United States Patent Application Publication US 2011/0014706 A2 - sequence listing, part 3

SEQ ID NO: 3512 - DNA, 521 bp, Arabidopsis thaliana landsberg
  unsure (1)..(521): unsure at all n locations
cgatggatgagacgcaagagttggttatttgggtggatctggagttgcttgagactgcattgcctagacgaggagggcaagttttggttctatcggggaagcatatgggtatctatggtaatctggttgagaaagatttggacaaggaaacaggtgtggttcgtgatttagacaaccacaagatgattgatgttagtcttgaccaagttgctgagtacatgggtgatatggatgatattgaatactaaaactctatgttgaactgaagctgctaagtttcaaggtattacaactagctcatttccttctttagttttcttgcaagtttgagttgacgaggtgtttttggagtttcgtatgtgtaatctgcgagctttcaaaactgaacaagcttgatttaaaaaaaaaaaaaaaaaacaagcttgatttagcttctcttttatgtgcttctgtcataatgttcttgcatattcatggtggngagagncttggagaagttggctatctccatttatgattcc

SEQ ID NO: 3513 - DNA, 568 bp, Arabidopsis thaliana landsberg
taccataaacccccgagtcaaatcgcggaggcttttttcccaagctggttctcgggtcaacgagtcatgagcagagcgtgcctagatgtttggtggtcttaggcaaataaggaaaaacattttatacatattgtgataaaatgtctgataatgtataattaaatttaacatatttttcaataattcctgaatttttgctttcaccggattgtcgggtactcttatgaaatagattttcgatttaagctcggtgttcacaagttggagaaaaagttcggtatatctaagactcactatatactgataattttaaagcatataagctaaataaatatatggtgacatgtgtttatataaaaaaagatgatacattcggttcctcagtagctttagctttgccctttgattggcccttataacttaatgatggagttccggtgcttccattttttctctgtttgatcctgattaaagaaaacagagacatcaatcaaataaactaaagtaaaatgaataagccagaagcaaaattatacaagtgaatcaaaatatcgaaactaaacgtaga

SEQ ID NO: 3514 - DNA, 2107 bp, Arabidopsis thaliana landsberg
atgatgtgtcttcgtctttctttcattatttattagaaaataactggcattttatttttgttctacataaacttacactagaaaaaatattaaattcttttctgagcatcttatttttttttctacattaagtttaactaccaattttctcgtgcctaatatttcaaaattttcagtaagttcatcttgtcttgttaatttagggattccaaaagtaaattttgggtatttatttgcgtggtcgcgaatgaagagctatttaaataagaatctagacttttgaagcggacacttaaaaccatttttttggtttaatggaagacaacaactgaaaataaggggacaactattcaaactctctcatacacaatgatcgaggcagccttatcgaaccctttctccgacgtcgatgaagccatggctcgccggcgtcgggatttgtcttccctttactacgttgtttctctcccaacacatccaaatcctttctcggcccatgtcccacgatctcccatgcccactccttgcgacgattcctatatatctgaatttcttcaagttacaatcgtcttcctctgctatcaaacaacaccgtttgatgcggctcagcccactcctgaaacaagatcttctccctctaaaccttttgtgattcttgtaaatcttccctctcaatggctccccttgaagtcaaaacctgcatctcacaactcctttctttgggattcaattcctcccaccaagtgtttttcttggttgcgtttggaccggagctctgctttgacgccggagccgatgaggatttcaacgacggaatcttcaacccactcctcagctttggcaacgctgactcgactagctctaaccctaatgttgactttaccaagaaaactcaccgtcgtcgtgcggccgccgttgacgaataagggaggtagcttcctaaccctaatgttgcttttccttatttggtttgggcctagcccaagaactgtttaccctccctccaatccattttcaagtcctcgaagcccatgatcagtttttttaggttaagctcacaacttgtttggcccaggttaggtctttatttcactctagcaaacccaaacgttttgatttctttctcgtctttggagagtagctaccttccgagattagttgtgatggtcattgtttggttttggttttctctcccacaaagtttggcaaataggttagctcgttggttttatgttacaaatctgatctcaaaaagctttgggctaactccacttttgaagtgttttagagtcttgatgcccatgatccgtattgttatgtttctgtcaattacaacccctatagcaccctttaactttgttttggctggtcgtggactccacgctaacagagtaacggttcttttaggctgttttgatagatacttttgtcgaggtcatttgttaattttgtttcgaaccctatttgagactatcatcccaaacctttggcaatgtccaaaagagtgaggaagaacgccattatgatcccatctccacggagcggtggttaccgaagcttcttcaactctctacctccttacccgccaattaccaagctccttcaaggtatcttgaagtatacggataagttgcaaatctgtgaaagcttggcaaagagcggcgttatgatctaccctttattttctcccgtggagcaccttttcaaaggttcatatgcattgtttgcaatagccgtctatgaccacacgttggtcgaggatttcgcgaagcccgtcttcatggtcgaatccgtcaaggcttcaacagatttttcaaaccttgtgaacttttttaaaaagtgaacactcctttgcaaaactcatgaagcctctatctttattttcttgtactatcttaatttgaatttgtatggacttcccttttttgagacttaagtgaatggaaattattgtttgagaaaaaaaaaaaataagatgaggacccaaaagctcatagttcgtcatctgatacatgctgcatttttcaggcaaagcaatccgactaaaatcaaggagatgtggaggggagaagctttcgcctgataccacggtaagagctccacatgc

SEQ ID NO: 3515 - DNA, 4023 bp, Arabidopsis thaliana landsberg
tgttgatcattgattttagtttaactgcttaagggttaaagttttaatattgggaataccttaaattcgttttgctaaattgggtttaatttgatctgatgtttagtatctggatttagggtttgataactctagaatatttcagtgactttgttcttagaaacaaatacatttagcagtgaggtttgacttttttttggtttttagaatctcaagcctgttttatgtttctttgtcagctacaaaattgtcatctgatcttgaagaatggcttaatgcaactggtttgaccaaatctcctgatgtacgaggcgtcattgcaccgtaagctgttcttgcttatctcatttcctcggagaagtgattacacttgcactaactttttgaaggaatccagacacgcaggttattcgtactccggtcgtgcagctgcttatgcttttgcaaacatagatcctagtaacatgtaagtaagctcgcctatattttggaagagtgtcatgagtagaccattactatttctgactagtctcatttcagttcacggatatttcttcttggtccatctcaccacttttatactccaaaatgtgccctttcgactgcaacagtttataaaacccccattggaaatctacctgttgatgtggagagtaagtttgtctagcttagcttaacttatcaaagaaagattttctttcagttggtgaggaaagatgttctcttttggttttcatatgaattcaccagtgattaaggagatacgagctatgggaaaatttggaatgatggatctacgggtcgatgaggctgagcacagcatggaaatgcacttaccgtatttggccaaagtatttgaagggtaatcacaggggtagtagtgatgttaaggttctgaataactatgaatgacatggcggaatttgctgagactggctccattttaatattttgatcaggaacaatgtgaaagttgtacccatcttggttggagcagtaagtccagagaatgaagccatgtacggtgaattgcttgctaaatatgtggacgatcccaagaactttttctcagtgtcctctgacttttgccactggggctcaaggtttgtcttagctcttcatctcctttctctcattgaagtaccacattctgatgtaacgttacttttgatggacattgcttgagaaatgatatctttttctctttatctctttctaaaattcgccttaactgcataaccagattttctgaggcccttccagtgagctaattgcgctctgttatgtttatattcatatgtttttggttataggtttaattacatgcattatgacaacactcatggtgctatacacaaatcgattgaggctctagacaagaagggaatggatataatagagacaggagatcctgatgcctttaagaagtatcttctggaatttgaaaacacgatttgtgggcgccacccgatcagtatttttctccatgtaagtagtgctagactgtttctttgcattggtcaataacttcatgaaaaaatagccttaagcttgctgccttcttatttagtatctagatacttttcttttagatgcaaccaatataatggtgaatctggtactcaccgaggctactttgcatgtatctggtttgtagatattcctcacaacttactacttctgttttatgtttgtgattgctttcagatgctaaaacattcatcaagcaagattaagatcaatttcctgcggtacgagcagtcaagccaatgccagacaatgcgagacagcagtgtcagctatgcatctgctgcagccaagttggaaacatgaactaaagatagtcaaaaacttggtgtgcaaaatttcccatttggtttcaaggtctttcagggtcgaaaagtataatcttaatgcatatatctatgcgaagaaccttagaaaaccaaaggtttcgtgtttacatttcactgtaataacaagcacaagactcttcttcattgactggtatctaaattttcatttttctcagtggactatgttcagacatgaaagcacaaatcaagtatcttgagacttgaaacattttgcttaagatctacagagacatacatcaaaagttaactcttacaatctccttactttcagaaaattcaggcagagcttccttccgatgccttcgctctctactgtaaatgatccagaacataagtgagagcatcacagccgttgctaaaatggccagacccacatagacccaatagccataacgctgtagtccaggacaatggtcattcgttatgtctctaaaggtctgttttgcgtatgaacagtcctgaagctggaccaggaatggcgcgtctctgatcaatcccgtgctgatattaacacctgatgccatctgactgtacagcgcaggtgtaagccttcctgttgtggtgcaagtcccgttctggctcacttggcacacgaaactggtccatgcctgagagtgttttgacatcactaagatttctttgtacaagtgcaattttatgcctactagagacagtttcaacagtaaagaaattggtcagagggggacttacttcagtagcattgttcaaatcgagctcaccaggcgagcaagagcgatcggtaaggtcatggttaaaaggattgcagagcaatggaagcaacggtccagattggttataatacattgggacaaagactggagagaagttgatgttggagacattagtgatgactgtgttgattagctccacaagctgacccgtcacttctctgctacgcatcaaggtttcctgagctgtggcattgtctgtacaaggcaatatctcgtccagagccgtattgcttgatggtctctcaacccattcgctcattgccacacatgtgtctgcagttgcactgacggtgaaagaaacaaattcagttatgttttagctttaactaacaaagaacaagttgttcaagagtcatgagacatacttgtgtagcacaaggaatgttccactcaagatgaatgtaccagtcaccagaatccatcccaagatcacaaggctgcacaagaggaaaaggattcagataggttttacgaatgaaagtcgcgcagtgaacattttagagtttgactcacgtgtaaacgatgacctgcatcccgaaaatcgaagaaactgcacgagaagaaatgataacaagatcactagagtcaatacattagtagatagttgagaaacatgtagtcaaagatgaaaacattaccgagaccaagaaaagtcaccacaagcatgacgattgaaactacaataagcgctactctcctgcaagtacagaaatgactattatacatttattttccaaaatccaaagattctgtaacagatagactgttaggaggagtttgttacacagaatcaagaaaatgtcttatgtgattggagctattagtcgatttctcagtgatagtagctacagaagaatccagtttcactccgatctgatcgatttcagtttgtacatttgcaggtaaaagaacctgaagaactgcagcctgcttggctgaagcaagataatctgagatagctctaagctgcgaaatcgtgctatctgcttgactcatgacatactctaatgtctctgtcgtgcttttattataccttatctgacccgagtatagcagaacacaaccgattctacataataagaactcaaaatgctaagcagagaaaacaacaaagccaaatcataacttgtaatattttctcttaactcacattgcaataacagtgaagatgaggaggaagatgagggagacaacataagcaactttagagtacccaacagaattggttctatggcaaatgtgacacatacagatgactaataaacaaatgccaaacccaagaaaccaaacagcagcaagaacaaagagaggaacagctgtatagctcactgactgcaatatcaaaacacacaaaacacacaaaacacataatcaacaaatcatagcaacacgca

SEQ ID NO: 3516 - DNA, 562 bp, Arabidopsis thaliana landsberg
  unsure (1)..(562): unsure at all n locations
cagcctttgaagtccataaatgatagtttatagatactacattttttactttcatcaagaactgaacgtgttaactgggtaaagcatcacgctaattgaggaacatacatggtaggaaggaaaactatgtttgtatcaaaccagtaacaaagtatttaagggaatttccgcaggaatcaaaataagaaaatatagctcaaatacctagactgactaatatgcacataaaaataagagtaataaatctaaggctaaccttattgtgctctgcaattagccaggactcgaaagcagaaaacaagagagatgtagcaataccacccaagatacggccaaccatcaaaactttgtactgtggagagtgcttggtgatgcaacttagtatgtaaactatacagtatgtaacacatgccctctttcgacccctgaatccaacacacacaaagatattagttgcctaannnnnnnnnnnnnnnnnnnnnacggacttaaaacataagagagagagctttctcactgtttgtcagccagagatccaacaatagttccaaacaacattgac

SEQ ID NO: 3517 - DNA, 3158 bp, Arabidopsis thaliana landsberg
ctttatttcttaattcttattattggctgatggcttgagaaataagataagtataattcaacaaataattctctctcagccatttctcactttcagcatgtgacagtaaaagtgacatttcctttcctctgtaaagctttaatcctctcatgtgtgcttacaaatgatgaatagatattttttttttcattcttgtaaacgtataaataacattattgtgttacgtcataaaatgtcactcatctaatctcttgagacatgcagaatgtgactggtaaataattcactaagcacattataaaacaatatttcacagttttacaaagtcaccgatcaaattaattgtttgaatatacttatatacctaaaaaggattagttggaaatgattttatttatttttataattacaacgttgatgacttttttattttttggaaatttctcaaaacactagtgacttttattactatagtaatattgaattcatcactttaataatcatcaaaatatatttttataatctaagatgttttggttaaaaccacacaaaagtattttatttatttattactatgttttcataaagaacataactttgtattgttgctcaaaaaaaaaaaaaagaacataactttgtatttagttcatataataaatcggcaaatgaaatcatatgcgaagattaaacaaactgttgtactactttttcttttgcacaaagattaaacaaactgtactattagtgtggctctgatgaagaatctaatgtataattctttttgtcaaatgttttagtgctatagattaatgatgtagggagaaaataaataataagtaaaaggatgtgtaatgattacgagcatatcaagtagtgctcacatgagcgacaacccaatctgcccacgtgaagcacctttaatccattttttgagccacttcaccggttcggtttttctaaccggttggttcgatcgaatcgccgcggttctttttgagagaagaaataaacctcagaaatacaaacggtcttatgagctcttactactattgggccttatatatttttaaaaattaaaggtaaaatgcttaatgttactaatagcttactctgactctcaagcatttattaagatttataatattacattagaaaacatgatggtgaaaaaatgcaaccataagtaaaaattattagaaaaaaaataaaatgagtagacgcaatttttaatttcttaaacaattatgatagaaatacataaatatactcattaaaacattatgataaacagacacaaacatttaagactgtgttatgttacgacatacaatcctcgaaaaaacacaaaaaatcaaaaattgacagttatttaggaaaacacatgatgatatagataacagaatgtataaatgaatgctatatagttaaaagtactaatttatatgaaaatgtatcaaacaaaaagtaataataaatatacacaatttttctaagaaaataaaatatatatataaagttaagatacatgaaagtttaaatagacaaccatttgtaaaagatataagtattggaacgaagagtttgtgattataaacacgagtaaaacatggtgacaatatacaactctaattgaacaaatttaactttaattgatatcctcaaaaatattttataaagggcaaatattgcaacgattcatcaaatataccaaaatttgatagtttatcaaataaactaaaggttacaagtgtccaaaaatatatgggattaacatcactgagatgacaaacatgcttcttaccaacattgaaactcttagagaggtggtgtgaactgtgagctgcctcttcttgtatatccaaaaaggattctttacaaatttaccaactatatctgttttgaaattatgcccttttataatagaccacaacatatcatcacccaaaaccagtgtccctttttagtatacttccaaaatcttggagaattggtgagaggatatagctgcaaacaacttttggattcctatatgtgaagaatcgcaaaacgaaaagatgactgtcgattagtttgcaacggactttaagcttttgaatctcatattttttgcaatataggtttttacacccgaaaaccaatgccaagaaaaaatgtcagtttttgttttagcatagatccaacattctccaacaagactgtagatacactagccagatatggattacctaataattatagcttttactttcattcttacgttccctctcttcttcttttttttcatcgattcttatgttccctttctaattgttaataatttacatcgtgaccatgttacaacaaatatctaatacaaaagctaatgtcaaaaaaaaaaaaaatattttgatatttatatttctaaaatataaaataatataaattataatattaacagtcataagttaccctaaatttaaaccgtgccaaattccaacagcagcatctaaattgattttaaaattcaaacagaaatgcggaccctcgataaaagaatggcggagtagtcactgctgttttctcgtgtacacgagcttcttgtgttcgttccacctcttgaagatgaagaagttcaactacgaaatcgttcttctctcgatctcggatttttctgatcgatggcggttcccacactctgtatcgccgatggaatctaccccactgcttttttctaccggaattcagtccgacgactgacctccgtcgcgcatgatcggtttacgaacccgaaattcggaatcgatggacgtctacggaacggaccgaaggtgacggcaacggtgaatccgtatacgtacacggaggcggcgcagcccgaagagcggaagagtttgacggattttttggtggaagctagagatttcgtcagatccgacgggggggatggtggtccgcctcggtggttctctcccttggaatgtggcgcacgcgctccagaatctcctcttcttctctacttacctggttcgtcctttcaatttagggctgaaatcaattctcgtttgattgattcgttattctgattggaacaatccacgttaacaaaactaagaatcccccattgtagggatcgatggtactggattaaagctcattcgccagcataagaggcttggaga

SEQ ID NO: 3518 - DNA, 3592 bp, Arabidopsis thaliana landsberg
gccagctgttcccaaagtgtcttcttcttcgtgtaataagtggataaatccagatttctctgtttcagagtatgaattgactgttcaagctgatacttccttggaagattactcactctgaaccttgagaatagatcattccacatttcaactgcatcttcataatacagtatgttatcataaatctccttactcaccacattcaataaccaagttttaaccatactattgcatctactccagatcctgaacatacgatcactaacatcaggcctaggaagagatccatcaacaaagctcaacttattctttgcatctaaactcattcgcatagctatagaccaattgttgtaactcgttccatcaagaacatgagaaacaatattcagacctagatgatctgatgagtgaaggaagaacggactatgagcattgtcgtatgattcaatcgctgcggaatgtgattgaaaacgatcgcgattagccgtaattttgagagacggaggttcaacgatgtcatcggtaactggatatgaagaaccagctcgagtcttcatcggtgaatactcagatgttggagaagaactccgattctgcgctttcttcttctgtttcaccatggatagagagatcgaagctcaaatgtgttaacggaacttgaatcgaagcttcaggaggtgattctgatcagctagagctcaaatcaacacaaatccaggatcgattcaacactttaacggtgaaaaacgaagaaaacaatgagaaatcgatgagaaatcagagaagcaagagcagaaaatgctctgataccataatatgaaccatgaacgagagggaaaacatggtgaaagctcaatttctcattaatgatccaaagagtttattacaatcatgtatagtatacagactctactaaaccagaaataaccaagagattcaccttagatgaataaaccggactataccgaacccttaaccacttctattattcacaagtatagcctaagtatatactaactaaaatctattattacttctaatagtattttcggtgattcatataataatttgaataattgtcaattactaaaaaaactctcactaaattagagaaaatgtaagatcctgtttctcaataatttattttaacatataacaaacgctaccagtttggtttctaatgagtatccattttggtagctaaaatttttatcagcaccaaacctaaccaagtgaatactaaaacaatctggaggtactaactcttactatactctaaattcaccaaatcaagatccaaagctcaagagctttgaggtgtgagacttaacgcaacagttttacaacatgacatcaatgagtttgaagcaaaagctttgacatggcaatatcctctcattttactcatcagcttcatcttcttcttctacccgaatctgcttcccgaatttcttcaatgccagagaatatacttctttctttctcattgatgttctttctgcaaccgttttcaccgcctgataaagtttgatgttaaatccggaatcattaagtcattaagtcacatatcgatcaatatctatgaactgaacagtctaagttcaattctatatctgtaacgtatggtaattgaagcttagtttccaagaagagtaagttctcaaatcaaaatggttaccgtggaaaggctatgcccatcagagatcaggcctctcaactcttcttcaagttgagactctgttggattttcagctttggtttcttcctttccttctatcaaaagcgtgatttctccttttggttggcggatcagaaactcttgcttggcttccgctatcgaacccctccaaaactatagtagaagagcatctctcatcagtggggggtttaccataaagtttcatgtattactaacacacgttacatataaagtgataaaggatgttacctcttcatgcagctttgtaatctctcgagctattacacattgcctgcaccataaatctatgtcaggaccaggcatgggactgcttctaagtcgtaacactagaagataaaagatatcgcattgagagaggcttaattcatcaaatatcaacaataaggaacaagagagaaaagaaagtggatgtgcatagatatcaatccagcagatgttaacataacttgcttgaaacttgcaacaaaccttgattcaccaaagtaaggggttgtttcttcaagaaactgtgacaacttatgagggggaacataaaagatctgtgttcttgtctcatttgatgaaacaatcagcctctccttccttgttccagaatgcttaggaagaaatccaactgtattaaaaacaaagtagttcagaaattataaactttatataaagccaggttcgcatcaggttgaccggtaaatcggagaagaagttaccgaatgtgaactcatctgtctccaaaccagatgcagaaagagcagcaactacagcacaagccccagggattggaatcacatctatattttctttcgcacacattttagcctgaggaaagatgatagcacttgtttctcatactcttcagcttataagtgactagagaacattttcagactatgtgtaacacactagtaagtaagttgattataaacaaaactagcctggaaaaaagctcaaaggagaagctataatatgcactcacaagttgagtaccgggatcactaattcccggtgtgccagcatcgctgataagtgcaacaatctctccttgtttcaaccgtgtcaacaccgcttgttctctctgagcctcgttgaacttgtgataactaagctacaaacctaaacctcataaattcaaaaccatcacatgataaaaaccaaagagactactactactactttccatatacaagtaacttacaagctgagctttaatattgtaatactgtagcaacttcccagagtgtcttgtatcctcagagagtatcacatccgcagatctcaatacacgaatcgcactaacaaattctaagcattagaaatcagaacacatttcaaacaatgcaaagaagcttagatattgaagagtaccgtaaagtgatatcttcgaggtttccgattggagttccgacgaggtaaagcccaggcttgagaggaccctgaaagcagctaaattgtaagaaaccctaaaaccgtaatcgaatttgatccagaaacagagatgagtgaatttttacgcgttttgaatcatccttggctacagagtcggcgaactccgacgacgagcaaaatgaaattgcggcggttgtggagagaatcggtgaacggaagagaatcgagagagtagaggtacgaaggaaagaacaaggaagacaaactctcgccattcccgcgcacttctctgtgttaagcttcttctctgtttatcttccaaagctaaaaatggtgtctttttagcttctgtctcataaaccctaaccgaaccgaaccaaaggattatggatcggtttttggttttgtttcggttagaacttaatacctatgtggttagcagcgatttcgacaaagttaaagttttttttatacgtttaggtaataatagag

SEQ ID NO: 3519 - DNA, 4469 bp, Arabidopsis thaliana landsberg
tcttgatttttcctcccaattctcaaggtacctacttcaatgttccttgttgtaaattggtgttttcctagtgctagttatcgataaacctgatgggttaaacgttgagctgttaagaattctggcctagattttgtacgtcggggatacaaccgaaagtctttgattggaaatcgaaaagccctaattttgtggcctttattgataaacataagtgagagcataggtttggtaaaacaatggtctctgtttgcattgcatagaattgaaatttagctgcatatgtagacatgatgagttgatgattgatattcctgtatattttggactcgtacttgtgcagatagataaagcagagatggtggtgagatgatgattttcaagaagatgagtgtccttctaactgaaaaggattttgttgatgccatcgtatctgtttctctcaaggaccttacgagatcactctttgtcaggttcgaggccaaggcttgccctaagtttgaccttatccataagacttccgtcgagacggttaggtgcgtagggaaaacctttatgcatatgctctctaaggtttctagagagtttcctccccgcaatcgaactcatcccggtggcctcctctatcagcgatttgatcctactcacttgtctcttgctcgccaacaagttgctatatgcaaggaaactgattcacagtatccgcatgagattgtgattcactggacaagtgcaagcgcctgaaagtggatgctcttggttacatgtttactattgcaatgagatgcgcccctagtttggcttatctcgaaaagttcaggcagtacatggctcaggcgaatgagaagaatctggaagatgagactgctgctactctgacgaacaagaagcatgtcgccctcttggctgaggaagactgcacagtcctttgcacccctcgctttgagtttcaaaatgttgccgactttgttcttccagaaactttgcgttggcttgacgagttggagcttcaagccagcttcaagctccaagctaatcaactggactctgcaaaacttgcccgcactcgcaagaagcaccacatggtgtattattctcgcttatatatcaatctgttgaagaatcaatgtctctcggttattttattctatatctatctagtctttgatattgtcgacatttgtttcttcaggtccaataacatgaagaatctctctaaaatttagtcttgattgagctaaaatatatagttatacttcatgatacaatgccttggaacttcaagtccacgtcttgttgttgtgaccctccaaaaccattccctagaaactttgcaacaatagatatgaattcatctggtttttcctcttgaggaagatgaccacatttcttaattacttcgaacactgatcccggtatggctcgtgccagcctctctgcgttccatgctggcacaatacggtccgtatctcccgtcacaatcagaactattagaaacatgaagatagtatgatgtcattggttcagagttcagacatacaatgcacaatatttggttccaatttctaattcattgtcagaatcttatagaaagagatattaccagggcatttgatttcttgaagccttttagacaatgggagttttttctctgagccattattatctgttagtgtagccaccgtgaattccacgagagctttgtcccatcccttggctttaagaggctgttttttttgcaacaaatacaatcaaatttcctaaatttttaacataacaatgcagaagaaataaagaaacctgagaaaacccgaaaatctcacctttgtataaccctgcacgacatgatccgtcacttgttttgagtcataccacgcgttcctaacagctgttactccaaatttattgattgccatcctcacctggtgaaaaaaacaaccaccttagaaacacatcaagtgttctggtctaacaacatataaaaaatgacatgactggtgaatgaagccaagacaaaaaaaagcggtaccagcattactccaaggaaggatctgaggaaagctgctaaagctttcttgtagagagaactcagcatattcgccattcccgttaccactctcaatactgctcttataacacctttggttaactcaactagagtccctagaaagttgctagtgggagcttctttgtcacggttctctccagcatcagttgtggccacaggacggggagcgaatatagctggagcgacgagaatgagagcagcaacacgctccggggcttcaaagtaagcatctaaagctacagggcaaccagcagaatgcctacaacatatgaattaacaatctcagcttatggtggcactttaataagaaatgcaaagtatatggaacctactagcttacttaccccacaagaatcgccttatcggcagcaagaacatcgatgaaatacaacgtagtgagcacggaatacaccatggagtagggattcaatggttttgcatcattggtagcaccactaaacgggtgaaaaatccgagaagtcaaaccaaatgctggtctatcaaaggcaagaacttttgaactaacgagacgagctaatggcttcataactctgttccaggagaacacagaagcgccgaaaccgtgcaatagaatcatcggaaacttggtttttggtgtttcttgagcatgagggcttgtgtttgaaacatcatcagagagtgtatgtggatcaaacactttgtggtgtatatgaacaccttgaaactcacagaaacaactgtctggatcagctaggttcattggatcctgttctgtttcagcttccatctcctctttactatgtgctccagcatctaaatattcatgaaacaagaagattactcatataaaattagatctttatgggagaaaaaggaacaatttgtgatacacagagagattactcaaatctaatttcatccaattggaactataagctcaaatgttccacaattagcagaatactaaatctcataggtgagtcaagaaacctcaatatggtagttacctaacacgaacagaaagattcatcaattgaaatctgaattctaagtagaaagaaaggaacaatttttgtaagaaacctgggaagccaccagagagagaaggagaagaagcagcattggagacgatgagacggcgagagggttggccggaaatctgacgagacatctgaaaatgggttctagaggaatctgaactaaacttgtcgctgagagataatgttgagagagtctgctttggttggttcaaaaagaagatgcatgtagtgtttaaattcattgttgcttcctactaatcagacagaagaataacatcaactacacaaaagttctgacatttttgttttgttttttctaaattaaacggcaaggttagatgattcaacagtgttttgtctttgtttgtaaaacaaattaaaaaaaaaatggtgatgaattcctgacttctcattctcagttctcacctacacaatctattggacaaaaactaaagatcattggatgaacaagaggacctaaacgtaaaaagcccactccattcgttgccacttggcttctcagtattatgggccgccaagattaaactattccaagttttggtattacaatttgaaagttttattttttttactgcttattaccaaaccggttcacagtttcacacataatatcaacatgactggttcatacaccttttacaggatcacttaacacaacacacacacacacacacacacacttgatcccagacttgaattgaatcttgcttggttgtggaaaaaagcccaggactagcccaaaccagattattttgttgttatgaaaccagattggttggtggcaataaaagcccaggcctagcccaaaccagattattgttgttatgaataccttaccttctttctttcttttttgtcaagtatcttaccttctttctagggttgttattataactttgagtcaattgccttgccggaaaacaaaattggcgctgttttcaccgtctccatggccagttctagcaaggaagttaatttatgtggtttgttttcagtggctctgagctactatctacttggctgttgattttatttcttttcttttccattgatctgctcttcttttaggtaagagaaatccggaagatgatgatttggagaccaaaccgtttctcaagaaacataaggacgaggagaagaaagtaacgtcggatcactccactttttttttttaatacatacaccacttatgtatgtatgtatgtgaatgtaacaggaggagacaccggaaggacttgctgatagcctccagcacaagtctgatcaagctaatttaatctctctcaaggtttaatattgtaataagttttattatgttcaaattaagcatcttgttctccaaaatctgttccaacggc

SEQ ID NO: 3520 - DNA, 1607 bp, Arabidopsis thaliana landsberg
tctctagaaactttagagacaataaacaggagatttgttcatccatcaaggagaaattctccaacacttactaaggtatggatgcagcggattataatttggcgatggatattgttactttgctttttccgctggatgctatgtctctacaattgtaatcttactaccccatatgtttttcgtcaaaaggtccaaagcgatcaccatgaggtggtggcagaccttattcaaaccagctttctattttcaattccgacggatggtccaatgtcgttttctacgccccgtgtttctgtgcaatggattcttcggtttgagttcctaactactcctaagagtgtggacttaagcaggtattactcccaatactcaaacgatccattctctggttgagtcttttgaagtgctcaagttgttgaagtcagtttctggttctgttttgtggtaatttacaggtacgaacatccattgttagtaccggaaagggaaaaaagcgaatgggttcttccgattactgtacatgcaccgccgcctcggacatcaggtgctcaaaaccgtggagataagctttttggtttggagccgtcttggattcgtagctaaatttgtttttggtgaaagatacagtttctggtctctgtctagctcacctcatgcaataatttgtttttcttttgatcatttaaaaataacttttcaagggaaatatatataccacaaacctattttgtttagtttttaattactagtttattagactatagagagtagatttatttttctttttggtgtcctatgataaaagatcttaaatctttaatcacaaactgtttcttatataagcgttacttaaatcagtttcatcagttttgggcacataaagtaacttttgataaacaaaattgtagaaaaatgggtaagagaaactgatgataaatccaaatctcaaaatcttaatcctaccaaaaaaaaaaaaaaaaaaaattattaatagaaaagttggaaaattggaaaaaaccctagatgtctttacttgttctatattaatacaacattgagagggaaaagaaaaagaaaaaaaccctatcgtctctgcgctccatttttctctccttgcactaagcttctctctccctatctctctcgcgtacggtgattgtttgtttaggtctgggcaggtactgtcacctaatggcatctgaatccaatagctttgcgaaaagagatcgtcttctcgagattgaggtagcagttcgaaagtggtgggaggatgaggatgttttcagggctgaatctcgtgatcatcttccaaagccaggagaaaagttcttctccactttcccttttccctatatgaatggttatctacacattgggcatgctttctcactctccaaggttgattttgcttctgcttaccatagactaagaggtgccaatgtgcttcttccttttggtttccactgtactggtatgcctattaaggcttccgcggataagctttctcgtgagatcctacagtttggagacccttctgtcttccctgctcaagataacctagctcctcaagttcacgaggagggcagtgatacacccgctttacgggt

SEQ ID NO: 3521 - DNA, 2548 bp, Arabidopsis thaliana landsberg
tctgaaaacagaaccgtgtaaaaacaatagtttggcatttctgaaaacaaaaccgtgtactgaaaatctgttaaaactaaaaattcccctcatagaactgttggttcctattaatgcatcaccctcaagccacttatgcatatcacctctacaaaagtcatcaacagcatttggatcccatatcaaatcttcttctccagttcctataacatttctgaatggattggtcgtaattccaaagaatcgagatatatacccaacagttcaacactaatatactaattcaaaaccatatattcaaaacagaaccatatacggttccttgttccttgtaaactaaacagtgggaagtttgttttaagatccgaagtgttgaaaatatgtttcacatttcatcaagtgctaaggaaagacagaacaatatacggttcatcaagtgcaacactacaaaatactgaaaatctcatcaatcaacactaaaaatcatcaaggaaccttctagtcctaagctccaaaaattcaattttatcttcagccctaggaaacgttataaaacaatgtcggctggcttcatcaactataagattctcaactgttgctttgtgaaatggagaccacatcctaactccaggcaatccattaagcttctgtaatacactcttaacactatattcattctcactctccaacatctgtactgctatcatattcttcttgtcaagaactttggtccgtcttacaacagtttcaatagaaccacttagatttgagctaagcaaagaactttaacaaaaacccataaacataagatcaaaatagaagagaagagtcaagagaagagaaagcatttcttaaattttcaatctcacaaaacaaacctgaagaagtagatgtcgtcaatgtttcagcttgatgaaaaaagaaaggttatgaacagaggaggatcgtcgaagaacaagcttgaaatcgccgatagatcatgagaaaaagaaaaaatttcgatgagtagctttagccgcaaccattggggttagatgttttgtgattctcaaacatattgagggtaatgttgttattttccacttaaatcgcaatttaacgctgaactaaaacggcgtcaacaatttttagcagcagctacttgcgtttgccacaatgtttggccgcatcgtcttgcgtccacctaacgaacatgcacatgcacatcgcggctgtgactgtcgcaagtagctgcggcgaccaaacgaacaacctaaacttaataaaacatagattagatacatttagttggtgaaacttaatagagaagcatgaaattttatggattaatatgtaattgcctaattaaataaagcaacttataaataggaagccattgatctcaagtatacctattttcactacactttctcgatacctaacttatatacttgcctaatctactcgtctgcttacagatttgttttggtagacggacaaccatagatgaagatacgcgtaaacactcattgttcgtcttggtctagcattgagttcaaaattgtagtggatcacttcgttgatatataaacaaattactacataaaatgattcacttttttagtgcaaactgaatgaatatttaggcaagtgaaatgaaagagttcagaaatggagaaaacgcttacttaggcaatgaagtgatgggagttgatggaaaatggaaaatggaaagttaaaaacagtgaaattccattaacttacctccgtttatttgttcatcgtgtagtgtagtatatacgactctttgactggcttctttttctacacaagcttaacaccgctatcgtcacacatcttcaacgcttctgtgttaaaaccaaacaaataaagcaaatcgattaggaaaagaatcacataacagaatcacatattgtttttcattggcattcgctttgatcaaaatttcagtttcaattattataaattggaaactgaagcaccgatggagatgaggcaatcaattatgtgaatcttagtcacaatcttaggatattttatataggaaattatgagacgtttctactcataatttaagtgaggagcgaaaacatttatggaggagaaataacacaaggacgtgaaaacctaatgcactaacaataattggatggataatgtggcaacatttaagagaagttcttcttatttgatgagatgaacaccttaactgatctcaaagaattcattttatcagtagtagattgtacaatataaaatcctagttaagaatctgcactataatttaggcggtatgttaaaattaaatctacttaagcctgatttttgaaatcttttgaatttaggcggtatgttaaaattctctataatcaaataaatataattgactcaaagattaaaatcggaggagaatgcaaattgttaacatgtttatcatatactgtaagtagtcatatgatatattgttcaaaatcgtatatttttttaatggttttgtgttaatgattattgaaaaattcactctaatgccctctccttgatgccgctt

SEQ ID NO: 3522 - DNA, 3156 bp, Arabidopsis thaliana landsberg
gaaactaacacagcccgggcaaaggcttgcccttttggtctacaataaggctttttttaacaactggtccagcatctttgaagaaatcgattctggaaaaatggacggtaaaatgtcagccttgctccaagaacgaaagaggagattaaaggtgctacttacatatgtgatatttttgttcggcgagggacatgcgcaataaagagcaccttttctcttaaggcaactgcctgaattcaacagtcaagtgtgttagcacgagtctaaggagaaaaggacttgaattgcataacaagaagtagcctcatctaaagattcatcctcagaataaagtcattttttttaagggtaatgaaatattttgaagataataagaacaagtacctcaacacaactaggagtttcatcaaggccttccactgtctcatcttcttctatcagaaggctatctcgtagaagatagtcttcgtacctggaatatcaaaaacccttgtgatctctccatgtataccaaaaccttcacccaatgtgctcttgataacaaaactcaaaggcaaaagaacttaccaaagcttctctgcaaggttgtacctacttaacaaaagtaatagcgttagtcttcggtaatggcatcacaactctagcaataagttacaactagtgttactgaaacaaatctccataaaatggaaaatcaatttacttgattcgtggagggtacggagctgtcttagccacaccaagaaaaatcttatgatcgtgcaaatattcaccattcttcttttccagcgcctacagtgtgtgagatttaatcagttatcctactttcaaataactgctgaatgtttttcatcataagtatacactaattttcaaatgactttgataatttttaaatcattactacaaaactagtctcaccatgtttgctaagcaaggagaagcaaactcaacatagccatagcccacatgcttactctcggggcttacaataagtcgaacactaacaacttctccaacatcattgaagaaatcgagtctgtaaaagtggaaggataaaatatcagtcatggaaaacttcctccgagaacgaaagcaaaaattaaaggtgctacttacatatgtaatattttagtttggggagagagattggcaacaaagagcgtattttttcttacagcagctgcctgaatggaacagccaagtgtgttagcgccactcttaaggagaaaagggcttaaatatgcataacaacaaaaaagtagactcatccccgagacagaataagcgtttcttctgagcctgacagatttcgaagataataagaacaaaggtacctgaacaatattgggaggtgtctcctcttcttcaatcggaaggctttcttgttgaatgtagtcttcgtacctgctataccaaaaacttcacctaatgtgctcatggtaacaaactcaagaggcaaatagttgaatcccttaccaaaccttgtgatatatgcaatacctaattaacaaaaagtaatagcattagtaatctgtaatggcataaaaaaaactcgaccgttcctttgatctgctcctgttacatgagtagccactactataacaaagtgtgtaaagaaacttgttcccaaagaagaagaatcaagtggttaccttcttctcctcatcctcggaattttccttatgtttcttcagaatcggtttggtctccaaatcatcttctggctctctcgcttacctaaaagcagagcagcaacaacaacaaaaaaaaactcttcagctagagtagccaagacatgtctatttacaaaacagtagataagagagagagccacccaaaacaaacccaataaattaactttgtcggaactggccatagagaagatgaaaacagcgaacggtttatttgccgggaagagttctttacgttgagagccgcaaaaaagagaaatatgatgagacgaagagagcgagattttgggttttcacacgttaaggggtttcgctcttcttcgtgggcctttagggcctaataagcttcggcccaattttatttttctgttgactttttaaatacacccaaaatatcaatcttacatcattccagattacctgatcaacaagaaagcgatgtttttatttttaatacatgccacaaatcattcttaaaagcgcaggtaacaactatatcatatactctgaattctttatccattgccaatgacatcactgctctcttgtctaacttcatattctcaaaataagcaatcatgtgcagttacttagcttctagtagaattacttttactacatatctgggggagagagagaggtaatcaaacctgtgctctcaaggcagagcaataaacggaatagcaggatctccttgccaaatagggcaaataactgtatgctctttagtgcttgaggacttgtccttggcaaatggactatgaatattttttaacagctgatgagtttgagcatcggcatagtaaccagagcatttcctgaatatcaccaaactcacatctaaagctgaatgccaaacagaaccaggaaatcagatccaacataacgtttctgacagcagggaagacatatactctcagtcaagaaaatgttagagacaagtttacccgggaccttcctcttcgcattttcatgataggaacactaactgcagcgaagtgggttatctatgatgctgtcaaagttttagctggattgtaactttaaagttttcatcacctgcacttaaagatagtctaatcaatactcgaaccattgtagaaccaacatatgcaagacatccatcaattacctataattttctcattttcttaaggccagccactggtggtgcaaattcagctactgcgcttgctccatctgtaagtgcataaaagtacaaggacattcctcacaatgccatcacattaaagaaataaaagggaaaaaaactcccaacttttcttattttatttctatcttgtaagagtacaaaaatggtgttcacgactcctagctattatgtgtttacataagaaaggtatggcaaatatcatctctgctttaaaccgaatgtcaagtaaagcccaaccaatccaagagggactacaactctcgaggtgggtttaactgaaacgctgtg

SEQ ID NO: 3523 - DNA, 201 bp, Arabidopsis thaliana landsberg
  unsure (1)..(201): unsure at all n locations
ccccaacaaagatatacaacctaacgaggccactatgatttatttactcatggcnnnnnnnnnnnnnnnnnnnnnnnnngagtgatcgcatacatggattcagtccatccaatgtatatctccatctagatgacttcgtgaatgcgcttaccattgcccccatctgtggctgcgtaaggatccaaattgatcacacactca

SEQ ID NO: 3524 - DNA, 1622 bp, Arabidopsis thaliana landsberg
tattggtatcaaaactccaggaataagtcacaaccagtgttacagaaaacgtgaaaatcaatttacttgggtcgtgtagggtatggagctgtcttagccacttgaagaaaaatctgatgatcatgcaaatattcaccattcttcttttgcagcgcctacagtataaaagatttagtcagcaattgtactttttaaatgactacttgaatacctttttcataattacaacaaaactactctcaccttctttgcttcgttagaagaagcaaagtcaacaaagccatagcccacatgcttggtttacaataagtcgaacactaacaacttctccaacatctttgaagaattctttgctgtaaaagtgaaggataaaatatcagtcatagaaaacttggtccgagaatgaaagtggaaatttgaggtgctacttacacatgcaatattttagtttggggagagagattggcaacatagagtacttcctgaattcaaaaaaatagagattggcaatattttagtgtgtgaataatattcatccctaaaaagaagtcatctttcgactttgtggcaacagttctgttattaaaatgtgtgagcgtgacatattttgaagaggtacctcaacaaaatcggaaggtgtctcattttcttctatcggaaggctttctcgttgaaggtagtcgttgtagctgaaaaattaagaaaacctagtgagctcttcatgtattcaaaaattcaaccagtgtaatcaaactcaagaggtaaatagttaaaatcccataccaaaccgtgtaatctatgcaatacctaattaacaaagttaaaagcgttagtctagcagtaatattgtatcaaaagctctaacagtaattaataaccagtgtcaccagaaacaaatgtcaataacatggaaaattgaatttacttgagtcctggaggtcgtggaggtcgtggacgtcgtggaggctgtggacgtcgtgaatacacataaagaaaaatcttataatcgtgcaaatattcaccgttcttcttatacagcacctacggtaataaagagtttattcagcaatcgtacattcaaattgaaacttagatacactatatatttttcatcataactaactataaactagtctaaaccttttttgcttcgttagcagaagcaaagtcaacaaggccatagcacctatggatacgcttggcggttacaaaaagtcgaacacgaacaacttctccagcatctttgaagaaattgatgctgtaacaaacagtgtaaggtaaaaatatcagtcatgctcagagaaggaaagtggagattgaagatggtgctacttacatatctgatattttagtttggggagggatatggccattaaagagcgtcttttttgtcacctggatttaacagccaagtgtgttagcacaagattcttaattgaacagaaatttgtacaaaatatctagcaaatccgttggttgtttcctcctgttacatatgatacaagatcaaagagtagccattagaagaagacagtgtaaagaagattgttttgtcaaagaagaagagtaatacgaggccatcttagggttaccttattctacttatgtctcttgagaatgga

SEQ ID NO: 3525 - DNA, 2307 bp, Arabidopsis thaliana landsberg
  unsure (1)..(2307): unsure at all n locations
cataggttgatgagttgcatacggtttctacagatatcgaatcatagtaatagaaataggcactcatctagaatatctcttccactaactatggacaagcttcaagaatttaccattgagcattgccatacctctgagataaagatgggaagggtatgcagcttctctagcctcatcgaagtgaacctaagcaattgtagacgcctgagggaattgacatttctgatgttcgctccaaatcttaaacggcttcatgttgtctcttcaaatcaactagaagatataataaacacagagaaagctcatgatggtgaaaaatcagggattgttcctttcccaaagctgaatgaacttcacttatataatctacgggagctgaagaatatctattggagtcctctaccatttccatgtctagagaaaatcaatgtaatgggctgtccaaatctgaaaaagcttccactcgattctaaaagtggaaagcatggtggaaatggactcatcatcacacaccgtgagatgaaatggattacacgtgtggaatgggaggacgaagctactaaaacccgcttcctagccaacaggtctagtttctcatcttctcttatttgtttttcaaatgatttagtttctcgtgatatgaactgcttccatctttaatgtctctgtctctttttgtgtgtgttagggttgattatagtcagaactcacaaggttaaatgggcttctcaggcagaaacttcaaagtggatgatgcaatttggattgtgtctttttgtgtttaagtctttctctatgcgttgtttttctgtgaactattttttagatttgtgtcggcactgaactctactattgctatgtttggaatntattggaatatatccatgtgccatttgcaaatttgtcctttaaagaacttttctaataacagaaatgcggatacaattaaattatgttggattccttgtgcttcaagtattgcgtataacgttttgatgtccgttatcatcatatcttatttagaattaaatgtaatccaacttaacaaaacactcgcgatccacttgctttgcagctcaattataggaaacaactcaatcatatgtgaaatcttcatgttgaagccaaattaaactagttattttgcatctattttctaattaaaagctgtctgaattttccgacagaatattagagtttgtttccttgcaatatctcacttgttacttgtcagatgacgaaactataggatttggaggaaataagtcatctcccgagtattgtgataggatatcaaatttgaggatattgaaattttttgttctggtaagcagggtgaaaataggcataccataagatactgcagactgggaaaatggattgatggtgtcttagcttcatctgaaatatgaaatttataatattttaaggggatcagctgacccttcttctctttgtgggtccgcccaattgacatcatctccacaaagtctatatgaccaaagatttgaaaacactttataatcacatattaattaacatgacacaaaaatcccattacatatcctaactaattatggtaccagcagtaaatcctcctaccacatcacaccacgtggcagtaatcggtgctggagcagccggactcgtggctgctcgagagctccgccgtgagggccactctgtcgttgttttcgaacgtgggaaccaaatcggaggcgtgtgggcttacacgcctaatgtcgaacctgacccacttagcattgacccgacccgatccgtaatccattcgagcctctatagttctctccgaacaatcatcccacgagaatgcatgggtttcactgatttcccgttttcgactggacccgaaaacaagtctagagatccgagacgacatccgggtcatatagaggttcttgcatacctgaaagactttgcgaggaagttcaagatggaagagatgattcggttcgagacggaggttgtgagggctgagccggcggcggaaaatccaaaaaagtggagagtcgagtttagaaactccggtgatatctccgacgagatttatgatgccgtagttgtttgtaacggtcactatacagagcctcgtcatgctctaatccctggtaataattaaccaacttactcgtcaaaataaatcaaaaagtttataaatatgaattatagctaatatttctggtggctctgttcaagacaacccctatgcatattttctctgcatgacacactctgtttccgttgaaacttgtaatgcaaactaaaaaaaaagtctttaaaaacaaa

SEQ ID NO: 3526 - DNA, 2747 bp, Arabidopsis thaliana landsberg
acagagaattcctttctttttctgaaaaagtgaaaattatactatatggagactaggctaatgtgatttgtgtgatattatatccattaatatttgagatatgatatgatgatcattacatcatatgaagattgatatatatgttatcgcaaaaggaaaaatataaaagaaaaaacaaaccgaccaagttgactctattggacttcaatttcatcatccactactacaaaataatatactattagaagaccgtcttccgaaaggtcttagcctcttaggcaaataattaacgaatacatacttttaaaacttagagaaatttcttagtgttcaatagtattacaatgagagaaaacaaattaaaaatgccaaattatagcgacttttcattaattgaaccaaataaagcttattggagtacattataactaataaagataacaaatcaatacaccagcatgaaaatcttctaaaagatactccttccattttataatataagttgttttgaatcaatttttttttatcataatataagttattttcaaatttttatacaaattatatattattttaatattttatgattatttatattatacagtctcttttatgattagttgaactttttaaaagtaaatattcttaatctacgttcttttagttaaaacaacttatattgtaaaaagagtgtataacaagtcaaattatggcaactgaaaattgtttgaaccaaataaagcttactataattttctacaactcaattaatattggtagtgaaaaggaaaaataataatttggaaaaaaagtaataccatccttggggcccaaggatttccaaagtcgaaacatgcacatacatatatctttttgatgtcttttcgaatagacacatttcctttatatatgtaataaaaactatatatatactctcatacccaaccacgaccaactactcctaacatcaaaaaagaaaaagatctcaaatacgatctgaaaaataatgatgatgggaaatacatttggttcaagtttggcgagtttattcttcttgtgggcaactattcaacaaatctttccaaaccatctcagaatcgccattaaagagtttcttatctccacaatacaacaactctcatttgttcagagattttccgacagattcatcaacttcttttcgccttatgtcgaaatcagcttctctcaatacgaagattatcaattcaatcacgcatttgcagccattgagacttaccttggggcaaaagcaactgataaagccaagcatctaagagcaagccaagttaaagagagtaaaggtttggtcttgaaacgagacgagactaaagtccgagatgagtatgaaggagttactgtctggtgggagatggaaaccgactccacaggatatagaacattcaaactcactttccatagacgctcgcgagatattgtaaccgactcttacataaaatatgtttttgaagaaggcaaatcgattcaagccaagagcaagcagatgaagttgttcacaaataatccgagttctcactggggcactagcaagaagagtttttggagatatattgattttgagcatcccgcaagttttcacacgctagctatggatccaaagaagaaagaggagatcttgaatgatcttgctgcgtttagcaatggtaaagagtattacaagaaaataggtaaagcttggaagaggggttacttgctacatggaccaccagggaccggtaaatcaacaatgatcgctgcaatggcgaatcatttaaactatagtatctatgatcttgaactcacggctatacgtaacaactcggagttgaggaagctactcactgctacttctagcaagtcgatcatcgtgattgaagatatagattgttctttggatcttacgggaaagagaaagaaagagaaaaacttgatgacctcgagagaagatggagaacaaggtaccgaagaagacaagagttttgtaacactctcggggcttttgaacttcattgatggcatttggtctgcttgtggacaagagaggattattatcttcactacgaatcactttgagaaacttgacccggctttgatcaggagagggagaatggacatgcatattgagttgtcatactgttctttcgaggcgtttaagattctcgccaagaactatcttgatcttgatactcatcctctattcaagaagatcgaatctttattgaaggaaatgaagatcgcaccagctgatgttgctgagaacttgatgaagaagaatactgaaatagatgctgatggatctcttaaagatctaattcaagctctggagaagaagaagaagaagactcagagagctcaactagatgctcaactagatgaaccgaaggaaaaatatatcaataagttttattaaagcattttgcatgtcatctaaagcctgatttctcatttctattgtttttaatttccttcatatcattagactcgattgctaaaagttaagttcggcagttatacaaaaattgttgtacttggtaaatttttataattaatagtattcattattcaatagaaagtaaacgttatacagctttagtcacatcaaatttcctaggtggagagactctagaccaatatgatgttgagttatataatatgcagtaattcgtgagacatgaatgaatgatgatcatatgaaattgatatttggtatcgagagtgtaatatgggtt

SEQ ID NO: 3527 - DNA, 1191 bp, Arabidopsis thaliana landsberg
ataaatctcgtcggagtatcaccgaaatttctagactgactctccactttttggattttcccccgcctgctcaaccctcacaatctccgtctcgaaacgaatcatctcctcaatcttgaactccctcgcaaagtctctcaggtaagcaagaacctcactatgacttgaatgtcttctcggatctctagaccggttttcgagtctggtcaaaaacgggaaatcagtgaaacccatgcattctcgtgggatgatggttcggagagaactgtagaggctcgaatggattacgggtcgggtcgggtcgatgctaagggggtcgggttcaacgtttggcgtgtaagcccacacgcctccgatttggttcccacgttcgaaaacaacgacagagtggccctcacggcgtagctctcgagcagccacgagtccggctgctccagcaccgattactgccacgtggtgtgatgtggtaggaggatttactgctggtaccataattagttaggatatgtaatgggatttttgtgtcatgttaattaatatgtgattttttaagtgttttcaaatcttttggtcatatagactttgtggagatgatgtcgatgtgttaattatataaggagaaacacaacgtacttgtcgtgttcattttcacttaactactgcgtaatcattgtcctacttattttcaaggaaaatttgtcctgtaataaatacagcagtgttatagagttttagcgtttattggattaagagtttgattcaaatcactcttgtttttgaatgatttcaaattgttaaaagatattttgtaagttaataattaaaagatttatgacgcagcaaaagtgaacaatgagtgtgtcagtctcacatgacaagagtgataaatgatatgagacgcagtcgccaatcatggaaaaagaaagaatctctattgaagttagcaagttcactttgatcactgcaatctgacgtctcaaattgaaccatggttgtaatataagacaaaatcttgtaaaaaccatacaattctataagaacttgtaaaattttaagcaaaaaaaaaaaaaaaaaaaaaacagtcgtgccctttacattttttttccttattattattttttcatttacgttagcatcctgaaaattgtataaagaaaactgagattattttataattctacacaaacgtta

SEQ ID NO: 3528 - DNA, 1364 bp, Arabidopsis thaliana landsberg
atatcacatatgtaagtagcaacctttaatttcctctttcgttctttgagcaagtttttcatgacggatattttttcatccatttttacagcatcaagttttttaaagatgttgcagaagttgttcgtgttcgacttattgtaaaccacaggggtgagcatgtgggctgtggctttgttgagtttgcttctgttaacgaagcacagaaggtgagagtagtttatagtaatgataaaaaagtattgaagtagtcatttcgaaagtagtgtatttcgaaagtacgaaaactaatcaaatattttgtactataggcgctgcaaaagatgaatggtgaaaatttgcgcagtcgtgagatttttcttgacgtggttgagttagctccataccctctccgacccaagtaaattgttttttccatatggagattagtttctctaaattatctctatagttttgatgtgtcattacaaaagattaatgctattttatcttctttggtaattaggcacaaccatgcagagaaactttggtaagggatttaactatttgcctttcgagtattgttatcaatagcacattgggtgaagtttgtggtatacaaggagagattacaatgggttttttttttttttttttattccaggcacgaacgagaaagtcttctgaagaaacagaaggaatatgagatgttgagcgagaggaccgaattctgcggtaagaagattatcttctcttacgacgacgaagaccatatgttctgatattaaatcattatctgccttcactattatgtgccgtatacagtatactattttaactgatttgtttgtcaaaactcaaaaccataatctcggacaccaaatacagtctcaacttgattcagtctttcgtatctttcaccaaagtaaaaaagtagtggtaactcaagacctagacattggctttacgataacctttgtacagagacaaaatcgtaagcttgacccgaagcttatgagtattcttatgagttatgccacagtaaaaaaaagtaacatttaaaactatcttcttttacccaataagatttgccaaatttgtaattcggaaaaatgttaacttttaaaaatagaaggtcggttagaaccctctatatcattcagagacttcaccgctaacttttgtaaaggtcctttagggttttcggattcgagcaaaaacaaaatctccgcaatcgagagaaactctgagatcggaatcaatggagtctacaatatcgttgaaggtcaacaaaggaaaaggcaaaggatcaaagggagcttcctcttccgatgacaaatccaagtttgatgtcgttaaggaatggacccaattgtcattgaaga

SEQ ID NO: 3529 - DNA, 1556 bp, Arabidopsis thaliana landsberg
tgataatcgtgacggttttatgcaatttgctcgataggtggtgctcgaaacctcttgagatagaagaagatgtttaaagctttcgtcttctgtaactttggagaagaaggatccagtgaaagaagatggtaagagcaagacgaacgagaaggcacaagctaagccaaataataatctcgtttgaagaaaattttcaatatatttgttttgcatcccttgtttttatcatatagttttcttatttttaacaaaggttagactcttgagaatctaaagagtttgaaagatgttatctatgtatggtttctttatcttatcataactaactaaacatgttgtgtggtgttgatgaaagattgaaaggattaatcaatcacattctctagaaccaaagtcgagaattcttttaactattagtctcttagatttgcttccattactaatctttcaagtttgaggtgtaactcaaatttctcaacattttttttcatgcaaatctaaatttctgcaaatacaatgaaattataccattaaacaatccaccatatataatatacgacataagcatcgcacaataaaaaaccagtaacatttgaaaaggggaggagaaagaaaacatgaatattatttaacaaaaaaaattaaataaactggcgaaattgaccgtctactagttaaaaaaaaaaaaaaaaaaaaactttgaagtccccaaatatctgggccttttagtggatgtggcccaaattctaaatgggtttgacttggatccggttttggcgagactagttcagtttaataatcagccgtcgaatccaaagactgaagaaggtagtcttaaagaaaaaccctagaaaccattacttatctctcccactggctctgtctctgtcaaatctcggatcgatttcgcggtgggctcgattcgtgattcctcaaagttcatcatccctaaggtaattttctccccaagctggtagactcaatttaccgatttttgtgttgcacttaaaaagccgatatctaaattagaggtttgcgtttttttggggtaggcactgtcacttaatggcatgggaatcgaaaagctacgctaggagagatcgtcttcttgagattaaggccactgttcgaaagtggtgggaagacgaggatgtattcagagccgaatcttgtgagaatcttccaaaaccaggagaaaagtttttctcaaccttccctttcccgtatatgaatggttatctacacattgggcatgccttttcattgtccaaggttgattttgcttctgcttaccataggctaagaggagctaatgtgcttcttccatttggtttccattgtactggtatgccaattaaggcttctgcggataagcttcgtcgtgagattgaacagtttggtaaccctcctgtgtttactgctgaagacaccaccaaagttcctgaagttcaggaggagagcagtgatactatagctttaccggttccgggtcagttcaagggaaagaagtaataaggttgctgccaaagctggtggacaggtttatcagtgggaga

SEQ ID NO: 3530 - DNA, 865 bp, Arabidopsis thaliana landsberg
gatgattttgcggattttgactatagcattctgagtgatgagagcagtatcggttactcggacagcaaacctcttgttaacggtactcaagtcttgacagactgatgttttaaaggaaagtaaaaataagaattgtcgaggttgatttatttgaatttttgtctgttaggtttgatctatttgatagtttttttttttcatttcttcttatcccggagatagtaaaatcagtttcttattaacttacccagacatttgggatcttgtagtacaccgttgaacgttaggaacgtgacgtttttttgttttttctatcaatcgtcgtcagagaaggtagtcttcacaccgcaaaatacgcctaaatgtttctcttgtttcttctgtttgggctccaaaacatcaacttctatcaaaaggctttctcgttcgtacctggaatatcaaaaacccttgtcatctctccgtgtataccaaaaacttcacaccatgtgtgctctttgatgacaaaactcttaaggcaaactcttaccaaagctactctgcaaggttgtacctaattcacaaaaataatagcattaaacttgtacaatgacatcaaaactctaaagcaataagttagagaaccaaatctccataacatggaaaatcagtttacttgggtcggagagggtatggagctatctcagctacggagaagatgaaaacagagacggtttattagcctggaagagttcgttgagagcagcaaaagaagttataaatataaaccttgaagaggaagagagcgagagaaaagaggtgctccgagttgtatatgctcgttaagggttttcgctctctttgtgggccttaaaggctataagct

SEQ ID NO: 3531 - DNA, 1543 bp, Arabidopsis thaliana landsberg
ctttgtctctcgggccatcatacacttaaattccttctcagcttttaggtgaattctttttcgagagaggctttatgcattaaccagtctctccatccaagtttgaataaacaatttgtaacctctcatgctccggaatgttattctcaccataataactctcaaagttgcttagacatcttcttaggttttcatctgagggccttgatactctatcttccacctgttcctcttcaccatgtgaatcgttcactaatggagtaagtattttccttcctagcaactgtttggatcgcaatctagaatcaagcaaaaaagttcgagtctgttttccacgtctcttcctcgtacctttgacgttttcagttccaagtgggatcacgtgatgtctccttagtgttctcttttttatgaccttgtgatggctttgtataatagggatacgacctttgttgcgagattgattgatgatttttaacacaggagccaaaggaccgaaaggttcttctagtggtaaaacgcccaacaagtgttcgacagtattctcatgagaatttccttgattttcaccttgtataacaggtatcgttccttcctggcgagaatgatttgtcattggaagctcagaaattgtgggttctgaaatccacactagagatttgtaattgagattatgagaaaggagggctagatcttcacagaaaccttgagagttatattgctaagaacgaatggaatttttgtattgataatgacaaagcttttacaatgtgaaaggagattacaagtgtaaaagtatgtgtgtgaatgtaagctgaattgaatgtcccttccaagtcgtccttgcttccttatatgggtctacgcacgtggtagctccgttcgggatctgcggagatcctcctgaatattgggcaggtcagttccgagatatcaggtccgctccgcgaatatctcctcatcagttcctaggttgttattcgcttatctcccttcattaggtgaccgggcttatctggcccaaatacccattcgcgtatgtgggctcatcagctgcgtaggtcctctacttggtgggcttggtgggcttttgtgggctggcttggtattttcgcaggtggattcctggaggggaatccagctccggcacgatccatccgagttaatgtccgtgaggaaataaggattctctgttgaatgccttcgattacaaaaaaacatcccgggagacccgcgaagctgcggatacactcagttgggaaatacgaggtaaattatttttttgtgcatccacatatttctagatacctaggtagccatagtttttgtcttatgtaggggaataaccagtctaaaacgcctaataagtgtgggagatgtgtaggtgtaggtcagaatcgtgttatgtgctgagaacccccttggttgaccctatggggtcttgcgaaaatttggaaagatttttggaaatatctccaggagtcttttggtccggtgcctttaaagagtgttagttggtaaacattcatatacagaaaagttg

SEQ ID NO: 3532 - DNA, 1695 bp, Arabidopsis thaliana landsberg
agagggttttactcattttatgtgaatagggaaagaaataggattgggtattttcttatacagatgatgatgatgatgatgatgatcaaagaataaaaataatgtatagggaagctttttgtaaacacaaatatgtttggtaaccattttggtattttgaatcaatgcatatggttgtttttctcgattattttaaacttgatttcttacaacacaaacacacacatcagaaggttaaagatctctgtacaagtacaagatctctcataccaagagagaacataggtcaaaggcattattgtttttcactactgcttgccttatgaccggattctgtatactgtgagtgataaactcatggcttgcttgtctcaggtttctgcacaagagagtgaaaagcaaacagtcaacgagcaagttcatttctttgctaagttcggttaaatcttcatttgttgtgaaattaaagccaaattcaagtctagaaatacgcttattctgacacagagcaggtcgtacgtaaaactgaacacttgaatgaaaagagaccaatggaagttgatggtatgatgaaagtttaccttgttggcacttcctttctcaccatctagcttatcttgctcgagtttcttcttcttctccagtctttccctctccattttctacaacaaaaagatcggtttcttataagtgagtgaagagaaatagcttccttcattaatttcaatagtcatagccaattattctgagcctgagtaatgtaagtgagacgcaacgaagctataaaattgtctttaaactgtaactatgagctcaacctcaaatcaaaaaggaacacaaaaacctatagagattgcttaacaacaatgtcaacaacacacagttcttcccctttctacaacaaatacttttcgtagaggcgtaagtaggatcacagattcacacagacaacatttattcaattctttccatctgaatgaactaatacgcattgcaaaactcatccacatactatttgaccatttgttatcaaaagacgactttacaatttgatagacaacaattggattcaagtcttatgataagaataagcctcggatctttatcagtgtatctcacaagcttaaaaatcaatgctaacgcaatttcccaaacgatatttcatataatttgattgatttcctgagatcagatttcgtttaccagtattcgctaacttgaagcaaaaccattgaatccaaataagcaacagcggcttaacgaactattatagcaccgatacataaatcaagagttagaaaaaatcgatgatgaagtagaacctggatatacatgctctctttcgcgcgttcctcttcgctgagcacacgacctttatcgtcactgaagtaccgaatcgccggtcctcgagtcgataccaccgaacgcgatgcaccaatctgcctctccccaaaggatcgagccagctttagctttgtgatcgcagaacgagccgacgacatcttgctaatcagtgagatggttttctcaaaatcgttttttttgggtagaaaatgtctttggagtgaagagacagttaggcagcttcgggtccggaccgggtcgggtatagattattgaagaacccgctagaacattgcaccggcgtaattgttagctaaagactttggtctaatgacccaatgggctacaata

SEQ ID NO: 3533 - DNA, 406 bp, Arabidopsis thaliana landsberg
gcatggttgttgattgatctctgaggtcaatgattgatctttgattttcttatatctcactagtgtcttcctcttttgaagcattgagatttcagttaaaaggttaaaggcacaagaagatatttctctgaaagcccacacaaaacgtgaaggtttagtttcttcccccctctggtagtctggcaattggctgctgaaaactctgagtaataattatgttaaaaagagatttttgtttttgcagaatattgcgaaggatgagtttgaaaccaattttgtctcagccgtggttgctcctggagaaattggggtaaagtttgacgacattggtgctcttgaacatgtgaaaaagacactaaatgagttagttattcttcccatgagaaggccagagcttttcacccgt

SEQ ID NO: 3534 - DNA, 1722 bp, Arabidopsis thaliana landsberg
cggtctgtttacgcacatcagatggatctacttcgtaaaagacggtcatcactatttgtcctatatcttccctacacttcaaaatctccagcagctcatccaaacaccacctcgatgatgcatagttcttcgagagcaccacgatcgagatcctcgattccttaattgctcctgtgagagcaggggagatggtttggcttctttcgatactttgatcatcaaacatggaaatcccgttgtagctaaactgtttacgtaaatggctgagaaatgttttacggacgtcaggtccatgaaagctcgtgaagacgcggtatatccaggttcgagaccaagaagaagaagaggaagaagccatggggaagaatcttgagtggtttaaaatcaaagttcacaaatatgtatttggataaacttattttttggatgaaaaaatggaaaatcgtaatcattaagagttattcagagaggaagaaatggaaagattcgtggctttttcattcattcatctttgaaaagttgacgaaatttcaaaccgagtgaattgattattacccacaaatatagagaagaaaaaagaagtcagaggttaattacactaatgtttggtttttggaaagttgtacaaacaagtggggtcatcttgggttataccgcaaacgcgtaaagaaaggaggagtgtttcctttaacgtttgaaatgattgtttttagaaagttgaaaaagattaatgtttctccttgcaactaaaaagtaaactaaaggtttatatatttttggggaaattgaggagaaaaaaaaattctttctcattggtcccatctatgcctttttatttaagtttggtgaactatattttgtatttatcaatcgaatttcatttcgtatttttaaacggatgggttttttggtccaaaaaaaaaacagaatggttttaataggtctgcaaaatacatggactagaaacagaaacagtaaacagaaccaagcccaactcgaactggcaaaatacatgaacgggtcctaaacctcaagacccgagaaccataaccaaactcgaaccgaatgcgtacccgaacatatacccaaaatataagcatataaccaaaatatagtagtcatatatatatatatatatatacttgtaataatctacacttctataaaagtatttctcaatagataaaatctgattgatgaattgacagtcaacaagcatggatacagaaaagcgtaagatgcaatgttttacgaagttcttgttactgctaactgaaaatggctgaaattggaaaaatatagggaacaaatccttatctatctttgagttcctgttcgaacaggccgagtttgaggcgtataggctccaagaactgcttcatatccaacttaatccgctgcttcagctgctgggaaagctccttgtcttcgctgagcttcacatccacctgctcatttgcacaaaatatcaccatccagagattctaatatccttttcaaatcaaatcagagtctctacataactttgtctaacctacaaaaggaacgttctactcaagattctaatagttgcataaaaatgttacctcaagatcatcaagctcgccgaatgaaaactctggaatctcgaggctccccttcaccttcttcatattctcttcaaatgaccactctcctaagaaaatcgccataatatgagttatgtatgcaaatatacatgag

SEQ ID NO: 3535 - DNA, 4919 bp, Arabidopsis thaliana landsberg
gaaccctccaacctttatcatatgccaaagtgtgcctatccttctgaaacagtgtatttatacgaggaattcccctatcccaagaatcctgtcatatttttatacacgagttattattctacgtcaatgatcagatatttctagaagaaaatattattcacaaatagaggccaaccaacaatatgatatcctcccaaaaccctctgtcaagcaaagagaaaagactacttccaagattaccaaaagaaagcaagctagcacgctgatatctctctcaaaattcgacatttaagtaaagaggtaacaaatacacaagtatgatacttacttccagatcttccagtgtaagacgcctattttgggcttgggcttcctgcctcttcaaagcatattctgcccacacccgctgtgaatcaataaattcactttcccacggctgtatgtaacggtaaagatttggtataagctgatcttcctcgtggctcattccactcctaaagtgggttacaccaacatctgtttgcttgctgtaccgaaggtcactttgtgggatcaaaatatgtcccattgacaacattcccagcccaccaatttcctttggagtgtagaagataacaggaggaaatctgccaaagagaagtagaacaatcaggttacagaaacataaacacacagctctactatgtcgaccataaattcagtaagatagcgtttgcttaccgactaggcatctttgagttcagcccaatcttaatcctggtttggattttattctcacacttgaccagtagatccaagagctcttgcgtgtgtacagtggcttcccggaagtaagtcatgagacctgtttataaaagagtatgtgatcagtttcatgctaaacaacacatcataaaaaactaacaatgatgcaaaccaaggctcataggattgtaccaattagagctgtattccatttgttgacgatcttggtaaaggtggttgatcctgatgacatgaggatctgcctcacacgattctcaaataccttcatgtgttcatcgtcaacccgcagaaaagctactgcagtcctctccttcgtctgttcattttgcagattccagacaccatcttttgtgttgctgaaagcttcttgggtcatcctgattttagggagtatccggacttcaaatccacacctgcaagcaagatgcaaaagagtcactaatgtcgatagcagtaccaaattacggtctaaacgaagccctagcactaatatcagatggactagaatgctcgaataaaagacttacatgctaaagagcaggttaggattatccttgctatagacagagacaaagccattctcccactccaaagtagtgatgctccgaggaagacggttcttcatgtcccagaagacacttctaccaagattgactgaaagaagaataatcaatgagacacaacatgaacatctaatgtataaatgatagtcaaccggattatataaaacaaaaagggaagaacataccatcatgtttcatcagtctcatccttgcatctcttggccagcacttcttattgttgtatcccaccatgttttcattgttgggatcgggatgctccgtaagatatcgctgaataagatcccgagcttcttcatgggtaaatttaaacattatatgaactttgtctatataccgagaatagagtcttatgggatggcgtgtctccacttttgtatcccaaaacgtcataaactcattaggcatctgaggtggcccagcaatttcactcgctcgagtcaaaccaagaagcaaaagatcaagcaatagtccataaaactgaacaacaaacgatgcaaactgaagtcccctaatgagaccatacgagttagtatgactcatatccttgtaagacaggaccacattattcttggcggacacatagtctgcaatattgtggtcaagaaccaaacgaagaagcctgaaagaaacaacacaaaatatttattactccagaaagtcgtggctcaatgtctataattaataaagtatgaatagatatgtacctgttcaacattgtcagatcgattttctcaaagaacttttcgaacttagtttggagcatcaccacacactgcccatcacctgtgtcccatatgccttgcaaattgttgataccttgacaccatttataaaccacaagtgggggcggctctgagtctgctggcttaatccagtttggaaacaagtgacgcttgtcaccttcgtaccacaagtattgatcaagatatgcatcggtcattttctctagaggctctatgtcataaaccggaatcaagtagctattaagatccataaattctatgccaacctgcaagaaaaacatattcaccatcattttacaacagtaaccttgaagacctatgtcaatccaaagctccaatatagagagaaatataaagttacctgtttaaagcctcgttgggtgagaagatgacgttttattcgtgatagagcttcatgaggattgtcataagcttgttcaatcaaaccaagctcttctcgctgctgctggttcaacctcacagctacactatatgattccttcagtctctcaagggcaaggatgagcaactttgtgtcatgtttgtatgacaatggagggaatggaattggtgagaacttccttgattccagccaatgaacagtagttgtataaattgcaagtgcttcttctggagtgacatacggaccatctttcaggtaattgtgctgtcgttcctgtaacagttttacaaggataacgcatcaatatataacgcagtttcataaaatgttcaaacaaaaatgacaaagtcattaagtcaatgaacagacctgttctgcctttagccaaagacgagtcaaccttccgagattctttctacaaactgtcttatcaacagtagcccctcttcggatacgctcacgattgtagtgagcaacattcgtccaccaatcagccttagacttgacataacgcaggatcatattttcaatcggtacaggtaacccagggaccttccatgggatattagctttccagcaccgccatgcctcactaaggtgctgcaatatagtccgcgctttattttgcttgataccctctgcacattatcagaaaatgttaaccaaagaataaagcaaagcaatttcatcgttgataaacaagtttgtaaaaatggaaacctggcatagcatcaaggacgtcatgcatgacagcagcccgaagctccagatcaaaatggctttcaactctctgctttgtgactgttttggccactccttttgaatgacgcccctcaaattgacgagcaagaagattccctaaccatctttcaagaagaggaactataccccgaaggaaaaacaaccataccctccacattggagcccaaaatccacaccctggacccttacccaccggaccagtattgaaacggtaatatatcaagtgctttaaatccttgcacatccgaatctgcctcatcagtctgtatttataacgatacatacccgtcaactggccaacatgagagaaaatatactgcagaccatcagccaattggaaggcatcgacattaccaagtcggaattggacatttgcatcaactacaagttttgtcaggcggaggatctcacggcacagatggaaagcgttcccaaaacgtgacttctttcgctctttggtggtcaaagttttcacaggcttgaggttgaagttgtagtcaagatgcaggtagtttaaattcttcctatgaatcagcagattcagcatattatatccctgccgacagacttgcagacccacttcaacccaatccagttcggtactttggaaaaactttgtagctgcaagagatcgaaacaagtgcttcttcttctgagctttaggcggtctatggtgcaactcattcagcacatagcacttcaatagcttttggtaactaacccgaactttaaccggataggctggaggactgcagttaatgagttcacaatatgtattaggacggtcaccagtaaatttcaaaacggtaaagaggaccaaagtagaataaaaacaaatagcttaccagtgctctttgaaccactctgacaccaagggaatatcttctgcgcggcgcgtcctcccagacctcatattgaaaggtcgtggggcaaacaacaatgatatgccagcagctgtagtgtcagtgtagagttgggtatctcttagcaaaggttccacaccttctggtaaggcgaagtcatcctcatcatcataaaccttcctttcacgtttttccttgttggtgttgcttattgggtgaatcaacggatcataataaaatgcaggaagatcgggatcctcggtctttatatacatgatcataggactgtgatacacacagagttttactttcctgggccgattattgtagagatggggaaaagctattctgtactcagtacgcagaggggaacgaataatgagcttgttgatgtcattaaactcattccagtcctcatcccctttctccatatcacggtacaaaggttcaaacttgggtccacctggaaaagagtaggagaatgcattaaaagcaatggacccgcagcaaaaatataaaaactggagcatagaaggaaaatggcgtaccaggtatgcacatgttcagagcttttgctgtgaagaaagatggcatgtcaaataagtagaagtagttgcgatcaatcaaatcagacagcaactggcctgcaagcctgtgaagggttgccatgattggaagtgagaggttccacctccggtaactgggaccattaatcagttttgttttaacgagtggcttgtggtcgtaaaaccaagtgtggacagcagaatcttcttcctcatctagctccaattgaatt

SEQ ID NO: 3536 - DNA, 1716 bp, Arabidopsis thaliana landsberg
  unsure (1)..(1716): unsure at all n locations
agatcaacagaatcagccacaacaattacagagagcaaatccatctagtatgtttcctctcttactaacttgtagatgtgatattgtttttagttctaataatgaatatctttgtagcttctcaagattctacgggaaagacggtaaatgccaatcccggggactggcaggaggagacctatcagaaggtatcttcacttgccttgctcttcgcttcttaacatcacaattaggttttgattttgttttcaaacatctcaacattttcctgtttcctgcagattataaaactgaaagagatgcattttcctgttctgagtttaatgcacaaaagaattgcggaaaaattgcggcaggtacttcattttataacctaatttttttgcttctggaacaaggatttgttctaatggttttcttaagcatttgtttttcaattttgtgttgtttttggtttaataaacctaatgtttacagactgaatctcttccgccgcaaccgatgcaagctcagtcgattgaaaagctaaaggcgggaaaattgtcaatggaacaccttatgtttttcttaagtgttcaaaggagcaatgtatcagagaaacatagagacaagtttagtctatatgagcaccacatattgaaatttaccaagagtcagaccatggttcagaggtcaacgcagcaacaacaaggacaatttcctccttctcaaacagcaatgcaatcccaaagtcctcaagtccatgtgtcacagtctctttataaggagcaaatgagatcacggttgatgccaagtagccaaaatgaggcctcgtctttgttgcagacaaggcctaagttggatccaagagacgagaacatcattatggcttcctcaggaaatgtcatgttaccttctgttaaacaaaatcctcgggccgtaaacacaaatatcagttcggttcagtnnnnnnnnnnnnnnnnnngattccatcaccgacaaatgcaacaacaacaaccacaacaagggaatcatgaccatcaaatgcagacaaatgagatgaatgatgtgaggatgaggcagagggtcaacattaaagccaggttgcttgagcaacaagtctcatcgagtcagtgccaggttccaaagcaagagtctaacgtttcatcccctcagatacagaaccactcttctcctcagttagttgaccagcatattcttcctgcgacgattaacaaaaccggaaccccattgaagtctagtggttcggcttttgttgctccagctccatctccagttcctggagattctaaaatgcctatatctgttgagtctccagtttctggtgttgatgaaataaactcaactttagattcttctagtaaacttggcacacaagaaactcctctgttatttgttcctccgcccgagccaatcacagagcggcctattgatcgacttataaaagcggtaagtaaactctatagcttatctaagtttactttctttaccttctcctatttactgacctaatttttaatgtgtgtggctttctagtttcaagcagcatcaccaaaatcattggcagaatctgtaagtgagattagctcggtgattagtatggttgacatgattggaggatcgttcccttctagtggaggatgtagagctagtttaggcgaggatttgagtgagaggacaagaaactttcgcacacacgaagaaacaaatctgtcg

SEQ ID NO: 3537 - DNA, 1253 bp, Arabidopsis thaliana landsberg
caaccaagaacccccatttttgcagacaaacgggatataattaattaactctactctcctaattgtattgtatctatattgtttttctcgactatggagtttcattttatttgaagcttgccaattaacttggtgataggttcatgttggctaaattaaatgttaaaaacctcatgtaccaattatatgattgaaccttatatagtaatatataaggagtaaattatattgctgattttgagttacaaaaatcatgaatcttgatattaaacttagtttttttttttttgttaaagctaaacttagttaatttgatgtaagtaatgcaatatcgatcacattaatctctcacatggataatgggaagaaaaagggaagaaaatatataaatatgtgagtatgtctctctgctatggtctcccatatagtgaacaaaggttgtctcttgcagttcacaaaatctgagaaaggtttgtcttgttgtgatgatttacgcataaaaaacattattataaagtaagaaaacaaaggctcgacgtacaaggtcggatcttggattcacaataatagtaaagaacaaggttcagtgaacttcgtgctcctttccactttcatagctcgtacactaaatccaacatcgttagtcaaaatgtcggtgttgtcttgtaacgaagcagttgtgatcattgattccacttaagggatatggctggatggaatagattaattagttttctattgagtatgttactccatcctttttacgggtacttgaaatcttaagtgtctactattcacaagatatttggcaaacatcgataatttaatcagaaattcaatgttgaagtacgtccgatttcgatgtttgttttgatgagattttaacatacacactatcacactgatagtctaataccctgcttcgacgtcgtaatatgataatcgaaatggtaaaaagacttgtttagtgtatattataatactacgttattagcgatttggtagcgtaaagagcgcctgtagctcagtggatagagcgtctgtttcctaagcagaaagtcgaaggttcgaccccttgctggcgcgtatgtaatgtagtctttttttttttttttgtttatgaaagagaaagaagatcttctagaagaagggtatatttttgactagtcttattctgacttcgacgaatgtgtgtcgatctccggcgaagtaataagtcgtgataaccctagaaatcttgccctttttttagc

SEQ ID NO: 3538 - DNA, 774 bp, Arabidopsis thaliana landsberg
aggaggagaatataaaggttcacccctacagataaacccaaatatttctttttttgtttggtgaattatagactacatatttttgtattacctctttttacgatcgtttttaagttaatgcatttcctaatgatatgtaagcaaggtatttctgatcttttataaataatatagattctaaggttttgcatctatttattacttgatacgatagtattttattgatagaaatatggattattagaaaaataagccatgtatttagatactttctttcaactctataatatttattattgttttgacataaagagttgaagaaaattctatgaaaagattatggattatggaaatgtgtgatttggactattgatgcggaccgtgtagaaatatgactttatctgctcatttatctctggcatcgataatgggaaagaaaaaacaaaagataatatataaatatgtgagtatatctctgctatggtctcccatatagcgaacaaaggttgtctcttgcagttcacaaaatctgagaaaggtctgtctcgctgtgatgatttatgcatcaaaaacattattactagtataaagtaagaaaaaagggtcgacgtacaaggtcggatcttggattcacaataataataaagaacaaggttctgcgaacttcgtgctgctttccacttccatagctcgtacactaaatccaacatcgttagtcagtgtcggtgtttcttctaacgaaacagttgtgagcattgattccacgatcagggc

SEQ ID NO: 3539 - DNA, 733 bp, Arabidopsis thaliana landsberg
cttttaacgtgtacttgaaatctcacgtgtctactatcactaagatatttggagaacatcgataattttattagaggttcaatgttaacgtatgttcgatgtttgttttgatgagattttaacatatccattgatagtccatgggctctcaccaattttttactttaaattttttgatatttcaatattgagaaacttttgaagagttgttaagaaacgtgttcaatggtagaaacatgaggggttcacttataattttgtttgaaaataaagtttggattaagtgtattgagataaagtaattggtgtaatatgtgtttagtgtattaacaaaacagactcatagaaaggtagtcaaagaaagctgtggtgtaatatgtgtttagtgtattaacaaaacagacttatagaaaggtagtcaaagaaagatggagaagttaattaactgtgagataacttcattccaatttcgggtgttctaaatgtcactttagtttctcttaatctacttgttacttcattgtccacatatgaaatagactaaagatcatcatcccatagcaaaaaatgtctttatatcccaattcttgtgtataaaatgtctttcaatcactaaagacatgtaaatctacttggttctactgtcatagagggaactgctacagatttgatctattgcaacaatgactagacagttttttattaagggtcacaattttgaaaataaactttg

SEQ ID NO: 3540 - DNA, 4624 bp, Arabidopsis thaliana landsberg
  unsure (1)..(4624): unsure at all n locations
cctgctatacatctgccatacatgcttaatggagtggaagtgcctacggattttgttgtgcttgagatggttttttatcctaaggatcctctaatcctagggagacctttcttagcctcagtgggagcgatgatagatgtcaaagacgggagaataagtctcaaccttgggaagtacatcaagctgtagtttgacatcaacgaaacttcgcaaaggacaactgtagaagaaaatatcagggctcaacctcagccttcgaattcaatcacccgacaaagcacaacctttacacgtgacttgcgagaactcaaaaagaaatctgatgagcaagaagaaaccatagagaagctagctcagatagttgaggaacttaagagtaaactggatcagatgcgagagaaagctcaaccaaaatgcgggattgaaactattcctagaaaaaagtttacttcaagatggtctgaggagatagattatccaccagaagagaaagaggcctatttcgaggaaagaagaattgagtattcggctactcatctctcaagagaggatgctgaatatgatgatgagatcagagaggactatgcagaccctctctatcacccattttcttcttaaagagtttgaggagtcaagctagagactttaaacaagctcacttgggaggaattcccaagactgtttctgtaaataaaacttttattttcttgttatttttgatttgtttttggttgtgtttgtgattctcaggaacagagaaacagtgtggaggtagagtaaaaatttaaaaattttactctacagagcaacaggggatcgagtattccagaaattcaagaatttgaaaaacctctattgcactcagaggccatgaggtcgagtattattgatgattctaaaaaccaaaattttgaaatcatatctatgctcgacagacagaagctacagagacttatagggagtttaacaagtttacagaggattacagaaggttctagtcaacagaaaacagtgcttcagggcaaatagacagaacgtggcccaccacctctcacctttgttcccccacgcattttaagagataacaaaatcccttccttccttctccaccactcgatctcaccctatcctctcccaccgacatcatctctctcccactccaaacactcgaccacgaagactcactctacctcacgtctctcactcgaccaaacctcgcaatccctcttcctctccaaacacttgacctcaccagtcactcgatctcacccctccggcttcgtctctctccttcactcgaccacgaaacaaccgtcgccgttcgctccacctccttcactccctccttcactcgacgacggtactcgatttcgccatctcttccttctcaccactcgacgttcactcgaccgcgctgcccttcacttcgccggaagcttcaccgtctcaccgtcgcctccttaccactcgaccgcaactcgacctctccgtgcttcatcttcatcttcatttactcgacttcgccggagctccttgccgttccagcttcgcatactctctcaccgtctctccttcactcgaccacttcacacttcgcctcaacatcttcgccggagtttctcgccattgaccgtgcttccgtcatctccgttcactcgacctcgccattcactgcgcctccattcgtctctttactcgactgctcctcaaaccgccaccgtcttctctaaattcgccgtttactcgaccacgttgttacgtctctcattcgtgtacactcgaccgctatacccgaagccacaatatcactgtactcgaccgtttcactcaaccgcgtacttgactggtttagtgtgtgtgtttatttgaactaacatattgatatttggttttgagttacattctttttcagggaatcaatatgagtaactacagtggcgaatcctccatggatgcggattacaacgtcgatgaagctgaaccttggtcaactagaccagagagagagcaacaggcttatgagagcttcagagccgagacccaacgctcagtagctcgacgcaatgaaaggagagctgagattgctagaggaaagagagcgatgacctgtagatatgagttgatcgacgaagatattgacgtcgagtatgagcctgagtcatggcacagagaaacgaagctgttgaacaagcctgatgaagttacaatggaggagtacatcagacttttcgaggtgaacgacttctggggaacgaggtacccctgttatgagactttggcccagttggggctactggaggacgtacaacacttattcgagaattgtcatctggagacgctgatgtcttacccatatgttgcttacaagaaggaaacaatagagtttctctctactttgcaagtggagatgtatcaaggacttacagcagatgagctggagagtgaagggttggggttcttgactttttcagtgaacgagcagcgttaccagctatctatcaagagcatgaaaggattgtttggtttccccagtggaaagggaactaaacccaagttcgagagggaagagttgaaggatttgtggttaaccattgggaatgatatagcgctcaactctgcgaggtctaagagcaaccagattcaaagccctgtgatccgctactatcagcgctctttagcaaatgttctgtactctagggaatctacaggcaccgtgtctaacacagacatggagatgattgattctgcactcaagggcattctccgcagaacaaaggggaagaaggtcctgaagggcgacctcaatgatgcaccaacggttatgcttctgttgatccacctgtgtggatacaggaagtgggcgcacaccaacgagaagaagagggtgcgaggagccctttgtgtaggtggtgttgtgacaccgattctgattgcatgtggtgtacctctcacgtctccagggtttgatccgaggatgatggatttagatcatttgcgtcgttgtgagtttctggagcatgacatggttggcgatttctatcgctacaaattcgagcactccttgacccgaacaaccaacattctgcttccctgcaccgaggccataaccatacttcagggagaaaacattgacttcaagcctgcgcgtgattacctctactttgagagcgctccaccgactgatgacaacgtccctacaatagaagctacagaggatgagattgctgagacagatgaggatagggaggaggagtacgatacgagcatgtatcatttcagtgagcatgtacctctagcgcgggagaccaagagcttgagcgaagctcacagaaacaacagtaagttgcagaggtggtgcaagaaacaagataggctactcatcaagtgcttcaaggccatcaagtttctgacagacaagctatgctgctcctcttctaccacagttattccgcagggagagcctcctcaggacatgccctcgaggagatatgacgcgccagagccaactcgccacaggcctgggccaagtcaccacaggcctgagcctagtgaccgagtagtcccactagtccctgcgaggcattcatcattcgagcctcgggagctcgggagaaagaagaaggctgcactcgctcggtctggcagcaggagtacacgacttctcaagtctcgtagcttacgcgacagcggtgctggccgcagcagaagaagagaggtcgagtatcatcagagcggtgctggccgcgacaaatgagcagcggtcgagtacccccagggggaagctgagacacaatagggagattcttcgatggcctggcagcaatcacaggcagctattgacgactaactctgctccttcttccactgacgtaaacacctcactccaccattgtaatataccatctcctgtttttattttgtttctggatgtgttttttcctgagtactctcttccaaatttggtcacacactggactgtgtgatttaagtttgggggaatgctcangaagtgtgttgcattgtatataatcttgagtctgcattcatctaaggcatagaaaaaaccaaaataattgaaaattttcagaaaatgatttcacaaaacaacatagtgtcatgtagattgcatatcattttaggattgtatatagagtgtttgtatttaggattgctcatctgcatagaggataatgatgattttaaacctttaagcatgttttgattcaatgatcctaacattctctagcctatggccatgatcattcaaactaagtccatatgcctaacaagtctaatcaaatcctaaccaacatgtacttctctgcaagcttacacaacattctagattccatacctaagttccacaactatacccaccaggctttcatcgctggtctcatcaaacaagccaacattcaagatccttctagactcgttcatgtactataccatgataatttgaccattctttatatatttcttttctttttgggtgttctttctctctcctagacttattatttttagagagtaaataaagggcaactcgcatactggatcgacaccctcggcaattttccaacctttgtaattgatcattccaaataatatataataaggggtc

SEQ ID NO: 3541 - DNA, 3763 bp, Arabidopsis thaliana landsberg
cttctccttattaacaagagccaaagaaaagaaaaggaaacattgatccaagaaaaaagggccatgatgagatctatttttccatcctccttttcgatggggagaatttgcccaccattattttaggtctctatattgtgatgttgctgagttgtaatatcatacgcaattgtattagcaatcttgttttagtggaattgtttctagtctaggtcctgaggatgtaggttgttaccaaaccccgttaacaaatctctgcttttatgctctgatactcattacactctcatatcgttcaaacacatatatctaacacacacttagtaactttacaaaagtccagcaattaggtgctcatcgttttcatcatcttcttccattatggagagaactatttccaccaatcttctccttaatgagaagtgttttaaaaagcttagcctttaaagcatcacgagctcaatgtgttgttccagtggcggacctacgtgttctccattcgtgtagaaacgaactccgtggcgaagagattttgagtcttcattcgtaattaatttttatttgcgctattagcgggacactgatcgatgtaacggacaacgtttgtatactataatcaattgagtgcatcagttacactctactacaaaaaaaaatttaaaaaatcatatcaggttgtagtgaacatattatataaaatataacaaggaccgatattgaggcctataaatttgataattaatatgcattctatatcatttgtagtgaacatggaagccacatcagttttttggccaaaacatggatctcagatttttcttagctcttcgaccaatttatgtccgttaagcaaactctatggctttcacctgacgtcattccccggtaaaccattaaagcatattcgtttgaaggccactaatactctgacatttgatgatcaagaacgttttcgcaagttcaaaaaattgccaacttctgaatggactcattatttccactcgattccccttgatatctcggtacgtccatatatataatacatatgtaaaagttagtgtatattgatgtggagaagattaatgcatgtgtacatacatattttaccttttaggaaatggatgcacttaggaaagagatcgatgaactaaagccgaaagttaaaaacacattcatgtcttcccaaggcattgactctacaaagaagagaatccttatgatatatttgtttgtgagccttggccttgcatatcacttcgaggaagagatatatgagactctaaaagagggtttcgaaaatatagagaagatgatggacggtgaagatgatttgtacacaacttcgatcatcttttgggttttcagaagatacggtcaccacatatctttttgtaatttagtctctctacctaagctttcgttcatcattgacgttggaacaagtgttttttttttaatctccatattgttatgtataatgacttttatctacattttggtcaatagatgtattccaaagattcaaagggagcaatggaaacttcaaagaatctcttactggagatgccaagggtatgttgagcttgtatgaagctgcgaatttggggacaacgaaagattatatactggacgaagcattgagcttcacatcgagccacttggagtcactaggtgcaagtggtacatgcccgcctcatctctcagtgcgcatacgaaatgctcttggtctatctcagcattggaacatggagatgttagtcccagtggaattcatcccattctatgaacaagaaattgaccatgacgagatgctactcaagtttgccaagcttagcttcaagttaggacaactacaataccttcaagaactcaaaatccttacaaagtatgtatacttaatctatatggcttaacttaattacaatcttttaaaagattaattctgactacatatctatatctttggatgcaagatggtacaaggagctagattttgcaactaatttgccaccttacttcagagacagaatagtcgaacatcatttccttgtgcaagcagtgttcttcgcgccacaactctcacgtgaaaggattatgatgattcagtacttcaccggtttagcacttctagatgacacattcgatagatatgcatctcttcatgaggctgaaagccttgccaacagcctgttaaggtatactatatgacgttaaacacacgcgaaaaacagtatacaaccttattatcaaaacttcagataaacaatgatcatgatgatgatgtacaggtgggctcctgatcaagcaatggataaacaacctgattatttgagatttgtgttgaactttattttggatacttttgaagagtttaaaagagaacttgggccagaagaaagaccctacagtgtgaatgccacaatagaagaggtacccaatcaaattattctttctaagtatacaactttatacattaatcaaggcaatatgttcatggctccaaaagaccttttaactgagactttaaataaagaagttgtgggtgtttcaatattttagaattttttttgaaacataacatttttgtagtcctaacggatatataattttgaacatgcccagttcaaggcagctgcgaaagcgaacattgatctcgaaaaatgggcacaagcagatcacattcctagctttgaggagtatatggaggttggtgaggtggaggtcacagtgtatgcgtccttggcaggtattttcatgtctatgggaaagatggcgacaaaggaagcttttgagtggctgaaatccagaccaaaactcgtccaatatttgtctatcaaaggtcgtcttatgaatgatttaatgggttatgaggtacaaatacataaatattttctttacatctcgcgtataactgctttcttgtaaatcttacccacttacacaaatattgagtaggacgacatgagtagaggatatgtcacgaacgcggtcaactgttatatgaagcaatatggggttaccaaagaggaagcttttagggagcttacaaattcatcgtagaggctgagaagatattaatgaagagttcctgacaacggtgggtgtgcgacattgcgttcttaaagcaacctttgatcttgcacgtatgatcttcatcacctacaatggatatgaaggatttacctatccccaaggaaagatcaaggagtatatgacttctctgtttgtcgatcgtatcggtctttgaagactttgaaatatgttgtagagtgtttaattcaccactatgacatttttctcttgtttactcttaccagatcatgtgtttggtttctactgtctacaattagattgtataatgcttttttaaaagtaatgaaaaacttgatgtgtatgttattataatgttggttgatcatgatgtttttgattaagtgaattcaggggtgtccaatgaaaatggatacactaaattataacattttaatacattatcatactacaataatcatctaaggttagtgacaaaactctatatatgctcttttgttttaagattatttgcactcaaagcttcaaataaattatatttcaagaacaaaggaacaatttagttgcaatgtttgtgcttacctcacttgacgtgtgaaattaattgtttttatatctatgcttaattctttagagaaggacactgtctttttttgtggagtgatgtatagacctgaaggagtaatagtaagttcatgaccaaaactttatt

SEQ ID NO: 3542 - DNA, 513 bp, Arabidopsis thaliana landsberg
aactaaactattaaaaaaaacaccaaatagacttatatcgataatgaaactattgtattctctcatagggggaaaaacaaagtaggtgaagatgatatcagatatcaccaccactaaataagaaactacgttttaccagcaaattctctatctgcaagcaacaactagacgaggcctgacttgcgtagctctgcttccccatgagcaaagtgacatctatcaccaaatgtacagtttccttttgagaatctctcacatatcttagtcttgaagttgctccctggatgtggtttcccttcagaacccatgccaccaccaccaccaagaccaccaccagggggattcttagctgctgaatgaagcctcccaatcaaagctttgaccattgcactcgcttcgcttatctgctcaagtggaccttcaagtacaatgttcttcaagtttgggtctctcttgtgatcttgaattgataattctactcccgtctgacgacatatctgctgtgaactgact

SEQ ID NO: 3543 - DNA, 3320 bp, Arabidopsis thaliana landsberg
ttttgcaaaaggtataacctgtccaatggcacagtaatgtaaaaaggactacaatgaagatctaatgcatgcacaacgttaaaatccatggaatttgatggcccgagaccttttctacaaaagacaaccaacaacactaattcaaatggaaaattatacgtaagaacccttataagttgagagtatatataccaaccaccattttatttcctttctactttcgttttttaagtttctttgttctttatggatattaggttgcaagaggtaactatggaccagatctttttgctggagtaagaggaaaccttaacgtatggagaccaaaaatcttggaagatcaagttagtgttgcatacatagcagttggtggaggtgctaaagataatttcgccagcatttctgttggatggaaagtaagtcacttctggttccttaataaaaagtgaccatgttcgctaatacgcctcatcaactataagttgcatgagtttaaagttaacaaaagtttgaaaatatgtatataaaacaggtgaatccatcgctataccacggtgattatgctcgtttatatgcctcttggactgtaagttttgagttataccagtaagagcttgcactaatagttcctttatcttccgagggtcttatcaattctatatgtatatgtttgcttataattgtgcttatagttacatggaagcaataccggctgcaacgacatgtcatgtcctggatttgtgcaagttagcaagactatcccacttggtgccgttattcaaccaacttcctactataagggtccacagtatgaattgcgtttgaccttatatcaggtaaagtttactcatctttttgaccatttctcttaaaagtcattcgtattcatatttcaaaaattgggaacaggatcacatcaagggagattggtggtttgcaattaacgatgaggacgttggatactggccagcatcattgttcaagtcctggagagaatctaacgccgcaagttatgcatcttggggtggccaagtgtatagcccagtgacagagaagagtccacctatgggaagtggtcattggcctagtgagggcttccataaatctgcttatgttagcaacctccaaatcattaatgttaatggaagagtttttaatccacaaacgggtacagtgaagttacatgagaccatgcgaagctgttacaaagccagatttgttcatgatgctaagaagccttggttaaaatctatttactatggaggtcctggaggatgcatagtgtaattattgatctacgaaataaagagtagcaatatcttaaaagttttaaataggctataggaaaaaaccacatatttgaaatatatctaagcattacttgcgctctgtacgaataataaagtttccatgaatcttcacaacattttttgcaatatgtttgatgtttatgcctaagtcaaatcatcataaattaccatcctttataaaaccaacatggtgataaccaaaaatgtgggttctactgtgcttttgtctgaaattcatctaaaagcttcttttaatcatgtcttaaatatgatgacaaaaaaaaaaatcatgtcttaaatatatatacccatatacatagcctagcttgcccctactctttacctctaaaccccttaagactaaagactcataaagattgtcttgatgataatagcatagcttgcccctaccctactctttcacgagagtatatcaattgattcaccagttcaaaagactcataaagattctcttgatgagggaaaagattctaccaaagtgtgtttagcaactgtcatggatacttaaggctagtgaactacacacctccacacgacgtagagaagcaagaagagctcgttgaaggtctttgaaagcataaggatatgagctgcataacaatagtctatcaagattccgttggtgggcttcaaatgaggtctaaagaagggaaatggatcgatataaatccgtgtgaggatcaccttgttgttaacattggagatctaatgcaagcatggagtaacggtcggctgcgattgtctgaacatcgagttgtattgagaaagttggtgaacagagtctctctatcgtttcttctctgttttgtgggcaagaaagtgatacttgcgccacaagtatcatcaagatattgaatgcttaagtaaagcagcttatgtgagaggcatcaaaatcatcgatggttcgggaacagttttcgatccagaagtggatataatgatggtacatgaaaggagaccaaaatgttacaaagccatatatgttcatgaggatgatgagccttggttaagagctttttactttggaggatgcatagggtaataatgatctacgaaataaagagttgcaagatcgtaagacttttagatagggtataatagaaaattgacataattgatatatatatctaagcattacttgcgctctattgaatactcataagttcacaattcagcacaaaatatcgaatgaacatagattgagtgcaaactcacccttcaagaaaaaacaaaaaaagaagaggaaagcaaaatggtaatatagactaaaaactcacagaagatctgtaacaaatggaaactattatggtcaaatattattttgttaactattcataagtcaatatcatttagtccatattcttttaatttgcataaagataataaatgatacaaaaatgcatgaactaattgtgtcaataaatttagttttcatgtgattttctacattataaataaatcattttgattcatttttggtttgtagaagaaagaataaagataagagcctctttcatagtatcaatggcttccttcaaccactttgtgttactgattctgttaataatcactcttattctatccgctgaagcaactaaggaacgccgagcaataccatcaaaggcagaaaggaatgaaatgaagagacaactcaaagctatcaacaagcctgcaatcaagagtttcaaggttggcttagccttccttaatcttacctgcttattgtttcatatctaacttctttttcttatgaacagactgaacatggtgatatatttgattgtatcgatattcacaaacaactagcatttgatcatcacctactaaaaaaccacttctgtcaggttttgttttatacataattaatactctctttatctagctattgccttctgtattaaaagacgactctccttagagaatgattattgactttgtctatgcagctaaagccaacaacagtacctgaatggatcactggaaacaaca

SEQ ID NO: 3544 - DNA, 2176 bp, Arabidopsis thaliana landsberg
  unsure (1)..(2176): unsure at all n locations
atcaaaattccaaagaaccatagtgaatccatgattctcctcccaactttttcttccattacaaagaacaaaactttatttcactttttttggcccttccctttcgactgttatatatgatacaatcatcctataatgataatgattaagatgatgaattgcataaatgattctaaaaatcatgagtcatgacaatggtgatgcacaaacaactcgatgctgagaagcaataagagtatagggacctcaattcatttcagtcaccaatgagtaatgatgaaaaacatttaatttatttttggcaatacagttcttaaccgcaacattttccaaactgtttcacaaatgaatccactaactggaaaaacatgtgccagattttacttataacgaccttttatgacacaatgcaatcttgcaataagagctaaatgcgctaaaacttaagctggcttctcaaagataaagaagcagataggaaaaccaatagaaatggtaattctgcaacatctaaatggggaggtaagtggaaagattcagaagtggactcacaatggctctaacttgaatccaagttcatagaagtacgagtggtaatctttattactaccattcatattgaatgcttatttggtgaatacccataaatgaagcaatgtcaccttctcgagatatatgggaataaggttcaaattcgtcgcaaatgtaatgtttctcgaccattatgcgttacttgcgaaaaccattgtcaaggtaaaacatttacgatagacaactgcatattatatgttatgtggaatgtgtttgattcttccttcaaaaaaacttgtaatttctcttttagtagacttattgatctgttaagggttggctttgatgatttagagtgataaagataattaccgcaggaaatcatgaggggcagagagatagaaacatgatagaaataggttactagtgaagaaacaaaaaaaaaagtctaataaacaaactaagaatcagagtcctctggatcttccactgatgattccgcttgctcttcttcttctcccactgcattatcatcaaaattgtttatctctttttctagaaaacacaacgtagaataggaagatgaaacacacacaaaccttcgaattctagttccctaagaatggcattaaactgatttctcaactcgcgcaattccacaagagctctttgaatcctttgaatgagatgattttctgccggaggagctgcatcggcggcgatcaccaccggacggcgctgagaagctgacggagaagcttcgtcgtataatnnnnnnnnnnnnnnnnnnnnnnnnggaacagcatcactctcttccatctacaacaacaatgacaaattcaaacaaaatgtgtaagctttttcaaaaaagctgtgagaccccaaatatcaaaatcacatctttaatagacctaatttcatcaacagaaatagattacgtgtaataaaacaatgacccatcaatcgaattttaacaatgtgcttctgcgatttcgaaaggcactcaatttgtttctctctagggtttatcaaatgtaggtgacacgaaacacaaagcgaaatgatagagacgaagaaagatagagactttaccggagaaaatgtccttattgatcgcaggggagattatagagcggtggagacagaaggagtcgcggctgcgtagaagagacagacagacagactcgagtgttgaaaagacagaacagagaataagatcttggtcgctgcataattcaggtttctcaatttaaccaaacccaaaaccgaaccaaaccgaaccatctcggttcaatttgattcagatgtcaacacctgtttacataaggttctcataaatgatgaaaaaaaatgagtagaaattctcaattgtttttgtaagaaatactattaagaagataataagatttatatataaaaaaaaataaagtaataagctctctccagcatacaaatgatacaaatctcatagtatatataaagttgatttattggtttgttacataacagccttgtgtagtatacaaagaatgataaatgttattttttgatacccacttaccaaagaatagagagaggtgtgtaatataaaattggcaggaacgttttatattaaagggttaaggattttctgacttgtaagatc

SEQ ID NO: 3545 - DNA, 1394 bp, Arabidopsis thaliana landsberg
gggactcttctctgttactttgctatacacttggccaccccaagatgcataacttgcggcgttagattctctccaggacttgttcaatgatgctggccagtatccaacgtcctcatcattacatgcaaaccaccaatctaccttgatttgattctgtacccaatttttgaaagatgaatccaaatgacttttaaaagaagtgatcaaaaagatgagtagactttacctgatacaaggtcaaacgcaatacatactgtggacccttatagatggaaattggttgaataatggcaccaagtgctatagtcttgctaacttgcacagatccaggacatgacatgtcgttgcagccggtattgcttccatgtaactattagcacaattataagcaaacatatacatatagaacttataagaccctcagaagataaagaaaatattagtgcaagcgcttactggtataactcaaaacttacagtccaagaggcgtataaacgaacatgatcaccatggtatagagatggattcacctgttgtatatacatattttcaacttttgttaactttaaactcatgcatcttatagttgatgaggcgtattagcgaacatggtcactttttgctaaggaacgagaagtgacttactttccatccaactgaaatgctggcaaaattttctttagcacctccaccaactgctatgtatgcaacactaacttgatcttgcaagatttttggtgaccatatgttaatgtttcctcttactccagcaaaaagatctggtccatagttagcttttgcaacctaatatccacaaagaccaaaaaactcagaaaatgaaagtagaaactaaaaatggtggttggtatactctcaatttataagggttacttacgtagaattttctattgaaattagtgttgtttgtctctgtgagaaaaggtctcgggccgtcgaatcccatggatttcaaacgttgtgcatgcataagatcttgcattgtagtcctttttacaattactgttccatctggacagcttataccttcttgtagaagaccaaatgatctccctgaaatgtttctattgatccattcaggtacacttgtaggctttagctgtatatatacgtcaatgtgttcacaaattacatcattctctaaggaaatattcatcttttattgaaaagaaaggagataaagagaaaattctgtataaaaaacctgaatagagtggtttttgagtagatgatgatcaaatgctcgttgtttgtgaatatcgatacagtcgaatatatcaccatattcagtctgttcataaaaagataaataaaatattaatcaggtatgaaacaatataagcatggaagaagaaggaaggctaaaccaaccttca

SEQ ID NO: 3546 - DNA, 1282 bp, Arabidopsis thaliana landsberg
aaattgttaataataatagcgaaattacattttattcagatgcatggatactttgtttaaataccttcttatgaacatgcaacacgggagcctacgggatattttttccctatacaacggttcttgcaagaaccacataatggccgagaaatattacatttgggaagaacttgaaccctgctatacccatttattgaaatattgaccgggcttgatatatgggtctccaccaactaagcattcaatacgaaaagtggtgcaacactcgtcgcaccagtagaatacttttgtgcatgtattctttaaactacgctcacatatttcacaccattcttgctcacgtacttcttcaccaaatgaaattgtgaggaagtgtgtgtcatgcttatattttattttgtatggtaaggtaacacacttaaaacatacaatgaaattgcatttgatgcaatttaattgttttaaacattctgttttgcatatatgacatatgggttttatttctgggtttaaagctaggaacaagggatcttcatgacctttgtaatcaaacggctcagaaattaaagcgcaccttacatcaagcttgaaaaagttgcatacctccatcctacagtgataggcaaagccaatagaaccacgatcacaagcgttgcaacggaaggtattgtaagtaaagctattgataacctccaatacaagtgggtgaggatgtaaggcatgttggattctacggggagccttagcacatgtttcatggaggatgaaatcacactccatacaaacatataagttaccttcatagataggaatggcacacgcttgacaaagcatgttttcatcataaacgttgctgacctcgagtcggagatgatgattatgatgaaaataaagtatcactccttcagatatcacctcgaacggtccatcattttctgttatatcgattatctctggtataccttcgagttcttttccatcccacacatctttcccaagagcgcatattgaatgaacaacataatcgctacacgtgtcacaagtatatgcaccataatcaacgttaatacttaaacggcaaactccacaaaaccattctctagatgtaagagaaaaagtgaacgagatacgatgacggtgacgtgatatcttgatgatgtgtggggaattcatacagtcattatgagttacaaagttacatctgaaacaaacgtaggtgggataaatttttctcaacaaaccacaaacattacaagtcaaggaagttagcctggggaaaaaa

SEQ ID NO: 3547 - DNA, 522 bp, Arabidopsis thaliana landsberg
ctgtagttccaaagataaaagctgatggaagatgctaccactatgttacttgatctgtgcatgaggtaacattagtgaggacacaaaacatttctggctcaattgcatagaaaatatgtcgaaaaactaaaatctaaagattacctctaagggtgataagtgtaaggaaagacgtttggctgcagttagagattccaaaatgttctcattttttataccaaaaacgtcactgacttttgcctcctccagctttggcgctttctcaatcagaaaagagttaagatacttgaaccttcttatgttcaagtatttcaaagaaggggcatttatcacatagcagcatccatacccaaatccagaatcctttatggttaatctctgtaatgatggcacgacgatagtgaaagttaccatacatcctctctttctatgtactaccaaatcccgaagactaggacaaccacatagaaggttgcaaacagagtcttcgtcataaaatgtactttgtaaagtgtagctttc

SEQ ID NO: 3548 - DNA, 1074 bp, Arabidopsis thaliana landsberg
gatcataaaccataatctttatgactatctcaattacaaacaataagaatcataacaaattacaaaatactatactaaaaataaaacaaaataatgaaattaaatcaaaagttgcattaagataaactcttgttgaccaaagtaaaaataacaataaagatataactcagtggacggtggaactatctatagacaacaaaaaaaattcgacggcacatctcaaagaacacgttatgctgttgtctttcgcaaatattttgccttgacaacgcattttgcaagaatcgcaaaatggtcgagaagtggcaactttcccaagaatgtagaactctttctcatccccatccaaaaaacatctaccaagtttcagatataggatttccccaaataagcattcgatatgaagagtagtgcagcactcgttgcaccaatagaacacttttgtgtttgtatctcctaaattacgctcacacacctcgcaccaatctttttcacatacttcttctccccacagaattgtgagagagtgtctgtcatgcttatactttgcttgatatggtaacgtcgcacattttatacacataataaaatcgcattcgatgcaatttaatggtgtaagacactctgatctgcacacatgacaaatgggcttttctcctggggctaaagctaggaacaatggatgtttatgaccttggaagttaaacggttcacaaacggaagcacatcgtacgtctagatcgaagttgcagtcctttctcggacacatatagacaaagccaccacaataacgaaaacaagcatcgcactcaaagttgcccgtcccatatttactcacgacattcaatgtaagtggatgaggatgtaacgcatgttgtattcttcgccgatattttgcgcatatttcatggatggtgaagccacattcgacacaaatgtaatgattaccttcacaaataggaaggacacatgcttgacaaaacttacttttatcacatagtctgctaacctcaagttggagatgatggctatgaacgaaatgaagtatcactccttcagatattaatctgaatg

SEQ ID NO: 3549 - DNA, 2102 bp, Arabidopsis thaliana landsberg
tgatttttcccgcttcacttgggtattctttttgcaggataaatctgaaacccaagggaccctcaagcgcttcctaaagagagctcaaaacgagtttgagctcaaggtgaagaagataagaagcgacaatgagtccgagttcaagaaccttcaagtggaggagtatcttgaggaggaaggaatcaagcacgagttctccgctccctacacaccataacaaaatggtgtggtagagaggaagaacaggacgcttatagacatggcgaggacgatgcttggagagttcaagtcccccgagcgtttttggtcggaagccgtgaacacggcttgccacgccatcaaccgggtctaccttcatcgcctcctcaaaaagacttcgtatgagctactaaccggtaacaaaccaaatgtttagtattttcgagtttttgggagtaagtgctacattctagtgaaaaagggtaggaattccaaatttgctcccaaagccgtagaagggtttttgttaggttatgactcaaatacaaaggcgtatagggtcttcaacaaatcatcaggtttgagtctctagcgacgttgtatttgatgagactaatggctctccaagagagcaagttgtcgatcttgatgatatagatgaagaagacgttccaacggccgcaatgcgcaccatggcgattggagatgtgaggccactggaacaaaaggagcaagatcagccgtcttcctcaacgatggtgcatcccccaactcaagatgatgaacaagttcatcaaaaggaggcgtgtgatcaagggggagcacaagatgatcatgtgatggaggaagaagcgcaaccggcacctccaacccaagttcgagcgacgattcaaagggatcatcccgtcgaccaaattctgggtgatatcagcaagggagtaactacttgatctcgattagttaatttttgtgagcattactcctttgtctcttctattgagcctttcagggtagaggaggccttgctagatccggactgggtgttggccatgtaggaggagctcaacaacttcaagaggaatgaagtttggacactggtacctcgtccgaagcaaaatgttgtgggaaccaagtgggtgttccgcaacaaacaggacgagcacggggtggtgacgagaaacaaggctcgacttgtggcaaaaggttatgcccaagtcgcaggtttggactttgaggagacttttgctcctgtggctaggctagagtctattcgtattttgctagcatatgccgctcatcattctttcaggttgtaccaaatggatgttaagagcgctttcctcaacgggccaatcaaggaggaggtgtacgtggagcaaccccctggcttcgaggatgaacggtaccccgaccacgtgtgtaagctctctaaggtgctctatggacttaagcaagccccaagagcctggtatgaatgccttagagactttttaattgctaatgctttcaaggttgggaaaaccgatcctactttattcactaagacttgtgatggtgacttatttgtatgccaaatttatgtcgatgacataatatttgggtctactaaccaaaagtcttgtgaagagtttagtaggataatggtacaaaaattcgagatgtctatgatgggggagttgaagtattttctaggatttcaagtcaatcaactccaagagggcaccttcatttgccaaacgaagtacattcaagacatactcaccaagtttggaataaaggatgtcaagcccatcaaaacacccatgggaaccaatgggcatctcgacctcgacacgggaggtaagtccgtggatcaaaaggtatatcggtcgatgataggttctttactctatttatgtgcatctcgaccggatattatgctttccgtatgcatgtgtgcaagattccaagccgaccctaaggaagctcaccttacggccgtaaaacgaatcttgagatatttggcttatactcctaagtttgggctttggtatcctaggggatccacatttgatttgattggttattcagatgccgattgcgtggggtgcgaaatcaataggaagagcacatcgaggacaagc

SEQ ID NO: 3550 - DNA, 1229 bp, Arabidopsis thaliana landsberg
atatatacaacaaaatccttcacccaaaagaaaagagagagaaaaactatcaaaattactggtggaatagccatggattccatcggtggatttcatgagatagaaactgatgataaactataccagcagcttgtatatcatcacccaaaatacaaacccaaaccacaaacaaaatataaacccaaaccacaaacagccagccatgacctcccttttcaaccactttttttatgtcctattccacgaattttaaaagttgagttcgattctctcacttctccaattaataattcccctgaatacatcgtctctgcaacaaaaagtgatgaagagtataaagatcattcactactccctttgttttggtgcaacaataaagaattcgatgtcgatggtgggtgtgacatatgcagcggctcaaattttggcacagactattatttatgtgtccactgtgataatatataccacaaagaatgcgtccaatctccattcaaaatcgagcacccataccatccagagcattctctcctactttcctttcgtaaccctaatgctcccgttatagtgtgtttttgttgtggaagaacaacaacatgtctggtatatttctgtaccatatgtgatgttgtaatgcatacagtttgtgcgatgaagtcgatactcttgggtggattccatgaggttgaaaacgatggtaaactattttttgtatatcatcacccaaaataccaacccataccacaaacacaaaacctaacctcctccgacaaagctgccaaccatgaccactcttttcaaccacttttttttatgtccttttcgacgtattcatccaaaatactctgattctctcatttacccgatcagatattcccccctatacgtcagctctacactacaaagtgatcagcaagatgaagatcattcagtacttcctctattttggtgtaacaataaagaaccggatgttgatggtgggtgcgccgcatgtagagactcatattttggcacaggctattatttatgtgtcctctgtgataaaattttccacacagaatgcgtgcagtctccattgacaatcaaacacccttaccatcctgagcatttttttcaactttcctgtcgcggatctaatgctccccataaagagtgttcatgttgtggaaatatagctaaaaatatggtatactgatgtaccatatgtgaagcctttatgcatacaacat

SEQ ID NO: 3551 - DNA, 616 bp, Arabidopsis thaliana landsberg
tctggtagccctcactggccaatgaccacttcccataggtggactcttctctgtcacagggctatacacttgacctccccaagatgcataacttgcggcgttagattctctccaggacttgaacaatgatgctggccagtatccaacgtcttcatcattacatgaaatccaccaatctcccttgatttgatcctgttcccaatgtttgaaagataaatccaaatgacttttaagataagtgatcaaagagatgagtagactttacctgatacaaggtcaaatgcaattgatattgtggacccttatagatggaaagtggttgaataatggcaccaagtgctatagtcttgctaacttgcacaaatccaggacatgacatgtcgttgcacccggtattgcttccatgtaactattagcagaattataagcaaacatatacataagagtctcagaagataaaggaactattagtgcaagctagctcttactggtataactcaaaacttacagtccaagaggcgtataaacgaacatgatcaccatagtacagggatagattcacctgttgtatatacatttttcaaaattttattaacttgtagttgatgagaaatat

SEQ ID NO: 3552 - DNA, 1065 bp, Arabidopsis thaliana landsberg
agacaaaagagctgtttttttgtctttaattgattggtcaactgtttacatattttttggtatgaactatttacaaattcatgaatacaaaaaatatctcaaatttttctttacaagtcgatccacttagttcttaccgtttttttggtataaccattattttataaaacatcgttcccgctaaatttttatcgcatcaaacatagcgtgctacaaacggaaacggtcatctatggcgatcgatcaaatatacaacaccaaaatcgaatccaaaaaatagtttacttgaagtatttatatgttttgcttcactgctaattctatggttttgaaatcctttattcttctcaaaaaaaaaaaaagtttgtcaatggttgttgacatggtcttgcataatatgtggataaatatttgttttaatcattttcatcatcattgcatattcccaagtgttatcaattgtttgacaaataaagaaaaattaaaattgatacctttttattttagttaattaataacgaaactgaaactatttctccctttgcatgcaatgtgggttttaaagacggaagctgaagagtgaagaagaacaaaagatttttgagagagaaaagtagagtcactccaaaattgttctctcgcaatcttctttctcggtttcctcttttaagaaaaagtccgcattttcactctcactcagatttcttccctcttctcacctgcaaaaacccttgtttcccgctgtttcgtttcttctccggttgaggaaccaaaacgggtcaaatacgcagctgaatcatcgaattcttaggtattttcgtcttacccaactcttatctttagatgtttttccgggaaaagagctcgatcatgactccgccgtgtttttttttgggggggggggggtttctccgaaatgggtttcaaatgtaggttactctaggtttgaaagttcggattttttggttcactgtgtgttactacagcttcgattttgtgtaaacgagtataaaaattgtatcttttacagatttgagaacttgttcttcaaagacttatttttct

SEQ ID NO: 3553 - DNA, 974 bp, Arabidopsis thaliana landsberg
  unsure (1)..(974): unsure at all n locations
agaacgagacgagatgtgattctattaaaggatggtgaagtttttagattgtaagaatcaacaaagtaaatatacgatattggtaattacatatcaatgtcaaagtttaataaatcaaacttaattataaaactgaaattacacttaaatagaggaatagacaacacactagactcaataaaaaacttgattcccacatttaactgaacatactatatcgttgtatctcttcaatattttgccttggcaagggttcttgcaatcctggttcatgcataacggtcgagaacgattacttttgccaagaatttgagcatccctatcaaaaaactttaaagtttgaccatgcttcacatatattaggtctccaccaaataagcattcaatatgaaatgtggtgccacactcgttgcaccaatagaacacttttgtgtctgtagctcttaaattacgttcacatactttgcaccagtctctattacataattcttctccaaataaaactttgagaaagtgtttgtcatgtttataccttactttttctggcaaggtagcacacttgatgcatacaaaaaaaatcacatttgatgcaatttaattgtttatgacatattgctttgcatacttgacaaagtagttcttcttttggatctgaagcgaggaacatggaatgttcatgatatttgtaattaaatggctcataaatggaagcacaccgtacatcaagatagaatttgcattcccttatgtgacatccatagataaaaccaccacaaaaacgttcacaagcattgcacatgaatctataagaatcgtactccacatgttccaatgtaagttgatgcggatgtaacgcatgttgtattatgcagcaagaatttgcgcatgtttcatggaggatgaaatcacactccatacatgagtagaaattaccttcaaagataggaagaacacacgctngacaaaacttgttt

SEQ ID NO: 3554 - DNA, 2873 bp, Arabidopsis thaliana landsberg
aagctaaggagatcatcggttctaaagaagttcaagaacagggatgttagggtacttgtgactaacgagctcttgacttggggtttggaagatgcggaatgtgatctcatggtcgatcttgagcttccaacagatgctgttcactatgctcatcgagctggaagaatgagaaggccgggaaggaaaatgacggtggttacagtgtgtgaagaatcacaagtgttatagtgaagaagatggagaagcaacatggtctgcctttcttgtattgtgactttattgatggaaaacttgttgtcctgcagaagatatagctattttactctagtttgcagattctttttataaccaattaaattcagaactttcttatttatttatttctaatacaacgaaacatactaattgtactggactatacactaagaaaataacgagtgttaaatttacagaatgacatgaatttatttaggaaattgcttatattcagggcagtgacttgtaatctttatgaaaatatcaaatgcaatgagttcatacacatattggttagggagctgatgatgtatccgaaacatacattgtgcttggtgtgcttcactaaagaacatctgaaaccattattgaatttacataatgccataaatctgagtattagctgacatatttttttcatttgcgtgactaaaacttcgagaggccgaagaactacacaaggagatgattcaacgaggtatagctcctaatactattacatatagttccttgatagatgggttttgcaaggagaatcgcctagatgaggccaaccagatgttggatctgatggttaccaaagggtgtgatcctgatatcgtgacgtataatataatatcctcaaaatattaaagaaagacgcaaaaacaaaaaactcattggccaaatcgagaaggagaaggtttaagataaaccggtttctaattatcgacattgtaccggttcagagatatatatatcacacaatctctctcaacatctctaaacgaagatctatctgcatgatttgggcttagctttttcgtccccaaatatcgcgcttcatcgagattgctagggtttctcctcttcgatcttcgctgctcatcaacatctattgattcaattttcgtgctattgtttccctctctgatttcttaatcggaaatttcgtctcgattcgattcattaggttccatcactcttttctgatcggtgaaaggaggttcgttatcttccctaatttttgagcttgatcctctttctgtactttgattcaaggattaagtattggttttttgctgtttcgatctagcattctttcttttttccggaaaaaaagttatggatttcgcgcgaaaatctctgggtagagtcattgaagttgcgtcttttattttcatactcttctctgcattgctttctagattgtacttgtgaagttttatgtacacatttctgtaatcggtggagtaaatttttggtttttctcttttgtgtgtgtgttggaaattggctttttggctacattttatgtactaaacttttgattggctctatagcatttttgtttctgcagttggttttgatgattgattcgcttgttctgattttgcaggagaagacctgttgttttcttatgtaagtgattctgatattcgttatctgttggctggtttgatgaggaagaagcggaaaggtagtgaaactgagggttgggagaatttaccagatgatttatcatgttcaactgcatcacgatcatccaacttcaggtcgcacttttcactagagggttatgctagacttaagaaacggtgtaaggagactgaagctgtcgagtctgttggttcctttaagagacgaattgctggtgttgctactgcacctccttgtggtgcatcatctttggtttcgtcaggaagaggtttgaagaggaagatagggtgcatagatgtttccacacagactggtaggaagaataaaatagacgatgactatgtttttggtcgaaatattgggaaagggaaatttgggtcagtcaggatctgtaagtctaggaagaatgggactgagtttgcttgtaaaactctgaagaagggggaggagactgttcaccgggaagttgagataatgcaacatttgtctggtcatcctcgggttgtcacattgcatgctgtgtatgaagagtcagactgtttccatcttgtgatggagctgtgttcagggggacgtttgattgatcagatggtaaaggtgggcaggtattctgagcaacgagcagctaatatattcaaggaccttatgctagtgatcaattattgccatgagatgggagttgtgcatagagatataaaacctgagaatattctcctaacagctgctgggaagatacagctggctgattttggcctcgccatgagaattgcaaaaggtaaattatattcagacgttactatttttgtagtaatttgtgtacgcatttaaaaatgcttctattcatggcagtgtcttgtagtgtctttatgaaattgtcaagtgtaatgactccattggttaaggaacatagcggcttgatgctgtaaagctataagttgtcatggcatcaatgtctaacaatactggtgaaaaaactaatgatgcccaaaatctatcatgtcggtacgatattttaactgtcctgtgtttgtcttttcctctggtagtttaacttgtaattgcctaaagttgacttaaactagatgaggaaagctagtcttctatgagtaaagttgatagcagctgttcatgctttacttgttctgattgattaaagtattcgttatgttgttattactggcaagttatggtctttcttc

SEQ ID NO: 3555 - DNA, 2216 bp, Arabidopsis thaliana landsberg
  unsure (1)..(2216): unsure at all n locations
ataatatcactccctagattgtgtcccttacctagtccctatcatacaatagttatcctcgtgcacataaccctcttaaaaatacacaccatcttttttttgctaaactgcaaatatcatataaatgaagggaaaggtttacatgagttagaacctatacatttgatttcctggccaaaagttaaaaaacaggaaaaacaatatgatagtctgaattgggtcagattttagtgcaaccaaagagtcataagccgcctgaaccgcttcttcaatcttcttgcagtaatggagtttttgatttccctgtcaatggtcttaaacaccactgacggcagaatagtctcatgattgtggaggaagttgtttctctgcttccaaatggcgtagagcacagattgcacaatgagcttgcggaggggagggttggcggcgagcgtctgttccgttgaagagtccagtccatgaggtcgttccacacaacaaagctgaaagcaggcagctctaatctcacactaacagtgtgccaaagaaaacacgcaaattcacaagtcaaaaacaaatggtctctgtcctcgatgtccaaagagcaaagcccgcaagtcgtttgtaattgcataccccaagaggcaagcctagttttagtgggtaggcggtcaagatttgttacccacatatggaaagcatgtttaggagttgcacctttaaaccacaccgtttttgcccagctaaccacatccgatcttggtctcagggctgcccaagttttcgcagaggaaaagccgttgcatagcttgtcttccaccacccaatcataaacatccaactccccggatagagtaggtagatcaatagaggtgaggtagatcatcagattacaagctgaatcagttctaggagccgcaagagtccaaccaactgagttacacaaatccgcaactttcgcattcaacggggctctgagactgcgagggccatcagttccaagaagcttgattaggggaccaaaaggagtccaatgatcaaaccagaaactagccgtcttcccatcaccaatcttacatctgacaaagttttctgctaagcaccgcagccttaagatacacctccagttccaagagtcagaagacttctccggctggatccagaagctagtagagatgctacaattgtggtacttgtgccaggccacccacagagatccactgttcgaaaacagaagccaaatcatcctcaggcagagagttctattccatgtgccgaatctccttaagccgagacctccttcatttcgtggcaaacagatctgagaccatttaacctttgccattcctttagtatcaatgcttccagaccataagaaccgagagcagagggactcaatctgtcggatacacccaagaggcaaaataaacgcagaaatccagaaattgacaattcccgagataactgaagccaacaactgaactcttccagcaaaagaaagggatctaactgcccacgaggtgaatctcgaagaaatcttctcaatcagaggcgcatattcagatattttaagctttcgggacataagtggtaagcccaagtacttaataggcaaagacccaactttgaatccatagctagttatggcagtggattcatgatggctcaagcctgcgtggaagagcttagtcttttctctgttcatatgcaaaccagaccaacccgcaaagtcgtccaaagtttcataaattccatgcaaagaagaagaagctccatcaaagaaaaccattacatcgtctgcgaacatcagatgagaaatctcaacctgagaagttctggggtggtaggcgatgtagccagaagtgtaccttgagcgcagaagacctgagaaaacctccatcaccaacacaaagagatacggagacatagggtcgccctgtctaaggccatgagagcttctgaaaaagcccccagtgtgtccattgacagagattgagaagcttgctgttgtgagacattgataaatccatccaatgaagatgtcagggcagtttatggctctcaaagtggataaaatgaaatcccagctgactgtgtcaannnnnnnnnnnnnnnnnnntttgagcattgccctaggcgaaatgtttttcttgttataaccctgaaccctctctgtagcaaggaggatattaaataataaaaggcggcctggcatgaaagctgattgacagtgg

SEQ ID NO: 3556 - DNA, 564 bp, Arabidopsis thaliana landsberg
ccggcgggagacgtccggggcggcaagctcttcacccgcgtctctcgctgtcggctcaaggaggacgccgcgagagggggctttcaccaactcgtcggcgccgtccacttctgccacagccgcggcgtctaccaccgcgacctcaagcccgagaacctcctcgtcgacgagcacggcaacctcaaggtctccgacttcggcctcagcgcgctcagggagtgccagaagcaggacggcctgctgcacaccacctgcggcacccccgcgtacgtcgcgccggacatcatcaacaagaagggctacgacggggccaaggccgacatctggtcctgcggcgtcatcctgtgcgtgctcctcgccggctacctcccgttccacgacgccaacctggtggagatgtaccgcaagatcagcagagccgacgtcaagtacccgcagtggttctcccctgagctccggcggttgatgcccaagctcctcgaaccgaacccaaacaacagatcaccatcgagaagctggtcgagcacccctggttcaagaatgggtacaggccgggcgtcatgc

SEQ ID NO: 3557 - DNA, 12156 bp, Arabidopsis thaliana landsberg
  unsure (1)..(12156): unsure at all n locations
gtcgctaaaaaggtagtttccgatattttgtttgacgggaaacacagcccatgtcatcagatggagtctaatatgaggggtaacatcgatgtcatattctaaagctacatagtttaaattgttgattttttttttatcgtaaactgggttattataaatcggtgtgtgaacagttatagactttttaattagataaatcgatcaagctaagaaattgtcaattaatgaaatttttaaatatttcatattcactacttttaaggggaaatttacataatgacccaaaaggaatgctaaaaatatgagttatttgagtaataattatacctaaattatccttgttttcctttgtagagaaaaataatattacagaaatgtcattactatttaattcagcaaggcaataaaaccacatttatttacgaaaatgccatcgttgtttttggtaaatttgtggctcttgttgcgacggatttgttatcgatcacagatttgttggtcaaccacagattttttacaacagacttgttttgtaccacagactttactgtgttatgttacgccagattatttttttttcgcagattttttaaccttgactgatttgtttcatatagtctccacagattttatttaaatttcaaaagtaagaatgttgaaaccaaatctgtcactgatttgttttccggaccacagatttttctttatggtggcaacagattttctatttacacccaaaaatctgttgtgttataacagatttgttaacctcaaaaaatgttatataggcatgacagagttgttttgtgtaatcacagatttaattaacttgttaacaaaatctggtgttttacaacagatttttgttaaaaaaaaaaattactacacagtcacatagtgataacagatttgtttttagtgatgacagttttgtttttcagtgtcaaagcataacagatattactcatgtcaatgttatggccgatttgtttatgactagaataaaacttttttagtaataacagactttttttggcagatttatttttaaaattttgaaattttttgttatatgagatttattagctagccctcaattaaattatttccggtttgattgtatgttaaatccggtttgactggatttttatttttttttttgaaaacgttacgacagacttttattagccgacaaatttttccgatttattaccatatttgagtcaaggaatattctcgtaacgcctagggttttcaatgaaaaacactgccattgtcgttttcttttttcttctgtaacgcctaccaaatctaatttcaatacaatccattattcttctacctattcgagatcttagttgcttcatctttgatacaaattcgattcccttgtttattcgattctctctttggtatggatcaagtaattctcgtgtgtggtaaatgggtatatgagaaaacgagatggctttttgtggttgatagtacaaaaggttgtcgtgtacttgaaggtaatagtcaaaccagttatgatgatttcatccaaatggtgtatgaggattacaatatcgagaagagtgtatttgaagttattttgagttacaagatcccgaaatcaaagcaattaccaacagatactccacctgtactcattggtaataatagacagtttcagtcttatttggggcaaacgaagaatgatactgttcgactttgtgttgaattaaaagagaaagttctagatgaatatgaagaggaaatcattgatgatttaggtagcagcgacttgccgaagacaaaagcagttgatgtatacggtattgtcgaagaaaacgttgaaaacgttgacgtattcactcatactgatagcgttgttgaaggaaaaaaatctgaagcagttgaagatggtgaagatgacgggactagatttgattactgtgatgattccgacggaacagattctgatgatgagaactttagcctctatgggattccaccagaagaagaagataaaacgaacgtatcaagcaagaagaggagtttaagtgtatacgtagaagaagataaaggggatgctacatacgagaccttagaactatcgtcattgggattggccattggtcaatgttttgaaacgaaagatcacttggagacacgtttgaagatacttactgtgttacagaaatttgattttgatgtttcgaaatcgactcctacattatattttgtaaagtgttggattaagggatgtcgattgagagtgcgagcaacaccagttgacgagtgtccaaagtttcaggtgagagtgtatgtttcccaacatacatgttattttactaaacgcttattacgttccccacaagctactcacgaaatacttggattgctctataagaattacgttggtggaattggacataaggttctcccaatgcacgttaccgaagtattnnnnnnnnnnnnnnnnnnnnnnnnacggtttcaaatcaaggtacgatttccaatttcttggctttctttgtttattaatcacaccttgttttcaaccaactaatcactaaagtcaatacattttgttagatggattactcgaaggcttatcagacactaagatctgcccgagaaatggttaggggtacaccagaaagtggttacgagcaacttccggtatacttgtacatgttaaggagggaaaatcctagaaccttcacgcgacttgaagtggatgaaactcagcgatttaagtacttgtttcttgcgtttggtgcaagtattttaggattcactttcatgaggaaagtggtggttgttgacggtacttttttacaaggataatacttagggacacttcttacagcaacaactcaagatggtaattttcagatatacccgattgcttttgccgttgttgatactgaaaatgatgcctcatgggaatgtgttttttagacaactcagcagtgtgattccagatgatgaaagtctcgccattatttctgacaggcaccaatccatcaaaagagcaataatgacagtttatcctaagtctagccggggtatctgtacataccacttgtacaagaatatattagttcgctttaaaggtcgggatgcatttggtttggtaaagaaggcagcaaacgctttcagattagtcgattttgaaaggatatttgatcagattttagctttgaatcctgctcttcatgcttaccttcaaagagctgatgtacgtttgtggactcgtgtgcattttcctggtgataggtacaacttgcttacaagtaacattgcggagtcaatgaataaggtcatgtcacccgcaagaagccttcctattgtacaactgttagaagaaattagatccatgatgacgagatggttttcagacagaaggaatgatgcattgaatttgtctacatatcttactcgtggagtagagaagatattgcaggtttcatttctaatacaaacacaatttatacacgtccgtatattggtgattatagctaactaatgacattgtcttctttgtagagtcgtgtagagcacgctaaattgctaagtgtgcaagacatagatgcaaatcaagtacaagttacgtttggagcatctctgcatgttgttaatttgaaagactagaaatgttcttgtcataggtttgatctaaaaaagattccatgtacccacgcgattgcagctgctgaaaaacgaaaactttctcggatatcattgtgtcatccttactttcagaagaattacttatgcaagtcctatgctaatgccatcatgcccagggactttgatatacttgttcccgaaaatgtcgtgtcgatgatctgtttaccaccggaagctcgtcaacaaccaggtagaccaaagaaatcgagaattcagtatgtactggagattgctatagagaagaagaagcctagaaaaaaacacacttgtggcaattgcaagcaaattggacacaatcgtaagacatgcaaggcttaatgttctttatgacttttttcctttttcgttggtttgtattatttgaatctcaacgatgttaattcatttctatgattctgttctaagacaagtaaggattatttcatttcaacgtcatctttgctgcttgcattgcatatttctggaacaaagaaaaaaaataaaaaatataaagactataaatctgaaaaacgactaaaaaaaaaccaacactaaaacgaccacaatacgagtttatatccctaaaaaccaacactttcaatgactatgagtctgaaaacctgatttgccaattttcgatgcttatataaaccaaaaaatcacgagaagggaaatgggtttagatacatgtacataaaagtttaagacaaaacatgggtcctaaaagtcatagacataccaaaataaaaagcttaagaagaaacatggttcttagtagaaccggaaacaacacaaacaaagcttttactcatccatgagtccagggaatttgaaggccttgcgacgaacctcaaggtgtagtgttccagcattctcgcctaattccttaaacatctccacggcaagtttagtacgtagggactgcatgttctcatcacacaagccatcaaaggacttgccaagcgccaagcattcgatatattttattgagtagatagcacaatcacatgcgtcaagattcaccgggatcttcataatcctcttccactccaactttgagtagctcctcctacgttgctttgacggaataaatgaattcaacatagcaggaatcattttcatcacaaacatgcattgtatcgccatttctgtatccgtagtcaagctcgagatgctgtcataaacattgatccgtttttttgtcaagtcaatatccagagcgacccaatgattcccgttgacaaagaggaaggcatataggtgatccacatcaacaaaccatttcttgtttgtcgccgcttcacattgagctgtaccattgacttgaacctcataatactccctgaatttgaagcacctataatctggttgaaactgtttatagtctttgagcattgtggagatcaaatcttgatccaaaaaagctattctctagttgggatattttgaaggattacgattgaatcttcggcgaaacaatgacattgaagctcccatgtgctgcattataatcaaaacaacaattattatagttacatatactttcagccagccaacagtacaggatttaatcaattgaaagcaaaaacttttaagaatatatttctatagttacatagtctttcagccatccatatttttctattggtcaattgcttcttggagtcattatctgccagtagaaccaggcattaacattgctggtgttcaggccttctttttcactgcagaaaaaaaaagaatgaataatgatagcgcaaaacatttctatgtgaagaaaaatagacacttacaaatctggttcgagccaatccttcaacctatcaaattggtcatcagaaacaggttgaagatgttcatgtaccggaagaagacgatggtacatcagtgattatgcgcttcactgttgaatttccttcatacggatatttctgagaacccgctagttgtggcactcgtctactcttactagtaacactgtccaaattatctagtccgtcttgaagtgctctcaatgcatcagctgttgccttattagccatctgatctagaggattggagaatgtttcttcagaacttgaagccattttcagattgtttgcaataaccttgtcagtgacatccacaacatcatcatcaaatgtctttgttgtcggagctgcaactgacttcttcttctcaggttttggactatctaccttttctaccttcacaactgtcttcttcatttcaggttttggtttttctaccttctctacattgacaattgtcttcttcttatcagattttgcaactttcttcttagtaaggaccattgtagcagctttcttgttcttcactgaattaacagccttcttaaccactctttgaataggcaacccatcaacagaacctgacttctcctctactacccaagactggaaaaaaacacagtacatatacggtttaataaaggcaaaattcaaatccaaagtgcaaaacatgtaaaattaaaaactgacatctacttacaggttgattactatttgcctcatggaaatgtggaaaaccaatcgaaaaatggaaaaaatcaaatggaaatgtgacgggttctaaagtttatttatactgaagtcgatacctccgctgttgttgtggctggagaagctgcttttgaaaggagtaaataagaaagtgaaaaccaacgatgaacacgattatcagcagttaagaaagggaaacccacaaccctaatgctgcaacaaatctacagatctgcaacaaaaatattaatcactatctgaatcaaacgaaactcaatcgatatagggacttattcaatcgcggtggttgcgggttaatagtttacctacaccaccgaagaagtgaatccgggccaccgcgactattccctgctgtttgtgtagccggaacatatggcggctacaaaagtttgaaccaaagaagagttaaacgccgttttgtgtgagaagaagcagcgacaaccggagaagagatatcgcctagtcgagcagcgaccaccggagagaggagccaccaccggagaagagaagttggcggatcgagaagccaccaccggagatttgctagggtttcgatttgaaatcaaagaaaaagaagagacatgcaatttttgggtttcgatttcgagagtcggggaaaacactttcgctttaggtttcagtaaatttttttattctttatttctttatttaatccattcttttattaatgattttatttatttttaatcaaagtcacatttttagtataattctggttataaaactgattagggttaaaatgtctttagatttaaaatgtgagtcattctagtcagccatcaattacaagagtcatttaagttattaatcctaagttatgagtcaatctgagcaaaattcagtgtggaatttgacaacacaaaagtctcgtctacatcaccaatggaggtgttcgcatatctcattttcttcgtctacaacaagaaagaaaacaaatactttaccattcaaggttcgtacatacatagcctactctctctatctatatatatatacacacatatgcattgattagaaatctttgtataaatatacgtctagatgttgaagtaaagcggttcaatgcattaagaacggtgtggggattatcacaagttctttcacttaagacattcaatgaccctgaaaatggatacacatttgagggagaacaatgtgagtttggtgttgatgtgatggttgcttcacccattaccaagtgggaagtcgtctcttttgatgagaaactcgatattctcaagttctcctggagtgttaaggatttctcggtgcttaaagaggagttctatgtatcagaaagcttttcaatgggaggaagattatggtgagtctataaaagtattatatatgtccatttttggtaactgctaaaacgtgcataataacgttttatagggatcttcaaatgtatccaaagggagaccctagaagagataaaaaaaatggttttttttgcggttatctggtagtgaaaccgtaacggtggatgagaagatttacgtgatagcacatctgcgagttcttgacccacgtggatgaaatcacttcactaaaaatgtatgctcttttgttagagcttattcatgagatcgaaaattgtagatgttgttggggttcttgacttatggattttaaagtgtcctgctcactttacaaacattactggttcagggaaccgaacaaagggtggggttatcttgaattcttgtctttatctaaacttcggaaatcatacttggacctagaagatactttttttttccctaaacttgtaaatatcataaaatatgaagttagggtaatacaaagatattaccaaagcaaagcaaccaaggaaaaaataataaaaacaaggttacaatagagctagataagatttgggagaagctaacggatccaaagcaccataagctcccgccaacgcttgatgtgcctcctacaaaagatgatgttgcacagctcacggtcgatctgtcgaaagaccacagaccacgagactatacgagagttgtggaggacattgtttcgctgcctccaaaggctgtacaccacgagattagctaccactttccgaaggagagtaggagctgctgaagaagaaagccttgtccaagagagaagctcctaccatgagcagaacagccgctgacgagggcagagcctgaggaaaaccagcctccaaacctgagaagagaaatcacaaagcagcagaagatggttccttgtctcggtgtcaacagagcaaaggcaacattcagcagagttgataaggccccaagaaagcagcctgtgaagggtagggagacggttaaggttagtatccacatggtaaaagcgtgtttaggaacagcgcctttgaacctgatagactttgtccaacccttcaaagaactcctaggcctgaaaccctcccaggttgcggcgactgagaagccctgactagcgtctccattgatactccaaaagtaacagtcactgtccagatgaggcagaggagcagggagcgaagagagaagagcgaagatagagtcagctgtgattgaccatggcagaggatgcctccatcccgaagcatcaaaagcatccgctacctttgcgtttaaaggaattctcagcggtctcaatccaacattacccaagagcttaatcaaggggcccttataagttcagttatcaaaccagaacgaagcctttaagacatttcccactttaagccttagattcagcaacattttccagctccaagggtcactaatgttagcctccacccgccagaaagaaaactccctaagacgatgatggcactaccactgaacccacagagaatctgaacggtcaaacaggaaccaaataagccttagaagaagcgctttgttccactcactaaaccgcttaaaacccaaactgccttcactctttgggaggcaggaatgcacccaagagactttagcgcctttacccacatcaatattacccgaccagaggaatttggaacaaagaccttccagctttttaaagcagcccttgggcagaaggaaagtagacatccagaaattgattaagccaaatataaccgaagagataagctgcgcccgacctgcgaaagacaaggacttggagacccaagatcggaatctagaagagagcttctccagcaaaggaccatattcagcaattcgcagcttgcggcacatcaaagggagacctaagtaccggatagggaaggctccttctgggaaaccataggcaacagaggcgctcctctcagttaaatccagacccgcttggaacagctgacttttgtccttattaactctaaggccagatctatccgcaaagtcatcaagcgtcacgcaaatactgtgcaaagaagagcttcccccatcaaaaaagatcatcacatcttccgcaaacatcagatgggagatagagaggtctcttgtctttgggtggtagtggatataaccagagtcatagcgagaataaagcagcttggagaacacttccatggctaacacgaagaggtagggagacaagggatcaccttgccttagacctttagtactgttgaaaaaacctcccgagaccccattaacagagattgtgaaggaaggcgttgagatgcactgataaatccagttgatgaaccgatcagggattgcaagcgccctcaaagctgcaatgacaaactcccatttgacagagtcaaaagcctttctcaaatccaccttgagcattccccaaggtgagatatgcaacctgttataaccatgaaccatctccgtggcaaagagaacattctcagctaaagatcttccaggcaggaaagccgactgagattgaccaatcacttctgaaagtaagccctgcaacctgccagtcaaaaacttagatataactttgtacagcgtattaaggtaggagatgggcctaaaatctgatatgaaagaggcgttagaggttttagggattaagacaagggtggtagcattccactgcttaaggagctgcctagagataaagaactcgtgaatggcagcagtaacctccgacccaataacgctccaggactctctaaaaaattcaaccggatacccgtcaggcccactagatttgttccgcgggagagatttgaaagctgctttgatctcatcatcactaaacagcctttacatctcagtagactgcgcctgagagcacctataggtaagcagcatgttcatgtcatcttgctccaacgagaagggagtctcaacctcacccaacagcctctcataataggccatacaatgatcaataataccttgttgggagtcaatcaccaccccattgcaatcaacaagggactttatggggttaaaacactttctggaatccgccattctatggaaataggaagtattgctatcaccctcagcaaaccaagaaaccctggatctttgatggaagaaactctcctcagcagaggaaagcaaaagccacttacgctgagcctccagttccaaggttgcattgagatcagaggcgttggcaagagtcaggtcttggcgctttaaaaaccactcatgagcctcttttgtacgcagctctataccagaataattgagcctactgaagtctttaataggcttcttgagggctttcagctttttagaaaccctgaacatgtgagacccaaccacgttagttgaataccaattttccataacaacattcaaaaactcctcattattcaacagaaaattatagaacttgaagggacgcttaacactaataccatcagcatccaacacaaccccacaagacacatgatctgagaagtccaaattaccaaagacaccaaagacggaggcggcaccggaagacccatcccgaacaccagaagagacaaaggatgcagcacgagcacagactgctgcgaacttagaagagcttgtgaccaccccacgatgaagtttctttttctttttctttggcattagaacagaaatttttgaccaccgacgtgaggccggcgttggagaaaaagaagcgaaacgagaaaaagaaaggtttttaaaagatattttgaatatagagatcgaatttgatgttgtttctgtcaccaaacgctcagcctaaatcgaagctctacctatctttaagatatctattatctaccatgcatcaactactaggactactctttttttgcgttttattaattatttttttacttatttaattttctataatgtaatcttgtttttcttaacctagctagtatattttattttggtgtggtgaacatccaaattaatatataagaatgtttgaaaaaataatatattaatatcaacgctcattgtttttttataacaaaaaagtaaataaaaaagtagttgctttcgtttagtaacattgcttttctatatagagtttatattatgttgcataatatgaaatgtctgttatccaaataattaaaaaaaatgcactgctcggagccttctaattaaaatactttatacactagacgtatgctaaaaacaccgtattgtcttttacatagagatcatataacaaaaaaatgtatatataattttttcagtatatatgaatatataattataatgatacaataacaaaaaaagccataaaattgatatgggtcaactttccaattttcagtttgtaaaaatatgattatctaacaattttcagttttttgtttttgtttttttcagttgttttgtaacacttccgaagtccgaactatacaaaactaagagtatgccaattgttcggttgtcgaatnnnnnnnnnnnnnnnnnnnnnnnnngaaaaactaaacgtagttgaaaaacaagaaagctaactacagtatgtggattcagtcaaaacttaaacccaaaaaaatccgaagaatcccactaactaaaagagcaaaaca

SEQ ID NO: 3558 - DNA, 627 bp, Arabidopsis thaliana landsberg
tctacgacagaagggtgatctgtgatactcaacagtgagggttttcccgagggaatcgcatggagagaaagcccttgtgtttagttatagggttcccatttacttcatagatctcagatttattaggtattgcttgtgagagcatgcacataagggattcccactggtttcttccgatggaatctcccacgaacactatcctcccgttccgactcctctcaagtaaatcacttgcgttaaatctaaaccattcaatagccaaaaacacaaaaccagtgatcatttaagagaattactaaaacaaggtttcaagtctttttttttaagagaaagcaaaactttctttagtcagaagaaagtgaaccaaaccctaatctctagtgtttagcttgtaacttttgcaatggaatcaatataacttcaggtttaagcaagaaatatattttcgagtttaaagaaaaaggtagagtgatgacgtagcacaatttgttaccgtggaagatcgcagccgtgtggttgccatcgccaatcaagataaccagaatcttttcttccatgcttatgacaacgaaaaccagagtcaagaaagcgacactcttcgccataaaacaatccattaacggatga

SEQ ID NO: 3559 - DNA, 672 bp, Arabidopsis thaliana landsberg
cgggttagcaaagggtgcgaacctgacatcgtgacttatagtattctcataaatagctactgcaaagctaagagagttgatgatggtatgagactttttcgtgagatttcttcgaaaggattgattcctaatacaatcacttataacactcttgtcctagggttttgtcaatcgggaaaacttaacgccgccaaagaactcttccaagagatggtttctcgtggtgtgccaccaagtgttgtaacttatggtattttgctggatggtttgtgtgacaatggtgaactaaataaagcattggagatatttgagaaaatgcagaagagtaggatgactcttggtattggtatctataatatcatcattcacgggatgtgcaatgctagtaaggtcgatgatgcttggagtttattctgtagcctctctgacaaaggagtgaaacctgatgtcgtgacatacaatgtaatgattggaggactatgtaagaaaggctcgttgtctgaagccgatatgctgtttagaaaaatgaaggaggatgggtgtactccggatgattttacgtacaacattcttatcagggcacatcttggaggtagtggtctaatctcttcagttgaactcatagaagaaatgaaggtgtgtgggttctctgcagattcttccaccataaag

SEQ ID NO: 3560 - DNA, 7151 bp, Arabidopsis thaliana landsberg
tccctaagctgactggttttatagagttgggtctcatgactggttgcacttgcttgaagcaaacgtttatatctcagcatatatcttcgattaaggcgagggccactcctcattttgtgagaaaacaaattgggcctacagacttcgtggcgctgcatctggaagtagagcataaggatcccttaatactgggaagaccctttttagcgtcagcgggagcagtgatagatgtcagggaagagaaaataagtctcaaccttggaaagcatatcaagttgcagtttggcatcaacaaaactccacaagggtcaaccgaagatggaagaacctctggaaatgatagagcgatctcaggagaaggatatgagactaaaagagtgaaagaacttagaaagaagtctaataagcagaatgaaactatagagaagctggcccacaccaatgaggaacttaggagtaagctgaatcagatgcagaaggaagctcaacctaaaggcgggattaacactatcccgagaaaagaattcacttcaagatggtctcaagatacagattatcctccagaagagaaggaagcctattttgaagaaagggggattgagtattctgctgcaaacctctccagggaggacgctgaatatgatgatggtatcagagaggattatgctgaccctctctacagttcattttcttcttgataagtgtgaggagtcaagctagagacttaaaacaagctcacttgggaggaagtcccatgactatccttgtaaataatttttactttcttgttatttttgatttgttttagttgtgtttttagttctcaggaatagaggaataacgtgaagctagagtaaaaattcaaaacttttactctacagatggcctagagatcgagtacattggtcgagtatgagtgatgtttaaaacccaaaaaaatttaaatcatcattttactcgaccaacagaagctacagagtcttacagggagtttatcaagtttacagaagattacgggatttcctggagtttttgtagtgaacagagaatacagagaagaaacaaggagacacacgtgggacccaccgctaacgcctatgttcctcatgcagctgacaaaaagacaagaatctatcctcttcttctctactccactcgacctccccttatcccttcactcgatcccgtcgccttctctcttcaaaaactcgacctccccatctctcttcctctcacactcgaccaactccaaaccactcgacctcacaaattgctgcgacactcgatttctcatcaccttctccttcgtccaagcctcatcactcggcctgaaggaatcaccgccgcagctcatctccaatccactagttactcgaccgctgctcccccgcagctccattgattcaccaccacaaccactcgagttctcatcaccattgtcatcctcacaaccttcactcgatctcttcaccaccttcttcataaccgagtcactcgattcagcaaccgaactcgaccgcttcacaccaccgccgcagctcacctcttcaccaaagccacctccgtcttctcttctcccgcgagctccacttcactcgacccctcatcaccatctccttcatcgcctcttcactcgatcgcgtctacacaccatctaccatcactccatctctccccactgaacgcttttcaccatcaagctcaaaaccactcgacctctacgctagagcaatcgctcgacccccttcaccatcaaacgataaaaccgtttcctccttcattcaagcaatcactcgaccgcgcgtctctctctctcgcagccaaagaatcatcaccacttctagttcactcgatcgttccacctccaggccaccaagaaaccactcgactactaattcgcaaaaccgtaaaaaaaattttttttagttctcggttcactcgaccggtttactctgttaggttgtgtttttggttttgctgttactaacgtattaacgtttctatttgagtttcgtctgttttcaggtctcatcatgagtaactacagtggagaatcttctatggaccttgattacaatgtggatgaagctgagtcttggtccgctagaccaagagagcaaaccctattcctaatggtggcgaatctattaaaccatatgaatccttaatgagaaaccctattcctaacaggaaaactactcagacatattgattgaaacaagcaacataactaagtaagaaagcataaacacagcaaataagattagagtatcaaaggatttgttcactctattgggaaatgaatgaatctctgaaaatatggatgaatagcttatgtctctctcgaaacttggtagaaaagaacttaggtctaaacaatgacctctaaaactatatatatgccctataaaaagttcaggaactaataatgcaaatagggaagtcttttggggcaaatttgcacttttataaacttgtaagcgtcatggactttgcttccaagagtgtgtctatccacactctctctcaatctggaactgaaatcgtccttagcttccttctccttagcttttgctccaaaatgtctcctcatttccattgttgtccctcctcacataatacgtgaaaagactctaaaaagattcgagaaataacaaaaagattcaagatcctaaatctaaaacttagatcaaatcagtaaaaacagggttgtatcaacttccccaaacttagcttttgcttgccctcaagcaaacaatcaagaacaagctggaagtgaggttttaaagcggggactcagagccaaagcaccagataaaccagatgaaatcaatgtccaagttgatagttctaagctgcaatatgatcgaattctactcaaaaacgttagccatgctttattatcgatcaatccgactcatatgctcgacctactcatgttttcaaatctaccaatccctttaacattcattagttctagaacatgaatcaagcaatgcatcatcaatgaactcatttggctaacgtaaaggtcaagagacaaagatggtccttacaaaataggcttaagtaacagggatctctcaagaatgattgcgctttaggagaatgctaaaggtaagtcccaagttatgcatacagagataagatcccatctacccagagtataacaatgaagctctaatggtaatcccaactcgagtcccaatacaagaacttaactctaccctttgcactcatgaatctttcaaactctttttcatatcagtcttttcttttctcttaactctaggagaagctttctcaacactctgatacatctagcggatttgaatttctttaacaactaaggttcctgtttttaatctttaaaaccaaaggcttttaacccttcttctttagctaacaagaacctcattcttttctttaacattcccaaaacctttactagatttttttctaacttctttagcttacttcccctagaattctttccctttccttctcatcaatgaattcacccttttcttttagacacatcccaacccaaagtataaccgcccatctagtcctttctaggctgaaaaatgcgaactagaactacatgagacactatctctgtcgttacgaacctaacactttctaccaagcttaatcggaataagacctcacaaacactcacaagtgatatagggcttgaaagaaagtgtaggtttgggttcgggttaactgctctaatagggagagtcagctacttggattaacaagagtgatcaaaatgaataagaaaatccaagtattttagggtatccatcagttcaaatttgatgcagacatgataattaaagatcaaattcaggtccaaattgatagggaatggtatcagatcataacagtgtggtcgagtagagcaatctaggcatggttcagttttacttcaatttcattgactacgcaacagacaactagcaacgagggcactaagtttatccggtgaatcaaaatgcttacaaggctatctcatcatcagcccctatgcatatgcaacaatcctaaatgaaacactctagacttgatcctaaatgtgatgcaactacatgaacactcttttttggtgaaatcattttctgaaatttttcaaatttttttggtttttttaggccttagatgaatgcagactcaaaaatatacacaatgcaacacacacttcctaagccctcccccaaacttaattcacacagtccactgtgtgaataaacttggaagagagtactcaggacaaatcaaatcacagaaacaaaaaatgaagaaacaaatcacaacagatggtataatacaatggtgaagtgagacacgcacctcaatcgaagaatgaacgttgttgctcgtcaatggctgcctctgattgctcccaggccatagacgaaccatcttgttctgtatcagctccagcaggtgggtactcgacctcatcagctctctggcggccagcaccgctctgagtatactcgacctctctccttctgctgcggccagcaccgcggtcgcgtaaactatgagactgtagaagtcgtccgctcctactgctagattgagtgagtgtggtcgtcctcttcctcccagattcacgaggctcgaatgatgaatgcctcgcagggacatgcggaatctcctgctctctaggctcaggcctgcgtcgacttggctcgggcgcgtcatatctcctcgaaggcatgtcctgagggagatgtccctgcggaatagttgtagtggaagaggagcacctgatcttgtccttcagaaacttgatagccctgaagcacttggcgagtaacttgtcctgtttcttgcaccacttctacagcttgttgttgttcctgtgatcttcgctcaaactcttgcttttcctcgaggaaggtatatgctcactgaaatgatacatgcttgtgtccaactccgcctcatctatatcatccgtctcatcaacatcttctgttgtagctccttcggtgtgacttatctcctcagttggcggactgccctcgaaataaagatcttgaagcgcaggcttcaagtcaatgttcttgccctcgagaatcctagtagcgtcaatgcaggggagaagaatgttggcgattctaatcgatgaatgctcgaacctgtagcggtgaaggtcgccagccatgtcaaactccaagaactcacatcggcgcaaatgatccaagtccatcatcctcggtgctaaccctggttccttgaggggtactccacaagcttccagaattggcgtcacaatgccacccacgcatagtgctcctctcaccttcttcttcccgttcgtcaacgcccacttcctgtatccacacagatggatcaacagaggcattactggtggtgcgttgttgagatcgcctctcaagacattcttccacttcgtccggcggagaatccctgtaagcgcataatctatcatctccatgtccgtgttagacacggtgtctgtagactccctggagtaaaagacgttggcaaccgatctctgaaagtagcggatcacaggactccggatttggttgctcttggaccgcgccgagtttagcggtagattgttccctatagtggcccataaatccttaagcttttctctgtcaaatctgggtttggttccctttccactagggaaaccaaatagttcttccaacttcttgatcgatagctgatatcgctgttcattcactgagaacgtcaagaagcctaaccccatggtatccagctcaaagtttgtgagtgcctcatacatctccacttgcagcgtggaaagaaactcgattgtctcccccttataggcagggtaagggtaagacatgagtgtctccagatgacacttctcgaacagatgctgtacgtcctccagtaaccccagctgggctaaagtctcataacacggatacctcgttctccagaagtcattcatctcaaagaatctgatatactcctccactgtaacctcgttgggtttgttcagcagcttcgtctccttgcaccatgactttggctcatactcagtttcgatgtcctcatcgatcagctcatatctactcgacatcgctctctttcctctagcgattttagctcttctctgattacgtcgtgctgcggagcgctcaaattcttctataaaactctcgtaaacgtgttcttctctctcttgtctagtggaccaagactctgcttcatctacgttataatcaggatccattgaggattctccactgtagttactcatgatgaaacctgaaaacaaatgaaactcaaggataaacattaatacgttagtcttaacaaaccaaaaacacaaaccggtcgactgatgtgatcgagtaaaccgtcggttttgatttttttttttttcttttctttcggttgatcaagtgattttgtatggtcgagtgcagctagtttcgtggttagagtgaggcggtggtcgagtggtgagcttgaagaggaggagagcagttgcggtttgaccgtggaaatagaggagcagtcgagtggtgtcgctttggcggtgaatcgagtgaacttggcgaagtcgtgtgatgagtggacttgagagatgagagaatgatggcactttggtcgagtggttatgagctagaagtagtgaaggcggcttggtgatagaggtcgagtgaatgaaatggcgaggtcaagttgtttccttggagagagggagcaagcggtcatgatggagaggcgaagagagttgtggccgagtgaaattgagacgattgagaggtggcggtggtgaagagtggtcgagtggtgaggcgatgaagaagatgatgatgaggagtcgagtgaagttgttgaagttggagaatgatgaagtcgagtgatggaaacgaacacttgaagacttgaattgcagtgaacggtgatgagagatgagagagttgcgaaaagtttggtgtgtggagaggagtgttgaggtcgagtatatgaagaggatggtgaggaggagatgtcgaggtcgagtaaaggaggtaagggagcgttgattcaagagggatggggtcgagtggttgagagaagaaagatgagagtttggtttgttggtggtgatgaatgaagagggatggggtcgagtt

SEQ ID NO: 3561 - DNA, 1713 bp, Arabidopsis thaliana landsberg
tttcttaatggttaagggaattttttattttcccttaaacatatgcgttttttccaatctaaaatgtggagagtatatttttatttatatatatatgagtgacccctgcgtgagacaacggccactgaacactatcgatctaatcttttcagctctctccatcgtcgtcgtatctgtgactctcgtgatcatcgcctgaaaaaaatttgagataatggccagaaagttcttcgtcggaggcaactggaaatgtgtaagtgatctttaccttctattgcgcaccttattattagtcttgtcacttgatccttccccgatcaagtcaaagagatcggaaaatcccgatcttaagatctaaggtttttttcattatttgtagcggtggaatttgaattgtaatgcatatggttcagatttgtcgattctatgccggatcttagttgtttttttttgtcaaaattttgagtaggaatttttcttcaattgatatctcgtgttctagctttggtggatccgtgtgttaattttgttggttaaactattttaacatgttaatatttgaatttgtaatcttatatagaacggaactgctgaggaggtgaagaagattgtgaacactcttaatgaagctcaggttccttcacaggatgttgtaggtatgtgtagcatctcaattgctttgacgacattatggcttttttttaatttccatgtctatgaaatcttaagtagtgacaaatattttgggcatacaattacaaacctgtttcaatgtacatcgatgttctatagtgtttatgcttcttaggaaccatggatagatctagtgtttgttgttagttaaaatgttctttatcatctacttgttatggttctatctttgttgatagttataagtatgtttgttcttgtatttaaaaatttgatgaaattttactaaatgcagaggttgtggttagccctccatatgtttttcttcccctggttaagagcacattgaggtctgacttttttgttgcggcacaaaactgttgggttaagaaaggaggtgctttcactggtgaagtgaggtgagattctaaccattggtgtatactttaagctgttttaccattattgcttcatgcagtaaatatttatggttttgaaaatgaatatgattgtgtttataaacgaatcgatttttccatctgttcttcttctttatcttctttcctataagaattgtgtaacctaagtgattaagaaaaaaactagtagttggtagtaagaccatgattggattcgtgcctggttagacaagtaggtgtaatatgatttacctgtctattgaatgctttcataggaagaaaagatatattctgtggtgcctgtatttcctgctcttatgcattgtgtaatttgtgtgttttagtgcggagatgcttgtgaacttggatattccatgggttatccttggtcactctgaaaggagggcaatccttaatgaatcaagcgaggttggtgactttacatgataaaataattttctggagactcaaatagcttttaaattcatgattttggtttttgacctctatcctacatttgtagttcgtcggagacaaggttgcctatgcacttgctcaaggtttgaaagtgattgcttgtgttggtgagactcttgaggagcgggaagctggatcgaccatggatgttgtggctcccagacca

SEQ ID NO: 3562 - DNA, 490 bp, Arabidopsis thaliana landsberg
gaatctccaagagacagattactgaaacggaaactttttaagcagtatcttattttctccagtatggtttgcttttgagcaacactgatcttcaattctcttgtacttcagctccagtaaatgagatggagaagcactgtaatatcgaaatagcagctcaagtatcccgtgtggcttctagtgaaaatagtatgcattctaactttaaacatcgaagtgatcttggtgtattctttgtctcctttgtcacatttaattgtaaattgaaagacttttccatattttggtagatggagacaaaaattattatcacatggaaggattgatggaaagtcctggggtaggcgatgacggagattgtttttcccctttgttactgaacgcaacttcttgtaatgttgaagtctactataacaaagctgtgaactatacactgatggtcacttttgtatcctttactgaaaagtcgtttactctttcataatagaat

SEQ ID NO: 3563 - DNA, 1732 bp, Arabidopsis thaliana landsberg
atttcccaagcttaatcactatttaactttgacatagttaattgatagtctttgtatttttttttaaaagttataccttctgtttttttgttttttcatagatgagagagtgaaaaaacaatttttgaagatactggttcagactacaatgtcagtgttatggttttcgtatcaacaaactcattccacaaagaaacccaaccaaaaccagttatgaagctttttatgtattaaagtggccaacagactaaaaagccgtcgatatagaaactgcagaagaagatggtaacaataatgaaaggcgagagattcaataggacttcacaaaggagctattttggtataacatatagattgaattttccaaaaatttgaagagaagaatctatacaatccgtaagaggagaagaggaaagggacctgaagcaggcgactttggcatctcaacctcaacgtctttgtatctgttgtctgtaagttacaacaaaaacaaagctcagtttcagaatattaaaccatgtgagctttttctttttaagttaactcatctctccttttccctttcactttcagtgttactgaatgtgttcataaccatataattactattatatctctttaaatagtgcggattgtaattatacttccggttcttctgctgcgtcctccagtagcaggctagtgccccaaatgcgcagcttgcaagtgctatggccaatgcagctcccactggcacaaccagagcattggtcggtactgccatctcttctgcagctgcaataacctcctccttgctcacactctcaccatttttcttgtaaacagacaccagtttctgtccatagtacttcttcaagaacttgtagacttgatcatgatcccagtcaatgtttttctcggtgctcgaaagataacacgacgggcaaagctgctttggtggccatatcatctttgggaacttggggtctcctgttcccagagaatcttcgtccttcttgagtctctcattgaccttattgtgtgtgctccacagccacagcgcaatatcacgtgcctttttaaatggagttttgacgctgttagtgaaacacataagctgttagatgtgataatcgagcttgttagccaacccccagatatgtctttaccttaagcacatgtcgtgaaaatgccgacggcaatcatcacacatgaagaagttgttgatgaaatcacaaatggccgtgaatgcaaactgactttctccatcctcaatcctcacggaaagtgaatgcatcaaaacccataatccgcagctgcagccaaaatattttgataagagttcaggagcttctgcttgaattatatgatatatgacaacagattaattttgcagaagactacctgaatcccctcgtttcgtttttgctgccacggcaaaacctctgccaaagtatgattacgtacagaaagcaggagaatcagatttctgtgtttaagcacacgaaaaaagaaagtggttggttgggtggcactcacgtagtatccacgcggaacatcctttccacatatatggaagtttcgaagggaatctttcgctccagattcctggtcatacgagcattcgcctgacgggcatatatcatcaaaattcacaagaatttcagcacttcccgtacggcacctatagaaattttcagcttttgattagcatgagagaaaagagtgagcagcagatcgtaaatggaaatat

SEQ ID NO: 3564 - DNA, 5832 bp, Arabidopsis thaliana landsberg
agctcattccttttgaatccacagcggtgtggtgtgaaatttccacaacgttctaaagaagcacccctgatgcttgaaccaccacctccagtgacacagtcttcttcctcttcttctatgaatttaatgtccattggctcatttagaaggcttgacgaaactatggctacagaaattgagagcttaaggtaagcttttttctttctttctttcgcaaacaaccaatcatttctaaccttaattatttttagttacttgcattgttgattgattgtttcagcttatcaagccttgaatccatgagaaatgtgatggatcttgtgaatgacatggttcaagccgttaatccttctgataaatcagtatgtgtggaattaatcactctgtttcaacaatacttaaatctctctaataatatctctggtttggtaaaatatatcatttttcatatgcaggccttaaaagatgagctaatagttgatctagtagagcagtgcagatctaatcagaagaaactaatccagatgctcactacaactgcgtctgtcttctccacctttctctactacatcttcttcttcttcagctttacttgttcttcttaccaataagacatctgttctgccttcttcttgcctgcagggacgaggatgttctggcacgtggtctcgagctgaatgactctttgcaggtagtgctcgctagacacgacgctattgcctctggcgtctctcttcctttgttgttgcaggccccagagccaagagagacaagctcttccctcaagacttgtggtgctgctgctcttgagtctgctgactctgagtcttcttcatcatcatcgagcagtgaaagtgaaacagatgaagtggaggatgttaaagatgactttatacagctagccaaaaggttaaccattcactcactaactcaaacacactagtaccttgccagtcacaaactagtttatagacgacattctcgaatttgcaggcatgctctattaaatgccctacacagcgatgaagaagaagaaacattgcttctaggcaacgacaatgaaaaaacagcagaagcagaagccaagacacagtgcaaagatctagctttgttcgacacaacaacaacaacaacaacaacaaccaccaagtcagagcaggatattattgaacttctcagcctaactctgtcaacaactgctctgccctccccacaaacgcaaccgcagacgcagcacccatcgttttttgctgatgataatattcttatgaacagctacgttgtcccctgggcacagtcccaagaagaaccacaagtcccaaaaatgactcagtttgctccatcaggacctcagtttcagccatggcctctgcagcagcaacaaccgtattcatacggttatcctcagccacaatggagcggtggccaagtaaacagtaatgacacaacattctggagccaaggaggcaatgagaatatggtctttgagagaaacttgcaagtctcaaactcatttcctgctagagccacgggcacatccggtgctgctactgcggctacagtggacgggcagccgcagaggccatatgttcctccatacaaattgtttgaagatcttaacgttttccggaacacagatgggggcgttaggagtagcaaataaatatgttgtaattaggatataataattccaaaagacattcaaattctattagaaattgacaaagataactaataagactttcaaagtgaggcaaaaatctttggaaacataatatatttgataaggaataaatagttgaagttgacacagaatgactactatttacaaagcatttacatgcgtaaattctatttggcaaagcctcctcaattagttttgcttggatcttctcatcggaggctagttaatcaattctataaataacacctaattttaccccaactccatattcactttgcatttgattaacttactagttgtcatgatctatcttggtaattgtgtgttgtggtgggtgtataaggagacgaaggagccagcagcccctgcggctaacaacatctggtaagggtgaaaggcgaggcaactgactgggccaatctgttggcccatgaaggaagtgtggtactttatgatcccaagttgctctcctttaaggctgaacacttttattagctgttttgctgacccgctcgctatgattggagcatgtctatgaacacccaatgctgtcagtgatcctctatgcgcgtctatagtcaggtatgtctcctttggtcttctcagatccagaaactgaatgtcacctgcttgtgatgcgctcacaatctgagacaacaaacatgtcaagtgagtaactaaatgccttttgtactgactggcgagaatcagagatttgggtgtgtaacctttgctggatcgagtccaggctgaaagctgagtccaactactttttctactcgctgatgaggccgagtggcgcacacaagactatacattggagaagtgagatttcttctactcttgaactaataatctttgttactatgtttaaaatccaaaggtgagagaattaaacaagctctctaaggtaacttacaagtcaggtgtgcgaacgtcgtagagtcttacagatccatccgcaaaaccagcagcaagttgactcccatgcacttgagaagccgactgcaaataaacacacacatacaaataaagagactcatcaagcaagatccgactagtccttgagatcctgtcttcatttagacgaaaagaagatctagatagtatctatttgtaacacagatatccaagtttgcatatgctggcttacaagggctgtgacgctgcacccggattcaaagggcatagatttgacgagctgttctttatccaggtcccaaaccatgattgataacgattccccagaaacatactgtagacaccaataatgcgtcaaatacaaagtagataagtttcacaactccaaatataaaatgatagcatgttgttaatggagtggccatataccaggtaacctgactgttgttgccagtccacgacagcgttcaggccacttgcaccaggcttctgactttggattgacgaaaaccctgtgacaagtttttgtctaccctttgttgcgtagtctttccatatacggactgatccatcgcctacatgagatttcagaaccacaagtaagagcttttaacagccatactcaatcaataactaacttgcaaaagacgctctggaaagagttggaacattacaagaggcaacaagtagcagcgagtcatcaagttcattgacaaggcagagatttgaaattcctttgtcaggaaaatcgttattgtcaaagccattaagaagagttgcttcctcgtaattccacaccctgacaggaaagacagctaaacttagagtccaagtgtccaacagaggcaattaagtcaaaaagcagtttttagatgaggtatttgagtgaatgagggatttcaagataaagcattttataaatgatggcactaaatagatagcactgatcaacatgtgtcgtcatctagaaatggttttacaacttcgtgcacctaaatacctggtgtaaaaaattagcttgtatttggccttacagagggctaccgccaaccggattacatattgttggtttgaagtctataattttagttaaggtaagaaatttttgcatacctaatccgttcattctcatcggcagcaactacaataggagaaaaagggtgaaggagggccgtctttgttcccgtttcaaactttgtatcccaattagcaatcggaatattgctgagcccgcttattgctgatcgatgacaaaagaaggttgtgatacagttcaagtaactagtatagatatagaacaagtcaaaagatacacagataaaaataacttacatgaatgctggcattttgcaatatgctccaacaaaaacttttctttttcttctctttgggctgctatctcttcattagcatctgctccgccaagaagaggtttagaaaagtgaccacagctccagttgtagatagttgattgtggaagcaaactccgttcagacccgcttacacctaaaatcggatcagccaatccagagtcgggagaacccagcagatgaggtcggagctctagcgaacaaactctcctcagtccagttaaatagcttgtttgcggagggcttaccggaggagtcctaaatgttaacggtaggtggcctgtcaacataaatttcatggttaagttacttagaagtttataatggacaaaaacttcaagattcacatcaaatgatgatttaaaaacactgcataaccaacttacctgtatgcatgtcaaaccaagaggatgagcgaactaggccagccagaggagtgtgagatgctgatgctgcttcacctggtcggccattggacttggagggtttcgcaacaatttgttcaatcccaataacagaaagcacacgccgcccaaggcttgcaatacgtggagatggatctttagctaaggtaaacatagctagaacactctgcgaatagatagcattatccagcggtcttggctgatggacaactccattgctgacaccatcatggatgattccaacatcagaatgcaaggaggagtcatcagctaatggagatccttgcattagcccggaaaaaggttcttggaggctgcttgagatccttccttcacgagccactggttggctatcagggctagctctagtcagagaacccatgtctgaagaagcaactattgaagtcccagagtcatgaaacttggccattgaagggagagaagttcgcagagaattttggggcttccagtatgaagctgcaactgactttagatgttgtttgtgtccaaaggcaaaccgtgcgagagctgtgagacaataacaacatgttgagactattcagaatatacaatccaagcattagtttcaagctttctaagcggaagagatattagttaaaaaggttattaattttagttaatatagacactagagatcatataatacgactaaacatgtagtttatttttcctttgaacttgatgacacatgatgcaaataatgctacaattaagcatgatgatcaaacgtcaacatgttttgcatacctacagcaacctctgttcggacaagcgggctcccatctgaaactacatctaagagactttttatgataatatcttcaactatattttcatcatcatcaaattcttcatcacaaacacctttaccagagtcaaacccaacatcaagtaaggtacccaaggcaaaaacagcagcagccctgacctgcaagagattggtgtggccagcaattagactgctatttcaaagcaaaaacaaatactgaaatcttataagttagctaagcttctggcgaagcaccacctctggttgggcctcggaaagcagaggtatcaacttctcagaagcatttgcctccctacccattatctgggcctccaaatagtcctcccacaactttccaagacaaagacaaagccattgtagaaacaatggttctggcggtggatcacatagttgggttgcttcgaggtgccccagacaaacagcaattaaattagcttcaagacatgattcttggcctcgtttgtagccattgacaataacagccaaaataaacgcagccatagcacgttgttctgggaatgcatcagaactatctaaaaatccaatgaaacatatgtggccccggtccttcacaaaatcaaaaagacaggactatataaaaaaaaaaaaaaatctctcgac

SEQ ID NO: 3565 - DNA, 5486 bp, Arabidopsis thaliana landsberg
ctatgtggtatctgacctcaatgcacaaataagttagtcacaaactatggaattcagcatattaaaaactgttcgtattgacatctgcttcctatttagtgaaaagtaactgaggcccaagttttactagtccaagattaaaataattcatgtaagagtggtccagattacagttgagacagaacctcagagcaaaaaaggaatctgcacaagcttctgtgaaattcagaagaaagcaattgaaaatgtaattacctcagtaggcatcaaaacaacaggatggcaaacagaaccagaacccacatctaggacgatggcagtgaactcatatgcatcttcaataaacacctcaacaacaactctatcatcaattccctatccaaaaaaaaagaaggaaagaaaacttactgcctgtaaagaaatagtttgcaatcctccaaaaatacagattttctagtttcgagaaatagagatctccattcctcatttccaagtgtctagttatattgtccaagtctcaaaacaaataatacctctagaataagttcagtagcctttttaattgaatcatttacgccaaaagcaaccttgacaccaatgcttgaacctgctttagctggttttacctgaaacagacaaacgtgaagagagaaaaaaaaaaagtgaaataaatgaggagggatctctaggcaacatttctatgaccaggctgagaaatggggagatgccttaccacaactttttccatctcgagatccagctggttatctgtaaaccacagtgctatttcacttttgtccactccagttccctgagcaaggatttgtgtttaggaaatatatcactagctcgaaatttgagtgcatgtatagataagattttcatatacaatgaagagggaattgaatgcaataaagagacatgcctgcatagacaataatacaatatactacatgcaccaagtagtttggtactgtcatgaaaccaagttccttgagctccaaagaggcttcatactggaataagttcactaaaaataatcagaactatactaagacagatgaagaagaatatcaaacaacacaatgagagctagctaattaaaatgtaatgaatatctgatacaccagttcatccacagactctttctatttaccttgtcaaatgctcgaaaacattcacgggatccagtccccacaaatggaatgttgtgactttccaacagctcctacatagccaataatcaatgatatttaaggtctcgtaacataagtacttccaatagaaaataaaatttataaggacttgtccaaacaaaaaaacctgaatgcccccatcttcaccaaatcgaccatgaattactggaaaaacaatgtccacagcagaaacaagatgctcggccaattcggataatgacgagaatccctgtgcaagactacagtatgaaacaaactagccactcagctaatttggtcactgctattgtcccataaccaatttttcaaaccgttcatatcatacacctcacctctccagcttaaaatcgaaatctgaaggagtattcgagtacacctgaaatttttcacaaacaataaaagaaagaatgagtaagagatacataaagcagaattgttcaaaatgcctaatacaacgctgcaaacctgagcggatgaaattgcaaaggctttgagatcaggatctatataatagcagctcacgtttataccatcaccctgatgaaaaaccatccaacacaattgaaactcaatttcaaaccagacggattaaatggagccagaaaatacacaaatccaaagctcaattgatcatgggaaaacggaaaataacctgaatatgatcgagaactgatctagcagagttgagagaaatcccgcgctccgccgacggacctccgcaaatgagtcccaccctcagactcttactcatctcttgtccgtaaccgacagccttcgagacggttcgtatagctccggatccccgatacttattcatccccaaaagcatgcatgtactctcgctcagtgagttcttctgattcagcttcagagttgtccgtgcagccgtcgctactcgatgaacatcgtatcctccttctcctatgccgctagtcatcgaaaaactgacgccggtcgccatggacgccatctccaaaggaagcttaattctccgtacaataatctttacacctccttgaggaactttttatttttttcatcgtcagtcagaactcacaagtcagtaaaacagtcatcgaaacaaaaagctttcatttgttgcacgcgggagagctttgctttgcacgtgtcagtaaaaaatgtcctaacggatttttgttcgtagattttgttattaaccaaaatgataaagatcgtcattcattatgattgttaatgattgttagtcatctctttattgataaccaaagaaatcctagtgagtgatcagatttttcgataattacttggattctgacataaactggtatttgaccaatcatagagatgcgtagcatgaaaaattgcaagcctatttccaacggatcccaacttgaacaaacaacagacaacatttcaaagcatcgtcacgaaaatgcaaattttcttccaccattacttttaccattttttttacacatgaaacaaattaggaaacagaatgacttaaaagattaataaaaaggaaatcacacacccaagagatgagaaaatgaaaagcaaaacagggaaactatttacagacaccatttacgtgcgttgttgcataggtagagatataacttatttggtgaagcctccttctttagtgttaacttagatcttgttttatcttggacggaggctaacgaatactataaaccacacccactttaccccgacccaaaaccgacccgacctgcactgatttatgcttttctttttatcacaagagcaatgctaaatgcaacatattcacttacggttgtgactcatcttgcttgcgagttgtcgtgggtgtatatggagacaaatgagtcagcagctccagctgctagcagaacctggtacggatgaaatgtgaggcaactcactgatccaatcttttgagccatgaaggatgggtagtagcggattatccctagttgttccccttgaagactgaatactttaatgagctgttttgcagatccactcgcgattattggagcgtgtctgtgaacagctaaggccgtgagtgaacccctgtgtgcatcaatcgtcaggtatgtgtcccttgttgttctaaggtcaagaaactgtatgtcacccgcctgtgatgcactcaccacctgaagataagaacagaatagatattggccccaggaaaacgacaaagagttgagaaactcttgagaattaaaaaccaaaccaagacgaaattcttcaaacccgaaccaatatatgctataaaaaaaggtatgaaagctgacagttcatagatcaattttggtttgcaacctttgcggggtcaagtccaggttgaaaactgaggccaaccaccctttcaactttctgatgaggccgagtcgcgcagacaagccttcaatagaagaaatgatattaagtgatgtattcaaaaatattttttggtgctctcattttagattattttgaggagttctgttaaagaatgaacattaaagtttaaaccaacttacggttcaggtgaccgaacatcatagagtctcaaagatccatcagcaaaaccagcagcgagttggcctccgtgcacttgagaagcagactacaaagataacataaagtaagcaatattcacatgttttgtaattcaaaaatgttttgatcaaggaaaagcatgataaccatgaacttacaaaacaacaaaaagaactataagacgatagcttatgcatactatctcttcgattcatcagattgtagcaaatgatgacatcctagagcatttctatgttttaaacagaaggttgttcatgcagacttacaagtgctgtaactccacattctgattcagagggaacagatctgacaagctgttctttctccaggtcccaaagtgtgactgttgacgtctccccagaagcatactgttaaataccagtaacccgtaaataacaataaatcaagcttcgtaacttggaaaactaagaagaaatatcgtgcatagcatgattgaagaaatcacaaaccaggtaaccggactgttgttgccagtccacgacagcgttcaagtcacgggcaccgggcttgtgaccctggattgaagaaaacccagtaacaagcttttgtttacccttagttgcatagtttttccatatccggaccgacccatcgcctacccaaatcccaaaagcatgtgtaagacatagataccattactcaacacccatattcaatcaacttgcaaacatctgaaagacttggtggcaagagttgtgaacattacatgatgcaacaagtagcagagagtcgtcaagttcattgatgaggcagagctttgaaattcctttgtcaggaaaatcatgattgtcaaagccattgagaagagttgcttcctcatagttccacactctaagagaaataaagtgaaatacttagtgcagttaaggcttctcgataaaaagaggtcccaagagagaacatcaaagtttaagataagtttcaaagggaagctttttctaaatgactaaactaaaccgagacctaatccaatagattgggaactaccctgtacttttcctaacagagggttaacctgaatgcaagaagttgttctaacattcaattttaacgatgctctgatgaaactcgcatacctgatccgttcattctcgtctgcagcaactacaataggagagaatgggtgaaggagggctgtctttgttcccgtttcaaaccttgtatcccagttggcaataggattattgttgagcttgctaatagctggtcaaggtaaaatgtaggaagtcaattcaggcgactagtataggtatagaacaaaccagagataacagacaaaactatttacaagagtgctggcattttgcaatatgctcaagtgcgaatttttctttctcttctcttttggctgcaatctcttgactagcatccgcaccaccaagaagtggcttagaaaagtgcccacaactccagccgtagatagttgatagtggaagcaaactccgttcagatccactggcgcctaaaagcggatcagccaatcctgagtcgggtgaacccaatagatgaggcctgaactctaatgaacaaactctcctcaatccactcacgtagtttgttataggggggctgaccgggggagtcctaaaacttaaaggcagattacctgtcgtcaacaacagtgtaggagtagaattcactaacatttcaagaatgaacagcattcttaaattacgcaaaactttgaaaaattctgcatcaagatatgatcataaaacacttcataaacag

SEQ ID NO: 3566 - DNA, 1548 bp, Arabidopsis thaliana landsberg
aacgagctatggctgcttttgttctggctgtcattgtggatggacatcgacgaggccaggaagcatgtcttgaagctaatttaattggtgtttgtctcgggcaccttgaagcatccagaccaagtgatccacaaccagaaccattgtttctacaatggctttgtctttgtcttggaaagttatgggaagattttatggaggcccaaataatgggcagggaggcaaatgcttttgaaaagttggcacctctgctttccgagccccaacctgaggtgaagttcagatttctgtataacgtccttcgtgtagaagtgtacgttctgaccataacattctcttgtaggtaagggctgctgcagtttttgccctgggtaccttgcttgatattgggtttgactctaataaaagtgtggtggaggatgaatttgatgatgatgaaaagattagagccgaagacgctatcattaaaagtctcttagatgtagtttcagatgggagtccacttgtccgagcagaggttgccgtaggtacgcaaagcatgcaactcttgaaaattcatgttcgtggaaccatgggttcctaattagcatcagagtcatttaacgtcaaaagtaaaacaattctaacctaacaagattattttaaactagatacatctgtacatttttttcttgatttatcatttgcccaatttcatgaatccagtttacttagaaatccatatttatttgatgcgttagttttagagaatgacattttagctcgatacaatcttaaaatcatattgtccctcgtttagagagtttatatagagttttgtgcatttccaaatgtttgtctttgttcattctacatatacatcttgaagcgtagcttgcttacttttacttttttttctttctatttgatcccctagtcgctctgttgtttatgtctttacagctcttgcacgttttgcctttggccacaaacagcaccttaagttagccgcagcttcatattggaagcctcagtcaagttctttgcttacttctctaccttcaatagctaaattccatgatcctgggagtgcaacaattgtttctttacacatgagtcctctgactagagctagcacggatagccaaccagtggctcgtgagtctaggatctcaagcagccctcttggctcctctgggctgatgcaaggatctccattatctgatgattcttcgttacattctgattctggaatgatgcatgacagtgtcagcaatggagcggtccatcagccaagactgttggataatgctgtttattcgcagtgcgtccgagctatgtttgcattagctaaagatccatctccacgtattgcaagtctcggacggcgtgtgctttctattattggaatcgaacaggttgttgcgaaaccctcgaagcccactggccgaccaggggaagctgcaacgacatcttacactccacttgctggcctagctcgttcatcctaaatggtttgatatgcatgcaggtagctgtttatgagtgtgttatgatcataacttgatg

SEQ ID NO: 3567 - DNA, 1249 bp, Arabidopsis thaliana landsberg
tgcctttcatttatgttcatccggatctgtgcagttttgtttagctttcagctttcacagaggcttttctttgcaggttctgcagacgttctcttctgaaagaatttatagatgaatcacttattgatagaattcccggtcgccaaaatgaccgtaaaacattgttaggagagttgaactggatcttcactgcagtcacagacaccattgcctggaatgtgcttccacgcggtacttcccaaactttccccctaatgaatcaatgcaaaattgttgacaaaaaatagtatcaagaccaaactctcaagtttgacttcttgtttgttttctccattcctcatgaagttagttttaccccacagaacttttccagagattattcagacaggacttgttggttgctagccttttccgaaatttcttactagctgagaggataatgcggtccggaaattgtaccccaatatcacatcctatgctacctcctacgcatcagcatcatatgtggtattggacgttatccctagtttgcattttgatgaattgtgtgtctgagctctttacctctgctaatagctgttttccagggatgcatgggacatggctgctgaaatctgcctttctcagcttcctcaattttttctggacccaaatacggagtttcaggtttgttttgtccattattatatttccttgtaattgtatgatttggtatgatgtctgtcttgttgataatgcttgttactctcctttatctagccaagttcatttttcactgagcaactgacagcttttgaggtctggctggatcatggatctgagcataagaagccaccagagcagttacctattgttcttcaggtgccacctgaaccctaaatttacccctcctgtgttttaaaagaaggcccctatcttatggtccatgagaaactattcatatctatttgtcattcatcgacactgcttctttcttattgatgatctagggagcaatcactggcttcattcttcctcttccatctaatatctatatatatcctaccatcttagcttacttggaatctgattcgtatcaggtcttacttagccagtgccatcggtatcgtgctctggtgcttcttggaagatttcttgatatgggtccttgggctgtcgatttggtacctctaatgccttgaagccctgttttcccttgttcttagacatttcctctcccatgttatcttgagtgaagtccttacttgat

SEQ ID NO: 3568 - DNA, 2768 bp, Arabidopsis thaliana landsberg
  unsure (1)..(2768): unsure at all n locations
aaggtaaagtttgtccaaactaaaagaaagaaaaactgttttactacaataattctgacttttaagctgagactgattagagtttagagtctttagactgagaaaacaaaacattacagaagagaaacagagcaaaaacaggagacattccacattgagaacgtctcaattatctttgtgtcacattccacattatgaaagttccaatcccatcgatcatctgttgtttaattccatatacccttcgaaagttaattggttcgctcaaaatttctcagtgaatttaaagccaccaaaactacagtttcatttgcataagattctactacaccatgttcgagaatccaattattagtattatataatgataatactatcaatttcctcttttgaccgacgaccaaaatttcgaaactagtgaacgacgcatgcatgaactaaccctatcatagttttaccaaaaaaaagcaaaataactaatctatttcttttgtcaacattaaagttttgttcaaaattcttttgatttttcaaccaatcaaaactaacctatcaaaaacattttgaacccgtgtattggggatatatgttatccgattaggattagtacaatatctttgatgatagagtttctaacctatattttagggatttatgtttatttcttgatagagatcattgtatataaataccatagtttgtgaatcaataaaatcaagtcagttcaataccttattctacatggtatcagagcagtcgatctttgtggatcataattaaagcttccgcattatagtttttgtaatcaagaaaagattatgaagatggtgatcactgaaggagaagacggtgcctccgacggtggaaatgaaaacgacgaagatgtcggcatgttaagggatggaggttacgtgattgttttttaatcacatgggtattatttttccaaaactttaagtcgttgtttttctatgtttttaataggattggttttggttttttctttttctttttatgttactggaattattcttgagttaagaaattttcagagtttttgtgttcttagtaagagagtttggtaatagttttaccgttacgggggagtttggttatggtttagccattagtagagtttgtggaacattcatgtttttaggtcatgtttagtcccgagttatagaccgtccaagataaagatgattgtttgtggagcagcataatttgcgtacacgggatgtattcccttttaccaagaccgaagacatgatgaagttccaccccaagaatgaagtttataccctaagatgtttatttacatgatttgtccgtcctcgacatattgtccacgacatgcgtgttccgctttgtgattgcaaagtttgcgttttgcgtaccacgtttgtcgtgcgggggagtattggggatatatgtaatccgattaggattcgtacaatatctttggtgatagagtttataacctatattttagggatttatgtttatctcttgatagagatcattgtgtataaattccaatagtttgtgaatcaataaaatcaacagagttttgatatcttattctacactagactaaacacgtgagatacacattaacgtaatctttttgcctagctagaatataattagattggtatgtgttgaagttgtgttagtaaaatcaatgaatcatgctagaaaagaaaccttgcatacgtaaaaaaagttcacacaaagagtgatcaatgccattcttctttagactcatatttaaaggattggaagaaaaccacattcttgattatcaaatggccatcactctactaccattacgtattcgtgcctcccttcttatcattatattcgctctcacttgtccaaaggaatgcacctcgcattcccgacttacgctaagaaccaaaacccaagaatcatcgaaaatcaaaatcggttacttgcattccaagtcaacccccgcttctcgcctagataacttgtggaccgtctcacatgtcactcctattccgaatccagcagcattccttgcaaatatttctatcggcaatccacctgtcccgcaactcttactcatagatacaggtagtgacctaacttggatccaatgtcttccctgcaaatgttaccctcaaacaatcccttttttccacccttcaagatcttccacttaccgtaacgcttcctgtgagtccgcaccacacgccatgccccaaatctttcgcgacgaaaagactggaaactgcctatatcacctacgctaccgcgacttttctaacaccagaggcattttagctgaagaaaaactcacatttcaaacatctgacgacggtttaatctctaaacaaaacattgttttcggatgcggacaagataannnnnnnnnnnnnnnnnnnnnnnnnnnnnnnnnnnnnnnnnnnnnnnnnntctccatagtaacccgcaatttcggctctaagttctcgtactgcttcggcagcctaaccaatccgacttaccctcacaacattctaatcctcggaaacggcgccaaaatcgaaggcgatccaacacctttacaaatattccaagaccgttactaccttgacctccaagcaatctcctttggagagaaacttctcgatatcgaaccagaaattttccagagatatcggtccaaggaggcacggtcatcgnnnnnnnnnnnnnnnnnnnttctagccagagaagctacgaaactctctctgaagaattgatttcttctaggagagttc

SEQ ID NO: 3569 - DNA, 2703 bp, Arabidopsis thaliana landsberg
gtagtttgtaaggtggttgttggtttctcatgatgcattttttgacaaaattacaggaaaatatgacgcggatgctgatggtcacagatgttcaagacatcataaagaagcatcagtctcagataatcacctccttgaaagaccctgacatcaggttggtttagatttgccatctaagcatcagcttttctggcttgtgaacccggatcagtatctcgttactgttctaatttggaaccagtacgacagtttttcaatcatcaaatctgtcttagttcttatgatttaatataccgttttttactttgtctctatagtagttgtgaataagattatttctgtcagcattaaaattatttgatttgggtagtatatatgaaattttaagaaaatgggatctatattttttagtgaaacattatttgttgatttgttttcttgtgataagctataggtataattatatgtggtatacggtcacataagaaatattatattattatattattggccggtgggtcagcactatttcgatgacgtttgttagtaaaagatggataagtaccacagtccattatgtcttgatcttatttccattgcaaatggtggcttccgttttacaaacatatagtttgatttatcatctcttggttcttttgcttatggtgtcagattcactattggttgaactttcctgcagtattcgtaggcgtgctcttgatttattatatgggatgtgtgatgtgtcaaatgcaaaggatatagtcgaagagttgctgcaggtaagtctttgaccttactttatattaatatttcttgatttttagtctccttatgatttgtgaagtttaacagaaaggaaggattaagttgtgtagtgtttaagcttacatggaagctaaaaatatattgcagtatcttagcacagcagagttttccatgcgggaagaattatcacttaaagctgctatccttgctgagaagtttgctcctgatctatcatggtgaggataactcgatacgaagtatatgtacacttcattcatgcacacaaatttggttacagtaacatgcattatccatttggtgtgacctttagatccttgcacaatcaactggttaaagatgttaattttgatgttttcaggtatgtcgatgtgatccttcagttgatcgacaaggctggggattttgttagcgatgacatatggtttcgtgtggttcagtttgtaacaaataatgaagacctgcaggtttatataattgttaggaaaaatatattgtttatcctatttatgacattcaaagttgcttacatatttctttgacctgacagccttacgccgcgtcaaaagcaagagaatatttggacaaaatcgcaatacatgagactatggtgaaggttgtacattctcgcttcccataacaaattccttatattgcagataacaccttaaggaaggtttgtttttgttttacaggttaactgtggtggtaaattttatcacttggctgattctattattttgagcaaggcttcctaaagtcagatcattggtctctctctcaagtaacttaggtttgaaaaagcagcttctccagtcagcatcttacccttctcactactcagcaaatccacaaatagaaacgagtcgttgcttcggaagccttgttcaaaatcagagtatcagccatgtgataaaattaacaaccagagttaacatataaaacaaaaacaatccttccttaagttgttgttgcttaatttgggaatttagagttactaccttgctacacatgctgacaaaatcttatctgtatctaaattctttgcaaaatacaaattaacaatgcttataatttctttcggaatttcaggtcagtgcttatattttgggggagtatggtcaccttctagctagacaacctggatgcagtgcaagtgaactctttagcatcttacatgagaagcttcctaaaatatcgtaaggacaacacaaatgttgaattgcgctcttctcgtctttgggtatgtcttaatagctttttttcgttttttttctcaggactcccaccattcctattcttctttccacatatgcaaagcttcttatgcacgctcaacccccggatccagaactgcaaaaaaaagtttgggctgtatttaagaagtgagacttgctaactttgttgtccttcctcaatgttttgcttgtcatcatatgtactgtcttttttggtaaccaaatgaagtttcctaaatgagttttgttttcgcagatatgagagttgtatcgatgtggagatacaacagagggcagttgaatattttgaattgagtaaaaaagggcctgcctttatggatgtattggctgagatgccaaaatttccggagcgccaggtttgtaaaattattttatgattctatgaaagttactttgacgggaagtttgtgctaaacgactttgatgctggattttttttccgtgtctcttccatagtcttcattgattaaaaaggcagaaaacgttgaagataccgcagaccagagtgccatcaaacttagagcacaacaacagccttcaaatgctatggccctggccgacccacagccagggaaaggggcaccaccaccactgaaggttccacactaaagtggaagcacggtgagtacaacactatcaggccccaagagacaaaaca

SEQ ID NO: 3570 - DNA, 2693 bp, Arabidopsis thaliana landsberg
tcagtctcttctgatcgaatgtgtgcctgcaacaattttattcacgtaatccacatcaatttaaatttgttttaagaacaagtgtatgtgtttggttatgacagttacccgattaaaccgatggatcgagcgaggacgaagaggccgttgagataaccgatctgaactatttcgtctatctcttgttttgtgaacatcccacttccagcgagaaggtctaagaagagagatccaatggctccatcgacgttgagtaccaggttgttggctttagacagtgtgtatgtctctacttggactgcgtattccatgtacttcactgcagggaagttagaccgtgcaaatttctgaagcagctccactcttttgtctctgttgtctctgctctttatcctacaaatatgtaagaaaacaaatccagtcagagaatgttctgttcctgctattgataaaaaggatacttgattgatatataacgccaatttccacatttacatgtgaaaacaaacgatgaagatctaagctcgtttgtttgttcttacctgtgaccaatgccagggacacggattcctttcttcttcatgccttccacgaattcataaggtgtgagattctgaatagggcacaacattttagtactatttatatctaagtttcaagaaaggcttgatgcagttgcagtgaaggataaaatgatttttttaccctgtcacaagcgtccttgaagtatcgtgctgcatcatcaatggcaccaccaaatctaggaccgattgttaatagacctgtttgtttgaagaataatcagcataagttattatatagcaaacttcacttaaaaagttgatggattgggatgttaattcacctgagacaagacttgagacaaggtcttttcctgctcttgctgttacgatggtgttgtgagcgccagagacgcatggaccgtggtcagcgcacaacattatgcatatctgatcaaagttcagtgtcagaaaacatattcaatctcagtactaacagtgttcaataattgtgttagtacacggaaagatgagcaacctcaatgaatttggtacaatatcgaggaagactacgtttgaaccataggagggaaatgacatctcccacgccataaccctgttcaatgatggatgacattggcacaccagcatagcatggttcctcccctgaaaattcagtgcgtgagaattttgtttgaaaaaactgttcttgcttaaagagagaattctggtttagtttcagaagaataataatacctctgtcatcagaaatggtggagatgatgtgagtaggagcccggactttcccactcttaattgcagagctgagatcttcagggatttgtggaggagtgacttccttaataggagagacctttccctcttcaacctaggaggacagaaaaaacatgaacataagatcacagcaaagagaaatgcaagctaagaccgcatttgattggagactgaccaatttgtcaaaagtttccttgattgcaacttctagggcttcgaatgaagtgggtacagtagctccagcatcttgtagcgcttgattcttggcttgtgcagactccatctctccaccacttttggccccctggttcatatcatatcaaagaatgatttatatcggaaccagatgaacatttggcgtccaaaattctatatgtcagtttctgagtgacacttactgcatgaccaaattgtacttcggacttgaatagacgtgcacaagtcccgctgacccaagcaaccactggtttggtcacttttccctgtttcatggcttcaactagagaatattcatctcttcctccaagctctccaagtacaaccaccatcttaatctgcaatattgaaaaaatgaaaacaaaattttggagttaaagaggctagctgaacaagagagggaaggtcagatgcctctaagtacagtatagctttctcatggttaaacagtagaaaaaatggataggccgcatgaggatatcccagtgagcaacaaaattttaaaagtcaagaagaatatacctgtgggatgttgttaaaccgcaggatatggtcagataaagttgagcccgggaacacatccccaccaatagcaatgcctacggccatcccaaatcataaactcatcttaagaatcttcagaaatgataagcataaggaacatattcattagtaaattctgaacaaaaaaatagaaactcaccttcatagatcccatctgtcacacgggcaatggtattgtacatttcattagacatgccaccctatagaaaatagtgaatgagaaataaactctcagattaagattcaaaagaggataatcatgagcttaggtagactacaaaatgcgaaaaaaacaatctccacagctcatacagattttgagacaaagccaacagatccaggcctgtacaacttgcattggatgatattgtcaatagttccagcagtgtcaccaattttaaaggctccagcttgaacgcctccaacagtagctggtccaataataacctgtaatgaccaatcagtaaaagaagattaactcggaaagctcacatcaataagaaaagatcgatcaatagtaagttcctaggaatactgcatcatgaggaatgagtcagtttagtgttataaccaaccttattattagcacgagcataa

SEQ ID NO: 3571 - DNA, 1959 bp, Arabidopsis thaliana landsberg
aacccattgatataattctttctggttcctctggtcatctaattcaccaataacttcaagaacatcttcttttgtaacaatcttgacttctccgtttacgagaaaccctttatcactgctttgaatctccgaaaggagaaacatagattcaaaaccatgggttgtgtccttttcatcaaacccgtatactgcttctgaaaacaaaaccacaaaaacaaacttgatattatcatcaactacaattccaaagaaagtatgacaagagctatactgcaacatagaggttgtgttctttatgttgtccgccttatcataaagtggagagagtagaaacaatcaccttgttgttgggagagttctcccgtaacttgatttaccatagtaaaagaaactttagcgcgtcttctccatccggaaggcaaatactcagaatcaggaacacatagatacagagagaaataatcatagatatagttattgtttccctcgggaagggcgagtagacacctacaagcaaaaaccacagaaactcatttgcttgtagctatcgaacacaaatatatatcacttgcaaacaagaaatgttcttaccatttgcagccaccgaccacgaatatatcagaataaactctatcggaatccaaaaaagagaaattgttaatcacccacaacttcttaacagcttgatgattccccattgttcttgatgataatgactcctataaacacacaattttttaactcaaacaaccatatcgagaaacaaaaccaaaatatagaactaagactacactatggaacaacattgtaaaaaaaacacttatttatttcacatgttaccaagaggaacgaacagtcaaggaaatgaaagagtaagacagatagacaatgaactaaatattttggagccacagcttttaaaggcatgcatgtgtgtagacgagaggaatgcgaatcgtttcgactcctcgtaagtcatactatagctcatagggttgattttataatattttaaaaaataaaaaataataataattggggtttttttgtcaagaaattttttgtaatagttattgcaagacgaaaattaaactttctcataagtaaatttaaaaggagtggaaaaaagatgttcccgagaacaagtgatgtggattatagatgagttttaagaatactagaaattgcagcgatacaaagctatggtggatttgactactaatattcagagagaaaaatgattttgcatgcctcgtcaaaatactagaaattgcagttgaaggtacaatgaagaattgatggatgttattttatttttttacatttataatttaaacgggtatatgagaatgacaagagagacatgagtatagaaattgcagcgatacaaagctatggtggtgtacctatgtgtagagccataatatggtggtgtaccttccatcagtgaacaaggatatggcgtggaagatatcatttctctcctatggttcaaatgtaatctttaggcctcgattgtttgttttcacatataaacgcagacaattggtatctgaaacagttgacttttttttaaagcagcagcagaaacagaacacattctattgtggaatgtttttcttacatctaatggccttttctaggataaagagcagagacaaaatagtggagctgcttcagaagttagcacggtctaacttccctgcagtgaagtacatggaatacgcagtccaagtagagacacacacactctctctaaagctaataacagatatgataaaaaaggaaataaattgctttaaccggaaaaaacataaagcatcaaatgttcaaaagacaaaaaccaaaagaaattcaagacaaaaaccaaaagttcaaaagagaagagataaagagaagcgatgaatgatcctgttaagtgataggagacaatacttaagcatcctcgtccacatcgtt

SEQ ID NO: 3572 - DNA, 597 bp, Arabidopsis thaliana landsberg
ctttaaacaccaggtacctttcagaaccctaatcatgatactttcacaaaactatatgtatatttacataaatatatttaatcggcatgacattttgtgattaattagttctttttgttgggtttataggttgtgaatttacaagcagaacttgagattctaaagcaacaagcagcacaaagcatgatttttgctgattcaccaacatcagaaaaccctaatagttactatggagacactactaaggctccttatcatcatgatcatcaaaatatttatcatcatcatgatcagacccatttggtttaccaaactggaagttctgggacggttcaacacggggatgccacagagagtagttaccacaacgaaacctcctcaggcatgggggaattctccatctactctgacttggaacaacacctgaacactttcaatcaggatcatctcaaagagcttcaatcagcaaattttggctacatctccttctcgtgatatggttctatcaagaatatgggttgattcttatctatatccgatctatataatatatagcttatatataatggttgaagattctttgatggttttagtttc

SEQ ID NO: 3573 - DNA, 833 bp, Arabidopsis thaliana landsberg
agcatgcgtgcaacatgcatgaggaatgagatcgtaaacaaatacttacaagcttatggcatatcgtcacatgaaaactgttgaacagatttgccatttccggaagagctagaggtcttacacctctaacctgaaagaagttgcagattcatattatataacacataaaactaacgccgcattaacgagcatatgtagaagtgttgaaaattctctataagtgttggggaaaaagctaattcactaatttctttgaataaaatattcttagaagaattctgcgctactcaaatacttttaatttgatatttgatcagagaagctgtggagatacataccacttcctgaagtttcaagggtggacctgagattgctctccattgcgggaagaactcttcagatgtcaattgtagaggttgaagaaacttatttaaggttgctgggatccgtaatttggcactgacctataaaagattcagcatgtcaggtacactagataaattattcaccaaaataagctaaggacggttgcagtaagtaccacgtttgcaccaaacttgtaagagaaatccaaaaccgcaacatccctgctagggcggatgttcatcacttcaagtggagattgtacctatgaccatgaaagaaattgcaacacttattaaagtacgcagaaatgagtagaaattgaccgattgtgtggtaaaactgaaaacaaatcaaccacaaaagtacctgtgctcgaggaggaattgtatcaggtactggagacagatccagtcttaagtgggcagggggtagtatcagagcttgaactgatgtaagtggagaagtat

SEQ ID NO: 3574 - DNA, 1404 bp, Arabidopsis thaliana landsberg
gcaattaatagtgggaaagtccgggctcctactcacatcatctccaccatatctgatgacagaggtattgttatggacactaaaccatattctaaggagttgaaacacagagaaattggcacatgagttacacagaacatagattcatatgcctctttaagcccattttctgacactaaactacaaaatttgtcttctcatattaatctgcaggggaggaaccatgctatgctggtgttccaatgtcttccatcatcgaacaaggctatggagtgggtgatgtcatttcccttctatggttcaaacgtagtctacctcgttactgtacaaaattcattgaggtatcagtttctctctttgcctttttaacctattctttctcactacatacatactgttacgtagtgaaatttgactctggtctgcaacttttgataattcttctgaattagatatgcataatgctgtgtgctgatcacggtccatgcgtctccggcgctcacaacaccattgtaacagcaagagcaggcaaagacctcgtctcaagtcttgtctcaggtcagtcaacattttttttcccccacaaaacacataagttctctttaccgtccaacaatctctaagaatgttaaaccataaaacaggtttattgaccattggtccccgatttggtggtgccattgatgacgctgctcgatacttcaaagacgcgtgtgacagggtaaaaggctatatcattttccccaatataaatttctgaatctgaattgtaattggtattaataacattggttgcttgtttcagaatctcacaccttatgaatttgttgagggaatgaagaaaaagggaatccgagtccccgggattggacacaggtagaaaacagaacattgtaccaaagaaacaggcaaatccacacagcttgtcttgtctgaaaactgttttcttctttatggtaggatcaagagcagagacaacagagacaaaagagtggagcttcttcagaaatttgctcggtccaacttcccatcagtgaagtacatggagtacgcagtgacagtggagacatacacgctctcaaaggcaaacaacctcgtactcaacgttgatggagccattggatctctcttcttggaccttctagctggaagtgggatgttcactaaacaagagattgacgagattgttcagatcggttatctcaacggtctgtttgttcttgctcgctccatcggtttgatcgggcacacgtttgatcagaagagattgaagcagccactgtatcgtcacccatgggaagatgtgttgtacaccaagtaaaactcatttcaatccaatttttgttagtaccgcaattaattagccttttaaaattcttctgagagatgtgcacgtaaaaaatg

SEQ ID NO: 3575 - DNA, 861 bp, Arabidopsis thaliana landsberg
ctgatacaacccctgatgacctcacaatacaaatgttcagaatgtatgcaaaatttcataattaactcaactcgcccgctttggatataatcataactagctttcctattaaacccttcccctctccaccccccttggctctacatttactctcccatcattccatattttctccattacattctacaataaccgaaaaaaacaaacttttcgacatgtgcaagtaagtaaatctcttaccccaatgaatttaaagtaagccagcgagcatagctcctggatcatcagctaaagccgctgggcttggcggttgagctacaggtggtgctggacctgctgctggaactaaagctcgagatcccattgggatagtaattagttgttccttgataaattctttcaacctgtggataaaagaggtcaacaaatgcaaacgaaaaaaaaaaaaaacatgttcgaggttgggtttgtgctaagaggcagagatatcatactcaaatgtaagggtaggatctcccgtgcctactgtcattcgcaattgggttctgtccgctgggtctgtttctattcttgcctgaaaatagcaaaccacggacaatgtcacacaacagacaggcttttgagaagttttgggagtgcagcatcacgttattactataagtctcaagaaattttaggaattggaagagcggcaagtgccaaaaccaggaagtaaaacttggttatgatctcaccaaacagaaaatggctcctgtactctcagagtagaaggttgtacttgccactagattaatagggtttggatcctacaacagaaaacgatacaagtttaagtttgaagtatacatgtgtgcaacaagc

SEQ ID NO: 3576 - DNA, 1112 bp, Arabidopsis thaliana landsberg
ctttttgagaagtcctttctcccttaaaagtcttttaactttttcctagtatgtggatttacattttttttttctctcttatgtcgtgcatcgacagttatacaccttagaaaaggataataagaaattgtaattctaagaggtcaattcaactcttttgttgtcattgttattttctttttctttttattatcaaccgatttttttacttcaaattacatatctgagtaatttcacagttatattccaaggattcaaatggtatgattaggattgttagatcaaggttcctcagcttttgatgttaggtgaattaattataacttgatgaacgaaacgttcctagattgcataattgatgctatgatgttttgtaaacatatcaaccatattaacaatagtgaaaccttcattaaagaagaattaagtaaaagaaaccttaatgaaatcgtgcaatttcaaataacaagcggcgcggttgctgtgaagagcgatcttttggggtttggctttagcagcagtaagagcctccgtatagaagagaagcgcctccttgtacttgccgtctctgtatagctgatgccctctctccaccttccctgacgccatcgatgccatactcggggagacgaaactgtagatttatcaaaatgctaacgagtaataattgtagaaaaaacactaaaccgtagattttttatcaagtactttactatgattgatttgattagtatgtagatggtggattgttcagcagttaatcctatataaaatcatgcatgaaaattaaatagaagatatgataaaatagatgaaataagttgcttaaaccgggaaaaacatagagcagcatcaaatatttaaataagtactttaagttccatagagaaaaaagaaagccgagacaaaaccaaaagttccaataataattaaaaaaaaaaaagataagagaagcgatcaatgatgctgataagtcatagcagaatccttaagcatccttctccacaatgttcttgttacaatctgcagctcacctttctcctggacacgtacgaggtcgactgatacaaaccagtccttgttactgaggccttgaagagcggttttcaaaa

SEQ ID NO: 3577 - DNA, 1990 bp, Arabidopsis thaliana landsberg
  unsure (1)..(1990): unsure at all n locations
cttccttctaattcagattatagagaggagcttgagtccgtgtgattctttgaaggagaatttaccgtcaacaaaagggcttttactggtagggcttcgtggatgccggagaaagtgagtgaaagagtagagaggaaaaaaaaatcttttatcattttcccgcgcttttggtattggcaaccaaatcactgataagcccctcatttttggactctaattgggcctatctaaaagcccatctttatcgcatttgcattttggatttcgaacacagcctttccattcgagacgatgatgacaaattaggatttctagctcgaggcgaaaacaaacttccttcttgtagctgtaggtgttctcaagctccgactcacaagtcacaagtgtagactgtctccttgaactcgaatcacctccggtaaagtcttaaacactctcatatctcaattggggtatggagaaaatcggtttatgaaaccaaataacttaaaccggatcgggtcgaattaattttcagttaaatgccggtatggtccatacgactgtgacttgtaaggtggttgtggtaggtggagaagtgaccacacaaacgaactaccccaggaaaacatgtttttctacattctcgactttgctatttcattgagcttgaataaccaattttaagacgccattgctaaaacatgaaagctctatcatcttcttctccaatattaggtgctagccagccggcgacggcgactgcgcttatcgcgcgatctggtcgttctgaatggcagagctcctgcgctattctaacaagcaaggttatttctcaagaagaatctgaatccttacctgtgcctccagtttccggcggagttgatcatctcaacggccataacagcgccgccgcacgagttccaggaatgaatcttgttccgattgagaaatctgatagcaatccgttggttccacagcatcgtcataatccactgaaaccccttagcatgacggatctctcgccggctccgatgcacggatctaatctacgcgtcgcttatcaaggtgttcccggtgcttactctgaagcagccgctggtaaagcttatcctaattgtcaagctataccttgcgatcaatttgaggttgcgtttcaagcggtggagctttggatcgcagatcgtgctgttttaccggtggagaactctctcggcggttctatccaccgtaattacgatctcctcctccgtcaccgtcttcatatagtcggcgaagttcaactccctgttcatcactgtttactggctcttcccggcgttcgtaaagagtttctcacacgtgtgatctcacaccctcaaggtctcgctcagtgtgagcacacgctcacaaagctcggacttaatgtcgcacgtgaggcagttgatgacaccgcaggagccgcagagttaatcgcctctaacaacctccgcgacacagccgctatagagagtgcacgcgccgccgagatatacgggttggagattttggaagatgggattcaggacgacgtgagtaacgtgacgcgcttcgtgatgctggcgcgtgagccaatcatacctagaacagatagaccgttcaagactagcattgtctttgcgcacgagaaaggaaccagcgtgcttttcaaggtgctctctgctttcgccttcagagacattagcttgacgaagatcgaatcgaggccgaatcacaaccgtccgatcagggtcgtggatgatgccaatgtcgggacggcgaagcattttgagtacannnnnnnnnnnnnnnnnnnnnnnnnnnnnnnnnaggcgcgtgctcagaacgcgcttgccgaggttcaggagtttacatcgttcttgcgggtgcttgggagttatcccatggatatgactccttggtcaccaacatcatcaacttcatcgtaaccatactatagtctatacacacatgaaaatgtaaattttggagaagataacaaagttttataggt

SEQ ID NO: 3578 - DNA, 974 bp, Arabidopsis thaliana landsberg
aaatatattagaaaacatcataatacgttttgagtttttctattcattagagttgtttactcacatgggcatgccaagagtggtccttgttgtagataattgcggctccaagacttctagctgggttgattccggtcccggtgatcggtattgttgccaagtgtaccaagaacactgcaaatccgattgggagcggcgccaaaatctacaatagagagtgaccaattattagtcataaactgttaaaccaataaaaccggggaaattcgatcggttagtagtctaattaaagcaataaaatcagcaaaccggaactaagagaggggtccataccgggacgtgtgagtcacgggcgcttctcttggcgtcggtggcggagaagacagtgtagacgagaacgaatgttccgatgatttcagcaccaaggccagaacctttggtgtagccatgagcaacggtgttagcaccaccaccgagagtctggtacggcgttggctggaaacctttgacgactccggcaccacagatggctccaagacattgcataatcatgtagaacactgctctggtcagagataacttccgagccaagaacagaccgaatgttacagcagggttgatgtgtccacctaaaaacacacaaacacaaacacatgttacagaaagatgtgagcttttatctgagaaatcaacagtaaaattggtgtaacatacagatctagataagcccaagcatcaaaagaacccaaagtttcctgctttataactgtttttggttcctttacattttctaggtcaaacagagcatgaacaaaagcagaggacttacataatggttttcagaaacaaatcagagcaaataaagcagacccaaaacagagaacccaccaaaacagagattacagaaaaatgggaaaatcgagagaaggttacctgaaatttcagcgtacagtagacatgagcaaagatcatgc

SEQ ID NO: 3579 - DNA, 1063 bp, Arabidopsis thaliana landsberg
  unsure (1)..(1063): unsure at all n locations
ttttactcggccataacctgagagacttgtgtcatatacaaggggcaggttttggttactaagatgatcaatcttcaattagcagagtcgaataggaaactccaatggctaatgatggaaaactagatggtaagtaagtaagaattaccatacatctagcaatggtggcccgaaccaaggttcgagcaagcaaagcattcttcttaagctcatcgcctcgcatctgaagaactttctctttctcggttggtgacagaagttgagagtagtgttttagaagagatgtactcttcacttcatctggtcgaataaaccatagatgagtctccctacatgtcaaaagataacacaatgtagaagataataaacagataagaatgtnnnnnnnnnnnnnnnnnncaatttggatcattgcacaacattaggaacgtacatccgagatggaagttgcagaggaaccagtgaaggcaattcgatcgataagcttcgctgcaattgagacatgactctgattctcatcagctccaacaaattcttattctattggaatcccaaaatcgcaacattcaaacaagaatcagtaatccaatcagtgacaagacaaatttagagaatcgatctagaattctaagaacaaataatcaactggaattggaatcaattattaagatgaattacccaaacggaaattaatactccggctaaacgacggcgaggtcccttgccggtgacggaggaaagatactctaatcgaacggagatggtaatactttctgtttgagttagggtgcgaaaatagtactaacagaaccgtgtcgaaccaaatcgcattttatttttaaccgaacggttttacttatccttaaaccaaactaacccgtaaatacttcaattggttcccagttccgttcgctggataccgggaattacatttaaccggatattagaattacaacattttttgttttgttttgattaataacagagttctacacttctacttgtaacttgtgaaccttaaagttccatagtttaggaaaatctcatgatatacaagattagg

SEQ ID NO: 3580 - DNA, 4141 bp, Arabidopsis thaliana landsberg
ataaaatctgatgatacaaaattacccaataatatattggtttataaacgttatctttaaattatagaattatttcaagagaaaataatttttttctaaaatcttgtagttctattatccaaatttgatccatttatatatctatcactatttaagctttcaagtcagaatcaaagataattaattataacttgtccatcaaaaagctagcacctaaacttatccatgattgagttctttataaaatgctaggtttaacatagctaatcaaaatctgtattatgcatagttgtgtccaaaaagtgtttatatgtacactaatttcctaagtgtttagttaagataaattgctaatttttaagtgttagattttggtagacaaatattgatggaaaagttataattaattatcttggagattaagaaataagtaaccaaaagttgtttaatttttcttatgatttgaagaagtagtagaataagtagaaagatgtaaaaaatggttatatacacagagcaaacttcacattgaagatctctctcttaggcctgggtacgaagcggatatccagaaaaattgtgatatttgttatttgattcgttttaaccgaatacttgattttgtgatttgctttgcttcgaaaatttccgaatatccggaatttcgaatatccataatattttatgatatttacggatatccgctttgatacatattaatattaaaaaatttgtaaaatatataactatatcagatattcaaagtttttatttaacatgctttcaaaattagttctaaataccaaacataaccgttgttggtatcaccggtcaacaaaatgttatcaaactaattttaaaaactaaatcctgataggctttgataccatgtaagtaatgtgtattgcatatgtttccagaaaagattacaatcatatatatacatgtagcagtagaagactctaggttaagtctcttatagaaagagtgatagagaaggaaataagatatcccctgggatgatgatatgatcatatccttgacactttgttaattaagtagagtgatattctcttcattagaactttatgttttttgctttatgaagtatctctcgagagaagattgtaaatttgggttgaaactttgtaatatatttagatacaacaaataagtttgaaatatgagcgatttgataatatgtgtactgaatgtaaatttatgtattattcagggacttaaatgaaactcaataaaccaaagggtattattgtaagttttaccatcgttgtgcttcaatcgtccacaaaaaaacttccgttggaattttctgaggaaaatgagaaaattcaattgaagaaaagagtaaagaagaagtctcttgttcggttggattgttcaggaatttcattttcgtgagcttacttgtttgtttatgtaaagaggtggaattttcatttctgggattacgaaattgatcagtttctgggttgttaattgaagttatgagcaatcttcgagctatctgtagacctcactcggttttctcttcgattgtgtgttgtagtagacatcaaagtcgatcaatttttaggttttcgattaaaaacgtcgcctttagaaccggagttcgaattcgtctccgtcttcgtcttggtttaggtctaaagattccaatctttggtttcgtttaaatcagaggaagactctagttagagcatcgaattggagccaagagaaatctccttacgatactctcggtaagcttcttctaccaatttgggaattttctgtatcttacagtttcctttgatgtggttgttgattcacaagtttgtgattctattcgtatgagtggttctgttgttttggttactgtttgtgacttgtgtcagaagaatttgacaagaagtctttgtgttgtgtttcgtgtttctgatatggttctatgttgtatgaatttgagtaacagagttggatagaaatgcagaggaagaacagattaaggtagcatacagaagattagccaaattctatcatcctgatggtacttttctggatctttagagcactttgtcgtcacaaagttgtaactctgtttctgattctgtattttgtttgtctagtttatgatggaaaggggactcttgaagaaggagagacagcagaagcaagattcattaagattcaggctgcatacgagctgctcatggactcggaaaagaaagtacaatatgatatggataaccgagttaatccgatgaaggtatgtatatataagagtcataaacttgaagttttcttttttccctctgaaattgttttaaggatgacatgtgttgggtttgtgtaggcatctcaagcttggatggaatggttgatgaaaaagcgtaaagcttttgatcaaaggggcgacatggcggttgccgcttgggctgagcaacaacagcttgatataaacctgcgtgctcgtcgtctttctcgttctaaagtaagaaataatgtgtctttttgagcttgttcttccaacttagtaactttcttctgctctgttgtgaatcttgaaacttattaaggtggatccggaagaagaaaggaagatattggagaaggagaagaaagcatcgagagagttattcaacagcactttaaagcgacacacgctagtgttgaagaaaagagatctgatgcgaaagaaagcagaggaagataagaaaaagctcatcactcagctattagcagcagaaggtctcgagcttgataccgaagcagaagaggaagaagcagcaaagtaagattccaaacattttggaagcttctatagctacttcaagtaattaagcacatggtacttgctccctctctgtctctcttgtagtataaacatacatgtagataatcatatttgacaatttacaagatcttcactgcacggttcattattaaaaataagacaagtaccaatacatacatcctgagaaacagaacagagaaacatcaattgcaatgaccaagaagacctaagcagagcaaatcagacggagcaacaatgagtagggcatatacccaaatctttaatataattatcatattataaaccttaatttgggcaaatagccatttcagccggtaaattacaaccactttctttcagtttcggagattataggaacatgaaaataaaagaaaccaccaaaactaaacagaacggtgattgagaaatcagaacattgatgatattttagtgaataggttaaacatgttgaaggcttcaaacttcaacgtaacttgccttccaagaaagaaagttgcctccattcaagatagtgatgatcatcaacaattcttaacatccgaatcccgatcatcatcttcatcaagagagacgagctggatcatgagacgaccgttggatctgtgagctcgaaaatactcgttgcgacacactttctcttccttgagtaaaagccgaccatcactcgtgtactctcgcttcagcaccgacggcacgtgcgacggcaacattggaggtgacattatctcacgcgccactgtctttttctcctctcttctctcacatggcaacttgacatcaccggtcttgtcggagaaagcgttgaagcagctctcttttccaatgtagcctccgttgtaggagagagatgacatcacgatggtcgagttttcttggtagtgagaactgagagcgatgttaccaaattttgaaagctctctctgtgtctatagatcgagttagtgaggttgagttaaataggagttagattcatccattcttttacttacattttggaagttttctttatgagaaactaaacgatgtatacagagaaagaaatacgtaaaaagaggaaagaaatacagaaacacatgtgaatatctatccattagttaaatggataaaatgaccaaaacaagaataactttgtttcaccaaatgaataactatacaccttgacaacaacaactgaacaaaaacaatggtttatttgtctccatttttgtcagatgtgtattttgacacatgccccttttttggatgatcatatccgtactaatcaaatactataataaaaccatgacacacatgtctctactacgttactatccagattcaaactaa

SEQ ID NO: 3581 - DNA, 1013 bp, Arabidopsis thaliana landsberg
gctagccaaaaccgacaagaaccggaccaatacgggccgtaacctcattctagaaacgatcttatcatttcaatagagacggtggctcgagtcaaaatcccacgtggattagggtcaagaagacctctctataaaatgtaggactaattcgacacaaaggaaggaacaaaatcgaggacaaaaccgcaaaacacacgacttaattttaaaacacgactataatttatacattaacttgttatgccttgatttttgtattttgcaatcgatattttgaccaatagaaaaattatattcgattatttatatatatttttttgtagaatgtcacaaattgattacttttgtcaaaataattagttagtgtaaaaatatatatgaccacaacaacaacaaaaattcttcgttgtgcaagttaggttgatcttgttctcactacttgagcaattgagcttaatttgtttatttgaccgttgggagttgcaccgctttgagccgcacatttatgctcattaaacatatttataaaaaaaacgcatgaaagtgtttgaccagagacaaagtgtattacaaattcactaggcttacacaaaaaggcttgttgagctgtattagaagacccttaacaggcctccatactagtcttgaagatgggccgaaattcactaggcttaaagatgcgccgatattcactagtcttaaagatggcaccacagatggcaccacagatggctccgagacattgcataaacatgtagaacacagctctggtcagagacaacttccgagctaagaacagaccgaatcttacagcagggttgatgtgtctacctaaaaacacacatacacaaacacaggttacagagaattgtagaatgttacgaagaatggattatataatatatggttttgccttcttatatatgtccacatcatttaaaatcctaaaccaaaattgaataatttaaataactcataaaacttttatatgtatgcttgtctacatatcctga

SEQ ID NO: 3582 - DNA, 1241 bp, Arabidopsis thaliana landsberg
tctgttgggtcccataaaaaatgctgtgtgatgaaagagattaccaaagtgcaccctgggggagaagagaagaaagaggagatttgacccagttctgaaatgtctaattcaaggaaacgtttggttggtgaaatgtaatctgatcgagccgaaactttgtggcaagcttttctgtcttgattttcaacggtgggattgagattttgacggttggtttgtgtgttatttgagattcttcaacctgatccgggcacaattcatctgaagtttcagttttgaccagtttcggtggaaacatcacacggatgaccaaatgagttctgaatgggatgaattttgtcagacatatgagacaagattctggtataaggacactcaatttggagtccgggaacatagcttactgatgacccttcagaacagttgatacagagtcttatggaacgaagagtttttagtgacatgaaaggcaaagagacatgaatgtcagcattggcttgaaactacaaggcatttgagtaatggagtctgagactgatctctacgttggcatcttcagaacttggtttatcatgaagagttattaatatgaaagaacctgtaattaagtttgttgaagaaacgtaaaacacaagttagtggtgaagaatcagtcttctcatagctcgttcttaaagagaaggattcgcatatttaagtatttatgaatctgttgctatcacaaggagaaagagaccttcgatattgttgcttcaaagagaaggaatttcagagaatgatcaaaagctatgatttgcaaagatctcaaggttgattaaatcattgtgttaaaagggcctcaagaacgtcattgtatcagttagtgtgagatagctacaaggaaagctaccagaatggtctaagactgtcaaaatatcagaagtgcaaagataaatcaaaggttgagttgttcaaagatggactttcagaagctttgaattctaagaagcgtgtatgattcaaagtttgctgctagtaatttaggtagcagtttgttcagagagaaggagattactaggcagattactcaagtacatgataaaagatatgataaaagaggaaataaattgcttaaactgggaaaacataaagcatcaaatgttcaaccgacaaaaaccaaaagaaatcaaagacaaaaaccaaaagttcaaaagagaagagataaagagaagcgatgaatgatcctgataagtgatagcaga

SEQ ID NO: 3583 - DNA, 589 bp, Arabidopsis thaliana landsberg
gacctcttgacaaaacactttttgatgtgcttgcctttatatactacatacttctatcttattatctctgacagtctgtttttcattgcatgtctagcaggaccctgagtcagtggctcgatctctctcacatcccaatggatctttaagtaatatagatccacaaactccatcacctgatctccttagtgacctactcggtcctcttgcaatagaggctccacctggagctgtctcatatgaacaacatggtcccgtaggggcagaaggagttccagatgaaattgatggttccgccattgtacctgttgaagagcaaacaaatacagtggaggtaatcttttcttattcctttgctttctttggcatagtaggtgttagcattatacttctacttttgctagctcattatttccctagtttttttttttaactatagccatatttttttctgtttcgtctttttgatttattacttggaaatggtatgtaacgtttacttaggtggaatgctacctgagatgttctgtttcacaatttaagatccataataaaagaaaccgagccatttttgtactccataatatat

SEQ ID NO: 3584 - DNA, 591 bp, Arabidopsis thaliana landsberg
aatgaattgtaagagtgaatataagttcaatttgtaacatcaaaactccaccaccagaggcgcgttccagcgagcagcaggttaaacaattgaagattggtatatacctgtgggatgttgttaaaccgaaggatgtggtcagataaagtcgatcctgggaacacgtctccaccaatagcaatgcctataacaatcccccaaatataaaacagtgttaacaatcttcagcttaatacgtcattagtagattatcttacattaaaactcaccttcgtagatcccatcagtcacacgggcaacagtattgtacatttcattagacattccaccctgcgggaaaagaagagtaacgaataaaactctcagacatcaaagtgagctttaggcagattatgaaattttgcaaaatcagcacatacagatttggagacaaaaccaacagatccaggtctgtatagcttgcactggataatgttatcaattgttcctgcagtatcaccaatcttaaaggctccagcttgaatacctccaacagtagccggtccaataacaacctgaaccaattcaatcagtctcacaaattaagtgccc

SEQ ID NO: 3585 - DNA, 539 bp, Arabidopsis thaliana landsberg
cccaacacagacctcataacagaacaacctatatcaagaattttacagtgttaacacatttctcaagaaaatgggctcttctgaaagatccatgagctcaatttctactatgattgattagtatgtagacggtggaatgttcagcagttaatcctatatgaaatcatgcatgaaaataaaataaaagatatgatttaatagaggaaataagttgcttaaaccgggaaaaacataaagcatcaaatgttcaaaagacaaaccaaaagaaatcccaagacaaaaaccaaaagttcaaaagagaagagataaagagaagcgatcaatgatcctgataagtgatagcacacaatccttaagcagcctcctcaacaatgtttgaagactgttccttcttcgatctcttgttcggcttcttcacaactttagccacattctcctgcggatctctcgagacaccatcttcctcagcgttccttgagctagaagcaacttgaccatcttctttagccggagtcttgactttctttgctctttttttc

SEQ ID NO: 3586 - DNA, 552 bp, Arabidopsis thaliana landsberg
  unsure (1)..(552): unsure at all n locations
aacgtaaacccgtgattttcccgccaaaaatgtaaacctttaattttcccgccaaaaacgtaaatccgttatggtttcgcccaaaacataaacccatgattttttcgtcaaaaacgtaaacccgtgatttttccgccaaaaacgtaaacccgtgattttcccgccaaaaacgtaaatccgagattttcccgccaaaaacgtaaatccgttatttttcgccaaaaacgtaaatccgagatttttccgtcaaaaagcttaaacccctatccaatttatttaccgtattgatagcttacatttgaagacaaatcaacgtttggaaagttttagtttttagttgctatagtgtgtttaacaatgagatgagaagcaatggtaaagattatatataggcgtcatccattaggtcataaatcttttggtggttaagtaaaatatacttgacacttactaaatggagcaaaatatattgaatcggattntatttggaatatgctaccataatgattataccagtaatcaatattttctataaattcgttaataacaata

SEQ ID NO: 3587 - DNA, 504 bp, Arabidopsis thaliana landsberg
ctaaggatgtacaaattgaacctatattcactctttcaattcattatgccttaattcaagagctatgtggcagataaaaatgatggttgtacttggagagcttggaggaagagatgaatactctcttgttgaagctttgaaagagggaaaagtcaataaacctgtggttgcttgggtcagtggaacttgtgcacgactcttcaagtctgaagtacagtttggtcatgcagtaagtggcgcggaagaactttcaaagcaatgccttttttttatctcttgtacaaatcaaaatagttcttgaacatgttatatatgaatagggtgccaaaagtggcggcgagatggagtctgcacaagccaagaatcaagctctcatagatgctggagctattgttcccacttcatttgaagctctagaatctgcaatcaaagagacttttgagaaactgggtagttttcccgtgttattcgctagctggcattgacttctgttgcaatcttatg

SEQ ID NO: 3588 - DNA, 2176 bp, Arabidopsis thaliana landsberg
ttatgattctttattatttatcaatttaataacaaaagttgacaaacaaaaataaatctaaaaaaaaagatctgtactaaatgtgattaaatttgttaagaaatgttattgaaagcaaaaggcaaaccaaatctaaagtcaataaagaaaatatccacctccatgattcaataagccccctaaatggctaaatcaatcaaaaataggaaacaaacatagacccaaaagtatatttaagtaattatatttgactttcagctaattttattatctttggtccaaaaaaaaaaaaattaaattttgtttatgttttgacttggtgaacactaaatctagtgcatgtggttaccaactcacaaactaataagcaatgcgattggttctttatcatgcaagtgacgtcacaagagttgagtgaagggtataatagtaaaatcagtaagaagaggcaacgccgacgaacccgtggcccgcacgtcgtgagaagagaagagagtctgcgtgagcagaacagagcgaggaaaggcgcgtttgttgcgttttggctccaaaggccaaagcccgccttttgcttttcacctttcgttataaaaagcgtttcctctccttctctttccatttctctctctctcctctctcgctcgctggcttcgaggagaaaaaagaaaaattggagaaataatttaactggttctcggagaatctagggttctttttagccacgccttgctgatctccgtcgtgaattcgattccgattctcacctggtacggttttttatatttactcttggttagaattcgcgtcagatctggaatttttgtcatactttttttttctttcgatatcgattcctatgatgacctcttctgtgtcatatttttgtgcattaggcttgatttgtgtgttgttgtttcgccgaattgcttgatctcgtttagttttggtggtcttagacgatttgtggcttagactgtccaatgtggaattgaacagagtttgatgtctagctttagaaatacagtaatctcctaattgttcaggatttggtttaggaattatgagattgtgctatctctggcacgatagaaagggaaaaaactaggtcactagctttgttgaagcggaattgttgagccattattgaatctgtgattattgaggttatctcttcttacggagacttatctggcaggtcttttgtggcctaaagctcataagtttatgctagtgcaagaagttatataggaatgacatattagatttacaatgatggaagtggggttctctcttattcagtggttgatcagttctggtgctgacagtccgtttatatttggatggcttgtaactggatctgttggccttctggctgttatctacacatttcttaaatggcagaaaaaaacttctttaaattgggttaaagctgctgctagagagaagaagaaggtatggaaaagactgagagttccactttctcatcatcaatggactgatgattatggttatgggcaacagccatccacttgctgtgtttgtctctactcccttgttccaggtcaaaatgtttctaataaagcatctctgagtattcccgtccaccgatgtgctgtatgcggtgtagcagctcacttttattgctcaagctctgcagcaaaagactgcaaatgtgttgcacaggctgggtctgaccatgtccgacatcactggtctgagcgatgggttaacatggatgataatgctgacatgactgccttttgcttctactgtgatgaaccttgtggtattcctttcattgaagcttctcctatgtggcactgtctttggtgccagcgcctcatacatgttaagtgtcacatgattatgtccaaggaatctggtgatgcttgtgatcttggctctctcagaagagtaatcctctctccagtacatgtaaaactcaatgaagcaaatggtgtcgatggagtactgactactattaaaaacgagttagcatctatacgagggcatgtgagaagaaagcgccacaggggaaaaaatgggaatggccaatctttaaatggtaagctactggaggattcagtcagcgatccagtaaaaaccgtagttaatgggcttgtagtgaagaaactacgcagagataggagcatagattgcttaaagcaagtctcgg

SEQ ID NO: 3589 - DNA, 562 bp, Arabidopsis thaliana landsberg
ccaaataaaacaatagacattctaaacattttctacactccaaaaaacataaaatgggatcatagggtaaataattaacatgcggtgtacctcgggtcatatcctagttggtataaaaaatgtaggagtctatggatgacactaggggataataaccctaaatatttgcatgctctaacaagacagacacggactagaaattggattaccggattacatgatgagaatgggacatagtcttcagaatataaagatattcaacacatagcaatgtctttttttcaaaaattgttcacaacgactaatcctcaagatttggaggagtctttagtagaggttcaaactttaataacagatcaaataaataattttctaactgcatcgagacagaaggtgagatgcagacgacattacttataatgcatgctgagaaagcaccaggcctagatggtatgtcatccgtattcaaaaagcttgggatacagaagaacggatttgttattctttggtaactctttcttacaagatggaagttttgatgaaccggtaaatacaactaata

SEQ ID NO: 3590 - DNA, 2882 bp, Arabidopsis thaliana landsberg
aatcggttgagttgttgctgctagattatgattagtagattgctgctataaattcggtttacaaaaattgtatgaaatggcgtaattttggtttttgtatctgattattgttcatttaattcggacagtgattgaatctctctcctaatttcaatgatacgtaaaccgattgagatatcatcaacccggctttgttattatcgactaatggttgtaccggtcggtaaagtccggctattaaattgcattattaaatttaggttctttaacgacatttagggggaagcacatgaatgctgcaataaatgaaagaagcaattgaataaagaaagagaagagagaagaccgttggagaagacgaggaagcaaccatgtgctttggtttctacttggtacagcattccatgagcttttttcttctctttgactagtatattttattgtagaaaattaaatggaggaaaaagctaaactttcttaatcacagatgcagattgattctccatttttctcgggagaaaagttcctcgccggagatggagcatatgatgaaagaaggaaggtctcttgcagagacgccgacttactctgttgcttcggttgttactgttttggtctttgtttgctttctcgttgaacgcgccatttacagatttggaaaggtgtgtttttgttttgtattttttcttcgtgtgtgtgcctactatatgtttgttgaaatgctcagctcaaaagaatgagtgtgaagaacgtattatgatttttttttttttttctgcacacttgccacttgggttaactcttgctctccatgattcatgagctggaaatgttttatctaataatgggtgctagaaagtgagaatttttatggacgagatgtttcttcttggagatatgtgtttatgcttgctaaatgtcagtagaagtagtgttgatgttttcactctaagagaagtcattattacaggatgtgtctttcatgttagatatatatgaggagctaatttcatgttctgttttgttttcagtggttaaagaagactagaagaaaggcactttttacttcacttgagaaaatgaaagagggtatgtcaaataaacctgtgctgatgttgtggtgctttatactttctttctttttcgtttgattttgacttgttaaactttcttggtagagttgatgttgctgggacttatatcacttctgttgtcacaaagcgcgagatggatttcagaaatctgtgttaactcttcccttttcaatagtaaattctacatttgctctgaagaggactatggaatccataagaaagttcttctggaacacacctcttctacaaaccagagctccttacctcatcatggaatacatgaagcctctcatcaatgtggtcatgtaaatatttactttttctatcgacttaagagcctattttccttttgacttttaattatattactgaactggatgttggatccaatgccagggccgtgaaccatttgtgtcgtatgagggactcgagcaactcctaagattcttatttgtcctgggtatcactcatgttctatacagtggcattgccattggtttagccatgagcaaggtacacatcctagctcctaaatctacatatgagtgttaaatttgtattcttaagtatttctatgttgctccgaaaggaagagatgtattatacttgcaatcaactttatcctcatgtctagaggatgtagagaacctcatgatcaaataattagtggtcctaagtatatgtcaaatagaaattatcttcaatctgaaaattgagggaaaaccttcgatattatcatttatgtgcatagagtgttagtaagattaagcagacgaacatatcaataccatctgaaacagtgttgtctttttatcacgtaacacagatttacagttggagaaaatgggaagcccaagcgatcataatggctgaatcagatatccacggtaaatgacaagacttttctgtctctccttcaaattaaggcttgtatgtttttgatgggtctcatcttgagggcacatgaggaactgtgttatcttaggattaagaacagcatgaaactaggattctgttaagtatttaggttgttcattcatgaactcacttaagctgtggagaggcttttatgcagatttgcaaatttcgcttcatcttgactagcagatcaaatccagtataatcacttataaatactgatataggaaaaattcctttctgtcctagtataatcacttatacaggattgaaatgaactgtgtggaaaagagatgtatctctgtaattttagctttatcacgaacagctgattcattgttaaagatacttaatgcctaggatgctttagtttccagtcatatataccctagtcttcttgactttgttcaacagcaaagaagaccaaggtgatgaagcgtcagtctacatttgttttccatcatgcctctcatccttggagtaacaatcgttttctcatttggatggtaactccccatgcttttaccttaagctgtaattttttaaaaatttcatatctctagttaagaacactgttatatttttctccagaagctatttttacggcatttgtccagcaataaaatatatgtttgcattgcagctttgtttcctgcggcaatttagaggctccatacgaaagtctgactacttcgcacttcggttaggtttcctcactgtgagtaacttttttatttcgtttctcagtctttccttcaaatttaaaatataactttctagtaatttctcaagaattctcatctaatctggtagctgacatgattagttttctgaatccggtcttcattactttaaaatttcagaaacata

SEQ ID NO: 3591 - DNA, 1486 bp, Arabidopsis thaliana landsberg
aaaggggattcatgtcgaaagtcagactaatgcaaaacagagaataaggcaataaagatagtggcattatacacatacaggataagagcatttttttgaatctttagaacaattaattctttcccaaccttatggtatctgatttcatatcattgttcacagaaataaaacactgaatatcacattttttatataaaaaaaagtatattccttttatatgtcaccactaaaatgcaccgtcaaaataaacgtaacatatatatgtatttactgatgtgttgcatgcatagttttttggataaacaaatttgctgacaccatttacaatgaaatatggatttggataagtactgcttcatcagttaaaaacataattacagagtaagaagtgtgattgggtcgaaacttatccttttaaatatatcacttaacctcgacttagtggaatcttaaactacactactatccacacgttctgacaaaaggtattacagattataataccttttctcgatggttgaaacttttttgaatattcttcttgtaatgaaatctcctgatgactcaaatgtgtaaatagaaaaatagtgaaaatcttcgactcaccaatactaaaccaacacaaaacccataaaggcaccttcagcagtatttgaaagagatacttattattaaaataatacaaagtaatgaaaaaaaagagataagtgaaaatcgtctctgttttcagaaactctaaaagacgtttttggccatgtgtttttcaggaatggttgattttattttttttaactaaaatttaatactttatctgaattcaattaaaataagcaatatttatttatgagaaactcttttttgagaatcaaccgatgtagatggcgtaagtgcactctgcctttgacttcatattttcatatttccttttctatcttattggactttcatgaatcaccctcctcgtccattatcattacctcgtattattaactctctcacacgacacacgtattataatattagtctatgcgcatacatatactaatatataatgtcactggatagggacggtcgagttataaatggtgtaaggtttggtattgaataattttgctttatcgacattacgacatatataattatgtgattataattagcacttgaagccgtctcttatctcgctctttttgacggtccaatgtaaatacgtatataagattcatatcttttttagttttgatgatgtactaacgtaaaacgatcgtatatgaatggatagaactttatccttcttgtttcggggataaatggatagaacaatccatatttcagggataaatcttatttacttttgatcgtgtaaatacttgtttcgagattagttgctttttatttcgtaatcgtggtgacctaacaaatcaccgagtgttttaaatggatgattgcatgcatggctcaataagggtttgacaattactaacacacg

SEQ ID NO: 3592 - DNA, 1802 bp, Arabidopsis thaliana landsberg
  unsure (1)..(1802): unsure at all n locations
catttcttacaaatttaatcacattagtcaggatctttttttaagattaatttttgtttgtcacctttggttattaaattgataaataataaagaatcataatgttgagttaataaaaaaaaaactatttataggcttttaaaaaaaaaatcaatgtaaaccataattggctgttgtaatcttatataaatcacaaatatttagaatgattagggtccaattaataatgattaaaaaaacaatttgtagagaagcaatcgatatctccaaagcaaaaaaaaaaaggaaaaccctagaacagtagatacaagaaaactctcgtctgttaaagctttcctctgtttaccttcggagtcaatcttgattccgatgggactcgaatcgggttttggagcgtttgggtgaagacatggagaaactaatgactgaatcaggtttgaaaccagttgttattgattcgaatcaagatttatctcgtgtatattgtgggatctgctctaatattggtgatgacgattatgatggtgatgttgttgttgttgatggtgatttgatctacacgcctttttgttctcacaagttctgcaaagcttgttggagcaagtatcttgagaaaaatttcttctctgtggagaaaaaccacactgcaattccttgtcctgatcgagattgtcgagctgctgttggaccggagacgattgagaagctaaccgtacgtgatcaagcgatgtacgagttgtatgttctgaaatcttaccgtgagaaatacctgggatggaagctcaaacagtgtcctgcacggggttgcaattacgtgattgagtttcatctggcgagtgaagatgaagagcatagcttaaacattgtatgtctctgtggtcatatcttctgttggagatgcatgcttgagtcacacagaccagtgacctgcaacaacgcttctgattggttgtctagagacttggagcaattgatagaagaagtagacaagccatcgaccgtcttctggattgatgccaataccaagccttgccctcattgctttattcctgtggagattgatggtgaacgaccatgggcccagttcttgacttgtgtctgcaggtttcactcttatgaaaataacactggttttttgctattcgcagattattagatttctctatcttaattatttgatcatactaatttgtgtgttttcttgattcagcggtcgtttctgttggaagtgttttcggtcaccggaaactcacggaacctcaggatcctgtttggcaccggcgcgttcgagcaatgttggtttcaatcattggaacagagcaaaaccggggatttcgtgtttggatctctggaatgcgagtcaagtgaatctggtgaacgctaaatacgagctagaagctttcgaggaatccataatcaagaaacctagtgacttgaaggagcaagacgttaaggtactaagggaaggactgatgctcattgttcagtgcagacagttcctcaaatggagctgtgcgtacgactatatccacacagagtatgatatggcgaagagagagtacctgcgattcctccnnnnnnnnnnnnnnnnnnnngtccatagtttctcacagagtataaaggaggaaacagaagccaaagagcttacttgcggtaagctattgagcgagacaaccaacattgggaacttcttttatcatttcatcaagactttacgagaaggtttgcccgaggtacaggcggagtcgtacgacaactatggtggtccttactggttgtgcgatcgctgcacatatggaaac

SEQ ID NO: 3593 - DNA, 1669 bp, Arabidopsis thaliana landsberg
ataattgattattgccccatcgtatagatttaattaatattactaaatagtaaataattaagtatataaaaatttaaattttgctccaatatatatttagtgatgaataacaatataataaatgattttggtcatattttatttaattatgtaacaacgtaaaatttcttaattaaaaagatatcattatcaaactttatgctgtcaaaaaacttttttatcaaacattatgtaatagcgaaaacataataattttgtagcttgacgatatccccaattcccccgttggagagtgaaaaatggcaaaccctagacgataattagctatctccaccttcgattcaatcttgttgtttcaggcgcaagctactagtaagccttaaccctatttctttacaagtttatcttctctagctctttactaatttatcgatttgtctttctgatttttgttttgtcattttcaagaaaacaatggagtacgatggacggagaccctactctgttctaacgaaaaatgaaattaccgtaaagatgaagaaacagatcaatgaaatctctgacatcttcttcatatcaaactccgatgcgaccgtacttcttatgtatctccgatgggactcgcttcgtgtttcagagcgtgtaggtgaaaacaaggagaaattattgatggattcaggtttgaaatcagtcatgatcgatcccagtccagattcatctagcgagattagcttggagactgatgtttatgagtttgatggtgataatgatttaatctccacgaccttttgttctcacaagttcgactcaaaatattggagagagtatcttgagaagaatttctactatgtggagaaaatccaaaccacaatctcttgtcctgatcaagattgtcgatctgcggttggaccagacacgattgagaaactaacagtacgtgatcaagagatgtacgagaggtacatttggagatcttacattgaaggaaacaaggtattgatgatcaaacagtgtcctgcacggaattgcgattatgttattgagtttcatcaagagaatgatgatgatgatgagtatagtttaaacgtggtgtgtatctgtggtcatatcttctgttggagatgcagacttgagtcacacagaccagtgagttgtaacaaggcctctgattggttatgtagtgccacaatgaaaatatcagatgaatcatttagcctttatccgaccaaaaccaagacagtgacttgccctcattgcctctgttctctggagtctgatacaaaaacgccccagttcttgacttgtgtctgcaggtttcaccctaattttgaaaattacatagaattggatttctctgtttaagtcttgatccttactcttttgtgttatcttgctttaggcttcgtttctgttcgaggtgtttgcggtcagaggaagcccacaaaattgaagcagtagactctggattctgtattaaaacagaagtggggattttatgtgaggatcgctggaacgtgtgtcagaagttactggagcaagccaaatccgatctagaagcttttgaggaaaccaacatcaagaaaccgagtgacttattaagggagcaagacattatgattataagagaagggttgatgttgattgttcaatgcaaaccagttcttaaatg

SEQ ID NO: 3594 - DNA, 534 bp, Arabidopsis thaliana landsberg
  unsure (1)..(534): unsure at all n locations
ttaacgtgtgacattagaatgtcaggcccatttaagcccactttctgtttaagttaccaaaacaaacccaacaaggcctggagaaaccctaaaaatccttattgtagcagctggagcaatatatatcccaatttgccgcaactagggttttctcttcctcacgcaaagcaatacatcgcagtctcccactgattcagcagctctttgaactactcttcgacaatggccgaacgtggtggagaacgtggtgttgagcgtggtggagaacgtggtgatttcggacgaggattcggaggccgtggaggtcgtggagatcgtggagggcgtggacgtggaggccgtggtggtcgtcgtggagggcgtgccagtgaagaagagaaatgggttccagtgaccaagcttggtcgtctcgtggcggctggtcatatcaagcagatagagcagatctatcttcattcactcccggntaaggagtaccagatcattgatatgctcatcggtcccacattgaaggatgaggtaatgaaaatcatg

SEQ ID NO: 3595 - DNA, 730 bp, Arabidopsis thaliana landsberg
gattttccaaacaaaaagttaattaggtgatatttaaaaagggatcaagatgtctttgagttgatttaggattcgattatggtttttggattgctttccaatggcataactatacaaatacacaaaattagtttcatatagagcttaagacatcttacaaatgaccaaatgacatagaatattacccaaatgaaactaaaccggagactccaattataatcggttgagctggttaaaaccatcaagctaagtggtcaagggcctaggatgataaggccatctacattggtagattctcaaaaaagagtttcttataaataaaatattgtttattttaattgaattcaaataaattattaattttaataaaaaaaaaaatcaactattcctgaaaaaacacgtggccagaaacgtctctcagagtttctgaaaacagagacgattctcacttctctctcttctttttcaccactttatattattttaataataagtatcttttctagatattgcagatggagagacaaacactcctccttctctctataaaacaaagtcgccaaatttagtgtgacttttggtgttgtggttggagatgaaaaagaatttagtgtgaaaatcacaccaaatatagtgttattctaacaccattttagtgttgtggttggagatgcccttagtgtgaaatctgtttgttttatggggatttagacttttgtaatttattttt

SEQ ID NO: 3596 - DNA, 635 bp, Arabidopsis thaliana landsberg
  unsure (1)..(635): unsure at all n locations
aattaaaaaaattaaaatcaaccatttctggaaaaacatatggtcaaaaacgtctatcagagtttttgaaaattggaacgattttcacttctctctattctttttgattactttgtattattttaataataagtatctcttccaggtgccctaaccacttcgaacagttctgaaaaccattatcggtcggctgccaacaaaaacgttaagtaatttatagattatagacctacgacataatgtttgtttagcttgtttttttaccgtgttcgtatatatgcgtatttctcttcttcttttaaatgtttttttcgatttttgtttgatgatgacaccacaactcgttgcgtggaccaaaataaacaagtgtacagagatatctacatcaaagtcatgcgatattagatcaatggtctagaaaatatcaattaaaaaagtttccaaacatcatagtactacttgacgtttaactatcaaacgaatccaaatctagatagctccataaaaaagaaagaaaaaaaacgttctctcgtttctttctattattcaaaatattctcaccaactaaaaaaagatacatcgaaacaaatctctctaatcatatctaagntataacttttcttataaacaataac

SEQ ID NO: 3597 - DNA, 3863 bp, Arabidopsis thaliana landsberg
gatatgatgatatatacaggtcgttcacaacaaatgcaaaagttggatgctctaagatcatgtccaattctcttgattggaactatgctcttattgaggacgttatgaagactgtttcaaagttatcattttatttcttttggctttggtagttgaatgtgttgtaacttctgtttggtttgcaattaacgtaagaaaggctgtttgtataaggtttttgccttttcaccatggtttctccagtggtggaacttgctgttcagttttgtaatatatataaaaagtcctttgaaaaaaaaaacattgtccaaatgtctctatagtataatacaaaagtatccaaaaactaaagcacaaaagacaaaatatctaaaaatatagagaaaacgttgaggacttatttgatcatctataattctatatgttcatgacacaacgagaagaagcttcagcttgcccttgacttggaccactcgcttctccaaccgataagggtttcacataagtctctccgaaacagagaagtactgtatttataattgaagaagcgggttcaactacaagggaagatctaaggatgaaggagaccggacacttgagagagctacagacttttgttcggaatgtatgttttcacaatggccaagaagagttaatagactcttgttcggatataattgatgaaattgtatggttcggttaagtgtaaaccggtatgaaccgaaactctctagtatttaaagagagtctcactgtaacaaacttcttcagatgaataatagaaacttcttcttcttcgatggtttcttcgattctctctagttctattatggtatcagagcgctgtaacttgaagttctaagccgattcaacctaactctcttcagattttcgagtttttctaaagtcttcctcagaggagaagagagacgaggatgaagtggctgagtggtcgaaatggtacaagatttactaatacaatcatcatacaaacaaactattacatagttaaaagaatcattttctaaattgtcttcatcacaaacaaatgtaggaacaaaccaaatcttagtaatgagaaaaaggaaaagaatgagagctatttgtacatgtaaatgtgggaaaccaaatcttggtcatctctccaccattggtgtatcccatgagcgtccttgtaatcttcggatatggttttgtttactataagattagcagatgggatgacatgaaccggctcttctacttcaactgcattgctcactcccatcgcatccatcaacaaacctcccaaggaatgctgcatcgccatccgctccacaattccggctccatacccaatctgttccatatttccccggtgctcgaaaaacccgatatactccgaacatagatggtcccctggatttacatgtatgttagggagccacgaagataatgcctctagtggatcttcagtcaagttttgtagttgcagttgctgttgttgcggctgctgtgtttgtttaagagttctagagagagcgagtcctgcggtgattagactccccgcgaatctaatcccgtgcctaacccgttcgtttgctatcctctcaatcgggggagacacataaggagggttaaacaacaatgacttaatataaactccactcttccccattgttttaccagcaagaagcgccatcgctgcacctaaagaatgccccgtaagccaaaagctcgaagctcccacagaatcagccatacttctcacagcttgcatcgctatctcaaaacgcgacgttcggtgaagcccattccgtataatatggatatccaactcgatatcacgggttatcgaatccgctttagtcaaagtccctctaaaggctataacataccgtggaactccagagtccacaacatctggctgtaacgatttgtattcaaaaatgccaccaaagatggagaaatcagcatcgtctttaaggtgacggatcaatttaaagttgaatgattcccaccatggagatgcaagagcttcagtgccttcacgtttaagctgacggtcttgctctactatatagattccttgtaccaaacaagctgctacacaacgttggtgatcttcatttcccctgtaaaaaaacacaaagacatatctcaagaatccatttcataagtctaactacatgtttgatcttgagttaacaatccaaacataccaatcaacagttgtgaggtgtgtaggtccacacaagttaaactcttctctatcagaggccattgattcttcaataagctcctttctccaactgtaatgtcacagaaactttcaattttcgaatctgaattgaaacaatgaaatctagcagataattttaagaaaagtcaacgtattggatcatctaaataaaaacttatagagagatcttatttggttatgaaatcgaagtatcacgaagacattgctgcaaaaaccctagctaactaaactcgattgaagaacaaattcagagaaaaatgcattggaaaattcgagattagagaatgaaggaaggaattgagtaaaaaaggtagaaatattgtaagagaattaatacctaagaccggagttaaaaaaacatgaatgatctttgtctacaatgtctctgcaaattttgtccgtgatcgatcttccttgtaatgaaaaagtcttccttgtaatgaaaaaaaagcacaaggatctgttggatggttatacagaaacgacggcgttttagactaattaaatttgacacgtttcgtaaaagcgtttctttgttttttttctgtcggcaagcgcttaacatttttatgtggtgtttgggttgtttggaaaaataaaaagattttgttcaaaaaagataaatgtaataaagaattctaaaaacaatctcaaacttatttaacgaaaaagctttcaaactattttatcagatgaataaagttttcagttttacattgaacttactatttatctccgttgttagtcaataattttaactcgttattattgattaaaaacgaaagtaaaataacttaatcaacataaaaattggagatttatttatctaatggaatggttaaagttattttagtcaaaacaggtaaattacatatatttttatgacattttcttattaaaattatatgagagagatgttaaatgtaaatgattgatgtacttgcataatgaaataaatgttatagaagcaagtttagcgactactctagcaacttttgatttactccatggacttatgtttttcaaaattttgaaactattgtgtttatggtgtttatggtgtctcgaccattgcattcaaatcaagtgcgaattgtaaaacacattgtttctctgtttccagatatgaaagaccgtgatctgagtaataaaataaaatgttatagaagcaagtttaacaactactctagcaacctttgatttacttcattgactaatgtttttcaaaattattttgtttcattatggatgttttaggttgatatccggtctttctagtgtctcgaccattgcattcacgtcataagtaatagattatagttcgaaatgctactttgagtagcaaaaaatctaaagcactaaaattattaggaaggatatggtgaagagtgtcggtaaagaaaattttaatccaagaaatatgtacaaagctcatctcaagatcgttaaagagtaaagacaagcgaaaacacttttggctaaaccaaacgatactatacaattctactcgagccatctttatctgatctgttcccaactattacttgaaacgataaaagcaattgttacatactttccaacatccaattacacaacagtgacataataaagttatcagttt

SEQ ID NO: 3598 - DNA, 2043 bp, Arabidopsis thaliana landsberg
  unsure (1)..(2043): unsure at all n locations
ccatggtatgatgagatgaagagcgcttagaggataatgcaacaactagaagtagtctcattgatttgtggaattccggcaatttgtccttgtggtggatgcatccttgacattatctctgagaaagatggtgacaaaagaaaacgatactatgagtgcaccgattaaaaggtaaattaaagatatcatcaatcttgttttagaataattgattaagcaataagaattcatgttttgtagaatgatgggttacacattcggaaactttgggataaagctatggtagaagaggtgaataggttaagagagcaagttgataaccatcaccaaaagattcaaagcttggagtactctaaccaagaaatgcgttcggagttggatgagatccaaaaaaagatggggactttgtggagagtttgttgtggagagtgaggaattgattgggtttgtgtgaacttaatttctgcctttgttttgtaagacttttattgagtattctctagtactcccagtattatggatatctagttttcccttgtattctctgtattccattgtattcacagttttctcttgtattctctgtattatcgtcaattcttagttttctattgtattctcagtattccattgtattcacagttttctcttgtattctctgtattatcgttaagtcttagttttctcttgtattctttgtattttcgataagtccttgaatatcaatttccaattcatatccaaattgaaatccaaaaaacggcataccaaattcaaatctccacaaggcaaattgaaatcctaaatctaaacattccaaattcaaatcctaaaaccaaaaaacggcataccaaattcaaatcttcacaaagcttgaaatcctaaatccaaacattccaaattcaaatcctaaaaccaaacaaagacaaccaagttcaattcttggttctccgagtgatccttctcgtgacgtttgcttccacgggttttgaaggacctccatccttctcttttgggtccttctctttctctttctctttcgggtccttctctttctcttgttccttctctttcgagacaccatcctcctcttgatcaccatctttctcttgaacaacatcctcctcttgatcaccatctttctcttgaacaacatcctcctcttgatccttctctctcgaatcaccagcctcctcttggttcatctcatcttgattctacgattgaacgaagttatatcagtattacgcaattatactttagttatcatagtgttacttagtattacacaattatcaatatgtacattttcctcctttgctttctgctcatccttgaatgcttccaacgattcaactcttctatccaaatcagaaatcattattataatttcattcatctggtctaccatcttcttatccaagttttcaatcatctgaaccacagaaaccaaannnnnnnnnnnnnnnnnnnnnnnnnnnnnnnnntcctccgcacccggaatctttggacctgcggtgatctgcagggcttggatatcctgctggtagagctcatcaaacctaattagacggccctctttacgacgcttctcccaactttcaaccaccatatcagccacgtcaacgtcgtcttcttcttcagtgattgctttcatgagtttttgctcctcaattccaagtgtgacgatagaatcaatgacctgtaaagataaacagtatgaatggattattataagaaaatataataactatcatttgtgaaacagtatatcttaagacaactaacctgagttgtacccaattctgcataaatggtatcaagaggaaagcctttcaaatggttcttcttgaacctcaccttgcacatcctaggacatcccggatctgcttctgcaatttcctcaataaatgtttcctcaactgtggaattgctcgaatgcaagaagctacagaataaaaaacaattttaaacacaaatagtattccagtattacagtatgcaacaatcactatctatagttgtactacctcatcggagcag

SEQ ID NO: 3599 - DNA, 997 bp, Arabidopsis thaliana landsberg
ggatatataaaagtttcaagatgtggataacttagaccgaacataagtcaaaataaacaatcacttttgaattagaatggggctaacacaagatgacgcaaacacaaaatcatatatatcagtttgaagccattttgtgacacaagtccatactcagagatgaagattttctaatgacaactacttgtattggttcttaacttttaaaccaaaaagtacttttttcattgggtcacattccataagatattgttgttacaaggtttgatggctaataaataacatattaacaatcatcgagtgggctgtgtcaataaataaagctatcgaaacataacgggcctcttaaaaccaaatgggcctaaattcaattaacagcgacgagggatccaaaatgctatcgtgttgagcagagtatatggtgcaagagaagcttgttttacttgaagcaaagtattcaagtaagctgtcgtgtggtggccacgaactatcctctgtcaataacattctttaatcttactctcaacacaccaattttgctcttctctttccttttctaaaccacttttttgatggattgattatgatcatatctcttgtattaacgagctactaaatcctcaaaatttaataacacaacaaaagcaagtcaaggaacactagaatgaattgtattaacaaatcaattacacctaaagaatacgaacaagaatcgtagaatgggtctaactaggtgctaaaaaaaagccctagccttccaaacacactgtttttcctctgttttcatataactttcatcaccggactgtaagccaactcccaccgacagaccaatcagggatcgaaccactaaccaaactcccaagtctctccaccggagaatcaaacgaggggtttgaatccaatgtaaaagaatcccaatcatcaaactcaaaaggacactttggagacatcaatactttatcctcatccttaaccttcacaacgaagttttttc

SEQ ID NO: 3600 - DNA, 1513 bp, Arabidopsis thaliana landsberg
acagaggtgaggaagtggaggaactgagctctctgctggctgctcgccgtggacagcagagtgaggtaggaaggtcgccatgggagaggagccgagctccctgcgtgctgccgtggggaagaggaggaagaaacgtgctggctgaaataataagagcaaattcaggactgaaaagccaaagtgaaagctgccataatgaaacggcaaaccttctatatatagaggaatcctatggttagggttccaaatgggttgagttgggctggcccagaacactcaaacgggctgcgctaatttattttttggaataaaaatgttcctgtggatttcgactctacagagaacagagctaattagagtttcggcgaacggacgattgagccattaattcggccgagagtttaatttgaatttgctcgaaaataattccttacgcttgattcgaaaataaatcgtcttaagacttgatcggctttggatttttgggtcggagaaggcgaatcgtgatattttaaaatcgttgtcgatacggggttttgagttcggttcggacatgagatatttggccgagtcggataaaattgatttgatgatgacatattaagcattccgtttgaaagtacggagtcggattaatttttggacatagatcgaacatcgagaaatcagagtcggacacagctcgactagcagctgtcgagcgtttgattaaacgagctttagatgagtttgataaattgagaatgattatcgagtttgcattcgtttcgagaataaaagttttaacacgctccaaaattggttgtttctcgtgatcgaataactccgaattcggtgaacttccatgagaaagcctgatagacagagatagacacgatcgagagatagaagttttcactgagcatccgagattaagataaatctcctgacataacacgaaactgacacctagggtgtcacatctgcgccctaagggcattgctaagaatcaggctctacaaaagaagtgtggtattaagtataagatcataatacaaattttcgtttttaagtactagaaattcattctcacacctttaaactattatatgctaaattgtcggccaattcatctttcgatagcaccgaaagcccgtcttatagtgtcgggaatccgaagcttctgctcatctcccggcagacagaaatcaccttgctgtctgagagacaatacaagaaatcttcttctccgctgccgttgaatactagtgccccctttggatatttcagcttctgggcatagtgttgagcttctcgttcttcttctttagagagctttttccccgaagcatgacggataatatattcaatattttctttcaaagctttgggagaaggagcggcagctttttcaggcaaaatctgttctatagcttctccctccgctgccttctctccaatttccaaggttttctccttggtgggctctgaaggcccagcttcggcaccggcctggctcattgaagcttcggct

SEQ ID NO: 3601 - DNA, 1047 bp, Arabidopsis thaliana landsberg
tgctttccagagagtagtcttactagctaaccgaccataagatccgttattgtccaacttcatatttgattcctctatgttacgattggcagatagcaacttgtggttgatctttatttttgccaaccgtagttttaaactcgatgtgtccatgtccatgaataactctgaaatgtagatacgatgtgtccatgtccatgaataacttagactctgtaattttcggagaggaccattgactttgacacaacaccaagttcatggttacttcaggtaaagtaacaacttgcgatgtgtttgattccacgacacgatcaacatcatcaccaccaacatcccacgagtatgacatttaaggatccataattcgaaggttatttttatgcaaattaaggtgcatcatcatgagggggaaaggatgctgatcctcgttatcaccaccaattagtgtcaactccttgattttgaagccaaataacaaaactccaaacctcaaacaccggttttgtctaatattagtcgaaacatcaattctccattccttccattgatattgaccacgttgtaatgaaatgggattggaccactttcgtttaatctcatcacgaccggtcactatgtaatagaacgagagagaattgaagaaacaaacgaagaagaagatgattctgctattcaacttaagaaaagtttgttacattgagactctctttatatactatagagtccccgctcataccggtttacacttaaccgaaccatacaatttcatcaatcatatagtctattatcctccctcaagatgagccgcatatggagagaagactcatcttgccaatgagagaattaaacatagaaggaaatagaggctttgtcaaaacatctgcaatctggtttgttgtatccacatgcatagtcattaacataccttgctcaatcctatctcttgtaatgtgacagtcgttttccatatgcttcgtgcgctcatggaagacagcgttgctaactatgtgtatagccgctgttgaatcacaaaatataggaact

SEQ ID NO: 3602 - DNA, 696 bp, Arabidopsis thaliana landsberg
tcgttattggccagagaccatacggtgttacggcgaggattcaacggtggagaactgagaatttatgcataacttgttattagagtacgcttcgggaggaagcttagcgagttacatgaagaaacttggcggtgagggtttaccggagtccaccgtgcgtcgccacacaggatcagtgcttcgagggttacgtcacatccacgctaaagggtttgcacactgcgatataaaactcgcgaatattctgttatttaacgacggctctgttaaaattgccgatttcggtttggcgatgagagttgacggagatttaacggcgttaagaaaaagtgtggagattagagggacgccgttatacatggcaccggaatgtgttaatgataacgagtatggatcagcggctgacgtgtgggctttaggatgtgctgtagttgagatgtttagtggcaaaacggcatggagtgttaaagaaggatcacacttcatgtcgcttttgatacgtataggtgttggtgatgagttaccgaagattccagagatgttgtccgaagaaggcaaggattttttgtcgaagtgttttgttaaagatccagcgaaaagatggacggctgagccgcttttgaaccactcgtttgtaaccattgatcaagaagatgatcacaaagaaaacttcgttgtgaaggttaaggatgggga

SEQ ID NO: 3603 - DNA, 442 bp, Arabidopsis thaliana landsberg
gatcaatgatagaactatagttgtaacaatttcttcggcatccccatgtattggcactacaaaagaaagtctagtttacatcgcttaaattaattattagcatcagttataactgatgcaaatgagttttacatcacttatataaataattctgatattggtgatgcaaatattttacatcaattgagctaaatatttgtatcgcttattataattgatgtaaatatgcatcaattgttaaaagtgatgttactttttacatcacttaatatagatgatgttatattagctacggtgatgataaatgattttaaatatttatatcagctgtgaataattgatgttaaaattagtgtctgcttttataagtgatgctaatacttgtgttatttaatataaatgatcctccatttatatttatcccccatctcaatctctgcta

SEQ ID NO: 3604 - DNA, 272 bp, Arabidopsis thaliana landsberg
cgaaggataaagcctcaaagtctccgataacgctgccttgagataaaccaatcgatcaagctcttcgcacgaaagcggctcgtccgtccataacgccacatcatcgccacgtgtctcaaccagaacggtacagatctcacggaggattttatcctctatggtcggatgctgcgtaatcaaccagaagaaccagctcagcgcgactgatgacgtgtcacgtccagctaggatgaagttgagcgccacgcgctggagggtctcgtcggagtaag

SEQ ID NO: 3605 - DNA, 566 bp, Arabidopsis thaliana landsberg
  unsure (1)..(566): unsure at all n locations
tgatgcaactggatgaacaaaaactcgaagatctgaagagacttaggtgttgaatcggctgagaacttcaaattccagcgctctaataccataatagaactagagagaatcgaagaaacaaacgaagaagaagaagtttctgttattcatcttaaagagtttgttacaatgagactctctttatactagagacttttggttcataccggtctacacttaaccgaaccatacaattttgaatcaatcacatagtctattaacgtatatacgaatgactcggtaaacccttatcaccaagtttcttcacgtaagtcgctaagcttcctctcgaagcgtactctaataaccaattatgcatgttgtctctattccccaacgttagatcctctccgtaacaccgaacaatctcaaggcaatcgccgagtgaatccaacaccaatttctcgttcgaaagcgacgatngccgtaagaatcggtcgacttcatggacataagagctgagaagtactggaggctctaatatgtgttgctatactgacagttgagaaagtcctgaatctgattgg

SEQ ID NO: 3606 - DNA, 1435 bp, Arabidopsis thaliana landsberg
aaatcaattttcaactgaagaaaaataaaaagaatggataataagtgttatttaaaaaaaaaaattacatgtgaaataaaaacaatattttagaacagaaataagtggcgggaagacgagaaagagcggcttggaccttaaaaaaaaccaaattctcactaaatgattccgtaaaaataaaattctccgatggatttcgattcagactccgatggttctcatgtctccgccactcctccccgagactcatttccgtcatcgccgccgcaacttcagtcaccggctaagcatgtgccgccggtctcccggaaaatgacgtcttcttcctctcgctcgaagcccaaagcacctacacatccgccgccaaatccctcacaggaagctccagtaccgtctccctatcctcctcctcctcctccatctccactatttaccaatctccctttccggatctgccaatcccaacccgctaggttttcttcttccgtgtcgtccttctccagactctgcagcagagcttcttttacatctgttgagaaattgaaatcggacggcgtcgattttgtgcctgagccacctctggtagaagtaatcgctcctccaaaatcagttaggagaaagcctccgaatctcatcaccgatactataacttctcctccggtgaaacctatggtgtttcgtagcaacggtaacggcgagggtaatttcgtgaaattgaacttaaatggcaagagagggaagaagtttcccagcaaatacaagggcgtctctaaatctagaagcagttactcattcagagggaagagatacaagaagaaagaagctgatggtgatggcgaatcattgttggaggaagagtctgatttacagaaacagatagaagacgaagctaatggttttattagctctgtagaggatgcgattcttgctgtgaagactgaggcttctgatgagaatctaacgaagctgttgaatttagtttatggttatgattcttttcgagacggacagttgcaggcgattaagatgattcttggtgggagttcaacgatgctggtattgcctactggtgctggtaagtctctctgctaccagattccggcaatgattcttcctggaatcacgcttgtagtgagtcctttggtttcgttgatgattgatcagttgaagcatttgccttctatcattaagggtggtctcttgagcagtagccaggtgtgtgcctcaaattgtttgtttgttgccggttcttttttttgtagtctttagaagtttttaatggagtctgctttgggaatttttttcattagagacctgaggaagcaacggagacattgcggaaacttaaagaaggccccataaaggtgtgttctatagggaaaatttggaagtcttacttttgataagactgcttggtattgtttaagaactggcc

SEQ ID NO: 3607 - DNA, 4823 bp, Arabidopsis thaliana landsberg
  unsure (1)..(4823): unsure at all n locations
aatcatcagatgggttcttctattgtgaaggaactaaagttgaggatatcatggagtcagtggagagaagacccttttacttatatagcaaacctcagatcactagaaacctcgtggcttataaagaagcattggaaggagtgagctctgtgattggttacgctatcaaagctaataacaatcttaaaattttggagcatttgagaagtttaggctgtggtgctgtgctcgttagtggaaatgagcttagacttgctcttcgtgctggtttcgatcccacaaagtaacattctttatttacccattattgccctgtatctgatttagagagctttaacttcatccctataacaaagtgtttgatttgttgatggaatcagtattgatatgaatggtatgatttggtgtaaaatgaataggtgcattttcaatggaaatggcaagtctttggaagatttagttctagctgctcaagaaggtgttttcgttaatgtcgatagtgagtttgacttgaataacattgtggaagcttcaagaatttctggtaagcaggtcaatgtactgctgcgtatcaatcctgatgttgatcctcaggtatggttaaaatttactttaaactttagcatcatgtctaacataattggtcttggatattagatagtgagcttttctgttttatacatttttcaggtgcatccatatgttgctactgggaacaagaactcaaagtttggtatcaggaacgagaagcttcaatggtttctggatcaggtcaaggcacatcccaaagagctgaagcttgttggagctcattgccatctaggctctaccattactaaggtaacactctgattatagttgcttaaagttgtattttgatgtaatcagatgaatatggattgctctctgtttagtgtttgcttttggtccgtccttagatctcaactcttgagctctacgtatttgcgtatgttctgtttattccaggtggatatattcagagatgcggcagttctcatgatagaatacattgacgagatccggcgtcaaggttttgaagttagttacttgaacattggtggtggtttagggattgattattaccatgccggcgctgtccttcccacacccatggatctcatcaacactgtaagaacaacatctctttcgttcatttgatctcaaaagtagtgggatggtagaattgttacaatccttgatgtgttccaggtaagagagcttgttctttcacgagacctgaatctaataatcgagccagggagatctctgattgcaaacacttgctgtttcgtcaaccatgtaactggtgtgaagacgaatggaactaagaacttcatagtcattgatggaagtatggctgagcttatccgtcccagtctttatgatgcttatcaggtaaaaacaaatatacttctcacaacagcatctgcagattttggtcccctttgagctatagctaaacattctcttgttcatgtttttaactcaaaagcacattgagttggtctctcctccaccggcnnnnnnnnnnnnnnnnnnnnnnnnnnnnnnnnnncctgtctgtgaatctgctgatttcctgggcaaagacagagagcttcccactcctccacaggtatgataaggatatgattctgtttggaagctcaggtaatgtggaatcttatgagtttattgtattcattacagggagctggtctggtggttcatgacgctggtgcatactgtatgagcatggcttccacttacaatctcaagatgcgtcctccggaatactgggtaccaacacattttcttgttccaggagaatcaagatcccgagagaaattgtcatgaatttgaacttattttcttcaatgtgttgtttgtttttgcaggttgaagaagatgggtcgatcactaagataaggcatgctgagacattcgatgaccatttgcgtttctttgaaggtctatgaactcttagatttactcatcattgttgcttttttgattgaattgtatgattattcggaatcaggaccataatgatattgctgttttagattttcacattatgtgctttgattcaaagtcaatgaagtgatcatatgaataagaaaacgttcacaagtcaagacagaaaataagaggtgattctgattataagaggagtctttcaagccaaagtcgtccattgtccaaacacataaacactcatctaagcttcttcccatagctataagaagattctttcaagctttttgttcacaagtttgcttgcagaactaaatgaatcaataactacaactactatgtcattaatcaagaaactaaaagaagatagttcatagttcacaggacaagtaaagtgaatttggtttatcatgtagtgacccaccgccacaagtctaatttcatcatgggttataaggaagattccaaaataaaccttttaatgtgtaaatgagacggtggctggaaacttgaagtagcaaaatggtcccatgcgacgccgtattggcgcggccacctctctccgccatataatagaggtggtcctttaagttttattttctttctgtggtttctatgttaccgtacgtatcaatttttaaaagcagctatacatggtacgacgtctaacaactatgttacctgaattgtcccatcgggccatttaatatgtggatggttgcatttttcttcttctaagtgactagtttgtacttggtaaagtgtttacgctaacatccatttgtaagtttgattcaacaaattaacttcaacagtgaaatgaacatgtctaatttggaaaagtttgatttcaaactgaatatgttaaaaatttctcagcataaataagattaatatccaaatgttaattaattattttattttcaattggatgatcataaaacttgcaaaataattaatcagaaaaagaagaagcaaattttttaattatacttgaacaatgaaaacctaaatccctgcaatttggcttttgaatttagtaagagacgttagtgtatgaatgtatgtatatgtcatcttcacgaattaatgctaaaagtttggcaaatctttggttggccaactcatttggctatgatatgttgttaccattatatatgcatgttgctgtcaatttttctcttttccagaagtttagaaaatcattatatagttacattacagggtacgtatcatatcatacagccacatatcaagaggattagaaaaaaggaatctgtgataatcatagtcttgaatttagcaaacaaaaattgttttaaatcactgagccacttttatctaaatctgaatagaaatatatactgtattctgtagtcttgggaattataagttgaagataaatatgatctttaaacgataaacaagtaaaggatggaaacgtatataactattatttgagaaaagaaattgaaagctataaaggctaatagagcccccacaccggccgtcttcccttttgaaagcaacttggtaccttttaacttgatcttacatccgtaccagtgtgtttacagatacaatctggatcatttgatctttgttttggtggtgtttatatgttgttgtgtaatcgaatgatttcttcatcgtataggttcaaagccagagatggttgtaatttggtacattgatacttacttgacattgaagattaccaaataattaagcttggtgccaaattaaaacgttttttattttcttttacgtgtgtgtaaaatatggtggttgattaattgtgcatatctaaagataaaatcatatcattgaaaattaggtttgattttgtcgggagtgtaagttctctttcacatatattattgtccttttgtagatgcaatcatgcaagtgctttaacacttccattcatactctctataaattcacttcatcacttctcaccaaaacccttcacaaataatcttgtccaacaatctctcatttctctctttcttttttccttcccatgcgcaacgaagaagctttcttctcccaacattctcttttggattcagaagatctcaatcagcaatggaaacagttaagacctccaggttcactactgaggtggctccggctaagtttatatcggcgacaagagaaccattcaagaacatgttgacaacaatctccgaggaagactttgactttgatgaactagtcagagccactgcagagagactctcttcttcttgtccaggctcctcctcctggtctcttgctcactacgccaagatcaacagagtctcttcttcttagagcattcaattgccatcccaaaatgcatttttttctttctctttttcaataataccaaagaagatgatctgtttgtaatctcttcagcatcagagtttttttatctacttcgcgttgttgaatgttttcctgctagcattcttgaattattttatgatcacttctgtttattagcattcttgaatcatctatgatcgatccttttatgtactaccaacgaaccatccatatattttactggaacgaaagcacgaaaccatgtccgatgttaatatgtttaacgaaaaaccacaaatacaatacacaaattcaagaacgttcttatactaaaaatttccacaggacttgtatatttgtgtaaagcttcatcgataagaggcaaaaaacaagaaggcgttatattatacagattgagatctgttttttttttctttttttttccggtaattacttttactctcttccaaaatgtaataataatagaaaagaaaaaaactcacttcaccatcatcacagtcgcaggaaaa

SEQ ID NO: 3608 - DNA, 3879 bp, Arabidopsis thaliana landsberg
tgccttattcacatgcaaatagttatgggagcattggaagctatggtagctacaatgatggtactatacaggacaatagctatgggagctatggagggactggcaatatgtttgcatactattctcctgtgaatcatccaggcctatacatgcaaaaccaaggtggggtctcaatgcttggaactagtcctgatgccagacgtcgggttatgcagtacccacatggaaatgggccaaatggccttggtacaagtccatctgctggaaattttgcaccactaccccttggcactagtccgtcacaatttactccaaatacaaacaatcaatttttagctgggtctcctggacaccatggcccgacatctccagtaagaaacagctgccatgggtctcctttgggaaagatggctgcatttagtcaaattaatagaagaatgagcgctggatattctggaggttctcagtcgcaagattcttccttgtcacaagcccaagggcatgggatggataacttttatcaaaatgaggggtattctggacaattctctggttcaccttcacgccggcaactggattctggtgtcaaaaatcgtaaacagacacaaggaggcactacattaagtactgggtactctacttataacaatgccaactcatcacttcggtccaatatgtataacccttccagtactgcacaccatcttgaaaatccggatactgccttatcagtacctgatccaggagactgggacccaaattacaggcaagtaaacaagatatctctctaatttaccagttaatgaatgtcaaggttctttgtctgtatgttagtgtgtatatgatgtgtacttgaacaaatctggctggtttagctagaattcgtgatattgagctcatgtattgtcttccatttaaaccatatcagactaggcatgtcacagcccgtgatttctgaccatgttcttgttaactggtagttaagtttttcacttgatagacaaatttgcttgctgaaacagtatcaaaatcgaccagtagagcgacattaagaaccagtcacgttagtgtcaatttatattggcaacgtctttggttacctgatgttattctgtctttttttaatagatacttgaccacttttcattctggctatttacagttgcataatataatactatttgtatgtcaaaattctattttcaggttaacatgttttaccccagtccttcatttggacgttctaatatgcgcaattttgttacatgtacagtgatgacttgcttctagaagaagatagtgcagatgagagttctcttgctaatgcattcagcagaggtatgcaacttggttcaacagatgcctccagttattccagaaggttcaacagtaatgcctcgacctcatcctcaaatccgactacccaaaggtaaccgagaacacgtcttagggaaactattctgaatctacttttcttttgatgttggttcctactttggtgatatttagatcttacatcttccatggatatattaacttatgatgaaaaactgtctagtacttgagtatcagaactgtgttaaatttggcccagggttcctgactagaatattggaacgcagaaaggcccatatttgatgttgatacctcctgtatatgtgatattagctatgtgcatatagttctcttcataggacttatattctattagaaggttgccctgtactacaggtagtcccttgacaagatcaatatatgtgtgaactattgtacaaaactagttcttggtggatgtgtatttgaagcaattaggaagagtctaaacaccattttatattttatgatccagtagataggcagctgaacgtgtgacattccagacaccaatttatattttatcgttactttttctctcttgatgtaactatgaatcaatatcaggagatatgctcccaatcaagccttttcacaagtagagactggcagccctccaagtaatgatcctcatgccagatttggccaacatataccaggatcacaatatattcctcatgtctcccagaactctccaagtcgcttagggcagcaacctcctcaacggtataatcatgggagaccaaatgctggaagaactatggatcggaatcacatgaacgctcagcttcctccttccaatacaaattctgggggtcaacaacgttcacccagaagtagctcatatacaaatggtgtcccttggggtattttctttcactcatcttagctttctctagaactttttttcttgtttacggcctctagttggtcttagactggaaattaatatatatgtttcatcttgtaggtcgtaggactaacaatcatgtcccgaatgttccatcgacgtcccatggaagggtagactacggaagtattgcttaattctgcagtctttcttctcatttattttgttctttcccttggtgtgcaatcttcttgttagaagtgtgggaacaaagttgtactgagacaagaaacaaacttagttcatggcttgtgggcttctgatcagaacgtgcttattcattgtgctttttgcacaaataaacaaaaaaaaaaagtatgttataattgatattgttatctttctggcatctatctctctgaatttctttttggtattctctgatgaatgtatcttttgggaaagttgttcaagtgtttaagcctagccttgaaaaaagatccttaatttccgtaaatttcagtttattagcagactgatattggtgtcgtttcttgttttatctcttgaatttctctaacaccttagtgaattatatctggtagagtttggaacagaaacagaatgtgtagaagcgaaaggatgggatgttggttttaggacaattgaagggtcctgcacccgctatgtttcaaccagtcaagcccgtagacgcttagagatcatgtgtacagattctctttagtttgacaattcagatttaccaaaatcaaaattcatcaaactagacattacacaaaatcaataacttataacaacacatgtttaacctgtttttgagtctttttcacattttccatacacaccaattttttagtcacaaaaccatctcggaactataactcacagagtgtgagtggaatcagatgaactggatgttgcactctgatgaagctctatgaagagagcttagattggctcgcaggtgctcgttgttgccgtccctttcaacaccaattctcacagtttcaagacattgcagttttcccaaaaaatgcctcatttgtttcagctctataaaacttcctccataccctgtaatctctagcaccttgattcgacatgccgataaacaacacattcctgtcttcctctcgctaatgcaggcgcatgcgtctccacatctactagtaactctgtgcacaagaccctaaaaaccataacaacaaatcagacaaacttcttttacataagagccaaaaagaacattgtgtattaatttctcaaaaacatgtcatactttgatagatagagtatgaagatttagagaattattgagcagaagaggcaatgcttgccatcctttttcttcgtcgctctcaagagatagattacggaggttgttgaagaccggcatgtgattgcagcagaagaaaaacgcctggtttataatcacaaccagtaaacacatatagacatgatacaaaaccgataaaaccacccatcagtcagctgtagcagaacagaactgacctcaagagaatcaggagacaggtgaagggtcttaactttgcgtatcccagaaaccaggcttgtaacattaccaaaaacatcatatggacgatagacatcaaaatctttgtcttcataatcac

SEQ ID NO: 3609 - DNA, 3526 bp, Arabidopsis thaliana landsberg
taagatatatacaattaactttcgtgatatatgtgtctctttgtctcattttaacctttaatactaattggaaatttatacagccaatgaatcctccaaggtttatgaaaacatctcaagcaacaacaacaacaaccaatgttcctgcactaagtgatgatgctttgactcgtgtcgccatgtcacttccttctccaaaaactgcgaataaagaagatggactgtgtgtgatttgtgtggatgcaccatctgaagcagtgtgtgtgccgtgtggacatgtcgccggatgcatttcttgcttgaaagagattgaaaacaagaaaatgggatgtcctgtttgtcgcgccaacattgatcaggtcattaagctatatcatgtttgaagcatatctcctctatggctggaagatattgaaactatctcctattttttactttgtctttaaaagataactacaaattttttattgtgtgtatgttatgtggtgaagtcaaagaagtcgaaatatagaatcacgacaagtttagtttgtctttttatctttgttacatgatcaatgttaatttttccttcaatcttacaaactctatatgtaacaacctgttccgtggaattcagttggcgttacagcgcatcgatcctataagcccttctgacccattatatattttgttagtatatttggagtttttcgaatctaagacctcaccctttaacaatttttccagaggactagcattccactgaacgtgttgttacactatgattttttttattggcaaatatgaaagaaaagaaacaggtgtacaacttacgaattatcccaaatatacaaaacagaacgaacgccgacaaaaactagagttgatgataaaagtagaaaaagtatatttatttatataaacaccgatgaacaaataacgacctccaccgattctctctctctctctctctctttcacttgcagtgtgtcgctttgctgccttcattctcatttcacacgaagattaaaaaaagttggtctctttcctaatttagaagagtgataaaccaatcccagatccgagtctctctccccatctccttctttctctcttttgaataacacactgcggttttttgcctttgagatctgtcattgtctcttccaaatctagaacctttacttgggttgtgtaagtcccttcttttgatctttctgggtttcgctgttttgtttaaagtttcaattttgagatacgaatcggttgtgctctgtgaggctttgtctatcattattactgtggtagatttgaattcgttgtttataagcttcttttatgatttttaaatcctatcgtttgattgatacaccagtggataatgtatttatgggtcgatcctgttctgtttcattctcacaccagatctgttcttattctgggaaattgtagttgattcctcgtgcaaagattcggaccaaatacttaataacaaacacaccaaattctaacagaacagtgaggaatcaactgttttgtgaattgagtgcttttatatcctaaaaatccagattctttgctagtgttgataattgaatactttagtttctctaagtgagtagtagtagaccacatttctctttttttgtgtgtggttaagattggtatatgtgcgtgtgttctttttgttactattcttacagatactaagcattgtctttttttatatatatatagaacagattcaaatatctgtaactagtgagaaatcatcaatttttaaagctgaagtcttcacttagtagtctgcatcctttaactcggaacgttgggtctccgtttggctttatctcaaataagaaggcaatgaaaggaagatcagatggagggcaaaagaagcgggtgattgctttggtttgcgttgcagcggtagttcttgttttcgtatatctgttctacggctcttctgatcatagagcatcggctatcgaatacgggagaaaactcgggttaggtggggatgatgatgatactaaacaggatgacacttctagctcatttggtgttgatgatggtttcactccgagaagttttcctgtgagtcttcttgagtgttttctcaatgatggttatgttcaagtggtatatgttaatgtgtttgttttttacgaaggtgtgtgatgatcgacattcggagcttattccttgcttagataggaatcttatataccaaatgagattgaagctggatttgtctttgatggagcattatgaacgtcattgtcctcctcctgagagacgattcaattgcttgattccgcctcctaatggatataaggtgtctatcgatatgttatacagttttatcgatatgattagttacgatgacataactgttttctcttccaatatgttttaggttccgattaaatggccaaaaagcagagatgaagtgtggaaagtgaacatacctcatactcatcttgcacatgagaagtctgaccaaaactggatggttgtcaaaggagataagattaatttccctggtggaggcacacattttcattatggtgctgataagtatattgcatcgatggcaaatgtaaggaagttacacttggtgtttgtacaagagaacgtatattattctttcatttgctaattgtattcttggaaatttttcagatgcttaactatcctaacaacgtgctgaacaacggtggaaggctaaggacggttttcgatgttggttgtggtgttgcgagttttggaggttatcttttatcatcggatattctcacaatgtccttggctccaaatgatgtgcatcagaaccaaatccaatttgctcttgagagagggattcctgcctccctcggtgttttagggacaaagaggctcccatacccaagcagatcttttgaactttctcactgttcacgttgcagaatcgattggctacaaagagacgggattcttcttctcgagctagacagagtacttagacctggtggttattttgcatattcatctccagaggcatatgcacaagatgaagaggatcttagaatctggagagaaatgagtgctcttgtggagcgcatgtgttggaagatcgcggcaaaaaggaatcaaactgttatttggcagaaacctttgacaaatgattgttatctagaaagagaacctggaactcagcctcctctttgccgttctgataatgaccctgatgctgtgtggggcgtaaacatggaagcttgcattacttcttacagtgaccgtaagttttcaagcttcttctcgcttttcaataacagcgtatatttcctctgaactcttttttggggttgtcttagatgaccacaaaaccaagggaagtggattagctccatggccagctcggttaacctctcctcctcccagacttgctgattttggatattcaacgggcatgttctgagaaggacacggtatatagaaacccataacttctctgtttattgcaactgacaaactaagaccatgggctattatgtcacatcct

SEQ ID NO: 3610 - DNA, 312 bp, Arabidopsis thaliana landsberg
gtgggaagactcatccagagattgatgtttgttgctacattgtcttgtcataacgggtatattccgctttcagaggcactataccatcctgctgacgttaaagagtcgaaacagatgctgagccttctgtgctcgaaacgtgtgaagattaagacggcagagggaatacgctcattgagcaaccttaaaatccatgtgatccacacatacatgaaccatatgaaagctcgactaatctttttcacctttatgagtacagggcacaagaggtggactggcggatcgctaggggagagagtgttgtgaggtgag

SEQ ID NO: 3611 - DNA, 4211 bp, Arabidopsis thaliana landsberg
ttttggaaaaatctggtagttgatcattcctatttggctttatgttgcgttagcactacaagtaggcattttgcaattgcttcgtctcttatatatttacttcctgcaaagtttgagaagaaccacaatattttaaccaacaaaaaaagaaaagagaagcatgagactatttcttttacttgctttcaatgctctcatgcaactcgaagcatatggttttaccgatgaaagtgataggcaagcgttgttggagatcaagtctcaagtttctgaaagcaaaagggatgccttgtccgcgtggaataactcattccctctctgcagctggaagtgggttagatgtggccgcaaacacaagagagttactcgtttggacctcggaggattgcagttgggaggagtgatatcaccatctattggtaatctttcgtttctcatatatcttgacctctctaataactcttttggtggaaccatccctcaagagatgggaaacttgtttagacttaaatatttggctgtgggctttaattatctggaaggagagattccagccagtttgtccaactgctctagattgttgtaccttgatttattttcaaacaatcttggagacggtgttccttcagaactagggtcattgagaaagcttctttatctatatcttggtctaaacgacctcaaaggaaagttccccgtatttatacgaaacttgacgtctctaatagtgctcaacttgggatataatcatctggaaggagaaattccagatgatatagctatgctgagtcaaatggtgtctcttacattaacaatgaacaacttctctggcgtttttcctcctgctttctacaacttgtcctcacttgagaatttatacctccttggtaatggtttctcgggtaacttgaagcctgattttggtaatctgctaccaaacattcatgagttatctttgcatggaaattttctaacaggagccatcccaacaacacttgccaatatttcaactctggaaatgtttggaattggtaaaaacaggatgacaggaagtatctctcccaactttggaaaactagagaatttgcattacctagaacttgctaacaattctttgggaagttactcttttggagatcttgcatttcttgatgctttgactaattgctcccatttgcatgggttatctgtgagttacaataggcttgggggtgctttgcctacatccattgtcaatatgtccacggaactcaccgttttgaaccttaaaggaaacctcatttatggaagcattcctcatgatattggaaatctcataggcctacaatcacttttgttggcagataatctattaacaggaccactcccaacctctcttggaaatcttgtagggctcggggaattaattttgttttcaaataggttttctggagagataccctcttttataggcaaccttactcagttagtaaaactatatttatccaacaatagttttgaaggaatcgttcctccgagtcttggtgattgtagtcacatgctcgacttacagattgggtataataagttaaatgggactatacctaaggagatcatgcaaatcccaacccttgttcacctcaacatggaatctaattctttgagtggctctctaccaaacgatattggaagattacaaaatcttgttgagctattacttgggaataataacttatcaggacatctcccacaaactttgggaaaatgtctttcgatggaagttatttatctacaagaaaaccattttgatggaaccattccagatataaaagggttgatgggtgttaaaaaagttgatttgtcaaacaataatctctctggaagtatatctgaatattttgaaaacttttccaagttggaatatctcaatctatccgataacaatttcgagggaagagtcccaacagaaggaatatttcaaaatgctactttagtttcagtattcggaaacaaaaatctttgtggaagcatcaaggaactgaaactaaagccatgcattgcccaagcaccaccagtggagacaaggcatccatctcttttgaagaaagttgcgattggggtcagcgtaggcatagctttgcttttgctattgttcatagtttctctaagctggttcaaaaaaagaaagaacaatcagaagatcaataattcagctccttctacattggagattttccatgaaaagctaagttatggagatctacgaaatgcgacagatggcttctcttcgagcaatatagttgggtcaggtagttttggtactgtgtttaaggcattgctccagacggagaacaagattgttgcagtgaaagttctaaacatgcagagacgtggagctatgaagagctttatggcagaatgtgaatctttgaaggatataaggcatcgtaatctcgtgaaactattgacagcttgcgctagtattgatttccaaggtaacgaattcagagctctcatctatgagttcatgccgaatggaagcgtggatatgtggctgcacccagaggaagtcgaagagatacgtaggcccccacgaaccttgacacttcttgaaaggcttaatattgtcatagacgtggcttctgttttggactatcttcatgttcactgtcatgagcctatagcgcattgcgatcttaagccaagcaacgtccttctagacgatgatctaactgcccatgtaagtgattttggtctggctcggcttctcctcaaattcgacaaggagtcattccttaaccaactaagctcagccggagttagaggcaccatcggatatgccgcaccaggtaaaaaaaatatcacacatctgtaatgttctatgaagaaacttggtatatattttatcgttacaatcttgttctgtgaattatggtgcagaatatggaatgggaggacaaccatcaatacatggtgatgtgtatagctttggggttctccttttagaaatgttcaccgggaaacgaccaactgatgagttatttgggggaaatttaacactacatagctacaccaagttagcgttgccagaaaaagtattcgaaattgcagacaaagcgattcttcacattggtcttagagttggtttccgtactgctgagtgcttgacactggttttggaggtgggacttaggtgctgtgaagaatatcctacgaaccggttggcaacgagtgaagtcgcaaaagagttgatctcaatcagagaaaggttctttaaaaccagaagaacacctagacgttgaagtttttatggttttgcctacaaactttgcagtccactcaaaaggcctatataacattgtcttttacaatttgtgttttcttcttctctattaaacatacttatgctatacgtgtttttaagccctattaaaacatactaagatggcttgcagaatattgttaatgaatgcttgtgttttttgcagacaatatatgtatgttgtgtaaccagttttatcatatatatcaatgttcccaactttatttggattttctcagtttttcgtagcttaaaaatgaattacaaactttcatgatttaaaaggcaaacgtaactcaattctagttgttcttcacaatgactgtctttatgaactccataactgttgaaactaattgactttggtgctcagtataaccatgattagctgcttccacaatctccagcttgtggtttggtatgatcttcgcaaactccttcgcatcttccacaggtattacctcgtcctccgatccatgaaccgtcaagaccctgtcattacaatcaaacacaagtcaatcttgtgaactcaatatgacttagagaactcagcgagtctcacctgcactctttgtcaatcttgaggcaagcttcatgaatatcagtgcttaacctgtccattaagctcttctcagtaacacgataccccgattttcctgcaaaagaccaacacattgatagaaacactagagtcctaatcaaagacatcgcaggaaaaccaaaaagagataacaataccatctccaacatcgatgaatccttgttgcttaattctttccaaaaaatcttctccaagacgctctcttataccctttttaagatcataacgtcccgagagattgattacattgcggacatcatgatacttggaggcgtagaggaggacaacatcagctgccttactgtgacc

SEQ ID NO: 3612 - DNA, 1364 bp, Arabidopsis thaliana landsberg
aattagaatcagatttttagaaagagctttaaaatcttgatatagatatacgttcaagaaaatggattatctttaccaaatacagagataagtctatatgcatgatgcactgtttagtgcaattttatggcataaccatacaattacatataatgaaagacaacaacattaaacagtacttggggccttgacaaaactaaatgggctttatatcttatcacgaatatggacccatcgaccattggacccaagtctttggatttaaagagtctctgtatttggctttacatgacttcccagccaagaaactgcaaactgtagtctagtttccaaaacctaacagcaggaaacaagaagcatcaaaacagtaacgaaaagacaagaatagagatccaagaagcccaattatgcgttttagatttgcagcaacgagaaagagaaacgagggtttagggtttaagacaatgatggaaataagagagcataaacagaggaaaaaaacaaaccacagattacgaaagacagtatgatattatataggcctcaaagtaaggcttttaagtggatggcaaagtttgtagagaaaaccataaacacttcaacgtctggctgttctccgggttttaaagaatctctctctgattgagattaactccttggctgcttcactcgttgccaaccggttcagcggagattcttcacaacatctaagtcccacatccaaaatccctttcaagcactcaagtacagggaaaccaactctgagaccactatgaagaatcgatttgtctgcaatgtccaaaactctttctggcaaggccgccttggtgtagctgttcagggtaaagtttcctccaaataactcattggttggtctttttccagtgaacatttccaaaacgagaaccccaaagctatatacatcaccgtgtattgacggttgtcctcccattccatattctgcaccataattcacacacacaaaaacgacaacaagattgtaatgaaaaaaggaacacataaatattcttcatttaaacgttccatatgtgtaatagttttacctggtgcggcatacccaatggttcctctaacaccagctgagcttagttggttgaagaaagactcctggtcgaatttgaggagaagacgagcgagaccgaagtcgctaacatgggcagttagatcatcgtcgagaagtatgttgcttggcttaagatcgcaatgagctataggctcatgacagtgaacatgaagatagtaccaaaccacaagccacgtctatggcaatgttaagcctaacaaaaagtgtcaaagttacttgagggcctatgaatctctccgacttcctgtgggtggagcct

SEQ ID NO: 3613 - DNA, 485 bp, Arabidopsis thaliana landsberg
accccattaccttataattgaaaatttgaagcaacgcatccatgggaggtcaaagctcaaagattggtacatgttgttcacacaagactactgctcttgaagctccagatgttggtgacgtctctgtttttctctcttgctacaacgacaagccctcttttggctgatatcgtaatcccctttttacaatattacagaaaacaaagagaatggtgaggtaaacggtgtgcattcttttcgtgaatactcactagaacagcttaagatcgccacctcttgttttgctttggagaatgttgtatctgaacatggagaaacagctccaaatgttgtctatcaagggaaattggagaatcatatgaagattgctatcaagcgcttttctggaactgcctggcctgatcctcgccaattcctggtatggcatgtacctttcagtttatctagttgccaattctcaaatctattaactttggatatgtctg

SEQ ID NO: 3614 - DNA, 828 bp, Arabidopsis thaliana landsberg
gttactcatttgaacctcgggggatgcaagttgggcgggatagtatcaccatctatcggtaatgttcgtttctcatatcacttgatctgtctgataacgctttgggggtatcatccctcgagaggtgggaaacttgtttagacttgaacacttgtatatggccttcaattctctagagggagggattccagccactctatctaactgctctagattgttgaaccttgatttatattcaaatcctcttagacaaggtgttccttctgaactagggtcattgacgaaactcgttattttagatcttggtcgaaacaacctgaaaggcaagctccctagatctctaggaaacttgacctctttaaaatcgcttggcttcacagataacaatatagaaggagaagttccagatgaattagctagactgagtcaaatggtgggtcttgggttatcaatgaacaaattctttggcgtttttcctcccgccatctacaatttgtccgcacttgaggacttattcctctttggtagtggcttctcgggtagcctaaagcctgattttggtaatctgctaccaaacattcgtgagttaaatctgggagaaaatgatctagtgggagccattccaacaacactttccaatatttcaactctacaaaagtttggaatcaacaaaaacatgatgacaggaggtatatatccgaactttggaaaagtaccgagtttgcaatacctagatcttagtgagaatcctctaggaagttacacttttggagatcttgaatttattgattctttgactaattgcacccatttgcaactcttaagtgt

SEQ ID NO: 3615 - DNA, 1000 bp, Arabidopsis thaliana landsberg
acttaagtaaactaaacgaatgattggaggatttgatattttaaaacgttttgcattatttcaaacaaatgaggattatattaaattattataacacgttaagtatttaaaggaaacaattggttataagaccatataagattaaacctttgatattgtagtaagaaatgacatttgacttgatctcaagtaactaagatgatcctaatcctaaagatctcttctgtttcatgtgcatctccatacgtattagatttctgctacatagaagagattaacggagcaacacgtaactactgccagagcagcaacacacaatacccatgtgcaccgggcaaaggctacttcggtcgtggtccgatccaactatcatggaactacaactacggagcgtgtggtcaaagtctcggtcttgaccttctacgccagcccgaacttgtgggtagtaacccaactgtagctttcaggacgggtttgtggttttggatgaatagcgtaaggccggttctgaaccaggggtttggagccaccatcagagccattaacggaatggaatgtaacggtggtaattccggtgcagtcaacgcaaggattggatactatagagactattgtggacagcttggtgtggaccctggtcctaaccttagttgctaaaaaacctttgaacccaaacacggatatatgtgacgtgcaggcacgtaataatatgggataataagtgagataataaacttaaatttcacacgtatgtacttaatgtcgggtctcggtgttccctgcgtcacaagcaaaaaattgttgtaataaacttgtgaaagtgattttcttttcttatgtgacttcttatgaaagagaattttaagattgatagatgtttgagattgacacttgcagtatctgattttgggatacacgcacaaattgatacttattataatattttataatcttgtatttatcacgccaaaaacataagttttttaaaaaaaacttaatg

SEQ ID NO: 3616 - DNA, 1024 bp, Arabidopsis thaliana landsberg
cgatcactcttcggaacacctgaatgatttttactctcttgagagactgaatgattctccccattttcacccatggtcaatcaaatagaaaatctaccagcttcttctacggaacttatcacgtgtgagacagtgagagtcaattcacatcagcttcaatattctttctcgcaaactcaactcttcaagatcaaacaggaagctaacttaaactgatgcacttagaatctgtcacatataacacaaatctataagaaccaaagctcattgtatgaaattaaagcaccaaactaacaccaacgcaaaaactgcaaaccaacatatactagaaaattacatattgttattgttttatttttatgtcgtcgtaatttttttttgtttagccaaaatccaaaaacaaaaaccaaatctataatctaaaaactacttaaaaacccctaaaaaattcatggccaaggagagacacaaatcctacttataagatcatacaagtttttcactgcaggtttgtagagaattcgagttaatgtgatctccaaattagtcaaaaatatccatttcgagaaaaaaaaagtctcaccttaggagaagtacagtattctcttttctccagatggctgatccaacactcgagagttcgcaaattatgaatactttacaagcaaattgtttagctttgactttgagagacgcgcgtaaacgttttcatatatttgctccttattgttttacatttttacataaataaccgtaaacttataaaatgtgacatgttacaccaaagaataaagaaacaagggttcatcgatattaaagaagggcatcgctctttgttcttcatctactgtcacatatcagtactctagtagtagtgtctttatcaaggtgcgggtcttttacaggaaactccgggtttcgtgttaccgaagagagcttaatggaaaggttaaacactgatatgcatgaagcttgccttaagattgacaaataatgcaggtgagattcgctgaggtccctttaa

SEQ ID NO: 3617 - DNA, 751 bp, Arabidopsis thaliana landsberg
atacctagggccaaagaagcccatcacagaagaacatgtagtttcttgaaagctggagctacaaaacgtggttaagatatttcaacacgaagcagagactcatgcccaactccggagaaacaacctctctcctactgctggagatgtgtttgatgctgattattttctcatccagtaaacgaattaaacgcagaatcaattttttttgtttgtattcatattactaatcttagattcgtgttagccatcttgttgcaaaagacacagaaagtagtctgaatcattgagagaacaaagctcttaagacgaggtctctgttccagcatctttttcgtcacgatttgaccgagtattcgtgtattccatatgatgcgagccatagacaagcagaggctgcacttgcttttcggtttgctctataaagtttgcaagcaaacaaaagggctggtcatggttgctgaatatcacaaactaatgttgtgtgctttctgacaatgttccatgattctagaatgaaacgtaatcgcataagccaagtagaagccatgtttgtcatcatataggacttcttaacttagatgacaaacaaggactactacttgacttatgcgattatttcaattgtacgtttcatttctgtaagtattagtataatggtttaccgtgttatccgatgatcttatcttggtatctattattcttaaggcaaaaatgaggaatgagagttgaaaatgtgttaagaagcataaca

SEQ ID NO: 3618 - DNA, 1113 bp, Arabidopsis thaliana landsberg
ttcctaagatattgggaatctcataggcctacaaaaacttcagttgggaaaaaatattttgaccggaccacttccaacttctttgggaaagcttctaagattggggttattaagtctatattcaaataggatgtcaggagagattccatcttttataggcaacctaactcaattagaaatactctatttgtccaacaatagttttgaaggaattgttcctccgagtctcgggaagtgtagtcacatgcttgatttacgcattgggtataacaagttgaatgggactataccgaaggaaattatgcaaatcccaacccttgttaacctaagcatggaaggtaactctttgagcggctctctaccaaatgatattggaagtctacaaaatcttgtaaaactatcacttgagaacaataagttttcaggacatctcccacaaaccttgggaaattgtctcgcgatggaacaactttttctacaaggaaattcttttgatggagcaattccaaatataagagggttgatgggtgtaagaagagttgatttgtcaaacaatgatctatcgggaagtatacctgaatattttgcaaacttctccaagttggaatatctcaatctatctattaacaattttacgggaaaggtgccttccaaagggaattttcagaactctacaatagtttttgtatttggaaacaaaaacctatgtggaggcatcaaggatctgaaactaaagccatgcctcgcccaagaaccaccagtggagacaaagcattcctctcatttaaagagagttccaattttagtgagcataggcatagctttgttattgctgttggtcatagcttcaatggttatgtgttggttcacaaaaagaaggaagaaccaccagacaaataacttggttccttctaagttggagattttccatgagaagataacctatggagatctacgaaatgcgacaaatggcttctcttcaagcaatatggttgggtcaggtagatttggatctgtgttcaaggcattgctcatacctccccagcccccattgttgcagtgacagttctaaacaagcagaaacgtggagctatgaacagctatatggcagaa

SEQ ID NO: 3619 - DNA, 732 bp, Arabidopsis thaliana landsberg
cttcgaggcacagacgaggaccacatcaccacctatataaagtcaaaataagttgagtttcttgcaatgtcagttttcaccccttctgtgaatccgttgttcgaggcagaaaatcaaacagtcctagttacctttactgtggccaataattataggaaccacacggttcatgttagtgaagtatcggataacagaatgtagatcatcagcttcatagttgtagttaccaaaatagaaactgccttcactctctctgaaacaatggaagatcaaaacaaaatccaaattctctcattcactgatgcaaaacaatgataaagcaagcaagagaaacatacccgttcccagagaaatcaaaacggaaagcgctgatcccttctttctctatagcagcagcaacatttttcatgacttggtcattctgcataatttcattagccaatgaaaagtttaatgcacataaaactcctagcaacatatgcttccacctttagcgtacaaatcgctagttagcttaattgtcaatgcacttactctattgaattcaaaaaccagtaatcaaagaatataacaggaaactgtggtaagattttcagttactcagtagtgtataaccttccaaatcacttactatatgaaacaatcaaaccgactaaaacaataaaccccttgaagtcttactatctagttggaataagcaaagaacagatttgaagttttccctcaacattg

SEQ ID NO: 3620 - DNA, 313 bp, Arabidopsis thaliana landsberg
caaagtcctaaagaaatcaagcaataagtcgaagaagaaatagtcttcggacgttgttgttgaggcttaagtatttgtcatctgagataaacaatgctctactatgagcatcatgatctcgtttctgtctttcttttttctttacgttgctgaactttaatgctttttctagtttaagaaacttgtttcctgttttttatcgtgtggtttttgatctcctaatgcatgatgacatttaggctttaacatttcaccatctatgttgagtagaatgtctataatttggatgcggttcttttgtcctccgtttttc

SEQ ID NO: 3621 - DNA, 5032 bp, Arabidopsis thaliana landsberg
cgccaaaattttgtagctgcgagttctagcagtttcacattcccatgaatcctgcaagccccatgtaaagaatcccatactgggggatgctccttgcatggtgacttcattacaaattcatacgcttcttgtaacctaccagcacgccctaacgtatcaaccatagcagcatagtgttgtccctcaggttcaatcccgtaatctctcttcatagaatagaaatgctcccaacctttatcaactaaacctccatggttacacgcagtgagaaccaccaaaaaagtaaccggatttggtctacaaccttcttccttcatcttttcaaagcattttaacacctctgaaacttttccatgatatccatagccagacatcaatgaggtccacgtaatcacatttctagtggacaattgatcaaatactctgtggccatcagagaagctactgcatttaaagtacatatcaacaagagcactatcaactataatgttcgacttaatacaccgctttatcatcacagcgtgagctctctttgcatgtaccaacgatgctaacgcagaacaagctctaaacactgaagcaaatgtatactgatcaggaactattctgatctgtgtcatatcataacaaataaaaagcccttcttgctctaaaccttttgcacatacccagatatcattgcattccacggtatcaaatctctaatcttcaaactacgaaagaatcctccagctgtttgaagatcacctgataaggcgtaaagtatcaacaacttaactttcaaatactcattgagagcaaatccaacaacaaccatctgagcatgtatacgtttcccttttgtatactccttcctttgtttacattcctgcaacagtacagcataagtctcaggctctacttgcaatccgctactccataacaacccaacagcttctttcaatctccctgtaacacatagaccctttaatgtcttatctagcttctctgttttcctctgattctccacctgaaacctagaaccaaattttgatcactcaatggaaaaagcttcagactttacaatctcatagagatgatcatagcagaattataaaaggttcagcctttatacgtgatacaagaacaaagataaagattccaattttagacgaataaacccaaaatcagggaaatgaatttcgaaaccttccaattctcttctctgcaagcatccggcgtaggatcgtcgtcgcattgccggagaacatagaactagaagcggacgtctgagacgcctctgtttggaactcccgagtgtagtaaaccattgcaagcttattcagcttgaagcaaatagtcaaacattgggatttgtgagaaagagaagaagagattaacgtcttcattctcacatcacccaccttaccgatggagaaattgtgcctcggaattaaaaatttcgaatttagggttcttcaagcacagtggaaagggtttaatatttgtaatatgttttgatataaacatgtctgatttcagttattaaaaagtcaagatggccgagttggtctaaggcgccagtttcaggtactggtccgaaagggcgtgggttcaaatcccactcttgacaagttcttttttttttcatattaaaccttcataactattgagtattttaagtttatttttttttatttttcttatatgaaaaacataataggaatatttatcaaaagtcatgaaaaaaaagaaaaaaaagagaagatgataagagagaacaaaagaataattagctaacacaactttagatgatactttgtttattttaagacaggtaattcagttaattttaaactagataattatttctcgtgtttggctggcttaaaacacgtacatctgtgtttgagatatgtcgaggaaagagttcctcgtgggaagacttttcttccagcttgaaattttgatacaaactgatgttgctcatatatactaataatagccagatctaactgttacagttattaactaacacaactttaggacacacggtttttttcttttgactaatgagattttgagaagaaaacacaaccactaaacagaaccattttccagtgaatcattcttatctcaaatattgacctaaagttaatccttaattattggatatttagaccatttgttttaccatcaagctgtcactgttacatttctttttattcttcttctaaatttagcatttcaatttttgagctttttctctataaatacagtttcccaaatccataagacattcattcctgttttgttttaaaagtgttaacttaaacagtattcagagaaaaatatttgtttagtcgatcgagatttgggaaaacagattcagaccaggtaaaattttctctgctttgtaaaattctggctgatgtaattagaagatatcatcacctctttcataattttccctgatttaggatttagattggctcatatattatggtttagaaattaaatgcagtagttatccacaacattatctttttggtttatctcttgaaagagataatcatgtaatatggtagttaatcacagagattagttatctagggaggtctcctttttacttttcacccagaatctcgtgaaatccggatttaaccatcaaacgagatcgtccaaagtaattaatccatgtaggtcccacttaatcaactttataattaagagaatcttatccaaattcatctcatcttctatcctctcatctccccgtatctcactctctgttgtgttctagtaaaaaactaattctctggtacgacactggaacattttcttttcttttttaacttattatgtttttttcacttgcatgtcttattcggtttggtcttctaatctaattgttgactttgactataagatctgtctaaatggaaaggaacaaaatgaaaatcttaaaccctttaatgatagaagatgatgcttctaatttcccttttcgaatatattcgtttaagtctctctttatataattaacagtttttgttaatgggaatcgcaggtaacgattgagaagaatctctctttttctccactgagagaatcgcattctgagagatcagacaagaaaagacaatggtggaaggaggaattgccaaaacagacaaaacagagttcactgagtgttggagaacaacatggaagacaccttacatcatgagacttgctctctccgccggaatcggaggtcttctcttcggttacgacaccggagtcatttccggggctcttcttttcatcaaagaagattttgatgaagttgataagaaaacatggcttcagtcaactattgttagtatggcagtggctggagccatcgtcggagcagcagtcggaggttggatcaatgataagtttggtaggaggatgtcgattcttatcgccgatgttcttttcttgatcggtgcgattgtgatggcatttgctccggctccttgggttatcatcgttggaagaatctttgtcgggtttggtgttggtatggcttcgatgacgtcgccgttgtatatctctgaagcttctccggcgaggattagaggtgcacttgttagtactaatggtcttctcatcactggtggacaattcttctcgtacctcatcaatcttgcttttgtccatgtaagtgaaatgatttagtttcaagttcttgtgtattataaccaattcaagaatgtctctaaatttgattgaaaatgttgttgaatagactccgggaacatggagatggatgttgggtgttgcgggagttccagctattgttcagtttgtgcttatgttgtcgctacctgagtctccaaggtggttatatagaaaggacaggattgcggaatccagagcgattcttgagaggatttacccggctgacgaagtggaggcggagatggaagctttgaaactgtcagtggaggcagagaaagcagacgaggcaatcattggagatagcttctctgcaaagctgaaaggagctttcgggaatcccgttgttcgacgtggactcgctgctggtatcacggtgcaagtggctcagcagtttgtggggatcaacactgtcatgtactacagtccttctattgtgcaatttgctggttacgcctctaacaagacagctatggccttgtctcttattacttccggtttgaatgctttgggttctattgtgagcatgatgtttgtcgatcggtacgggagaaggaagctcatgatcatctctatgtttgggatcatagcatgtcttatcatcttagccacggtgttctcacaagcggccatccacgcccccaagatcgatgcgtttgagtcaaggacgtttgctccaaatgctacttgttcagcatatgcccctctcgcagccgaaaatgctcctccctcgaggtggaactgcatgaagtgtctcaggtccgaatgtggattctgcgccagcggggtacagccgtacgcaccaggagcatgtgtggtgttgtcagatgacatgaaagcaacttgcagctcaagaggaagaacattcttcaaagatggatgtccaagcaagtttgggttcttagctatagtgtttttggggctttacataaaaatctacgcaccatgtatgggcactgtcccgtggatcgtcaactctgagatctatccgctcagatacagaggtcttggtggaggaataaccgccgtctcgaattgggtctccaacctgatagtgagtgagagcatcctctcactcacccatgctctcggctcctctggtaccttccttctctttgctggcttctccacgatcgggctcttcttcatttggttgctcgttcctgagaccatagggcttcagtttgaggaggtcgagaagttgctcgaggtcggcttcaagcccagtctcttgcggcggagggagaagaagggcaaagaagtcgatgctgcttaaagcgatgatgatcacttatctctctctttctattttaattattgtcgctgtctgttcctaattctataatgt

SEQ ID NO: 3622 - DNA, 1865 bp, Arabidopsis thaliana landsberg
tggattcatgaattttttttttttaagcccttttcgaatcattcttttctttggtaatctcaataaaaaaaaataaaaagaagacttaattatgacacctggaacctgggttggggttttctgagttccaattgcttaaagaaccatctggatcttttgaaatagactgcttcagagttaaaagagcaaacccttcgtcgtttagagcattcaattcgccattgaagttccagataagaagaaacatgaataaaagagatcccaccgacatttcggaggaatcagtacaaaaaagtagcagaatttggacaagagtttacttttggtaatggagatatcaagaatgagaagagtttgcggagattgattagagaattggagagagaagagcagtgagagtgtgaaagcatgaaaagggactgtgagagacgttgatagaagattcgggcttcctaagttggacctttggactttggtatctatctataaatatcccaactttttttttttgagatcaacaatttattgggtatatgcactagatgactatgaaactgaaaataattgagtaactaactatggacaacagtatcttgtcgcaaagatatatagaattacttgaatatcctttttatcatcttctctctcatcttctccctagttttctttttctctatcttttttttgcaggattttctttctccctggatctatgtcgtcaacttctcttccctttatagatattctctaccaccatttactctgtaataatatcacgatgaccataaccaaataccaaattgttttcgttatttttgtttaattcatgtcacttcttaaattttcatgggttttttctaaattttatgtaattttttatgatatactggtatctttccgtttaacatactatagttttggtttacatgtgattttttaatatgccatgctattgtttattttgacatgctattgttcaaaaatacataagattttgtataaataccaaattatttcttttgttatttttatttgattcatgttatttttaaaaattacatgatttgtttttttaatcttttgccagatgactctctttctagactacttactctgtaataatatcacgatgattatgaattccacctctgagtcttttttctttttctcactgaaccttatggagtctctaccaccataaagaaatgtatcattgtaaaaactataagtttacaaggttaattggtattttcctcacccctaccccaccacaaaaagagtcatttaccaaaaaaaactgacatatagttagtttctttattatgctgtcaaatttggtcatcccttaatattatccatttactttatacatgttaacgacttttttaatatagtaaaatattttttaacttttaagtgagcaatttaatcctcaaagttaacattgatctaatcactgtattttttgttagagaaataaaggttagtttactgtatacacgagctatataaacggtcattatgttaacgactttttctaatatagtaaaatatttttaaaacttttaagttagtaaattaatttccaaaattgaaattagaaaattcagacgctaatgttaaaaaagaaatcaatatttgtatgtgttatcctctctaaatttaaatcgaggacgaaaagacgaaaattcctatatgaaaaactcaagttcccagctaataatctatagtatgtttctaggtgttcctcatgatgatctttatgctgttcacatgccgtgtgaaagattataacccaacactaatacggttttagttttcaaattcggattatctgactccagcgttgaagctattttattttt

SEQ ID NO: 3623 - DNA, 309 bp, Arabidopsis thaliana landsberg
ttgcttaccacttttatcatctaccaggggatacagagccaatgaaatgggcgatgcgactaagggttgctttatacatttcagaagctcttgaatactgtagtaacaatggacacacgctatatcatgatctcaatgcttacagagttttatttgacgaggtaattacttaaacgcaactcttgtacgggaaaccatgttttgttttatgctatatttctccacttatgcgtttatgaattttaataaggaatgtaataccagaatttaaacattttgggtggacgaaggatctattgtaagataacc

SEQ ID NO: 3624 - DNA, 3271 bp, Arabidopsis thaliana landsberg
  unsure (1)..(3271): unsure at all n locations
ttacctgcatctacgatcaatgcaatacaatccaaatttttcaaggtgttcagacggtgagccactactacagtagtcatatttcggctagccatgatcctagctagagcgtcctgaacctcctgctctgagttagagtctaaggaactcgtaacctcatcaagtagaaggattatagggcttctcagaaaggctctagcgatagctatcctctgtttttgaccacctgaaagttgtactcctctttctccacattctgttttatattctttttccattgccctttatagatgaaaaacaaaacataaagagaattgaacatagcaaaaaaaaaaggaagaaaaaataacaaaaagcatacgaaaatattattttgttagctcattcaaaatttacgataagaagtttgatctctaaagtctataaatatcaaacaaaacaaaaatatgttttgaactctagaaactactagccaaaacatacaaggaggatgcaaatactacttgtgtattattagtaaaaatagaatcacacttacgagatgaaatcatgagcattcgcggctttagcagcctccactacctcatcctccgttgcttcgggtcgtccgagtataatattatctcggatacttcctgagtaaacaactggctcttggctcactagagcagtatgttttctataccatttgatatttatatctcgcaaattttcactatctattttcacacaacctatttccacatcatagaagcgttggatcaaagctatcactgttgatttaccacatcctgatgtaccaaccaatccaatgcttgtcccaggcttgatatccaaggaaaaatctcgaagcaccagaatactaggccggttagggtatgaaaaatcgatattcttcagttctattcggccttgtattgtccccatcttttctccatggtttgtattttcctacatgtaacactaactattaataatatacgacgattagttcaaagaaaattttcaacgtcctatagaagatgataaaatgttaatggatgtttgtaacttacatgcgatgaaggacgatcaaggatattgaaaacagaagaaatggcggcagtgcctttggcaaggtcagaagtcatgcttcctgcttccgcaataaccttgccagtgcttaccaaaacaaagaatgtcttgaatacatccccggccgatatttcccctttttgaaccaacactcctccataccaaaagtctaatgcccatgtcaagaatgttaggcattgtgcagaccccatcccaaagcctgcgagccaagctgccttcctaccctttctttttgcctcatattgagcattatcaaatatttctatgatcttcttcgtagaccctaaggatgtaacaattttgtggttgtaaatagcttctgatgcaatctgtgagctacggttttgtgcataggcgtaattgttggaaattttggagagcaaaacctttttggtatagaagcaaaggatagagagaggctgtaccgcgatcattaccaacgcaagtttccaagaaattagtagacctatgatcattgcgattgtgacacctgaaatggtctggacaagtaaggagattctgtcggctactaaggacttcacaatggacacttcattattaagccttgaacaaatctcactggtaaagttctcttccacatcaaaccatgcaggttcaaaggtaaagattttttcaagcattttcaaccgaagtcgttgcattagcctttcacccatttttgcaaaactataatgctgaaggagattaagggtgatggagagaaaggtaagggaaatgaagattaaagagtagatgtgtatcttatcttgcatttcttgagagctttttgcgaaaaatgctgatatcataccgccaatacttaaggcataaaccggttggattgcaccaaatgtagctgctgatatgcaaccgacgagagaagacttccactcaggagaaacaaatggaagaagtcgagtgaatgaagtagaagggatattttcattgatcttggttgtgtgattgctctccaatgtgataggagaaacaatgagatcaggagatgacctattgcttagcctaaggacactgttcatagtcgaccaacgttgttgtatctcaggactgttgaccctatcttgaagatcttgttgatgttcatgaccgaattgtctttgaagttttacgagttttgcataatggttgttctttgtcatcaaatcttcatgagaacccaattctctaacggaaccattttctaacatggcaatgatatttgctcctctaactgttgaaagcttatgtgccaccacctatttcacaatatatgcatattgttataaggaaaaaaaaactcatgagtttgagaaaagtttaaagtaccaatgtagttcgtcctgcggctacttgatcaagtgcattttgaatcaatgtttcggattctccatctagtgcacttgttgcttcatctagaagtaaaataacgggatttctaataattgcccgtgcaattgcaatccgctgcttctgacctcctgataaaagggcgccgcgattgcctatctgttttcatgtcaatggtataacaaaatataacaaattataattatgtaaataaatttactttcaaatacatacgtgtgtatcataaccatttggtagttgtgttataaagccatgtgcatttgcagcctttgcagctgaaataacttcatccattgacgccttatttttcccaaacattagattttccattatggacgttccaaataaagcatgatcttgactcactacaccaatgtgttgtctcatccattttaactgaagagtctttatgtcaaacccatcaatcctcacaaacccctcacatggatcataaaacctttgtagtaatgcaattactgttgatttgccacttccactagctcccattaaagctacactttgcccaacatcaacagtgagagtgaagtctttgagaattatggtttctggacgagaaagatatactaaggttacacgttcaaactctactcttcccttcattttctctccgggtatgaatcctttctttgtatcctcaccatctatctctgaaattctatcaattcttgaacatattcgagctgccgcaactgaagcctcggaaaagtatcttatttcagtcagtgccgtccctagagagctgcaccattttattcattcacaaatattacttnatatctcatgcaatctg

SEQ ID NO: 3625 - DNA, 4713 bp, Arabidopsis thaliana landsberg
ccagtgttagccgatgttaaccaccattgaccgatacatcctgctttgatcagaaccggcattgaccagtgttgaccgatgttgaaactagacacggaccacggagcaaaactacatatgttcaaagtaaagataaaagtaacctgaacaaacgaatgaccatactgcaataccgaggattcgtgttattcacggcaggtttttatttttactcgaccgtttgatttttttcttttcgatcgatcacactttcttcggattttagattttttttccggcgattgacgtaccgtttaccgaggcacaccattaatgaaagaccaatccgatcattttaaaacaaaaatattgtttaatcatacatgtcatattgacgttagctgtctttacgtattatcttatggaaataattttatataacatcaaatattgatctagtgctgactacaataatagattgcagcgtacttatacctcacatggcctttttcaaatcctctctataacattcacaaatcaactactaaacagttttaataatcaaagaaatggtttcataaaaatttgtgcaaaggacttatttaaaaatattattcattttatttgcaaaaatatgaaaaatatgtaaatgagtttagtctacaattgatagtgttccgttataattaatttggttttttcgagaatagagagcataggtaggtaatctagcaacttaggcaaagagacatattgatacaaatctaactttcaagttcaaaagagagttctctggagactgaccaatgagaaataagctccatgtggaccctttgccaataaagacgagtggtttccacattcgacaactgctccattgtctaaaacagcgattgtatcacatttttggatggtgctaagcctatgagcgatcacaacgcttgtcctcccaaccatcaaacgctcaagcgcgtcttgcaccacgctttccgattggctatccagagcgcttgtagcttcatccaggagcaacaccgatgggttctttagaaccgctcgagcgatcgcgattctctgtttttgaccaccagacaattgcactcccctgtccccgcaatatgtgtcatagccgttagatagtgatgtgataaaatcatgagcgttggctgcctttgctgcctcgataatctccgattcatcgatcttgtttgatgctcctccatacatgatgttctctcgtattgtcccagcaagtaacgttggttcttggctaaccaaagctatgtgttgacgaagtgatctcaaatgacacgaccttatatcacgaccatcaattttaacaataccctttaacgggtcgtagaatcgctcgatcaagctaattatagtagatttacctgacccgcttggacccacgatcgctgtcgacttaccatcttcgatatcaatggagaagttcttgaatataatcacatcaggccgtgttgggtaagcaaagtccacgttggaaaaacttatttgtccctttacttttttagggacgtaaccgtctgggttctccggctcaatggttgtgttgcgatctaatactgcaaacactgacgcaaccgcatctgatcccttgactagatcttttgtcattgtcccagcttcggcaataacccgacccgtacttgcaaaaatcaaaaatatttctaaaaattcttttgacatcatcttcccatcagcaataagtttaccaccataccagaaattcaaagctgaaacgcacgttataaggctttgtgaagtccccaacataattcctgctaaccacgattggcgggcgctatctttccgcggtccttcttggaccattttaagtaagttaaggatccgttcttgtgacgagaaagctgtgatggttcgaatattggagacagcttctgcagctagtttactgctttcatcttggcctttgatggcatttctcgacatgcttttgagcagaacgcgttgagtgtagaagcacacaacaatcactggctgcaccgacatcatcactatagagaatcgccaagagatgaccaaaccaattgcacatgtgatgctcactgccgatatagtttgaacgagtaatgacatccgatcaccaaccaatgatctcacctatcataacaaaccattccaagatcaatacatagattagaatagattgttcattgaagttcaaattagaaaggcagaagaaataccatgttagcatctttcgctagtctagagcaaattgcaccactcgaattctcatctttgtcaaaccaattaacttcaaacgttagtatctttccgagcatacgttctcggatacgttttgttaggtattcgcccatgtacgcaaaaccataatgctgactgatattggacaagaaagtgaacaaagctagaccgacaaataacaacacatagatcctcgttttctccttgatctggtcatggctcgctaggaaatacactgataccattgaccccgaagaatatgaataaattggttgtacggccccaaatagagctgcacctaagcaaccatataatgcatgtttccactctggtctattcattgccatcaatcttttaaatgatggcactagtgaattcccatccttaggactcaaatcaggaaaatctctaacgatgcttgaactcgtgctatgaataaaatctttaggactatacttcaaatctttgctcaaactcgatgctcgaccttcttccaaacttacattgatgttatgatctgattctttattatccatttgttgtaaacggactagagaagtatattggccgtctaacttctccaagagttcttcgtgtgatccagtttctataatgcgaccattatggactacacaaataacatcagcattacgaatagtagataggcggtgagcaatcacaatagttgtacggccaatagaggcattgtctaaggcttcttgaactaccctttcggactcagagtccaatgcgcttgttgcttcgtctagaaggagaattattggtgatttaattattgctcgtgcaattgcgatcctctgcttttggcctcctgataattgtactcctctttccccaacctaatttaacacaaaaatcaaatatacactcatataaaaacttttaagtaaaaggaaaaaaaaaactataataagttctaaaaaatggagtataacctgagtttggtaactattggggaattgagatatgaaactatgcgcatttgaagccttggcagcttccactatttcgtccattgatgcgtcctctttaccaaataatatgttttcttttatcgatgtggcgaaaagcaccggctcttggctaacaagacccatttgtgatctcaaccacttcacttgcaatttattaataggcaaaccatcaatgagaatctctccagcgatcgggtcatagaacctctgtaaaagtgatatcacagttgattttcccgatccacttccacctactagagcaacagttttcccggatggaactctaagacataagtcatcaaagattggggtttcaggtctagatgggtaagtaaacttcacgtggttgaattcaacttctcctctagttttctcaagtatctgaccttccaagttgtctgagtctataccagggactctatttatcactttcataatccgttctcctacgacaaacgcctctgagaaatatttgagattcgacaaactttgaccaagtgatctgaaaaatgtaaaataccaaaggtgaagaccacaagatggtttgtttttgtttcaacaaaaccctaaacactgtaaatatagtaacttacgtgccaccgaaggtgacgcaaacaatgactgaggagacggtgccgcctttggagccatggttcataaccatccgacttccgtaccaagtcaagaacccccatatagcataagtgataccattgctcccaatggcaattcccttagctagcccttgtctcaacccaagcttcaccgacccttgaagcgcagttgagaacttttcgatcatcttcttctcactaccaaatgcgtagacagttcgaactgatgagatgacctgttcagctatagaaccagcctcattatactcctcgcgtattttcattgagatgcggattagggcacgtccgtacattagtccagggatcaagaggaggatgataaatggaaagcctacgattgtgagtctccacagcaataagaaacccactatgtagcttgcgacaaacgcagatgtattcatcaaaaagtttggtaactgcttgaataaaaatcatcaaaaaaacttgtttaagaacaagaaacaagatcaatgtacgtaatatagaaaagatgagaccttttcactgatgaaatcttgaataacgaggctgtcactagagacactggtaataacatcagaagtgcttgtaacatgaagatcaaagtaacccacatcttgtcttaatactgctcttaagtacttctctctcatttttgccgcttgtctctcccctgttcttgtccagcaatatccttctgtttggttaataaatatgcaaaccatccacaaaattaaatagtgattagttacattaattgagatcgatccatcaaattagggtttttttcttaattaaaaagggacacaaacatcatctataaagacttaccaatgaaacatatcacccaagatgcacgagccacataa

SEQ ID NO: 3626 - DNA, 557 bp, Arabidopsis thaliana landsberg
  unsure (1)..(557): unsure at all n locations
aaggtatgnnnnnnnnnnnnnnnnnnnnnnnnnnnnnnnnnnnnnnnnnnnnnaaggaaacatttgaggtatcaaagatctgcttttctcgaccacaacgtcgatatggacgagcttttagcttcaattcaccagacccagaacgaaaaagagcttttttctttgctttcaacttacaaagacagacaattatctatacggttcatggtctctcttctttctcgagaaaatgattggcagagatcattggcattgctcgattgggttcatgaggaagccaaatacacaccttctgtgttcgcctacaatgttgttcttcgaaatgtgttgagagctaagcagtttgatattgcacacggactgttcgacgaaatgcgtcagagagctcttgcccctgataggtatacttattcgacgctaattacctcgtttggtaaagagggtatgtttgattctgctttgtcttggcttcaaaagatggaacangaccgtgtttctggtggaccttgtttgtatagcaacctcattgagctntctaggaggctgtgtgattactc

SEQ ID NO: 3627 - DNA, 1518 bp, Arabidopsis thaliana landsberg
aggatagagaacgggaaacctactattgttagtctccacagcatgatgaaacccacgatgtagcttgcgacaaacgccgatgcactcatcaaaaaatttggtagctgtttgaaacaaatataatgttttcacttgtgagaccttttacactaaagcaagcaacaaaaaatgatgatttagagatataaacgttagaccttttcactaaggacgtcttggatcacgagggtgtcactagagacactggtgataacatcagaagtgcttgtaacatgaagatcaaagtaacccacatcttgtcttaacactgctcttaagtacttctctctcattcttgatgcttgtctctcccctgtcctagtccagcaatatccttctgttttgtttgtatttggaaaaccatccacaaatttcaataaaatttattatgttgaaatgcaccaaatttagctttctttttggtgttaaacattatctaaaaaacttaccaacgaaacatatcaccaaagatgcaccagcgacataaagcaaagctacggcattctgttatttagccaatgtttgtgtaagaaaaaacgaatatacattagtactcttttcttatatatgataaatattattcacaacaaagggttatagctagatttactccatctcacaactctcgtggttccatttttaaaccaattagcaatgaatgaaataaaataattcatatctcttatatattagattggatttatacacgactcataattcctaaacacatgtcgtcattcaatcttgctaagaccaagaacagagaacatagaataaagaagagagaaaaagaccttcatgatggcatgcatgaaggttttatcaccgaatgaggaatcaccgatgtcgttgagtagcagcccggtgatgaaaaatattataggagtgatgaagccatcaccgacggctccgattaaacctaatcccatcagcactaaatccacactgtccgcatgcatgaatattgatcttacgcttccaaaactcttcatgatcttcttccttctccttttgcttactttgggtttcgaaaaaagaaatactaaacgacacattgaccttggggaaacgacaacatacaaagtcctcattttttaagagcaaatggcactattaatgaagactctaaacttaatatgttaaagaaatctaaatttttcgattttcacgtgtgttgtaataagttcacgtcttcctggtcattttatattgcaagtagcagcaaccgggaagcgagaggccgttggctattcaatgcttacgaaaaatgtaacatgattttatagcatttcatatgaactatcttaaatattttctttcttttaaacttatgagaggcgtggcttttatctttatacattttcagcgtagaaacacaacagcttatattagatagcgctggcaaatcattgcagtggtctaacacctggctttagaataaacatctatagactgattgaacatgaatagcttcagatg

SEQ ID NO: 3628 - DNA, 1140 bp, Arabidopsis thaliana landsberg
catccggattctccggctcaatggtggtacgacgatctaacactgtgaatactgagtcaactgaatttgagcccttggctagatctgttgtcattgtcccagcttcggcaatagcccggcctgtagtcttaaagatcaaaaataactcaaagaatgcttttgataccatcttcccatcagcgattaatttaccaccataccaaaaattcaaagctgaggtgcacgttataaggctttgcgtagtccccaacataatcccagctaaccatgattggcgggcactttctcttcgtggaccttcttgaactctctcgagtaatttcatgatccgatcttgtgatgagaaggttgtgatggttcggatgttggagacagcctctgcagctagtttactgctttcatcttgggcaatgatggcttttttcgacatgttcttgagcagaacacgttgaatataatagcagacaataattactggttgtactgaaatcatcacaatggtgaatctccaagcgatgaccaaaccaattgtgcaagctaccataactgttgatatggtttgtaccagcaatgacattctttcaccaacgagcgaccttacctatcatgacaaagcaattcaagatcaataaatggtaaatatatttctcattgaaggtcaaattaataaggcagaaaatataccacgttagcatctttcgctagtctggagcaaattgcaccacttgagttctcttcctcatcgaaccaattgacttcaaacgttagtatcttcgagagcatctgttctcggatacgtttagtcaggtattctcccatgtaggaaaaactatattgttgactgatactagtaaaaaaagtgaatagagctagaccaaaaaataataacacgtaaattcttgtattctctttgatctgctcatggttggttaggaaaaataccgatatcattaacccggacgaatatgcgtaaattggttgtacggccccacctaaggatgcacttaagcaaccacataatgcatgtttccactctggtctattcattgccatcaatctcttaaacgatggcacaagcggtttcttatttgagggatcgagtcagaaagattcgtaacaatgctttgaactcatgctatg

SEQ ID NO: 3629 - DNA, 690 bp, Arabidopsis thaliana landsberg
tcatgctatgagccaagtctcttggattataatccaaatcgtttcttaaactcgagactcggccctctttcacacctacgctagtgttatcacatgattcttcattcttcatttgttgtaagcgaactagagaagtgtatttaccatctatctccatgagtttgtcgtgcgatccagtttctacaatgcacccattatgtagaacacatataatatcagcattacgaatggtagagagacggtgggcaataacaataggtgtacgaccaactgatgcattgtctaaggcttcttggaccaccctttcagattctaaatccaatgcgcttgttgcctcgtctaggagaagaattatcggtgatttgattaacgctcgtgcaattgcgattctctgcttctggcctcccgacatatgcactcctctctccccaaccttttcggtttacacaaaaaccaaatatacgttctcattaacaaactaaacacaaaaaaggctttaaaaatttactctaaagatatgagtctaaacctgagtttggtaaccatgaggaaattgcgaaataaaattatgagcatttgaggccttggctgcttccactacttcatcaaaggatgcgtcctctttaccaaataatatgttctcctttatcgatgtggcaaagagcgatggctcttggctaaccataccca

SEQ ID NO: 3630 - DNA, 124 bp, Arabidopsis thaliana landsberg
cagtgtttgtcttgctcgacccatgttttgctttataacttgagggtaaccaacacatgcttattgacagttttcttatcggctttaacagtagatttgagggaccgaatctttataccatctg

SEQ ID NO: 3631 - DNA, 1126 bp, Arabidopsis thaliana landsberg
gcttggtaatgtacattcattatactccctccttattttttttcacgctttatctttccttagagcaaagttctcttccacttcctctctgtaattttctccccccaaaccaacggactatccatttttacaatgaatcctgaccatgaaagacccgagtctccatccttcgacgagggtggttctagtaacgacttctgcacccgactgaacgacatagccagtccgcactaccaatctaaatgtattcttcaatccctcgaccaattgagggaactttgtcgaattccgtctgaaattatgacggattcgcagatgccggaacccatcgagtccccggaggatcaccgtcccggtttcttttgtgtctacgaagtcaatttcaaaggttgcgggctgacatttcctcttcccgaagctcttgttcggtatttagctggtcttgaaattgtcttaccccaattgactcctaacctcctccgaactattctggggatcattactattgcgacggagaccggctttgtcatcggagtccccgaattgaatgatctatttagtgtaagaagttaatcgaagaaaaccgggtattctcaccgtacccgaacgctaacaggaacctcatctcgcatctcttgaataaagatgagaaccagcatcactcctggtttttgattaagaaaacttctgtttcaattggaaatctttccgatgtccttccctcgtagtggtctgcaaagtccggtagctcttaggtcatgtatgctattctcgcttatttcttctcttatctgaccgatcttattgttttccacttcgtagctttcatcgctctgactctcgcaaccacggattcgtcgaattcttcaaaattatcattgaaggggagaccctttggaactctttcactctcgagcggttcatagaagccaaccgcaagctcagaataagtccgcctggacagcttctataacttccaccacctcccgctctacctcacggaacctcagcccgggctatcgctacacgacgtaagacattatccaagccgatggacaaggcttgtgaagcaaacaagacatttcttacgccggttatcgacgagagaggataaagtaggactcta

SEQ ID NO: 3632 - DNA, 2505 bp, Arabidopsis thaliana landsberg
  unsure (1)..(2505): unsure at all n locations
tgcaattgtgaaccaagtgatctctcatatactcgatttcatctgatcgcctccagactgctgcatcatctacattcactacatctacccaaactctagctgcattctctcccaaacgaacatggtgtacattttgatctgggtctattgaatgcactcgtcctgcaccaaccacccgcttctttccacttatatccattaacttgcacttctgattagccttcaaaccttcagatattttttggcgctgacatgttacattataaaccaggattaaacgcatgtagaaattttattagtcaatatgtcaaaccaaagacaaacttaccggagatctccgtagaggggtttgtgatgctagctgagttttcttcacaggagactttggaactactgttggttgcttctcaccaagagattttgcaattgttcctgcagattctgaacccttggctgcagatacctgaatagaagaattatgacctgactttccttttgttgctccattttgttgcttctcaccaagagatttctctgttgctccattttgttgacttgctgctgctgactttccttttgaggctgatgctgttggataagttgattgagaactctgaagaggagctttctgaactgctgaatctgtggtgttttcataggaaactttgtgggcaggccatgctacaaaagactataaacagtcctcaaggtatgtcacatccatcgttggcctccatatgaacgtctcaggttgaagtattacatccacaaatactttcactgcagcaggtccgagaggaagcccattaactaatgcagattggtcttttgtctgccgggggccttctgcaacaataacgggattgaaagacaaatccagtagtttgcacttgtttccataagtgggtcttggtccctgtcaaacacattaaaccaatgtcttagtatgactctgaatatataacatttaactctgaatatataacattttacctgtgcaatgtcttctagattgagcttctcctctaggctaacacacatagcaacaggccaagctatcatctgaccaacagctttctccataatttccatgttaactacgggtctccaaaggtatgcttctggtacaatcgtagtgtcaatcaatactttaacatctgtaggacctaagcgacttccattgactatctcatccggatcagaagatataatacaaccctcggcaacggttgcatcagtaccagcccaatcgatcaagatacacttaggttgtgatccttggttcacactctgtataaggaatcaataggctattatcatataattacgcccaagagatcaaaagtatcaaataaaagtaacttactcttgcagctgagttttcaccaacttcagctgattgtctctgttacaaagaaagaaaaacaaagtcaaatcgtatgtactaattgagccttaagtctgtatatataaatagataagttcactaacctggttcttcattttttcaattacttcttgtagctcattgaccttcttttgtagatgaagctgattctcttgcatttcagccatacacttgtgcttcacttagaaacaagctaacttggtcttattcatattgcgacccattgctctcagtctacgaggattgtcaggccctaacagttggcttagtgaattttgtgcttcatttgctgatggattatcattgttaacaatctcttctgcctttttttaaaactcataagatacattttaaaatattaagtgtgattcaaaatgccaaaatgcaaatcaaacgaaacaaaacaactcacaatcttttcagcagcattcgtattcactggtgtaccatccttcttagtacgtgacttaacccaaacctttagccttgtcacttcagatgggtctgcactagcagttttctaaaccaaaaaaatgatctcagttaatacataagtgtttggactttggaaaaaggctgagcaatatgaacaatataagtgtgtacaactattaccatgtcttcggcaagtctaagcattcccctgcgactactagtatgtggaatctgattgcgccttctttccttgtagctatcgcttacaacctaacagatgaatgttaatttctattgtatatagataaatttacaaattccaaatgcatatcttaaattcttggctagttttgagcttcacaaatttacgccaatcaaaagaagaaatgtttttgggtcgcatgttatcctctcttggttagtcttagcttctctaatgtttgtaacttgccttgatttcaaggacctccacannnnnnnnnnnnnnnnnnnnnnnnnnnnnnnnnnnnnnnnnnnntcaagttcaaactttgcctgcagtcaaaaacaaaacagtcaagtactcaccaatatctaataaacttgtaaattttacacaaagcttacctgaacagatttctagagaactgtcctgagttcttcaccaattttaatccaacgtt

SEQ ID NO: 3633 - DNA, 471 bp, Arabidopsis thaliana landsberg
  unsure (1)..(471): unsure at all n locations
aggagatgaacaagaaacgccttcttcgntaacctccctaaagacctcagaagagatattaaacgccatctttgcctcgatctcctcaagagggggagtaacaagctttctctctttttcttccataaactgaactaaagaaccctcagaatccaaattatatgatgtttatggtaggtacctttgtttgagataatggatgagcagttacttgacgcggtttgcgataggctaagacctgtgctctacaccgannnnnnnnnnnnnnnnnnnnnaggagatcctgttggggaaatgttgtttgttatgagaggaagactggtaagtgccaccactaatggaggaagaagtgggttcttcaatgccgtgaacctaaaggcaagtgatttctgcggagaagatcttctcccgtgggcattagatcctcaatcttcttctcactttcccatctcgacaagaacagttcaagct

SEQ ID NO: 3634 - DNA, 616 bp, Arabidopsis thaliana landsberg
gaagatgaaaactacgacaggagtgatgaagccatcaccaacggctccaattaagcctaatgccatcaatatccaatctacaccgtccgcatgcatgaatatcgatcttatacttccaaaactcttcatcttgtccctcccactctctttttcatcttctttacccattatctcttttgtttagagagaaagagagagaccaaaacgacgcattgacctttgggaaacgacaaactacagttttatatagcagccgggacagagggagatcgtaggccttttattatgtatgaaaattaagttattataacattggtatcaatacgtgaagataattaatgtactagtgtagaaaagtttagcataaataaaatatttctagcattgagttaattttttttaaaaaatttggtcataacaaaaatatgttagatttgacagaaaactgtttatcagttacacgaagtataaaccaacacatcgtcacatatacatattttaaaaatgtcgcgttagctacacgaagtattgatatcacatatagacatacacgaacaaacataagtcatgaagaaacaccatatcatccactttaccagaacggcataaccagtgt

SEQ ID NO: 3635 - DNA, 6983 bp, Arabidopsis thaliana landsberg
gccaattcgtgacgatttcctgacactaaataacagtagtaaatactcgactatatatgtgactccgtaataagttactcttttctgactgaaatgcaattagttttgtacgtcgatgaaacaagaattgtggtcccaaagtagtcgcatatgagtattggttttgttgcgactagttgtagactctttttgtcatcgcatttaagactcatatttgtaactctttaacctcgaatttggtcacactgttgtaattggtttggtcacaatttggttacatgttttggctaatcataaacctaattaattaccaaatttaaaattttagtaatcaagctccaaaaacaaaaattcaaacccaaaataacttagcattatcatcctaaatagacaaaaaattatcatcttaaatagacaaaagattatcatcctaaatagacaagattatcatcctacaataagtttacaacataacaatatatgaaaatagttcatgagtttcataaagcattagacaaaggggatgagtttaattcgctgcctgctggtatggtggctgaaggtgtggagcttgctggtatggtgttggtggctgccggtgtggtgcctgttggtatggtgttggtggctgaaggtggtgtagaagaggccagaaaagctactaattctggatctttatctttcatgtacagaacaagcatctcgaagcatgagatccgcttatgagattatcgttggtcctcatcccgtcttgcattctcagtgtcgtgctcagctatcttgcggcgtagttgttcttaaagtttcaaagctgttgatgaagaagagcttgcataactttctttcattttccctttgctaagtgtctgcacaagtgatccaagaccaaaatggttgcccttttgatctttttcagtacactaaaacaaagagaaaccaatgcaaagtcaatcaacataacaggctaacaacaaagtattaaaattagataatcctatgatgcgatataaagtgaatgattcacatacaaattaagggtgtcatagaaactatacctggagaaagaggtcacgatgagttgactgttcagaggaattcactgaattttctggaccatcatcatctatttctatcagtcgctcttcacatgtcttcttataaatctcaggtactttttcagcttttgcatcaacatatgacccgtcagctcgagtgtgtgttttcataaacacttccccaaatgctacagggcgcccatatagttcctcctacaatgaaattgaaacacattaaaatcatgtaactaatataagaaaatagtgaattgtttggatgactattagaggaatgttaccaattcttggtgaacttgcacaaatgatttctgaccggatacatgtttgtggggaccaagaccgccacgaccggagtttctacactgtgaagcactttcactcctcaccattgcctgactggtgttccaatgaacccacatctgattccaaagtttatcacgaatcaaaagaggttgtgaaccactcctcttagcttgactaacaatgcccttcatccgcttctgggctatcacttcgaaccccgctctaacagcctcagtaagcccatgatcccaatagaacatccgctacatagtacaaataaaagagataagttagcacatatacttagtaaatgagtaacaatatatatttgaaagataaaactgaaaattttaccaggaaactcctgaaatatctctctcggatgttcaaaggagtgaccttccaaatgaagtatggaccatcaaatttcctcctaaatactccaccaatcgccctagatagtttacctttatgcctgttaaacctgtaaaaaaacagagaagagaactaatctctgtaaagacaagaaaaagatgcatctctagcaaaaacagagaagagaactagtctctataaagacaagaaaaagatgcatctctagcaaaaacatagaagataactagtctctataaagacaagaattcatccatctctagcagtaactagtttacctttaatgctaactttttaaactctagaacacatgacaaatcacaagaactaaagtaactagagattgctctaaactctaacagtcgtaaaatgtttgtaagcgctaaatgtttttatgttttgttggggtcggatttcacccaagtacctgagccggtcaaatggataccatcagcacttcgggagctaggcttggtgttgttccggttcgggtgttactcaaggaaacacaccctaagccgggtgcgatgaaacattgtgacccaggggaacaccttagataaacgatacttggctcgggtgttattccagaaaacacacctgagccgagctcaactatatctcggggatcgcttcggttcgagcccaaggtagaatatccacccgaggaggatacttatacaaattcagtgaagggtcaagatatcatttccgaaaaatccggtgaaggatatcaaaaaatcttcgggatattatcgaatatggaagttttccgaaactcccaaagaataaggaagatttccatatagaaaatatcccctatcgccgacccggagataactggaaatcttccaaggaatatcgcgagaggcgggttaccaaggtcctatataaagcgcctcgaggaacgaacaaaggggacacgcataaagacgctctcaacttcaggctatcaaaacgctctgactttgaaggcaaaacacctattttttacttttctaaacacttgtacgatcgaatcatcatctttttcaataataagatcaagagcaccgtccgcggtaatcaaactgttgttctttgagaatctcacacagatccgttctttgaagaaacccttagtacaatttctcttgtgcaagtttcgactctcacaatttggcgctagaagaaggggattgagatttctcttactcccagaacacagaaccaaccaaccaatccacaatggtcaacattcaaatccccggtaacacagttgacgtagagggaaacccgatccctccaaaccaaacagacgttcctgaagccaccgctcctgcggtcctagcagaattgaggagcatgatggctcaacttcagaagaaagtaaaagatcaagaacaggcaaatcggtctttggcgcaacaactcgaagcagctacctcccaaggacagatcaagactactcgtttcggcgcaaggcatcttcacgatcgacgaacagcagcagatctcagtccaacatggctcctgttacacacacctggcaacacgatgaggcctatccgccgaaccgcaccggaaactggaagagatcgagccgagccggcaatcttgggaaatcgagacacgaatcgaacagaaggaaacgatccgcagctccctcctccccgagcacaaaatgtcgaggccaatcagatcggggtctcggacgatgaagattcagaagagaacgttcgatgggctgaggagtacgccagagaacaggaaataagcgctatcaagctctccctagccaaggcaaaaaacgagatgaagcttgtgagatcccaaatgcataacgcagtctcctcggccccaaacatcgaccgcattctgtgaggagtcccataacactcctttcactcgcagaatctccaacgcgataattttatacccaagaaagctaaggatcgagtacattaatggatcttccgacccaaaggcacttgaagtccttcataatttctgtagcccgagccaaattcaaatccgacgaaagggacgccggtctctgtcacctgttcgttgaacacttgaaaggaccagccctggattggttctcaagactcgagggaaatttcgttgatagtttccaggagctatcgacactcttcctcaagcaagattcggtgcttatcgatcctggtatgtgggacgccgatcttttgtcattatctcagccaccgaacgagccagtttgagatttcctcgcaaaattccgatctactctagccagagtcgaaggaatcaacgacgtagcggctctctctgctctgagaaggcgctgtggtacaagtaagaattccgaaaggaattaaatttgtccaaaccacaaacaatccgagatgcattacaccgagcatcggattatgtttcccatgaagaagaaatggaactgctattgaaaaggcacgagccgccgaagcaaacgcctcgtagcaaaaaatctaaacctacaactccgaaccacaaaaagtgcgctcaaggcagaacgttcgtacaccatgaaggacggaatttctccggagcccacaattatcaagctgatatacatcgaggccgaggacgaggccacaaccgaggtcgcggacgagattcctacatctggacgaaggaccaacccgcgggaaacgaacagaatattgcgaattacataagagttacggcgatcatacttccaaatgtcgtagcctccgggcgaagttggcagctaagttcctagccggagaaatcggtggaggcataaccatcgacgacttagaagcggagaaagccaaaaccgagcaggtcaatgctatggaaaaatcccgagcaggcagcccccgcggcaaacatcgaaggatccaaaagaggccaaggcaatcgcgaagcagattgcggtgagccagaagctgctctgggaaggatcttcacaattttaggagattcggctttctgtcaagacacgacggcatcgatcaaagcttatcagaagaaggccgactaaaatcgtaccaactccgcgacctgtgctcggattagatgacgaagtgacctttcacgaaagcgataccaacggtttggactgtccgcacaacgatcctttagtcattacactaaccattggtgatttcaacgtcgaacgagttctggtcgacacgggaagcacactggacataatttttcttacaactctgcgagaaatgaaagtcgacatgacgagaattgtaccaactccgcgccctaagctcggattctctggggaaaccactatgactctcgggaccatcaagttaccagtccgagccaaaggggtaacaaaaattgtcgatttctctgttaccgaccagccgaccgtttacaactcaattatcggcacaccatggttaaatcaattctgagctgtcgcttcaacatatcatctctgcctgaaatttcccacgagcaacggcgtgaaaaccatctgggaaattagaaaaatgctcgaatctgcttcatggcagcacacaagctaaggaacccgtcactgaatcaactgccgacgcgaatcataagaaagctaagcttggcggagctgaagagaaagtaatttccgagcagttatagcagctaaagatcgaggaggctcgggaatccacaagaccaatccccaattcagtaatctctatctgccttgatgacgaaaaactcgagcggtgcgtggaaatcggtggagacctacgagaagaattaccaactgaactcaccgctttcctcagagaaaacgtcaatacattcgcatgaccccataagatctgcccggagtaagtgtagatatcgtatcacacgagctctacatcgacccgacgttcaaacctattaagcagaagaggagaaaattggatcgggagcgagcagtagccgtggcattgttgggaatggcgtcacctcagaacaagcgagaagtgcaacgtctaatggaaggcccttaaccgtatcatctctcgtttaaccgacaaatgcttggccttttacgatgtgcttcggggaaacaagaaattcgaatggacgacccgatgccaagaagcttttcaggaactcaagaagtatctggcaacaccacctatcctcgtgaagcctgtaatcggagaaccactctacctatatgtcgccgtatcagataatgcggtcagcggagttttagttcgagaagacagaggcgaacaaaagtcgatcttttacgtctcacaaacatttacttgcgtagaatctcgttacccgcaaatagaaaactcgctttagcagttgtaatgtcggcttggaaagtgcgacctatttccaatccctctccatcatggtaataagttccatgccgcttcgcgctgtcttacatagcccgagccagtcgggtcgtctggctaaatggacaatcgagctcagcgagtatgacatcgagcatcggaataaaacgtgtacaaaatcccaggtcctagccgacttcatcgtcgaactaccaacaaaggaagctcgagagaatccgctcgatacaatttggctactacacgtggacggctcgttatcaaagcaaggattgggcgtgggcatccgtctcacctcacacacgagcggagttcttgagcagtcgttcacactaaatttcgaggcaaccaacaatgtgcccgaatacgaagcgctcgtggccggacttaatctagctcgtaggctgaagattgcaaaaattcgagctttttgcgattctcagctcgttgcaaataagttcaacggagaatacacggctcgggaagaacgaatggagacctatctggctcatgtacaaaatcaggcaaagcaattcgacgaattcgagttgacaaggattccccaaaagggaaaatacattggacgacgccctagctgctttgaggcctcaacatccgacccgaacatgaggagagtcatcccagtggagtttatcaaaaagccaaacagcgagctcgacaaagaggaacatgccttccccgtgcagggtgccgcgaattacgaagatgcgtcggatgacggctcaggcctgggttgcgattcagaatggatagaacccatctgaagctacatatccaaagggaaagttccctcggataagtgggaagctcggaagatgaaagctcagcctgcgcgttctggtcgaggagaaactcttcaagtggcggttatccggaccctgatcttaga

SEQ ID NO: 3636 - DNA, 540 bp, Arabidopsis thaliana landsberg
agttttctcggatgatatttctccaccttaacctacttgatacttaacacacaaaacccattaacacattgggcatgttttacataatgtcccaatggcccttttcctttagtgaccaagtcgcgtttcttctccttagtttcacaaacgatataattatatcaagtggacagattaactggcctttttgtatcattacttaatttgaagaatggagcttcacttcatccttggaagagaaaggtaggctaagcgacagtagccaaatttcctctccacttacggtttccatgatattcttgatattttaccttcacaaggagcttgtatgtgtggtagttgaatggcatgaatctaagcaatgaaaattgcaagttttatatacataaaaatgttggaatcatcaaaaatgtagcagaacgatctcgactttgacatggaagctgcatattttaccttcaccaccttcgagcatggaagtcattacagttactgatgctaaagttgtggccatgttgattaggtccattaagctccccc

SEQ ID NO: 3637 - DNA, 571 bp, Arabidopsis thaliana landsberg
  unsure (1)..(571): unsure at all n locations
tcgtaggttccccgttctttannnnnnnnnnnnnnnnnnnnnnnnnnnnnnnnnnnnnnnnnnnnnnnnnnnnnnnnnnnnnnnnnnnnnnnnnnnnnnnnnngctggttctattgccgagcaagccatctcgttggtgcgaaccgtctacgcatttggtagtgagaggaagatgatatcaaaattctcagctgcgcttgaaggctcagtgaagctagggttgagacaaggaatagctaaaggaatcgccattgggagcaatggtgtcacttacgccatatgggggttcatgacttggtacggaagtcggatggttatgtaccatggtgctaaaggcggtactgtcttcgcagtcatcatatgcatcacctatggtggcacgtaagtatatatacatgtctaaggctctctcttttttttttcttattatagttttgatcttttgtatcttacgtagatcacttggtcgaggtttgtcgaatgtcaaatatttcgccgaggcggttgtagcaggggaaaggattattgaagtgataaaaagagttcccgatattgattcggacaacccgag

SEQ ID NO: 3638 - DNA, 1722 bp, Arabidopsis thaliana landsberg
gaagtatgacataaatgaagtccataaaaagtttggaaaaagtaatcagtaaacacaaaatataccttgcatctgaatgttcgatttgtggagctacatcagaagtcgcttctacgctgttgctcaaaggccttgatccaaaacctccaaagcttccaaaacttaattgcgcgcattcttctgtgtgaattagcaaatggtttggaattacaacagcaggtctatccttttcatgtgagacttcttgatcatgactatctagttgttgaaaactggctgaaccagatgaaacatcatcttcatctgaaaagtaataatgagacagtgaataaaaaaaaacatcagaaacaccaaaagatcctcataaggtattgatttttgaatactatattttgtaacaaaacatcacataatgagtatcaccctaccgccaaaaaatagttgagaaagaaaacagagcaggcaaagtatagtatagttttatgacaaactaaacagcaaagaagcttttatcacccccagcagaactataatcctatctgtattcacatgatcaataaacacaagcacactccaaaatgaaacaggaaaaagaatttgaacataatggcacacactagcaataaatgggaaacattttataaagattcaaaatattacctttgtggtgctctactggatggctctgtgtctgatatggattatcatcaatttctgacgaaactacagattcatcttcttgaacagagtcggcttgcacatgatcaaccttacgactttcagaagggccactttctgctatatgaatattttctaaccggtccttcagatattgatctcctctatcggattggaaatcagctggaccattgcgtacttctgattctgctggtgctactgataaagaagatgtactaggagccagcggcttctcaatcgacggccattcatctttaacaggggcctgatgatttgcactaactttgtgttcatgatttatctcagaacccatattgacattttgctttgttgtcttgttctgtggtctacccatcttcacaacttcagccatagacctctggcctggagctccaaaccatgcagtttgatgtccagaagctgactgtgatgatgatattccatctcccaaggtaacaggaggcaatttgttttccgtagcaacgggttcactgcaaaggataagtaggatacatgagaaacttgtacaacccaaatagaaacatgtacaaaaacataatccaagggaaaaaaatgtcaaattaaaaaggctaaaaaaaagagaaatgcggaatgaaaaagttaaggtcaacatggagcacccattcaactgtaatgcatgatcttgacaaaatgaccatacctaacctcatcatacaactccaaaccagtatgtaagttttcattgcttctagttagtaaaacagaaactgtacatgaaaagattctctagttattggctcaaatctttcacaaactagagacttgcaatgaaccagtaaaactaattgtgatattctactacctacctaaggtataggtcatataattactttaaacaatccgtcacagttttcgtatctagtgatatcccttaagcacgtcataaactgggaattctgaaacactactaaatggatcctactaatacaatgagtaaccatatgagtaaaatatgaaatcaattaattgattcaatacgca

SEQ ID NO: 3639 - DNA, 746 bp, Arabidopsis thaliana landsberg
gggggacccaatatctccttttcttttcatcttatgcacggaggcattaattgcccaattcaaatcagctgaatggaatggccacattcaaggacttcaagtctcaaaggcaagcccatcgacttctcatctcctctttgcagatgatagtttatttttctgtaaagccaatgaaagtcagggaaaggctattatagacattattcgttcgtacggcgaggcatctggacaacaactaaatttcgaaaattctcggtgatgcttggcaagtacgttgatacacaaactcgaagtaccatcaaaagaacacttgggatatccaacgaaggaggaatgggcacttacttgggacttcctgaaaaaattcacggttcaaaaacccaagtcttcgcttttgtccaagatcacctccatagtcgattcaacacttggtgagccaaattcctttccaagggtgggaaagagattcttataaaatcagtagctcaaacccttctgacatacgtcatgtcgtgtttcctcctacctaaagctatacgctcaaaattatccagtgctatcgcggattttttgtggaagacaagagcagatagttaagggattcattggattgcctgggataaattatgcaactatcagaaggaggtttaggctttcgaacattggaggcattcctccatttacttattcagctggagagaagtttgtaacctaagcaaattataaattaattgaacatatgtttt

SEQ ID NO: 3640 - DNA, 7142 bp, Arabidopsis thaliana landsberg
  unsure (1)..(7142): unsure at all n locations
aagctatagtgtaagtgcgacaaagtcctgcaatggcgtgggtagtggtgctaccattgtcaggggcttttgaaggtggaagaagcttcttgtgatggtctgtttcatggatctattaacagtgttgaggctggaagaaactcttgtgatggattggttaatggcattgaaggcaaacaaaatcatcatcttctccagagaaacgcaaatgttggtacgtgcagccaagaaaaccttgagaagagtatgtttagattctatctgagtccggtaaagagccataagactagcaaatccgggaagagtaggctgaagaattagtttgatctgacatttgtgttaactcatgaatattatgttgtaattagcaaattagcaactaatgtatttgttacttcagtctatagataagtccgtatatcacatcaacaccaatgtttgttttccttctcatatattttcctcataaaagcacatcaacaatacattgtttttgcatggtttgcttatacaaatacgacattgcgtgtaatatatgtcataacataattccccgatgttcctgtacatcaatcagaccagtgaagttacactggttttgaattgagaccgaaaccaaacgggaacaatgggtcataagaattggcatgagcatctagtggcaaatgctcaacgtgtttgaaccagctcactggcaacttccccttgaagtcataatctccaaaaacaacgtcagccaccccttgcccttctgttccaggcagccaagcagcaaccagagcctctgtcttttcaagaaccgtcggctccaaaaccacaggtcgtcctgagatcaatatcaccagagtcgggattatctctgcaactgcggtgacaatgtcagtaccattaaaaggtattctgagttccgagttatcccccatcgtctctgcatagggcggttccccgactgcaacaatggcgtaagagaatccttcacttgaggctaaggtttcctttgatggagttttctcatagattacttcggtttcgtctccaactgcttcttttatggcgtccaaaagtgtagtgcctacatttgcagacaaagacggattcatactgattaacttttcaacagcatctattagcctctgctagcaatcgttttaattaccaattgtgatcctgccgcttagaccgaaccatgtctttgtccatcctccgcactgatatccaagatcatctgcgtgagttccagtgactagaatcctcttagcgttgcgatctagtggcagaaacggtttatcagcatttttgccattctttagcagaactaacgactttctaactgcttcctgcgccaattctctatgttcctgcacacatgaaaaaatcttagaataggggtagcactctggtctaatggccttcagtacaagagagctcaccttgcaaccaacagtaggcaacaaagatcgatctgtgagaggatgtccaaaaagaccagcgacaaatttcactctgagtattctttcaacagcatcattgatccgagccattggtatttcccctgactctaccagatctgtcatgtcctgtatgaactgttcgtacttaaatggtaccataacctgcaacatagattatataatcttcgcttcttcaatcatccgagatgatgaaaatcatttactaagctgaaatattttgtgtacggggttcacactctaccatgtcaatgccagcattaaccgcagttttaatgcagtagcggtagtttgatccctgaggctcactaagccggtccaaaccttcccagtctgagactagaaatccctagtaacatatacaagcaaactagcttaatgcatacacctctagcttatttttctttctattcaattaaatttacacgaaccttgaaaccaagtttttcctttagaatttctgtcaagagaaaacggtcggcgtgcagtctagttccattccaactggagtaagacgccataaccgtggaaactccctgagcaagacacttcagataaggaggaatatgtatcttctctaattcttcatatgaagcgatggtgttcccttcatttatgcccttgtcagtaccaccatctccaacaaagtgtttgacacacgcgacgacgttgtttctataaccccaataaacaaatccatgagaaatgacatcaaacctattaatgtcccaaataagtttacagtgtactgattcatatgataccttcctgcaacaaaaggataaccatttgggtgttcttctggtggcacaccttgtaggcccgagacaagagaagtcatctcacagacaagttcaggatcttctccataactctcatagcatcttccccacctcggatctctcaaaacctgcacaaagacaaaacaacaactttcacattcaatatttacaaatcatttcgttcaatttcagttgttaaattataaaaaggaacgaacttacggccacgcaaggagaaaatgcccaatgaaccccgctcgctcttacttcaagtgcagttgctgctccaattcttctgaccaaatctgcgtctctacagagttaccacaataactactactgttttcacattaatagcggccaaacacagcatggctgcaatagaagcaccaatcttgaacacaatcagattctactcatccatagccactgcaatactacttctactttgttttaagaagcaagctcagaaatttaaactagacctgaatcaactaagtagcttcggtaaggtaagtttccatcagatagaccagtaacagaacaaagctttaagagcacacttctagtttgcttatggtaaatcgagaataaacctggtggctccgaggccaatgttgtgagggaagacagtggcgccgtagacattattgttgccgtggacagcgtcagtgccatagataattggaattcccaaacgcgacgctaacgctgatcgctgaaaaccatcaatcatatcagcccaatccgatgacttagcgtcctcgaacggtacactacctccagcgtttagtacacttcctgcaaacaccaaatccataaagttactaattttagtaaattgcaaatgcatttttcaaaattgaaagttcaaaaaaaaaaaaaaaaaatgtgtgtaccgatgaagaaatctgtaaaggcggagggagaagcgactctgcgttcgatttgagtcatctgaccgatcttctccggcaaagtcatgcgagagagaaggtccttcacacgcgcctccactggcgcgtctccgttcttgtaaacgcatgatgactcctcgacgaccattttctttactcttcttcttcgttgtagttgttgtacgactttctctttatctataacaagatgagacgtgacacattgattttgactcaaaatgcttaattaatgattattgctttatgtaaaaaattcatcaatttgattaacttattaaattaaacgtgtggttcatatggtaatcgcatatttttaatacaagttaaccggtgaagttaaaccagttaaccgaaattggaagtgagaccgaaaccaagaggaaacaatgggtcatacgaatttgcttcagcgtttaacggcaactggtcaacgcgtttgaaccagctcactggtaacttccctttgaagtcataatctccgaaaatcacatcactcatcccttgcccttcagttccagggaaccaagcagcgaccaaagcttcagtcttttcaagaaccgttggctctaaaaccattggacgtcctgagaacaaaatcactagagtcgggattttctctgcaaccgcggttataatgttgttaccattgaaaggtatagtgagttccgagttatctcccttcatttctgcgtatggaggttcccccactgcaacaatggcgtatgagaagccatcacttgatgctaaggtttcctttgttggagttttctcgaagatgacttcagttttgtctccaactgctgcttttattgaatccaaaagcgtcgtgcctgcatttcaaaacaaacaagtatataagtgtccacatcattttttctgatatcttctaattcgattcaactaccaattgtgattctgccgctttgaccggattttatctttgtccatcctccacactgatttccaagatcgtttgcatgcattccaaccactagaatcctcttggcattgcggtctagtggtagaaatggtgtatcagcatttttaccattcttcagcaacactaatgactttctaaccgcttcacgtgccacttctctatgttcctgcagttgtggaaaacatagtcaatcatgctctcgtacatcttacaatagtggcctcagctatagatacctcaccttgcagccaacagttcccaacaaagatcggtccgcaagaggatgttcaaagagaccagcaacaaacttcactcttagtattctttcaacagcatcattgacccgagccattggtatttcccctgactccaccaaatctgtcatgacctgtatgaactgttcgtacttgaaaggcaccatcacctgaaatatcattcattaacaatcttcgtcttctataaatcattcgaaacatatgaaaatcattcgttaccatgtcgattccagcattaatcccgagtttgacgcagttacggtagttggaaccttctggctcgcttatcgtctccaaaccatcccagtctgaaactagaaatccctggtaacaaaatgacaaagtacattaaacgagctcaatgcatacacctctagcttataaagattcttttccatattcaataaaccttgaaaccgagtttctgtttaagaacttcagtcaaaaggaaatagtcggagtggagtctacttccattccaactggaaaatgaggccataacggtcgacactccctgagcaatacaattaagatagggagcaacatgtattttctccaagtcttcatatgatgttatagtgttcccttcgcttaagcctttctcagtaccaccatctccaacaaagtgtttagcacacgcgatcacgttgtttctatcaccaagtaaacaaatccatgaaaaatgacaacaagcctattcaagtctactgcattttaatgtttatatgtacatctataccttcctgcaagaaaagggtaaccgtaagggtgttcttcaggtggctcgccttgtaggcccgagataagcaaactcatctcacatacaattttagcagcttcactataactttcatagcatcgtccccacctcggatctcccaaaacctgtgagtaacaacaatttcatttcaatatttacaaattagtatcccaatataccaacaatctacaagggacttacggccacacaaggagcaaacgtccagtgaacgccactagcccttatttcaagtgctgttgcagcaccaattcttttgaccaaatctgcgtctctatcgagataccacacaaaactacgattgttatcacatcaacaacaaccaaacacagtacatggacagatcttaaacacaatcagattctaatcatagctagtactactactgtgtgatcaaaagctaattgaagcaaaatcatcagaaactccaaattcttgtggaacatgaattaaaacaatccgacattgcttgtaacttaacaaaatgattcaaactttttaatcaaaattcaaaagctttaaatccatagacttcctaaaaccccattatatgcaaaactctctcattctctgactctcttttgcagaaactaaagtttgcttaaagtggaagagaatgtttaagaacctggtggcgccgagtccaatgttgtgggggaagacggtggcgccgtagacgttattgttgccgtgnnnnnnnnnnnnnnnnnnnnnnnntggaattcccaaacgcgacgctaacgctgaacgctgaaaaccgtcgatcatatcagcccaatccgacgacttagcatcctccaacggccaacttccggcgccgctctgtacactgcctgtaaaaccaaagttgtgatttttattttcgaaaggaaagtagaaaagtttggttcgttgaccaaaacaaaaacaaaaaccgttcagtggtgttattgtatcactattaccgatgaaagaattagtaatgacttgaggaaaagcgacggagcgttctatctgagtcatctgaccaatcttctccggcaaagtcatgcgagagagaaggtccttcacacgcgcctccaccggcgcgtctcggttcttgtaaacccatgaagactcctcagtctctgccatactcttcttttgtctttttctctaaccgaatctagtcactccacttctctttatctagccaagctggaggacacgtcacgtcacacttaattacgccactacactcaaaattcttaattaattggttaataattgaagaacaaactcactaaacacatgtgctatctcttgggcttttgtttatttccttctttttttaggtcttattataaacctcgtaggcctactatatatagtacattgtattccataattttaaatgaaacaaaattttaagactttctctgtccaaaactctgaaaagtttctgtcgaagtttaggattctagggtttagcaacgctatggaaaaatcgcagaagcaagtcacccgcccaagcaactcccgaagagaatactcgaaggagataccaattgatctgttgattgagattttttcaagattgtctacgggagacattgctaggtgtcgttgcgtgtctaagctctggtcttccgtaccgcgtctgcgagatttcactgaactattcctgaaaatatcttcggctcggccgcgtatattatttaccttcctacataacggtaagcgtatgttctactccatatctcagcatctacattcagacccgagttcatctcctttggttccctactatcatatgtctttttccaaaggtatggttccttcctatgacaatgagattcatgcccctgtacgtgggtttctttgtagcaaagctagtgtctataaccctagcacaggagagtgtgcatacccttacctagagcttctagtaagaggattgagagaacctattttgggtatgatcctatcgacaaactattca

SEQ ID NO: 3641 - DNA, 4523 bp, Arabidopsis thaliana landsberg
ttcggctttcgctgatccttcgacggaaggaggagagattattaggttaccttcggagaagatcaacggtgaaaaaaacagaggcgaattctgtgaaggaattgctaaaccggcttcgtgtccggttcagtgtttcaggcctgatccggtttgcggtgaagacagcgttacttactggtgcggttgtgctgatgctttgtgccatggtgttcgtgttgtgaaacaaggagcttgtgatgttggtaatggtgttggtttgtctgttcctggacaagctctgcttttgatacacattgtctggatgatgcttcttgggttttctattctctttgggctcttttgattttggctctaatttctctgaatcaaacaacatatagaagattgtttaggttttcagattgcaaatgacgaatcttttttgtttatactcttctttttttctttatattgctctgtattcatattacattaaaactatgtggaaatattattattatttggtttgtttcgaacaaaagaagcttttttgaatcttgctttctccatctctttcccaagataatccaggattgtatctgttacgtggttaggtaaacaacctgcatctaacattgctttcaagtacttgtatgcttttttcaatttccctgctttactattcacttcgatcatcgtgttgtaactcacaacgtccgggtttattccattgctcttcatgttgtcaaacagttgtgtggcttcatctaaccgggttgctttccccagagcgttgatcaatgtgttgtacattacaatgtctagatatcctccttgctttgtgagtctgtcgagtaccgcgctggctaagtctgctcttcccatttttcctaatccttggattattacattgtatgttgctatgtctgctgcacaaaagttctcaaccatttggtcaagcactccacgggcggtttggaagtaaccctttttgacaaacgagctcatcatggagttgtaggtgtaactcgtgagatcggtaacacccattccattgaatatctcaaacaatttgcaggctaagctgagatcccctttggacagatatatagatagaaacgtgttcatcatgtctacgtcaaaagaatctggctttgcttcgaccctctgtcctcttgctaaaccaaacaagggcttaggttgatttctctggtgtgctaattggtccatatatggagatgatgaccaagggtcatcttccattggtgatacttcctcagcactagctccatcgtcttccgaacctaccatgctcataatatctaggaagcttcctttacttggaaacattggggtgtaatccttatctttgctctgtggacgttttagtgaagcttccactccagcgttccatctcagaacattaggcaccaagttaccttcccttatgtgcttcatcaacttctctttccaatcccacctaccttgtttatgaaatccgatcaagagtgaactaattgtgaccaaatccacagagaaacctctagtctccatctcctctaccaattttactgctccttctagcttcccttccctgcaaagctgcaacacaacaatgctaaacgtaatggcatcgacaaactgacccttcttcttcaagtcacagaacagagtaaacccagcctcagctcttccgttcctaaataacccgtcaattagaatgttgtatgtccagcaggaagctctaactccttcttgaaccatcttctcaaacaactgacaagcctcagtgacttttcttgccttgagtgtcccatctaaaagacaattatacacaatagtatcagggacaaacccgttatactgcatctcaccataaatcctcattgcatcatccatccggtaagatttacaacatccttgaatcagtatacgatatgtcgaattatcaggctcatggccagacaccttcagctcatcccatacaatcaaagcatctttagcttttccaaataaacacaacacatgaatcaggctgttatatgtgcatatatcaggaccaaaagaagacccatagaccgaacttcgctccttcatctccttgaacaaactcaatgcagcatccaagtctccccaacaaccaaatccatgaatacaaatgttataactccatgtatcaaacttgaatcttttcattccctttaacttttcaaatacccttttgaactccgacctcatatctgctctccttagaccaaccaagagctcattaacagcaacagttccaggaagataacttacaataataactctaccagtatcatcatcactatggttatcagaagcttctaaaagcttaaagaatatagacagagcaagacgcaattcgtgtttcttcaccagagcaataagaacagaatcatatacactaggatttaagcaatctcctaattcctccatgtaatccaaaactcctaacgctgattcgaacttacccgaacggattagagaatctagaagtatcttcgccatcgtctggtccaagttaactccatcttccttcattgaaccaagcaaatcgggaacttctccgagaagccctgtccgacaaacagtgcgaaatatctgagagtaagctgtcgctgaatgtttgtatccaggacgaagagaataacaccatcggaagaaatctagcttcttcgatggatctatggagtttctacgaaggatctggagaaccacaggttccgaaatcggtatcgaattcgcgtcgaggcttcgtgtaccggactgagacaaggtcttggacaaagacgcgacgagaaggacattgcagagctgtggaaacggtgaattcttcgccggtgatagaccggaaattgcagctgatacggcgcttcctcttccatggtgcatcgcatagtgaccactgagaaacgaaattgaaagctaacatacacggcgtcgtttaatatcgttataatgaaacgccatagtataatgtttcttcaaggcccagaattaagcccgttaatagactgatacggcgacggtttaacgaatattataaagatagataggcctatgcttaaagatgggcccaagcataggcccatttgtataggtttttcaattttgagtcgataaaccctaagttagtctccgtcgtcttcattctcagctttgccgttttcatcgattaaagagagagaggcttcgttcgccgtccgtcgtaaaaatggggttcaagaggaagaaagatgatggtgatggtgaggaaatggaatctgatgttcgtggaaagtctactttcagtgggggtgagaagaggaatgtgatacttccttcgatgattaagaacaaagataagagatcaaaagtgtatgcgaagcagaagcatgagaagaaattggagaagcagaagaagattagagctcgtgatgctgctgagaaacgagctttagagcttggagaagaggtaacgatctggagaagcttttttagggattttttatgaatttgagatattaagttggtgtgtgttattcgtttgtagcctccacaaaagatgattccgaagacgattgagaatacaagagaatctgatgaaactgtttgcagacctgacgatgaagaagtatgtttagatttaaagtttgattcatctcaatttttgaattcaattcattgtcgtgttgctaatttagtgtaattgagtttgtagttgtttgcggatattgatgctgatgagtttaatccagttctgagacgtgagattgcacctaaggtcttgctcacaacatgtcgtttcaattccactgtaagtctttttttttggtaccattgtttcataagagattctacagatttgtttgtggttttctgattcaagtaatgttgttggattgcagagaggacctgctttaatatctgagttgctttcggtgataccaaactctcattatcaaaagagaggaacctatgatttgaagaaggtgttgttataagtttcatagcttccttgtttctctataaagttagtctttttgcaactatataaccttgttagatatggttctgcagattgtagaatacgcaacgaagaaagattttacatctcttattgttgttcatacaaatcgtagagaacctggttagttttcactgagtttcaagttttgtgctctctactgtatatgctttgtttcaagcttttgctatttcatatgtagatgcgcttcttatcatcggtttgccaaatggtcctactgctcatttcaaattgtcaaatcttgttctaaggaaggatattaaggtatgtaagctaaccattactcttctctacatcgagtgtagattagtgatcactgaattggatgttaaatgtaactgcagaatcacggaaatcctacaagccatcaaccagaactggttttgaataactttacaacgcgtttagggaatcgtgttgggaggtattgttttcatagtgttggtgacttgggtttatggtctctttgaatttcttgctgatggtagatttt

SEQ ID NO: 3642 - DNA, 2122 bp, Arabidopsis thaliana landsberg
  unsure (1)..(2122): unsure at all n locations
aagaagtcatgacttcacaccttacatacatatgaaatgaattttagttgatattttgtccttccttaatgcgagtgtgtttccaagtcaacgtcccatcccatgtgtccctagcttggctatatatatattaaagactaaagaggagaagtgacattgtaagaagaagaagagaaagaggaagaaaatggttgacaatgagaagtcatatgtttacaagaaccgggaagcgccagtggaggcgcgtgtaaaggaccttctctctcggatgactctggctgaaaaaatcggccagatgactttgatcgaacgtagcgtcgcttctgaggccgtgataagagatttctccatcggtatacacaaccacagaccatttctaaattttgttttggtcaacgaccaaacctttgttagattttctctaattctttttttgttctcttatgaaaattgaacatactaaaagatacaaagcaagttgtcatattgttacaggtagtgtattgaaccgcgcaggaggttggccatttgaggatgcaaagtcgtcgaattgggcggatatgatcgacggcttccagcgatcagcgttagagtcgcgtttgggaattccgataatttacggcattgacgctgttcatggcaacaatgacgtctacggcgccaccatctttccccacaatattggtctcggcgccactaggtctggttttcttttaagcaaagtacaaatttagtagaagagactagagagagacttgcatataaagggattgatttgatctgatgagacttgccttcactgattcatttgagtcttatttgaagatttagtcatgttacacttataacctttttaatgctagctattagtattaaataattttgcatctattgtggccatgttgtgtttggcttgtgataacatgtggtagttcatgtgttaactttgtagagacgcggatttggtcaaaagaattggagctgcaacagcacttgaagtaagagcgtgcggtgctcactgggcgtttgctccttgcgtcgcagtaagtctcctacacacctagattttcgcaacaagatcgaatatgatttggttttattagtcaactgaatgagatgttgttcttacaggtggtgaaagatccgagatggggaagatgctatgagagttatggtgaagttgctcaaattgtttctgagatgacttcacttgtctcgggtctacaaggggagccatccaaagaccacacaaatggttacccttttcttgcaggaaggtatgcctatatatataaaattatggcttgatttgtgtctttagtatatttagtttcatttctcatggactctggtcacttggtgatagaaaaaacgtggttgcgtgtgccaagcactttgttggagatggtggtaccaataaggcgataaatgaaggaaacaccattttgcggtacgaagacttggagagaaaacacattgctccctataagaaatgtatttctcaaggagtctctaccgttatggcctcttactccagttggaacggagataaacttcactcacactacttcctcttaacggaaattctcaaacaaaaacttggttttaaggttggttcagtttgaaaacaatttaaataaagctagagatgtattcattaggttcatttgatatcatattttgtgtttggttactagggatatatagtttcggactgggaaggtttggaccggcttagcgacccaccaggttcaaactaccgcaactgcgttaaaatagggattaatgctggaattgatatggtagtgaacttttttcattgtctcgataatacaagagaatatataattaaaccaattaatgttattgtaggtgatggtacctttcaagtatgaacagtttagaaatgacttgatagatctagtggagtcaggggaagtattgatggctcgtgttaatgacgctgttgaaagaatacttagagtgaagtttgttgcaggactcttcgaatttcctcttacagatcgatctttgttacctactgttggttgcaaggtgagctctcgttctgaaatgctattaaactgcngtgctaagattattgagaaccatataaaacatg

SEQ ID NO: 3643 - DNA, 536 bp, Arabidopsis thaliana landsberg
ggattagatatttgtgtatctacaacattttactataatgctacattgaacttatatccatgtgatatattcaatctatttgttaaatcaaaagtggcaatgcaaccactctagcaattattttcttttgattatatttttaaacagagaaaaaaacaaattatatttataattagaacaaacctgttctaggtctgaaacctcaaatctgggcaatgtcatttcatccatagctgccaaaaaccgctcaatatttacacaaccaggctcgaagcttcctccctacatgattactccaaatagagtaaatcaaagtaaaaacaaatcacataactagaactctagaagattgagacatagaaaataaaagaacgaaaaaaaccaataggtttacacaaaatctagtaccattcgcatcgaaccgggactaagctgatttaagagattgcacaagacagtaccatccaccaaacatgctctcaattctttctctgaagcttcccatggtaattcaaataggaatggtctatttaacc

SEQ ID NO: 3644 - DNA, 876 bp, Arabidopsis thaliana landsberg
tgactatttcctcttaaccgaacttctcaaacagaaactcggttttaaggtttgcctaaaatctgatttgaatttagctaaataagctagaggtgtgtgattttagctagtttcctttgcttttgttatcagggatttgtcatttcagactgggaagctttggaacggctaagcgagccattcggttcaaactaccgcaactgcgtcaaaatctcagttaatgctggagttgacatggtaaagtctgaaacccctagtcaatgatttttgatcttttagattaataatggagagaagattattaatcaatgttactccaggtgatggtgcctttcaagtatgaacagtttataaaggacctcacagatttggtggagtcaggggaagtaactatgtctcggattgatgatgctgttgagagaatactcagggtgaagtttgttgcgggtcttttcgaacatcctctcacggaccggtctttattgggtaccgttggctgcaaggtgaggtcacttgtacataatgtcattagaccaaagtgttgggacaagcacatgattgactctgtttttccatggcttcaggagcatagagaactagcgcgtgaatcggttagaaagtcgttagttctgctaaagaacgggacaaattctgcgaagccatttctgccactagatcgcaatgtcaagagaattctagtcactggaacgcacgcagacgatcttggatatcagtgcgggggatggacaaaggcatggtttggtctaagcggcaggatcacaatcggtaattaaagcgactccaatcaaagagactagtagatgttgttagtaaattaatatcatgacgtatctgtgttggtctgaacttgcactt

SEQ ID NO: 3645 - DNA, 497 bp, Arabidopsis thaliana landsberg
  unsure (1)..(497): unsure at all n locations
gtttatttccgttccaactggagtaagaggccatgaccgtagagactccttgagcaagacaattcagatatggtgcaagatgtattttctccaactcttcgtatgacacaatagtgttcccttcgtttatgcccttatcggtaccaccatctccaacaaaatgcttagcacatgcgaccacgttgtttctatcacatagtgaacaaaaccatgagaaatgaaatcaaacgcttttaatgacttaattctagctagaggtgtgtatatataccttcctgcaagaaaagggtaaccattaggatgttctttaggtggctcgccttgtaggcccgagacaagcgaactcaactcacaaataatgtcaggatcttcactgtaactctcataggatctcccccatctcggatctctcaaagcctatcaaaaagatttatataaataaaaataaaaaatctcattcactatttcttcgntcctcatatatatgtgtctgattt

SEQ ID NO: 3646 - DNA, 1275 bp, Arabidopsis thaliana landsberg
aacatcatccgccttgtgaatctttggtttgattgatcaaccttttatccatgttggtagaaacttcagtagcttagtttaaaaaagacctcctgatatataaattctgtttggttgctgctatctggtttttatttagtcccgttcttccggcttaatataatgacaatggtggtgagcaaacgaaagcaatttacttcgtattccaaaccggataaatttacagagacttgcacgattctgtgccacactcatcttcaagtgtttaataaataaaatcaccctcgaatcatacaaaactcaagagaagggaaaggttacaacactctttagatgaatttacctagcagggcctcaaatttttgggcgacactaatcgattgtaagctaagaagacgacaagaaaaacaagtgatctggctattgactctggagatctggcctaattacaagtctagtgatgaacggggacatggctgcaagaagcgccttgggacactcctcatgtggtaaatgcccacatcctgagattgctactagtctctgttgatgacacgaatgaatgtcagttgctatcttgacatgaaaacaaaccgtagctgggataagagagcttgagtttgaaagagggacttacagagttaaggagtttagaagccattccttgggaggacttcaatggcacaagggcgtcttcggccccagcaatgactagcactggcaggttttcaacagccttcagaagcgaagctgcattttgaggtgcaagcaccatctcagatgaaagtctacctatctcatgaagtgcctcatcccagccttctacgtgtaatggggcctgacaaggaggaaaacacattatttgatacatgtctaccaaattgcaaatctttgtttgatgtagggtaccttgtatagccgtaggacgtctgtagtcatcttggcaggatcataccaagcacggcgattcaccacctgagctatctcagtgcgtaaaagagggcgaacgaggtgcttcttccctagtgatgtgtgcagaagtattcttgcaaaagctggaactacttcccttgataagctagtattaagcaagacaactcctttgaccacgacctagaaatatcagtaccaactaggtttagaaaggaaaatatataagcctgcacaatacacatctgattacaagtctactcactttgttggattcgtttgttgccatcaatctttgtgcagctttgagagcaagtagacctccgtcatcatgaccaacaaata

SEQ ID NO: 3647 - DNA, 3639 bp, Arabidopsis thaliana landsberg
  unsure (1)..(3639): unsure at all n locations
aattcttggcaggaatcagtttacctcgaggccaaggaatctgcactagggttcctcttgtcatgaggcttcagcgaagctctagccctgaacctgagatttggcttgagtatagcgacaaagtggttcctacggacgaggaacacatcgctgaagctattcgtgctgcaacagatgtgattgctggtatgttctctttctctctctctaagtgttaagtgtattttgnnnnnnnnnnnnnnnnnnnnnnnnngagaatgagacatttatctgaccacaagtgcctagaggtgttatatgagctactagtttggtctttactcatctgatttttttttcaagttttgctatttgatgaaactgttacaaagttatgagtttgaggttaacaagtattgactatgattaagtacttataaaatacatgtgctgcaggatctggtaaaggggtctcagatgctccattgaccctccatgtgaagaaggctggtgttccagaccttacgatggtcgatcttcccggtataactcgagttccagtgaatggacagccggaaaatatttatgagcagatctctgggatgattatggagtacattgagcctcaagaatcaataatcctcaatgttctgtcagctacggtcgacttcaccacatgcgaatccattcgcatgtctagaaaagttgacaaaaccggtcaacggacactagctgttgtgacaaaggcacacatggctcctgaaggtctcttgcagaaagtaactgcagatgatgtgagtattgttcttggttacgtgtgcgtcagaaaccgcattggagaagagacatatgaagaagcaaggatgcaagaagagttacttttcaggacccatccagtgctaagattgattgatgaagacatcgtgggaatccctgtgttagctcagaagctaatgcttatccaatcaagcatgattgctagatgtttgcctaaaattgtaagcaagatcaaccagaagttggacactgctgttctagagttgaacaaactgccaatggtaatggcttctaccggggaagcattgatggcattgatggacatcattggttctgccaaagagtccctcttaaggattctagtccaaggagacttctctgaatacccagatgatcagaacatgcattgtactgctcgcttggctgatatgttaagccaattctctgatagtctgcaagcaaagccaaaagaagtgaccgagttcttgatggatgagatcaagatccttgacgaatgcaagtgtgttggactgcccaatttcatccccaggtcagccttcttggctatactttcacaacatgttgatggtatacaagacaagccagttgagttcatcaacaagatatgggactacattgaagatgttctctcatccgtcattgctaagcgttctgacaatttcccacagattcaatcttccatcaaacgagccggtcgtaatctcatctgcaagatcaaagaacaatctgtgaatcgagtgatggagatcgttgagatggagaagctgactgattacacatgtaaccctgagtacatgacgtcttggactcagaagacaagtgcacaagagagcttcatcgatgctgttgtgaaaaatgagaacatacctgactacttctctgtgactggatttggaaatgtgaagatttcgcatctacgaaagtatcacgctcatttactgattccggctttcgacatgaagatgaggatcacatcttactggaagatcgtcctgcggagaatcgtagacaaccttgcactgtatcttcagctatctgtgaagtctctcgtcaacactcgatttcagaaggagattgtggcggaaatggttgatccaagagatggtggaggagttgaaaagatgttggaggagtctccgttggtggcgagcaaaagggagaagcttcagaatagtatcaagctcttgaaggagtctaaggatgctgtggccgccattgttgatcaaaattgttaagcgattgcttctttcacaagctttggtgaaatcgggtcaggttaagagatcgtccttgatttatttgtttcggtgaagtcgggtcgagttattagggctcctagatgggctatttgtggacttgggccttttatgttttttgaactttcggattttcttgttttcaatctcagtttggaattagttctcagttttaacagccaacactttccattttttttctcctaaagaactttaataggcttttatatgcattagggaaacctaaacattgactagctctagcgcaaaattacctcaatagattagcggaaatattcacaaaatggcagcaaaatcctacttaacttcttaaaacccatctgggattgatattagagattaagctatttcagttaatctcatgtggaaaaaagttagagtttgatacttagttctatgaaacttgtaaatcacgaccattggaaacttaaagcatgcttgcaattgaatcatctgctaacaaccattggaaattatcaagtgttgagcccaatgaacgaaaattatcaagttacgcctttagtcaaaattccaaacttcaccacaaaagaattcagccaattggaaccaataaaatattcaaatacacatcttaagagagacgttttagtttcaactacgagctagatataggtgcaattactgacttaattagcttttttcaattccaacatgcacgctacttgcatcctttcatgcaatttacttgcttcgtaaattcttcgtatacacaaagcccttctaatatctctatatatatctttgcatatctctaagaagaatctcacttacccatagaacttctcttttctgtcttttatatcttctactcttgtcttatctctaaaagaacacaaatgggaggtagtaagaagcatgttgtcactagaacctcttctccttctcttgcaattgtccaggcgaatcctcatgacaacagagaagttgttcccatcgaagcaccgattatatcttcatataacgataggattaggccgttgcttgacactgttgaccgtctaaggaacctcaatgtgatgagagaaggcattcagcttcccaccattgtcgtggttggagaccagtcctcggggaagtcaagtgtcctcgactcgttggcaggaatcagtctacctcgtggccaaggaatctgcactagggttcctcttgtcatgcgacttcagcgaagctctagccctgtacctgagatatggcttgagtacagtgacaagattgttcccacggatgaggagcacatcgctgaagctatctgtgctgcaacagatgtgattgctggtaagttcactctctatcttggtattaagtgtgtttagctgcaagagagattactgagagtgcgacctttaatctaaaacatgaatatttgaacgaagttggtttacttaccatagaattccttggagttagatgtgtacatatacctaaatgacagtgcctagtgatgtgttttatatactctgaaactcctagttggatcttaatggtctggttttttttcatgctgttaattatactctagctgttcacgttacttactgttgaaacttcatagtgttacttacta

SEQ ID NO: 3648 - DNA, 2376 bp, Arabidopsis thaliana landsberg
ctgctacatctagtgcaggaatattgtaactagtagtgcattgtagcttttccaattcagcaacggactttactgtaagttgatatctaaaggttcaaacgggagctaggagaatagcataggggcattctgatttaggtttggggcactgggttaagagttagagaataataatcttgttagttgtttatcaaactctttgatggttagtctcttggtaatttgaattttatcacagtgtttatggtctttgaaccagttaatgttttatgaacagatatcagagctatgaacggcgaagctgtccatgcaaatcctaaaaagacagggatgataatccttggagggggcttgccaaagcaccacatatgtaatgccaatatgatgcgcaatggtgcagattacgctgtatttataaacaccgggcaagaatttgatgggagcgactcgggtgcacgccctgatgaagctgtgtcttggggtaaaattaggggttctgctaaaaccgttaaggtctgctttttaatttcttcacatcctaatttatatctcactcagtggttttgagtacatatttaatattggatcattcttgcaggtatactgtgatgctaccatagccttcccattgttggttgcagaaacatttgccacaaagagagaccaaacctgtgagtctaagacttaagaactgactggtcgttttggccatggattcttaaagatcgttgctttttgattttacactggagtgaccatataacactccacattgatgtggctgtgacgcgaattgtcttcttgcgaattgtactttagtttctctcaacctaaaatgatttgcagattgtgttttcgtttaaaacacaagagtcttgtagtcaataatcctttgccttataaaattattcagttccaacaacacattgtgattctgtgacaagtctcccgttgcctatgttcacttctctgcggctgtgaaaaaaggagaggtgatctaccaagggtacagtagtaaatacagctagttattcttcaactgtttcactcaattaaagccatgaatggaacaaagcagcaaacaaatagtgaaatagataggaagttaattttatgacccaaaaaaaaaactagcgaggataacgtttataacgcattatttgatcaatgtaactccacctctgtaaacagtgctacgacagatgggacaatcctgactttctctaagccaagagaatatgcaattcatgtggaaactatgattgcacttggataaacaaaccacgactttatcatcatcattatcaaccttcttcaaatcctcaagacatatcggacaacataattccacgtccacaactatgtctttaatcatcgccgcaatctcccgcggacacattggcggctgaggttgtggtaacggtagaggtggttgcggtctctggaatctaagattagttccacgagaaccatcgttaaaggttgcataccttatggcaacaatgccatacaaaacgaagacgatgaccataagagtgaagtcttcatgtagatgatgatgcgtattgttttcgatagatgcgggagatggtgacggcggaaaagatcgcatgattgtgtgagtggagtgggtgagctcaaaagaaatggtgcaaaataatttttggtatctataagtaaatcctatgttagtgaggtttatatattataagcattaagccattaactaattaattacggtaagtttgtgtgttgcaagaaaataggaaactaaattgcaccaaaagaggaagactttgataagtattcaaatacacatatccatttgagtgtgtcattgtttaaggtgtcaatgactaggattatactaaagccaaaaccgtctgataaaaaaccctaaaagcataattttttgtgatccatagtccatcaatatatgtgcatattttcaagttagttaagatcaagttttattcccgaaaataaacaacaacttttattccaacgatgccaaacacaaaggcacaatttcgtgaatacacgcaaacaattgatcaacttaaaaatgagaacaaaaagaaacaaacactagaaagatgttatataatcaatcaaatgttgtaacgatcgatacgccgaaccttttggtttaacggatcttcctacattctccttaagaatttccatcctctctcggattgcttttccttcagtttccgaaaataatcttcttatcgcttcctcaatcacattcctctgaatccgaccctctaaatgcagtccaaccatccatacatcactaacaaatcttgcattaagcaattggtcccatacaaaaggcaaacatatcatagggacgccttcaaaaacactctc

SEQ ID NO: 3649 - DNA, 1845 bp, Arabidopsis thaliana landsberg
ggttgtcttctgagtccaagaagtcatgtaatctgggttacatgtgttttcggtaagcttctccatctccacgatctcaattactctgttcacggaacgttccttagtcctgctcattagattacgaccagcccttttgatggaggattgaatctggggaaagttgtcagaatatgtcgtaatgactgatgacagaacaacttcaatgtagtcccatatctccttgatgaactcaactggcttgtcttgtatcccatccacatgttgtgaaaggattgctaagaaagaagatcttggtataaaattaggcaatccgatacatttgcgctcttctaagactttgatttcatccatcaagaactcttctgtcacggcttgaggctgtgcctgcagattgtctgagaatcggtttaacatttcagccaagcgagctctgcaatgcatcttttgatcgttagggctgtccgttcacaggctgtccgttcacaggaacacgggttattccagggagatcaaccatagtaatatctggaacaccagccttcttcacatggagcgtaaggggtgtgtctgaaacccctttgccagatcctgcaacacagtattcacaagtacttatcaaaatcaagacttcaactggttagtctcaacacttcaatactgtgaaatttcagctgatagcagaactagtgtaacaggatgaaagaaaatcagatcactaaggacccactaggaattacagaatcctattaacactagcactagtattcatataagagcacatgtagtttcagggtatattatatagtagttagctcgttttgagtgtgggatatctcaaataaaggtgtcgttttcattttcagaatcctattaacacctctagcactagtattcaataataaatgcacatttagtttcaggaactttttctttaccagtagctagctcgttctaaatttggcatatttcaaataaaggtgtcgttttcattttcagaggcttggaagcttaaaccaaacatatttaacagtatggaaggaatagagtcaaaacataccagctatcacgtctgtagctgcacaaatagtttgagcaatgtgttcctcatctgtaggaacaattttgtcaccgtactccagccagatctcaggttcagggcttcgccttctctggagcctcatgacaagaggaactctagtgcagattccttgcccacgtggcaaactgattcctgccaatgactcgaggacactcgacttccccgaggactggtctccaaccacaacaatggtaggaagctgaatcccttcttgcatcacattcaagttcctgagcttgtccacagtgtcaagcaacggcctgatgtggtcattgtaagatgatacaattggtgcttcagtgggaacaacatctttgtgggggtgaggattcgcctggacaattgccagagaaggagtggtactagtgacaacatgcttgttactacgtcccattttgttgcttgaggagacaatacacgaatagaatagaatgagatagagaatagaagtaagtgagataagcgtagttgagatttatcaaagagatatgcaaatatatatactgagatatttgaagggctttgtgtttatgagcactatactacagaagcagacgtttgacatgaaatgacgtaagtaaaaagcatattggaactgaacaaagctaattaattaagttcatgattacacctattacctatagatattagctcatagttgaatataaaaaagcctctctcaaatcctttaatataatgaatgtgtgagatatcaatattttactattttcaggtagacaaga

SEQ ID NO: 3650 - DNA, 1397 bp, Arabidopsis thaliana landsberg
tcccgatttacgttatttacggcagcatcgtgaccatcagcgaatcagatttaacggagattgcttggggtctaagaatcagcgaccaacccttcttgttggtcgtacgggttggttcagtccgtggcagagaatggatcgagacaatcccggaagagatcatggaaaagcttaatgagaagggaaatatagtgaaatgggcaccgcaaccagacattctaaaacatagagccattgggggattcttgacccataatggttggagctcgactgttgagagtgtttgtgaagcagtccctatgatctgtttgccttttcgttgggaccaaatgctaaatgcaagatttgttagcgatgtgtggatggtcggtataaatctagaggatcgggttgagaggaatgagatcgagggagcgataaggagattattggtggaacctgaaggaaaagcaatccgagaaaggatagaacttcttaaagaaaaagtagcaagatcgtttaaacaaaacggttccgcatatgaatctctacaaaatttgattaattatatatcatctttctagctagccatatgacatgttgtttctttgtgttttagcttttcaaccgataaaattgttttgtgtatcagaaatttcttcctttgtgtgttttgcattgttgaaataaaatcatcttctcaagttgaaatatacatatgtacttaccattggctatattataaggcctattgttatcgtgcaaactactagaacaacggatcgtgtcttttgatttatgtctcttaattaattaaaatcaaataaaattagacaactctcgacaaatctggtctttctttatatgacctagagggaaaacgaatctggtctttctttattagcacaacatgacgcgtatagtttgtctcactctctgacgtgataacaatatatagatacatggtatcaaaagggaaataataacagcttttggaaagaagatcaaatggagaaaggttcaatggataagagtaatggcctacgagtgattctgtttccacttccattacaaggctgcatcaaccccatgattcagctagctaagatcctccactcaagaggtttctccatcactgtgatccacacgcgcttcaatgcgccaaaagcttcaaaccatcctctcttcaccttcttgcagatcgaagatggcttgtctgaaacagagacaagaactcacgacgtcacacttctactgacgcttcttaaccgaggcagtgagtctccatttcgtgattgtttgactaaacttttgcaatctgcagattcagaaacaggggaagagaaacagaggatttgctgtttgattgatgattctggatggatcctcacacaacccattgctcagagttgcttaga

SEQ ID NO: 3651 - DNA, 1237 bp, Arabidopsis thaliana landsberg
gaagagaaatcgagagagctgttataagactaatggttgagtcggaaggagaagagattcgaggtagaatcaaagtcttgcgagacgaagtaagaaggtcagttaaacaaggaggttcgtcatatcgatctttagatgagttggttgatcgtatatcaatcatcatcgagccactcgtgcctacgtgacacatgaaatgggattctctatacgaaactcttgtcaattgattatagaacaaagtggattcatttgtttgcatttgcgtgaccaactgctgtgagttaatataatcatttatcttttttcataaagatttttaaaaagaattatttcaaaaaaatcttttttacaaacactcatacgggtccacgtttacagacacgctcctttttaatttataatcaacctacacgtacaacggatctggtcttccctcagattaaataaaaaaatacacaaatctgatcttttctatatagactatagtatttatcacattgagaaacgtagaatattgtcttcactctaacaagcagtgataatataaagatttcttatgttattatatatacatatataccttgactgaatttatagaatctttgcataattggattggaaaaagaaaaaaaaacagaaagaagaagaaaggttcaatgaagaagagtaatggcctgcgagtgattctgtttccacttccattacaaggctgcatcaaccctatgattcagctcgccaagatcctccactcaagaggtttttcaatcactgtgatccacacgtgcttcaacgcgccaaaagcttcaagccatccactcttcaccttcatacagatccaagatggcttgtctgaaacagagacaagaactcgcgacgtcaaacttctcataacacttctcaaccaaaattgcgagtctccggttcgtgaatgtttgcgtaaactgttgcaatctgccaaggaagagaaacagaggattagctgtttgatcaatgattctggttggatcttcactcaacacttagccaagagtttgaatctcatgagattggcctttaatacctataaaatctccttctttcgaagccattttgttcttcctcagctccggcgtgaaatgtttcttccattacaaggtaattattcactttaccatcttatatgatctatcaatattttactctaatattgactttcttggtccaattttcttttaaaatattttaaaatagcctt

SEQ ID NO: 3652 - DNA, 371 bp, Arabidopsis thaliana landsberg
aaaagcggctatcccattacgatgagaagcatagcatttttagatctctttgaggctctggaagccaaaatggggggcatggggtactcattctcgacaaggccgtatgctaaccctttctaacaaaaacaccaaacataaatttgtccaccaaagcctgctcaagaattaatcattaacaatatttctatccataacatcatctaaccttaaatgcagtgtcaacaagactagattactcactaggcagctttatccaaaaccctttcttcccctatcccaaaaggccacagtcagtcattggcaatagaaatatcatgtctatgaagcatatcaaaaaaaatccaataacattctgacaaaaacaaaaa

SEQ ID NO: 3653 - DNA, 970 bp, Arabidopsis thaliana landsberg
cttacagcaaccacccgtcgacccacaagaagggttggtcgcagtttcttagaccccaagcaatcttcatgaactctgattcgctgatggtcacaatgctcccgaaactcacgtaaatcacggatttgtcttcttgcttgtctaaccatggaatgcaagtctcgtccactgtgaacaagctactagacgagcctgggaagtagcaatgagaaggtcctatcgtaaagatcgggacttgaaaatcttcacgtgcttgactcaatgagtcttggtccaactcttcacaggacatgagtataagacctgaagacgcttttgtcgtttctaacatcatatctaagtacgagtctagtacttccgtttctttatcaataatttgtaaaacatctttctttcgaagcggtagaaactcctgaactagatcgtctttttcagaatctgtttacgtaaaacggttgggttcaaatcaagaatatcatttctagataaatatcattggaagtaacaccacggtagtaaaattatttaatctagaaaatcttatatctcgtgaccaaatgattctataaatactctattttagttaataaatataaaagacatgtactgagtactgactgactgataaaaccaagaatacaaatgtaaattcatttgtgaaacaagtactgttgatagataaatatttttcatatgacccttttttggtaactgaggtggattatagatgaagattcagacaactaatcttcgaaactagtagaaaataggatactttttagtaccatttaagatatctagtgaccaatagtagagatccatgttgcatgtaattcatatgacattgtcagtaatacttaccaaatactgtttagttttagatttttcaaaagaagtttagaccaataaagtcagcaatataggaaaatatttgtaatcatataattacgacagcttttgacaaaatgag

SEQ ID NO: 3654 - DNA, 1538 bp, Arabidopsis thaliana landsberg
tcttagatccgtcggactagtaggttgcaggataatagtaaaaagttgctgaaaacgtggcctgataatatagtggtaagtatatgtgtattccaacttaagaagaaaaatttattccaacaatgcaaaacacacaaaggaagaaatttctgatacacaaacaatttatcggttgaaaaacttaaaacacaaagaaacaacatgtcatatgcatggctagaaagatgatatataattaatcaaattttgtagagattgatatgccgaaccgttttgtttaactgatcttcctactttttccttaagaagttgtatcctccctcggatggcttctccttcagtttccaacaataatctccttatcgctctctcgatctcatccctctcaatccgaccctcgagatgtatcccaaccatccatacatcactaacaaatcttgcatttaacaattggtcccaacgaaaaggcaaacagatcatagggacgccttcacaaacactctcaaccgtcgagttccaaccattatgtgtcaagaaacctccaatagctcgatgctttagaacctcttgttgtggagcccatttcactatctttcccttctcattaagccttttgatgaaatattccgggattgcttcaatccattccgtgccattgactgaaccaacccggacgacccataaaatggttggtcgctgttacttagaccccaagcaatctccattagctctgtttcgttgatggtcacgaggctcccaatactcacgtatattacggatttgtcttcttgtctgtctaaccatgggatgcaagtctcgtccggtgtgaacaagctactagaagaagcaggaaaatggctatgagaaggtcctatcgcaaatatcggaaccttaaaatcttcacgtgcttgactcagtgagtcttggtccaactcttcacaggacatgaatataagacctgaagacgcctttgtcttttccaaaatcatatccgagtacgagtctccctgcaccgaatctgcttcaagaatccgtaaaagatctttctttctaagcggtggaaacttctcaactggatcatcttgttctgaatctgtaaagcaattgggatacaatcaaaacataatttcgggatatcagcattaattcaccacgaaaatactttttttttaagactgtatattttgggaccaaagaattttaatttatctctataaaatctttaattagtgtctctaaaagacttgtactaccctaatagaaccaaaaatgctagttttgctaaataatgacctttttgtaactgagtagattatggaccgaaacatagattaaacctcgaaatatatagaaaattgggtatttttacaatttaaaacacccaatcttgacatttgccaaaaaaaagaaaaacatctataatgaccgataaaaccaaccttagaagtggaggtagtagttagatgttttcatatgcattgccagtgttaatgtacttcgcaaaaaaggcaataatagaatattttaaaagaaaattg

SEQ ID NO: 3655 - DNA, 743 bp, Arabidopsis thaliana landsberg
gagggaaaactccaataagctcaaatgtttatgcaagatatctaaaattaaactttattattataattcgaatttgttgggattcagcgtttctgaacacctctggtaatagatacagtcggatctaaatggtaaaatattagaagaattagaagaaaaagatgagtggaattggtacgataatgaaacatttaatgaagctaaacttagttaattcattccaaacggtaaagacgacataacgattagcttagtttgttacaacaaagagattaaaaacataaaataggccggaaaattcaaaagttcaaaaactacacaaggcccaagcccaacttcaacaacagagaaagaaacatacccgacctgacttcaccaaaaaactcgacgaatgaagcaatcgcttaacgatcagcgtatacagagttctgatcaacaatggccgccacaacgtccttggattccttcagaagcttgagactattcttcagcttctccctcttgctcgccaccgacggtgattcctccagcatcctatctattcctccgccagctcttggatccaccatctccgccacaatctccttctgaaactgactgttgaccagattcttcacagagaattgaaggtagagagcaaggttatcgacaacccttcgaatacgatcgtgcagtaagatgtgatactcatcttcatatcaaacgcctgttgcagcaaatgaagcgtgatactttcgcagatg

SEQ ID NO: 3656 - DNA, 807 bp, Arabidopsis thaliana landsberg
tatcacaaacttgcaatctatcgtggttcaaactacaaagtccttgacggctaaaaaatcaaagattgaaaatagtagtttaacagttaaatttatctcttgtactccgtaaaagttacaaacctcagatgtcaacatttacatctatctcttgttcttaaaacaatgaagaactttcaaacttctacatttaaccaaaaaaaaaactttcaaacttcttctttgtaaaagttaaaacaccaaaggtcaccacaagccaatctataaatgtcaccaccaacatgagtctcttcactcactaaaaacttttcttctctgcatctaatcctttatttcctctctcactctcttttgtttatactcgtgcaaaaatgggaggcagtaagatgtccaatgactatgaaattgatgtcgaagctgggatgtcttctctttctatagtcaacacacccattgaagcaccaattgtatcatcttacaatgaccggatccggccattgcttgacactgtcgacagattgagaaacctgaatgtgatgagagaagggatccagcttcccaccattgtggtggttggagaccagtcttcagggaagtcgagtgttcttgagtcgttggcaggaatcaatttgcctcgtggacaaggaatctgcactagggttcctctagtcatgaggcttcagcgaagctccagccctgaaccagagatttggctggaatacagtgacaaagttgttcccacagatgaagaacacgtcgctgaagctatttgtgctgcaacagatgtgatagctggtaagttttctc

SEQ ID NO: 3657 - DNA, 3935 bp, Arabidopsis thaliana landsberg
  unsure (1)..(3935): unsure at all n locations
gcgtattttgctggctttcatgacagcttgcaagaactcatgtggactcacctgtggatgcatggtaacttaaattagcgaggtcctcaataggtgagtgcataacaaaaactaaaaaagtgagaggcataaattgagtcagacttgtcctttaaagtttcgagcatgccaaatcttgcgagttagttccccaaaacggtgaacaagaggagacttgcagtgctgataattttcaggaatgaggaagaaattccttacacgagtcactctcatcaacgactggattgtaacattcacaaactctgtcttttgtatgttgttcaaccccacctacatatttacaagcttaacctttaggagacattaatttcaagatcaagtgtaatcaaagagaaaggattaccattcctggaagatagtcggagccatcaagagccctagaccactgcctattcttgtcaagctcgtttacttgtgctctactaaacctgtaaatggatagcaccgaagccttcatacaaaggaactgaaaaatcaaagaaaaattgacaaaacatgaaagaagagtaatatgttcaagctatcatgcaaaaaaatataaatagatggtagatgatacagagaactagtaagaagaaactgattgagataatagtcaaagcaattttgttgttgttaactacgtgcaaaggctcacatgttcacaaatcaatacccaaaatgcagtaagaactatgatgtagttagtcacaagatctaatataccttgggtttaaaacatggcgaatgtcatccaaagaagggtcattgatctcgtaactatcaggaagacaataaaccttctctgtcagaagattgatgtaaacgtggtgtcctgcttccaagctatgtgtataagcatgagacttctggcttcttccttgaaagtacttcccacaaacaagacacgcatacacattcagatttgacaatgagacagagcaaaacctctcgaaatcaaaatccaacacctgaaatcaaccataagatatgagtttaaacgctaatctcaaaccagcaatataatgaacctagcagaagcttaaagatccaccatagattagatacattacaagtaccaaacacaagaaattggtcaatgatatacctgacgattaacagtatcaagataaggacaatcacgacgaacttcaacatggcgtgaatgctttcctctccccttcgaagcatcatcatcatcatcttcgtcgtcatcgacctctacttgagcttctcctttcactttgttaccatttccctctcctttcgcaactacattacaacgagtttgcgatttattctgctggttattatcatcatcgtaagcattagcaaacggcaaaagaggattgttgaaacctagtggtggaggtggcgaatcanaccgttccatcactctcttcctcttcacctctctctcttcctcagaaacaccattcttcacttctctttcacctttcattcttaaaattttccctaagctaaagcttgctttaaaaaccttagaacacaaaatcccagcgattcacgaagaatcctcaaccaaagaagcaatgaactcttccaaaaaacgccaaatacttcaaatcagaagcgtcgacagccgcgaatctactcgaacttatctctcgttcccaattttctcgagaaacttcaaaatccgccacaacgcagacgttaaacaaacaacctattaaagcttcaagagccgactcaagtctcacccagattgattaactcggttaaaaggccgaatatttattattgggccacactgttatagcccaataacaatctgttccatttatattacttctgtcagcagtattcagtaattgatctgtattcacgatccgatacttatcgaataaccattaataccctcaagcttctcgaagcaaactataaacgcgtgaaaatctacaaggacgtattcgacattccacgagtaaagagatgagtactgaagttaaagccagctggcgaagaagtaaaaaagcaaatagattagccaaaatacgacaacaccctctacctacaagccatagataccatgactcataagggcaacaccgacatttgtcatcatttgataaatctaaccaaccctgaagggcatattcgtctttccaaatagttataaagagacagagacgaagaaggagagagagaaagagacaagattagagaagaggataagagagagaaagatatagagaatttgttgtctttttttctttttcttttgtggggtatttgtttttttttttctccttaaaaagtttttttttttgtgtgtatgaaaaaaaaagctttgaaattctctctcgacaatggtgtcggaccaggatctagcgaaaggagtcgagactttgcttcgacaatccgaccctagctctctcacatcgttaagcagtattgttcagcagcttgaagctaagttagggttagacctcacggagaagacgactttcatcagagatcagatcaatatcctcctccgtgctcaccaaaacccttctgcctccgtcgcctccgcttcatccgtacaacaatctcaccctcctcctccgccgtcttctcaccagcagcagaatttgcattccggcgtcaatgttcctccgatggcgaaagggcatttcacacttagccatccttcgcaattctctgtttcttctcaatcacaacaatatccttcacatttcgctcttcagcctccttatcactcttatgacctaaatttccggcagccttatccggtttacatgccgccgcaacagcaccagcatcagcagcagtctccgcgacaacaacaatcctctgtgatgctctcacatggcgggaatgcttctctatctgttaatcaagccccaaaagaaaggtagggtttgcaacatatttcaaatgttggtacgtaattttgctcaaggttgttccaatttcagtaatttagggcttttgctactttcatggaaaacatgattttccattttaggaatgtctaaatcttttgtcaattttgttcatttacgggtttttaggttttacatgctcatgtttagaattatcatcctgtgatatttttagcacattgattcatacaacgttctattatagtgtgattatttctttctgatctacctaaatttggcacatcaacgaaatttgtcaacttttcctttgcagtgctccggctggaactaaaagaaagggtggtcctggaggactaaacaaagtctgtagggtttctccagaacttgaagtagttgttggtgaacctgctcttcctagaactgaggttatcattgtctttcatttatgattataatgtgtataagcaattgtggttgttatttatgtgttgctgtggttggcttttggttttagattgtgaggcaattgtgggcttatataaggaagaataaccttcaagacccgagtaacaagcggaagatcatctgtgatgatgcgttgcgtgtggtttttgagactgattgcactgacatgttcaagatgaataagttgcttgctaagcatattctcccgcttgatccatcaagtaatggttaaacacaagcgttttttgctgagttccaactgtgcttggtttgttcaaggttactgactgtttgagtcacttttggcagaggactctggtcaagcaaaaaaggcaaaaactgaggtggagactaagactgagaccaccgagcctgttagttcaactgctattagttcaactgttacattatctgagccacttggtaagttctttggcactggtgagacggagatggcagacgaagagattattcgccgtgtttgggaatacataaaactcaacaatttagaggtaatgattttaatcttgaaatcctctggtttctccttattgcttc

SEQ ID NO: 3658 - DNA, 815 bp, Arabidopsis thaliana landsberg
tgacaacatatgaggatcatttttccaatggaaaacgctgaatactaatctagcccatgcatgagaaacggcatcctggagatttgtttggtttcattgacttgatactctgtcacaacctccaactcaccctgtaatggttaacaggttacatgagatacagcttttttgtaagaaattatatcaaactgcattatgttgacatttcaaaggacggacacatacctggaagcacttgtggatgatactgctagcgtcctttgaagttctaagatccatgtgcaaagtgttgaggagccacgacataaactctactggatctgattgttggccaatcctaaagcgtttcttgctggctttcatgacagcttgcaagaactcatgtggactcacctgttgatgcaaggtaacttaaattagtgaggtcctcacctaaaaactaaaaaagtgagaggcataaactgagtcagacctgtcctttaaagtttctagcatgccaaatcttgcgagttagttccccaaaacggtgaacaagaggagacttgcaatgctgataattctcaggaatgaggaaaaaattccttaatggagtaactctcatcagcgactggattgtaacattcacaaactctgtcttttgtatgttgttcaaccccacctacatatttacaagctaaaccttttagaagacaaattaatttaaagatcaagtgtaattaaagagagaggattaccattcctggaagatagtcggagccatcaagagccctagaccactgcctattcttgtcaagctcgtctacttgtgctctact

SEQ ID NO: 3659 - DNA, 1984 bp, Arabidopsis thaliana landsberg
atgttgtggacattgctttcgatgcagaggcagcggcaagaattgaatttgtgcgtgtgcagattagttggaacagtgtgaatccactccgttttcaacgcaattgtcaacacgttgttgaggttccgatttgaatgtctgagaggtttttgtgaggtctatcgaatgcttacgcatgattcaggagcgtgtattctttgtaatggtgatgctgattcaaattctgatggtgatgaagatgatgatatgccaaatgctgagccataaaatcagggagtggtcatccgtgagatagaagaaggagaggagaatggaggccttgaaatcctctctgtgattgctgatccaggggaagaacctcgtcatgttgaagatattgacctgatgcctaactcaccggttgaggatgatgatctccgtgattatcaacgctacagcatgtaaagtggtgaatatgatactaatgagttgtttaacccaattccaatctttgagaatgcaacaagagatattccaggtgatgaaagttacagtcgctattctgccaacattcattctcaacctgaagacatggcgcaaccaaagaatgatcatgagaccatggctgcagaaaggggaaagaggaagcgagaggactctctggaccagactgaaggcaatgacaacttgaagatggtgatacgcgaagcgggagaaggaagtggctcttctagcatgatcacccagtgtagaggcgcagtgggccccaaaccaccacaaccgccatgaatacaccctgctggaactgtcaaggtttaggcatagaccttacagttcgacaccttaaggagatacgtcggaagtatctcccggaaatcttatgcctattggagacaaagcaaggagatgacaaagtcagagatgtatgtgttgacttaggttatgacaggagtagttcagttcctcctgttggattgagtggtggtgttgctgttttctggaattctaatgtttccctttctgtagtttcctagtcttctaatcttgtagattgctatgttgaaagtaatggaatctgtttctacttgtcctttgtatatggtttcccagaaccaagtaacaaacacttattatgggaacgattagaacggatttcaactacaagaagagaagcctagttaattatgggagactttaacgaaatcaaatccaatgatgaaaaaagatgcggtcctccaagaccagagagcaggtttttggatttcagaagaatgattttaacatgtgattttcatgatcttaaatcctttggtgatcgattctcatggaagggaaagatatatacacatgatatatggtgctgccttgaccgttcaatggcaactcacaatggcttgcttgttatccctctgctcaaactgagttcctcccctttgaaggctcagaccatcgccctttgattacaagcatcaccgatactttaggaagtcgctatggtacctttacatatgataagagattatttcaccgacaagggttcaaagagaaggtccttgaaagttggaatgctgcaacagagatcacgcctctagagaggaggattaaacagtgccgcatatccatggctttatggaaaagaagacatcgtacaaatttagcagaacaagttgaagtcttgaaacgacgattagattttgctctttcgaatgacgacttcacaactcaggatatccatcacattcgacaagatttaagtcaagcttatcatgatgaagacacatattggaggttgaagagtaggaacaacttgaagaattatggtgacagaaacaccaaatatttttatgcctgagcaaagacgagattggcgagaaacagaatactatccttagaagataattcaggcaatttccatcatggtgattcagacattggcaacatagcagaagggtatttcatggagctattttctacaacacgatcgcctcatataaactatcaagcg

SEQ ID NO: 3660 - DNA, 5882 bp, Arabidopsis thaliana landsberg
tattgttaagcaatacctcgtttcttgtacccacactattggaactatgtgtgagagatgattggggctctttgtcagctttggaacttgtatcaaatataggcttccaaacacaaccattgcctggaataagaagataattttaaaagcaatccaaacagtgttgtccaataaaacatatcagaaaattatgatacttgttattaatgtataccttcataggatcagagttgacttcacaaactcctgaatgaattgctgcagccatatccacggtgacctgaatgtttagggttcacaaagagatggtgagaaaaacataagaatatattacttgcaagttataacgaatccacaaactcctatccaatataaaagtgaacatgcaagcctaatttagtttagacataaggatgaccttcttttcagagaacattgcaaaccctaacaatgaatgagatgttggaggcgtctccatggtgtcctaaaagttgaagtacacaaaaagatggtgagaaaacataagataatattatctgcaaatgttaagggatccacaaactcctgtcaaatataaaagtgaacatggtatcataatttagttcaaacctaatgttgaccttatttttagataactttaccatgtggaacattttttctataaatgtttgttgcataatgcctgagagatgcagcaaacctctacaatctccaataaatgaatgaatgtaaatcattagctgaaactagttagaaatttatacccccatagcatcattgccaatctttacttcgggttgtgcctccgacactgaatgcgatgctgcaagtatctccaaagtaacctgaatgttgatgtacacatgtagctagttagaataaataaaagaaatattgcctacaaattaagaagtaacaagaaaatcatgtccaattgctcaagagccgcaacacataaaacatgataatgattgttgcagtataccttcatagaatcaccatcgaagttgacttctggttgcgtctgttacaatgactgagataccgcaaccgaccccaaggtgacctaaatgtagaagtgccaataagatggtgagaaaaacataagaaaatattagctgcaaattataacgtatccacaaactcttgtccaattaaagcgagcctactttagtatagacataaggtttaccttcttttttgcgaactttgcaacccctaccaatgtatgagatgctgatccgcctccatgttgtcctgaatgttaaagtactcaaaaatatggtgagaacaacattagcaaatattatttgcatattataacgtatcatcaaacacctgtccaatataaaaatttaacttgcgagcaatatttagttcaacatatggttgcccttctttttaaagaacataattagttcagacataatcttgacttttttaaacataaataattagttcattcatagttcagacataatcttagagtccaagctaagcttgctgttcttcagagctctgttctattggcagatctaaatcagattgtgatgcaggatccctgtccaatgagtcctgaaagtaattgtagaatgaatttgttgtggtaaagatacagagagtaaaatagattatgtattttcaatggttaaataaaggctttgatttattgtgtttgtatttataaaagtaccggccttttgctatcaacatctgcttcattggcattcggttgatgttcttcagagttgtgttcttttggcagatctaaaccagaatgtattgcaggaactctctctgatgagtcctgaaagaaattgtagaatggatttggtcaaaaaaacacataaccattggtctgcgcagtaggtccaacaaatactaaattatcttacatcaataatatggtcttggttgagaggaagtagtttttcgacgctttggtttgaacttggatcaacctgattggaaattacaatagtcaatgtctcttatatataagtcattatgggtgtccaagaaaacctgtccactcaggattaacattaaagacatcacaaaagaatatgtagttttgatggttaaagaaaggctttgatttgttgtgtttgtatttataaaagtacctgcattttgctatcaacatcttcttcattggcatttggatctttgacatcagtgtcataaatagggttgccttcatttgcatcagccttattagagtgctctgattgtagtggggtaacaaagacatccatggggtcatcagtaatctcttgcaataagatgtgttgacgtcgttaattctaccaagtttggatatagttgaagttaactattacactaaccgtgtttgtcaatggggtactatcactagagtctttagcttgatctaaattatcgtttgggacttgctgtccaacttcttgttgtccaaatacatgattagacatcgtgtgtgaatgagatggattctatgaggaaaataaaagttttgttatgcgttaaaacttggaaaatgtataagtagatgataaggttcaaatattataaactgtttgaaatcttgattacctcagaggcttgagattgagtaggtacctccaatgacttcttgcgctttgaactagaaacaaatggaacaaaaccgaaagccaaatttctggaccgcttgaatctgacagtttttcttttcttttcaagcttcattacacgatttgatagctcttccatcttgttttgtagatcaacgagcaacctagacttctcatcatcagatagccttacattttgattaaaacgagttgaatacctatgcttggatttgggagggtcagacttcacccgtagtctcttcttacgatccacaatatgctttttgtgaacaacagaagacttcttctttggaattttaattgatggcaatgtagcatcacctcctggccaatcgctttttttgaattgatgagctttccgtatcaaatcattcatgtaagcaactttcctgtctttcacctcgtcatcccactctgcccaactttggtcaacattaatatcttcacctataagcggatccactggtctctattgaaaaatagaaggttattattagtaaataagactgaatattatattgttatagaaagagaatattatagtttctaacccatataaaaacttttgggttagaaaaataccttaaggttgctttctaaagagtgaatctgcggaagggtaattagttgtgttggatgagttaaattcttccaatgaaggattgtcaaggaggagtcgtcaaacttgagcagatctaccattccaagtatgttacgaaatgctaagagctgcagggcatgcagcaaacctttaagacagaatgtgatctgctgaagctgattcaccaaattctgaataggattgtcagtgagctatcttttaccggtgcacttagcgagaatctgtttctcgggtgtcatcgcttcaaccgtcttcataaacgactctctaccccaaggaaacgaaagaaatttctctagatctgccaacatctctacatatttaaatgtaggcctaccagtttggttcgatgctatgaggacaccatctacaatgagtaggaaagcgagcttcagtttgtggtcagaagacaatttactgcgtttcttggttagcatggcagatatatcccctaaggtaaccgtcttgtctggaccaattaactcattctagtagctcttcttgccatcatcataaaccggagaatcttcagggtcatactcgtcacgaaactccccacaaggcaagcctgtcatggaagcaaattctagtagtgaaaatctcattgggtgtccaccaaaaactgtccaaaactcatactttttcttagtaagtgaaacaacccgaccccatttttttttttttttttaaaatataattaaatatttccataaatatctaattaaaccaaccaataacataataattaaacagcaagtcaaaaataccattttatgaataaataaataattcgaccaacaaaaccaagaataactgacaatcctaaccggtttccaataaccaaaaacaccaaaaataaaacaaacgagttcctaaatcatcctctcttccttgccatgattccacgatcacattatctttacctgcatcaacaacacaaatgagatgcgtaagtattatcataaatacttagtgaggtgatcctcccatctacgagctatacacacaagcaaaaaaaagctctataatcacaaatacaacataacgaaccagttattgaacaattcacccaaaaacacattcaccacacctacatatcatcccacaaaataaatcatacaacccaatcgctcagataagcacatggtcacgcactcacttaataaattgattctaacaacaattaaactcaggagagacttaaaacgtcccatcctgggctgtccgtccggtgaggttgttcccatccgaggacaactcaagtgtcctcgggtcctatctgaattcgctctaagtgtaattggcagcggaaattctgagattcataagtaaaaagtgacgaattcacataaagaaacaagccaactttattcatataaggtttcgaacgacatgagtgtttgcactataggctattacaatcattcgatccaataatttgactgaaacaccacccacttgcccgaacaaccatccttgcagctaagccaaatccttcccacaaatttggtcaaatcctgaaattaacgaatcatgagtatgccgtggtttacacttagtgatcatgcatatgctatgatgctccccatgtttcacccccacacataactcaatcgttagaacagaatattagaaggatagatcacatcaaccgaattcccgagcccttttaagaccgttcggcctaaggtcggtacggttatgcctcaccttggtcgttcgactattcgcttcctcggcctccgtcagcccaaggccgccgggagtgcccatggtctctaactcggccatcttgttccgttcgctcgcacccttagaaagatcacgtttttttctgagtttggtgagagtttcggtgtatggacttgtgttctttccttggccgaagggcaaattattaataaggaaggggcgagtaaccgcccttgcgaacgggcgcctctaggtccttctggatccttcagggcgcttccttcccaaccacacacgtggcgcgtccttatggcccggtaaccgctcaaggtacctgccgggagaaccgttcggcaaccgtccgggtaaccgccgagtaaccgcctcactccccatccagctaggtcgagctagtggagctagctagtagtctcccgagctggccgagcttaccggtgagctggtcgagcttccctttgaacttgccgagcttccccaaccttctccgagtttccctgagctgccctagcttcctacttagcttcccgagctattcactccatcttctttccctcgggctcttggtcattcgtgtttttcccgattggccgcccttcttcgggccttgggacgagttttctcacccgactctctacaagtcttgtcccagcccttccccttgatcctagtttggatcggggatgttacaagattctccttgcatctgaaatagttcagaaacgtcatacaacaagtcacacaaccaaaagcaaacttgaagcaaactggactgaaaaatagaaacaaacagtctcaaagacgaatcccttaaataaagaccaaccgttaactatcaaatccctccgttgaaacactatccttagatatcataaagcttccccaatatcttgtattgatcggaaacctgatgagaccacgatcacagttacaat

SEQ ID NO: 3661 - DNA, 2485 bp, Arabidopsis thaliana landsberg
gctctgttattttcatttgttccatagcagcaatctcaagctccactattggcctattttcatacctttcctgaaaaagagacgatttgatgaatatgtaactttctcattcactcacactcaacaaaaactgatttggaaatgcaaaagttgacctttaacgcatggagcatctcagcgtgagtcctgccagaagcgcaaataatgaagataaagctaaacttctttttgtaaagtacattccattcggcaagctcctaagaaattgaaaacaattgatcatcagaagaagaaatcactgaagagatgaaggaaaaaaaaagtgaagatccatcacctgtaaagcagaagcagaagttgtggcaaaggcggttgactgttctgatacgctccgacgagcaaaatcggagttgatagaaggtgaaggactattcccaatctgaggatgagcagagaaagcttcaagccaatctgtcacattaacttggttgaaccagatgtctcttgcagtatatattgcttcttgagaagttaacggtccagacgtagacatctgcttcgcgaattcggagcttccacagcaaaccttccattcatcttctccgatctccatcgccattttttctctcttttctccaatcctcacttctgttgactggtgtaagatcaaaagtcatctaattgggccttttcataaacgggcttttcaaaaatgggccttttctttatcttcttcctttttttattcatcatcttctatatgtgaattattcagaaacagaagcgagaagtttcttacaatttgtaaagagatctgttttagggttttgccttgttcttgtggcgggaataacaaagacatcgccgatatggggaaagacgaagaggaaatgcgaggtgagatcgaggagcgactaatcaatgaagagtacaagatctggaagaagaacactcctttcctctacgatctcgttattactcacgctctcgagtggccttcacttactgttgaatggcttcctgaccgtgaagaaccttccggtaaagactactccgttcagaagatgattctcggtacccatacctccgagagcgagcccaattacttgatgctagcccaagttcagcttcctcttgacgataccgagagtgaagctcgtcagtacgatgatgaccgctctgaatttggtggctttggctgtgcaactggaaaggtgcgattttttatttttgtttctcatttccaactttctagatttgattctagggttataacgaggtaaaggatgataaatgttagtttgattgcttgtgtaggtacaaattatccagcagataaatcatgatggtgaggttaatcgagctcgctatatgcctcaaaaccctttcataattgctaccaagacagttaatgcggaggtctatgttttcgattacagtaagcatccatctaagcctcctcttgatggggcttgtaatcctgatttaaagcttagaggtcacagctctgagggatatggtctctcttggagtaagttcaagcagggtcatttgcttagtggctctgatgatgctcagatctgcttgtgggatattaacgctactcctaaaaacaaatctctggacgctcagcagatttttaaggtaatgctttggatttctattcgtttttagttttgttttgtatcatctagaaaggaaggaattgcacccacttaacggaatcagttacacttatgaaagctcatagatagatattcaggttggtttctgtgttttccttgctgatgattattttctgaacttaaggctcatgaaggggttgtggaagatgttgcatggcatctgagacatgagtacctgtttggatcagttggagatgaccaataccttctcatatgggatctgcgttctccatctgccagtaaaccagtacagtctgtggttgctcattcgatggaggtgagtttgcaatatattagctttagatacagataatacttctggtttttaagcttgctttccttaacactaaaaaccattgaatcatattgcctcgtatgtatttgctaattgttgagttgtttgaaatgccttaggttaactgcttagccttcaatccatttaatgagtgggttgtggcaacaggatcaactgacaagactgttaaattattcgatctacggaagctaagcaccgctcttcacacatttgatagccacaagtaagaatgatacgccataaatattgccgctttgagatggattttgtgttactaagaagtatttacaagttacagcaacatcactaaccttaattatgtgcttgatctccagagaggaggtttttcaagttggttggaacccaaagaacgagactattttagcttcatgttgccttggtagaagacttatggttaattaccttaccaaacttaaaccgtatactttaattctttaatttaacgttcatgtatggtcatgga

SEQ ID NO: 3662 - DNA, 2191 bp, Arabidopsis thaliana landsberg
  unsure (1)..(2191): unsure at all n locations
caaatcacggacttcttcttgttaattaattaataactagtttttcctatttgggctttaactaataaaattgatcattttttatcgtaagtttacttgctcaacaaaaactcgtgttaaaattatatcattcaccactatttattattccctttgttttgtgttctttgggactctattaactatataagctccatagaaaatcaatgagataaatataaattttacacatttggctctgaggttcactattccaatttgatagctgcatcaagcatatccacgctgctgttttgttgtgtccatagctgcgcatatctccctgattttcccaatagctcgtcgtgggggccttgttccaccaccttcccgttttccagtactacgatctgcccgcaaccaaaagtttcagttatgcaaaaacattgtttctttgagctaagttgacaaacactatttactacaaacctcgtcacattgcatcgcagtggtcagcctgtgggcaatgaagatagatgtcctgttactcgctagtgccttgagtgcgttcagtatctctgcctctgttgtgctgtccagcgcactcgttgcctcatcacacaacctgtgtacaccaaccatctctatgtatgtgaggactagacacgtacataatcacataagtaaactcaatgctgcttctgtgcaaagttacttacagaatcgcaggggatttcaaaaatgtccgagcaagggccactctttgtttctctccaccactcaactgcacacaacaccactccatggttatcacaatacaaaaaccccatcaatatatgactctactcaaactcaggatggtcactcatcaatgctactctttgccattatatagaaaacctcaatcagttaaatcttttatttttcatgattgttacagtcctgcgaaactagttgtattagatcatattcttcatcaagttttcaacaggtgaactttgacttggaagcctgattgacttagcttgttttactttgattatgacaatgacaaaaacgacgggtgactaactccccataactcaatcatgcattccagatataacatcaaaatactgaccttgagccccctttccccaacgatcgtggaatatttatcagggaaattactgattgtttcatgaattgcagcacgccgagcagcctcatacacctggattgaaaatttatgttagatgaggattattgatattaaacttgacatttccaccaagtataagttgactggtacctcttcttctgtagctgagagacgtccataatgtatgttgtgaaatattgtgtcattgaagagaacctgcagtgcagtagagattacccttgagaacaacaaaacttggagtgctataccttcacaaaagctaacaatgatacatatgaaaaataaaagagaagaaaagtggaaaaaaacataaaaaaaatcaagtgtctagcatgaccagagaagttacaatgagaagaaaggcgagaaacaaatgaatgcaggtcatagtggtgtatataacaaaaagcctcacgatgagaagtagagaaatgccaacttacagtatcttgcggcacaactcctatggagcttcggaggctatctagtctcacttcctttatatcttgcccgtcaatccttatctgttaaccaacatgacaaaaaagatgttatctagataccaagcattttcttcactaaatttctctgcagcagggtgtactttcgttgctacaatgcttccaaacaagaccccacatttcacaaacaaaaaaaatgcttacatttccggaatctgtgtcgaagaatctgaatagcatcctaagaattgttgacttgcctgccatagaacaaataataagatttgcaacagtataccagaataacaaatttacacagaacttagatgcttaaacagaagaggtttaggaattaccgctcccgctagtaccaacgattgccacactttttcctgccggtacgacaaaggaaattccatctaatatttttctctctggaaggtaactgtcattgtagaaaaagagaaagatgatgtggcaatagacataagttattaacccccttcgtcttcagccacaacatgaagctgatatccaaatcatgcaatgtcttataatttgccactttgataagctcaacanagctaat

SEQ ID NO: 3663 - DNA, 1525 bp, Arabidopsis thaliana landsberg
taccgatccatctccatctccatctccagtcaacgcacgagtcttcttcttctcaacttcaacttcaactccaaatcaagatcaaaccaaaacagcatcatctaagaagatcctccgcacgatttcaagctatctatggatgaaagacaacccagaactccgattcagagtcatcgctgctttagcgtgtctcataggagctaagttcttgaatgttcaagttcctttcctcttcaaattatctatcgatttactctcttcatattcatcttcaacaatcactgattcaaatccttatctacttgctgctttcgctactccttcttccgttctcattggctatggcattgctcgatctggatcttcagcttttaacgagcttcgtactgctgttttctccaaagtatctctccgcacaatacgatctgtttctcgtaaagtgctctcgcatttacatgatcttgatcttcggtaccatttgaatcgagaaacaggagctttgaatagaatcattgaccgtggaagtcgcgcgattaacacgatcctctctgctatggttttcaatgttgttccaacgatcttggagatatcaatggtcacaggtatattagcatacaattttggacctgtttttgctttgatcacttctctttccgttggatcatacatagctttcacattggttgtgacacagtatagaactaagtttagaaaagctatgaaccaagctgataatgatgcaagcacaagagctattgattctcttgtaaactacgagactgttaagtattttaacaacgaagattacgaagcgagaaagtacgatgatttactcggaagatatgaagatgctgcattgcaaactcagaagagtcttgcgtttttagattttggacagagttttatatttagtacagctttgtcaacatcaatggtgttgtgttctcaagggattatgaatggagagatgacagttggtgatttggtgatggtgaatggtcttctctttcaattgtctcttcctctttactttctcggtggtgtttaccgtgaaaccgttcagggtcttgttgatatgaaatcattgttccagttgctagaggagagatccgatattggagataaagatacagagacaaagctacctcctcttgttctgagaggtggaagcatcagttttgagaatgtacattttagttatctgccagagagaaagattttggatgggatttcatttgaggtaccggcagggaaaagtgtagcgattgttggtagtagcggaagcggcaaatcgacgattcttagaatgattttcaggttctttgacacagattctggtaatgttaggattgatggtcaagatataaaggaagtgacactagagagtcttcgaagctgcattggagttgtccctcaagatactgtaagttgccattttccctagccttgttctcttacattttgttgttattagtctaaaccgtgacaaattaggtaaaatgtctgtaaaaaacgactcgctttt

SEQ ID NO: 3664 - DNA, 1498 bp, Arabidopsis thaliana landsberg
gctgaagttgatgtggagaagaacatgacgcgtgcgttttcatatgtagtatcggagatggagattgatggggggcatgagtaggtggagattcaagaattgagttacgtttgatgagcttgaagaaactgtggtgaagatgatgatgatgatgataaccagagcgaagacggtacgaaagagaagtgcgacagagttggagttgagaaactctcatcattgcttcttgtcctaacatatacagtttcgtctggttcgtttcttatatttctgtagagtcgtatgtttgactttttgctcgacctctttctgaatccagtttcgtaccatagcacctgaagaagaataagattaaaaaattacctcttgcttggagatctcaacttgttaataacctccccagtctttgtttacaataagattatgaattagatatctcggagataaccggtcctggttcgattgccacgtgttttaggcatgagaaccggatacttcaaggactattggtttttatccaattcaatgattccaaaggtaatacaaatagcttacttaaaaaccgaataacgaaactttttgatttgtcaaaaggtaattgaaaaaatcggtttggtacctctacgactataaatgattttcccaaggttacaaatatgttttattttttgtaacaaggctacaaagtaccatcaatgatatttgcaaatatatgattccaaaaataagggaagtcagcaaaaaaaaagaattagtgaggcgaaaacagaacccaaacactagctgtctagctcttgagattcacacctccagtgtactgttttgttgtgtccataatttagcgtatctgccagatttctccaacaacacttggtgtgtccctttttccaccactttccctttctccattactattatctcatcacattgcatcgcagtggtcagcctatgtgcaatgaaaatgcatgttctgttactcgctagcgacctgaacgttttcattatctctgcctcggttttactatcaagcgcattcgttgcttcgtcacacaagagaatcgctggtgatttcagaaaggcacgagcaagtgccactctttgtttttctccaccactcagcatcagccctctttctcccaccgcggtcgaatatttatccggaaatttcatgatcgtatcgtgaatcactgctcgcctagctgcatcgtacacctcttcttctgttgctgaaaggtttccatagtgaatgttgtgaaatattgtgtcattgaagagcacctgccataattccaggagtcaattgaggctatgattagtctagtttatctttaagtatgcaagttataaccattaaatcgatttgatattaaaatgaaaattaagatcatcaggtttaatcagaatcacttttggagtgtaaaatgtcataagcatgtgatttatgtagaaattgtgactgaataacaaaaaagtttaaaataccctaaatagatttttc

SEQ ID NO: 3665 - DNA, 2424 bp, Arabidopsis thaliana landsberg
cactagcatttgaagttgcagtgcttgccggtaatcttcctttgggtctcagtgtccttggttcgtctttaaaacgaaggaccaaagaagagtggatggagatgatgcctaggttccgaaatggtttgaacggagatattatgaaaacattaagagtcagctacgatagattagatcaaaaagatcaagatatgttcctttacatcgcgtgtttattcaatggttttgaagtcagttacgtcaacgatttacttgaagataatgttggggttacaatgttggttgagaagtccctcatacgtattacaccggatggagatatagagatgcacaatttgctagagaaattgggtatagaaattgatcgtgcaaagtccaagggtaatcctggaaaacgtcgatttctaacggattttgaggatactctgagaagtattgacagagaaaactgtaagtttttagcagctgccttttaatgcatgactttatattaatttaatcgtcatttggggattgataaactttaacaattgttgcctctcctgcttaattaaaacgtggctagctcttttgatgtctcagaaaaataaaaacggttgccattgtaaagattatatcattatactagtttacttcgtatttttttcaggggacagaaacagttcttggaatacgtttctgcacagctttccgatcaaaagagctattaccaatagatgaaaaatcgttccaaggcatgcgtaatctccaatatctatcagttactggggattatatggatctacctcagagcctcgtttacttgccccctaaactcagattgctaaactgggataggtgtccattgatatgtttgccttatagttttaaggcggattacctcattcaactcacaatgatgggaagtaagcttgagaagctgtgggaaggaactgtggtacttaattcttcattgaaatagttgtcaatttttagaacagacctgtggtaaaaattaatctgtttgaaatgtttatgaatgtgtgtattatgtttttccctattttgttttcagccacttggaaacctaagaggatgaatatgcatggttccagatatttgagagaaattccagatctttctaatgccagaaacctcgaggagttaaatctttctgaatgcagatctttggtgacacttccttcctcgattcagaatgccattaaactgaggaagttgaatatgtggagttgcacaaatctagagagttttccaactcatctcaacttggaatctcttgagtacctcgatctcctttattgcgataatttgagaaatttccctgtgtttaaaatggaaacttcaacttcttcgccacatgtaattacgataaaggtaggagattgtatatggaacaagaatctccctggactcaattgcctcgattgccttaggagatgtattccaagtaaacttcgcccagaatatctcaatgggctcacagtgaaaggaaacaacgtgccggggaagctatgggaaggtgtccaggtacattgttaatgttatagcatttgctgatttttgtttaacctctgttgtaactaattacgtataaccaaattaaagttgtcaaaatggcttgtgatccacggtttatatttacatacataattatgtattataattttctttaaaatgtgtatagttattaaattaaaacgaaagtgattgaagtataacattttttttttttttaatttctgtttcagtcgcttgcaagtctcgaggagatggatatgtcagaatgtgaaaacctgacagaaattccagatctttcaaaggccactaatctggtgaatttgaaactcaacaattgcaaaagtttggtgacgtgtccttctacaataggaaatctccaaaaattggtgaggttggaaatgaaagaatgcacagggctggaggttcttccaaccgatgtcaacttgtcatctctcaaaatgcttgatctcagtggttgctcaagtttgagaacttttcctctgatttcaaaaagtattgcagtactcaatctagatgacactgccattgaagaagttccatgttttgagaatttctcgaggctaatagtattatcaatgcgtggttgcaagacggtgagaaaatttcctcagatttcaactagtattcaagaactcaatctagctgacaccgccattgaacaagttccttgcttcattgagaatttttcgaagctcaagatactaaatatgagtggttgcaaaaagttgaaaaacatctccccgaacattttcagactgacttggcttatgaaggtcgactttacagactgtggaggtgtcatcgcgacgataagtgataccactgtggtgggaacattgaaagatcactatgaagacattgaaaagagaggtacacaaaacgata

SEQ ID NO: 3666 - DNA, 2046 bp, Arabidopsis thaliana landsberg
tcagaatagaaacagatgtcatcagaatctaactttttttatgtttaacagccacaggttataaataactgagagagacctttctgcagcgaggaaggagttcttgcagagttttcatcctctcgttgatcctttccctccgtctctgtttaacagttatacaaactacgttttaatggagagatgaaacaaagagtccattattaaaacctagaaagtaaaatataacaaccctttcggagaggttatgcatttctgcagctcgtgacctcttcctaaacgttgaaccatgagcttcctcagttccctgtacgccaagaaacaagataaaattgagccttgactgctacactgcacgtgtcaacaggtgaacctatggtagctgtgactcacagggatttctgcaatggtttcttctctcttcttgtcttcggcaattttcgtctccctctccggttgtatttgaaccggctctgtttcggccttgcacacccctgaagatgatgttccggccgtatcggttgccaccgcctttcccctccgaccaagaccgggaactgcaaaagtacgggatactccggtaatggccaccgctccactctcggtgccgtgagtcgctggtattacacaggattcagcggctgaagacgacggagtcgcgcttgagcctatctgcgtcgattctatcaccaccggacaagcttcaactctatcgccggaaaatatgttccctcttagcctcaagaagttcataaaattctctgtccttctcgcaacgggaatctgaccgtagggaacactgggtggtggtggtgttggtgctagagaggcggaactttgccggcgagtagctgaagtagaggcgacgccagaggaaaaataatcttgacggaggggatggtaaagccaagaggccatttcgtcttcctggatgaagatattttgatgagacggatgcaggggaggcagaggcagaacagtttcttcacctcccccacttccgctgccgcggaaaatgggaggaggaatgggtctctgtgtctggatgctttgaacgacttggccgcttttccataagagttccaccacatcatcttcactcctaatttcaaaccaaaatccaaaccctaaaatatcagactcgtcaaattgcaaagagtaagagaatgaaaggaaaaagaacggaaatgtacggagcattgggtggtggtggtggcagggaaacagaactttgcggatgagtagccggtgtggacgtgacaccagtgtaagaatagtgaagccaagaagacatttcttcttcccgaatgaagagattctgatgatgcaggggacgtggaggttgtagaagtggaagtggaaggggagcattttcttctccgctgccgcttccgctaccacgcagaatgggtggagtaggagaaggtttacccgaggaaggtctttgtggttggctggttcgaacgacttggccgttccataagagctccactatatcatcttcacccctaatctcaaaccaaaaccctaatcatcaaaaaatgtgaagataaaactttagcaagtaagagaaataaaaatacaaaaaggaacttacatgatggaagtatgctataggaagatcaagtaagaggaagaaagagaagtagaagattcaaagtatggaagttcatagcttgagacaaaaagaaacaaaaaattttgagaagagaagagaacagaaacacatgtactggaaatttttgaattgttaactttcaacaggaggaaaacaataaacaaatgtgaacagtttaaaagaaataaaacaaacgtcgtcgctgtttctgtcggtttacccacagagtagaaaagacctgcataatatttggttgatttgcgagttcgaaacctagattttataatgttgttttgttttgtagtggttggtcacattctttgaatttatttttccacagtcttctgattattttttcagaattttgtgctaagatatctctgtaagaaacaaaacattccaaatatataatgattagattaacctta

SEQ ID NO: 3667 - DNA, 1914 bp, Arabidopsis thaliana landsberg
atcttaatcagcaaccgtagatccatcggagttttcgtaacatgtatatcttcgaacaatctccgccgtgtgttttcgattctgccgtcttctgctgctgtgtaaatcccactccactactcacaatcaccaatttctcaaccatcgccggccaaatctccgccattctatacgccacaaatccaccgtaactaatcgaataaatcgatattcctcctcctccttcaacgcatcccagtttcttcaatcctccgacgacgctcctcgcctgaatctcaacgctccgatctatattcttcgaataagattttccgaagaagaccaaatcggggatgaagagattaaacgttttagagagatcggagacttgatgaacgaattgccatttggagtttcctccgtatccatggagcatgacgagattctgccgagagattctacggtggccggagatccagaaatggactgtggtttctccgtcgtctagatcgacggttacgggtcggagatcgcagaaaactaagaaatacagagataagaacgaatctgcgattttgatcagtatcggaaaatcgaaaaaacatgaaattaagcgttgaaagagagtgaaaacgattgagagataacgacggaaaagatgaacgtgtttcatggacgccatttttaagaaaagtggaaatcttttgtttttgcagagaaggtgtgggtgtggcgatagagagagtgtgcttttaaatttcaaacacagtttctaccggtccggttaattccggttaaatcttgtttaagcgatgttattgatttgagttttgttcaaacgtggcaaagtgcatgttaagtgtttcgacatctaattctataaaaagtttatttaacattttaacaaacaaatctatatatgaaaatctaagtaattgagcttattattacagctgtttaaagaatgtcctcgcacgagagcgactgatccacacatcacacatgtactcatggtataaactatatcgtctctttgtcgtctctctacgtcaactaataagccacactcgattaagtcgctggctcttgttggtgaatctgcatcgttggatcagaatctaccaaacaaagacaaaagttttacccgttggattggatctctcttgccaactttaagttcctagatttctaccaatgaaatgatggcttcaggtccaagttaggttaaaatccaagaagaaacctttgtcttcactctcaagtgaatggctgagggtctctaccttgagttcccaggagaataaaggtactcttctatctctcattttttttttctcatagcaccttataatttcaaggtttatactttatccgtgtgatcagaaggtagtttgagacccaagttaggtcagaacccaagaagccatctcaaatttcaggctagacttaggtcaataccgaagaagatagtttacattaacctttctagtcattttgattttggcataactttacgaaaattatctttatatattatatatcatggtttacaagaaattatttatgtgttttctacatttacttcttataaataatttccttcttaattatatagatacactattaggtacacctctacacgtaacaccaggctcagaactcggaaccaacaactcataaggcaaaacaccagccccacacctatttctacggtcaggatcagcgttccttttctcaatctctttctctatccgtccgatctctgccgcaaatccataaaacgcttcaacaatctccgcatctcctgtccaaatcgacggctgttgtctctctccaatatactcctcatccggcgaatgcgtcgacaaagtatcaaccacggccataaacttcgaagtctgcgccaaactggcatcgacgagaagtaattttctc

SEQ ID NO: 3668 - DNA, 1749 bp, Arabidopsis thaliana landsberg
gttttgttggcagtcctgcgattacagaaagtagagttactacagtccagtgcttgtctggtactggttcgttgagagttggggctgagtttctcaaaacacactaccaccaagtaaacttctctctatttagttttttattatatttgacagtcattgaattatgtaatcaaacaagtgttgcttactatggttctcatccttccagagtgtcatttacattccaaaaccaacttgggggaaccatcccaaagttttcaacttggcaggcttgtctgtggagtatttccgctactatgatcctgcaacccgtggtcttgacttcaaaggttgattcttaactttccattaatttttgttttcatcttcatgtggttgcactgacattaatttagtcatggttattgcttgattatccatctactctacttttcctgtgttttccttgatataaccacaatgaaattatttctgtaagtttaatgatcgtattttgacaattctatgtttgaaatttgagtaaggaaagaaatctcaagattgcactctgtcaaagtaaaatggcatttgatacaaacattgacctttgatgccaaaaaaacaggcttgctcgaggatcttggcgctgcaccatctggagctattgtcttacttcatgcatgtgcacacaatcccactggagttgacccaacctctgaacagtgggaacagattcgacagctgatgagatctaaaagcttattacccttttttgatagtgcatatcaggtagcactcataaaggaagtcttgctttgttgctttattcaatggtggtttacaaacaaatgaaccccgttatagtgtatgcttgaatcttatctaatgtagaaaaatagcagcctgactcatttttcctaacacttttgcagggttttgctagtggtagccttgacacagatgcacaatctgtccgtacatttgttgctgatggcggtgaatgcttgatagctcaaagttacgccaaaaatatgggactttatggggagcgtgttggtgcccttagcattgtaaggaaccaaacttctcaatttcttattcgcttctattcatttgacattatgattagtcaaaaagttcatctaatggatagtacaagaatacagtattcaaaaattgcatctaatctgtgtgatataatgtgaaggtctgcaagtcagcagatgtggctagtaaggttgagagccaggtgaagcttgttgtgcggcccatgtattcgagcccccctattcatggagcatcaattgttgccaccattctaaaaagcaggtacatgattatcatgctttagtttacaattactttgaatatattatgttggagaaggaacctttaaaccggagttagtatagtaaaattacatttttagattattacatacaagatatatgtatacattgaaagctgacattaaaaattaataggcaagtggaaagagagatccctactgatcttccatacgcagtaatttgatagtttatgctgtgttgaaatggttatgccaagtttctttttctatggaatcatgcatatatcacaaacattttcctttgctttatcaagcttataatgaatatctatggaattaggttctgctctaagtttctaaaatttctttgtatatattggcagtgatatgtacaacaaccgcgaccctcgagctgaaagaaatggctgacaatataagagcatgcgccaacagttatttaa

SEQ ID NO: 3669 - DNA, 892 bp, Arabidopsis thaliana landsberg
acttacaggtcaatttttgaataacagataaatacggggaagattcagtaattaacaataataaacagaacttacttcgatgaattgggagaggatgaaatctggaacccagtcaagaaatctgatacctgtattcatcgaaaccttaactaacaaccgtagatctctcggattactcggaacaagaatctccgatacatctccgccgtgttttttcatctccgtcatcttttgctgttgtgtaaacccaactccactactcacaatcaccaatttctcaatcatctccggccaaatcttcgctatccggtacgcaacaaatccaccgtaactaattgaataaaccgataaatctccgtcaccacaacctaacctcttcaaacctccgacgatactcctcgcctgaaactcgatagtccgatcggtgtttctcgagtacgatttcccgaagaacacaagatcagggataaagagattaaacgatttcgatagatctgagacttgatgaatgaactgccatttcgaatttcctccgtagccgtgtaacatgacgaggttagggcggttgattttacggtggccggagatccagaaatgtaatgtggtttctccatcgtttaaatcgacggtgattggacggagatcgcagaagattaggaaatataatgataagaatgtatcagcgagcttgattaggatcgggtaatcgaaattgtcgaataaacaccaaatgaggttatagaagagagtgattgcgatggagatgtatcgacggagaatatgaacgaagcttttcattgataccattacagtggtgatgatctgaaaatatggtggtgcttgtgcatgtgtgtgtctttgaaagagaaatcggttgtgattaaaactagac

SEQ ID NO: 3670 - DNA, 515 bp, Arabidopsis thaliana landsberg
ttgtttttaaggaaaacatagactttagttcttaagtctagaaagagacttacatcatttaggttataactaaaatacacaaatttgattataacaaaaaaaatttgtatattatttaatccaatgaagagtgacatttttatacaccccaagagaacccactccaaaaatagacaaaacaaccttatttgaaagccacacaacttattaagtttagttaacttaatgcatatgactcaagggatctaacttattaaactgattccaacactttctcataaccagatcttctactttgagagctaaaacattccgtggcaaaattcattgctttatatatacaaagcccactcgaacgcagcagaaatgtcgtctctctttttaaaggccaatgatcggaagctacgacaaaatttctggaatgtcaaaaactcagcttcgtagacaagctgtataccataagaaatcaacaactgcttatcttttgtagggatgataacaacactccccggacc

SEQ ID NO: 3671 - DNA, 361 bp, Arabidopsis thaliana landsberg
ttctacttgtttagatcataaacccacttctttacttggtggtacgtcaccgtttatactggtgaaacgtgtgagagctgctgaggatagtaataatagtcataatcatagttctgttggtaaagatgagacctttacgacaacaccagctgggttttgggctgttccggcgaggccggattttggacaagtttggagttttgctggagctccacaagagatgtttttacaacaacaacatcatcatcagcaaccattgtttgttcatcagcaacagcaacaacaagctgcaatgggtgaagcttctgctgctagagttgggaattatcttccgggtcatcttaatcttgtgttttatcgg

SEQ ID NO: 3672 - DNA, 1538 bp, Arabidopsis thaliana landsberg
  unsure (1)..(1538): unsure at all n locations
gatgcaaatcattctgtggcctaggaggtgacatcatcctcactggaggagaacatgaaggttgaggaacttgaagttgagtaaactgagatcccagttgaggcataattagcggtggtactgttggcatcattggatggtattgttcaggtcgtggttgcaacacgccaccgtccacgttagcaaaaaactctaaagcatgcaaatcagtcaaagccatctccactgcatctttcttttcaacaacttgatcaagaagcttgagaaaaccaacaacaacttcccccaaaccagcaccattctttctggaacgccttaacactcttgaatacccatcaacaagccgcaagtaaaaagagcacttgctatcagttgacttaaaaaagtcaaatttagggcttataaacactctcttcatcaattctgtccgaaaaagggtcccataaactgccacaaactgtgctgtgagcttaatagtatcaagctcattgcgcgtgaacgttacccctctagtaaggaatgcaaacttgacaggagccggagctcgtaaatcattaatggacatgttagcaaagtattcataagcatgcaaatcagtcatagccatctccacgtcatcctcatcctttacaggcacttgagcaaataagcttggagaagccatcaaaaacttcactcttcgtcttcagcttttgggaaggcattaacacaccctgatacccgagaataatccgcgtgtaaaaactgttcctactgtcagttggtttcaaaaactcaaacagaggactctcaacaactctcgtcgtcagttccctctgaaaatacttcccataaacagccacaaactgcgctgtgagcttgataagctcaagctcctttcgcgtgaaagtgatccctagaggaaggtgtgagaagttgacaggtggagccagcagaggcatatccaaggatggaggccaaagatagtcttgtgcatcatgagtagctggagtgtcaggacttaagctcctgaatcttgaatcattcacaattttggccaagttccttatattaacaagacgcgtgctttctgaatccgccccaacttgatttgaattgttttgcctcgatcgcaaatccttgtgcatcgaagtgtacatattttttttctacaaccagagaaacattaaaaatcagattcagagagaagggacaactactgagtgagagagagagagagattaagaaaaacatataagaggaatcggagagagattagaaacaccgtacctcagcctgtgacttggagacctaaagcttggaaacgaaggaagcgacgaagaagaaatcaactgtgagccctagcccctaggctaccactatttataaccaaactcctttggtggttttctaatgggccctgattgggcttataattgcggntcataataaataattttattataatttctacgatttaatcaatcacaacaaccccagttactcggaagtcagaacttaaaccggaacagctatactaagaataattggattggaat

SEQ ID NO: 3673 - DNA, 1190 bp, Arabidopsis thaliana landsberg
  unsure (1)..(1190): unsure at all n locations
tattttaataatatgaggtcaaatagattatgcaaactgggtgcggacacatcaaccgagtttataacatcgaattcgaaaccagaattatgagtctattagattaantggttaaagttggccccactttagacataactaaaacggttttttttatttataagaaccatatgtaagaaatattatttaatatttctctcttattatatgatcttgtaattatccattttctattgaaataatgttattatttaatatatttggtaaccaattaaattggtaataaagaagtttttcgtaatcaatatctactttgatggacggatgagatctaatcttaaggaaaccctaatgaggaacaagtcatctctctacctataaatatatacctttagaccatcataaagatatcataaaaaacgcaacacgttaaagctaagtttataggcaaggtgagagaaacctaatcctaaactaaagatcaagacttcatgaaacctattaatgaagacatctctacgacaataaagagaggtaatccgataaacctcctaatgattttattatgtgattaacctagatgtttaaagatcttagggttcatgtaaaattaacttacatgtggtatcagagcatggttatgaacatctgttatcatggttaattaaccatgctctgataccacatgtaagaaaaaatatccaaacatcaatcaaaacaagtagactgagctagcattatctcgtcaagtgcgtcgaaaaacatttccgtgcataaacaaggcttgtccaaatctgtctatctcccacacgtacagaatgacaaagtgaggatttctcctgctcctacattttaatatgctagtgacttgttgttgtcctttaacaacccggcttttccgaatatcacctgcttctctggtgggattcttcggtttatccgcggctattttctccttgaaactcgccacgttttcagataacgactgcactgttttctcaataatgtttagctcacgaccatcaacatccacaacagagatcatgattatacaccaaccttgaaacaaatgtataacgtcctgattatcagatacagctntagacgaagaaaaaaaacaaagacataatgtaagagcctgaagaaaacataccgggtggtgagcaagaaactgttcctatggaacaagg

SEQ ID NO: 3674 - DNA, 865 bp, Arabidopsis thaliana landsberg
agaaaagctcctaattatgatgtctgcttattatgattggcctatatttgacatttaattgagctcttatatgacttttgcatcttttatatattatgtttccactgtgcacacatattattgttgttggatctatgataacataatgtgtctttatttaaagacattaaaaggaccattatgataactcctagttatgttatggtttagctatgatggtggtcaatgtagtagtacatggaatgggtcatgttgcagaatgatgtgcgacctctatgactcccattgattgctaaattagccaagacacttatgatggccaaatgaaagaaattaagttatttcatattatgctagccttatgattcctaagagaaaacattaatggattttactaacgaccaagtgggagactgtaaaaaatattatttaatatttctcccctattatatggtcttgtagttatccgttttctattggaataatgttattatctaatatatttggtaaccaattaaattggcaataaagaagtttttcctattcaatctctaccttaatggacggatgagatctaatcttaaggaaaccctaatgaggaataggtcctctctccaccaataaatatatacttttagaccatcataaaggtatcattaaacgcaacacattaaagctaaatttataggcaagatgagagaaacctaatcctaaactaaagttcaaggcttcaggaaacctattcatgaagacatctctaggacaatagagagagataatccgataaacctcctaatgattctattatgtgattaacctaaatggttaaagatcttagggttcatgtaaaattaacttacatacg

SEQ ID NO: 3675 - DNA, 1051 bp, Arabidopsis thaliana landsberg
gattgatcgtcaattcgtcattatagtaatgtattgtcttaaaattttatttatattttgaaacaataaagccaattgatttacaactaaatttcggttcgtttcaagttcaagcatttcgatttagttatgctcagtgtttttttatataataaaaaggagtcattacaatcgaatttaagtaataaatacctagattcacaaagttcaatccattgccaatactcaggattattccctcctgtgatccaaagttcctttgcagctaacagtacacactttttcccacttgccgtctctaaccaaaagctcttttattttcaaaaagaaagaaaaaaaatctcaaacgatcaatctgaatagatagtttcccacttgaaggcaagagataggtcattattctcaaaatgtagaaacaaagtgtaaaactgataaatggacaaatataaatacctttttgccatcctcaactagaacaggatcgtagcaaagagtgaaatagaggtccttcttcgatgagaaaactcgccacggaggaatcagggattcatactccgacggaagaaacttctcccatatactatcacactggaccgcatgtgcgaaggattttgaaactgaagcggagacgcacacgtcccgtggacttgtaaaagagattatgttggagatgcaatcctccggcaagtcatcaaacggcgaatgaccgggtacgatctctcccccgcctccaccgatagattccacgtcgtgtttttgcaccttggatgaggaaccgagaacttgtctgattttttgtctagagtcaacgccgagtttttgtcccattgttgcttctacctgtaatgtttttcttcgtttcgattcgaagataagaatttaaagactcgtctaaagtcgtctccgacgctaaatacctataagaaaaagccgtgcacacgtattgaaactgcccttctttgcccattaagtcacacccgtgttttcgttttcctacaagtcacgttccatgtgtttaatgtgttttctctgtttgtaacatttgggtccg

SEQ ID NO: 3676 - DNA, 511 bp, Arabidopsis thaliana landsberg
aacttgtcatcgctcgtcagctagctaaacttggtgtcgacatcatagaagctgggttttctgctgcttccaaggatgattttgaagcggttaagactatagctgaaacagttggaaacactgttgatgagaatggctatgttcctagttatctgtggactctctagatgcaataagaaagatattgagagagcttgggatgctgtgaaatacgctaaacggcctaggattcatacttttatagctactagtgatatacatttggagtataaactaaagaaaaccaaagcagaggtcatcgaaatcgctaggagtatggttagattcgcgaggagcttggggtgcgaagatgttgagttcagtccagaagatgcaggaaggttcgatttttattaagattccttggtaaagattcgtactcttattcttatggtgatgattgaaaaatgttttttttctttgttctgtacatcggagagagagtacttatacgagattcttggtgaactga

SEQ ID NO: 3677 - DNA, 1863 bp, Arabidopsis thaliana landsberg
  unsure (1)..(1863): unsure at all n locations
aggggacagacctgcggaaagtacctgatagagtttaataatgtgctgtaatttatctcttcttctctcgagactgcgcaaaagcctgggaacatctgagattcgcttcagatgctgtctaagatcctgccttaacccagcttcttcaacaaagcactgaactatatctaatctcgtcttaatctcattcaaatccacgaggggttgcttcagccacatatgaagcagtctcttacccatccctgcggtacatgttctgttcatgagaccaaacaaactgaaattcttattagcatcagttttgctctccatcacattcaacgccctcatagctgcagagtcaagtctcatgaatccgccaatatcatatctgcggattgtgaagttcccatagttatcctcatttgagagaagttcagaaaacgagagtaatgcacctagagcaggagtcgcaaggtcaaacccggataccaaatctctaacaggctcaatattccccttcaccaatctcttaagatctgaatctaaatctcttcctttgaactcgtgtttcttcctctctgttatcatcacggcacacctctccagggaatcatacaggcttttgcattcattggatttgccggatnnnnnnnnnnnnnnnnnnnnnnnnnnnnnnnnnnnnnnnaacgaagactccagattggtgaagcggctatcatcaagaaactcagctagtccaagaactcgcctagtcagatcaacataggccatcccaataacgcatctgccatcgtgaaaacttggaaatatggagacaacaactggtgtgtcctgcatttcattgtttgcaaacaaaacatcttcaaagcttccaatgtttccaggagaacctgttttcacaagtctccaattcgatccgcttccttcataaagttctacagtatgatcattacgctccaggagaagatccctagcaatcgtttcgaacatgttcctactaatgcttacgcttgaaagagcatttgaaccactccctagctgacgtagagcactggttgtatgataataagtctttgcaatgaaaactgaattttcaccatgagctgtataataatcctgcaaatgcattcaaaaaatttccataaatcaatgacgacatttaaacaaccaaagtctagaccatttgagaacaatgaactcaccttgcgatcaaagaatctaacagctctcgtatcctgaagcaaagaacaatcaaaacccacataagcaaagatcgagaaattgctaaaaaatcttaagccttttttcctaattcgcttcccaatgaacaaaatgtctacaattgcttcaaaccctaattttaaagcatctactttccgactagaattggtgttatttattgcaattagaggcactgtacaagctctaacttctcccagaaatcgaaagaaaacgagaacttacatttggtagggttttgtagaacgagagaaacccttgagcttgctttgcatcttccaaaaattaaaaaaaaaatgcataacaaatatcagaccttttacaaaacccataaacccaattgggaaatcgaatacgaaaatgagaaagaaaaaaaaaactagggtttaacattacccaatttcagctccggaagcttgttctgttcctcgaaattaccctccattggaagatagagaaagctaaatccttcacctaccttctgcaactacggtgcaaatgttcttctttcgtggtttttcagtggaactggaatcgaaagcgactagaagaaatttatggtgtcgaatttggcgggaaagcggattggcggcaaccggcggcgcgtgtattaacgttctttgagaccaggcgtgcaatgtt

SEQ ID NO: 3678 - DNA, 960 bp, Arabidopsis thaliana landsberg
agacactctctgaagttcagtaagactgcccgtgcagcctcccgagattctgggagtttgtcactgagctgagacgatgctgcttggactagtttctcaattccatattctctaatgccttcaatgccctaatgattacacagccaaagaaaggtgatgttggtgggaacatggactggatccaaattggttgtcatggtgatgacatgacaaatccaaaacaaaagaacaagactggttttatgatatcgagtgcagtttgatttaccagtcggggaacacatcgggagaagcacgtggatgcttttgcgcggatccgaggattcctattcttgagaaaaggttgaagctttggcaacagcaaggcaggagaaacatgtgcagtcattgctactaatgctttttctgctgcttcacaaacaaatcgcttgtcttgggaagatttaaggaggagttgagtaagctgtaagaagggaattcggagttactgttataagaacacacaaatgtccgctatttgaggagaattccaagagtatctgcaaaagatgatttaccaagagatccaattgatcgattgtatggtcattatatgagctgaagatgtcagcagatgtcatacatgcggttttacttacagcacttcttgggttcttcagtgatttcacgataaacaggatcactttctccctgtaagagctgacagcgtgagactagaaaattctctcgacgtgtaactcgatctactaaaactgatcataatcacgagtagaaagaaaatgacttacagcatatgcagcatttcttccttgtggaatatggaaagacgacgaatggtattaagagcatcacagaccaaaacccaatccttggagtctagctcggttacaagtgactggaataataaagaaagcagttccagaatggtattaggtaaacaacttacttccaatgtccaaa

SEQ ID NO: 3679 - DNA, 1316 bp, Arabidopsis thaliana landsberg
aaccaaaaaaaaattaatccaacttaaaccaaaacaaaatttcattttacgggctatgttagtaaacataggtactggcatatttatcccaaaattaaataaattatcttgaatcgttatctcgtatcgctatctggcagataaacaggttcaccggattacgggttaccgtgaatttataggttttcaatttaaaatttggcggatattagcattaaactccaaagaaaaaaaatgtatggatcgcagattaaccaatcggacagtacatgaaaaaaaagatagtattaaattttaaaacacatatattgtctctgtcggtttcctactaccaaaataacgatttcttgtgacatatgaaagcttgtttacaaatactaaaggccagaaacaaaaccaatcactcaatgcagaaagacggtattttaagttccagagataacttcacatttcaatggattattttggttcataaagacatcaaatgctctcaatgtacctctggtccaggtgagaatccagtgggagagaaggttaattcaatagaatctctagaaaacatgtcttgactaccttgtttcctggcaatctcagagtccagacactgttttagctccatcacaacatgtggtatcgacggtctacggtttgacgtagggtttacacaagacaaagccaactccacagccttgcacacaccgattgtatcgaattccttcattagtttcgggtcgataatattcctaatgtctccttccatgagcttgaatccaacccaatctgtaatatgcgctttctcgcgggttgtatcaatcacaggctggtttgtgatgatttctaataaaactaccccaaagctgtacacatcagtcttctcgcttaacaagtttgttctatagtacctgaaaagagtatgaaaaatattacatttcatattctattatgagtaagataattgattgatttactcactcagggtctaagtaaccaggtgtgcccgcaacgattgttgacacataagattcgccatcgaccggggacgacctagagagcccaaaatcggctagtttcgcttggtacagctcattcaataaaatgttagtagttttcacatctctatggaccataggtggtctacttccattatgtagatactccaatcctgttacaaattgttttctgtcaatttttcattttatcaaaatcagaatataagcaattctttttgttatttcatcaccttgtgctgcctccattgctatttgcattctgttttcccaacttagaacatgtacactgcggtttcctataccgaa

SEQ ID NO: 3680 - DNA, 531 bp, Arabidopsis thaliana landsberg
tgaacccatttatttattattttttaaaacagcttgaaatatttattaaaacgtttttctaaatatactatgtcggttcaaacgattttattaataattcaattacagtcgccttttgtaaaatatcaaatattatttcttagcgaatcgaacaaattatcgcgacaagcttaatgggatgagtaacaagttgatgtagagcttctttgaggtttagggacagagatagcctatgtttctactttcacgcttaagttaaggagatttgacaacaccacattttcatattatcgcttatatatatataagtaaatcaacacataactaagtcatcttcatatattgatcatataaatataatagcaattgaaaacacagaatgcctaagttttattagaaacatatatgcatccaagtgtaattaagtagctatacgaccgttgttgacttcaaattatacctcgttcaatattgtaacttcagaaaatgatgtcttagctctgtgggaaaaacttcagaaaaaggaaaata

SEQ ID NO: 3681 - DNA, 4040 bp, Arabidopsis thaliana landsberg
tcctgattttctagtcgtgaagctcggcctgcaagcaacaaaattgtatcgttgtccatgtagtcaacgaatacctgtgcagaaggatttgtacatttaaacaccaacaatagagaacaagacgatgaagaaggaggcaactgttcttaacagtattgtttgatgaaattcaagtcgcatctgtagtattggtacctcaataagatttttatcaacggtaagactgttcaaagtaagggttccagttttatcacagcagagtacatccatcccagccatttcctctattgcggtcattcttttcgtaatggcacccttagagaacatgaagaaacagattattgctaacaaactgttttaaagaataacaaacaaaggacttccttttgcattcagcagcttaaagtgggatgtacctgttgtgaaagtcgatgagatccaatggcaagcgttacagatagtacagtgggcatggcaatgggtatccctccaatcagtagtacaagaagattattgatcccaattctgtaagagcgatgttgtacagggaacatgataatgatttcaagaaccattccaacagcaatggagcaaatgcagaagtttccaatcgatgtaagaacctagaagaaaacatgtcaaagactacattcggtttttccagattccaagttcactaatcaggttctatccaaccaaaagggaaagaaagaaggaaaacctgctgaaaatgtccagttacatctgtactgtccaccaagcgtgctgtttttccaaagaaggtggtcgatccagttgctatcacaacagcttctatttcaccttgtttacaagtagagccagaaaagacctgttcacccttcttcttggtcacaggtagtgattctccggtcagcactgactgcaggaataaatgttttaactattctgtcagagaaagtctttacatagtacacactaaaagaatagagactagatattctggacgtacctgatcaatcttcaaggggtctccttcaagaaggcgagcatctgcaggaatgatatccccaagcttaatgctaattatatcaccaggtaccaagatagaagcatcttgttcttgccactgtccatctctaagaacctataagagtggatctaaatcaaatttaaggtaatatggaaattaaagtgcagctaactttgccgtttcggctcataggaaggttaagagccatactcttgtttttaaagccaagcgagccataagagctgcagcagcattcccagcattgttttcttcaaagaagctgattgttgcgttgatcagcaaaaggcaaacgattccagtaaagtcttcccagtcaggacctagactctgtaataccattttcaccatgagtttcaaggtgcattttcataaacactcatggatggaaaatggtagcaaaactgtggttgtcttacttgactattagcgagggcaatggccatcaatgcagcagcttccataacccatgacaagggattccacataaaacctaagaatttcacaaatctgttctcctgtatcattgttgttttaaatggcggttagcacaagataatagagacaattggcaggaacactaagaagaatgtcatgtttattacctgtttctcttcaagtctgttaggaccaaatatcttcaatctctcttcagcatctccagataaaagcccttgaggcgatgttcttaggtattcaaaaacctcctccaacggcaatataccctgtcaagctcaagaagggtcaaaacccttttttgccactaagaattcaagtactaataagagtatacagttaaaaggaacatttaccaaatcaattccttttctgttgaaagtatcaggatccagcaatggcttgtccaaatcctcggccatacttaaaagcttcaaaatgtattaccaggatccgatactaatttcgtcgttaagaatataccaggaacagaagagaaacaggaatccttaaaaagaatccaggaatattgaaactgaaacgaccattccatggctgaccagttgatagagtgtggagaagaggagattctcctgcaagtctcaattggtatcaccattattggaagcataagagagtttgcgaacagtagatgtgaaagacgacgaaaaaagcagagagagagagaaagaagagtggttaaagatctcacttctctacctaacggtcactctcactagcttcctctttttaacttaacttaacaaccactgttacgtcaactgttctcataggacttggtctcctctcatgttacgtagaaaatgaaattaagaaaggattaacgatggaccaatggtatgagaaaattgatcacaggaataatgaaagcgtcaggacaaagaaacagataaaaaaatattaaagatgtacgacaagtctaattttgttatgtctgggctattcccccttagtcaacactggccaacaagttttttcatcttctttgtctgtttctcgtcttgttcttgttctcaccatgactaatgaggggagattcaaagccaaaggttttgtgagaacttcatcaaccacaagaccaatacaagctctgagttttcacatgattggcatactccttcagtgtgttcttttcatcagtgtcctttctattgcagtttcagaggctctctgcaactcgcaagatcgagaatccctactgtggttctctggaaacgtttcttcttctgtttctcctctgaattggaacccatccattgattgttgctcatgggaaggaataacctgcgatgattccccggatagccacatcactgcaatctcattgccctttagagcactatatggtaaactccctttgtctgttctgcgtctccaccatctctctcaactcaatctttctcataaccgtctctccggtcatctcccatctggctttctctcagcccttgatcagctcaaagttcttgatcttagttacaacagcctcgatggtgagttgccagttgaacaaacatttagaaatggaagcaacagatgtttcccaattcggatagttgatctgtcaagcaattttctccaaggcgaaatcctccctagttctatttttatgcaaggaactttcgatttaatcagtttcaatgtcagcaagaacagcttcacaggctcaatcccttcgtttatgtgcaagagttcaccgcagctcagcaaactggatttctcctacaatgattttaccggtaatattccgcaaggactagggagatgtttgaagctaagtgttctacaagcaggcttcaacaatatctctggtgaaatcccaagtgacatatacaatctttcggagctcgagcaactctttctacccgtcaatcatctttctggaaagatcaatgatgacatcacccacctcacaaaactaaaatcgctcgagctgtactccaatcaccttggaggagaaataccaatggacataggtcagctctctcgcctgcaaagcctccaactccatatcaataacatcactggtacagtcccgccttctcttgcaaattgtactaatctcgtcaagttgaatctgaggcttaatcggctggaaggaaccttatcagagcttgacttttcccgctttcagagccttagcattctagatctcggaaacaatagcttcagcggtgattttccttggagggttcactcctgcaaatctctatcagcgatgagatttgcaagcaataagttaacaggacagatatctcctcacgtactggaacttgaatctctatcgatcttgtctctttcagacaataaactgatgaacattacaggcgctcttggaattctgcagggctgcaggaatctgtccactctcctcataggaaagaatttttacaacgaaacatttccaagcgacaaagacttgatttcctcagatggattccctaatctccaaatctttgctagcggtggatctggactgaaaggtaaaataccagcttggctaatcaaactgaagagcttagcagtcatggat

SEQ ID NO: 3682 - DNA, 1403 bp, Arabidopsis thaliana landsberg
ctaaagctttctggtaatttttgtctcttgaatgctctgcttaaatagttgtcttacctcttgactattgaaatcatatcttccaaaggtaatttcgttgatgtggttattgtgtacttattctcccttcttgttttatttgaaatacacaggcgacggtagttgctcttggatggtgggatcgtattcataaattttgggtatgttttgttttggtctttctttgtttaagtctttgagaagtacttgccatttttatggttgctggtaaagaatatgaaagtaatatatatgaaatgttctgcttgcagaattgccgagtgctttgcttttcttgtttgcacaaaatggtccaatccagtaatccatagaagctcacgtgcccgagaaaccgggtcatcttctaccagtatcagatatcttgactggaacagcggccttgtggttgctccagaagaggatagacaccaagatagatggtgcggtttgcaagatattggtggtcatatgttaaaaattcccgttattttatttcaagttgtcctttgcatgtatttagaggtatacaccacatgactctctaacttaccatattgtctttggacaatactgaaaaagctaatggtttggactttcaagggactcctgaaagagctaaggatatatcgatcccagtactgttttctccactattcctattgcaaggcctcggtgttctctttgctgcttctaaactcctagagaagatcgtcctcttactccgcggggaagctggtccgggattgtattttagattttcatcaagtgcccatgattgcttgggattcttgcaccatggttccaggtgacaaacacgtctgtctattttcccaaaagttttaatttacaaaatgtagtactaacaaaaaatcaatcaatcaattcacttgttcaggctattaggttggtggtcaattgacgaaggaagccgggaggaacaagctcgactgtactttgatcaagaatctgggttagttagtatattccaaccttctatatggtcaaacaaagatgttatgggatctgctgaagatttcattataatataattgtgcagttacaatacattcagtggtcatccgcctgagatagtcaagaaaatgccaaaggaagatcttgcagaagaggtaactttacctctctggcatttttttgtttcccaattcagtgctgatattaactttaggttctctttgttgttgaatcttgtttcttctagtttcagcattgcttaagtgttgtttgcattcaatctaatttgatatctctaggtgtggagacttcaagcagcacttggtgaacaaacagaaatcacaaaattcagccagcaggaatatgaaagactgcaaaatgtatattcattt

SEQ ID NO: 3683 - DNA, 3748 bp, Arabidopsis thaliana landsberg
tataactttataatcaaaaaaaaactttacataaaaacagcatacccacaaccacaatcagggcagaaagataacatgataaaataaaataaaatttaaaagtgaactttgggtgtgacaagaagttttcttctgtttggtctgactattccctttggtcaacgatggtattgagagccatttacaagcttcggacagagaaacccagattggataatcatgtcttttgtttcttcttttccctctccttcttcttcttctttttcaagctttcttaatctttctcagcttcttcttcttcttcttttgttctcgccatgattgacgagaagatgagatctaaatccattggtccttttgtgagacaagtaaaacctttgagtcctcacatggttctctttgtccttctctacgttctttccatttctgtcttctttcttacagtttcagaggctgtttgtaatcttcaggatcgaaattctctcctttggttctctggcaacgtatcatctccagtctctcctttgcattggaattcgtccattgattgttgctcctgggaaggaatctcttgtgataagtctcctgaaaatcgtgttacttcgattattttgtcctctagaggactctctggcaatcttccgtcgtctgttttggatctccagcgtctctctcgtctcgacctttctcataaccgtctctctggtccactcccacctggtttcctctctgcccttgatcagctcttggttcttgatcttagttacaacagtttcaaaggtgaattgccacttcaacaatcatttggcaatggaagcaacggaatcttcccaattcagaccgttgatctctccagcaatcttcttgagggagaaattctcagtagttctgtttttcttcagggtgctttcaatttaaccagtttcaatgtcagcaacaacagcttcacgggttctatcccttccttcatgtgcacagcttcgccgcagctcaccaaactggatttctcctacaatgatttcagcggtgatctctctcaagaattaagcagatgctcgaggctaagtgttcttcgagcaggcttcaacaatctctctggtgaaatccccaaagaaatctacaatcttcctgagctcgagcaactctttttaccagtcaaccgtctttctggcaaaattgataatgggattactcgtctcaccaaactgacattgcttgagctttactctaatcacatcgaaggagaaatacccaaggatataggtaagctttcgaaactgagtagcctccaactccatgtcaataacctcatgggttctatcccggtttctctcgccaattgcacaaaactcgtgaagttgaatttacgggttaatcagctgggaggaactttatcggcgatagacttttcccggtttcagagcctcagcattctggacctcggaaacaatagcttcaccggcgaatttccctccacggtttactcatgcaaaatgatgacagcaatgaggtttgcaggcaacaagttaacgggacagatatctcctcaagtactggaattggaatccctgtcgttctttactttttcagacaataaaatgacgaaccttacaggggctctcagcattctacaaggctgcaagaagctttctactctcattatggcaaagaatttttacgacgaaacggtaccaagcaacaaagactttcttcggtcagatggatttccaagcctccaaatttttggtatcggtgcgtgcagattgacaggtgaaataccagcttggctgatcaagctccagagggtagaagttatggacctgtccatgaaccgattcgtggggacaattccgggttggctaggaactcttccagaccttttctacttggatctttcagataaccaacttacaggagagctgccaaaggaactctttcaactaagggctctgatgtcccaaaaggtaacagaaaataactatctagagctgcctatttttctcaatcccaataacgttacaaccaatcagcaatacaataagctgtatagtttcccacctgcgatttacatcaaaaggaataacctgacagggagtataccagtcgaagttggccagttaaaggttcttcatatcctcgagcttcttggtaacaatttttctggcagcatcccagatgaactgtcgaacctcaccaacttagagaggctggacctctccaacaataatttatctggtagcatcccttggtcgttaacaaacctcaatttcatgtcttatttcaacgtggcgaacaacagtctcgaagggccaattcccagtgaaggtcagttcgatacatttccaaaagcaaattttgaaggaaaccccttgttgtgcggtggtgtactgctgacttcctgtaaacctactagagccaaagaaaatgatgagttaaacagaacatttcttatggggattgctattggatactttctcagctttgtttcgatcttagtggtgcgtgcctggtgagtgtaatgtaatcatatcaaaacgcagaatcattcaaaacggtttggagttccatttcattttccatgggggaacaaactaggactattgtaaatatcctcaatttgtacaaaaaatgaaataacagttactatggattcgatggtatcaacaaatttctctcaatttgatggccaaaggaatctaatgaggttagtgcacttggattctagagtcactctacactcacaagaccaaaatcgatttgagcatattaacttcatgagttttggaaagaaataaaaaaaacgtccaatgacacactgaaattgaacccaaactattctactagaatcagatggcaaatattgcaaaaaggaaacaacgaagataaaaaaaactggaggcatcgtatctggagatgagagaagaaatagagacggcgagattcagacggacagattttttcaaataattggattaatatcatatggtaaagcatttgggtccaaaccgaaaaatagcattgcttagtgctcgagttacacaagattacaccttcttatgacatcattactacaccactgaaagaaaaaaaaagagagaaaaatatccggatcggccggaaaaatgtaagaactaattgacgccgtgagattcctctccggcggaacattgataatagaaacccagtcgctgtagtagctaaaaaacccaaaacccgttacgtaagtaaagaggcctcaaggcccaaaagagacccgatccactagatgaatcagagatcgaccaaacaaattatgaatacccaattaagtttaatcttccaagtaattttgttagtaatcgtcgtgatctgtgtacgagcggaggagcatcgtggcgcagagtcgaattatacagagacgagcatgttgttgtttcatcagagaagtgcatttcgaagtgaagctgttcctgattttggaattagagttcgtcttctttgccaaaaatccacccatgttcgaatgaagaagatttgatgattcaactcttctatttataagcattggcttctcagagaccaatttaataaatatcgagttttttttttcattggatttgaaggaagcctgaacttggtcttgttttagctcaatttgaagattttgcgcttgaggtaatctcgccgtacaactatggagtattatacacatttgctcatttttattctatcgatacagaagattttgttttagcacaaatcaacactt

SEQ ID NO: 3684 - DNA, 566 bp, Arabidopsis thaliana landsberg
  unsure (1)..(566): unsure at all n locations
ttatttcctagaagctccacgatatggagaacctttagctgcccaacctttactggtatagttccagtcaagttgttcctcttgatgtatatcgtaggtgggaggctggaaagctgattgtattgctgattagtggtgacattattgggattgacaaaaaccggcagctccagatagttccgctctgttgcatcgtatgccttttgcgacatcagagctctcagnnnnnnnnnnnnnnnnnnnnnnnnnnnnnnnnnnnnnttatcggaaagatccaagtagaaaaggtctggaagagttcctagccaaccaggaattgtccccacgaatcggttcatggacaggtccataacttctaccctctggagcttgatnnnnnnnnnnnnnnnnnnnnnnnnnnnnnnnnnnncaccgataccaaaaatttggaggcttggaaatccatctgaccgagaaagtctttgttgcttggtaccgctncgtcgtaaaaattctttgccataatgagagtagaaagctttttgcagncttgtagaatgctgagagcccctgtaagggtcgtcatt

SEQ ID NO: 3685 - DNA, 5939 bp, Arabidopsis thaliana landsberg
cgttcgatgatatagttaaagttaataaagtttgggatccataatcacaattcattcctgagtaatattcacagacatcacatccctgtaacgttgtatccagcgagacccacattaatattggggttgtttctctttatggcccaatggctataaacacagttaaaattaatgtaactaggtcacgtgagccattgacttttcgcccaatatttaagcccatttaaaggcccaatatttaagcaacactcatatacaacatgatgataaaattaaaaccgttgaagtatgtaattaagattgagatgacggtggatgtgtgaaacagctgcttccggtgtgctagtgccccgataggaccaaagctgagaatataattgaatatgtggacggttgagttataattaggagaatctcataaatattattgaaatatcaacgatgaaggaacgcaaatgttgggtgggataatgaagttaagtcccaatattaaagattagactaactgtttagaagtggacagagaggtggttggaatttaatacatctccttcttttataggttccactgactcgagaagatcttcgatatcatcaaaaaccacaaaactttcttttctttttctaactattttatttattattcctacaaaatgtcatgtttgaagtatttcttgatcttattgatgttgggactgtgtgtctcatcggaggagaattttcaatatgactacttgaaagttccggcaagcgagtttgtgagctccataaacacaattgtggtagtgataagacaagtgagttcaattttgtctcagttcgctgatttcagcggagatcgccggctgcagaatgcggtttccgattgccttgatctgcttgacttttcttcagaggagctcacttggtctgcttctgcttctgagaatccaaaaggtaccttaaaggcttaaactctagtttacaacatatatctatctctctagttttatcacatccttatagagttggaaactttgaatgcatagacctttttttaactctgatcacgaggtcaaaattactgttatgagattaatacatattttcttgggtgaaatttgaaaagatgataataaccaaatttgagtaatcgacaacttaaattaacaaaaagaaacaaacaaaccggatatagatatgcttattgccggtatatggaaagtaggataaaattgacgtttgtgaaactggttgctatgtttagaaagagtgtgattacttggtatataacttgttgccttttccattccaaccaattaaaagagaaagatttttaaactcagttgtttatattcaaatgccatgatttttgatcaaatgacaaaggaatgtttggtgcccatttaacagttaagcgactcattaatcagtccagatgttcggttgatttatttgtaataattatatatacaaatcagaataatataaaacaattatacatataaatacaaaatgtaatataaaaatttataaatgttttttttcttcgataaaaaaatttagattataaatgttgtattttttttgctttgataaagattttagattataaatgttatgtacataaaacagcaaaacagcaattactgtatattcttgtaaaacaagatatacgatgcacctgtacaacaaacaactctattggtttggaatttatttagttaaactctccacgactccaataaaagatgatgtaccatgcaaaaatagaataaatgatcgttcatggatcatggtgtatcgtagtaatatatagttagacaagtttatttacatagatatagaaaaagactatttattttgcacttgctgcattaaatttgaaagccggcacaaaattgattgtgatacggttagtaggtggttctttgaccaatcatattagtattatattttcaactaatacaattttgcatcacaattcacaacacaacaatattgaatttcgacctgtattttcttcattttttttttaatgttatttcagcttagacaaagtgaaataaaagagctgaaacaaaaataaatctgaatatgtgtgctggtgtgcaggctatatatttaaagtaggaaatctatttatatcaaatcattaccaaatgcatgtttttctttgaaaaagcattattcgattgcatatatcagtcaatataaatttagaaaaaaaaattaatgttaatttcaattttaaatgataatgtcaagtgataatgatatgttacatcaacgttgtgcattctcgttagtgaaatgaaagcaaatcctataatcattattgtaaatggcatgtgcgtggtagggacaccgaacatggatttcaaaaaaatcttagatttgtaataaatgtaagtgtgaatatatgaaaatgatagtgttgattgataagaataaaatcacgagtatcatcaagtgattaatataagagaatgcgtgtgatgattttttgaatgggaccaccaaccaggtaagggcaacggaacaggggacgttggatcggacacaaggacatggttaagtgctgctctctccaaccaagccacttgtatggaaggcttcgatggtacctctggtctcgtaaaatcccttgtcgctggtaaattaatcacttcttattgttatcttacaaaattttggttctgtttatccaaaagaagaattaatttataatttgggtgaccatgcaatttcgttagggtttcacgttgataactttcggttcaagtcggtatgatttttcttttttttttaacgttaataatttatcatttcaggcagtctcgatcaactatattctatgcttagggaattgttaccacttgtgcaaccagagcagaaacccaaggctgtttctaaacctggccctattgctaaaggaccgaaggcaccacctggccgtaaactcagagacaccgacgaagacgaaagccttcaattcccagactgggtcagaccggacgatcgtaaactattagaatcaaacggtaggacttacgacgttagtgtagcattggatgggacaggcaacttcacaaagataatggacgccataaagaaagctcctgattatagctcgacacgtttcgtcatatacattaaaaaaggtttatatttggagaatgttgagatcaagaagaagaaatggaacattgtaatgttaggtgatggcattgacgtgactgttatttccggtaaccgcagcttcatcgatggttggaccactttccgatcagctacattcggtaataagattttctagttgttaattcatgttttgataacaattgttttttcttttcttaattctaatggttttgaaacattgtgacacaaaaatttcagcggtaagcggaagaggattcttagcaagagatataacgttccagaacacagcagggccagagaagcatcaggcggtagcactgagatcagactctgacctctctgtgttctacagatgtgcgatgaggggttatcaaaatacactctacacgcacaccatgcgtcagttctcccgtgagtgcaccatcacgggaacagtagattttatatttggggatgggactgttgtgtttcaaaactgtcaaattttggctaaaagaggactccctaaccaaaagaacaccatcactgcacaaggccggaaagatgtcaaccaaccctcaggtacattaacaaaatcataaatagggttccacttttaaggtcttgttagtgtgatagtttcttgtcactcaagaaactatctaaactgaaataattgatctcttgtgaatagtacaaatttacaatcaatctatgtattaaccataatataacgattctaacttggacctttttcaattttgctcaccttcaggattctcaattcaattcagcaatatctcggcggacgcagatttggtcccatacctaaacacgacaaggacgtatctaggaaggccatggaagctatattcgagaacggttttcattaggaacaatatgagcgacgttgtgagacccgaaggatggcttgagtggaacgctgattttgcgttggacacactcttctacggagagttcatgaactacgggcctggttcaggactcagcagccgagtcaaatggcctggttaccacgtctttaacaactcggatcaggctaacaacttcaccgtttctcagttcattaaaggaaatctttggctgccttctacgggagtaacgtttagtgatggcttgtatatctaaactggctcagtgtttctattgtgaatgttcctgttttttgttccttttcattttgttttgcgttttcttgtcatgttcttctaagttggtttgttgtggtatttcacggttttggaaaaatattgataaatggggaatttaagtcgatcggctgaagttgaacaaatcatatattgcccataaaggttaatagattttgtatgttataaagagatcaaaattcaaatcttacatgtttttcgctattattgattaggaatatcattcattaattacgaaaagccttaaaacttgtttcgtgacaaaagatttgagtagaaatcaatctttagaacaaaaaatttaactttgcctcaactaagtttatgttctattatcttgtactccaaggtgcaatttgatctttacccacatcaattcaaaaaaaaaaaaaaaaacaaggcaccaccttacgtgtttattaagcatcgtaaaggccaagcttaaccggagaccctatcgcttggatccattccccttgtaagaatggccccaccgtaaatttcatcgcctcttccttgtttaaaaccctaaatccaggccatttaaccctagcagcggttgctccgcttggaccatcattcttgtattccgcgtaagacaatgtatcgatagcaaaatccgtctcttgccatctcaaccaaccaacaggatcgatcacatcctcgatcgttgattccatcacgactgttcgagaatggggtttccatggccggccgagatagctcttgaactgggcctttacgggtttaagatcttcgtttggagcaactgtacagttgtggatcacaaagcctgtcgtctgaaacttatccactcgtccttgagccgtcaccgtgttcttctgccccggtaaaccttttctgataaagatgtcacagttctggaaaatcgcggccgcatcaccgaagatgaaatcaactgtcccgataatgacacaacttctgtaatattggcggtgagtgtatgcgtataacgtgtcttggtagccttcaaatcgacagttaaggaaaacagatcggtcggattggacacgtattgcgaccgcttggtgtccctctggcccagcagtgttccgaaaccccatggattgtgccatgaatccttctccttgtgccactataagtaaatcaagcacaaatatggttattgcacctcaaattcaagccctaattgtctcttttcgttcgttaacacctagcacaagcactcttaggaaaacaggatataccaaatgttgctgttaggaacgttcgaattttctttgcgtggcttttgtttcccgtcacgatcgtcttctgtgatccatcaccgaccattgtaacattaggtttcttcttatcaataatcacagattcatcataaattccatgtttgatatagatggtgtacctacaaaaacgaaattttactaagcaaagatttggtaatatactatgaaaccaaataattgaagtactgtggtcaaattttaagaccaccactaagctcactctctctttctttcgttactaaaaatttcacatgatggtttccgggcccaagatggataaagggtctcgaggcgggatctattgtttataaaatatgaagaactatgagaatggttagtaccttcctggtacttg

SEQ ID NO: 3686 - DNA, 2399 bp, Arabidopsis thaliana landsberg
  unsure (1)..(2399): unsure at all n locations
acagtatagtcaaagcctcctcctgtttatgactttaaatccaggccatttaactcttgaagttgtatctccacttgatcctttattattgtactccgcgtagtacaacgtgtctatcgcgaaatccgtctcttgccatctcaaccatccaacagggtcaatcacattctcgattttagattccattatnnnnnnnnnnnnnnnnnnnnnnnnnnnnnnccctaggtagctcttgtactcttcctttactggcttaagatcttcatttgcagcgattttacaattgtgtaccacgaaaccagtcgtctgaaacttgtcaacacgtccttgagcggtcaccgtgttcttttgccctggtaagccttttctgatgaagatgttacagttctggaagatggcggctgcatctccgaatatgaagtcgattgttccaactatcacacaacttctgtagtactgacggtgtgtataagcatacaatgtgtcttggtaaccttcaaatcggcagttgaggaaaattgatctatcggattggacacgtattgcgactgcttgatgtccctctggcccagccgtgttccggaaccccattgactgtgccatgaacccttctccctgtgcaactattaaggataccaaacatttagaaatttttttagttttgattcagattgacacttatatatttcaagttcgctttttagatttcaagattaataggaggtgaacctataattctattggtctatatctcttatatatttaacttggtctcaacttattgtcaagacaaattttccaaaagaattaggggttttaccgaacgttgccgtgagaaaagtgcggattttctttgcatggcttttgttaccggtcacaattgtcttctgtgatccatctccgaccatagtaagattcgccttcttcttatcaacagtcacagattcgtcataaatgccttgtttgacgtagataatgtacctacaatttcaatacaacgaatctacttagtttctaaacctaaacctaaacctaagatgacgtgatgaccacgttcacgttataaaatgctctggtatacttaccttccctcatatttctcaggcattgctctcagcgcatcattaatggttgtgaaatccccactgccatctttggccacagttgcgtttggcttcaaagccttcacatcaacagcccttaacattcttctatcatcgttgcttacccaagacgggatgtcatcaagaagatgtcgttctacgaccttcattaccggagagagattctcggtaaatgttttgatcaacgcgagggaattgctggtcagaacttgagaagaattgacgctcgtcttcacttcagattttaagttcccttcttcaaacccgtcaaggcatgtctcctgataagacatgaccgcgcttagccaactttccaggtcaggaacgactttttcgaagctgttgacttctgtgacgttgattttgttcagcgacgcgacggcttcctcctttgcgtcttcgacaagcaacttacattgcgcaatcgcatctttatcatcctggttttcagtcttgagactcaagaccttctctaaaacaaggtcaagatcttcattgacagcttcaatggcagacttcaaaaaggtcgtcggattgtccaaagcaaaacccttgtctgttctgtttttgagcgttttctcgcagatttgcatgtaaagcgttgaactgcagagagtttggataatcttatcaccctgaccgggtttcactgactgcgctgcggaaacgggcgctttttggctcggggttggtgagctcgggctcttcttgtcgctatccttgacgacgttgttgccgctaccgcttttgttgtggttctttgcttgttgttgttgttgttgttgttcatttcttttctcataagcaacataagcaaaagctcctccaacaatggcagcaacaaccacaagcaaagagaccgttccaacgatgatcctcttcctgaatttacgtttcctattggcgtttacacgttcttggatcttgtcaaaatcctgaaacgccatattgaaattactataaattttctgaaatttttgtgttgtttttcttggggagagaaagaaatgaatctcctctgccttagaaggcggccaaggcagagaggttaaaaggaaagatgaatcctttttacgttttatttttggctctttcttgtcttctctcccctgtcttcattccatggtttcagttttatttgttactgttttgttgcaatttctacaattgaacatatctgctctggacaggagagctttgtgggctgatgctaattttttgaaaagaaattgagccttctaaatttagcaaccattttttttgtatcatacatta

SEQ ID NO: 3687 - DNA, 1722 bp, Arabidopsis thaliana landsberg
  unsure (1)..(1722): unsure at all n locations
ttaactgtccgggttttacactatgggttacgaagatgcctttaacttcacggcaacagagtttatttctggtgatggttggttgggaagtacttcgttcccttatgataatggaatttaacattttttttgctagaaatgtatagggtttgtcttcatataaaaatctaattacaataatgaataaaaaagttctaaataattctatggtttgagttatttctcaaagctgtgtattaattaagataannnnnnnnnnnnnnnnnntttcttgaaaagtctaaagcatgtctttcttggctttatctgagttgcccctttttaagaacgagaaacccatgcgaccatgtctttttgaaagttccaacactttaaattaaaacatgcttgacaagttgtgttctgtcagattcagtggcatattttatttttatgaagacggtgctgctaaatccaaatgcttaaaagacggtgctggtgatacataactaacgattgcatttttgttttaattctttgtttatatacctccataattgtattcaaagttgaacaaaaaatttgtatacacatacgcgcggtagccagtcgcatcttcttggctttgcaaaaagtgggttacaaagatagcattatacacatagacggatccataaattattgtacatagaaagataatttttaaaatgttaagatagtatatgttggggcaggttttcgtaaatcatcgtaatccaccagattattacatttgtttgtagtcgaaaacgttgttgtttttggattactattgagcaaaaagtagacaacccaagcaaatttaactcaactgtgttaggtgttgatgattttgcttaggaatggacagaaaaaagttgtaatctccaatatgtaagctagcatctgttattgcgtgaggcaaagcaaacaacgactagcatcctcgcttgtgtcactccaaacaactttagagctaacttaagtgataaaaatatggcacaagtacttgctgcaacagcaacaccattcacgtaatataagttacacgtattaataagggattcgtctaaaattcggtgataaaaaaactaagatacaaatatactattacaattttttttttttttttttttgggttgaattgttcaatagaattatgtaacattcccgtgacaactcttttcaaatgggatttgagatgtttcccaataaaaaatgtttacgtctagtcacgagtgtgtctcttcaatagtcatcacgtgatcataacttggcatttgctcactctgaagttttacatatatccaccaaaaccattgttgttgcctcttttcgagtctggtgatgtggtcacttactcacttacctatatgatcttaagccctaaaaagataaggaagcaccaaactgatagagaccgaattaataatactattacttttcattattgtcttttattagttttattgttttttcttatagctagattttcctttgtgatttgcttgttcgccaaggtgtattcctatttaacgaagacctatgagtttaatagagatcatccattaagattcaaaagtggagttgttattttactcgaataaacgaaataggagattgacttcgttttgatttttgaccaacaactctagtctagcaataatgtatgatacaaaaaaaatggttgctaaatttagaaggctcagtttctttcaaaaaatt

SEQ ID NO: 3688 - DNA, 1071 bp, Arabidopsis thaliana landsberg
atcagcagacctgattcacttacactggttaaataagttctctgcttttcccgaaatttgttaattatctggtcttacagtttggagccaagaaggtaaagagtgtacctagtctttaaccacagtactagtagtatctactgatgtctggttgtgttctcgcttatcaattgggaagaaatttaggtgtatcataaatatgttgctgccgtcccttgatggttctgtaaactctgttgttagtaatttttattatgctaatgtggtgccagtacatgttgtagttcttgtttcacatcagcatacaattggatacaagttggctggtttctgattctttagcaagataatttgctaatttctattctatcatacgttcatgcattttttatattattttgccttattaatcacatccactgcaacttttcaaatgcaggaaagatgtcaactattgctaatgattatgatgaagacgataataaatctaagattgagaatggatcttctgtgaacataagtgaaagggaagttttacctcctcctccgccattaccacctgggattaaccatctggatttgagtacgaaacaagaagaaccccctgttgccaggacagacgatgatgacatatttgttggtgaaggcgtcgattacacggttcctggaaaagatgtgactcagagtcctatttctgaggatatggaagaatctcccagggataaggagaaagtatcttatttcgatgagcctgcttatggtccagtgcaggagaaggtaccttatttcgctgagcctgcttatggtccagtgcagccatctgctggtcaggaatggcaagatatggtcagttcaccctagctaatccttggttgtatttattctcaaatcttgatcctcgtctgcaaattttgcgtcttggtatgtagttattagatgtcatttattcccatatttaggatttttctggtggtggtgtgttttttcagagtgcatatggtgcaatgcaaactcaaggactggctcctgggtaccccggagagtggcaggaataccaatatgcagagcaaa

SEQ ID NO: 3689 - DNA, 2738 bp, Arabidopsis thaliana landsberg
cctcggtcctccctacccgctttaactaactccagcctttcttcttttattagtttctgccttatgtgagcctgtggaaagagtaagataattcagttaacatcgccaaaacattttgccactcaaatggagcttctcatactagtaacagcttacttcaagtttggctggattgaccagcttcttacttagcttatcagaatccggaactttcaatccttttcgagccaatgcaagtttcgcatccttctttccctgcatgtgacacaagacatcatcaacaaagttggacttctttaccaaacagaggaaaagagcttctctctttcgcatatatgtatgtataccttaacttctttatttttcggaagtcctcattggaaagtatgccatctctttctgcaaaagatgtctgttccctctctgcctctgcgcatctctttagtgctcgtaggcttgtatcagcagcgaggagactcgcatcaaaatctactaacttccttttcttcccctttgctttctctctgtttccactaccctccacagaagcttctccttcatcttcttcgttttcccaatcagtctcggcttcatcactgtcattcttctcttcctcttcatctccactaaccaaagtatcatcttcagtgttattcatatcatcaccatcattagaatcttcttcagcctcgtcctcagttatcagctcctgttcgatatcatcactcccaggcaacgccacttcatcatcatcactttcttgcaataaatcaacattgggaacattgctgaagacattgacttctccatactttttaggtctggcaatgggacctccaggacggccacggtcttttttcactagtagcaaagggttgatctgaaattacaataatgtaattactggttaaccacatacactgattattttgttccaattaacaaatcaaatacttctgctacctctctgaacaatgctatgagggaagcagatgctgctgagatggcttttctatgggtacggtactttttatccgttttatactgagcaagatcatgcagcaagtcttctgtcatcaactgaagtatagcagacaaaaaaaaatatagaagaagcaaaaagacaactcagaaaaaaaaaaaaaaaaaaaggattggtgctgtaaaactacatttatatgagaatgttaaaccagagttaagaactagttacctcgggaatcctaaggcacatttctcgtaccacattgagtgcgacaggaatagcctggttacatatatgaaaacaatgaattaaaaaggaaaaatataaatgatagaataagctttctagttaagtccctccctaggtgtttgaaatcacacctccggacttgagcgatcgtgtaaaaacttattcactatttgcttgaacagtggctccacggcatccgaaggtacctgctcgatataaaaatgattggaaggattgcaggatgagaaaagggatgatgctttaaagtgtaagatgtttgtataccccatcatggcaagcctgaactgctgctgcaagtatttgtgtaatgtcctttacaccatcctgcatttaagagcatccctgtttcaataaattttcagcaaagaaattgtaaaaagggcagttagcaaatcttaccttagcataggcttgaagataagtataaaatttgaataaaagcaacttgtgaagaccaattgttcgtgcaataacttttataatcatcaacctggtctgcaaaatttattgaatacatggttagttagctcatatgtttctatagaatggatgaagcgagttaaaatacaattacctcgcgccgttcataagtttccccagtgctcttgtcatcagtttccccactgctcttgtcattagtttccccagtgctctcgtcaggcttaggcctaataaggggaagcaacctctctgcaaaattctgtaaaagaagaaaaacattcaagtacatagccacatagaaaaagctaggaaatgaccactacaaaaaagctaggaaatgaacctgtgcatcatttagatgattaagaggtgaataagttgaagtagtgttctcagacgacgcacgctgctttcgtttaatacttcgcatggcgcgttgcagttttgcttgctttttcttcttgctagaagatgtacctttgttgttggcctaaacatcggaaacaggacctagtattatacttaattcataatgataaaaatgatagtgacaactatatgaaggtggaaaattctattcacaaccagtagtaagcgtcttcgtcatagtctctaacaaaattcatgtataaatatgttgtttaccttgtaaacagcctctatgttaaacacaacctgagatcactatcatcctcatcgttaatgttgtcgtagtcaagaagaaaccgaagggaagatatcctgatcctgaacatgtaaaaaaaaagagaagttagtaattcgaccaaccaaatcatatcgaaatcttgcacagttaggaagatatacctaggtgaagtatgaaagcaggcttcacaaatggcaattgctactctgtcatgtttatcaccaaaccagacttttttcttgtgaagctcacaaagggtaacaagtgctctcttagccttggtttcatcttcttgctacaaccggagttaaaaatcatctacttgattatacactgatcaggtacacaaaaaacccatgaaaggggaaaagaaaa

SEQ ID NO: 3690 - DNA, 5973 bp, Arabidopsis thaliana landsberg
aggtttgcatatatgaatagctttctttatttagtctacatgttactacttatctatactattctagtgcttatcagctctataaaatgtttttttaatgaatatggcttcgctgttattgataccatgtttaccaacctgatttttacgcttcacagtggcgaaaagactactacaaaagagtggcctattttgctcgagatcaagggtagagtcagattagatgcatttgagaagtttgttcgagagctcccaaattccaggagtcgtgctgtaatggtatttgtctacacgtttacctctatcattaatgtacatgttttatatacgcattctgtgtttgagcccctgcaaaagctattaactgtgacgtttaaccaagcttaagtagaagcatttaggaaagaagaggagagattaacggccaatactgacttgtgaatgattgagaaaaatacattacatctgtgaatcacaatggagatagatggacttacaaaaatattttcaccagaacaattgcatagcttatgtttcttgaataggcctccatattccaataaaactaagacctgtttgttctcgattctatatgtatgtgatgaactcgtttatccatcatggtacttctgaaaccttgctttcgtgttacaggttatgtgtttcgtctgcaaagaagagtgctcaaagacagaacaagagaacatttccgaggtatgagcgttggtagttaaccaagattctgtgtagatccaaataaacgaaaagatgattaaaaaaacttgagatttatttgaatattaatgatttatttgatcaaaactgaacgcgaatctgtacaaactgaaaacccaaaccgaatttaaattgaaacactcctaaatatctgtagaatgtctaacttggtaacgaaatttgggcatttggttttgttactatacaggtggtggattcctacgctaaagatgggagggtgggttatgcagaaccagcttcaggagttgagctatacctatgcccaacccgtgggagaactgtcgagattctaaacaagattgttccgagaaaccaactcgatttcttgaaatctataaatgatgatggtcttataggtgttgttgtatggagaagaccacaatttaaaaaatcaccactatctaacaactctcacaagaaccaccgtgaaaagggttcttcgttaaccacatataatacttctcgttacagtaacatgctacaggtcaacaatgacgatggtgatgatgtgccacctgggtttggcccaatgaccatggctcgggatgaagatgatgacttgcctgaatttaactatttttccagtggggatgttgtcgtgaaccggacaagccggtctgtatctgtaagagagcttattcaaaaatatggaaaatctgaacctttgaggaaccaaagttataatgataatgacaatgatatactaccagagtggcagcctcaatctaactggactcttggggttactcatgtaaatggtggctcgatggttagaccatgtagtgagtggtggtctcatcaggatggcagaggaggatattaattgttttttgtttcaccttagcaattttgtgtttgttatgcattttctgtagcaggcaacactgctttccaaattttgtgattttctctcaacagtcaccgatatttggcactttattagtaagatgggcttgcgcagcccgctaatatattgctcctttctgtaacaaaaagtacaaaagtaacaaaatccactcctatcgattatactataaaacagaagtgcagagaaaatttcagtcatgatattttttgaccagctcgattcagaaatttggaaagactagcttttttttctctcgggtttcactttttaaaggtcgtgaaaatttgggaatcactgatcaattttgttaatatgatttcctgatttagggtttctctgcatgcctctagaatcagcaagtgtaaagcaattaccatggtgactccgaagcagatcgatttctcttcctgtggtggtggtgataactccgacgataccctctcccatcgagaatctccacggaatccttccccaaagcgtgctgctgcttccttcgcagcagaagcaggcgaagagactatgaagaagaaaaagaagaagaagaagaagaatttgggtccgccgttgatcgtccggatctggaacgaggaagatgagctctctatcttaaaggtattctattcatcttctccgttacactttgatttggttttgcattctgattttctcaaaaccagattcgaaatttctcagggattagttgattacagagctaagacaggattcaatcccaaaattgattgggatgcgttttacagtttcctcggaagttctatcgttgcgaaattctccaaggagcaggttttgagtaagatcaggaagttgaaaaggagatttcatgttcattgggagaaaatcagtgaagggaatgatccagaaatttactaggtctagtgattctgaagcctttgaattttcttcgatgattgggggacaaggtggatttggtaatgatgatggtatggataaggagatggtgaaggagcacgaggtaaacggataatggcgcatgcggaaaacgggactgctcgaatagcacaggagaacgagagtgtggaggagatgttgaaggagcatgaggaaatgttaaatgagaatggtgcagaggagataagagacaacaacgggactgctcgaaaagcacagcagctcgagagcgagagcgaggaggagatgttgaaggagcacgaggaaccgtttcatgtgaatggtgcagagaatataagagacaacaacgggactactcaaatagcacagcagagtgagatcgaggaggagatgttgaaggagcatgaggaagtggctaatactgaacttttaaatgagaatggggcagcgaaaacaacagagactgggactactggtggaaaagagagacatgatgacgatgatgatgatgagttatgcgctgtgcaggatgcatttgaggctataatgtcgcaaggtttaagtggttatcaaaagaagttgcagcttgagaagctgatgaaccttggaactggaaaaagaagagagttgagtgatgaatggaaagcgttatgtgttgaggaaagaagattgaatatcaagaagcttagattttccgccaagcttgcagaggcagctaatgatagttagatgaaaccaataagccgttgtagcatttggtgttaattaggttcttagtaagtcataagctttagtctgttcagtgtatatctttggatgttgtctttgttctgcttgggcaagtgtttgtaagacattccagtttaactgaagtatccagaagagccatccatgtccattgttggatataataaatttcattactttcttgttgcaccaatcagtcaatgaagtggcaaaacattttatatgcattccctaacaaaaggcatttacaatgtaatttttacatttttaaccactaaaaggccagaagaagtgcacaaagaaagactgaccaaataataaaataatttttcttgtcggtagtcaccaaaaccatgctattccaaaatgcacttcctttgcaacaaacggcttatatccatatgaatccgacagaggaagacaaaaggatttagtcttgtgatgtagcagagtattcaaaaagcaaacgtttggaaggtgcagattgcagaaggacacgcaagcggctcgtgagctggtaaataagtgtccattgcattgccatctcagaatctttcatctgtcttaccacagaggcctgtagataacagacagcaagaaccgtggagtgcttattttggttaggttttgaaaaaaaaaatagccatatggtgaagaaagaagatttcaatgtttatggctgacctgaagacgttttccgagctgcacttcaacttccgtttcaaatgatatgttgctcgccagagacttgagaggatccacagttggatcaacagagagtaaacttggggtctggggagcatacaccaacctccatctcgcctgaccaaactctccttttccttctatccttggcattatggttccaagtgttgcggttgcaagttttttgaaagcaagttgtccatctccttctaatatggattctgctaattggctctcaaacacctttgcagcctgcgaaagggagattattaaacagaaatttccatcaagaagaaaacacaacaatttccaaagtacagctacattttaacttcaaacttacctccgaaggtgaaagagcatcctgttcaacagaacgagttgaagtcacgacaagtttgtcctgccaattactggcacgactttgaaccctaaattgccattctgaaccaactaaggctaaatctagcagaggatctagtccatgttcaggctcaaactttgcaacgttgagatgctccctcttcagacgtacctgtgtttagaaaacaaaatagatgttggttactcgaggacatgttggctttgcaagaaattatggaatgaatgagttcaccacataaaatcaaaacagagatttaggcaaaacctgagtagccacaagattgacatctccgttctcgaatgttaggacaccctttggtttgataaattttggatgagccatgccatcaagttcaagctcaccactaacagcaaaattaagaattaaagggtacattatcctcagctctggtcctaaaacaagtttcatatcactcagacggatatccatatttggttttattttcacttcttcaatctccttttcaacggaatttgatttacctgttgcaggcaaaacaaagcaagatcattacaaaagtgtttacatacaaagtccaaatactaaaatagaaaaaaacgtagaaattttgctagtaaacatgtaagttaccagtcgactgagagaatttcatccctgaagaagcccgttcagtgccaaaaaatcgagcaaaatatcgtgaagaaactgcttgattaatagcagcacctggaatactatactgattggctgccaatctatttaaaggggcagctccgccacccttatcatgaggcagataagcttctccttggcttaatttaatatttcctgatatagttggctgcaacattgatccagtaatttgcagctgagtatcaacctgacaactgatatggcaacacgatctctcacggaatcagaaaaagtaataagctcagtaacatgagtctagaagagcaaaatggaagaaacctagacgatacagtatctcagcatgcggtctagatatataaaattaacaaaactgatccacgataaagtatgtacccatcaagatatatcaatagttaaagtaagaaagataaatcaaaattatgtactaaaagcttaaaatgattgacagcagcgttgatattgcagagtataccttaaaaaattctttgctcgtacttctagaacttcacatttgagctctattccatcaccagcagatgcttcatttgatctaaggggaagatttcctttaacaaccagctttccctttctacttaccctgctttccagtgaggtgatgcacaacctgtttgatttaacatgtaaggttccaccaaagtttgtgagcggtttacgaagcacaggtgaagagatagacgccctgtggaatgaagcagacccatcaagcactggatggtctactgtacctccgacctgctcagcagataggttatgcgtaaatgaatttagtcagaatttgaggacatggcagatcaatttaactatcttacaatgtaaagacaacacaacaagaggacaatggccaacctgaagcctgatatcagcatttccttggagccaattagcataaggagatatggctgttaacaaagtcattcccccatccttgatgtctgcctccagtcta

SEQ ID NO: 3691 - DNA, 599 bp, Arabidopsis thaliana landsberg
  unsure (1)..(599): unsure at all n locations
gggggggacttgcaagagcaactcaaggagagaattctagctattagtcaatctgcgcaaaatacaggagagtgtagatgctaaccatttcctcaccaaaccaattattcttacttttttaatcaacaactatgtaacaagagaagaatctatattggttcatatatccttttaaccggcttcattgctcctaacatttttctttctttcttttcttgtggattcattaacaaaagatacttgactctactgaggaggccattgagcaaagcctatcgagcacaggacacgcgacaacaagagcgacaaagatatattcacaaagctcaaagacaagttgcttccagtggctcttgatcttcgccatgatctgtgtgttcataatggttgttctgttgatccgggtcacatagaaattgttcagattgtaataccaaattagtgaaatccaaaaaacattttagtctctttatcatacagtttgtgaaagttcttttgactttcgtaaattctgagtttttgatatgtgaaactatacttctaaannnnnnnnnnnnnnnnnnnnnnnnnnnnnnnnnnnnnnnnnnnnnnnaatgaag

SEQ ID NO: 3692 - DNA, 1799 bp, Arabidopsis thaliana landsberg
  unsure (1)..(1799): unsure at all n locations
gggatgctgctgagatggttttttatgggactttttatacagagcaagatcttgcagtaactcttctgtcttcaactgattaacaggagaaaaaacactattcagagaaaacagatttgatactggataaactacatttttattagaccaaaacacagcgagtcaagaactagttacgtcgtgaaccctcaggcacatttctcgcaccacattgagtccgacagcaatagcctgtttaaaaaaatgaattggaaaggaaaatattaaatgatagaatgagctttctagttatgtcccttgatgtgaaaaaactcgaaatcgcacctcaggacgtgacttgtcgtgtacaaactgattcacaatttgcttgaacagtggctccacaacatcagaaggaacctgctcaatacaatataattagaaggattgaagaatgagaaaaaaaaaatcaagtttaaacggcgaaatgtttctataccccatcgtggcaagattgaactggtgctgcaagtatttgtgcaatgtcctttacatgcgggtgcatttaataactgatttcgatcaaatttcagttagcagaagaataataaagagggtaagcagatcataccaaagcatagttntgaagaaaaggatagaaacttagtaaatgcaacttgtgaagaccaattgtgcgagcaataactttaatcatcatcaacctagtctgcaaatgtattcaacaggggaaaaaataatcaactgagatcatatagtgggaaacctaatcaacagttagttagctcatatgtttctattagaatagatggttaatctaaacggatagtttacctcaacacgttcaccactgcccttgatggtctgaagacgggaaaacaatttctctgcgaatttctgtaacagaaacaaacattcaatcatagccacttccataccattgtgactgcactacacaaagctaagaagtaaacctgcgcatcatttaaatgattaagaggtgaaaatgttgaagtggtgttctcagacgacgaacgctgctttcttttaatacttttcactgcacgctgaagttttgcttgctttttcttcttgctagaggatgtacctttgttgtttgcctaacatcaaacagggaaaaatattatacaaaactaactcaaaacagtttccctatagattaatgttccatgatatcatataaacatcacctaatttcatactagtttgaaatgatgaaaatgatatagataagtataaaggcggaaactttcatcaacaagtagtaagtgtcttcttcgtactcaatgacaaaagtattcatatatgtgaatgaaatgttgttttaccttgtaaacagcctgtcgattaatcacaacctgatctattttctttgactcctcgtcatcatcgctttcagcatcactatcgtcatcatcgtctatgttctcataatcaagaagaaaccgaagagcggaaatcataatcctgaacatatgaaaaaagaagttagtaatttgaccaacaaaaaatcatatcatatcaacatactccatagttagaagaaaataaggatatacctaggtgaagaatgaaagcaggcttcacaaatcgcaattgcaactctttcatttttatcaccaagccagatctttttcttgtgtagcgcacagagagtagcaagtgctctcttagcctttgcttcatcttcttgctacaaacaaaaaacacaccaagcttaactatcatctactaaaactcgcattataagtcataacgcaatcccatgaaaaaaagtgtgc

SEQ ID NO: 3693 - DNA, 3541 bp, Arabidopsis thaliana landsberg
cgaaaacaactcttccaatgtcgatatggtggttattccctcagtatatgttactgggattggctgacgtacacactttagtaggaatgcaagagttcttctacagccaagtccccactgagctgagaagcctcggtctcgcgatttacttaagtgcaatgggcgttggaagcttattaagcagcttactcatctatctgatcgatttggccactggaggagacgccggaaacagctggttcaacagtaatctgaacagagcccatctagattacttctattggttacttgcggttgttagtgccgttgggttctttacgttcttgttcatctccaagtcctatatatatcgccgggtggacgtagtgtagtttacgcatggaggaggaaatggagagtttctttttgtgatttttgatttttatggacgttacgattctaacgtaaaactcccacaaatgacaaaacagaccataaatatcatgattcttatgtgaatttgtaactatatttcaagtatgcaaatttgatattaaattgtgattccacgattctaacgtaaaaataacattatgcaaatatttatgtatgaatgtacggccagtgctataaagatcgttgaaacttgttgaattttaatccccatgcaagagtttaatacataaaaacaaaattaaaaaaataagacgtaagtggacaaggtatttaaaaaataaataaaattgatttatacatgtttataggttttcttcgttttccattcgtttaaaccattataaaatataactaccaacaaattttgtggtccattccccggttctttatcttcaatattcttaatcacatatgtgtcgtgcgtgagcacagcgacaataaacaattgattgtggtctccaaaattctagagattttttctttacaaaaagacctccaattttaaaaacttacaaataaaatcttttaaaaattttagaccctcgaaatttcaggccgacagtgcatatatgtaagctcaagaacacaaggaatcttaactagttgagcatgttccaacaactttcgaaatatacaaaacatatatatatatatatatatggccctttcgggaacttctgctaataaaacaaagtccatacgaatcacgagttaagttaattgttatcgtggtcatcatttaatataacttgtcttgtcagctaagccacttgcgtccacaccttcatcatataatcttcacctatatatactacagaaacaatataataaacattttgtttgtatattgatttatcaagaccaatcaatcatacacattaatggctatcacctactcctccgccgacgagctcggaaacaccactgagggttttctggaaatccgagaaaatacctccggtggatggaaatcagcgaggctcatcatcggtaaataaacatgatatttacttttttagcaacaaaaaaattgatttagttccttacttcattattatttctgccgggaattttgctaatttctctttgtttttgtttctaaaaattttgtagttgtacaaatggcggagcgattcgcttactttggtatagcgtcaaacctaataatgtacttgacgggaccgttaggtgagtcaacagctgcagcggcagcgaatgtcaatgcttggactggaacggtggcgtttctgccgcttctcgggggctttctcgctgactcgtatctcggtcgtttccgtactataatcatctcatcttctctctatatcttggtagataaaaaaatttcctctctaacgtttctataatcagagtttcgttacagattttgatgattaacgaaaacaaaacaaacagggacttgggttgctgtctttttcaaccatgattccttctcatcagtccaaagattcgaatcagctgcaagagactatcttcttcttctctctttatcttgtagcaataggacaaggcggttacaacccgtgtattaaggtatttggagcggatcaattcgatggaaatgatcataaagaggcaagagacaagagttcattcttcaactggttgatgtttggaaactgtattagcatattgacgactcgtttggtctctacctacattcaagagaacctaagctggtcactagggtttggtattcctagtgtttccatgttgctttctctgtttctcttcctccttggaactacctcttaccgttttagtactgagagagtaggaaagaaaaacccttttgccagaatcagtcgtgtattcatggaggctttaaagaacagaagacaacccgatttagatattgctaacgcgaacgccaacgagactctccttctcctggctcaccagagttccaaacagttcaggtaacataattaacagcgatgttcttttgagaatcttcttgttcataccatcttggtttctattagtgaatccacgtcgatatattagagaagaaatgtatattgttccatctaggtttttatatataccaactgatatttagatgaaaaattattataagaaaacgaagtttatagtttcttttcttgtatactatgcagattcctagacagggcagctatttcttgtgaattggctgaaattgaagaagcaaaggcggttcttaggcttattcccatatggataacttctgtagtctacaccattgtacatgcacaatcccctactttttttacaaagcaaggagccacaatggacaggtcaatctcaccaggactcttagttcctgcagctacacttcaaagtttcataaacctctcagtagtcgttttcatcccaatctacgaccgcttactcgtcccattcgcaaggtccttcactcaaaactcatcaggtatcacaacgctacaaaggattggtacagggattttcctctccattcttgctatggtattagccgcattggtcgagacaaaaaggctccaagccgcccgggatgaactctccataccgatgagcgtgtggtggctgattccacagtatgttatctttggagtctcagatatgttcacaatggtgggtttacaagagttcttctacggccaagtccctagtgagcttaggagcgttggtatggctttgaacctaagcatatacggggcgggaaactacctaagcagctttatgatatcagtcattgataaaatcacgaaccagtatggtcaaaggagctggttcgataatgacttggaccaagctcatctagattacttctactggctactggcttgtctcggcttcattggtttcgccttctacttatggttcgccaagtcatatgtctacagcagatcaaacaccttttaaattgtctctcctctgttctgccaattaaattgggctgggatttcacaaccaaggaaataagaatttcctcaggcgaaagaaatttcgtgagtatatcaaaagcttataagatttctgttaaagaaataagaaatttctaaggaaaaagataaaattcgacaagaatattctatgatctggattcagagccaaattgctt

SEQ ID NO: 3694 - DNA, 3040 bp, Arabidopsis thaliana landsberg
agccaaagttgtaagccatactggaataagcctgacaagagctgtagcatcttcgacatctctagacttgcatgccacttttccttcatgagaatcatttgggacaagcaatgctttgttgagaaaactgtcacatgaaagtagaatcttataatcatccaacaagactttgaagttcgaaccacaacctatatgttaaacatacctcagctcctctggagattcttgagattgatttgcctctattagctcaactttgcacaagtctgatgaattcaatctctggttcttgaatgctacaaagaagactctacctattctcgtaaacgggtttgtttcctcttcttgtcttgttttactaaacctataactctttctccctaaaacgaaaagaacaagagagatcaccatgaacacacatgggattccaaacccaagtgcccagcttacattttcttggatgtacacaaccactaaaatcgctaggccgattcctgcacacatactaaggtaccaccagttgaagaaagagcttctatcactattctcttgcgggttcttctcatcaaactgatctgcaccaaaagcctgaacacaaggcttgtgtccactttgtccaatagccaccaaataaagagagaagaagaagagtgcattgagaaaagaagaaggtgacgaggtcacttcagtattgttgggaatcagaaacgcagataaagtcagaaacgccagtccctgacatcaaattcaaatattctcaactcaatttctacttcttctatatcagagaaaccgaatccaaatcaaaccgaaaaggaataaaaccgatctaaaaccgaagtttctttgaaaattaaaaattttatttgacttaatcaaaaccgaaaccgtaccaaaccatcacattgcggttgaaacgaatcaatttctacaattccttcactaattgtaaaattcagatcgaaagagaagagacagaaggagacgaaccaggacatagataaaagaagcgatgataattgttatgtagcgaccaagaaaagcgtcggcgacaaaagctccaagaagaggaagaatagtggaaattccagaccaagcgttgacattagcggcggcgaccgccgtagattgaccaagtggtccagtcaagtagcttatcaggtttgatccgatcccgtagttcgcgaacctctccgccacctccacacctgcaaaaatgtcctcagggattcaaagaagaggaaattgaaaaacagagcagctagtgattgaaggttaccgataatgaaccatgcagctctccatctaccggtaatagaccttctggcggaaaagccacggtggtcaacggcgtcgatgacgtattcttcttgaagagaagtttcggaagtcgtcctcattttctctgtctctaacgaaagagacaataaacaacatatagaaacttgtttgagtttgtttgaccttcaaaaggtgtttcttgtctttttatgattaaaaaacttattttgtgtaaagttacagtatacaaactacagagaccatcaagaagtaacttaatgttaaagaagcattttttttttcatttggaaactacactacgtccactcgacgatagatgtacgacttggaaatgaacaagaacgtaaagaacccaacggcgctaacaatcgctagtaaccaatagaagtaatcaagatgagctctgttcagattactgttaaaccagctgtttcctgcgtctcctccagtggccaagtctatcagagagatgagtaagctgcttaataagcttcccacgcccaacgcgcttaagtaaagcgcgagaccgatgcttctcagctcagtagggacttggctgtagaagaactcttgcattcccactaaagtatatacgtcagccaatcccagcaacaagtactgagggattaaccaccatatcgacattggaagagttgcttccggttggtctataagcccgtgttctttcgcagtctcgagccgcttgaactcaaccagagctgcaattaccatagtgatagtcgacagtacaattccagttccaattcttttgagggttgtgatgccacaaggttctttggttattaacctggcgatggggacgaaaactcggtcgtagatggggacaaagaggactattgatatgccgataaagacctgaagagaagcaggtgggatcttaacaccaggaagaattgttctatccattgtgacgccttgcttagtgaaaaatgtcatgtactgcgcgtagggtatcgcgtaagccagagtcgtaaaccatactggaattagcctgataagagctgtggcatcttctacatcactagacttgcatgcgttttctccttgagaagaatcattgggtacaagcaatgctttgttgagaaactctggagatgtatttgcctctagctcaactttgcacgaatctgatgaattcattctctggttcttgaatgctagaaagaagactctacctatcctcgtaaacgggtttatttcctcttcatgtcttcttttactgtacctataaatccttctccctaatacgaaaagaacaagagagatcaccatgaacacacatgggattccaaacccaaaagcccagctgaactcttcctggatgtatacaacaactaaaatcgcaaagcagattcctgcagacagactaaggtaccaccagttgaagaaggagcttctgtcagatttctcttgagagtctttttcatcaaactggtcagcaccaaaagcttgaacacaaggcttgtgtccactttgtccaatagccaccagatacagagaaaagaaaaagagtgcattgagaaaagaagaaggtgaagatgtcacttcagtagtgttgggaatcagaaacgcagataaagtcagaaaggccaatccctaacacatcaaattcacattcctctttaagttacttctcaatcatgtagaacaagtaaaccaaaagaaaaaaagactaaagagaagagaacgaaccaggacgtagataagagaagagatg

SEQ ID NO: 3695 - DNA, 2525 bp, Arabidopsis thaliana landsberg
  unsure (1)..(2525): unsure at all n locations
tagtttcttgaagattatacatcaaacatagctctttcttcaatggatatgcccaaaccctcctgggagtttcatttattgaaacttaaaacatcacatgcggaagctgtgaccgtggctaggttcnnnnnnnnnnnnnnnnnnnnnnngtctcttatgtctcttttactcgcttgtactcgtaaaacatgtgatcccgaggcattccccacttttgtggctccgaagaaaaacaaagcgaagaacgtttgtttttctttggtagcttggttatggttcatagtaagacttatgttccacacttgtgttgaagtcatcaagtctatagtttttatatgtcgtgcgagtgacacctcagctcatataatgggaaaaccaggagctacacttagcgctaataagttcattcatcgaatcattagtttagatgatgtcaaaatggtgaagaacgccatgaatatggtacgtttgcttaattagttattttattttctatttcaagatgatttttatgtgttttttttctctgtttctattagactgtaaatgatgttctttttgggatggtacaagctggtctttctcgatatttgaaccaaagatatggtaaatcatttactcttgttcaatatcataattaaataacatttgtaacatattctgacattttttctcgaatttgtgaacagttcttgaaacatcttcaaagtcaagaaaaaatctaaacaatatcggtcttcatggtgttgttttctttaatctaaggccaaatagaaatattgaggtgccgaagaacatataccccaaacatataagtgcttcttattttatgttgtctttataaaaatagctagtaagaatctaacacataaatctatatgtaggatttggctaaaatgatggcaaaaggttcaaagtgtagatggggaaactcaataggttatgttctgattcctttggggatgaagccacaggatgatgtatttgaatatgttcgacaagccaaaactatcatggatcgtaaaaaacattccctcgaacctctattttcttatggattgctcaaagtaacaatggaggttttcggattaagggtacgtaagatactgaatcaaacatgattttaatattatttttttatatagtatgcgtgtctgatcgacatagatggatgtgtgggggtggaaaacagggactcaagactcttgtgaagagaatatttggtagcacaacaatgatattctcaaatgtggttggtccagacgaagaaattagcttttttggccatcgaatagcttacattgctgcaagtacctttggtgtcccacaggtactctcttacacataaacctgttctattcataatctattatagttggggaaccttgattgatgaaactaatttcgaatgtatttttctttctttaacaaaggcactcaatatctgtattcaaagctatgtggacaaacttataatcaacattggggttgatgtagacgtgattccagaccctcatcacctttgtgatctcatcattgaagctctccgcatgatgaattctgctgctccaaaaaaggtttttcatgcttcaaaggtttaaacgaaatgtttggcgtacaaaagaactgagcatggaattattttcaataccttgcctcctaccatctctttaatttttattggtctacgaccatctcatgatatatgagtttatcatctttctatgtactacactattactgtgtgagataatgagtttcggttcaatattttgtctttttcttgtactatgttctcgtctattttatatcgcagtccttatatgtgaaacacaacctctaacccaaaggccaaaagtgaagaaggcatgacctagcaaattacaaaatatgtatacattactaaatattacattcaacaaccagaagaaccctgataccgtgactggtaagtcagtaaacaacaacaacaagaacaacaacaaaaaagctaagttagggtttgggaccaaaagagacgtaaaagacaacaaaagcattgatcaacaagcggcgccgagtctctgaccgagataaacaaagtgccaggttagagacataagcgtcaatatattcaaccaagagggagtacgtgttgagcttgctcagcctctcactcagctgctccaatttccgccttagctcctgctcactcgtcctctctcctcctcttccttcttccttttcggccttcattctctcaaacatcgcctgcccacaacagtataacccaaccaacattgttttactagaagatcccatacaacaacgacccatatgcatggtctataaacagaagtagtataatagccagagaagtgtaaactgaccttcgtggcacgtggctcaacagatgacttattagccgcgatcataaagacggaggacaagaggttaccccttgccacatctccgttgcatcggtaaggagtttcctcgcctgctaagcacgtgaccagacagacccacaaggattcccacagagg

SEQ ID NO: 3696 - DNA, 2393 bp, Arabidopsis thaliana landsberg
attctccaagctctttgactcttcttctcctctcttttgcatcatcactatcacccatcaattcttccacagcctttttcactccttctttatccactaacactcctattttatcttcttctcccgatttcataggctgctcaactccggctcttacaccggcttttagtacttgcacgaccagtttctcgttgcagaattggtctgcgaatagcggccatgtgagaagtggaacgcccgaggtgattccttcgagagtcgagttccatccacagtgtgtcaagaatcccccaacggaaggatgtgaaaggataaggacttgaggtgcccaccctttaatgagaagtcctctctctttgattctttcttcaaaaccgctctccaacatccactcaaatagttctttatacttttccgaacctcttatgacccaaataaaagatcttcgagattcctcaaggcctagccccagctccttgagctgagacaaaggaagattacatatacttccaaggcaaacatagagcaccgagccatgtttcttagaatcgagccatttaaggcactcatcttgatcaatgtctgatttgtttcccctctctgctttgtcggctcctaccttgttgcacaaggaaacgggtccaatggtccatgctttaccggaccttacctccttgtagtctttggcataagcaggctcgagctcttgaaatgagttgacgatcacaccataagatgtctcattcgcttctaccataccatcgaagatatctttccagtctccagctggaacatatgtttctaccggaacttgcgttcttgtgaattcaactctatcaggaaaatcaggaacagtgaaaagctccttatctgactttaaattgtccaagatctcacggttcttgcgtaaaacatgcatacacagaagacaaaagcaacccatgccatggaagaggatctttgggatattgaacttcttggcgattttgcttgtataaggcaaacaaaaatcagaaattagacagcttggtcgagggttcatctcttcaatgagcttctggactggttcttcgagaaagttaaccgctttaaagaaaggtatcatccgctccattgtgtcaagagaatcgatattctcttgtccttcttgcaaaccaaactcttgatatggaaacttgacttgcagtatgttgatgggcaagccagactcgatcgctcggtttaggacattcttaaaccttgctgcgttgtgaggtgtcgtgacaattgttatggtcacaccacgctgagccaagagtcttgcaatatcaatcatgggaatcatgtggccttgagccatgaaagggaagaggacaaagtgaagagaaggatgaaattggtgggttttttccgtagccataccgtttgcaacgactcaatgaggaatactcaagttatgtgtttttaatttcttcgatcatatatgtgaggttatataagataagaaaagtggggataaaaaaaagcttctctaacaagatgtagtagatgacgtaagacacgtagagtaatgggataataattgacaaatttggtagttcttattacaagaggatattccgtgtccaaaactttcttctctcgtctttttgtgaccattttactggtaaagcttacaaagatattttattttaaattaaaataagatacttgatccacgagacagaaaaataaatttgggctctttaagttagttacacgatacaagtctcaaaatcgaattctgtttgaaattttaaagttcaatttgttctggtagatgcatgacactaaaagatgatatatggatccacagtcgccaaatcgaacttgactctttccaacacaactttatctactagacgttaacaaatattgatgggtcacatgcacatgtagtaatataaccggttatatatagccattattaattatttaaattcacgtgattagttgaaaataagatagttaacgttataattagtgttatgtttttttttaaatgtaatattaatgtgcgaatactaactagtactaataacttttacttggataaagatcgaaccaaattatttctctataaatagaggattatacataatgtttaattttctaagtttcgtacagttatagagtaattttgggttatgatatgttaaattaaattatgatttttaaattaaaattattatgtatgttaattaacatcttgattcagtcacactttttaagaaaaatcatgttgaaatttgaaggattaatcggccttgaaaaaaaaatataacattttcaaaagatggatagattcacaatcattaatgggaataaattatttaataatattttacgaatcatttcacctcaaatgtttttgg

SEQ ID NO: 3697 - DNA, 1657 bp, Arabidopsis thaliana landsberg
gaacctagccacggtcacagcttccgcatgtgatgttttaagtttcaataaatgaaactcccataaaggtttggacatatccattggagaaagagccatgtttgatgtataatcttcaagaaactcatcaggattctcaatgttgggatctatatccggaacaatgacatgctcttctacgtttactttcgttggaatccatctagcttttcctttgtgctcaccatgaccagtcacctacaagtatcatgtaatgttaggcatcttacatctgaatgagaggaaccctaaagtaatatattgtggatatggattaatacactcatttgatattgattttgaaatggaaaatcatgaaacttaacttataaattaacaataaaaatgcgtgtacatgtgcatatttgtatatgtgtgtgtacgttgattacgtaccagtatgctagagaagcgtggatggttgatcaatgtgttctttatgccttcgacgatggttgaggcattgccttcggttttgcatccaatggttacaatgttgaagacatcgagacccggcaagctaaacaagcgtgcaaatggacttactggctcctctgcttccgtcacttgcctttctattgccatatctctctctctttccaatttctagttttatggtattattttacaaattacatatatatgcaaatggtttatttataaacacataatagctattaattaaatgaggttgttgagaagctaactaactcttctttaccacactatatatatgtacgataggtccaagagatagtggcgattgtcgagagaattataattgacaccattcataggggttttatgcattctctatctcttgtaattgtcggtacctggattcatgagatatttttcttctaccaaaatttcaagagataatactcctagtgaaagaggatgacaaaaaaacaaaaaggtgtgtcagaaaagtatccacgtatttcgaaattgaacttaacatttctatttctgtggcaagaactcttcagtgtataataaatgaaaaggaaggccatacgtccgtgcttgttgttggtgaagggtactactagagtactagttattaattctcattgtttcaaaagaaagacattagtctatcaaagagtgacattaggtttaatattcacctagattctggatccccctcaatgctctgggtcaaatcccaacattgggcttagaagagggttcatagtctagtggtattgggctctgtaaaactcttttttactttactttccacatcaattatttgatcataaaaaacacacacacaaagaaatagctttttaaggtttaaacaacacaaaacgagtttcacgtttcttgtctctttcgttggagagacagaggaaaaaatgacaactacttcagaaatttctcttcaagaagaatacgtcaccgacgccgttgaccaccgtggacttgccgccagaagatccaataccggtagatggagagccgccttgttcataatcggtaagctccaatcacaaactgctctgcttctcaatttcttgctctatgaatctctctgagaatatatctgcaggtgtggaggtggctgagaggttcgcttactatggaatcggatcaaaactaatcagctact

SEQ ID NO: 3698 - DNA, 2091 bp, Arabidopsis thaliana landsberg
tccaacttgttccctcccccactaaacctgaatcttacaaaagattctaattccggcgtcttgacaccaaaattccaaaaccagctcagattcaaacaaggaaacaactttcaagttagagagtcgcaaggaccttttctggctttttggagtaagatcctacaatctctaacatcaactcacttttctgcagctccaggctgacacccactgcaagaaatttggatgcaattcccaaaccagccaagatataaatgaaagaaccagtacttctccttaataagacagaagtaaacgtctagctttctatagaagattctcttgaaaaccaaatctttgtatgttattgagaaggatgactgattgcctttatgttttctgattgccagaaacaaaaaggaaaacagtactaaaagaacaggtgggacaccaaaatgtaagaacaacggcctcaaatcaaccgatccaatgaaagttggaccagtagtagtcgcatcaagatgaagtaaggaatcttcgcctcagataaataatcatatatgcactggatttcaccatgaggcagtaaagaagatggaagataccacaatgtaaggcgttaaattcaagaagaggtgtctctgtctgcttctttttccgtttcttgtgatattattatatgtatttcctgcaacatgtgggttgtctctgttaggtggattcctttgtgttcttgtcatctactgaatcccacatggtccatcatccatctaatcccttaaatcaatggaatcctccagaaacaggtgttgatcttctgatggacagaaaatgcataaacggcttagggtagtagatagatacgaatggagtttctttcctcacttatacatttacgagaagcattccactaaagcaatagtcttaaggtctgagaagagctcctcccactaacacacaaacaagtgcagattcaattagaacacacaccaaaatttgatatgtacgatgctatataatatacgtatctagcttctaattcccaaacaaacaaatgtcaagctcctgatatgacttcaacagagaaaccctgatttgaaaaaaaaaatccatagcagagcaaaaaaaaaccacacctttccacattcgctaaaatggcaaagagcccagacgatgtttttacctgaaatgtgggatctgggaagctaatcaacgaagagactctttatatatgtgttccaccaaatgtgggatctgggaagcccaaacttgtattttgtcccacatcggttacatacctcaaaatgttttactttatatatgaaattaaatcaatacttgtacgtcgagctcagtaacgtgggcttgtgacccgtgtggggacaataagttggtggaacactggctcggcccacgggtcggatctgttgtggcattgttccgggctgcccagtccaagctgtgagtgatccgtgtgtgttaagcgaaggcttggctcaggcggttcttgcagtggagggcaatgcgtgaggctggtttcacagagcagcgatcacctcccgctctcagcagtggacggatcacagctcgacgccactcagattcaccatggcctgctggctcgttcccagctggaccaccaattttttattttctttttgacaattgtatttatggatgggcctgagagtaatgaatatagacttctattcggcgattgggcccaattctttatctcaatcttcaacattggtgagttgtgccaactcagacggggttattaatttgtgttatgcacattactttaatccaaagaatacagttttgctaaacccaccacatgcgtatgttttagttagtggtgatcctgagaagaaacagacgatataagaaggtgaattattgaacaaaagttataccatattatagtacaatgatgttgactttgaatacaaattggtaaccgaattactttgactcactttcaccactttgtattgtttttcctttcaagtttttataaagagagatttggcattttaataacatcctcacctaatagatttggtttacgaaatggggaagaaggaaatattaaattagtgtgcctat

SEQ ID NO: 3699 - DNA, 1707 bp, Arabidopsis thaliana landsberg
aagccaaaccactttatccacagacacatttgcaggtctattctcagcgaactatggcatagacttcattcttgcaaagacgggctttctgtggttcaaagatgaaaatcaattctagttcagctgcacaaccgtacggtgcaagcaacagtttgtgcccaatatttgagtctagcttttacatcatctggatcatcacctgaatcaaaaattgcaacaatcaaacattcaagtcaagaaaatgttcttcataatcacaagactcaaatctatctcagatttagagatttaccagggctagagatcttccaatttgcaattggagcggtcgtggtcggtggtggcgacgaatcatcttcctcctgggacttgtggtggttttgttgcttatcatctaagaacttctggctcatggagtaacaaagctctaacgcaggcaaagtgttgcaaagctcagggatctcatcgtaactaaaaccaaaccctagatctaaacaacctttaagctcctcaagatcatcatccgtcaaactcttggctctcgtcaaatcatcttgatcatccaacgcgtatccctcaagcaacacttggctcttcttcttctccagcttcttcctactctctccggcgaaatagcctcctcctctgccgccagaatctccaatcgcggcccacgtttcttggattcccccgtcgccaccgtcgtggtgttctggtaaggttgtgttcgatatatcatcagcatttgttggtttgttctcttggacagagtgtgtcttccatgcaggtggatgtgatgattcgatgtgaatacaagccattggtttttctctctgtgattgttttttgttatcggatataacatattgagtggtgaggaaagattattatataaaggagatggtttctttcttagaaaagtggcgacgtagaagcatcaattattgcatatatgccatctttcttgtggggccataagtaaacgaatcaatgattccatgaaacgcgtgttcgagaaacattgggtttccgttttggggttcgtctcggttggtctttcaagtttcaacttctatttaatttatggacatctattttactaataataatgttgcataaacattaaatcacatcgagaaacataaagaagtgttgtgaaaatttgtatactacttaattggaaggagaaaacaaagtgtattaaaatgaacatgagaaattattttctgatattaaaaagtgtattgcagaagagatacactagtaatcccatttatttacatgatataaaattgaattgcgacctgagaagaatgaagttgacatcttcttccttaggagcataaatgattacaacatcaagcaatgttgtcaatggtcatcaagcaatgttaaaatcggcccattaatttataaaaagtgtaaattttcaatattgtttttttttcaacttatcaatattggatttatctaaagaaaactatgcacggagtcgccgctggtcacacgaacagaagaagtatggccaactttagagagtttgattttggtttcagatattggtataaattatttttcttgacacttgttctaactgtctctagattcgtgtttagtaagttaagtatctcatgttggaacatgttatagtatgtgttaaatgttatccatatcatatgaaagaacagaatttagggtttttgtttg

SEQ ID NO: 3700 - DNA, 1896 bp, Arabidopsis thaliana landsberg
  unsure (1)..(1896): unsure at all n locations
tctctcttctggttaacggagacatgaacttggccatttcatgacaatctccacaaactcttagattctttgtaactcttatgatctttccatgtccagagcttatgattcccaaagccattgctaatttctcactatgaccacataaagcttcttccttttccatctcttccgcatcgatcaaagcgtatttcgtcagtggtgaatatccttcttctatcattctagctcttacctttctcaaaaaagcttcaatgttttcagtttccgggtttgaactatctccagctacaaagatgttaactctaccctttatctctatccagctacatcccggattcttcctcaatccgcgctgccctatcctctttcttagccttttcacttgttcccatttctcagcttctgcgtagatatttgccatgagtacataatatcctgtgttgtctggttcaagctcaaagactttctgtgcagctttctcagctaacttaacatcatgatgtatcctgcatccacacagcaaagctccccagattgtagcatctggcggaattggcatgttctcgatgaacctataagctttgattaaatctccagttcttgcaagcatgtcaactatacaagcataatgttccaccgttggctcgatcttgcattcatgtctcatgatgttaaagaatctccatccttcatcaactagtcctgaatggctacaagcatacaacaaagatacaaaggatatttcatcagcctcaatacccgcttgtctcatttgattgaaaagagcaatcgcctcttttccaaacccgtgcatcccatatccagctatcatcactgtccaagaaacaagatccttggaagcaatatcatcaaagagcatatgagcgagtaacaacgcaccacatttcgcgtacatgtctacaagcgaattagcaacatgccgatctgagaaatacccgtttctcatgatgtaaccgtggatttctctgcctttatcgaaagcagaaagacttgcacaagccggaagaacacacgccactgttctctcatcaggactaaacctcttttcttccaacagcaaattaaacaggcttagagcttcattggcgtaacagttctttgagtacccaccaataatggtgttccacgagatgatatctttcacacgcatctcagagaacactagctccgcctctcgcatgcttccacattttgcatacatatccatcagagcatttgatacaaagatatcaaatcccaaatcgttttcctttatccactcatgcacacgcttgccttcatctaacaaccgataacgagcacaacaatttaaaacagcagtgacggtataaacatcaggactaataccttcttcctccatttcttcaaacaactttacagcttcaccagccaaaccttccctagcataaccagcaatcatggaagtatacgacacaacacttcgatcactcatctccctaaacacagctttagcagaatcaagatcaccacacttcgaatacatatcaagcaatgtattacaaaaccgatcttctctactaaaacaagctttcactccaatactatgaacagctctacctaacgatatcaaacgagaatcagcacaaccagcaaaaacactaactatagtagccaaatcaatctctatccctgaaaccaacatctgcacgaaaacagatagccctttctcagctaatccgtttgatacatacccattaataatagaattccaagatataacatctctctcagtcatttcatcaaacaccttacgtgcactatcaactctctgattcttcaaataaaatgcaaccaaagaattccncacagagttcctttctccaaacctgatttaagaataatccatgaagc

SEQ ID NO: 3701 - DNA, 1316 bp, Arabidopsis thaliana landsberg
ttgggcttgctctgatctgaatccttttcacgttgtatgattatcatgtttttgcgttgggatgagtcgccaaggtgcaggttattgttggaatccctatcttcaacacgtcttgatgattttcctgtttcataaacccgtctgactcctggtgtgggcgcagcaacagaggattgaagtctgccaataccactttgagtagtaggatgagtgtaaggctggaaggctgcagttcttgaagatgagaagtagggagtagcagcagctaacctgattacatctaaaccggccaaatttggttcctttttacttttttagtatccggtcgctacttttgattgtgactattccggttcctcttgaaattagtttcctaaattaaaactttcggaaaaattctaaaccggatagccaaaaatcgaagtatgccaagttttggccacccataatttcgaaaatacaatttgtcaattgcaaagcatcgttgcctgagtctcccattagccattagaccatttcgattttgcatacgcttttcacaagtaaattttagaaatgaacaaaattgcaactaaactgaaatggacatctccaaatgttagaatgagttccaacttccaacacactagtttttgtgcttatggatctgttatcttcttattaagcctaataaactaccactatctaaactactataccctaccggacactgtaacaaaacctctcttaatagctcagggcagataaacatccgatacctacactgtaacaaaatctgtagacgaataagagcgcaacataatacgttttatgtcacttcttagaatgatatagtaaggcagagatcctcaccttttcccttctgggacatacacaaaaataacttctggcaacgctaacagctcaactcagcttgtattttcttcttttactacacttttaagtttacactccttctgtggattttttcgtttcgcttgaatatgatgcacaaacgcagctactataacatggagctttgggggaggcttgcttgttgaagagacattatgaccagcatcctttaaagctttagccacatgcttttgggctttctggaagtgtatattacacagtgcaggaacagtcgacgcaagtgttggttttccacaaagtaatggtcctgctggggctctgaatgtacaatggaaacaatgcagagttaggcgagaattgcttaaattatcattatatgctaattacaaaccagcatacaaacttacctatatatgaaatctaggttgtaaaaactcaaatgtgaaaggtgggttctgttt

SEQ ID NO: 3702 - DNA, 4054 bp, Arabidopsis thaliana landsberg
caggcactcctgatgacggagaccaaccctcaattcgggacgctgctgtgtagacaactacttgcagcaagcccatgacctaaaccaatacagataagataacagccaaagcaacattcaggacgttgccgtgagaaaatttctattattctgaaaatcaagctaaacataccagcgctagatgagatgtactctgcaaaagctgaggccgattaagcagtttaaggaagacaaccagaggtatctccagatcccgggaatctgtctcatgagtaactttctctttaccttttcggcttgacaactgggatagaagtgacgaatcaaaataaaacaacatgtcagcaacagccgaatgatttgtagccaagtacgtcaaaacctcaagcacccgacggaacactaaaggaggaagacctgtgttaagagcaaagaaagtcagtcagtgctctggacgcttgcgagaatagcaaacaaagactttcggtagttattactaccattcaacagctgggatcgaccataaacaacatttaattgacagccatagagtctttgcggattagttaaagccaactcgctcggtgatgtttccatctctggcctaatcatatccagtaaaagttgaaccagatttgctcttgtaaaactgtgagcacatagatttaaaagaagcctctgcagaagtccttttcccaacggctggtacattaaaataacatcattgttagaaccaacagaagtataagaaagtacttatgatacttcaattagaaaagtcaatagataagaacaaaaatcattgatttgtttagttgctagaagggggtagcgtaaaaacagaattactctaacctgtgcaagtcgtaatagcctgattagtgatttcaaggcatcagcattcacaagagggtctccttcaatctcttttactttcaagccatctgcagaagatgaaacagccctctgaccaatagtgactccaacacccctgtccatccccgtcagcctattgtatcccaaaccattcctccgattattcagcctgtgactacttccaaaaacactactacgagcttgatagtgactcattgctcggtctctgagcatctgggcttccgcaagtaaaggagaaggcaaagctgccaaaactgcttctgaagaagttaagagaacctgaaaatagcatatttcagattgttataaacatttgacaattcaaattacctaattcaattaaagagatacaaacctcttctcgtaaatcagcaggtagagtagcaataattgaagcattatccatatcaactggctgtccttgtgactgctgtaacatcctttgcgccctttgttgagcaagaacctctctttggatctctgggggaagcgcagccaaaaattcaggatctatgtcgtctactggaggtggttcataagttggtggctggacggactgagcttgctgagaagcaaggacttctgcccgcaaatcttcagggagcgcttccaaaaatgtaggatcgatggcattcacttcaggtgccctaccatccaagctaccttcctcaacttgttcatcattcctcacattttctgtagcttccatggacgaaagctcattgttgtcaccgtccaaaggtgaaggttgtacactttgatttccctctgcaccatcactactcatatcaacatcaacacttggttgaaaattagaatcgggatcatctactggaggagctatagctgttacagacacattttgaatactggaagtatcaggttgaccctgagcagtggagataagatgcacagcttcgtggtctacttgatcaataggcgcaccatcaccttccccaacttccattctatcaatctcatttggtgtactgttcaaaggaagaggctgcataacttcaagctgctgcagactttcacctgtatcttggctgacaggagaagctagattagcttgaccttgagcgaaactttcagccactacatcaggtggattattaacattttcattgttatttagtagttcacgttcttcactttgttgaccaccttcgttaccatcacccaaaacagtttcacttccaacagatggaggaacatccgggtgcagctgctcttggatttctgtggtattagtctccctttcaacaacagtatttactggagcagaagcacgcaagttggaaataaaatgttcttctatcaactgggcaattgaagcagataggctactaggctgagggtgacctacatcagtccaccgactatcaccaacccctcttcttgatgaatccatacccacaacagaataatcagttaaaggaggaggtgccccaccacctcctaaacgatcactaaaaggatcaactggtacttgatcaaatggtagaaccggtgaatcaaacatgtaaaattgtgctacgtcgtagctgccagcttctgaatgcctggatatactgccagcacttgctgaaactgacgctgtattgccagtttgtgaaggcctggagaagagcggatgctgaaaaccatgtacttctgagccagatcgatcaaaagaagatctgcctgtttgacgtctacgctcgaagcccaaggatctccgcagagcaaacagatcgtctacattcacaccttcaaacggctcagcagtaatatcgtcaataaaaccatttccaccaccagatcgcccaacaatctggaagtgatccagcccatcaagagcttccctccaccgcacttctattacacgagtctcgtggaaatcatcctcatcttcatccaccatgtcatcattatattcatcctcatcatcctcatcttcatcaaccatgtcatcattatattcatcctcatcttcctcatcttcatcaaccatgtcatcattatattcatctccaaggccagtatcttcagggtcttcaacatcagttccagcaatagacataacaccagctccatcttccactgaatctgcatcttcatcatctccttcatcatcctctccttcatcgcccatgtcatcatctacatcatcgtcagccctatcttcaacatgaaaactcatttcgatttgatcaccttcaatctcttctcgcatgaaatccatctgaataggttcaggcagtattgtctcatcgccttctatcctcatctcctgaagcatagcctgggtttgactagaacccctttcacctgcgctttgagaggaaacttgagcctgctcctgtccattacctgctgcatctgttacttgctgtagactgctattattttgattcagctcatcagcttcagtctcagttgaatttccatgactatcatgtctctcatcagagtctctgttttttttctcgtttggtacttctgattttagctgctcggcagcatttgcagcccttgtcagtgtctcgagagacttgagaataagagtgacaagctttggagcatcagggtggtcaagatcaatcacgtgaaggatgctggtcaaacactggatagttcccccgtccatcatgctctttgcaacgtcaggtgaacagccacaaccagggaaattgcttgaagatgaagatgaattcttcgtcaagatcgagtaaaccaggttagcaaaagcaagaactcttttatcaggtaatagaacgcttttactagaactccttcccaaggaagcaaatacgcataaaaccctcgaaagctcattgattattcttttacgcccttcattagaacgactgcacaaaacaacaagaaaccaggaagccttttcagacagtttctccttccattcttcaggtccaacaaacttttcgagagatataggaagcaatcgatgaatgacatggtaaattaaccctccatttccaggtgaatcatcaggtagattggatcctcgaagttgagatatttctgtatcccgtctcagtatgacactggtcccatgtgagtacatgagaacaatatcactaaacaaaatcaaaataaatgttaccctggccagttcttcagatttttcaggtatttctgctttatccgggtc

SEQ ID NO: 3703 - DNA, 3871 bp, Arabidopsis thaliana landsberg
tatctttcagtacattatacacttcaatagcttcctctaccaacccttcttcactaagacacttcacgtattgctctaataacgtaggctcaggtttaaagccagtggtatcgagaaaactcttcgcagctttcacggcttttccatccaaaagggcaccaaagagaatattcaaagaaacaggaccaggtgtgtaatcataattggaacacaaccaccggaaaaaccacagagaaaacagaacattgttctgagatttcaacagttcgccgaaaaacagaggatcagcgaaatcaaacgaaggaaaatcagataccagagtttgttgccatctctgtctctctctcatgatggtagacacagttttagccatctccgtataactcacagccgatttttgctcatcgggcttggattcacaatcacgagactcgacagttagactccgtatctgggtattagggttctttcgagttcggtttctaaagaagctaatcaaatacgactgacctctactcatggcgtatcactaactcaaaaaactcgtgggcaaactcgaaatcaagctccaaagagagccagaagcaaattgtagaagaaaggaggtgaattttttattccgggaaaagaaagtcgaatacttatcaccggaaccctagatttggatctttctgtgtcatttccaggagatgatgaaaaaggtttggactttggagtaaataagaataattaaacaaagtttattacagcatcaaatataatttgtcaataatgttatgacgacatcaatttttagattggtcttgctttaaaaaaaaaaaaaaaagaggtcaatttgacggataaaaaaaggtgcttgctttgctttagcttcttcttcttctctctctgtatctatctatctatctatcgtcttcgctgaaatccctaattaatttggttcctaccaccctcaatttcccgcgcaaagagaatgtggaaggtcatgaaatgaatccttttagtaaattccaatcgacgacatctagctgaaagtttcaagctttctcgcaatctccgtcctttaccgattcgtttggtctttggtggtcgcttcgacgagaatggagaggtagttttctgatttttgtttctatttatttccctgaatttcatatctccgttcttgtgttcgttggcttcaattagataagtgtacttagatttcgaatcttcttgtaaagcttcaagttttgaaaattgttatgttttcaattgcagtgtagatactgagcttactagtttcaacaatatggttgctaaatcatcatatcctgtacggattttgcatcacaacaatggtattagtgaagatgaagaaggaggttcaggagttgaaccttatgtgggtctagaattcgatactgcagaggaagctcgtgagttctacaacgcttacgctgctaggacggggtttaaggttaggactggtcagttgtatagatcaagaactgatggtacggtttcgtctaggaggtttgtttgttcgaaagaaggttttcagctgaattcgagaactggatgtaccgcgtttattcgtgtgcagagacgtgatacagggaaatgggttcttgaccagatacaaaaagagcataaccatgagcttggaggtgaaggtagtgttgaggaaacgactccgcgaccttcgagagctccagctcctacaaagctaggtgttactgtcaatccacatagacccaaaatgaaagttgttgatgagtctgatagagaaacacggtcctgccctggtggttttaagcggtttaaaggtggtggtggtgaaggagaagtgagtgatgatcatcatcaaacacagcaagctaaagcggttacgggtactgagccgtatgcagggttggagtttggttcagctaatgaagcgtgccagttttatcaggcgtatgcggaagttgttgggtttagagttcgtataggtcagttgtttcgatccaaagttgacggttcgatcacatcaagacggtttgtttgttcaagagaagggtttcagcatccttcaagaatgggttgtggagcttacatgaggattaaaagacaagactctggtggttggattgttgaccgtctcaataaagatcataatcatgaccttgaaccagggaagaagaatgacgctggtatgaaaaagataccggacgatgggacaggaggattggattctgttgatcttattgaactaaacgacttcggcaacaaccatatcaagaaaactcgagaaaacaggattggtaaagaatggtatccgctgcttctcgattatttccagtctagacaaaccgaagacatgggattcttttacgctgtcgaattggatgtcaataatggaagttgcatgagcattttctgggcggatagccgagcaagatttgcttgcagtcagtttggtgattccgttgttttcgatacttcatacagaaaaggaagctactctgttccgtttgctactatcatcggttttaaccatcataggcaacccgtacttcttggttgtgctatggttgctgacgagtctaaagaggctttcttatggttgttccagacatggcttcgtgccatgtcgggtcgtcgtcctagatccattgtagctgatcaagatttgcctatccagcaagctttggtccaagtctttcccggggcacatcatcggtactcagcttggcaaattagggaaaaagagcgggaaaacctcataccgtttccaagcgagtttaagtatgaatatgagaaatgtatataccagactcagacaatagtcgagtttgactcagtttggagcgctctcatcaacaaatatggtcttagagacgatgtttggctcagagaaatctacgaacaacgagagaattgggttcccgcgtatctaagagcaagtttcttcgctggaatcccaataaacggaaccattgagcccttttttggtgcttcacttgacgctctaacgcctctcagagaattcatttctcgatatgaacaagcactcgagcagagaagggaagaggaaagaaaagaggatttcaattcttacaacttgcagccgtttctacagacaaaagaaccggtggaagaacaatgcagaagactctacacgcttaccgtcttcagaatcttccagaacgagctcgtccaatcttacaattatctctgtttaaagacttatgaagaaggagcaatcagtaggttcttggtgaggaaatgtgggaacgagagtgagaaacacgccgtgactttcagtgcgtcgaatctcaattcgagttgcagctgtcaaatgtttgagcacgaaggacttctgtgtcgacatatcttaaaagtgtttaatctgctggacataagagagctcccgtctcggtatatactgcaccgatggaccaagaacgcagagtttgggtttgtgcgtgatatggaatcaggcgtgagtgctcaggatctcaaggccttgatggtttggagtttgagggaagctgcttctaagtacatagagtttgggacatcgtctctggagaagtataagcttgcttatgaaattatgcgtgagggtgggaagaaactttgttggcagagatgatgaactcggcttgaccatgtaagatcaatcttcttcattgatgtctgaaattaaagatcatccgtatcatgtctgaaagttgttgaagattctagtgtgagaaatgaaagaactaaagaggttgttatcgttgctgtaggtgtttttgctttacccttgaagaagataaagtcttggtcgccgttacttaatcttaacctttttgataacatcgtcgatgcaagaggtggtggtggaggtgggagttttgtg

SEQ ID NO: 3704 - DNA, 402 bp, Arabidopsis thaliana landsberg
aaaccgaagcatgcctataaaagggtaagcttaatgtccatttggaatttaggtgcaagggatagacgccttactaaacacgtgccatactcgcacaatgcacctacacatccttaatctattaagcattacataaccaatttcttaacattcattaagcacaacaggatcaagcaatgctggtataactcacttggtttggacttagctaaaacaaaaatggccctctaatggttggcgagtaacagggactctaaagaaaagattgagcttcatagaatgctaaggtaaagccaacggacatatacagaagagactctatctacccaagattagtatgatagctcaaaatgatccatccatagatgtctaacgaccctttctcatctttttcttttggtc

SEQ ID NO: 3705 - DNA, 2966 bp, Arabidopsis thaliana landsberg
caaaaatatcatactacaattattgatataaggacaattactgatcatattagattctaaaaatagtaactgacttttgttttatttctgcttaaaacattcattttatttttaatggatggtaaaaagagtcagggctgctttgataaagcaacttgtaaccatcatataagaaaagaaaaggtaaactaaaaaacataaagagaaaaacgaaaagaaattgacctttttcaaggttaaaaaaaaaagattaagaagaaggttgtaacatgtcacaaaagtagttttttttttctttctttttttgttgctgttattacatgtaacttttggtaataaaattgcttgatgaagaatacatgatatacaacaataatctcgaagttacactttcttgcacatttcctcttgcgttatttagcttatttgcagactttctctccactcctttgccaatttttgtttccctatctctcctctcttttctctatctctctctatatatatacacacatccatatgttcatagaaagaatgtaaaatcacgctttactcgttttctctgcatcatcaacaactcctcaagtcattacgcactattcaaaaactaaaaaagaaagaaagaaagatcgaaaaagtgaaattttcgattacggtttgagtaggaaacgagtaaacacaacaaaaggttcataatggattcaagaaagttcgaagaagacgaagatcgaagcattcgtttacaggtttttatcacattaatttcttactttgtctctaaactgtttttcatttcaattagattttcttgaaaacttttaatcaatgcttctacattttcacttaatatcgtcctcttcatatttcttaagattaaaatgaatagtatctcaatttaaagttcctatcaaatacttgtaaactttttcggttttgtttaatcaatggagtagtagttttaacaattgaattttctaaaaattatgtttgtctttgtataggtctcggagcttcaaaaattggaggaagctataggctcaaccgacaccgtttttgatctaagaagcagtatcgagaaaggcgacagcggcgaaaccgcagacgcagcttctatttcctccgcgaccgcgtttcgtagaaaatcaacagtcccagctccggagaagaagctaacgctattcgctctacaactcgcgattcttgagaaaaccgccactggaatcggaaccctagggtttatctgggccacggtggttcttctcggcggcttcgcaatcacactcgacggttccgatttctggttcatcaccatcattctcctaatcgaaggtgctcgaatcttcagcagaagtcacgagctcgagtggcaacaccaagccacgtggaccgtcgccggcgtcggaatcagtagctttcgcgctctccgatcaagctcagcctcgcttttcaaaaatctaaaacgaatcaggttcaattttgcataaatcgatcagcctcgcttctaacatttgagtaacgatcgtctatgtttctctgcagtgattcaatcttcaagccacgatcgagagaagcgacggcaagagactgcgtcgttccagagacgacgttagagacatggaagaactcagacgtacctcttcttccatacgcgagatggttcttcatttccagtacagtgagtcgtcttctttactggctccagcttctctctgccacggcttgtgtagctctatcttcttacaagcttattaggcataactatggagatgttcacaaaggagatacggataagaggaatagacagtctgctctcaatatattctactcgctcgcctttgctgaggcgttgttgtttcttgtggagaaagtttattgggaatggcaagtcagtgtttgtaatttgcttgagaatgtgactagagaatgtgagtttggggttagtggtttggtttcgatcaagaggtttttctatgattcgtattccaagtgtgtcaatgggagtatatttgatggtttgaagatggatatagtgagctttggtatggagcttttgaactcgaactcttctgatgaacagcttattggagtgaggattcttaggcagttttcagtgactgaacggtactcggaggatacacttgagaagatcggaatcaactttcccgttattgaaaggtttggtttttactaatgaaaatattagattttacagagaaatgagttgaggaagttttgtaattgttgctaactttttgtttaactaggttggtggagatgttgaactggaaagatctgcaagaggaagagattaggagatcagccgctgagatactatcgaaactagctggcaaaaagcagaattctttgagagtcgctgggatttctggtgcaatggaatcgatttcatcgttgttagagaacacgagatcatcaggtgaagctcctgatgagattggagagaaaaaggtgttccatgaccataatctacactacgatttctggagattcaacaatttgggccttctaattctgaagaaattagccaaggatcatgacaactgtggaaaactcggcaacacgagaggtcttcttccgaaaataattgatttcacacacgcggatgaaaatctgttgagggatgaaaacgcagacatagcgaggtcacgggttctgacactgaaacggtcgctacagctggtgaaaatgttagccagcacaacagggaacacagggaagtgcctccggagagagatctctgagattgtattcacagttagcaatgtgagggatgtactgaaacacggggcgagatacccaaagctgcagaagctcgggattgggatattgaccaaccttgcacttgaggccgaagctcgggagagaattggcggaactggtggtgttctgaaagagttgttcaacattttctttaaacgggaaacacgcggagatgaagggaatgaggg

SEQ ID NO: 3706 - DNA, 1970 bp, Arabidopsis thaliana landsberg
ttgaagttccttcgatcggtgtgaacgctgcgagagtgttgagaaacatgtgcttatactccggggatgaatgctttcatgacctgaagttcgttaaagcagcagcaccaacggttagtatatacacttacgattgaaaaacttaggtacaactcgaatctagtataactattttttcattttgttgcaggtcttgaaatcaataacatcagaagacaacaaattacaggaagtgatggtgggattagcagcacaagtgtttagattcatgagctcaaaagaatcaagctatgttttcatggattcaggcatcaagagacaagaactggcaaactcgttagtctcaattctgaaaaagaacgacaagcccgcgattaaggttccaagaatcaggaggtttgtaattgagcttgcgatttggatgatggaagatgatgagttggaggataatgtagcattgtttagagagatgggtctagagaaagagcttgagaaggttctagaaactacggctgagcttgagaactttgatgttttctccggtactgttggactaagccgtcatatcataactgtccattcactagcagagctagccttggaaattcttagaggataaatgaagaatacacatcatcctgcaaaatatcttcaaagctctgcattagagctgcaaatatgactcattgttttgtaagaagaatgaataaacaatgtacaaatgtgatggttatggaatatattctttaatttatttgattaaattctgcaagaaaggtctaaacgaaaattgaagcttaggatttgattcttagtccaaaattaaggacaaagtaaagaattgaaaacattgctttcagcagaaggaacatctattcctatgaactggataaatataaatatatacaaacatgacacacacagagatcttgtgatcatcccaagacaaaaccagagaaaaagaccagtctggttttttaagaagtctttatatttttttttttgtcggagaatcttataagcatggcttcaggaggatcaaagtcggcagctttcatgcttctgatgctgaatcttggtctctatttcgtcatcaccatcatcgcttcttgggctgttaatcacggcatcgagagaactcgcgagtctggtaactaacaaagataacaactgattaagtaacaattaatccaacgttagaaaatgtcatcatcaatcttctttttgtggtattttgcagcgtcgacactgtcacttccggcgaagatattcccgatatacttcccggtggggaacatggcgaccggttttttcgtaatattcacgttaatcgccggcgtcgtcggaatggccacatcactcaccggaatcatcaacgttcttcaatgggactctccgaatctccactccgccgcggcttcctctctaatctcctggtctctcactctcctcgccatggggtaaacaaacttaaccatccggtttttattaaattaaaccgggttttaatccggttcagtttcttttcattctccttaaaccaaatctaaaccgatatgatgttgatacagattggcctgcaaggagatcaacataggctggaccgaagccaatctagtgagctttttactttctgatttaaaatttaattctaagaaactgaatttgtaaactgtttttctacggatacttatcatgttttgtgttttgttgattcttttttgcagagaactcttgaagttctgactataattgtgagtgctactcagttgttgtgcaccggagctattcatgctggagtcggagaaacagtcgcctccggagaaaggcctcatcttgggagagtttgagtttcatgattcttcttaaaagcggttttacatttgcttcagatcgtgtaatttgtgtgttgcgtcttgtgtgtgtttattcttttgtttcgcatgattcttatgatcatgtacaaatga

SEQ ID NO: 3707 - DNA, 3976 bp, Arabidopsis thaliana landsberg
agatagaatctactgctagagctgctgcaggtaagaaacttgttctgatgaaaagcagactactgatattatggacagtagtgcacctgcaccagcgtcggatgtttcagttgttggcgaagcatcggcttgggacgagtcacagcttgtggcgagattgacatcaactttcatgagtttgtcagaaagactttctggctttctcagtgaaggtcagtctgtgttcatgtctgctaagttgtttgacaaaattgcaatgcttgtagatgatacacagctgtacgagcgctttaatgatataagatcgaagcttttgagtttgatagagtcaaagcaaaactcaggacttgttaaccaagtcagagatttggctcagcgccttgtgaatcttttcgacgatggtcaaaggtctgtctcgcctccgctgattgatttacaagagcgcctcactgcgaccatagaagattttcagaagcaactggatttgatagttaaatatgactgggattttgatcactacctggagaagatgtccctgctgcggtgaggcaatgttgatcttgctgaatactttgcataatcgtgtctgaattttgtttgaattgggtgtccgtctttggtttgctatagattgagtatgtaagagcacaaagcaagcccaaggacggcaaactattcgcaattgggcactccatggggggtatcctactctatgcaatgctatcacgttgtggtaagttagtattcatctttcaaacagaggctcatatattaaggccgaaattcatttcttctatattattttgttagcttttgaaggacgagaaccttccgtggcagctgtggcaactctggcatcatcggttgattacacaacctcaaattctgcactcaaattgctcatacctcttgtacgtgtcgttatgttatatcactctgcgcaggaatctttgacaagaattgatgtgccataaatatctttggtagctaatttactagatacttcttttacaggccaatcctgcagaagctctgagtgttccagttgttcctctgggtgctttgttggctgccgcttttcctctttcgacacgtcctccatatgtattatcttggcttaatgatttgatatcatcaacagatatgatgcaccctgaaatgttagaaaagcttgtcttgaataacttctgtaagtaaaaacagttgatcccatttaagtatgtgagttcttaatgtattttaagtggaaaagaaacgtatcttcattaagaaaaagaaaatgctggaacagttactattagatgcttgaatgtaccatgactttttttgcaatccgtaattgctccctttatggtgattttcaagagtttctttgttttcttacatctaggtaccatacctgcaaaactacttattcagctgacaacggcctttcgagagggaggcttacgtgatcgtagtggtaaattttactataaggatcatcttcccagaaccagtgtccctgtcttagctcttgcaggtgatcgggacttgatctgcccccctgcggctgtggaaggtatactaacataatgtttattatgaaattctgcatagatgactctagcatatacatgaaaccattcatttacccagatatgcatttcattttaaattctacattgctgttactgaattctttcgagttatgagaggctgtataaggcgtagatggattaacttttgtgatactttccacacacaccaaataaatttttaagctactcacacatgcattttcaccattatgactaattacaaatgcttgtgaatatggcagacactgttaagctgtttccggagaacttggtcacttataagttacttggagaaccagatggaccacattatgcacactatgatttggttggaggacgactggtatgtttgttccccagtcatttctaggtctcctcctctgttggaactttgttcaatgctgtatcatgtgcatgcttgtttcgtttgttaatcgtttctctgacaacttactgcaggcagtggagcaagtctatccttgcataactgaatttcttagccaccatgattccgcataagtgaaacatttcgggagtttctgttccttgcatgctatagcacatgtagattgtagacgtcgcactaaggtggtgtcgaagaagtgtgtttcagaagcgcctgttaaaaaggatgccatttccgtttaagacacgtacatttagtatctgggcaaactgtacatgagcttaggatgcagttttttcaagtcatacacctgtaaattaggaaaagcatcgaatgagatgctggaagctcttgtctactgtgatgatttcccttgttttgttatggcaacgagctttttatttgaacatttatctttagaagaactggtgtgttctcttgtactgctttgcttcttttggaggacttgagttatccatgagagcaattgtatagacatggatttatgtgtacattttctgtcttagatccattaatgacacagccctacttctcagataatgtgtgggatacatgatgtaatgatagatctgaattgtctagtattaaacaacagagctctctttcatgaaagatattgtctctccaccatcatgtaagaccatacctagttcttctctttctttgtccataaattaattcgttggattctctatggtacagaattctctagcacgacttacctatttcttttgtaacgtgtttgatgttgagtgattacaggttttgacttgagacaatgagttgtcaacactctctgataacattgagacacttcactagatagagatgtgcttgctgtgattagtatagtacaattctgacttcacgataatttcaggtttttgtgttggctaaccagatgtattgcagcgatcctccccatcccttgcacttagtggcatcagacaaacaacaaaaagaccacaaactgatcctttcctggaaggtaatgtgttgttgtcttttgtttgttccctgtctgcaatgatgtctcttaactctcctgacactcttagccttagctgcttgatataaatcaacatcattctcacctttctatgtatctgttatgtgctgaatatgtatttgttatagaaaccaacaatggactcagacccacacggtgttttcccaaattctcccaagtatcatccatattactcgcagaccacggagtttggtggcgtaatcgatttaggtctcagcctgagaaccatacaacatgagatttaccactcatctggccaaagtgagtttctttgccgtttccattagtatttccattacctttaatttcttggtaaattttttcaactctgagacggtgtttacttatgagttatgacatgtggcaaaggatattgtagtaatgaaggatacagacggaagtggggttatgtaaaggtcaccatggatggtttggtggtaggtcgcaaggtctgtgttcttgatcatggaagctattcaactcttgctcatcaactcgaggacatgtttggtaagtttttcatgggaagcttgggattcaaagatgagtaagtactataagtagtaatgttcctagtaggcttataccggatgttcattacaatctgtagggatgcagagtgtgtcgggattgaggttgttccagatggagtctgagttctgtttggtctacagagacgaagaaggtctgtggagaaatgctggggatgttccatggaagtaagctcttgatactttctttgtagattactgaaataaagcgtttacatgtgttgtgatttgtaaatgacagtgagttcatagaaagcgtggagcggctgagaatcacaagaagaaacgatgctgtacttcccttttaaattagcttctctctttcttcactctttgtaaaatttccaagtcagcttgatcggaaatgaacaaagagaaaaggtaatgt

SEQ ID NO: 3708 - DNA, 1676 bp, Arabidopsis thaliana landsberg
  unsure (1)..(1676): unsure at all n locations
gatcaagtagttattttcttgcttagtataaacatgtgtttttggacgatttttaattatacaattgagtttcagttacagtgctttccatttattcattagccaatcaaagtctttatacatcaccaaggattgagacacatttagactgnnnnnnnnnnnnnnnnnngaagttatagaaacctttgacccgaccatggaatgatgtcgaactttaaggatccaagagctcacattttaggtgtattcattcattaggcaattctaagacttttacattgtacataatcactaatgatttgagacatatggtatacgttaatttgatagatctgattccgaacctgagctattgccacactacacaaagttacaaaaaacagaactcattaactctttgcttcacattcaagaacacctttgggctcaagcaaaaaataataatcaactctgtttccttacacaagcttgcacgtgtaggaacataccatacactcacccgcaggtgattataacaaagttccctttatacccgcctttgattcttcttcttaaatctctaaacccttttgccgtctccctaaaaccctaattctcatttctggggtttcacatttcatcttcaccagaatccatcacactctctgaaatctgaaaatgattagcacagtacttcgccgatctatccttggtacgtcaaggcgtactctcgccgcttcggtgacctccactaacgcagctctatttcataaccttgctccagccgccgccacagtctccgatctagcaaatggagctactaatgtcaagtctctcccttcgaattcgagcccgtttggtgttaaagtgagagactttcatgttaaatctgtaccgtcggagtttagatcgtcgattgtttcatctgcgggattcgcggctcaagagtatgctccttcttatgagaacgatggagggattggagattcggagagtgttggtagcagcggtggtggtgatgggcttgcgatagctgatcttggtatatctccggagattgttaaagctttgaagggtaggggtattgagaaactctttcctattcaggtatatatgatcttcttctctgttccatttggttatagagatcaattaaaagtttagattttttgaactgagtttttgatgtttgtgtttggttgaatagaaagctgtgttggagccagcgatggagggtcgtgatatgattggccgtgcaaggactggaacaggaaagacacttgcttttgggattcctattattgacaaaatcatcaaattcaacgctaaacatgggtttgtgtttactgttatatataacgatcatttgtggttgagagatttgcatttcctttggttcttatgtttgtcttttgatgtgaggacagtcgtgggaagaatcctcagtgcttggttttggcaccnnnnnnnnnnnnnnnnnnnnnnnnnnnnnaagagttcagggaatctgctccaagtttggatactatttgtctctatggaggtacaccgatcgggcaacaaatgagggagcttaactatggtattgatgtggcggttggaactcctggtcgtatcatagatctgatgaaaaggggagctttgaatctatcagaggttcagtttgtggttcttgatgaagctgaccagatgcttca

SEQ ID NO: 3709 - DNA, 1290 bp, Arabidopsis thaliana landsberg
aatattgaaatgcccatctcggaaaccagcaagcgttctttccctctgactctgggatatatcaccgtgtaaagcttcacatttgaagcttctagccaatgcatatgaaaggcgatcagcatctcgttttgtttgtgtaaaaacaatgcattttcctcctttggcatgctcctgcaaggaaaattgatattattaactctttccatatacaactgacaactccgaaaaaatacacaaataacttactcagttactgaataacacaaaatttaactcatactcgtttaatagcaaagtaaggaaagcataccgttacaagaggaccaataatggatgctcttccataagaatctgctatgatagaatatgtcgtaattccatctgctagtttctgatcagaatctccaacctgaataacacatcacagttaggcaaacaaaaacatagaagcacatttcacataagaaatcacttcattaacaactctgctaactccaagatcaattattcagaattgtgagaaatttcagagggtacaagactactcacaagatcaactgtcaaaggattattcaggtacttcttagtgagagatctgatccaactcggcattgttgcagaaaacatcatactctgacgtttctcaggcaacttttccaatattatttcaacatcctcagcaaatccaacttgaagcatctgatcagcttcatccagaaccacaaactgaacttccgatagattcaaagctcctctcttcatcagatcaatgacacgatctgtagttccaaccgccacatcaacaccatagtcaagctgcctcatttgctgaccaatcggtgtacctccataaagacaaatagtatccaagctcggagcagactccctaaactccttctcaacctggcgagcaagctctcttgtcggtgccaaaaccaaacaaagcggattcctccctcgtctatcacatcaaaaaccacataaaaccccaaaaatcagtaaaccaaccagaaaacataattctctgaacctcaaatgactcagtaaacacaaacccatgtttagcgttgtatttgatgattttgtcaatgataggaatcccaaaagcaagtgtctttcccgttccagtcctagcacgaccaatcatatctcgaccctccatcgctggctccagcacagctttctactcaaaaccacaaaacttaaaacctcacttacccttcatccaaaaacatgggaacacgaaaagctgaacaatttaaaattttgatctcacaacattacatacct

SEQ ID NO: 3710 - DNA, 724 bp, Arabidopsis thaliana landsberg
tatgttgttgtagttgtgtgtttggggctgaattgaatatttttttgcagaagaaagcacatcaaagattttaggatcaaagatttgcatagcgattcggtcttttgttaacccggaaaagcaagcttggtgtcttcctcctcacactcgtaaagtcgcaatgcccgatacacgaactctgtacacggtgctaagatcgcctcacgtcgataagaagtctagagaacagtttgagatgaggttcaagaaacggtttcttgtcatcaaagctcagagtcatgagttgagcaagaagctgtttttggttaaaacgttatcgtattcttggagctcaatatgaactccagttccattgcaagacccgtttggatatgactcaagtgttaggcaacatcaatggctccaccaccaatgcttactgagatggctaaagacatcattttgtagaagtttcaagacccaaccgggtactatgcaataatttcgaaccttacggatccatgaaaccagctttgcttcacatcagatcaagtagttattttcttgcttagtataaacatgtgtttttggacgattttgaaagatacaattgagtttcagttacagtgctttccatttattcattagccaatcaaagtctttatacatcaccaaggattgagacacatttagactgctaaaggtgtcattttgagaagttatagggggatcctctagagtcgac

SEQ ID NO: 3711 - DNA, 569 bp, Arabidopsis thaliana landsberg
gaacgcataccgaagctcccaaaaccagaacggtcagaatcaccagaataacggttgcttgatccgcctgaacgcccaccaccataaccaccactgctgccaccataaccaccaccgcctgaacgaccaccaaagcttgaaccacgatccctcatgcctcctccaaaggaaccaccggatcgagaacctattccttcaaacatgcttgcgcttccacgttccacagcaatgctagggagctgaattcaaaacccaatggatacaaacattgacttcatacattcaggaaaagaaacaaagaagtaaaaagaaagtcagattatctaacctcagtgaatcggctcccaacttctctctcaattatttttacagccctggattgatcttgactgtagatcagaatagcacttcctttctttccagcccgacccgttcgcccggttcgatggacaaatgtctccgtgttattaggaagctcatagtgaatgatctattcacaatcacaacacggatatataggtttagttagatgagaaccaaaactcgttaagagcaagaaaagtgtagtt

SEQ ID NO: 3712 - DNA, 952 bp, Arabidopsis thaliana landsberg
tggacgaagagatcaattttactgtgcctagtccagaggacattgatgcagatgctgaaggatcgtggctacttaatcgacggttctgaaattacaatgaccctagaagagtttattgagaaatatggcgacaatatgaaaaggagtctcttgttactctcaaagctaagaaaaatgatgacaatgataaggtaatgtataattaagtatgatgtctctcaatgtatttatacctataagaagatatggtttgcattgtataaaactgctaaaacgcgtaatttcgtgtgtttgatctcgtcttgagttgttttgtagctatatattttcttccccaatgcttccaaagttggaattgcggagatgaagaaatacatagaccagttaaaatcggcaaacgttttcagagcaattttagtggtgcaagatataaaggcattttctcgccaggctctggtttttttaggtgcggtctatcccaatatttcatattgaagttttccaggtaacaaaaaaaacaaacactttttgatttttgttctcttgatcatcacaaaagcctaaaccatgattgagtactgttggttcaggagaaggaattgatagtgaacgttaaggaacatgtttttgttcctgagcatcaagctcttactactgaagagaagcaaaagtttctagagagaaagagaaccaggtttgtagtttttttgcacatagaaataaagtattgttattagttttgggtgattaaagatttggaacctgttggtgttgttagcttccaaggattcacgtgactgatccaattgcgagatactttggactaaaacgtggcgaagtcgtcaagatctctcgactgagtgaaacatctggtcgttatattacttatcgctatgttatataaccaaaaccgttgacaatgatttatttatgaccttgtttgggaagcgtt

SEQ ID NO: 3713 - DNA, 2530 bp, Arabidopsis thaliana landsberg
  unsure (1)..(2530): unsure at all n locations
gctcaggaagcattggacctgtcaagagaactttcttttgaaattggttttcgatgaaatcgcagaactttccttccatttcttggcatgtccttatcgaaatgacatcgcagttcttaagtcctatcatgatccgttcgtaaaaactagttccatctccaaacggataggagaggaacgacaaactgttggtttcgtgtccccgaagcaacaccttggaggaagggtatcccggtggagtactacccaagtcatcttgactacgaccagggacgaacgaaatagctacacatgctgcagaaatcgttatgaaattgacactcttgactccatactctctagctatttccggaatccagtgagcaaaatcgaagaaaatcagatccggtttaccaacagaaactgcttctttgacctgattacatgtccgatccatagccgaggcgagaaaactgcctaacgagatagggatatccgaggttgtctcagcaccatcagggaggccatctacagatgggatggtaagagtgtgaaagacaatgcagtctgggaagagattgagaggttcaagttgcttcaatgctttcttggggagcaagaaagttattttgtggcctttctcggctagtttgttagccagatgcaaaaatgcagtcatgtgaccaaaaccgaaccatgggaacataaaagcatgaaactttgatcccatatctgttcttatgttcctctgttttttcttctcagcatgaagttcttagagtttttatgtttctgtttaggagaattcagttgcaatacctaaagtttaggaaagtaccggtatgaattgaatgattcaagtctgttacgaatatgccaaatctttagttttgattaggcaactctgtagtttccttttgtttttttaagttccggaaattactccggaaattgcaaagatcatgacattcaaggttgtttccactttctaatagggaaaatggtcagttaaatgctgaacttatccatttttgccaaaacaaatacaaactttttaataagtacgtgtacatgtgttgacttataaaaaaaatcaacaattcaaacgttaaacttaatgactgttagtctgaaaacgtccgtcgttctacaaatagagactcgaccttttctctctcttttcctctttctccttctaagggcatctccaaggctaaacaccattttggtgttcaaattacaccatttttagcactaaaacttatgttctctccaaccataacaccaaaaatcacactaaaagaagaatttactattatattatttatttaaaatattttttttattatttaatagttttgattagtatttattattagtatagaattacataacattataaaaatagtacattgaaatatatatttaaaaatacataaaattgtaactattttgagtattttcatacataataatataaaaatatcataattaaataaactatttcaagagatataatatattaatgtatacattcatttttatattttatatctattaatcatttgtaattttatatctgttaattgaatttttattgatataataagtgaatagtgtttagagttgtgaatagtatcacaccaaatttgatgtaacactgtagcattacactaaaatggtgtgaattttagagttccattggagagcttttagtgcaaaaattacactaaaatggtgttttagagtcccattggagttggcctaaatccctaattcctaatctcatctcatccaccctaattatgctgcttgtcagcttgtgttatcattcgcaaaaaagagaagattcatgattatgttgatgagtatttctaatatgccatgtctacaattgcaaataagttcccattattatttcttcttcttaataaaaactgttttacaatttagacagagaattgaaaacatgaatttgaataattataactagttcttaaataggcataagactaatgaacaagcgtaacgacaagatagttcttgtgtatacctcacgaagaagtggaatctgcaacgaaatccacaattgacgcagagaggtcgagtagcctcgttgttgggacatatttcaacaccagaagttaggtgtcctagcttcaaataatatatatctccaagtacacaatcaatatggagacttagcccacactcctcacaagtatagtaacatacactcggatctgtcttcgtctcacaaatatcacaccacaagtcaccgcttgagtttccaataccttgacatagtgacaaaaaatgatcatcacacctgtgttttactttccttggtaaagtagcgcacctcatgcataaagagtactcctcacaaaccgtacagtttaagggattattctctataggtcttttaaagagtgacactgattgttgctttccaagtaaagtatagggatgttgatgcagtcatggtgaacggttncgatacaactacaccgacatcgtacgaacactatacctttgcatcttatgatga

SEQ ID NO: 3714 - DNA, 1431 bp, Arabidopsis thaliana landsberg
  unsure (1)..(1431): unsure at all n locations
tttcttgtttatattatttcgcaagccactctctttctgtaaagtcttccattttaatctctcaattgagataaagatgtaaactttcccattgttacgagtcagagttacttcacttcatacttaggattctgcaaaactagatctttgcattgaaaggtacttgaacaaattgataattcatcttctgttcaagttaacaaaagaatatactgactttatatattgggtaaaaatataagaaagagaagtgagctttgaaacaatgtagcattttgttcagttaagtaggannnnnnnnnnnnnnnnnnnnnnnnnnnnnnttcatcagctgctagcttcgtgcttcaatcttgagcggtgttgttctccgaatatcaaacctgtctacgaatttcaatggaaatgttgtctcgtttctgatcctcttgatcttaggacttaacaatcccctgtgaccaaacccatacagtttgagcacttgattatccgcaaagttgaatgctcgctccatactcttcaagcaacgttcaaccgcgtaatcagcataactcccacacggtttgcatccaacaaagtgagtaataaaaggccatctttcatctcccaatccgggatggtacttctccatcatctcctcatacttatccactaaaccttcccaaaacccatgaagatagtactgattctccacaaacactttctccatccacgtctccttctgcgaaagcagcagatagatcaatgcagactgatcatccgcttcgaaagccggtcttcctttaagattcgcggtgagaatcttcccagcttcttcccgaataggtcctttaggtcccattggagcccaagcatccaacaaatccaaagaccattgacagttcctaaacaagaagctaccagtattcaaagcaatccaagacttctgatcaaacaacaaatcaggatatccatgaataaccaagttatggtaatcatatctagacaaaggaatctcaaacaccatgtcagtgaacaaagcatcactgtccatccaccaaatccattcaatttcaggatgagacaacatcaatctcctgatcattggaagctttgcccaatacccagcaagctccttgtctaaatgagccatgttatacacaatctcaatcccatgaatcctacaataatcaatcttgttcttcaccgatttcagcaggtaatgatcaccaatagggttgtcacaaggttttggaggcgaacctgttaaaagcaaaaccttagctttaccattgatgaaactggggaaatctgggttttgcgttaaccaaagtttccgtttttgatcccagttagtgatcttgggtccgagagtgtacgtcatgttgaggtcaagatccgaatcaggtggctcgtttgagtcggtaggatccgaatcggatcggatctcag

SEQ ID NO: 3715 - DNA, 3864 bp, Arabidopsis thaliana landsberg
  unsure (1)..(3864): unsure at all n locations
taacctttaaactacattgtaaaacctttcctttcaaataacttttaaagaaacatttacaattacctctggttgtctttctactccttcatcttcttgttttttttcttcatcttcctcagatctctgattattcttttcctccattctaatgtccaaaatcctctcaatcagctcgactctcttgttaagatcttcaaggattgtcaaaatcctgtcaagcttctcgctatcagatattttgttattgattttgttttgacctacttcttcaagggcagcacaaacatcaacgcatcttgtattccattcagttttcttcaatctgtagcccatattaacaagtcccaaaataggttggaattctgtgtcgtctgtgtggaaatcaggaactaaagacttgaattcatctgcgaagatacaataacattacaaatcttgagaaagcagaacttcaaatctaaaaaccatttaaagaattctgtaaatagacaaaagcttacctcagaaacatcatttacaaggtttacgatcttgaaaaactctagagtagtagtgcttttccacttcaatatcaatggatattcagattggaattccttatctttaactccatatgctgcaccaaatgctggaactgcgctcaacacccatattgttagcgctagtccaaatcctctcaaatcatatttctcttttgcccaagttttctcgtccattctcagaattgaatttgatagaacactgaatgcttcttttaccccacggttgggctgtgtacatatcaaaatcagaagcatgctgcaatcttggcaaaggtatcttctcttttccatatggtgtcaaaagaattccttcagtcaacactactgcagcaagacacaacttttcttcatcttcaacagcaggttcaccttccttaggttttaaaaacaatcgatcttcgagatcaccaagagtataggatcctttactagcccaaaagtatagttcttttacaggatcttttccctttcgtcgaagttccctatgaacaggttcacattgaattcctgtatgaacaaaagacagtgtagagactattattacaggttttatagtaaatactttaaaaacgattgtaaatcatgtttaacacttttaaaagcttttaaaatcccttataaatcattcaatgccacttacttatgctttaaaaacgattgtaaaccatgcagacacttttaaaatcccttgtaaatcattatatgacacttacttatgctttaaaaacgattgtaaatcatgtttaacccttctaaaagcttttaaaattccttgtaaatcattctgttcaacttacttatgcttaaaaaacgattgctaatcatgtttaacccttagaaaaggttttaaaatcccttgtaaatattctatgccactttacttatgttttaaaatcgattgtaaactatgcaaacacttctaaaatcccttgtaaatcgttttaagacacttacttatgcttttaaaatcccttgtaaacgtgtttaacacttctttaagcttttaaaatcccttgtaaattattctatgctagttacttatgcctaaaaactggtgtaaaccatgcataccctttttaaaatcccttgtaaatcattctatgccacttacttatgctttaaaagtgattgcaaataatgttttacccttttataagcttttaaaatcctttatcaatcattccaataccacttacttatacttaaaaaaaatattgtcaaccatgctaaccctttttaaaaatccttgtaaatcattttatgtcacttacttatgctttaaaaacgattgtaaatcatattttacccttttataagtttttaaaatcccttgtaaatcagtcaatgtcacttacttatactaaaaaaccattgtagaccatgttaaccctttttaaatcccttgtaaatcattctatgccacttacttatgctttaaaacgattgtaaatcatgttttacccttttataagcttttaaaattccttgtaaatcattcaatgccacttacttatgcttaaaaacaattgtaaatcttgtaaaactattgtaaaaagttttaaaatgatttacaaaggtttaaaaaagggttttaaagtatttacttatgtttttaaagactttataaagattttaaaaggttttaaaatgatttacaagggtttttaccaactacgaaagcttttaaaaaactttacaaagtttttttaaagagtttttaaaaattttacaaggatttttaaaagcatttttttggctgggaaaaaatttcacgagaaaaaattttggcggaaaaatatttttttggcgggaaaaaaagtttggcggaaatttttttttggcgggaaaaataaattttggctccaaaaattcggcgggaaactttcagtttccaattacatgttcttattagatgagggtaatttggtcattctgttcaaggaaatggataattttaaaaatgaacaatgtaaaagggtattgtttcaaaagggtagtaaaaaaaaggtagttttgcaaatctcccttctaagttaggccaaaaattagatcctctaatacaaagaaaacttgtttcttaccaaaacaacttgtatacaaattttacacatttacttaaaactacatatgttgtatttattataaaaataacatttttaaacaaagttaatccaatgcagcattatatccaaatagtaaaaacattgaaaaatattatagcattacttttatactatactatttcttatataattcaaacaaaatatacaatttaatttatacaaaatattaatgtccgtgctgtatagcacgggttataatctagttgattgtaaaatcaaagtactatatagaattcagtaaaaaaatagtctacacataagtccacagtgacatgaaactgttacggtcttgtcaaatctaaatctttagtccaacattataaaatggaaaagatataatatattatttctacacaaaactacacatgtatataacaaagaaaatgtacgatgtaatttacataactctcgattgatcttttaaaaaaggtaaaagcatgattgctcaagtggaaaaaaaaaaaaaaaaaaaaaggcatgattgctcaaaagaacggctctctttgtaatgttacagaatgttgatagagacaattactaggttccctttcattatctcagaactaaatttgacaagctgttctgcatcaacaaaaaaacaattccttacgacactacatcattacatgaattaatatatgttccatatattaatatttcataaaaagtgtgacatttgtagtagcaatgtgagagaaacgaccgttagtggatctatctggaaaaaagcgaaactgctggactgcttttataaaacaaaaaaaaatcttattgtaataccgaaaataaccctgctcaccttccacggttccacacctctcgccagctnnnnnnnnnnnnnnnnnnnnnnnnnnnnnnnnnnnnnnnnnnnnnnnnnnnnnnnnnnnnnngcaatagtaccctctccttctctgacctattcacaaaattgccccgtctcttctccacacagtataagaatgctgcaccgtgacatgactctgtagtagagagagagagagagagagaggtagacaatgggagttatgaagaagtgggcgtcgctgaagaagaagaagctgctacaagaggaggaacaagtgacggctaaagaaacacagacatggcagcgattaaggaatactgtttcaacgtcgtattcgtcttcgtcttcgtcggcgaagtggaagcgagttgagataataatgctgacagag

SEQ ID NO: 3716 - DNA, 1487 bp, Arabidopsis thaliana landsberg
gctgaaaactctggcaatgaagctggaaaagccaatgcagcgtcagatgagaaggaagcagagtctatgcaggtaaaatgcaaatctaattcccaacatcttcgtatctgtttgagttgaaaaattgctcttaacattttttactttgggaaatgctgttcctatgattaatctcaaggtcatgatcaatttatcatcagtcttttgacttttgatcaagtatattttctctatgttactatgccaggttgatagcacagctacaacggtggagaagaaggttgagccagaagcaacgtttgagattctagtcaatcctgcgcgtgtagtcccttcacaggagaaatacatcaaattgatggaggatagccgatatgtaccgatgaagctagctccatcagggtttgtccttctcagagacttgcgtccgcatgagcctgaagttctgtctctgaccgatgcaccgacttcaacagcatcccctgcagtgggtgcagaagctgcaggacaagcccaacaagcagccaccacctctgctatggccatagatgacgagccacaacctccgcaggcctttgaatacgcttctccatgattttgtaatttgatcagttgccattttgttttctgttaattaaacagagaaacagttctccttttttgaacttggagactagtacttattgcattggttccgacttgttcttgtgttagtagtttctttaaatctatatattactaagagcagaaatggtaaacaactatcatttttccctaagtaaagattaatgctatataccaaaaaaaaagaaaaaaagtaaaggttaatgcttgtatgatttttctaggggaaattagataaaaatcattgcaaaaatttaaccacattgttcagtcggggaaaaataaaaatctcaggttgtcgattttgggtcaaaatagtttgtttatgctagtaggccttttttaatttatgtgggtcaattatattacgctccttgtagcccaatgggcagaataaaagtgagcccatgagtgaggcgcgtggtaggcgaactgtcaaatgaaaatatcttacccactcgcatactaagcgcgtataagactgggaaaactgccgtttttcgctaaaattaataaactgggcgcgtgtgggcgtttttttactaataaaaacgtaactggccttctatctgattacccttgtccggccttctttagtgagcccatttttgttttagttttatgtttatagaccttataaaatataaagcccatatacagttgttccagccgcagcaacaactgtatccaattaaggttagactaatacacattttcttattcaacacgctaatttaatcagatagactttgattagatactttgatcaaagagcatcttactaaataaacccacccgctatatcctcactgccgcatattaaaaaagaatcccaaagtatcatcatgcttaggtcaaaatgc

SEQ ID NO: 3717 - DNA, 1858 bp, Arabidopsis thaliana landsberg
catgagtatagagaactcgaatatcgcgcttgccatcttctcaaagaggtattctgagtcatatcggtgtttgaacgagcttgtgaagatggaagagcttgccaaggaaggaaaactcgtggtcattccagtcttctacagtgtgaaaacaaacgaagtgagaagacttgagggagagtttggaatacattttagaaacacaaaagagagatttgctatggaaccaatgatggttgaaagttgggaaaaatccttgaagtcatctactgttacagggaggattggcttgagcttggaagcacacatgtaatagaatatttaatagaactcttgttttgtagtaagatcgactttgtggtaaggtcgtctaatcagtttctttcactcattttgcaggaacgaatttgctcttgtcggtgccattgttaaagaggttacaagattactaccaaactctccaagaagaagaagaagaagaaaattagggattggagaagttttcttgagggctttgactgctacatgtatctttgctgtcttcatataccctatgcctatgcctgatgtgaactttttgaaaattggtaagttgttattaggctttccgtttttggttgttgtcttgcacaagattttatgttaatattagaaacaaaatgatgttttctcgcttctggcttgtggacgctaacactatatgtaatgttgtgacgcacatcagctatgtctatttgaatgttatctctacggttattttgtgatgtacatagtaaaccaatccatgtccacaccgcactgtgttgagagaagatggtgattatcagaatagaattactatcagctcaaatttatcatcttcaaagacgagaaatttgcatccaaggaagagtataatgtgtaaaggaaaaggagaaccgatacatgctacgataaaccaaaggatgcaattcaaacaaaaaagccaaggttccctaaatgagaagacctgcctttctcgcaatcttggacctcatttcttctcactagcattctcaagctccttctttaactgacgcgagaagtcgtcactgacatcatcatcatcccagtcatcttcccactgcaggctaacttccttcacttcctctttctccaaccaatctgccaaacataacaataaaaatatccatctttatcaattctttcaataaagctatttgttaaatctcaagactgaactaacattgcaaagcaaaatctgttaaaatcagaaactgatcctagcttaagttgaattgtacaactctcccccaagctactcaatgcccccaaataattcctaaatccaccataacctttaggccctttagctcatgaagccttgccgattaataatgcaaacataatcaccagtagtttgctcataaaactgcactattatccatcaagtttatgagaccgtagcttcatcatcataaacatatatcaaacagatccgttttcgcatcagaactacccaacttcatacaatagagactatcttagtttgtataagacagtgcagaatcaaaatttgtatttataccaaaacctaatcaatcaccaaatcagttgctaatgaaatttgctcttatctccatgaattttataaccgatgatgaatcaatttcgaaaatcaaagaagcaattagtataaaacaaaaaaatcaccttcgttgatttcaaattcctcgaactcatcgtcgtcctcgaatagatccaccttcaccacttcgacagctgccttgggttctgccgccatagttacagatgtttaagcaaatcaaccagatcgagaaaaaaacctaagaagaagatcaccaaactcgataattcctcc

SEQ ID NO: 3718 - DNA, 1837 bp, Arabidopsis thaliana landsberg
atcccgctacattctttataaactttacgcatgtcgtactttgtaagtaggaagtttttcactatgtaattcaagcttttacaaaagatcaactgaatttgcgttctttttgatcttgagtaggtgaaaaagtgggatttttcgtttgcatcgatctggaacgggatagtatggctcatgctcctcaactttttcgtgaagattgtgacagcaactgcacagagacacttgaagaagaagcaagagaaagaaatggctactttgactcattcagattgataaaatctcccacaatctttcttcctcatgctccaacatcaaaacagacactatccagatttgagttgaagggccaacaaacaaaaaatgtcttctcatcttctcatcttgtcacattgattccggtgggactgttctgtgtaggaaattgggattatgagattgcaggaggtttatttttgttcctgtgattccatagagaaggttctgtaggaacaagttctcagaaaagaaaaacgcattaattgctaatttggtactgttaccaaattaaatctagtgtaagcttattttgttctatgcttagttccaattatttgttattttttttcactgttaatatgagcaaatgagtctaccaaatacagcaaaactacaaagagataaagttatagaaactgagccccaacaaacattacagaggtaatgctacattcagatacaaaaagctcatttaaccaacttggggaacctgacgaaatatatgattgccaaagatcctctctagtcgcacttcgagctatataagaaaagctctccaaacatggccaagcagcaaaacttatgattttattcaagttcaggctcttcatactttccattgcccattcccactctccacaggaataggattgaaacaaaggatcttctgcttctgctatgagttccagttattagttccttctcatattactactgaaataatgtttcagtgccatcttttgtatccagatagttcttagcagcttatgcagatatgataaaggttgactttaggagaagtctagttcaactaacaaaaatacccagctaaaattcagtttttgagattactttatcacatagtaagaaagatattaccagaaacatgagtcaatacacaaacgaactagataatagaaatcaaaccaccagcaagagatagaaatataggtttagaaaaacacacaactaagactcgtaagagtttcgagcccattcatcacaacacgagataatagagaaaaacccaacacaaaatccaatttttaagaaacattcttcttagtattcctctccttcatcatcctcatcgtcaccaccttcagcaccgacctcttcataatccttctccaatgctgcaagatcctcacgagcctctgagaattctccttcttccataccctcaccaacataccagtgaacgaaagcacgtttggcgtacataagatcaaacttgtgatcaatacgggagaatacctcagcaacactggttgagtttgagatcatacaaacagctctctggactttagcaagatcacctcctggaacaacagttggtggctggtagttgataccacacttgaatccagtaggacaccagtcaacaaactgaatagttcgcttggtcttgatggtgccaaccgctgcgttcacatccttggggactacatcaccacggtacatcaaacagcaagccatgtactttccatgtcgcgggtcacactttgccatcatggaagcaggttcaaaggcactgttcgtgatctcagcaactgagagttgctcatggaaggcc

SEQ ID NO: 3719 - DNA, 624 bp, Arabidopsis thaliana landsberg
actccatttgaacgaagtattggctacatacaagagatgactgatgtttgtagttggatagtgttgaagtaacttcatattcgacgtgaaatccccagcgattagcctcctcctcaccagtaccagcatcgcacaacatatccccagtaagctttcctgcaacaatacgatacagaccgggtcttctttaatcaagcaaatgagtggaacagtaaactaatgtgacttctgcatctatcgatttgatttcgggtatgcatcaaggagaagatattacgatcttaccagcggaccttcagggtcgcttaagagtgcatcccatatgtgaagactgtcaaagaaactaaactcttgtgttaggaggagagtgatccacctaaatgcatagaactgtggatttacctgtaatcaaagaatctatacaatgtcagtctcaatctcagaggatccaatccactgttattatgttatggataggagaacaagaatacaaagtaagctgaggggatcattggaatttatcttccgcacaaagcagatcattaggactatagtagtagaatgacacatatggttgttgtcacaacatacagacatgagagaaagaaaaaaccaatgtcttac

SEQ ID NO: 3720 - DNA, 606 bp, Arabidopsis thaliana landsberg
  unsure (1)..(606): unsure at all n locations
tggaaggtcttctccgaggacctgactggtgcataggacgaaagcatgaagtggatccttgggtattgaaccaagttggtttggaactcagggacatggggattcaaggcaccatcgaacctcagagaagcagtcaaggaagaaataacctgagagacgagacggttgaggttggtgtaggtaggtctctcaatgttaagggagcgtctacagatgtcatagatagcttcattgtcgaggaggatggagacatcagtgtgttccaagagagagtgagtggagaggacactgttgtaaggctcaaccacagaggtagacacctgtggagatgggtaaacagtgaaacccaacttggactttttcccatagtcaacagaaagtctctcaaggagaagagatccaagaccagatccagtcccaccaccaacagcgttgaaaacaaggaatccttgaagaccagtacagttatcagcgagctttctgatccggtccaagcagagatcaacaatctctttcccaatggtgtaatgaccacgggcgacatggttagcagcgtcttctttaccactgatgagtngttcagggtggaaaagctgacggtaagta

SEQ ID NO: 3721 - DNA, 2398 bp, Arabidopsis thaliana landsberg
gatattgatggttttagggttttcttacacaaacatcgtatcaaaccatatgtttcagttgtatattactttggttttgtgaaacttaggtttaatatcgtttacagaaccaaactgccactttgtttttgttagggcattatgagggcttataattactagttaattgcagtattaacaaatctaatgtaattagtttgagtgatggatctatatagattatatctatgatttttgaatactcttttgtcgttttcttgtactatatatttatctgttttgtgttaccctcttgagtgatttctctaatcattcttttgtttgtttgttaaggtttatcgaaggcggttcttggtcaaagcccatacatctaatggagggaaatactaactggaagcctaatgaacaaggcggagaccgcgctgctgcgaataattgtattgattggagatcacaacttgagcctgaattacggcaaaaggttctttcaaaaatgtaagccattctttcatgtttctttttttggactcattgttcttatttgattattgacattcatgaaagagagataggaggttttcttggtcatgctttcgatgtgatccttgtagcttccacatgataaagattgcaacagttaaagcataagagttgtgcataaatgtttattatagttgacaaaacctaacttcaaccttttgtactttaagttttgcatattcttttaacctcattagctgcatttatgctcttcctcactagaagaatcttgttttactctcgcttctattggtaatatttggcacatatgtacatttgtttcagtatttgttcgctaaacgtagcgccttgttgtatggtttcatgtgtatataagcgaaagggacttgtaaaaagcgactcaaggacttgttttgtagctctaggtgaaaagggacttgtaaaaaagtgtagctctggtttactgttgccatcgcctttgatagctctgatttattacgcgtcatgtatttcagaaacaatgaaacatatcttccattactaataattttttaactagcgagtcttgtgggataaaatagaagagattaaaagttttgaggaacctgtcagacagaacattaacttcctctagagtatcagttgtatccaaattcttcatagtattattttgtttagccgattattgttcaaactgtcactgatatttttgttctcatctatgtgtagagttgaaaagttcaaggaaaagtttcctacagatgaagaatacaagattaacgacattgcttccaaatttgaagagaagttttatgacatagcaaccgataaggtgctaaaatacaaattctttctccatctattaacttcagaatctgaatttgatatcttactcattgtctccttgctatgtctcagaatgattaccttcggaaactcagtgaaaagctgcattatatactgagaacttacactcgagttccaggtaataagtttttggtttcaaaattacactattttagcttaataacaaacaaattacttactaactttttttttcgatgtctttatctaaactaaacatcagcttctcaagtagttatgaatcaagcgcaatctcttcccacctcgttgccatatacgcagactacaacaaaccaccaatggatacagcaaaatacacacagaaatctcaacattcctgtgtcatcttctttgccaagtcaggtacatggtaggcaacagcttcttcctccgcagcaacagcctcaacagcctcaaatgaatcaaatccgccatgggaatctacgaccttcgcacatgcagcaacaagctcagccaccgcagccgcagcatcatccgcaaagtctgttgaaacaacctattcaacagtcctttccacaatcaagttcaagccaacaaaactctcaatcactgccaagaaatcagtttccgacacaacgggtcagttctagtcatcaaaaacagatggttctgccgtcccaaagacaagaacaagagcaagtcattaatcaactgatgaatgttccaacatcacgacctaacaacagagaccaacaaggagcttttcgggtatcatcgtctcagcagaacaatactgttggcttacatgcaatggctcaacagaagaataacctccaaagtatgactagaggtcaacaagtaggacaatctcaaccaatgatgtcacaacaataccgacatcaataccccatgcagcagcatcctcagaacagaaacttacagaaacatttggattttgtacaaaacaataccaatcaatttcaagcagcatgttcgttgtgcccaacacaaaacataacagatcatcagaaccagccccatcaattacagagagcaaaatcctctaggatgt

SEQ ID NO: 3722 - DNA, 2032 bp, Arabidopsis thaliana landsberg
taggatttgcaaggacttaatccctaaaatatgtggatagagaagacttctttttagtaatagcatttagaaccttggtctggcattgggaagaaggcctgttacttatcttttaaagtaccgtgtctagtacattcatctaagacttatctgatccggtgaatgtgatggggttgaaatttttagtagctgatagtcattttgatcttcttggtgtggatatgttttcgggtgtggttaggttaagaggaacagctattggagcgaataacaggatggatttgctgtcacttgtgacaagtggtgtgaacgatgaggaaataagcagcacagaagaagacattcttgggttagttgaaggttgggaagacgatgaaactcacaacccggatatacctgccgtctcacacaagaggggtatgactgcattcgtcttcgttcctttcgaagaggtaagtaaactataaattattgtatactcttcccacctataatcttagttacattgatttgatctgaatatcttccttgatgttattaggttgacgaatcggttctgaacttgccaccggagaaaatggattactatgtcactggctaaagagacacatcgaagtttctgtacaaaaatgtatcatagaataatgttttcacgttatatttattgttacgacaaacattagtgtttgtttgttgctgtcgaattgtgaaaaacatacattttgggatttttgtttgtttacagagattacttgaaacaagctttactattgtaagataatgttttcaagtttttattatacaccaaaaggctttaaagcaggacttgatcagatgctagacttgaggttcttggaatcatcctctgagtgaaccagacgctgccacgttgggtttcgatgaagaaacgtttcctgcaaaacacgacatattttcataagaatctgattcatctcaattttttgaggaaagaagagatgtatacggaaacgtaggagcaagtggggatgatggagaaagagtgttcagaggcgtgttcgaaagcggcgacgcatagatgcgaagctaaaccaagtcctgcttttgacggcggtacgaaggttcgaaccagatccatgactttaccgtcattcttcatcttgtactctatgaaggcttcgtgatcatcagtctcgaatctatgtcttccttcgttccacacgatcttcggtttctccgtcgcgcgtccccgtcgccattttatctgttatctctctaagtctaagtccactctctttcatttcaaaccgagaattgattttaatatatcgttagtaaaccggtttaatggataaaaacgtataatcgtcgtacacgtggcaggcgatggaggcggcagagtgttttgcttgcttcgtcgtgttatttggcgtgaagtaaagagttcagagagaaaaggaagtcaaaacttcagagagaaagtggatgggggacacgaaggtagagacaatctcgaggttagctcaatggagaattgaaaattttggtccttgttctttcaaaaagtccgatcctttcaaagtcggaatttggaattggtaagcttttcatttttggtttattttggtaaattttcttcggaattttgatttttgtttgttttgggatatgatgaaggcatctgtctatagagaggaatcgctatctatcagtgaggctattcccagaactttctcgagtatctaaagagcaacctcctgttgccaaatttgttcttcgtgtctccaacgttggccccaatcgtagattctacatctctcctggtatgtcttgtctttgaattgacttttctggatttggaatttgaattctattgtcgagctcgaattaggtatttcaggaaagtgaattaccttttatgtgggaactatattcaattatgtggaatctgaaagatattaatttagatgttaatgattggctgatgattagtagtaccttatgggatggttacaactgaattaggtttgtttaagctgagagactctgttta

SEQ ID NO: 3723 - DNA, 1414 bp, Arabidopsis thaliana landsberg
  unsure (1)..(1414): unsure at all n locations
ggcctcatcacttccaagtatcctcatatcaaaggtgttaatttcgatttgacttatgttttaacccatgctcctttttggccagggacaaaaactactaactatatttgatgtgctagtactactaactaatgtatgtacctcctaaaccttgtgttttggttgattatactaatgataggagttaagcatgtctccggagacatgtttgttgaagttccaaagggagatgcaatctttatgaaagtaagttaacaaatatattaacatagatnaaatttaactaaatatccattgtttccgaaatataatatgggtaagttattgacagcggatactacatgattggtgagacgagcattgtataaagattctgaaaaattgttggaaaagtctaccggaaaaaggtaaagtgatcatcgtagagatgattacaccagtggaaccaaagcctaatgacttttcgtgtaacaccgtgttgggcatggacttgttgatgttaacacaatgctctggtggtaaagagcgatctctttcgcagttcgagaatttagcgtttgcgtcaggctttcttctatgtgaaatcatatgtctttcttattcatattctgttatcgaattccacaaataaggatttggaattcacgaattctgctacatgctaagttttcttttcaagattgtttagtgtattatattaacagattgtaataataattgtgaaagtgtgtttgtaattgaaacatttcttcttatgctaattcttctgttttctttgtcttcttactgtaaccttcgagtttgattgcaccaaaaagcacgagctagtaaatcccaaattcgattcattgctatcgaaagcagtaggattcataaaagattcatttactctcattttgattacaatcatcaaacgaaacattttagagactttatttattacagagcacaatgagaaacaagtgttattcaaatgctagacttgaatacctctgaatgaatcagaggcttccatgatgggtttcgaggaagaaacgtatcctgcaaaatacacacaaagctgacgaattcaatttcaagatccagaatttctagtagttttttaaaagaaattcgtaccgaaacgtaggagcaagaagggatgatggagatggagtgagaagaggcgtgttcgaaagcggcgacgcagagatgagaagctaaacctaatcctcgtttgaatgaaggaacgtaagtatgaaccagatccatcactttaccgttgtttctcatcttgtattctatgaaagcttcgtgatcctccgtctcgaatcgccttttgccttcgttccacactatcttcggtggctctgtcgccatcttcgcctccgttgtcgccgccgtgttcgtcatttgtcaataaccgtaaatcgaa

SEQ ID NO: 3724 - DNA, 2935 bp, Arabidopsis thaliana landsberg
ttgggtatattgttcaagattttaataaaatttggtacatttataaatatctcccctttttttttatatactaaaagacccaaaaaaggtttgtatgggcccaaaatgttattttgccctagggcctttgatagtgttgagccggccctaacacttagcaggagtttgctcaatggaccacgttattctctacttcgatgtctttacctcgtatgtaagattacaacatacaaactagattgagtgattacattataagattcatgtgtgattcaggaaccatttttctttttttcttgttgaaattaactcatgaaccagttttcaaagcaaacaaaaagtagttaggattacgttggtagtttagtagaaattagagtggtaaaaatcaatgaaataattttactttaatacattttcatggtatgaatagtaaatatataaaataagaaaattattcaagatgcataatgactcgtgaccttttttccaaagaaaatttgtttcatagtagttaggattactttagtagcttagtagaaactagaaaggaatgtgctaaagagtagtaattaaataataattcaatagttgtagttcgtcacattttcatggtattgaatatagtaaaaacaaaaatgtggaaattaaataaatctttatacttttgtaataagacttttaggagttcatggaagctgttaccatcttctgtgaaaaacaaatatataatccttaaattcaacccttctaaattcttattatccaattgcgcacttagtaggagttttgccattggtcagtggaccacattattctctacttcgatacgtttggaagtgagacttttattttaccaactaatggagattcaagcaaagatatctattttactacttttttttgcttctgcaaaaccaaaaaaggttcgataactttattacgtcagattcttattttaattttatcataaacagaagacacaataatatatgatttaataaggtccgtatctaatgtaggaaaaaaatcggataatcgtaggtttatagaacaatatgttattcgtaatgacaaaagcaattcagaatattattcgtttggagccaagtattgtgacaaacaaaaacagtgacatttctaagtgcaaagtgaattgacatcgtcaaagattatgcattgacattatttaaaaggtaattaaggtaacaatacataaaaccaaagaagaagcccaaaacataacataattatgattaatactattttatcatcataagttttaatcaccagaatatgcatgtgtaattcccccactgggttactttcctttatattagcattttttatctatcatctttagtatacgcatcagtaatctatcatcaaggcagcataaacatgcttcaattttctgcggtcttgtgacaacggaagacactgaaattgcacccgggggctatagtcttcaaaagaatcctcgcagtggcctcttgactcactttcgcatcattcatctccaccagcacagctccagtgatcatctcaaaccctttgccttcgccacgaacaataaaatcaacaagcgccgcttgtactggtcccaaactaaggttatacgccgccgattcaatgcaccatcctccgtaaacttccccttcgcaaatcagcgccacccctgacggacacttgctatactgtgcgtacgatttgtttgccgccgttagggccctacacttaagatgagaacaatgctcggggtttgagcagatctctgcggcggaaaatggatccgagtgggcgaggcggttattctgcggcacgagaaggagagggacgtcttcctcgaagctttcgaggtagaatctagacggaatgaggcaagcgtggagttcttgctcgaagttgagtgcgaggttagcgacgaggaattgctcggcgctgatggagtggtgaagaggaaggccttcaaattcgacattgacgcctaagaagattcgatcggatgaggcaagtccaaggactgcgtcttggacgccggagattggagccctagccaggatcatcgcttcttcttctagcttcactaagtcactgggcctggagacgcctttggatgctgcttcttcacgagtgagaatgaatttgagctgttgtgtcattgtctctgtctgatttaggattgtgtttggagtttatatgtttaaagatatgaaataagatgagaagtggaagcaagcctatagttattttttaatttatagaggtgtgttgtgtctgtttgcttattgtcaaagtactttttaaaaccgtgtttactcattcgtatacacaaacaattacttacgacaagatatataaaaaggtgattgcaacacttccattctcatgaaacagatttttaagaaaagtagttatggttaattttctagttgcatgagtagaaagtaaatgtaatgaagaatggtaaaagtataggtcaatagtcctgactcgtaattaataatattttgatggttaaaagagtaatatataaataaattaaaatggagcttacatcattgcaattaagataacaatacaacaagatgaaaaatatgattgtgactattaagactcatgaacccatttttttagcaacatagttaagattatttttctagtttagtagaaagcaatataatctaaagtagtaaaagattattcaataagtccttaactattaatagtaacgttttaatgggttgaatagtaatgtagataaaaatcaaaatggtgtttatgttaatcacatacgcaaccaacactacaagttaaaaaaaaaggtgagtgtgactagcaagacttatgaaatagcattttaaaaaaaataattatgaatattactctaggttagtataaatgtaatgaagagtggtaaaatagtaatcataag

SEQ ID NO: 3725 - DNA, 2218 bp, Arabidopsis thaliana landsberg
tacatgcgcacgtaagatgatgtgaacagaacagagaaatcacttttatgtctcaattctcaacaaaattcttagaaaatcccactttcttgaacctcataacttttaactttttaccatggaggttacggttcaagttgcaatgatacactttataattttgtaattagactaagcttctactgctatttgttatgtttaggattggtctagggaaaatgatacagcattatacttttataattatacatttaatttttaggggttcataaagaagttgttcccatcttttatgaaaaatatatatattcaattatgaaatcagatagttttattgttcctccgttgtgtactatagtagaaatttgccagtggtcaatcaatggtccacttattccccacctggatatgtttgcaaatgagaattttttatcttactcattaatggagattcagactatttttttctggttttgcaaaaagcaaaaaaagaagtttttgttcacattatagaagagaagcaactcttaaatattcgtaagctgacatttataagtacaaagtgatttgagatgttaagattactacactgaaattatagtaaaaggtaacatgaaccaaagaagaaaacaaaacataattatgattctatgacattattaaaaggtttaatgaaccctaccaagaagacaacaaagcataataattatgataggataataaaatagttcaataacgaagaccagtgtaatcccctactggcgtattatttccttactatgtatccttttttaccgttctctacctccggtattgtaatataattcattttttttacgagatcctcgtagcaatggaagaccttgaaatcacagttcggagctgcgatagtgtctaaaatcatctccgctgtgcgttcttgactcaccctcgcatttttcttttccaccagcaccgcttcgacgatcttatcgaaccctttacctaggccacgagccacgaaatcaaccagcgcagcttgtaccggtcccaaactagggctagacgccactgattcaatgtaccatccacggtaccagttcccgtcgtcatcctgcagcgccactcccgacggagagttagtgtacggcgagaacgaattgtttgccgcggctagagccttgcacttcaaatgggaacaatctgatgagcatatctcttcggcagaacccgaaaggctgaggcagttatggcgcttctcgagaaggagaggggaaccctttgggaggacatcgtcgggagagaatctgtccggaaggaggagtctaaggctcttgaatgacccttctgcttcatgttttgatttgagcaggattttgatgttaagggctttgctgatctccataagaaactggcggcagtttccacacggtgcgccgaaatcgttaccgtcagtagagatggtgacggctaacagatggaggcctttctcggagttgagtgcgaggttggtgacgaggaattgctcggcgtggatggagtggtgaagaggaagacctggtaattcgacattgacgcctaagtagatccgacccgatcgtgcgcgtccaacggctccgactttgtatttggagattggagccagagcgagtgacatcgcctttccgatcagatttggaagcctcatgggttcggtgacgccttccgattctgcttctttagcagtgaaaacgaacttgtactgatcttgtgccattgtcgtgttttgagatatgaaatgacatgagaagtgagattatgtctttacctatctatatagatgtgttgtgtctgtgtgcctattgtgtaagtacttattaaaacttgtgtttaggtcattcgtatacgcaaacaatatgttagtgtatgaactacaattgattaaaaaaggtgactgtgaatatcaacattcatgaactagtttataagcaaagtaattagggttagttttttagttagtataaagtaatgtaatgaagagtatatataaataaacattaacgtaatgaggactaaaagtccttaacgtttatttagtagtaacattttaatggtttaatagtaatatagataaaaattaagaagtttatttgtaaaatgctagttcaattgtcggtagattgtagcatagcgattattttgatagtgtcaaatctgatattgaatatgtgtttgaagattgcaaactaaaatgacttga

SEQ ID NO: 3726 - DNA, 1884 bp, Arabidopsis thaliana landsberg
cgcgcatcatctggtcgattctacttaggcgtcaatgtagaatttaaaggtcttcttcctcatttttccatccacgctgagcaattcctgatcgccaaccttgccctcaattccgagccaaaactcactcacttagccgtctcccataatggcaccgtcttccaagacccgtgctacgactgcacccactttcttaaggagatcaacaatgcacatcaaattgaaattctgatcaaaaacgctcacggccgagacggatcattcaagagcctcgagagccacatgccagacgaattcggctccgaaagtatcctctcggcagaaccctctctccttctcatggagcgcgataactgtctcgccctcatcgatgaagattccgccgccggagggatctcctccaatgcggacctttgttcctttctaaagttggaggctctaaaggcggcgaacaaatcatacgcgccatacagaaagtgtccgtcaggggtggcgctgttttgcgaaggggaagtgtatgcaggatggtacattgaaacagtggatcggaccattagtttggggccagtacaagcggcgctggttgatttcatagctcgtggcgaaggcaaagggttcgataagatcactggagctgtgctagtggagaagaaggatgcgaaggtggggcaagaggacacggcgaggaagcttctagagaagatagcagctccgaactgcgatttcaaggtcttccattgccaggaggagcgtaaagattggatcaccggagctgtgctagtggagaagaaggatgcgaaggaggggcaagaggggaagcttctagagaagatagcagctccgaactgcgatttcaaggtctcccattgcgacgaggagctcaaagattggatcaccggagctgtgctagtggaaaagaaggatgcgatggtggggcaagaggggaagcttctagaggagatagcagctccgaactgcgatttcaaggtctcccattgcgacgaggagctcaaagattggatcagactataattaaagggataagtactttatatttatacgatgatgatagttaactgatgcattactactatgatagataaacaaaaagttaatacaaaggatgaaataagccaataggggaaagacattggtcttggttattaaaccatcatcgtagtttatgttttgttttcttcttcgcagggttcatgttacctgcactcataaataatgtcaatgcagtaatcttacgatcttaaaacactatgcacttataaatacaatgtcaacttacgaatattatttagtgaattgcttcttttcaaaaatgtgaacaatagcctctttattgttttgcaaaagcaaaaatagataaaaaatgcttttgcatgactctcaattaataagttagactaagtgaattatattttaccactttttgagtacattactttcgacgaaactactaaagtaatactaacttctataaagcaattatgctttgaaaatggttcatgagtcatcctgagttttgatgacggatacggacagaaactcgtttatattttgtaatcttgcgtgtacatgtgattattcacatacgaggtaaaaacactatttcaaagcattatattcaacatgcacacacttcacatatctagtaaaagtaagtttgcaattttcaaagacaaagggaatatctatgtgtattgtgtggacttgatatataacatttttagatgctttcttatcaatattaataacgtatatacattttctatatcatattctacgagtaacctctatactacgatctaccaacatattgaactatcatttgaggaataaattttcttaatccctatcacttttgggtaggaa

SEQ ID NO: 3727 - DNA, 1356 bp, Arabidopsis thaliana landsberg
taaacacgattttaaaaagtcctttcacaatatgcaaacagacacgacacacctatataaataggcaaagactcaataccacttctcatctcatttcatatctctcaaccaaaaaaaaactcgaaacacgatcctaaatggcccaacgtcctaacttgttaactcatttccaaaatctcgtcgtagaatctcaaaacagggcaatggcggcacaagataagtacaagttcgttttcactgccaaagaagcagcatcggaaggtgtcaccgaacccatcagacttccaaagctgatcagaaaggcgatgtctctggctcggggtccaatctccaaatacaaagtcggagccgttggacgcgcatcatcgggtcgggtctatttaggcgtcaatgtcgaattcccaggtcttcctcttcaccactccatccaccccgagcaattcctcgtcaccaacctcgcactaaactccgagaaaggtctccgtcagttagcagtcgccatctctagtgactgcatcgaattcggcgcgccgtgcggaaactgccgccagtttcttatggagaccagcaacgagcttgacatcaaaatcctgctcaaatcaaagcatgaagcagaaggatcattctcgagccttaagctcctccttccgtacagattcacccctgacgacgtcctcccaaagggttcccctctccttctcgagaagcgcgataactgcctcaccctttcgggttctaccgaagagatatgctcatcagattgttcccatttgaagtgcaaggctctagccgcggcaaacaattcgttctctccgtacactgagtctccgtcgggagtggcgctgcaggatgacgaagggaagtggtaccgtggatggtacattgaatcagtggcgtatagcccaagtttgggaccggtacaagctgctctggttgatttcgtggctcgtagccgagggaaagggttcaataagatcgtagaagcggtgcttgtggaaaagaataacgcgagggtgagtcaagagcgcacggcgaagatgattttagacactatagcagctccgaactgcgatttcaaggttttccattgctacgtggatctccaaaaaaagtttattactgaatagtgatagataagaaaaatctatactactagtaaggaaaataatagccagtagggaattacactggccttcgttatttaactattttattatcctatcataattatgctttgtttacttcttggttgggttcgttaaaccttttgatatgtcacagaatcatatttatgttgtggtttcttctttggttcaagtacctttcagtggtgtcagtataaaatatatttataat

SEQ ID NO: 3728 - DNA, 1224 bp, Arabidopsis thaliana landsberg
agtttcttgtggtccgtgacaccttcggatgcggcttgttcggcagtgaaaacgaacttgtactgttgtgccattgtctctgtgtgattttgggatcgtgtttgagattttgtgttaagagattggaaatgagatgagaagtggactcaagtctctcgctatttatatagatgtgccgtgtccgtgtgattattcaaaagttacttttaaaatcgtgtttacgtcgttactcattagcatacgaaactaattataataaaagaaataaaggtgacgtgatccacttcaagacttatgaaattttaagcaaagtagtaattagggttattttcttgcttaatataaagtacatgtaatgaagagtggaaaagaatggtctagagtccttaactcgcaagtagtaacatttttgatggtctgaattgaagagttataaagattaaaaaaaaagataatttgaagttaatttgtaaaatactagttcaaatgttggtaaattctatatatgtttactcgtgatttaatggtcacacatacgatatagaatgtgtttgatttatttagacggaaaaataattgatgataatcaagatttcaagtccatggtataaataattgttccttttttcttagaaaatgcacactaactattactagactggattaactttgacaaaacaaactattactagattagtaaagtctagatatgtgtgatgtatgcatgctgaatgcttttaaaataacgtgtttacattgtacgtgaagaatgacacgcacacgcaagattacaaaatataaacaaggttgtgactgtatccgtcgataacaagactcatgatgactcactaatcatttatcaaagctaatttgctttatagtagttaggattactttagtagtttgtagaaaccaactgtgctgaagagatgtaagaaaattaattatatagcagtctttccttaggcacataatttcaaggaataaataagtaaaatagacctcacttgagaattttattcataaaatgataactaaactgattgcgaatgagtgtttttttggtagaccatttcaattttaatatatattatgattcttttttggaaaaaaacaagcgagcacaactcacaaattcaaagttcaaactatgtgatatgattatgtttattaagtttccagttaattttttaagtgaagaatggattgaaaactatttaaaat

SEQ ID NO: 3729 - DNA, 1767 bp, Arabidopsis thaliana landsberg
  unsure (1)..(1767): unsure at all n locations
gcggatttcgcttaagctcttcttcattcatacccattccaactattcgttcttgcctataccccggtggataatgactgacctatgtaacatcataacagccaatactcttaacttgagagatttctcaacagaaactaaaaaagatcaaaaggatttggatttagtacatacccaactgctacacatatcgagtatgctcactcctggagtatcgctctgaggcaaaaccttggagtaatactttgtcaatgcagctatagctggatcatcaatgtgtgtcacaaaccttggagcttcgtagaannnnnnnnnnnnnnnnnnnnnnnnncaagtcaacaagatctaagtatgtcccaaagcaaaaatatagctcaagcatgcctttaagataagaaaacagagcaagacaataacaaaagcttggaattgttgtatcttactcatcgtatctctggaaatcttcttctttgaaagggaaagtctctggccaatccaccttattcaacgcctaaaaccaagcaaaatagttcaaatttcataaagctacaaactttgaccaattaaacgacatttcgatttctgaatccctaaaggtacaaactttgaacaattaactaaagagagtaaagagacctgttcgacgggagaaggattggtctgcctagcggaagcaatgaaagatttaccgccaaatttaccggacatattgttgttcatccacaaagaagcgccgccaaaaccaccgagaaccaaccggcgacgtgaagaagcacgaatccaactgtggaaaggtttcgaagcagttgtcggaagattcagagccgaggaagctcggaggaaaggagagtttccggtggaggagaaaatcggaggtagaggattggatctcaggctgagaaaattagccgtttttgacattgtttcattaattgttgggttttgtctgatttgtaaaaaggtttgaactttgcaagacagaacatgacgatgaagatgatgtgtcgcatatcgatcgatgaagatgacgattcgagtttagtgatccaaaccactcttacgtggtcgtttctctctgtttggggcttttctttactttttacaaagttatggggagtaactgtaaaaatataataacgtttattgttacaaaaattagagtaacacaattatccttcttaaaacgtttcaatccatattcactcaaaaaattaactggaatccatatttttcgaacaaatatatatcatacatttaagttcaaaatgatctacccaaagtgctcatttctgaacaagattcaattttaaacacaaagagaaaatatatatatagcatggacttagagtattatttgatatttttatattgtcacaatctcacacaaactcaatgaatttaattataactttttaagaataagattcccaattttcataccatgaatttatgactaatcaagactattgaattttatttttttaaccattctttagtatagaatttaaaaaaaaaaaaaaaaactaaccttacttacttttaaaagcaattttgttttgagaaatggttcatgagtcagcatgagtcttgatgacggagatacagtcataatctcgtttatattcttgcctgtccatgtaattctttacctatattaattagtactattcaaaccattaaatgttactactcagtaaaagttaattaagaactacttagtcttcctcgaataaatactcttcattacagtacattactttatactaa

SEQ ID NO: 3730 - DNA, 376 bp, Arabidopsis thaliana landsberg
ttagccaatggatagcttatagcaaatccacctttaccataatctataccatacgagaaaaatatgttgtgtaaatgagagtccgacaagctcccaatgtaatacatctgctcatggtcatacttcctcaacaccctaatcaaattatcagtaacaaacaccgtatcatcatcacccatcacaaaccacctaacattcttcggacctaaacgcagcgtgtcagaaacaatcctcgagatccgtaacgcagagcgttgtccttggttgttagtataaggaaacgaagcagttccaccggagattctcaccggaggatgaagcttttcgtcatcatcatcactaagactctctttaacctctttatctaaccaaacgt

SEQ ID NO: 3731 - DNA, 6388 bp, Arabidopsis thaliana landsberg
ctacttttatcgctcttgatgttcttgttctgcaatggtttagtgtaaaccttaagcaatcacagagtccttgcacatgcttcttgtcttctcaaggttcaacaaaaaaagataagactacactttgcttctcttcttcctcatcctccattacccaccacccaccaatcatttcaacaacattttcataaacctatcaccttcgtcttcttcacagagattccatggagagagaacgaagtaattttttcttcttgttcttgttttgttcatgggtctccatggcccaacccactctttctctttcatcagatggccaagctcttctctctctcaaaagaccatcaccatcactcttctcttcttgggacccacaagaccagacaccatgttcatggtatggcattacatgttctgcagacaacagagtcatctctgtctctatccccgacactttccttaacctgtcttcaatccctgacctctcttctctctcctctctacagttcctaaacctctcctccaccaacctctctggcccaatccctccttcatttggaaaacttacccacctaaggcttctcgacctttcttcaaactctctctctggtccaatcccatcagagcttggtcgcctctctactctccagttccttacaatgaacgcccacaagctctcaggttcaattcccttacagaattcaaatctatttgccttgcaagtgctttgtcttcaagacaattttttgattggttcgattccttcaagttttggctctttggtctctcttcagcagctcagacttggtggtaacactaatctcggaggtcctatccctgctcagctagggtttctgaaaaatttgacagctctagggtttgcagcaagtggtttgtcaggttcaatcctttccacatttgggaatttggtaaatttgcaaactttggctctgtatgacactgagatctctggtaccattcctcctcaactgggtttgtgctcagagctcaggaacttgtatttgcacatgaacaagctcactggatcaatcccaaaggaactgggtaagctccagaagatcactagcttgcttctatgggggaattctttatctggggtcatcccaccagagatttccaactgttcttcccttgtggtgtttgatgtttcagctaacgatctaactggcgatattcctggagatttggggaagcttgtttggttggagcagcttcagttgtctgataatatgtttaccggtcagattccttgggagttaagcaactgttccagcctcattgctcttcagctggacaagaacaagttatcaggctccataccctcacaaattggaaacctcaagtctctgcagagctttttcttgtgggagaactcaatttcaggaacaattccgtcttcttttggcaactgcacagacctagtggccctggacctctctaggaacaagctaacaggaagaataccagaagagctcttcagtttaaagaggctcagcaaacttctccttctagggaactccttatccggtggattaccaaagagcgtagcaaaatgccagtcgcttgtgaggctaagagtcggagagaaccaactctcaggtcaaatccctaaagagataggcgagttacagaacctggtgtttcttgatctctacatgaaccatttctccggtgggcttccttacgagatctctaacatcactgtccttgagctcttagatgtccacaacaactacatcaccggagatattcctgctcagttggggaaccttgtgaatctagagcagcttgatttgagcagaaacagcttcacaggaaacataccgctgagttttgggaacctaagctacttaaacaagctgatcctcaacaacaatctcctcactggtcaaatcccaaaatctatcaagaatctacaaaagcttacacttcttgatcttagctacaacagcttatccggtgaaatcccacaagaactcggtcaagtcacaagcttaactataaacctcgacttaagctacaacaccttcactggaaacatcccggaaaccttctccgacctcacacagctacaatcactcgacctctcaagcaactcgctacacggcgacatcaaagtcctcggttcactcacaagcctagcttcactaaacatctcctgcaacaacttctcaggtccaatcccatcaacaccattcttcaaaacaatctccacaacatcatacctccaaaacacaaacctctgccattcactagacggcatcacttgctcatcacacaccggacaaaacaacggagtaaaatccccaaagatcgtagctttaaccgcagtaatcctcgcatcaatcacaatcgcaatcctcgcagcctggcttctcatcttacgaaacaaccacctctacaaaacatctcaaaactcctcttcctctccatcaacagcagaagatttctcatacccgtggacattcataccattccaaaaactcggtatcaccgtcaacaacatcgtcacttccttaaccgacgaaaacgtaatcggaaaaggatgttcaggaatcgtatacaaagccgaaatccccaacggagacatcgtagcagtgaagaaactctggaaaactaaagacaacaacgaagaaggagaatcaacaatagattcattcgctgcagagattcagattctcggtaacatcagacacagaaacatagtgaagctattaggttactgttcgaacaaatcagtgaagctgcttctatacaattacttccctaacgggaatctacaacagttgttgcaaggaaatcgaaacttggattgggaaacacgttacaagattgcgattggagctgctcagggtttggcttatcttcatcatgattgtgttccggcgattttgcatagagatgtcaagtgtaataatattcttctggattcgaaatatgaagcgattcttgctgattttggacttgcgaagctgatgatgaattcgccgaattatcataacgccatgtctcgtgttgctggttcttatggatacatcgcaccaggcaagtttctctcttttttaacgggagggcctttttgataaatttgataaagctcaaggtttcatttgcattattataagagatagggggttttagtgtatttattaaaattcagagcttcatatccattattacaagagattgagagaaattttgaatgaatttgttaaaaaaacaaaagggtttcttgtgcatcattacaaaatattaggattttttttaataatgaatttgttaaaatttgaggtttcatttgcattattggcaaaagattgttttttttttatatatagtgaatttgttaaaatcagagcttgattttcattactacaagaaattgggggaaatttggaatgaatttgttttaaaaagtgttacttgtgcattattataaaatagtagttgtttttatttgaaatttaaggtttcacttgcattattacaaaagattgtgtgtttttttggtagtgaattaataaatttgttaaaagcagggttttattcatctttacaaatatagtttttttttaatactttgttaaaatcagggttttatttgcattattacaaaaacaattgtgaggtttgttaatgtgtttgttcaaaatcatggtttaatacataaaaacaaaatactggggcttgctttctgataacgtaattaataagaggttttttgtgtaattattgcagaatacggatacacgatgaatataacagagaagagtgacgtgtacagctacggcgtcgttttattagagattctaagtggccggagcgccgtggagccacaaatcggcgacgggcttcacatagtggaatgggtgaagaagaagatgggaacctttgaaccagctttatcagtacttgacgtgaagcttcagggattaccagatcagatagttcaagagatgcttcagacattaggaatcgccatgttctgtgtgaatccgtcgcctgtggagagaccaacgatgaaggaagttgtgacgttgttaatggaggttaagtgtagtcctgaagaatggggtaaaacatctcagcctcttatcaagccttcttcttcataacctatggtgcttgtgtttcttgttcttgtttttttttttttaggtcaaatttggttgagtggttttgatttcttgtacataaagtatcattgttagttgaacttggaaacatttgagctctttggaatcaattagaattggttacaactttgcattacatcatttggtgtttgaaatatacatttgggagaagagtaagagctcgggttttaaaagccagtattgtttgaatctctgtcttgagtactcggcgtaatcgaagtcgatcttgtttacatattcctacacaatcacaattcatgtttcagatactttcttgatgagattatgtttggattggagagaggaagagtcttacagagatgattccccataagccccaaaacagatggcttgctaatgtgtacttctcagcatccttcaagagctgttttatgtcatgttcttttggttcttcgcctaacaaaagaaggcgtatattagtccatgagacgttgttacggctagaagaagaaggaactatgtttctttgagaaactgacctgaagagctgaggtagttatggatgaatctccttcgttcctcttctcctgcaactctcaaaccaatcagtcaaaatacgaatgtatttgttacttttctacttgtggatgtgagtacctgggtacagagtatagtccaagatatggggagtgtcagaatggtaatttgctgccatttcgcagaagtgatttgcaatgtcgtatgcaactgggttataactagcgtactcgtagtcctgttttagagaatctcatattggtccatgtgtgatgatatgttaaccttaagggtaatggaaaacttacaatgatagtaatggcattggtgtcttcatcaatcataatgttaccatattgcaaatcattgtgacaaaaccctatctcctgctgcttacacttatcctgcagctcatgttccagcaagtatatctcagcttcaatcttgtctagaccaaactctgctaaatcttcaggtgtacacagactcttggcttgtctaagccaattcctggtcatatgttttcaagattctgttattgattaaaccacttgatgcttcacgttaacatagaaagattactcacctcatcctatcccaaatgagcacatttctatcaccagggatgtttataccatgaaattctcttagcttagccgcaacacgagcagatacttctgtttcacgtagatctgctgccgataacgtctgatcaaaagtcataaaatgcacttgatttatgatgataaataaagtgaaaacattgtccatcaagattcaagaacatctcaatcggtttacaactaaaccgggcataactctaatggtatttcccggaacccaaaacaaaaaaaaatcctaaacaaaccacaatcaaagatccttattgagataaaagacccaccccaaagtcatggtgatgaagtccaacaaaaacatctacatgttccttgttacccaattgacacacaactaaaccggtaatcactctattggtaattcccggttcaacatcaatcacaaaacaaatcaaaggttgttgtagtatcttctcagttctcatagtcaaattcagacccaacactatcatttcgtagtcacaacataatgaatcgaatcaaatgggtatggttaattaataattttattattacacaagaaacaaaaccaaacatacccgggcattaataaactcctcgattcgaccgccagcaaaccggccaagaagcttaggaccgtgaccataacgagagacaacctcgaacgtacgaatctcatcttttctgttgaacaacagatcaccaacacctctgccataaacacgaacaagaagcttcctatggagaaaactgttatcctttataggccaagtcaccataaaaacttcgttagtcattgcacctttcatgggtttcacttgaagacactcgagatcttcaactacatctccccatttaccggacagtgtttgaagtactgtctttagactgtctggtgatgaaattgggatcaaacccaacagttgttttctctgtctctgcaattgttgtgatttctgtaggaagctaggacagaagctctctgctttcctaaacattcggaattcttaagaaaggaacagttgaacggaggcaattttgattcaatgtctggatgaattttgaattaaactcgtatctatggactaagtgttattaatctcagccgaaatt

SEQ ID NO: 3732 - DNA, 514 bp, Arabidopsis thaliana landsberg
  unsure (1)..(514): unsure at all n locations
gaacaatgaacaagagattggcttctgtcacaatgacttgcagtatggtaacatcatgattgatgaagaaaccaatgccattactatcattgtaagtctcttactcataaccacaaatcttcttaaccttttttctttctttcagaatgggggaaaaaagtttaaaacccatttttacgatacgatttaactcgaggtaaaacaatatcaacacacactgatgaacatgagacttctcattctctgtctcatcatttgtgtgaaaatggatttgaacaggactatgagtatgcaagttataatccaatcgcttacgacatagcaaatcatttctgtgaaatggcggcagattatcattcaaacactcctcatatcttggactacactctatatccaggtacagtgatgaaatcaagcaatgtttataattccatagtcgaatttcgttntaattatggtttgggaaattgcaggggaagacgaaaggaggagattcatatgtaactacttaacc

SEQ ID NO: 3733 - DNA, 2328 bp, Arabidopsis thaliana landsberg
ctaggaagctcagaactgaagaacccagctctagattttcatttcatttccgaatttcagcttcagattgtgttcccaacttccctgcgaagaatccatgaactctcgccgatcgtgatacaacataaggaggaacaaagcgggaagagagatcaaaaggaagaagatggctcagggaatggcgactctggctcgcctgcttcgtcaccaatttggttagctgcggggaagagcaaccgacggcgaccctgcgacagaaaatcgcatgcatttcgaaactaatttcaaatgttttaccaaatggcgcaaaaataagagaatagcatcaacttcttctgattattcatgaaaagtgtgtgtttcaaaaactcaggtcttttaagtgcaataaaatagtgatgtaaatgtaacaagaagtaacaactttctttttttaggtaaacaaaagattcctccggtttagggaaattgtaaatatacaacttccaactttcattaaaccatgacgttcccatctctaaaccacaatcccactcaagacaaggttaaatgtcttacaaaacaaatagtgggtggcattttcggaataagatgaaacattgagggtacaaataataatcttaattttgtacacgtcgtcatcgtctttcttcctttttcgtacagtgatagagtgccttgaaactaaataaaaaaatggcctcaaaactcaaaaccttcatcaatctccgtgactacccaataaccctattcaaccagattccatcactatcctcacgaattctcacacctatcaatcaatctcactacaggaaacgaattttactcgcgaatctccttaaaaggtatggtttccctccttcttcttttcaagcacttcctttcaataaacaatcacctttgaattcggacttagtagaaaccgaaatttctctcggcatcctattgtcattgaaaatccctcagaaatcactcgttttgttgatttccgattgccctaatgttctgcgatcagagtttctgaggaaatggagagttcctctgtctaattgcggtaaacacggtgtcgtctcatcttctgcgattaagagcgtccttgaacattctagtagaattgggattggtccagataagtttaatgagtgcgtaagggttttgaagagtttagggttttgtgatagtactgtgagtaggattttaagttcattccctggtgttcttttagtgaatgagattgaaattcgtaggaagattgagtttttagttggaattggcattgctcgagataacattgagaggttctttcacgtttttcctgaagttctagggattggtactgagactagacttaagccattgcttgatgagttcatgaagatggggtttagtaaggatgatgtaaagaaagagattgctagagaaccgagagttcttggtttggagttaggtgagcttccgcggtgtttggagttgatcaacacattgaaatgccgggaagtgattagagttagtataatcagcgaaggagcatttcgtgctgggtttgaagtgaagctcagagttgattgtttatgcaaatacgggttgattcgtagagatgcattcaaggttgtatggaaagagccgagggtgatcttatatgagatagaggatatagagaagaagattgagtttttaactaacagaatgggatttcatatcaattgtttagctgatgtaccggagtatctaggggttaatcttcagaagcagatcgttccacggtacaatgtcattgattacttgaaactaaaaggtgggcttggctgtgatattggattgaaaggtttgatcaaaccaagcatgaaaagattttataatttgtacgtgaagccatacccagagtgtgaaagaatctttggaaagagaaaagagaatgtccgagtgaataaacgacatcccgcagggctttggaagcttatgaagccgcctagcaatctaacaacaaaagaagatgtgcagaacatgaagtcctttatagagtcacttgcttagtatgttggatcttggacttgcctcttactagattgaaagagatcggccactctctagagggttcttgctccctcactttgctacgagctgctctgaattgatatgggttatcaggaactttcagtgactatcgaatctgatctcaactcgctcgagttcatggcttgattattcaaaggacaatgcatactcctgaataagccatgctcacttctcgttgtgcatcttgggaagacatctaccaatgccattgccttcgtttccatgtctctgcctgatagatttgctgagcaa

SEQ ID NO: 3734 - DNA, 2791 bp, Arabidopsis thaliana landsberg
gaaccttcacctgcagtgaagcatctggttttataatcccagctcctggagaaacctagatagagttttttgttttacaataaaaatcattaaatcatgtctaagtctatggcaaaaacagcaattcagtggcgtaaaaggagaataataacctcaagccagcgagggagaccaaatgtgcctcttgaatgattatcaggttcctctccatcctctctaacgagagtttgacccttacagacgatgttgaagatggctctactcgagtttgaagtgtttctgattgtaaagatgaacgtgtcctgactatggagaagaatgttgttggtgctcactgatgtttctggaactgattttagttcctcgaacatggctctgagtttctcattcgacttgactattttccctagctcctgtcttcgcacagatttatcggtgtgagctatgttagcatgaagtttgcaccgcacgggtttgtgatcgctctcagtcacatccatgcaagcttcatacctgcaaacacaacgcataggagggtggtgggaaagagggaaagggaaagaaaagagagaagatcagaagatcgtggatggaacattacattatagtcgacgaaactacagggcactttaaactgcactccgtatatgagattgattggttgtctctatatataactctgtcacaccaagcgggtattcgctttttctcccctgaatcataccctggagataggagcagcatagaaatcaattaccttgtctaaatctttctcttcctacaagcttgcttagttagtgagaaatcagagacacaaactcatgatagagcaaccaggagaaatttatttcaaatctatcttttacctccaagacctggtttattcttttcaaatttgtaggtcggcgggaaggtgattaatgcctcacgcattccttggaatacttttccctcattcatctcttgcctaagttggtctttctctctgagccaatcaaaagatcggtgcgagatgaagtccctcgcttcatcataggtaataccaaacaacctgtaattgaagtcaccgaaaaatgcaaccagatctgctgatgctaaatgagacttctcctcttcagtgctgttgtttgtattctaggtgacaaggaaaaagaacaataacattagtaagggacaaacagcaggagcttgagaccgagattgtgaacaaaaaatgtaaatgctaatatgaaatcttcttacagggttattctttagcgcttgagcagatgttgaagcaccagctgcaagagaaagggcccatggcaagccagaagaataaagaagccaaaataagtacgtggagaagccaagcgagcaagataaaaacaggtacggcactataccagctgcagcagtatatacactttgtcctttggagaagaccattgaccgatatatgtgattaaaatccgcgtttctccgagtaactgcctccaagtgagcagccaagtgacagttcacaaagcacataatccggtcataaactctgattctcaaacccacacctccctgtttttgacaaagtaggaacattaatatgtgagcagttagatcaacaatgaagattcatcctaatctgaggttagccatcaaaatccactatcattgactattggatcatacatcatactacctgattttgtattagacataaccaagggaaatatagctgtaaaggtcaaaccttgttccctatggcgcggccaaatccacatggaactgctgcgacatcaagatctccgacatgtgtcctaatactcttcctcaccctaaagcagaaagttataagatatgaggtgacaaaagatgattaatttggaatatatgatttaactttacactcttaagacaggtgaaagatttttggtgctatgtaaggaaataaaactactttagtctggtccacctgcaatcactcgaaaacacacaaaatgtaacacgtctgaaatgacttttttgcctaccaaagagatattagcagtccagccaactgccttgaacccatacgttcgaaagtatttctctcatccagtgcatttccaattgcatcaagccaccattgccccacggcacttccttcaacccctacctacaaccgaaacaccaatatgagctcaattaaaatatgtaggacaaacagcattatcccgatattaagcgtatgaattcgcatgcaacatttttaaacattctactgatgacagtatttctctataactagtgatcctaggtagtactggacaggttttgcctgctgtacttggttaatgatctggtcaaccggttttgatataagaaaaatagtcatgagtacataactgtaagaaaaggagttaccgtttccttagcagtggacatggctaggaaaccagcccccatatccacctcttgcaagccaatagcgacaatgccaacatctgaaacagcagaacccagccaagacacaagcgctccgcgtgaagcccgtccttcaccaacattccaggtaccaatcaagattttaacactgtcttgtcgggcatatgccatttccttttgagacaattctgttcggattaagctgtcaagaggtcctggggatgtcacataccatcctcttacaccaccatgagtggctaagctaaaaatgaaaccaccacctgctgctagctttatcacaggttcattgtgtgaaacccagcttgcaattagctttccaccaagatccaagacctgaatgtaaccacttgaataacccagcatatattcg

SEQ ID NO: 3735 - DNA, 556 bp, Arabidopsis thaliana landsberg
  unsure (1)..(556): unsure at all n locations
ggcaaagnccgacgnagatgctgtaacggtagctcggagtttctctgtnggcatttgacctgatgtcaccaggcggggtagagcatcgggacagtccattgtgtatgtgtctgcaaatctttcaatgtttggcaccgtgtctttgagtgtagcggataaagttttgaagtggacaatgagtttctggcattcagattcgtactctgaaggattgattaggtctcttatataagctttctctagctcctctgtggctttgatgattgcaaaaagctctgcaaaattctcatacatctctctttcgcgattgtcgttccataatttgacctccatcattagagcaagtcaatctacggagaagagaacggtacacgcacaagctcttcctttctgtatcaatgaccacacagaccaaagtcaagatcctaatatctcaatagaagaaaacttcaaatcgagaagaaatgaaaagcaactagaattgtccaaagaaactcataacctatcaagaggctaacagttcttcactanagctttctaaatctattagaagtaa

SEQ ID NO: 3736 - DNA, 2570 bp, Arabidopsis thaliana landsberg
gttggtgcctataggattaaggcagtgtctgtcgaggagaatcctcacgccattccaactcgtaaggtacaatagaattatactcacatcgtgcgatattatacttatattcaacgtactagacattctttcatttttagataattttatacattcaattaatatactacttaattaattaaaccgtttaaccaaaaaaattctttcagttttttttataataaatttatttgtttattaataggttttctaaactgaattgtgtcataaatattgacttttttggggctacatgaaacactaaaaagaaatggacatggcaaataggtatctctgtgtagttgtgctatcttatgtggatctgataaataaaaaccaaatggacagggcaaagagaagctgggaaggtggaagaagatcaattgatccctaagaaagagatcttactgtttggtaagagtgttatatgtgtgatctacaaagagtaaaatgattatcttcctttatttgctctatgtatgtttcaatgttgatgattattatgagtaacaataatgtttattatcaaacaatctcttttatcatacttaaaactaaaataatacaaacaaaaaacataataaacggagttataggtgaatgtatagtagatatgcaagcaaaatgatataaacccacaaaaaaagtgctccttaacgttgcaatttaagttatttaacccaaagcatgtagaaccaaaatgaacagagtcattatccgttgcatgactaacaaggaagaagcaaaacatcaaccaaaaccgtaagactcaaggggtcactggcttcttgcttcgacgtgacgttagacatctttggaaccctaaattccacaagaaggaacacacactgattacaggggcagcggaatcaacgtccgacaatattattgggccttttctcaactcaaaagcccaatacattggtagcccatatgattaaaatgaatctcttttgttattacattcacacttagacataaacactcaaataatacaaaaacgaaagaagaagatgataaattaaggcaaagagagatggagcgtattgcagagaaatcttccatgaaaaatggagaagaagctagagaagcaacaaactctcttcttctcgccatgtttctcccgaacacttcgctccatctctctctttcttctcttacattttcttctccccatttctctcattctctcttcctcttctctttcctcaatctttcgccatggatatcatcaacaacaaccaccgtgacgaaaacgatgacgacgaagaagaagctctctccgccatgagctctgttcctcctcctcgaaaaatccattcctatagccaccagcttcgtgccaccggtcaaaaaggtcaccaccgtcaacgtcaacacagcctcgacgacattcctaaaatcactgaaatcgtctccggttgtggtatctccggcgattcttccgatgacgagttctatccttacgccaccaccaccaattcctcatctttccctttcaccggaggagatacaggagattctgatgattacttgcaccagcctgagatcggagaagattttcaacctcttcctgaattcgtcggatccggaggcggtgttgggatgtttaaagtcccgacgcggtctcctttgcactcggcgcgtcctccttgtttagagttgagaccacatccgttgaaggagactcaggttgggagattcttgaggaacattgcttgtacggagacgcaattgtgggctggacaagagagtggtgttagattctggaactttgatgatgcctttgagccaggttgtggtttaagcggccgtgtacagagaggtgatgaggatgctgcaccgtttcaagagtcggctagtacttctcccaccacttgtttgatggttgataatgggaataggcttgtttggagtggtcataaagatggaaagattcggtcttggaagatggattatgtgcttgatgatggtgatgattctcctttcaaggaaggtctagcttggcaagctcataagggtcctgtcaattccgtaatcatgagttcttatggtaataatttctacctcaaaaaaaattcatatactttatatatagtcttgtaatgaattcaatctgaaacccattgtttgtatttggaaaatgcaggcgatttgtggtcatgttcagaaggtggtgtgataaagatatggacttgggaatctatggagaaatctctttcgcttaggttggaggagaagcatatggctgctttgttggtggaaaggtcagggattgatctcagggctcaagttactgtcaacgggacttgcaatatatcttcctctgaagtcaagtgtttgttagctgataatgtaagatccaaagtttgggctgctcagcttcaaaccttctccttgtggtgagtattgattgatacttgagctcctgattgcaagttttgatcttcctgtgtcttctttgatgtgatattcttataaatgcataaatatctttgcagggatggtcgtacaaaagagttactggagtg

SEQ ID NO: 3737 - DNA, 2840 bp, Arabidopsis thaliana landsberg
aaaagcacatatggctctttcattgcttgcctgtgcgctttatcagaatttctcagaatgtgaaggatatggaaacatacacaggctatcacttactagctctgcttttacgtcccaagatggcgctatttgacatgcaatgtttggagatatttttccaaatatctgcatgtgaagctttcttttcagagccaaagaagttggagagtgggcaaactactattagcatgtcacctacggagattatacctgaaaacaactatgaggatcctagtctgtgtaaatttcaatatgaaacttcttcagttggatctcatggggatatggatgatttttcggggcgaaaagattcttttagtcatttatctgagcttgaaatgggagataatcctgttgaaacttcaaactgcattgtcttatccaatgcagatatggtggaacatgtcctcctggactggactctctgggtgacagcccctgtttccatccaaatcgcctcacttggttttctagagaatctcatctcaatactctggtacaggagtcacaatcttgcaattctgcgtcaaatcaatctggtgaaacatttgttagtaacacttcaacgaggggatgtggaagttcttgtcctagaaaaattagttattcttcttagatgcatcttagaaaacgggttccttactcctgagcttgaagatgtggttaggtttgtgattatgacctttaatccacctgaaataaagtcacaaaactcatcaatgcgcgagtcaatggggaagcatgtaattgtgagaaatttggtattggaaatgcttattgatctccaggtaaccataaaagcagaagaactgctggagcagtggcataagacagtttcatcaaaattaataacgtacttccttgatggagctgtgcatcctagtagtatgagatggattatgacccttctcggtgtttgtctcacttcttccccaaatttttctcttaaattttttgccagtggaggttatcaggggctggtacgggtacttcaaagcttttatgattctccagacatatattacattttgttctgcttgattttcggaaaacctgtttatccaagactaccagaggtccgaatgttagactttcatgcactaatgcccgatgatggaagccatgtagagttgaattttgtagatctgttggattcagtggttgccatggctaaatctacttttgacagattgatcatgcaatcaatgcttgcccaccagtctggaaacctttcacaggtgagcgctagatgtgtagctgagcttgttgagggctatgcagatatgactggagagcttcaaggggaagctttaatgcataaaacatatgcggcacggttgatgggtggtgaagcatcagctcctgccactgctacatctgttatccgtttcatggttgatctagcaaagatgtgccctcaattttcagctgcttgcaaaaacacagaatttctccaaaagtgtgctgatctttacttttcttgtgtcaggtttgcatcacatgccttttgcatatatatacatttttcagtaccacatactgaacatagatatgtatatccttttctgtacattcagaattcatttttttctgtctgtatcccttttgtatagtcgcggcatagagacattggaaacagtatttttgttccactaatcatatattcctgcatgtcagaaggtcctagataagaccagaattttttttgtttttttgtagttactgtgacctgcaagatgttttgcaaatattgaccaaaatctgggtcgttttgcagggcttttcatgctgttaagctggccaaacagctctcaatgaaagcagaagagcagaatataactggtggtgatgatagcagcgtagaagggaatttttgtagagtgtctcaccaggacatgtccacaaaaacctccataagtgctggaagcttccctcaagatcagactagcagtgtgatttctgtagacatgtatataccttcggattatgtggctgttgataaggtggagaactttcttacaacaccgccaggggaatcaaacaaatcatttcaaggtcgcgaatatattgcgaaacaagatggtgatcatgttggctctgtgtcagcctccagtgaaatgaaatctctagatcttacaggtagttcgagtcaagttcaaccaatagattctcggagttctgaatctttctcgatgttagaatctccccttttatctgaaaaatcaagtcttgaagttccattcattccatccccatccaaaagttctacaatttccactcctcatccgtcgcatatctcagttagtgaatttgatgcatcttcagatcaatcatcaggttcacaaggttcatctgctgtccatacattatttacaattagcccaaaagttctcctcgaaactgatgagtctgggtatggtggtgggccgtgttctgctggagcaagtgcagtgctagattttatggcagaggtctgtgctgacataatgactgagcagattaaagcagtacaggctttggaaagcattttagaaatgcttcctttatatgtggatcctgaatgtgttgtagtatttcaaggcttatgccttagcagagtcatgaactatcttgaaaggcgtttcttgcgtgatgacgaagaggatgacaaaaagctagacaaaagaaaatggtctgcaaacttggatgctttttgctggatgattgtggatcgtgtctatatgggcgcttttcctcaaccaactggagtccttagaacccttgagtttttgctatcaatcctgcaattggctaacaaagat

SEQ ID NO: 3738 - DNA, 1024 bp, Arabidopsis thaliana landsberg
  unsure (1)..(1024): unsure at all n locations
tgtttcgatatctttgactagtaccagatgaagcaaaatcctactaaatgaacgttcggagcgacattgggcaaattcttgggatacatagtcaccgaatgaggaatcgaagccaatcctaagcaaattgacgcaataatcggactaccgtccccttagaacaaaaagaggtccaaaggttgataggtcgcatcgcaactttgaatcgtttcatcgcccgatcaacggacaggtgccttcctttctataaacttctgcgtggaaacacggattttcatttggacaataaatgcgaaaccgctttccaagaactcaaatcctacctcatgagtggggcgatcttagccaaacctgaagttggagaaatcctatatctctctgtctcggtgtcaagttcggcggtgagtggggtactggtacgagacgatcgtggaaatgagaaacctatcttcgacacaagtaaggccctgaatgacgtcgagaccagatatccgactttggaaaagctagcattggcggtaataacggccgctcgaaaactccgagcttactttcagtcgcactccatagtggttttcaccgatcatccactttggacggtactccacagtctaaaccaatccggacaaattgcaaaatgggcgatcgaattaagcgagtatgatgtggagtatcgttcccggccaagtctcatatcacaagtcctggcggatttcatgaccgagctatctccagatgtgattaacaaggcccatgacgagaactggatactttacgcagatggctcctcgtcgttacaaggttccggtctcgggattctgctccaatctccgaccggggaaatccttgaacaatcgcttagacttcaattcaaaccatccaacaacgaagcagagtacgaagcacttctcactggacttcgccttgtaaaggtatcggggccagacatatgaaaactttcagcgattctagctncgtggtcagccagttctttggggaatttgaagccaaaaacgaaagaata

SEQ ID NO: 3739 - DNA, 4611 bp, Arabidopsis thaliana landsberg
  unsure (1)..(4611): unsure at all n locations
atccaagagaatctcggatggggtttaggttatggcatccttaccgttttactcttggtttctctcgttgtggggtataggggaacaccattttacaggcataaggttatcaaaacagacaatttggcgaaagatttggttcaagttcctatcgcggcattcaaaaaccgaaagcttcagtgtcctgatgaccacttggagctttatgagcttgactctcattattnnnnnnnnnnnnnnnnnnnnnnnnnnnnnnnnnnnnnnnnnnnnnnnnnnnnnnnnnnnnnnnnnnnnnnnaatttatttctcttaattattttctcatataataaacttatctcaaattctggttctagataaacggataatctttttttgtcctcaccactatatatatagcgaatcaaaaaccaagagagtatgattgtagtttgactccttgacagagaatcataggccaatagaaccataggataaaaaatctatcaaaattatgccttttgtgtgtggtgcctggtgcctggtggtgggttataaagtggaatatatatacaatgttgttttctttttttttattaatatatctaatctagtgtacctgctctgtagaattttgttagtagatggtccccagttctcaccttctacacgttaatgtgttctccaatatcaccccactacagtttcgtgccgaaatcatttcacattacaaaaactacctaatatagaaaactgaagatatcacaattgatacaattttaaatgtgcgtagctttacttgttggcatatgaagtatcaaacaagtttttggaactgattggacctattccttcatagcagtttaaaagctaaaataagtttattgcattttatctagaattagaaaatatcatggacaagaaaagtcacaaagtcattttcaatgacaattcaattcatagatttatgcatttagattaagtaaaaattaatatggatatttcaattacaggttcttggataaagcggccatttagacaagttcaagagtgccatgtacggtgacaaaagtggaagtggcaaagcgtgtgctaggacttatctttatatggcttgtcactttgatcccaagcaccttgtgggcacaagtcaacactctcttcgtcaaacaagggaccacgctggaccgaaaaattggatccaacttccagatccccgcggcttcattgggaagctttgttacgctctccatgcttctctctgtgcccatgtacgaccaatactttgttcccttcatgcgcaagaaaaccggaaaccctagagggattactttactccaaagactagggatagggtttgcgatacaaattgttgcaatcgcgattgcttcggctgtggaggtcaagaggatgcgcgtgataaaggaatttcacataactagtccgacacaagttgtgcctatgagcattttctggttgctccctcagtactctcttctaggcattggggatgtgtttaacgcgattggtttgcttgagtttttctatgatcagtcacctgaggagatgcagagccttggaacaacgtttttcacgagtggaatcggtcttgggaatctaatataaacgtattattagaatttctttctaattgactccttgacattgtagcccaagaccattgcttcctatatctacttgtgctaagggccgatcatgattcatgaatagcacttgtcaaaatgcacagtgcacgaaacgaattgtcttttcatacccgtcttggcatatcaagttcttattataagtgtgattggcccactcaagatcttctctaacttagcttatcatatataatgacaagggtaagagttaagagtgattaacaataaatatcttctctaatcaaagtatccaactaatttaccttatcatatataatggcatatcaactcttatggtcgaaaatgttgtatttgtcgtggtgtttaattcaacgacgccaaatccctaggttatatgtcttctagtccctgttaatatctcaaggcaaaggaatcctcccccaacattggatttgatgtgcccacctaatcatatattctttggtcgaatatctcctcaaatttttgtcttatacaagcaaaatatatatagccacggggcgtggtaactacgtcaacaacaaattagaaaatcattagtttaaagatatgaaaaatagtgaaacctttttttttaaaaaatagtgaaatttacacactgagtttagactgtttataagcaatttttttgtgtttttttcctccagtaattatctaaactggtacgaactaacaaatatctatatttggaacgtacgagaacttggaggaaaaaaccacgtaagaaaaatgtacaaactgttacgaataataaaatgttttgtccatatacatagagataccaccataaatgcagaagactactataacctaaatttagctatttcagacatataaacgcctatatgaattaagacccagagaaacgaaaacgaaagcacacatgaccagaaaaagctgtacacctacggttttgtctcgttttgaggatcagaacggtgcgtttcatattgataaggtactatcaatatgtctcgtctctttctctttctttgtttcttttgctattattcacaaaaactctctttcgcattgattattattcccattgcttgtttgtcttcatcttcttcctcctctgttctttcaaggggatccaaatatgaacacaacccaaattctaaacccgacccgacccatttggcccagtttctcttcgtccaaatctcttagcggtgatgctaactgcatggagcagcttctcctccattgcgcaaacgccatnnnnnnnnnnnnnnnnnnnnnnnnnnnnnnnnnnnnnnnnnnnnnnnnnnnnntcgcttcacccgacggcgactcaactcaactcaaagactcgcttcctctttcctccgcgcgttaatatcacgcgccgcctccaaaagccctgcgtttgcgtttctatcactggctgctacagcttccatatcccagaaaacgctacaccggttctccgtcatagagctcgctgagttcgtcgacttgacgccatggcaccgtttcggattcatagccgccaacgccgcaatcctcgacgccgtagaaggttactcatccgttcacatcgttgacttaagtttgactcactgcatgcaaatccctactcttatagactccatggcaaacaaactccacaaacaaccgcctccgcttctcaaactcaccgtcattgcttccgacgctgaatttcatccgccgccgttgctcggaatctcctacgaagagctaggttcaaagctagtaaacttcgcaaccacacgtaacgttgcaatggagtttagaatcatatcttcttcttactccgacggcctctcctcccttatcgaacaactaagaatcgacccattcgtcttcaacgaagctctcgtcgttaactgccacatgatgcttcactatatccccgacgaaatattaacttcgaatccactccgatcagttttcttgaaagaacttcgagatctaaacccaacgatcgtaacccttatcgacgaagactcggatttcacgtcgactaactttatctccaggtttatcttttttcggttcaatttcaaaatttaaaccctaaacactaatgtttgacctgatgagtaaaatgtgttttcaaatgttcaggttacggtctcttttataactacatgtggattccttacgataccgccgagatgtttttgacacgtggtagcgagcaaagacagtggtatgaggcagatataagttggaagatagataacgtagtagccaaggaaggtgcggagagagtggagagattagagccgaagagccggtggcttgagcggatgagggaagctaagtttaccggagttgggttcggtgagacggcgatgacagaggttaaaacaatgctggaggaacacgccaccggttggggaatgaagaaagatgttgacgacgataatgacgtggaacgttttgtgctgacgtggaagggacatagcgttatgtttgcttcggcttgggcaccaccaaactaaattaatggggttgctgtgcttatcatgtcttagttaacctgaccccgacccgttgtgtctgaattgtgctgactttcaaactctttttatttagcaaatcaagtaacatgattggtccgttagctaaactctccagctgtatataattttgcacgtgccaagttgactaaacgttgactccctcaatgcagaagcttcttaaaaaaaaaaaaaaagaaatttagaaaatgtgatctattcgtctaaatttcctcaaaatccttcattttgctaattcaagtcgcgattaaaatcgagttcagtactgttccaattcaagcttcattcgactatctggtcttcttcacaaggttagttaactttttcagttctctgtgattttttcgaatctggtaatctgtggaaagagttcaagtttcactaaatctttgttgttgttgtttctgtcgggaatcgaaactgggattttattttattttggtagtttcactgtt

SEQ ID NO: 3740 - DNA, 2095 bp, Arabidopsis thaliana landsberg
tgaagctgaactaacgaagcataaactccgtctttgatattgatcaacgtgtcgtgctttcctttctcaacgatgacgccgttcttaacgacggcaattacgtcagcattcttaatcgtcgataaccggtgagctaccacaatcgtagtccggtttaccataacacggtctagcgcgtcctgaaccacacgctcagactcagcgtcaagagcactcgtggcttcgtcgagcagcaacacctttggatctttgacgatggctctggctatagctactcgttgcttttgtccgcctgataattgaattcctctttctcccaccatcgtatcataaccctaaatcaggcaagtaatctccggttaatttgacccgacccgataacccattgatttgggaatcagagtaagaaccctaaaggttgagtttttacctgttgcagaccactgatgaatccatgggcgtttgataattcagctgaagatacgatttcggattcactcgcgtctcctcctttgccataagcaatgttggctctaattgtctcgttgaacaagattggttcttggctcacaagtcccgtttgttgtcttagccattttagtcttaggctcttgatctctacaccgtcaagagtgatctcacctgaatctggatcgtaaaacctctgcaacaatgcaatcaccgttgatttcccgctaccgctttctccaaccaaagcaactgtctggaatgtgaaacagagaacagaggtttactcaaaaggttctgccttttttgctcaaagaatgaaagttttgaaatcctaaccttgccagcgcgaatagacagacagagatcttggaagatctgaacatctggtcttgaaggatatttgaaactaatatgacgaagttcgatatctcctttaacattatcaagaactctcccagactcatcacttggatcaatcttcgattctctgtctataaccgcgaagatcgatgcagccgcattgctagctttgctggaatcaggagacaatgaacttgactgagaaatagctacagccgccattgtcaaagcaaagaaaacctgtttcgaaacaacacaaaacactctttagaaggggacaaaaaacaggaatcatgagtttctgaaatgtttttgttgcctttaccctgaaaacagaatcaaaggttgttttcccgtcatcgacaagccttgcacccgcgtagaaactggcggcgtaagaagagaagaggacgaagaaagaaacaccgaaaccgataccactaactatgccttgacgtattcctgttctcataggaccttcacatttcttcttatacattttcatcactttctcctctgcacagaatgaagcaaccgttcttatgctccccaccgcatcattcgctacttggctcgcttcctcatacattctctgccaacaattttccgtttcatcagacaaaaaatagagatatgtaacttgtatagaaaatcaaagagagtttagtcgtacctttgcatctgcactgaagccaaccatgaacttcatgtatatataaccattaagcccgattagcggaagcatcgcgagaacaatgaaagctaactgccaactcgccacaaacgcgatgaccaaacccgcggttacagacgcaagattctgaaccgtttgagccaatgcgtctccaactagaccacggaccgtagctgcatcagcagagagcctagctccaatagcaccacttgagttctcagtctcatcaaaccatccaacttccatacgaacaactttctcaaaacacattgatcttatccgctgcactagtttacatccggctatggaaaaaaagatcgtttgtgctgggaagaccaccattgaagctacaccaagaagcatgaagatgattgcccaaaaccttgtatcggattttaactgctcaggtggtttgaaaaatgctttgatcacgcttgagattagaatcccgaatatcggaagaataactccgtttaagaccgcggctatagatccgagtataagcataggaatctctggtttgtttagagcagcgactctaaagaaagagactttcttttctttgatcgg

SEQ ID NO: 3741 - DNA, 1439 bp, Arabidopsis thaliana landsberg
ggccattacgatgaacaaaaggtagaataaatgtgtacttctttctttctcatcaagcattactagttcacccatatgaagtttgatctctgtggatgaagataggaaactcggtttcttggctagacatatttcctttttttgaaaaaatcttctgtgtgcttttgcaattatgcttcagatatatccaaccaagcattggctggtaggatcatcactgccttcgaaatttaatccagctattgtgcaaaaggttctcgatgagctttctcccaataatgttcggtaagtctctgttcctggaatgcatgccttgctgcctactatattctaaatgtcttgtaaactaaataggttttcaccaagctaactttgcattggccatatgatctctattttatgcaaaatttccattggctttttggcggtttactttaagcagccctcagtccccaatgtgttatgttcatacaatttacatgtagttcaagcattgaatcctgactgcttacggcctagtaagcttttcttgttgccgaatctaatgccattatatttgtagaatcttttgggagtcaaataaatttgaagggcaaactgacaaggttgagccatggtataacactgcttattcacttgagaagataaccaaattcaccattcaggttggcttttaatgtattaatttcttgaagatccgattatacttgcatgtttattttcctctgcacgaattttgattctgcttgattcaatatttttctatttctctggaggaaaattgtaatttgtgcttaacaagtacaggagtgggtgcagtcagcccctgatgtaaacctgcttctaccaacacctaatgtcttcattcctacggaattttcattaaaggatttaaaggataaggttcagttccatcactctagttacaatttacaactgtctttcaaattctaatgtttgaagcagtaagcttatgtcacataattaagttctggaacaggatacctttcctgttttgctgagaaagacatcattctcaagattgtggtataagcctgacacaaagttcttcaaaccaaaggcatacgttaagatggatttcaactgcccccttgcagtcagctctcccgacgctgcggttctttcagatatttttgtttggttgctagtggactatttgaatgaatatggtaagattttatagctagacgtctttcagtcatttctctatcaactacggccttttcttgatattagtcaagaaaattgtatgctaagtatgtggagctaaggctctgaaagcaaaggtcgatttccaaggtaaaatgtagggggaattttcaaatttgtctcatacgatatgctttcatgtggtagttcggctgggaagtccttctagctctcgttcaattcacataacgtgtgttacgatatcagta

SEQ ID NO: 3742 - DNA, 803 bp, Arabidopsis thaliana landsberg
tacaaattgaggatcttgctggaagctgtcattcaaaagatagcaaaattcgaagttaaacctgacaggttttccgttatcaaggtaaccttgttaatagacatcgcccctcttttaaaattaccacgacgcttctttataaggtctgtacgtggtaagatattgccaacttcctccctacatccaacaagccctgtgaactgatgtacctactccattttttctgctcccctgtcctgtaataggaaacagtcacaaaggcataccaaaataacaaattccaacaaccacatgaacaagcaacgaattactgctcactagtattacaagatcagatttggccttggacagaggaactagatgctctttctcatttggaagctgaagacttggctaatttcgttccgctgctattatcaaggacatttgttgagtgctatatagcaggtatatcaacattatccctactgtatgattgtatctggtctcttatctttttccttttcttatagcccttgtggtgtctcattccagggaatgttgagaaggacgaagctgagtcaatggtcaagcatattgaagatgttctttttaccgactcaaaacctatttgtcgtccgttatttccatcccagttcctgacaaatagggttacagagctcggaacaggaatgaaacacttttactatcaggaaggttcaaactccagtgatgaaaattctgccctagtgcattatattcaggtatagttgtgacaagattagtaggatagacttcgaactaaagtcttataaagctttgct

SEQ ID NO: 3743 - DNA, 695 bp, Arabidopsis thaliana landsberg
ccggaatcgagttgggacctcctcatagtttcaacgacccgtaaagaggttgagactttctgaaacattcaatgtcttcgatttctatggatgttgatgggatcttgtctttgtcatttcgcatttccttcaaatgttggtttccgtaaacgcatatgctcaacgatttcttatttggtgcgtcaacctttatgtattcgtcaaagaaatctatcaattcgtccttctttagcagtctcagtgcagccacctaaaccccaacattaaggttcttaaataggagattactagaaagaagttggaaaaaggaagagttttgtctattacctctgcatctatgcggttgaatttgagtgtcccggtttgaatctctgcccagtaaaaccaggattcctcatccaagttcttgtccttttcaagcttcatatctatcaaatttgttacattgctctgaggagaaaagtcatgtccgatagtacatcaatgtttatctcaagcaaatcaaatatcatctagcttgtgtctctaaccttgaattcttcatcgctcatattgtaaaatttactctccaggtcctttagtagtgactcaactctcgaatcaatatgtcctggaccctattaacgataaactcaaaaccaattaaagagatctgcattgattatgcaaagtcttgagtggtagagaggcaatac

SEQ ID NO: 3744 - DNA, 738 bp, Arabidopsis thaliana landsberg
cgatttggatcctgttccagttgatttgtgggcgagtgtgagattgacgagaccgagatgattgtgatcggaaacagaggagagaagcagtgtcggtggtgttgtagtggaagaagaacgcagcgacggtgacgatgaagaggaagatgattacgattctgtagacattgtcggaaacccatgaagagaaatctaggattttgggttcagcgaatcggtcccgactaggaagttctctgatccgagattttggtggcttaggagccacacgatcttgaaccaacatcagattcaagcactaaacctgcaaaacccagaccaaaacccagaagcaagactctgaattcagataccaaaatcaaatcacaaagagtagtgtaggtttcctatccagggcaaacaaagagagactctctctgcaggaaatcggttgttgtcggaatttggaggttgcttatgcttcaattcaatgcaaactgcgaaagcgaagtcgggcgatgagctgcgaggtcaatgacttactgtttggggaatgtcttactaattatgttttttcctttgtttgttctttacgttttgattactgaaacactacaacaatgcccacatcactcatctatccttctatgtgcaaagagacaacaactaaagagcagatctgtaggaccagagaaaccatgacatgatggaaaaggtacatattaactaaaggctgatcagcttattggattatctaat

SEQ ID NO: 3745 - DNA, 976 bp, Arabidopsis thaliana landsberg
agtccaaaacccttggtctgccgttacgaagctcaaatcaagattcgtctccaacagcagatgctgatttgatctccaagcaagcaaggatttgatcaacgatccgacattgatatggagatctttctcatcaaagggagggtaagattcgactcaatcataccggtgaacagttggtggatatacagcgacataaccaccaagctcccataaaagcctttgtccccagtaacctctaatcacatctgaagccatggaactaaccgaaacaggaagcattaacccccaaaacgcagaggaatggtacaatgtgttaaacgaattcacaggcaccatcataccttgaggcaacgccactttaggagaatgctcatcgaatctgatatcaaacggttcgaaagtcgtcttcctagtggaataatacacggaatcaacatccggcaaaccgttggaaatcccttgctgaataaactgtttaccaccaaaaacctcagtgtaatactcttcatgattgatctcacctacattctctaatggcaaacctctaggccaaaccgatcgttgcccgaaatggatatacggattcaccacagttcgattcgggttttcgtgactatactgtaagattggttcttgcctagcgtcttctccaactaactctacatcaaaatgtttcccaagatctccatcaatcacttcaccacgatcatctgcatcaaagatcttctttgcaccatgctggatcgcaaacaagtaaccgacacttttgcgtacgaaggaatcataaggcaaatgatccaaaatccggtaattaagctcagcttgagcatctagagatagaaaaatcgcacctttgagattccaatctttaggtgttaaagagtttccgatcgctagaacttgccatcctttaatcttgaccaaacctttgagctcctctgttgggtgctttgtcaccgacacaacgatccatttc

SEQ ID NO: 3746 - DNA, 3063 bp, Arabidopsis thaliana landsberg
cacatgtcccactcctccacaagagtaacacttggcgcaatcaaccatataaggcatagcctgtggtggatgcaagcactgctcagtcgaatgatcagtatagccacatatctcccacggacgcttagccggagtgggtaacttccttctaactgacttcctcgccgttgcccgtattctgggcttaaccttggaattaatcccatatccgatccgaagtggatgcagatttactccaacgatcctttgggccttagacttctccgactctattcctacttcggtcgttctctttccctttcgcctctcgtcttctccctccttatcaaccatcttttctttcgacctttcttcatcaagttttaaatgattcattaaatactcgtggtttagttcctgttcaagcagcatcggatcccaccttcctcttccttcttcttcacttggctcatctcccttaaacatctcaatctcccaacatgattccggcttgctgggattcagcatcatcacaatgttgtccgatgagatgttgatcacactcggactcttaggctctagcgtcaatgactcaaatgagtccgatgaggaatcacccccatcgttcccatttcctcctccttttttcccgatcagaccaaaatcttgagcacactcagctatcaactgatcgatcgcgtgctctaactcattctctatggcttcattctcatcttctttgttatttcccataagcattagcatttcatactcgtcgttggccccatactcattcatcgcaccaaacgcaccatttgcgtggattactggtacatcgaacaagtctgcattcaattcttccaactttaacccatgctcgccaatagttcccagattcggaacaccaaagcttcccttctcatccgtcgatggcacatagaattgcgtcaacatattgttcagactatcattcacttgttcctcagtcgcgttctcggttggcaccgcaaataactcaccatcctcgatgatcatccgctcaacatggtttgcttcttcactagataacggattagcatcttccatactttccaaacatctgacggatccgattcaatcgatgtgtcggactcagtggattcactatcttctgccataaactgatcattcatggccacaaacaaactttcatcgtcagtactgcttgacggaacggagttctcaagattgggcacattaacactatgcaacagactaacggtgttgcttcctttgctagacgacatctgcaaaacgaggtaaacctatcccccacttagtcatctaaaagaagaacaaccagaatcttatgttgcattctgcgactcaaatttacttggtaaaattattgaaaacccgagtgtccacgagcatcgcataaccctgctctgataccaagaattctaacgccctcgaataaaataataaatcatcaagtaaacttagttgagtccatattcacttagcctagccatgcactagttcatttcattccttaatgatattaactatcaagttcgtcaaatgctcatattattttaagagtcaagttctaacttaagccaaattctgattagttaagtttaagtgagtaaccatgcatataatctaaagactagctctagaaaacatgcaaacaaaaacataattcgaccacaactgacagattcggtaagttttttagtcgcgggcagaatctcttaatcacggtcgacgacttctcactaggatgagttctctcgaccacatgcgattatttcgcacttacgatcagactttcctagaccacgggcaagatttactgaattcgggcaagttttcttggtttcggacgagttatcggtcagacagccttacagtctctctcgccttcaaaaatgaaaatggactgagaatagcatcattttatagtccacccaaggtcggccatgtagcaccgcccgctgccacatgtctagacagttgccgcacccacatgcgactggtgtctcgggcgatggcgtggcgacaggtgtctacgggtgtcattccattgccccatcagcttcggctccaagactcagccgaattcgactccaaggttggtgacttgattcgcatgtcaccgcaagtgaggtgtccacacgtcggttccacggccaacgtggcaaacttcgcccgcggtacgccaaacttttcccatctttgcccattcgtgcccattcttgtccatgtttgccctttgacagtttagcattttttgggcacatgcggtgcattggccatgcattcgagcaactttttctcattcggtcctttgccgtacccgatgcccttatgcgggtcactatagggttattgctcggatgttcagagaagaagcaagaaggcgcccttctttgtggtggactgacatcgaagatgagataatgatgaggtacacaatctctgtctctaagtggatatgccagaaagcaagcaggatggctttaaatttggtgatagaaacgcagaaacaacaatttgcaaagctatacaattatgaggctgaactgcacatatctaatgagcgtatccacatagacatcatgaccattcccaaagctgatagtaagcagcaatttgacaagttttatatctgttttgatgcgttaagaacaacttggaaaaattgcttttggcctagatgggttcatttttgaaatgggaattgaagggtgagattctagcagctgtggggagggatgcagataatagaatctaccttgtagcttgggctgtagttagagtggaggataatgagtcatagattcaagaagggtttgggtttagctttaggtggagatttgacagtgatttcagataagcaaaaaggattgctcaatgaggttagaagacatgcttcctcaagctcaagttgtgaggatgttagcaacaacttatgtgagagtttcgacagaacaatcagagaagcgaggaagaaacctgtgataaaaaagcttgaaataataagaagacaagcaataaagcgtctttccaagagacgggataagactgctcatgcaa

SEQ ID NO: 3747 - DNA, 823 bp, Arabidopsis thaliana landsberg
tctgagacgaagcgtttagggacatagaaaacttccgttctgcacatcgttaagcttgtgccatcgctattctttgtggcttccttgtaattgacttggaaatgaaccggcattgtactgacaattttcttgactaattccgcctgaaccgaataccaatccgagttcccggctggtctcaccgttgtccatgactccgttacctaaaaaagggactctttgtcataaaaccgaatccaaccataactcctcaaaccaaacattttttaaaatccaattggtactattatatttatgctgaacaactagctactgaatgagtaccttgtctgtagtccagagcttggttttgtcagcttgaagtaaattccagtaattaagaactgtatcatcttcaacaaacacaaatccgtcagcgctgctgtaccgatcaaatatcttcggtagccgcctgaaatggatataacagagctacagttagaaagctcacattggtggaagaataggttgaaactgagattctatgcaagtttccttgattacttgtatatgtgatcgagtttagcttcttggacgtaaaggtctgagtttttccgagaggacaaaatgaccacggttttgaatatccgcccataaagtaacctccattcaagagcagtacgttccacaggtccgttacagaacattataagcactacattcccaaaattcttcctccacttaatcaagttcccaatttcagaactcactgtgcctatcttctcgaccccaacatgaaccgaaggcaattttctaggaacaaactcttttctatctccatgac

SEQ ID NO: 3748 - DNA, 5043 bp, Arabidopsis thaliana landsberg
  unsure (1)..(5043): unsure at all n locations
atagtccaaagtagtcttgaatccattaggtgaaatcaataggcgtttgctagtatgtaacatttgctgtagatgttaaagttagttttctttaagtgtttattgattgtcctttagtgcaattgtatgcaagatatgaaggtttcagtactttttagttatcaattcgcttaggatgtctttgtagcttttttctgtgatacacaattttgagttcctttattttatgtcatgagcagaaaaatcatcnnnnnnnnnnnnnnnnnnnnnnnnnnnaaatatcatttgatactgtgcaacaattgatggaagtcaagcgggatttgttacatattgtcgaacgaaaccaggcaaaatttgatgcacttgaagcatacgaatccatattggctggaaaacggtaagacatgtaattttgttcttttaaatcacttaagagttttgttgattttcaatttttacctcttaacctatgttgtttcttagttatttttcaagtttatttttaagggtttcagatgtcctgatcatttttatctttattcttggaacgcagagaacaacgtcctcaagattgcttagactctatcgtggacctccgcgagtacgatgtaccttatcatgttcgatttgcaattgataatggtatcttgtttagtcaaaccagaatttctgtttagtcctcaaaattgtcaaaatcatgatgttttcttggtgtccagatgtgcggagtgggcaatggtacaatgtcagtatttccagcaccgatgtcatattggagaagaggacagatcttcttcaacgcgcagaagtccgtgtttgtgccttcgatatagagacaacaaagcttccgttgaagtttcctgatgctgaatatgatcaaattatgatgatatcctacatggtcgatgggcaaggttttctaattattaacagagaggtaactgctgtatacatttgtctgtattggatctgatattgtaatgatgattttttacatggtggatggggattgttaattcattaatttagagaacctactatatggccttgctttgccatttttgtagaaatgatccatataagattatcccgcttgtttaattgatttcgtatgatgtaactttaagactgtttttggactagcataacattttgctataatttaaaacataaattctgatatgttaaccgttttttgttgcatatatcatctctgtttgatatctcagctctatgctttccttatatattttgtactactgcaatcttgtttgattattaatgtagcatctttgcacttaattcagtgtgttggcgaagatgtagaagatctggaatatacacccaaaccagaatttgaagggtatttcaaagttactaatgttaaaaatgaggtaaaatacttaagctcctgatttgaatataaaatcagaaacattgatgtgcaggtgagttatttcttggttttttcttgtaggttgaactcctccaaagatggttttaccatatgcaagagttgaaacccggtatttatgttacatacaacggtgacttttttgactggccatttatagaacggagagcatctcatcatgggataaaaatgaatgaggtatgctaaagttttattcgttgtggttttgaattaattttatttgtctgcatgactaaacggatataatatatctacttggaaagtgtatataaaagtttgtgacattattcgctgacattctatagtggccttgtgagtgtgcctctgcataaagtagaatagtgacgctgctcaagtacttcctagactgtgtactgaattatcttgcacgacgatgcttacttttacatattattgtttccttgtggaagataaattttcatccttcaaaatattcagtgacttgtgttttgcatttcaatactgaagtcttctgagagttggcaaggtgctgccactcattctcccggaacttggttctcttctcagttctgtttaaacctatctttcttgctttttcatttaaaacctagttcgttgcatcttactcgtcacttcctatcctatttctactatcttccactggagcataatggtcaactgttattccataattggctggtgtgttttgtttctttcccttgtggttcaggaattgggattccgttgtgatcagaatcagggtgaatgtcgagctaaattcgcttgtcatttggattgttttgcttgggttaaacgtgatagctatcttcctcagggaagccatggtctgaaggttcattctacttctatatctgagcgattatttatcttttgtggtcatataatattttgttaagaaagtcatattatgattttgatgcttgtttcttaattaaatgccaggctgttacaaaggcaaaactaggttatgatccactggaagtgaacccagaggacatggttcggtttgcgatggaaaagccccaggtattgacgagaagttaatcctgctatttctgtaaaacatgtttttttaaccattagagctggttgttagatactagaatgggctagagttacaaactgtcgatgataagtgatcaagtgattcaactatggctcttcatgggttgcataaatgttcttctgttcatctttaattcattgtcttatcatcagtacacaaaatttagaagcggacatagaattcaggcaattaatggtgtcaactgtagatttttctagtctctctgtagtgcttgaaatatttgtatgggtgcttatatcttatttctattcaatgctgggaatcatctcgcagacaatggcctcctactctgtctctgatgctgttgcaacttattacctatacatgacatatgtcaatccattcattttttctctcgcaactatcatcccaatggtccctgatgaggttttacgtaaagggagtggcaccctttgtgaaatgcttctgatggttgaggtatcaacctatttaccacaaggtttttagcaatctttactgtgtgacacattctattaattggaagttttccattcagcacaggcttacaaggcaaatgttgtatgtcccaacaaaaatcaagctgaccctgagaaattctaccaaaatcaacttcttgaaagtgagacatatattggtggtcatgtagagtgccttgaaagtggtgttttcagatctgacattccaaccagttttaaactcgattcatcggcataccaggcaatttatctgctttatatttattcactataatgtttgttgatttgtttaattgattgctgagcattactttttctgatagagtttcaattcaattgtcactgatttgtctgtagtttcctctgaagtgctgcagtttatagtaaaatctatgtagtctgtaatgaatgtgtgaagcaaaatgcttcccattcttgtgtgcatgattgtatcatagctaattaatgcacctatctgatatttgacgctttgattgccagcaactgatcgataaccttggtcgggatctggaatatgctatcactgtagaaggaaaaatgagaatggattcaatttccaattatgatgaagtgaaggacgaaatcaaggagaaggtaatgaatttctcttctgaataaaaatattgatttaatgtttgttcccttgtttcttgtcagcatgttgttactcttgtcgctttgtatggctgacactgcatacacattcatactgaaagatttttcttatacactcatacatgcttagctcgtatctatgagccttatctcatgtagagtaatcccattagggcttgtggaagaacattagttagtccttagactactgtttgagcctccggaggaaatctgtctgtcaagtatcctctatcatagttgttatcaactatcatctgcatgcttggatattttaaagcagaatttataacctgatcgtcttgtgaattatctccctttatctttgattcgggttgaagtcttagttctgtcgtggtttggcggttttattgattttgtagcttgagaagttacgagatgaccctatacgggaagaggggcctcttatttatcaccttgatgtcgcagccatgtatccaaatatcatcttaacaaacaggcttcaggtacatctaatctctgtttgcatgtttctaactgatttagggattatatgttgtagcatgcgattgtaaataaatatctaccaaacatcagctaattggtgatgttccatatacaaaataatcacaaccgtgacttttacgattgtgaaccccctagatatattatgttaagcgaaagtttcctctaaattctcagccaccatcaatagttacggatgagatttgcacagcatgtgatttcaaccgcccgggaaagacctgtcttagaaaacttgaatgggtttggcgtggtgtgacattcatgggaaagaaaaggttcttaacatatatatcattcctaactttggatttaaaccttgttggtatagtcttaagttctcaactttgtttcaaatggtttgcagtgattattaccatttgaagaagcagattgagtctgaatttgttgatgctggtgcaaatataatgtcttcaaaatcgttccttgatctgccaaaggtggatcaacaatctaagctaaaagaacgactaaaaaaatattgtcaaaaggtactctctctccaccgtagtaatattttccccacaatgtcaatatataatggcaagttttctgctattggtaggcttataaacgnnnnnnnnnnnnnnnnnnnnntgaagttcgtgaagctgggatatgcatgagagaaaaccctttctatgtggatactgttcggaggtgcgtttcttgattaagactctatttgtcgtttagtcttttgggaagcatctctcttgggtgaacatacaactgctgataatgaaacatttagacaagtactaattactttttcaaattgctttttatttggtggtctttgtatgttattaaagctttcgagataggaggtatgaatacaaaacacttaacaaggt

SEQ ID NO: 3749 - DNA, 1188 bp, Arabidopsis thaliana landsberg
aggacaatcaataaacacttaaagaaaactaactttaacatctacagcccatgttacatactagcaaacgcctattgatttcacctaatggattcaagactacttttggactatttactacaaatgttcagttttgggttacaagaagaggataacaactaaaggttgtagcaaatatttctgatatgagtagagaaacaacattaatcaactggtggaagacactagtcaactacatcacacaatgaggaagtcagacttaaactaataataatcatagtatgctttactgacttacaagatcaagatcttctttttcaacaatctcaatatcagcaacttgtctttcatatcggcgtctcaagtaggcttcgagttccaattccattttgtcctgtaatttggcattgcagtttattgacatataaaatgaaaatacatgaatgattcaaggagaattccgataatgtccagagagaaactatcatactttcgtggctgcataaaagtaaggacggaacttgtactttgtcttgaaagaaaagccgtcctgaaaaaaatcctcaactcagttaactatttagaaaaatgcaacaacaaaaatataatcgttcatcaacttatacgaagctgacatagtaatgagtaatgaccataattatagcagctcacctgagtaacaaagtaaaggtccacacaactatagactttcccagtatcgcgatcttcccaagatgactgcaaaacgtagtagattatccaatcagtaaatactagtactttgacattacctagaatcctaaattctcgcactaatggagtttcattgtatggttcagtcgccaatgcttatatttaatttacagaaattcacatataatcgaatccgaaacctactcaaatactctcaattaacaaggttgagtccagattagagtgtcggagaacttaccgatgagaatgtgagtaaccacccaagtcgggtttcaccttcagagaaaagcccaaatccgagtttagattcgagttcatcttccgcagtgttcactaccttaggcttcttcgaccaccgcgtatcctttcgatcccgtcttcgattatctccgctcattttgcggcgattataaattacgcgggacagagagagattcctatatagagaggagctttattcctggagaagctttg

SEQ ID NO: 3750 - DNA, 1354 bp, Arabidopsis thaliana landsberg
gcgtatactagcaatcgtgcgcaaaagaaaatggagcatttttgcctcattcatccattacagactagaaacggtttactataaactgcaccaccttatatgagattactttaaactcacctgaaacaaaaaagtggtgttcagcaaccagcattattaagtaaattataaagaagataacttgcctggtatgcggatgcgtcgagcttaaaactggttggaatgtcagatctgaaaacaccactttggaggcactctacatggccaccaatatatgtctcactttcaacaagtttaccttggtagaacttctcagggtcagcttgatttttgttgggacatacaacatttgccttgtaagcctgtgctgggaatgaaatatttccaattaatagaatgagccacacagcagaacatctttgtagtagataggaagtcacctcaaccatcaaaagcatttcacaaagggtgccactccctttgcgtaaaacctcatcagggaccattggaatgatagttgcgagagaaaaaacgaacggatggacatatgtcatgtataggtagtaagttgcaacagcatcagagacagagtaggaggccattgtctgcaacaagattcccaacatgaaacagaaataacatataagctccaaattccatgcagtatcttgcacaactattagttaaattacttgataaaatatgttactctagctcattccagcgccatcaaacaactagctctgattctaaaaaactttgtcacacagaaatagcattttatgaattaatcagcaatacctgtggcttttccattgcaaaccgaaccatgtcctcaggattcacttccagtggatcgtaacccagttttgcctttgtaacagcctggcatttagttaagaggcaagcaccactcagaatcataatatgaattcctccacaaaagaaaaataatggcgaaaagaaagaaacagaatgaaccttcagaccctggcttccctgaggaagatagctatcacgtttcacccaagaaaaacaatccaaatggcacacaaacttagctcgacattcaccttgattttgatcacaacggaatcccaactcctgcaaccacgatggaaggaaaaaaaaaaacattatgccctggggatgggaaatagaaccgaggtctggtagatgagtgccaccttgccaattctaagaaaacttcagaattcaaacgcaaaacacattactaatctagttttaagcagaggcacattcacaaggtggcaacaaaatatcagtgaataatgtcacaaagaatttctcaagtagatcatatatttgatgcagacagaatattttgttagca

SEQ ID NO: 3751 - DNA, 881 bp, Arabidopsis thaliana landsberg
gttccatcatgattgaaaacagcataacgcttcttgattaagattccttcttctttcgatgcaggaataatcattgcctgaatggagagggttataaatatttttttgtgcagcaattaaagagcagcacatgtcaaaaattcaaagcgtttaagcataccttgtacggtccatctacttcaaattcaattgagcattcactatgtgatttatatgtcttgcgtacaggatctacaagagtctgttccaaaaccaaaattaagagtaaaaacagaaactgaacacaaggcaaaatgctttcagaaccacaaaagggcttgttatatcatctgcttatttaagactgaacacagaagctacttttaagtaaggaatagccggcaaacctgatattgatcatttgtattattctttgccacatcaacattaagcataacacaaggatacgagatggtgagtttcttcatgtctctgcaataatgaaaaccattgatggtttattaacatctctagaaccacaagaaaatgtaatccaccttaattaaacaaggaaataaaacgcctcttggaaataccttagagtgaaatgctatatattaaaaaaaaaaaacagaacaaggaaattcctaacatagacatgtaatgatgtaaatcatggagattacaaaatcttacattgttttaaaagtaaagttctcaggaaaagatccagggagacaacaccatataccatctgtatccaactcaagtggtttcccaattcgctcaataagcaaacgggcattctgtatgattttggctccagtataggtaactacaccagccatttccatggaataccatcttgcacccctggaattagttttagtcttagagaacgg

SEQ ID NO: 3752 - DNA, 387 bp, Arabidopsis thaliana landsberg
  unsure (1)..(387): unsure at all n locations
aagcagtcttgatgacgttgttctctacatttcaagacttttaatcataactaaggaacaacatagttttaagggataaatttgtaagaactctggaaatttataagaacaaaaatacattgccttaccgttttccagacaagatggattcgtaagcttcaagtgcattaaattttgcgaggtttcgttcgacaatatgcaacagatccctctttacttccaccnnnnnnnnnnnnnnnnnnnnnnnnnnnnnnagatattnnnnnnnnnnnnnnnnnngatgatttttctgctcatgaacataagaaatcaagaaactcaaattggtatggtaggtcaaagaaaaggtcagcaaaagtgacaaccaaacatgaggtactgaaaacg

SEQ ID NO: 3753 - DNA, 5804 bp, Arabidopsis thaliana landsberg
tgaatttgcatttccaatgccctgcagagcttggaactgatacaatacaggaaaggacaacacgtaatctgcgcggatcctaaggtactggaccgacacttgaaagcggcaggccgaggtggtcttgatgtggatgtgagcaaaatgatatggactccttacaaagagcagagctaagagggcattacacttcaaatagttatggttatggtctacttttaatctgcatatccttagatgacttttgtctgtaacaatttaacacgcactctgttcaatagatcttgtaactgtaggaatcttttgtctggatggtaaaacgatcagtagtaactttggtgtttcattcttgttccattctgattgacaacagtttggttaaaatttggaatatttgaaaaaatgccgaaagagaagttttataactaaatgttaaaaatttctggctttctacttcggctagagatctccggatatcaaaaacagaaaagatatcaagggatatgtgaaaactataattaagatgactataaatgagatgtaatgatacagaacaaaaaaagtttggaaaattttagttagggttctttgtgctcctttgaactgcaaatacactctggatatggattctcataaaaggcttcttcagttctaaaccgtgcacgtcctttgatcccctgcgttggtcctttccttctcctcggtgcaccttgtctgcaaaaccgatcaaacaaatcctcttctcgcatcaaagatgtgcttttttttataggtttattgtttaagaagcaaacgtatgactcttttgctacctgtctttatgcatttgattcacaaaattggacaactttggtccttcttttagctgtcctctctccatcttaccgaagagtttcactagtcctttcctgcatacaacaccaaacttgtcatgggctataacaaaatgactaaaagattaatgcttttttttaaggtaacagaaggaaggagatagaacctgtcgggagtgatagtcctgcgatgccctagaaatctgcggtgaccttcaactgctcttgccatgtttccagaatgtgaaggaacaaacacatcactctcaacagaaattatgtaatcaagagcagccgttttagtcgcatggccagtgaaaccttttaactcttcgttcccagcaagcgtttcctacaaaatccagtacatgaaacataaacatttatcatctttagattgtcagtaacatgaaagattagaggtggttgaacagaccttaaaaaccagatttgggaagcgcgacttaagctcagagagtctatcatcacccccatagatttcccctgctgcaatatatatgactgttgactgagaatatccgagacctttcagaaatattcccacttcttttggagtcaatggacaaaggccttcctctctctgctctgttgaatttatacttttgatcttccaatggcttgtactttccctgtgaccaacagataacatattgagcttgaaactgtaattttatcccatgaagacgttttgcatgtttgctttgttaagaatagatgcagagagtaatcaattaccgcattactctcagttcttcggattcagcatcagtgagaccataggtgcaaccagtgaaagccaacatatctttctcatatctcaggtgcaatgcaatatatctcccagcacgtgacttgagtctctcaaccagcttctgtggtgtcaccgtcatgattgctcagaacccacagtctacaggaatccccataggacacctcttaaatgcataaactacgtttgatagaaaaagatgtatccattctcctattctatcattacacacctcttaaatgcataaactatgttattgcaagttctatcatttgacaatgaaaactcgttgacccaaacgatggttttgaaacttctatatagctattcggtacccaaagagaacattaacttgaaatcttatgtgtatgaaatgaattttatgttactacagcctatctatgttgtgtacaagacaggaaaagggtcccaacctgtccaaggctttcaattgcaggagagaagcggagaccacgatatagtacacgacatctcagtctttgaacgtcgataggcaggtcattatttgcaaggcgagaatctgattttgcgacatggatgacctgcattgttattattctatcagcagttgaatgaaacagcaaatgcaaaatgttaaaaagaagttgcttaagaccgaccttgtactccttccacaagtgagtcatttcttcataatatccaacactagaccaagaagtgaaatgcttccttgctctaggtagagattccacttcctttgggagctttttaataaccttgacatctcttcgcaatgatttaatgaattgttcctcgtcaaaaatatctgaaaaaacactgagacatagcgaaaatgtaagttagaaatagtataaatctcataaccactaattaagtaagctgcattttttgtttgtttgaagtttcaaaataccttgaatcttgccaaaacgatcgcttatccagctcaggaatgactaaagttgcattcatgatgtgcgcaacagccactatatctgctatctgtacaataacatgcttattgaatcactttggtactaagcaagacaaaaagaatcatgaaaacaacaacttaaatggttttacttacaccagtacgcatttgatttagtccaccattacttctcactgttatataatgatctgattctgaaaattctgcaagaaacgaacttgaaatcaatcaaaagcacagttctgaattcataaacaaaacccaagatagatccatcagaaattggaagtgagcttctttggcatacctttgtatttcggagtaggtttgacacatggatgcaacccaaagctgaaaggaggagtccaaagttgagtattttcatacggtttctgcaaattctgaagctcaataaagttatgctttctcaattgttccgatcaaaaaccaaatcaagtcacctcattccttcattcaaatccacaacccatgaaatattaacaactttaccttcctaggaggcaaatacggtggcggaaatgattctgaatcgattagatcccgatgatgttgttgttgatgtttggtgtggtcatcatcggtttgaatgtttctggagctgaagacgagaacccagatggtaaaagcaaagacgaagatcaagtagagagaaattgcttttctagagaagaattttgctattgaagaagaatatgagattatcgagcgagatgagtttctgtgtttcaccatcttcgatgaagaagacagatctacaacggtctctttcctcctccggacatcgagcttttgcttgttcaaaaccaaaccggttttgaaattgctgttttaccggaatttttgataacgtccggttctcgcatcaccggtaataacaacattttaaaaacaccgttccaaagataccggtatcttcataattagtatttgatagtgaaccagtggtggtgttcggttaaaataaaaccgataatgcgtcttcgagaaactgtttaaaacgcggcgttttcaagcttttgctcgttcaaaaccggtttggtttcgaaaattgctgttttatcggaaattcgattggtaacgtccggttatcgcatcaccggtgcgattccttttccaattaatgtaaacgcaccgtttcaagtgcacagctccaaatttcacctctaaaaaccttatagactttatatatatttttttcaaatttaactaaaaagggttattttgaaaatgcacatctcaaagaaatatttttgaagaaaacacacacaccaagaaggcatttctcaaaaattctcaacatttaaaaccttttaatttttgtttgaatagtaatattaagctcatgtaaaacttagagcttttactttaatagagccaagttgctttaaaaaaaaaaaaatgttgaatttaaattagagactaagatatcaattttttaaggataattaactcattcatctttttttctaaaagatcatatttacgactatttcacggttaaacttatttttttttttgatttttttaattatttttaatctataatcacaagtgaacttttttgaattacacatttgttatttatcaatattaggtaggttaaattttggatttatgtttgattcatttttttttttgaaaaacatcgtctttggcatccgtaaccctaggcacagatctgccaaaaattatcatcagcttgatctatacaatctataagtttacttgatgtcttgtacaaatcatacacaaacataatcttataccattttgcttgcgctgatttgattggtctcctatattgcggtaagttgttatcgaggacaactaagaaaatgtgaatctctcaaaatgtggaaagtataagtgagagagatcgtgaggtactctctaagctttttgacgagatatgtccttgtcctttaaaacggtttaccgatccttttctgtcacattcaagaaacgatgcaaccaccggtaaatccacgttgaaagaaaaatgtcaactgacatcaattaaaatatataaattaaattgtttgcaagctttcaagtcaattggctcatttggttgagatctctatgacttgacccacctagttcaagtttgaaccttcttttagatctctttttatgtttttagtattatttattccttggtcataaccgataattcaattatttttcttttttttttctttttcttcatgcgcatttattatgtctataaattaaccaaatatttttaatttaaatgatgataaaaatatcatttaaaaatctgtatttggaaattttgtttaaatgtgatatgttatataaaagactaagtatttagataaatatacggttttatattacaatatgttgaccccggtaagttccttatctttttttacgtctttggagatttacatatattaggaacaatatacgtagtatgattaagatttaagatggctaaatttatttggattagattctgttcatggatttgaaatttgtcttccctagacatcatactcggaatattaccgttttactaagatttgcagacatcaacaacccatttattgggccaagcccgtaggtttgtggcccacttgacaccgctaccgagaaacataaaaagaagaagattagcgccaaccttgttctctctttaatcttcagcaagcaagcatctagttttctcgaccgatccaaaacgatgcctaagttcagcggtaagatatatatgttttctctggaaattgtaatctccttgtccttgaaagcgttagatctgttgtgatgcagtttggaatttgatgtgatcgatctttcatagcaagttagtcgatctaatcagttttgtaatatggtaaaacctaggaggagggcatagtacagtcttcttttgggatgtcgaggattgcccggtccctgatggtctcactgctgaggctgtttggcggaacatgagaatggcccttgcgaataatggtgagtatcttggaaggtgcgaaatcaccggttttggtgattactctctggccacgaaacacgctggaatcgggatgatgtgctccctttaggtcaattacacacactctctctatcttttacatatatatataggtatgtatcttgttgttgatcctgagttgataatatggtttcaggagacagacgtaccagacagagcaagattttagtggaa

SEQ ID NO: 3754 - DNA, 1848 bp, Arabidopsis thaliana landsberg
cagacggtccaaagaaacctacaaataaccaatctgctactagtcctccgtcggtaaacttttagttagttatgactgagttatcttcatattatacggctgagttataaattttagttagttatggctgagttatctgaatattatacggctgagttataaattttagttagttatggttgagttatttgaatattatacggctgagttataaattttagttagttatagctgagttatcttcatattatacggctgagttataaatgttagttagatatggctgagttatcttcatattatatggctgagtttagttagttatggctgagttatcttcatattatacggctgagttataatttttagttagttatgactgagttatatttatacataggtatgagttttcgttatttaacgcctgagttttcgttacgtttatgcagtcaaaccaagctgtaatggtagagaatgatgctgatattgctgaggttggggtaagtaggaatcttaatgaagaaattgctaaggcctccatcgtttctgatattgatttcattgagacgtctcttctcaaccgtgtttacgctcttccaaagcgaagctatcacctaagtagaaaggtaatgttaaggagaaaacattaaatgagctaatcgagaaaccgccagggagagaggaagaaaggctgctacaaaggagcctaaaaaggtgcctccaaaggggccaaagattacaataaaaaccccaaaatcaccttaaggaagctaaggaaaaagctgacggtgatacttcttctgtccccaagaataagcctgaggaagccaaggaaaaagctgacggtgagagggtagctgatgatgatgattctatacttgatgttattgaccaggttatatctgagtataatcaaatgcttcctgagtctgatgaagatgaggaggaaaccgagaggctatagagagtaaaagatgcgaggagaaaaactgttaagctggccccggatgggaggtcaatgattaaacccgatctaatgaccactaacacttttccagtaattggagacaacgggctgagctgcatgaggaagggttgtctgccttcacgagcaatctatgatcctctagcaccggttgatccggccaaagtgcggaaacttaaggcttatttatcaagtctcgactggtatggccctttataccttaataagttgttaaatacgacatgcttacactatttgtgtatattaactttcactactatttgttagcaaaaaacgttggaaagtgggatagacgaggtggatttctactctgttatcatggccgaaagaaagaactggccagaacccaaatatggatggctgggtgatgatgtaagtcattgttatattttgtctgagtttgtctaatgttatggctgagttatcgtgtcgttctacctgagttaaagtagataatggctgatttacgatgtaagttattgttatattctgtctgagtttgtctaaggttatggctgagttatagtgtcgttctgtctgagttaatttagctaatggcagatttatttaggtgttaaggctgagttttacttggttacgtctgagttaatgttgtgttttgtcttggttttattttctgtccagcacattgctgcgtatgtgaaactcctcaccacgaggctcctgcgagatcctaccccatactacagcgaacgcgtcatgattctagacccgtggttcacatcaatgtggacgaaggattacgcacagtggaagatgaagccgaagagggtatctaacaaaggttctacgtatgaaaaatgggtcaacggtacgggtgg

SEQ ID NO: 3755 - DNA, 1083 bp, Arabidopsis thaliana landsberg
gaagaaacatggcagaacttggaagtttctgttttactggtcacgtgaaccaccaagtttgttagttgtccaattatataagctagcaatccaagattaaagatcatgttgaagagaatgaatgccctctcttctgcattattaccatgtatatcaccataacccgttgtggagaaggttgttatggaccaatacattgctgtaacataccggataagcaaagatttctgtttccagtttgcctccgcaagtgccataaatgtcattgaagggtctggataatgtgcagcaatagaatagcagaagcaggcgccacaatgaaccacaaagagagaaacctacaaagcgaccatcaatgtcttaaaatgacaactaaaaaatatagttgcttaatgtaagatcgtgtacagatagttactaacgaggagaagcttcgtgcatcgaatccagaagtagttgtattttcgatctttctccaatctgaaaatttcaacacagggaaactaagaaatacagaggttttcaagtaaccgcattccagaaatttgtacacatatataataatgggtaatgatacacattcaaatctcacctggcaaaacatttactgaccctgtgcagacgccataaacgcaacatactgaaaattccatatccttgaatagtgttatgcaataagctgccaaaaagttcataaggaactgtagataccacatcaaaaatcagccaagtcgaagtatatctccaagctattctcttgggatcatcgactaggagataagttgccttgtccaagaaggcaacaaagaatgtcagaacaatgtcgacagcgaaaaatccattcaccacgttatcaagaatactgagaggtgctcttggtgtttgtaggaacccgaactcaaaaggagatgcccacgctgtgtatagcaccaaaatcactagaaaccaatcccaagctctgaaaaaaaaatcaacataatgcaactcatcatcagtgatactatcatagacagaattacatacaatgtaactgatggacttagtgataatgtaactgatgtatgaggagaaagagagaaagaa

SEQ ID NO: 3756 - DNA, 1493 bp, Arabidopsis thaliana landsberg
tccttttgatcctcgttacaggtccgttttttcaaattttgactctgctttaatctaatcgcttttttatgttttagctgaggtaaaacattatttttcagagcgtgggagacgtttttggtatttttggtgctctacacagcgtgggcatcaccttttgaatttgggtttctgcaaaagccaagaccacctctcagtattctcgataacattgtcaacgggtttttcgctgttgatatagtcttgacattctttgttgccttcttggacaaggtaacttatcttcttgtcgatgatccaaagagaatagcttggagatatgcgtcgacttggctgattttcgacgtggtttccacatttccttacgaaatttttgggagcttgcttcatgagagtattcagggatatggtattttcagtatgctacgtttatggcgtcttcgtagggtcagtaattgttttgccaggtgagttctttggccggtttatcgttccagccaaaacgtttaaattccagctgagtataatattgatgtcttcttttcaggttagagaaagacaggaaatacagttacttttgggttcgctgctcgaagcttctccttgtaagtagctattgtctacttgttttttacactctttttggtttcaaatgaacagttttttagctgtgaatttacagtatttgatttggtaatgcaggttactctttttgtgattcattgtggtgcttgtttcctctattccattgctgcacattatccagatccatccaagacgtttatggcattaaccgatgaaaattggaaagagtctcctattgcagtgcggtataacacggcaatgtattggtccataactactttctccacaactggttatggtgatatacatggtgttaactcaagagagatgactttcattcttttctacatggtttttaatcttggactgtcagcatatataattggtaatatgaccaacttggtggttcatgtgaccggccgcaccagaaaatttgtaagttctatgtaccggtactgttaactgcacttctctgaaaattagtctggtctcagtgaagtttcatgagtcttaagcatttgcattatttcagagagataccatccaagccgcatcagggtttggtcagaggaacaatctgccagtgcggttacaagatcagatggttgctcatttgtgtttgaggtacagaactgattcagaaggcttacagcagcaagaaataatcgattctcttcccaaagctattcggtccagcatatcacattatctgttctatgaagttgttgacaaaatttacttgttccatggaatatccaatgatcttcttttccagttggtatgtttcccataacgcaagaagtcctgcatgctaaaagtggtcactttattcacattaagtcttaacttacggtgtcctgtaggtcacggaaatgaaagcagagtattttcctcccaaagaagatgtg

SEQ ID NO: 3757 - DNA, 1202 bp, Arabidopsis thaliana landsberg
  unsure (1)..(1202): unsure at all n locations
ctgcctcagcgtttgctcagaggaacaatcttccactgggcttgcaagaacagatggtagctcatttgtctttgaggtacagaaccgattcagaaggcctgcagcagcaagaaattattgattccctccccaaggctattcgttccagcatatcgcattatctgttctacgaagttgttgacaaaacctacttattccatggaatatccaatgatcttcttttccagttggtaaatgtttctcattcactcttgtctaccttcttttgatggaaacacacagttaaccttctgatatcatgtaggtctctgagatgaaggcagagtattttcctcctaaagaagatgtgattttgcggaatgaagcaccgtcagacttttacataatggtcacaggagctgttgtaagttgctttggttacatcagctaaacaattctatttctcctagttcttttttcaaattagttgacatttctactatatgacaggacatcattgcgcgtgtgaatggagtggatcaggtaaaatccgcatttttatttctcttttgtgacggtttttaagttgtgagttgtgtattcattgcaggtagttggtgaagcacagaccggccatgtttttggtgaagttggggttctatgttacaggccacagttgttcacagttcgaaccaaacgattgagtcaattgcttcgtctgaaccgtacagcattcttaaatcttgttcaggcaaacgttggtgatggggcaataatcatgaataatcttcttcaggttagtccgaagctatttccgtataaatccatagtgactacaacattttagctggtttgactattttttctcatctgggatatgttttggtctaatgcagcatctgaaagactcaacagatccagtgatgaaaggcattttggctgagacagaactcatgttggctcaggggaaaatggatttacctctcagcttatgttttgcagcagccagaggagacgatttactgctgcatcagttgctgaaacgaggctcaaaccctaacgaaaccgataagaacggtcgaaccgcgttggtaagcccacgaatcccctgtacaaccaactatcgcatcatttttcactccaagagaaatatcanaatcctcactctgttntgatttttttctgcgtgatggtatctcagcatatagcagcatcaaaaggaa

SEQ ID NO: 3758 - DNA, 3522 bp, Arabidopsis thaliana landsberg
gttgtaaatatccttctcaaatctcaatgatggtgttcttataactcatgtggtgttcattaactctatctctctctctttttgtatatagcttttttgggttttaccagttctttttttgaacaccaagaagagttcttttaaagataaaaaattaggctaccaatataatcgaggttaataagaaaattaactaagaggagagagtgacacacacaaaacaagagagtaaaaaagcttaaaatgttgaacaaaacaaccctacctctactactgcagtactactatacataacgcaacagagtaagaaatatatcagctaagtgaagtcaatgtctccctttaccttgaatgttggaatgctttagagaaacacacatcgaatcaatcaggtactttacacgattatctctttcggcttttgaatcccttctctcaatttggtacaagaaccttaaggcaagccacagagaccaaccagtgattgatcgaatcagtttgtcactgtgtgctcctcgtcatcccgattcgtccagacactctaccaaatgataaaatacataaacaataatgacatctaaaggtaataataaagcttattgtagttgatatgataatacattaataccttccagaaagtagctgagctgtgtttccctttgagaccgagagacgtctggtcttactatcttgttgtcctttatcaacaacacgcattgcagcaacttctttccccattacagctacttctcttcgcatcttctttgcctcaacgtccatcgcctttgttaatgtttcaaccttcttggccaacatctaaatatacacaacccatatctttagacttatattatacaacatttcatataaaggcggcaaagaacaggaaaaaaggccaaacactagcaaacctcaatcgcttcgtccttgtctctcaggctctgatctttttcatgcgccgcttttcttaatgttatgacctctttctgcagcagatcgtacaagacacctgggacgctatcattatttgttgccttgtcagctgattcttcttccccttttattgagctaggcgattcgcctctgctagttccttcagaagacttgtggttcaaaggaaaattcgatctcggtccatttattagcactttgcttctatccaatgatctggtgcccccatcaaatgatcttgatgttcctttcgcatgcttcaatacagtgcttgcactagcagtcaatgatctcaactgagaacttggtgttctcttaatcagcgagccatttgatgtaatttttggacttgtttcagctccaccaagggattgtcttcgagtaggcccgttgctcgaacttctaccaacagatgtgcctctgctgctgctgctcgtaggcccctttaaactctcttctaacactctaagccgcagtaaaaatttctcctaaaaataagtaaaagcagcaattcctcagttaggagattaaaaaaaataagatggtgtcccgcagctatgattctaccttcagctgagcttcagattttgcagctcggtcagctatggcaagtttgtcgcgtagttgttgcatttctccctgtccaaacataacggtggtggcaatagtataagttaatctccgtgaatatgaatcacaatttgaagcagcaagagaatttaaatattaatatgtatcagcaatgacctgcaaaaatctacgttcttcaagccactgccttacaggcatcactttgtcattagaatctttccattcgttagctacaacagtagcaactctgtttgcatttaccttcgcacgggccaattcccgttcaaggattttcctctcttcctaaggaaaacacaaaacaccacaattacgatcagtacgagaccaaaacactaacaagaaaaacagtaagttattgaggtactatagaagcatatgaaatatacattcatttcttggaatttcctttggtaatctctcactgcgtttgcggctgcaccaccagcaagaacagcttcttctaattcccgaacactctgcataagcttttcaacttctgcaaccttctgtctgtgcatcttgtctataattctattctcttcctattttaaccaatgtatcaacaaataaggccaccacagtggtaagaaaaggaagagataccctattttggtgttccaatatgtaaaagaaatgatatagacatacctgacaaatttcaatctgtttcatcaattcttggttcttattctggagatcatcaaccattgaagcctttgccaatgcagactgaactgtcctttcagcgtcaagcaaagctgcttcctttgatttggttaggcggtccaatgatttattgtcgtcttgaagtttagcaatctaccaatcaaaacatgtaaacccatatgagaaagctgttaaatgtcccgtaagttgttgaatcgagctatacaaaggtaattctggttcaaaggaaggaaaatacttcttgtctcgaaagtttcagttcagcttctaaaggggcaagaatagcttcaattggaggcatgtcatcatccttttgagcagcatgaaccctacgaagagaagcttctgcagcaaattgagctgccattgaagcccttttttcttcgtttattttcttgatttcaaggttctgtgacaagatgcgatatcatcaaatacagaatccagaaaaataaaagagattggaaaatgaaaagcaactgagaaacattgcaaacatactttactgtcaagaaggttttcagttagtttgagcttctccgacatctttcccaactcttcagtaagcttaaacaatcaaatgaaagagtagagcgtcagaatatacaaagatggataaaaaaagatgatttatgtgacctaatatataaacttcatataagattttgcaggcatgaacacaattttttctcgcaaagcatttcaagatctagctataaacaataatgaaagccaaatcataatacatcttcttaagacaaggattcaggaatatgtatatgcttcgtggagcgactgaccacaggccaaacaagagtgaaaccaggcttacaaaggaacggtaacagaaaaaaactacagccacatatcggaaaactaatgaaggtctagaaacgaacccaagagtaattcagttcaaccacctatactacataatgcaacttgcgcaaaaacttagagccgaaggataacatttttcagaatctaaatattgaaattgtgcttcacaaatttaacttcttcctaaccattgattagacccaaacaaataatccattacgtcaagctatatcttcaatcttctgttcatgtgaaatattcagttgaatcaagtctaatccaaacaacctttacaggacattgtgaaatgtaaggaaaaagacagattaagtgcagatattacactaacctcttcaacagccttctctctttgccgttcagacaacctcaatgctttgatctcagcttgggattcagacaactcccgatctt

SEQ ID NO: 3759 - DNA, 1234 bp, Arabidopsis thaliana landsberg
tatgattgtaaaagtaattcctcgtactgaaagccaatggcttgatagactcacattactacccatagaatatgagcacttactcttcaatatcaagttttgttttagctttggtgttgttgtttagcattgttcctttgtttcttaagagccaagttttgaattgttgttggtagaattagtttcgttgagtaatgcccatttgttacattgatagtgattagtgtttcgtttattattttttgtgttgttatatatgtagagttagtggtggtaattggcgaggatgaataatgctaaatttctgacacctcttgtatgaggagagattgataacctctcccttgagcacattaagcaatactctgagcctattcattaccattagatttgttttgtgtttggagatgagtgtggatataagttgggttggatgctatgattgtaaaagtaattcctcgtactgaatgctctcaaggcatgatagacttacattactacccatagaatatgagcatcaccaccctcttctactaatctcttttatatgttttctagttttttactagatgttgtgattttcgttgtttgtgttttgtccctctcaagtgcattaaagaacaagatgttcattcttgttcagtccttatacttgggtttctgttggcttgcttgaatcggcagttgcatctgctttggacaacccttttcatttggctatcctttttgtggattttgacccgctttgtctcaatgtttgttgtgatcttcgctgttacgtttctgttgttgatagttgataatatttgatgtgaaatgttttcttccagctatgtcaaacgtaatcaacttggccaactttctctacaatttgaaaagcttcaaaactctgtcccatgcttatttgtagtctagagtctgtcttttgtgcaattagctactcaactgtctccttatttttggtatgatggaatttgttgaaacggctatttgtagagattcataaaatttgccattgttgttgatcatagtatttccagcgacaaacaactactgtctaaccatctgtttggggcgataagcagatgattctgtattttctgcttgtagaacgtttctagctcaatagcaaccattacggggataacaaatttcttagtttgctcttgctcagttctcctttgaggcttcacataagtttgttttagtccatttgctcttcgatgcttggaaa

SEQ ID NO: 3760 - DNA, 3311 bp, Arabidopsis thaliana landsberg
  unsure (1)..(3311): unsure at all n locations
ctgctgatcatcgcatcgaggtctctctagtctccgtaggtgatggtgtcactctatgcagacgccttgtatgattaagagactcatcaaaatattaaatgtttctttagttttgtttggtttgggatttgaattgtcgaatgcttgttgcgatacctttatttttttctcaagttctgctccaaccatgccatatatatgtcacgctagcaactgtcatacagtccatattttcaatcaccgatttcaattttctagtgtaaatctcattatttgtttttggaaaattagtggtgtatgaaaagacttctttttttaaaaggaaaaataataatttgattacctaaatcataaaaatacacttattttcataactcatcatgaaaaaactttacaattagagtttgagttgaagcggttgtagaaaatgtaatatactacaacgtcatgattcttaatatcatacgacacatttttttaatagtaaaccgatcgtcggcggtggtttaggcttccatcataaaaaaaaaaaaacgaaagatgtatacacttgtcgagctgttaatatcattactaggccactacttttacagattctctctaaagctttgatatcatactaggccacgccttgtatnnnnnnnnnnnnnnnnnnnnnnnnnnnnnntcgagagagagagagagagagagagctatggagaaactgcttccgccctctaaattgcttccgcctaaagggattctcaagagcgacgctctcaaaaaggtcttttaatcactttttagttcatagaggtttttttctctacttactgttttgttcggatccataagtcttgcatgctaattgatctgaaattttttagttagttttgtctgatgaggtgaagctttatcgtttaatgattaagattttctattaatgctaaatccgaaccaactcatgtattatacggttgtggttgtgaatcaaaacttggtatatgtgaaacagtacatctttgaaacgacggcgtatccaagagagcatgaacaactcaagaaattacgagaagctacggtcctcaagtatggcaatttgtaagtctggctgcaacctctattgtccatatttctataatcattatagcttagttgagctaatattttgcaagatatacagtactactatacgatcatactctgatactttccaacaataattgcaagtatcataacgttactacgttagatcctactaaatatgtatgtaccttgtacttccactcgcataagttaatttttttttcttgttaaactttccaaaaaaataaacattttcaaattttgacaagacttagcagcttagtgtggtttgtggtatagtcgtaaaatttatcagatcatcaattcaaggattatactagtaatgaaaaaatggtttgtgcttgtatgcgtagaagcgagatggaggtaccggttgatgaggggcatttcctatctatgcttctaaagataatgaatgccaaaaagacgatagagcttggtgttttcaccggttattcgttgctcaccacggccctagcattgcctcatgatggacatgtatgtacacaacactccttgatttttacaaatcaaattaagcaaaaatgataagagctagcatctatgaacaggttactggaatagatattgataaagaagcttacgagatgggactggagttcataaagaatgcaggtgttcatcacaagatcaatttcatccactctgattgtcttcaggccttagacaatatgttgagtgtaagtaatcagtcttcatttttctctcttttggtatgctattctcttaagttgatgacattggtttatgaatgataatggagcacaggagaatccaaaaccagagtttgatttcgcatttgttgacgctgataaaccaaactatgcaaacatgcacgagaggctaatgaagctggtgaaggtaggaggagtcatagcgtttgataacacattgtggtcagggtttgtggcggagaaagaggaaaacgtgccagtgcacatgagggtaaacagaaaagcctttttggacttgaacaagcgtctcgctgctgatcctcacgtcgaggtctctcaagtctccattggcgatggtgtcactctctgcagacgccttgtatgactaagagactcatcataataccaaatgttacttagttttgtttggtttgggatttgaaatcttcgagtacttgttgtgatgtgatttgttcaaatatatcaaatcatatattatatatcagcaaacccaaaatacaaacgaataaatcacacaaagagtgcaatagagtaacaaacaaataaaaggaatcagaggtacacaagctctagagaagccaaataccaaacctatacaccaaaaacaaactaactcccgaaaagagagatgaaaatgttagccaaaatgtcaacatctctcactctctccctcggcttttcttctcctccctctaaccactttaacaccaaatctatgtcacaaactctctttcttatctttctactaggttataggtgtgaggctgggattatcagcatgctaagttatatatggtgatacaaccaatcacatgaggtaaacaaaaacaaagtaaaagccatgatataaggttaaaacagctgaataacaagagccaaggacattcttttacttgctattttcttgaatctcccttcactgggtactcttcgttaacccgccacttcgtccagcagctctgcgcaaatccaaactccaaatttagtttgaataccaaattatgaactaagaagtatatagcattatagctaaccatgaaatgtgtaatacaaagtgaaaaaccacatagctctaccttcccgcaagaatctgggcggtgttggatgggctcttgctatttgaaaaccttttggctctggcgtcctgatctttctccacacgcattgcagcaacttctttttccattgcagctacttcccgtctcatcttctttgcttcaacctccattgcctttgttaatgtttccaccttcttcgctagcatctacgaacatcaacgtatcattacttcctccgtttacaacaagaatgttcttctttaaacaagattaatatggcataaagaaacagaacttaaagaaacagaactcttacctcgatggcatcatctttgtctttgaggctttgatccttttcattagaggctttcctcaaagaaactacttcattaagtagtaaatcatacaaaacaccagggacacagtcctcagttgctgcttcagggtcttc

SEQ ID NO: 3761 - DNA, 1099 bp, Arabidopsis thaliana landsberg
agttgctgcttcagggtcttcactttgtggcttctcctctgaattttctttccacccattacctgactctgcttccttagagtcatcagtagccttgttgaaggaataattcccaggtccgtttaaaagtgctttgcctctatccacggatcttgtgcctccatcaaatgacttagatgttcctttagcattcttcaacaccgaagttgaattaatagacaatgaatgcctcatctgagatgctggagctttctttgataaagcaccgtttgatgtaaatttttgtaagttttcagctccaccaagcgactgcctgcgagaaggtccattactcatgcttcttgcctcgggtgtgttcctggtggcgctgcttgaagttcctcgaagtgtctcctcaagcactttaagccgcagttgaaacttctcctgaaattgcacaaacaaaatatattacttcttgttctgtgtaacaagatcaactgaaagaagctgactaatggataagatttgttacttttaactgtgcctcggattttgcagcccggtctgttatggcgagcttatcacgaagttgctgcatttctccctgcaaaaaagttgaggatcaagaagtgagaatgtagatatggatgggccttgctcactgcaaataatttgcgtcctaagaatctaggagaggggccatcatatcaaagtaaacctgtagaaaccttcgttcttcgagccattgcttcacaggcatcactttatcattaccatctttccactcatttgctaccacagtggcaactctgtttgctgtaacctttgcacgtgcaagctcccggtcaagagttttccgctcttcctgaaagacaaaaacaagaattattcctacatcagtaggcaattgctgtgacaagaaattagagactttatgaagtgcgtttagttacattcatctcttgaaatttccgctggtaatccctcacggcatttgcagcagcaccacctgcaagaacagcctcttctagctctcgtactgtctgagtaagcttttccacttcagcaaccttctgcctatgcattctatctagaatttagcattcttcctaaaaca

SEQ ID NO: 3762 - DNA, 784 bp, Arabidopsis thaliana landsberg
agatttaatttgcttcattagctcctggttcttattctgaagatcatcaaccatagcggcttttgccatggcagcttcaacggtcctctcagcttcaagtaaggcagcttcctttgatttagtcagacggtccaaagccctgttatcttcttgaagctttccaatctacacagatacaagagatttgatcagtgacctcataaactttcaatatcccatatgaaagtaaacagcaagcagttagacttaaaatgacaatatacctctgatcgtgcaagcttaagttcagcttctaatggagcaaggatggcttcaataggaggcatgtcatcatccttttgagcagcatggactcttcttaaagtggcttcagcagcaaactgagcagccattgatgctttcttttcctcattgattttcttgatttctagattctgcagcaaggttgatatcatatgtctataagcttaagaaacgaaaggtgaacatcatcgaaccaaggaaagattatcgaacaatactttgctttcgagaatggattcagtcaacttgagcttctcatccaacttagtaagctcctcactcagctacaacaactacatacaaacatagacgaaacttcattccacaagaagagaatgtgtaactaaaaaatcccactgttgaaaacataaccgtcaagaacacacacctgatgttataatcgctcaaaactaaaaggcggagctcaattctgaatgttcgtctccaaccacattgcccaaataccacactacgataaatg

SEQ ID NO: 3763 - DNA, 824 bp, Arabidopsis thaliana landsberg
tcgaagggttcatgctgctcaaaaggatgacgatatgcctcctattgaagctattctcgctcctttagaggctgaactcaagttggcgagacatgaagtattttacttcctttcaatcaactatatctcttatttccttgcttattgagtcttggaacctttttaataactgggcattgcattcttcatttgtagattgttaaacttcaagatgacaacagagcattggaccgtctaaccaagtcgaaggaagcagctttgcttgatgctgaaagaactgttcagtctgctcttgcaaaggcttcaatggttgatgacctccagaataaaaaccaagagctaatgaaacagatagaaatttgtcaggtatcactttcgcctcctttacccagcagtactataaattcctggatctctctccttcgttttcgtgagcatgccttgtttatcgattgttcaaattaggaagagaacagaattttggacaagttgcacagacaaaaggttgcagaagttgaaaagtttacccagaccgtacgggagcttgaagaagctgttcttgctggtggtacagctgcaaatgcagtgagagattaccagaggaaatttcaagaaatgaatgtaataattaaattacacgtttagtgcctcattagcctattgctacccttgtacttaaaattcaattcctgtgctaatcatagctatggccattaatcctttcattaggaagagaggagaatccttgatcgggaactggctcgtgccaaagtaagtgcaagcagggttgcaactgtagtggcaaatgagtggaaagatggtag

SEQ ID NO: 3764 - DNA, 6243 bp, Arabidopsis thaliana landsberg
  unsure (1)..(6243): unsure at all n locations
ctgcgtgaaatggttcttctgatattacagttctttttaccatgttgccttgaagtctgatttacatcacatccgaaacctcgttcctggtaagtcttgtgctattgtccattatagataatttgctaaaagctgagattttagagtattctggttcttgttgattggtcctgagtcatgtgagaaaagatcagtcattatcatatcggtaggcgatgtaatagtcttattgatgtcatatatgcagctaaatctgaagaaggctacaatcttatagttattgatccgccttgggaaaatgcaagtgctcatcagaaatcaaagttcgttatctacttaatgtatgcatgtggataagtattttttgtatctgaaagttcatgaccaatgtttcttggttctttgttttaggtatcctactttaccgaaccaatacttcttatctcttccgatcaagcagcttgctcatgctgaaggagctctcgtggctttgtgggtgacaaatagagagaaattactaagttttgttgagaaagagctattccctgcgtggggaattaagtatgtagctacaatgtattggttaaaggtgagctaatcttgcagctctcagtccccatcttggtttctgagttgcacatatgacttgacattttacatacttgctatgtaaatgtttcaggtgaaaccggatggtacactgatttgcgacctggacctggtccatcataaaccttatgagtaccttctactaggctaccattttaccgaagtaagtcaattcatttttttgtcacttgaataatctgagaaaggaacttctgtttgaacagccatgttgtgtatacatgtcatagcttgcaggatcagaaaagaggtcagattttaaactcttggacaagaaccagataatcatgagcatccctggtgatttttcgaggaaacccccaattggaggtattcttatgtttatattttcaacagctttgttctgcgattggcttcatcaaattcaagagtagataatgcaattttttcaaattgcttggtctaaagctcccctgattcttgtttgtttccacttggactttgtgtagatatactactgaaacacactcccgggtctcaacctgctcggtgccttgagctatttgcgagggaaatggctgccggatggacctcttggggaaacgaaccgcttcactttcaggactcgagatactttttgaaagtttagtgggcgcattccctagggtgtaaccaagaaaaaggctggcttgggccctcatgatcgtttttctctatgactcattctcaagctggggacagttaggagagaacccttggaaagaagtggaaggttcggttcatcgaaaacgatatcgtttgaagaaggcaacactagagtaagcctgaaaaaagtatagtgttactaaagattattttgtctcagaactgtaccatcaatttagtaagctttttccttttcctttcataaacagatgtatttcagatacaatttatatattatcagtacagttagatcacatactatattagtatcactattctgctattcactagtagatttctttttctttttcaacaaaatatgaataaaataaaggcaaaagcgtgttaaatataaattcaataagtgactactcgttggaagatcatatctgctttgatgggtctatttgtggggcaaatccactatccagttttccttttgtgttcaatgaactatacaattgtcaaaaaaaaaaaaatacatgagaattaaagaaaatcatcatgaccaatgaagagcaggtcccaacaataattccgaattataggctctgattgttatagcaatcaaacaatatgcatacaaatcacaaatcaaaattaacgatatttccaaacatagagctttccagtttgacttaataatgttgtgtgaatatcctcacatttccattttcgactctctttagtaatttttgaagtagtagaatgatacaatgttttgttttatcaatcacacagttttgtgaaatcacgatttttatccactatttaagaaaaacatcaagtggaagaaataataaaccaataccatcgcaacaaaatgcatatcacgagtatagaatgaacaaactacattgtcaaatacttaattgaggacttaaacttcgctttcagacaacttggtttggaaacttgaccatccgtcatgttgatatacataatccatctcaaatgtagtagatcactatatcagcatgtgttatcaaacgcaagttgtcactaatatcggagcttctagttccaaatgttgaaccaaagtacaattgaatatacaattatacatccaaacacgtccatgcttctccactcgagttctctttggaaatctatataatccgtcggtttggtattttactagttgtacgtagtgtctcccctcatatgtattgagtctttatagtttgttgcctcgtatacgatagaaagtaaaggctaaaaaaccatactatttcataaagggtttatttagttaacttttaatctaaaccatgtatcactccgttttacgtatattcgttttcacaaataatctactaaataattttgtaatgtgataaaattaaagaatagacacatgatacatagacagtcaggacaaaagtaagcactcattttcttctattcaaactatagtgaaaccctattttatttttatccatacactatagtgccaaattaatctaatcattaaatgtgatgaggctcaaaacaatttgttttcttatttaacatggccgatcccctcataaaccaatcagatggtgtgttttccggtcatactcgtgtaggacccacttcattacaatggccccacatgtctctctatctttttctcctctttataaaatcagctccttttcttacacagatttagagaaacacaacataaaacgtacttcttcttcaaaacgcgaaaccacactgtaagttacgtacaccaccacctatcctcaccattcatcatcgacacgtggctggtttaactcaaatcaacggtgaattctttttgcttttttattttaaataatgaatgaaaagattcttctataattccagcgaagaagaaagaaaaaaaaaagcgtattcctcgtgagcactaacttctcactcctctcttcttcttcttcatcagtctacgttcacacaatctttcacccacctattcaaagctctctccggaagtttcgaggggttggttgttggttttcccgatgacttcggatggagctacgtcgacatcagcagctgcagctgcggcggcggcagcagcggcgaggaggaagccgtcgtggagagaaagggagaataatcggaggagagaaagacggagaagagctgtagctgcgaagatatacactgggcttagagctcaaggtgattataatttgcctaaacattgtgataataatgaagtccttaaagctctttgtgttgaagctggttgggttgttgaagaagatggtactacttatcgcaaggtgaagactttctccattttttccagatctgagcttgttttattgatgtttttgatgtttgaatctgaattcgttgatttcaattgtggttaaatgggtttgaatctgagaatttgagggttttctcaaagtgaatttgaatcatcagaaactatggatggatctgatttctcaaagtgaatttatggggtttctttctaattttagagttattattggtatgctaaagtcttaatcttttatgtatgatacttggtccaaagtcattgcattgtgtttcttttgcttacctgtgattgattgatgtttgattggttattgttttgcttttgttggagtatcagggatgcaagcctttacctggtgagatagctgggacttcatctcgagtaactccatattcatcacagaaccagagccctctttcatcagcctttcaaagtcccatcccatcttaccaagttagcccgtcttcttcatcattcccgagtccttctcgcggtgaaccaaataacaacatgtcctctacattcttccctttcctcagaaatggtggcattccttcttctcttccttccctcagaatctcaaacagttgtccagttaccccaccggtctcatcgccgacttctaagaacccgaaaccgttgcctaactgggaatctatcgctaagcaatccatggccattgctaaacagtcaatggcgtcttttaattatcctttctatgcgggttctgcacctgctagtgccgacacatcgccaccagttccatgctccggctactatacctgaatgtgatgagtctgactcttccactgttgattctggtcattggataagctttcaaaagtttgcacaacaacagccattctctgcctctatggtgccaacctcgcctaccttcaatctcgtgaaacctgcaccacagcaattgtctccaaacacagcagcaatccaagagattggtcaaagctccgagtttaagtttgagaacagccaagttaagccatgggaaggggagaggatccatgatgtggctatggaggatctagagctcacgcttggaaatggtaaagctcatagttgagatgaagtatacatgaacctgttatgtcatgtcggaaggaaggattggagaatgagaattagtgtgttgttcattcagttcatggttttggttcttgttctagaatcgatattcattgtaccagtgagtttgtttcacaacgcattatttgtagatagaatgtttaagatgtatgtttctattatcattccttttaggtcttgaaaacattacaaatataaaacatgattaagtggcttgaaatgtaaattatatatcggatgatgaaacagagaaaaacaagtgaggctaaaacaaagacttgggatgtaataacaagatcagagaggttaagaaagaaaaaaaagacttgcgattttagccataagatacacaaaaattcataatacaaagaggaaagtagaaggcatgaagcagtaaacattggaaaagggagaaatatattagaatcacaaatgtcaagaaactcggaaagttttttttagcctatctgcttttcaggtgaatcattcagaaccatcggggaagctatcaagcgcgtcttgcttaccgttaacgtagaactcaacgacggcttgcattctattgagcttatctggatggtaattcacatgaacaatcactggtttcactttcttcttcagttcatgattctttcttacagtcttgaaaaggaccttactgttcataaactcatacatatccatgactctcttggatgcatgtagcgcagtgtactcaggatgtgaaggatacaccagttcctcgttgaaaaccgcttggtcccacactttagccttagagagtctatctgccacgcgatcaagcagctcgattgatggaattgtaggccttaaatagaaaaacccggaattgaaaacccatatcctcatagtgtgagcataccgagcccatcccatggctggttcatcaaacacatcattgaacccataagccgtatgattgtcatggccatcactcattgactccacatcagagtctctgtatagatgactaaatgggttctgcaagaagacaatgtccacatccgagagaagaacaccataaccgagttgcaagaactctcttaacacacggaatttcaatccagagacagcatggttacctccagttttcccaacagtatccacgtccttgtctggatctctcttgtaatacgcaacatcgttctctttacataaattctctatgtaatcgtccaaagcaacaaccagatagtttgttatacccactctcttaatgctagcaatctgaacctccaacattgctttcacatttgcgtttgcaagagctacaattacctctttatcaacagcaatctcctctagaatctttgccaatcttgggtttatagattcatcaggaagaatagttggattagttctcagactcttgacagttccaaaaggaccagccttgatctgtgttcccaatgctagaacctgttttcttgcattgtctgatccttgctccgctaagcgtagcttctctgttaactctctgacctgcttctttaactctgcattcaaantattaagagttacaaagactgattttagcattttcactagttctggcg

SEQ ID NO: 3765 - DNA, 534 bp, Arabidopsis thaliana landsberg
ggaggtaaaagctcgtcgaagaggagaccaataaggccgagtttcgacgctgcggctgttaatgagtttattactttgcttcatggctcggatccagtgaaagtggagcttaatcgactagagaatgaagttagaggtctgataatgctgttcgatttttttattttttgtcgattcggtttctgattattggttgttggggggatgtagataaggatcgggagttaggagaagcaaacgctgagatcaaagcgcttaggttgtctgaaagacaaagagagaaagctgttgaagaggtttgtttgtgtctgaattttgctatttttgtctgaagctttttcacattttaccaattcttaatcatttcttgatgttttggtaaattatctccatttttggttaagccaatcaataatggttgataaatttcacacatttagcaatttctcagggacgattattaatctctacatttttggttcaaccaatcaaataatggttgatgaatttcacatctgggtcactttatttact

SEQ ID NO: 3766 - DNA, 1413 bp, Arabidopsis thaliana landsberg
ccgtccattgggtagataaaagaactttgaactttccatgcaaattggaaaagacaatttaccatgagtagtccatcctgataacatgctacgccggaaagtcgcttatcgtccacagtcgcactgcttttagattaaaattctgactcaatgatacatcgtacgcattgactccagtagaccacaactcttttagctcctcaataagaggttggaggaagacatcaagactagctcgaggatgatttggcccaaaattcaaaattgtaagaaataagtactttgtattcatgcacataccagggggtaaattatatggagtcaggatcacaggccacaacgaatgattacgagacatgccaaacggattgaacccatcagtacacaacccgagataaacgttacaaggttcttcagcaaaccggggatgtaactcttggaaatatctccactctatcgcatctgaaagatgattcatttctccctcctttgattggtgctcagcatgccatcgcattgctgcagctgtcttgtggctctgatacattctttttaaccggtctccaataggtagataccacatacgactatatggtactttggttcttcgacggtcatctttaggcttccatctttgtgcgccacaaaatcgacaatgatcttctttttcggcttctttccagaaaagcatacaattgttcgagcaaacatcaatcgtatgatatggaagtcctaaattgtgcatcaacttttcggtttggtaatgtgaactagtagcctggtttccttctggtaaaaaatctgtaaacatttcgcaaacggtatccaccaacttttcactcatattatactccaccttgttctgcatgagtcgagatgctaaggataaatgcgactggccatcacgacaaccatcgtacaatggagtatttgcaccttctaacaagtcgtagaatttctttgaatggttacggaccagttcttccacattctgataactaccatcctgatgataactatcctgatgatagttatcatcaaaccccacgttaaaattaaatgcatcgttcaccatatccacatatggatcttctacaacattacccacttcttcatgattctcactaaaatatgtcctatccttgtaactagttcctctatccatattcagttcttctccatgcttataccaagcataataatccagcataaatccttgactaaacaaatgactactaactcttttacatgagatggtgtgtttttcattcttgcatacactacaaggacaatgaaatttacctcgactactctgtactataggctgactactagcgaatgtcatgaactcctctactcctctgacatattcggcagacaaaattcccgttactttatcaaatctcttataca

SEQ ID NO: 3767 - DNA, 2101 bp, Arabidopsis thaliana landsberg
gcaattatcattgccttgattctcatcatcatcctctcggtttgttgtggattcaactgcggtaaataagtctggaacatttcttcccggcgttatcgactgcgctctgtgcttcccaagatctctgagaatatcttcattcagttcgttgtgctgctttctttttgtggtttctaatttctaatttctgctatgtcctttctacttaggttgtacataaatattatacatatatgtatgtcctttcttctttgaaattggttttgtataggccatatatatgtatgaatgtttttgctattactggtactgacactgattcttgcgaaccaatactgtgacgagatttaaatatgtaattggcaacttacaaattgctctggtctgttgatgtcttaatgaaggctctagttgcgaatttgcagtgatggtgataacggtgtaacatagcctagattggagacgagtctgtttagtctgaccggttcagcagagtctccggttagttcattaatggtctttcgttgctgccacatcacctcgctcgaacctttctcttctgcttccttaattatggaaacgattcgtctgatttcgattcttctaaacgattagtcggctagccatgttgaagacgacgcgctcaagttctcgactactgaaatcgaaacgacctgcggagacacctccgacgccggtccgaaggcttctggacaggaggtgatttggcgtctaaccgatggatagctgcgactgcgatgcattgttaaggaaacagacagagatgagtaatccaaatgcacctgtgacctgctttggtattgtttctgattcccctcctatgtgaaattcaatgcttgttaaattagggaaatttggtaaagctaaacccttggtttctagctttagagtctgatattgtattagagagagtgtttttatgtgtatctttgttatcattttcgatgatttgatctatctagttttctcacaatgttatacacaatcttttaaccattgataagcaaccttcattgagatagagagaggcaaagcacaaagaaaggagatttcagaactcaaaagatttcagttttaagttttccttataatagaaaaggatctattaaccgttgaaattctaaagcttttacatttccttccaaactcattcctctgttttcttattttcctcttttcctaaatcaggtttgtcaaaaaaaaataaaaaaaaatgggttcagtttctctctgaagaaaccaaacgacccaaaacaagataattccataattgtaatggcttcaagtccacccaagaagaccttaaattcacaatcttcttccttaagccggcctccacaagctgtcaagtttggtcgccggacgtccagtggtcgcattgttagcctctcccgtgacgatgacatggacgtctctggtgattactccggccaaaatgattacatcaactacaccgtcctcatgcctccaacacctgacaaccaacctgctggctcctctggctccacctcggagtctaaaggtgatgctaaccgaggtggaggaggaggagacgggcccaagatggggaataagctggagaggagattgtctgtcatgaaatcaaataacaaatcaatgttgttgaggagccagacgggagattttgatcataacaggtggttgtttgaatctaaaggaaaatacggtattggaaacgcgttttggtcagaagaggatgatacctatgatggtggcgttagcaagtccgatttcttagacaagccatggaaacctctcacgaggaaagttcagatcccggccaaaattcttagtccctacaggtgattgtttgttttcacattttaaaacccctcaagattttctgcttcttttattgatgtctattacagaacatcaaaatcttacaattagtccccttgtttcaggttattaatcgtgattcgtcttgtgatagtcttcttcttcctttggtggcgtattacgaaccctaatgaggatgcaatgtggttatggggactatcgatagtatgcgagatttggttcgctttctcttggattcttgacattcttccgaagc

SEQ ID NO: 3768 - DNA, 437 bp, Arabidopsis thaliana landsberg
  unsure (1)..(437): unsure at all n locations
catagtaactccgatttgcttgtgcggattttattaactcttctctctccctttttcgcggtgatggtgaatccagtcccacatatgacatatctaccgaaaagagaaaacaagtgaaaaatgaaaagaagtcatttgcccactttgaaaacaattattgaagtttaaagaatggnnnnnnnnnnnnnnnnnnnnntagagggaaaaatgggaggaatgaatcatcaaacgtgggtttaggtgggtcaagacacaaacaactaaccaattaacccaaccaaaccatgatagttcatgttcaaatgattcattgctcccatttttatgcggggtcagctgacccacctttcttgcacatgggtctgcccccgccacaaccaacagacttctgagaagattctccttaattaattgaaaatgtaaaatttattttagta

SEQ ID NO: 3769 - DNA, 2314 bp, Arabidopsis thaliana landsberg
taaaaaaaaaaaacttacataatttctttcgatgacgtagcttgaatcatttaatttattttcctttttgatctttagtttcaactgaagtgttacacagtcagcgaatgacattttttctggtcaacatatgatatattcccacgtacgtaactagttgcaaagggagtatatgccatacctttaaacatctcctcttgatgaaaaaaaaaaaaaaacatctccccttagtcattaggtccattctatcttccacgattaatgactgatccttttaagaagattagttattcgattactttttgtataacttaattattgttcatctaatctcatataccggccctaatcgtataacttaattattgttcacctaatcttacaagtatatataaagcaacttttttgttattcagtcgacttttagattgctaatttgtgagatagctgtgtagcttctctcttccaatgtacctcaaatcacaaacgttcattagaggtagaaacagtaatggtcaaatataaatgtatcaaccatgatcacagacctattggctaatggcatgcaatggtcaactattttttaacaccattttgacctccacctccatggttcatagattttgcttctatagaaacaaacaaaagatgaatagtactactatagttgacgcaattgtatttttttttttaataagaaacaaatccgcagatagagttcatactattagaaataatttggtcttagtcaaaatcataaatttaaactttaagcatccaactgctagatatggttatatataaacaaatagcgaaatggtactttaaattaaagttcattgaattgttttaaaaaaatattaacaacctagaaaacagaaacaatcaataattaaagtaattaactagaattaaataacgcaattaatttttgaaaaaaaaacgttgatagaaaggagaaaaatggatcgcagcgtcgtccctatatctctctctccctttcaatttctccttgtattttggatctttcttacttccgtacacacgaacccaaacaaacaacaaaaaactgttatctctctctttggtggaattcaaaaattgaattcgtggttgcgttttggtttttcttccttcttcgggtcacgagaacaatgggacaacaaaatttgatctacagcttcgtcgctcgtggtacggtgattctcgtcgagtatacagaattcaaaggaaatttcactgccgtcgctgctcagtgtctccaaaagcttccttcttcgaataacaagtttacatacaattgcgacggacacacgttcaattacctcgtcgagaatggcttcagtgagtctcttcttctcgatctctatatatgattctctctaagcttgaaactcgcgttacaataagtttcggtttaatcaatgtctatcttgatctctattttttttttttgcaatgatggaattcagaagttgcattgctatatctacttttggcaatgaagtaataatgctttgatggatctgataaaattgttgttatgcagcgtattgtgttgttgctgttgaatctgttgggaggcagattcctatggctttcttggagagagttaaggaagatttcaacaagagatatggtggtggtaaggctaccactgctcaagccaacagcttaaacagagagtttgggtactataagctctgccgttagaatgagaaaacaaaaatttctacgttaaatttctgtggatatgatttaaactttggttgtaccacaggtcgaaactgaaggagcacatgcagtactgtgtggatcatcctgacgagattagcaaacttgccaaagttaaggctcaggttactgaggtgaagggtgttatgatggagaacattgagaaggtctgaatcatttatacatgccaatctcacaattctgtgtcattactttcagtatatttgtcatatctggcttgaaccttctttgcccttaacgtagaagtgacacacttctgcgaaactgaatgactttcatgtaattcattctttggcaggtccttgaccgtggtgagaaaattgagcttctagttgacaaaactgagaaccttcgttcacaggtttactacttaccttttcactcatatttgtctgaatattatacgtgtatacatataagcgcataagcatgaaatggctttcccaggttcagacttttatattccaattcaaaaaatctacagggcacaagaatttcaaaaacaccaagggaaccaaaaaatttagaaagaaaaggatggggggtcttggaaaaacca

SEQ ID NO: 3770 - DNA, 1173 bp, Arabidopsis thaliana landsberg
  unsure (1)..(1173): unsure at all n locations
gttgttgtatttttatctataagtatggaacttacaaccatatgcctaagagaactaacctctgaactacccagcatctcacatatcacaccacgggcaagaacctgcaaatgaatgtgttccacaatgtaaacactgatacattatatgtttattcgacccagaactggacattcccctcatcaatttaaaggttaaggaaccaaaagatcatgacacttaactcatacgagcttaactctactggaaatagattaaaacataaaattataccatcaacagaaaaaagggttagaatcgaaccttctcaatgttttccatcattaaacttttaacttcagacacttgagctttagctttagcaaggttgctaatctcatcaggatgatccatgcaatactgcatgtgctctttcagattcgacctttagagcagccaaaaaggagtctgtcattgacatgaataatacaaacttctcaataccaatcatatagatcaaaaaacacatacccaaattctttattcaagctatttgcttgatcagttgcagccttttcaccaccatatctcttataaaaatcctccttcacgcgttttaagaaagccataggaatctccctcccagcagaatcaactgcaacaacacaataggctgacaaatatatccctttaagaaacttaaaaaatataataaagagtccatatccaacgtcatcaaaacccaactaagtttaattaaaacagagcaatataataaacacaatacaccaatgcaatttactcgagcgatatatatccacaaatttcccaaacaactctcatttgaaaaaccagccaaattcatgaaaacaaaagctacacgcaaagaagccaagaatcatagattcataataagaattgcatagatgcttaaatagatccaccaaacatatcactgattatagatctaacatcaattaattatcaaacccaatacataactattcctgaaattataccaaacggtaaacacataagaactcgactcagataagtcatagagatataccaaacataagaactcgattctcaaatgctcaattaggtaaaaagaaatctaatccaaacaatgaataaatcgactaatcgaaaacacaatcacanacacatcacgagcaatattttgactcactg

SEQ ID NO: 3771 - DNA, 3291 bp, Arabidopsis thaliana landsberg
gcatatgtccagcgaatcttctgtcaaccttgaaccgaaagttactcctccatcaccaaaatcaacggaagaagattctatggaaccagaagatactctttcaagtgaaaggggtcgattggaaatttcatccaacactaaaagtcaagacgaaactgctaaaggttatcctcagttgacaaatattttgaactatgtatgcaaaacgtttctgatacttcttttttccatttaccgccttcaagatatggaaaacatgcctggagaagatttactatctgaaaatttggagtcagcacataaaaaagttactagatacaattcagctcttgacatgaccctaaaggtaaagcagacaccagccaaaatacgattcaaaaatctgagctctcttctactgattcagctcattcgttattttcatattaaatctcttttcttactcatttccgctgacaaattatgatacgtgcaggccctcttgaacattaaggttcttcaagaggatttggtgcacaatcggcaaccatttcatggaaacttggaagaacaagttccctatgcactgcaaaatctattttctgctattgtctcggaacagatagcagaagagggactctacagttacctcctgagcaacttacttgcttccctagaaggagttcattccatggtttgtgcagataaatataagctgctgagcttgactgtcattccaaagttttacatgtcattcaattttttactcttttcagtcaagtgatgccgctgacgtagttgtcgcgattctcgagttttttcattgctggaaaagtccagaaagagaaagcttggtaactcgcctttttacgttggcggaatatgaaagaatgagttgtaaaaaatgcaaaaggaagccaaattatccagagcaaagttcttatggaattgttatggctgcaaattcaatcagaaacctgaaggtatgtttcattttctatatttttcatttctacagcaactggtacttaaaatgctgcgctgtggttatttatatatgcagtgtgcttttgggaatataaagtttgaggacatcctcaaaatgggccgcatgaaagatggaatgatatgtgatgttaaaacaggtggctgtggagatataaactttgttcaccatactataagtagatgcccgcctatcttcacaattggtaacttttgacgatgattttgttcttatctgctcacttcattattgtggaatgataaaacagtgttgctgtttttgtgggttttcaacattagtgttggaatgggtgaagaatgaaactgaaaaagatatatctgaaacaacaaaggcattggactgggagatagatatcagcagggtatacgaaggcttagaagaatcaaacattaagtaccggcttgtgtcaatggtaaaatctgacacattatcacaaatgttgtgctattcattttctgtatttctctgttaccgactcataatatggaaatgcagattggttgcgttgttgaaggagaatacatttgcatggcttataagaagaaccggtgggtcagtctcagacatgaagctttagcagaagaggtacgacgaaacagttgtctttctcttttatgagttgaatttgagttttgataggtgagccatgattgatatgtttggtgatcccttaggttgttggtaactggaacaatgtggtcagattctgtggagaaagaaaggttcggccagagattttgttttacgaagcatttcaatggcctaacaagtggcaaaagttaatatcaagaaaatatcaatatgaaaacctggcattcatgtaaaaacacagtgacatctatacaaacacttttttttatcttcactcgagtattagtacaacaatagagagccttctgcttcattctcgtctcttctttatcagtctctctctctccctctaataatcatttctgctcaaaatcgacatcaatgatttgggatttaggtggctttttagagtttcccttgatattattgttgttgttgccatcttttgagaagaagtcgccttgtggctgccacacattgttcccacagccctcaaatcctaatctcaataactaaaacaatcaaatatttctagtttcttaaatatattattaaaatggtgaaaagaaaagaaaaaactgaaaatagcccatatacaaaattttatgtatgttcgtttcataatataatctaccaaaaaaatttacccaaaacgacttaaatataatttatttagcaaaacccacaagttaaaccaaaaagaaaaagagtaaacccataaaggctcaaacaattgttttgctttcaaggtttataatagttttgagcctgcttattctcatggtaacatagttgttttgcgcatcatttagtcaaatcacagcttatgatcaaaacccaagtcttcttcactcaacataaaacagacaactaagagcaagtggataaagaacggaagagacacgttgcgacacaaaaccatgcaatattcagtttctgtttcctcgacgcgtgtcactgtctttctttgtgtttttctccaatttgtttacacagaagttttgcctctctttctctctctccgtctcttggtccttattctctctttcttgctactggaatctgcaatgagttctttgctttcgaagttgccgcaacctaaacaggtttttccttcttctttcttcttattaactacgaccttgtcctttgcctatgtaaaattactaggttttcatcagttacactgattaagttcgttatagtggaagataaaatgccctcaaagcattttgcaggatatctttgatttttcaaagatatggaactgtagagtttgatagtgttcttgaatgtggttgcatgaagtttttttggtctgcatgttattttttcctcgaaatatgttttgattccaacaagtgattcacttgggattcacaaagttgttttctcaatatgtatcagtttttttctatggagaaaaatcatagggaccgttggttttggcttctttaattttgagctcagattaaacccattttacccggtgttcttggcagaattgaaaacagtacgtattaccatgagtcaaacaatggaggaatatcagtctaatgagagtgaagataaaagaagttggatttggagtaaggcggttagtgttgggaagaaagttctgacagctggtgttgtagtatcttcagctgcacttcttgttccttcactttttgtcgccttgacacttgccttcc

SEQ ID NO: 3772 - DNA, 2234 bp, Arabidopsis thaliana landsberg
aaaaaacagaatcaataaccttgtccttgatttagcataaaatgtgtgcattagtcccttcatgtttcccaaacttcggttggccgtcaacgaatcaatacgaaagctattacggtgccggagataacctaaataacggcacatttcttgaattgacggtaccacagacttatgaagtgactcatcatcagaatagcttgggagtatctgtttcgtcagaaggaaatgagatagacaacaatccggttgtggtcaagaagcttaatcacaatgctagtgaacgtgaccgacgcaagaagatcaacactttgttctcatctctccgttcatgtcttccagcttctgatcaatcggtaagatcgctagtagctactctgatatgtcatctacatctgtttctaataagctcgtctatacagctatacaattctaaagaagaacaccgagttaacccttatttctttttctttactttcttgcagaagaagctaagtattcctgaaacggtttcaaagagcttaaagtacataccagagctgcaccagcaagtgaagaggctaatacaaaagaaggaagaaattttggtacgagtatcgggtcaaagagactttgagctttacgataagcagcaaccaaaggcggtcgcgagttatctctcaacggtttctgccactaggcttggtgacaacgaagtgatggtccaagtctcatcgtccaagattcataacttttcgatatcaaatgtgttgggtgggatagaagaagatgggtttgttcttgtggatgtttcatcatcaagatctcaaggagagaggctcttctacactttgcatcttcaagtggagaatatggatgattacaagattaattgcgaagaattaagtgaaaggatgttgtacttgtacgagaaatgtgaaaactcgtttaactaggtgactaattcatataatggtgtgtttatccactagttctcatttctttttagctgtgtccttttctcatatgaatctaacactgatctggaccaaatcatttgtgtactgagtcaatattgattgaacaaaacaatataaacagagataaaaaaaacattcactgctacagatgtcaactgttgttacatagtttattagaaaatcagaacatttaaaaacttaaaagaaaaaggtagtagtgtatatatatacctaagcccttttttcttgagccacaagaaaagctgtgaaagccagaaacagaagagacttgtttcaattatcctcagtgaagaccttgaagatgaaatcacggaaacgtctcgagtacagcctcggatcgacggctgagattgaagtaggatcgtactggatgctcttgtaagcgtgttctagtttcttgctgatatcatagtcttgaagaatgtctatgattccaaagatcatgacaacctcatagtactctcctgtcggttcgccaactagctggaactcacagtcgcttctcctcattgtcctctctgctcgagccggcatgttgcctccaagtctgatactagcccacctgcaacagccaacagatttattcttgaaaccgaaatcgagaaagttgctttctaggattgagtttaatttgttttgtgtttaccttgtaggatcagagagaagctgatccacgtctgctctagagagacgaggggctgattcgtcttcacattcacctgcagttgcgagaaagaaacatatacatttgcttcacgggtttcaaaggagagatatgatatttggttttgttaggaaagcgaaccaataggtgtgcgagctccagaaggaatcagctctccagcgactgatgcctctctgaaatgaatcccaaccagaagactgtaatccattattctctcctgttctagaaactcgcagtctttgtcgacttgcctgaacaaaaacacaatcagcataataaataacaatgaaaaatgtcaatggaaagagaatgattgatgaatctccaacctgatgaattcttggtaccaagctttctgtagtctaaaaatgaaattcagatcaagatctttcaaaattgtatttgaattgatttccgattcaggtttatcggttgtacggccaagagaagatcctttcaaatcaaagcgtctgtggatggagtactcagaacaaaataggtttcccataatgacaaaccgcacctgcaatttgcaataaaggagatgatatattcaatcaaaatccaagtct

SEQ ID NO: 3773 - DNA, 8187 bp, Arabidopsis thaliana landsberg
  unsure (1)..(8187): unsure at all n locations
cgcccggttcagctttatttcaaattcattgactacgcaacagacaactatcaacgagggcactgagtttatccggtgaaccaaaatgcttacaaggctatctaatcattatcccctatgcatatgcaacaatcctaaatgaaacactctagactcgatcctaaatgtaatgcaactacatgaacactctttttttgtgaaatcattttctgaaatttttcaaatttttttggtttttctatgccttacatgaatgcagactcaaaaatatacacagtgcaacacacacttcctgagccctcccccaaacttaaatcacacagtccactgtgtgaataaacttggaagagagtactcaggacaaatccaatcacagaaacaaaatgaagaacaaatcacaacagatgatataatacaatggtgaagtgaggcgcttacctcagtcgaagaatgaacggagttggtcgtcaatggctgcctgtgattgctctcaggccatagacgagccgccctgttctgtatcagctccagcaagtgggtactcgacttcatcagctctgtggcggccagcaccgctatgaggatactcgacctctctccttctgttgtggccagcaccgcagtcgagtgatctcctcgagtgaatgaggcgtgatctgctgctagatcgagtgagtgtagccttccttcttcgcttgtgctctcgagactcgaatgacgaatgcctagccgggacatgtgagactctctgctcgctaagctcaggcctgtgcgcaggctcatcaaatctcctcgatggcatctccagaggagtctgtccctgtggaatagcagtggtggagcaggaacaactcagcttatctgtcagaagcttgatagtcttgaaacacttggcgagcagcttgtcctgcttcaagcaccacttctgcagtttactgttgttcttatgagcttcagtcaagctcttgctctccctcgctggaggtacatgttcaccaaagtgatacatgctagtgtcgaactccactgctctgtcttcatccatcccatccgaagcagcttcttctagaagatcatcatccaatggcgaagcgttctcatagtaaaggcgtccaacctcaggccaaaaatcaatgttatctccctctattatccgtgtaacctcagggctggggagaaggatgctagctctcttgtctgtagagtgctcaaacatgaacctgtgcaagtcgtcaaccattgcaaactccaggaattcgcagtgacgtagatgctcgatatccattgttcgtggctcgagtccatcagaagtgatcgggactccacaagcggtcagaatcggtgtcatcaacacctcctatgcacagagcgcctcatgctctcttgtggttattgctgacggtcctgctcttgtatccacacagatggatcagaagaagtacagagagaggtgtgtcattgatttcaccttggagagacatgccattcttagtttggcgaagagttcccttgagagccattgcgatcatctccatatcagaattagtaacagtccctgtgatctctcgggagtaaagcacattggctatagaacgctggaagtacctgatgacagggctgcgtatctgattgctctttgacctggaagaattcagcggtacagagctgccaatggtgatccacaagtctttcaactcttctctgtcatacttgggcttagttcccgttccactggggaagccaaacaatccttccaatcgcttgattgataacctatactcatgaccatatacagagaatcgcaagaatcccaatccttcacaatccaactcatcacaggtcataccttggtagagctccacttgcagcatggagaggaattgaattgtctcatcttcatatgctacatacggataagccatcagagtgtccagatgacaactctggtacaggtgctgaacatcttccaacaatccgagttgtgcaagtgtggttgagcaaggatacctcgtgctacagaactcgttcagcttgaagagcctaatatattcctcagcaggcaatacatcgggtttgtttagcagtttggtggctctgcgagtatgctcaggcatgtactcgtcatcctgatcctcatctataagctcatacctctctgtcatcgctctcctccctcgaggtatattagcctttcttctgaagctatcatattctctctgttctctntctggccttgacgatgacgactctgtctcatccatgttgtagtctggatcaactgaagttctgccactgtaattactcatgattctcctatagaaatttagaactcaaagctcaaatgtcaataggttagtctcaaagataacaatgaaaccaaaattgttatcaataggcaacgaaatagaccctattggtcgagtacaatcttgtactcgagtaaacagggctgtctccgagttctgctttagtgaatcgagcaaaatagaaaccggtggtcgagtaaacctttggaggtcgagtaatgttgaggaagtcggtacagctggtgagttcagacggtcgagtgctttgtcggtgagccggaattggcaaggacgaagccacaaatcgatggtcgagtcttgtggatgtaatcgagtagctcttgggacttcgacggcaaactaggtggggactcgactgcggcggcgcaaagacggtcgagtatggcgagaacaaagagacgatgaacggtgaagtgaattggtcgagtatagggacgaaagtccccttggccacggtgacgaagcggtcgagaaaggtgagaaggggttgtgtgattttcttcaccgcgatcgagttgtagctttgaagacaaattggtcgagtgaaaaagatgtgggtgatttcaaaaaggagtggtggagattaagtttgaaattctctctccatcttatcttcagggagaaagcgcgtggtccacactctgttgacttgtctttaagctctgttccctgttgactcgataaacctcagtaaatcccgaaatcctatgtaaatttctgttggtcgagtatattgtttaatcgtttgatcgaaacaccattatactcgatttccacctctggtctccacatttcttatgttggtcgagtacttggtcgagtatgaaggctcagaatcatcaaacttactcgaccacatttcctcatcaacatgtggttagtgtgatcgagtgacatgttaaagctccaactgaaacactcgatctctacagcatgtggccgagtgactctttgaggttgaatccattacacttaaacatttacagttatctcctgaaaacactagtaaaatgcatcaaaaataacaaggaaaacaaaaatatgtatagagaaagggatgggacttcctcccaaatgagcttgttttaagttattagcttgactaccttgctcctttaatcatcaagaggttcctggagatgaactgaagtcacctctggaaggatttgatctgctaagtatttcttgagcctttgaccatttactgtgaaatctccactcttaccagctagagtgactgctccataaggacggactttagtgacacagaacggaccaaacaatctagacttaagctttcctagaaagagtttcaagcgagagttgaatcgcagcacctaatcacctacctggaaatccttggtgatgatcttcttgtcatggaaaagcttaattctctccttgtagattttagagctctcataagcttctaaacggatctcatcaaggtcactgagttggatcaaccgctcctcctcagcggtttttatgtcgaagttcaagagtttaaccgccataatagctttgtactcgagctcaataggcaggtgatctgattttgcatagagaagattgaacggagttgtaccaatgggggtcttgaaggtggtcctataagcccacaatgcgtcatcgagctttgcagaccagtctttccttgtaaccgcaacaatttttttccagaattgctttttatctccctggtggagatctcaacctgcccgcttgtctgtgaatgaataaggagtggcgaccttatgtcttactccatgtttctttaggaggttctcaatacccttgttgatgaaatgctttccaccttcactgattacgaccctttacctccaaatctcgggaagattatggttttgaacagcttcaacgcaacttttgcatcgttagtagagctggcaatagcttcgacccactttgatacgtaatctacggctactagaatatacttgttaccatatgaagatcccaccccacccataaaatagatttcccacacaaaaaaaatctcgacttccaagattggattctgaggcatctcatttcttctactgatgttgcctttcctctggcttgaatcacattttgaaacaaactcttgagcgtcctcaaacattgttggccaccaaaagcctgcttgaagaatttttgacactgtcttgaacgtcgcgaagtgaccaccatatgctgagccatggcaatgcagcagaataccttctacttcatcttttgagacgcatctcctgtagatcttatctttacagagagtgtaaagataaggctcatcccagtagtaatggtgtatatctctaaaaaacttcttcctttcataacttgtcaggttgggaggctctactccgcatgccaagtaattgacatgatcagcataccatggagattctccttcaatagcattcagttggtggaactctttcccactgtagctccttccgaagaactctacaaccatgagctgctcttctggcattgaatcgtctatcggaaggggttcttcagttctcatccttgacagatggtcagctgcaccattttcaatgcctttcttatctactatctccatgtcaaactcttgcaataaaagtatccatctcaacagtcttggcttagtatccttcttggcatacaaatgcctcaaagctgcatggtctgtatagacagtgacatttgatccaaccaaatagcttctgaacttctcaaatgcgaatacaatagctagaagctccttctcagttgttgcatatcttccctgagtgtcatccaacgttcggctggcgtaatatatgacatgaagctttttgtttattttctggcctaaaacagctcctactgcgtaatccgatgcatcacacatgatttcaaatggatagtcccaattaggcgctcgaacaaccggagcagataccaaagcgtccttgatggtttgaaaggatttgaggcagtcatcatcgaattcaaatttggtttccttgcacaatagtctggttaacggtcgggctatcttggagaagtctttaatgaatcttctatagaatccagcatgaccaaggaagcttctgatgtccttcaccgtttttggtggctgcagctgcatcatcacttcaacttttcctttgtcaacctctatacctttctctgatatcttgtgacccaatactatgccttccttcaccatgaaatgacacttttcccaattgagaacaagattcgtctcctcgcacctggtcaataccctgccaagattcaacaaacatgaggagaaagaggggccatagaccgaaaaatcgtccatgaaaacctccaccatctcctcgattaagtctgaaaatatagaggtcatacacctctgaaatgttgcaggagcattgcataaaccaaatggcattctcttataggcaaaagttccataaggacacgtgaaagtggttttttcttgatcattagggtgaattggtatttgaaagaaaccactgtatccatcaagaaagcaataatatggatgattagccaaacgttcaagcatttggtcaatgaatggtaaaggaaaatgatctttcctagatgcagcattcaacttcctataatctatgcacattctatgaccagttatagttctagtagggatcagttcatctttttcatttttgacaacagtcattccaccctttttagggacgcaatgcactggagaaacccaagtactatcagagatagggtagatgacaccagcatcaagcagtttcaaaatttcttttttcactacttctttcaaattgggatttaacctcctctgtggttcaatgctggaataggattcgtttttaagatggatcctatggttgcataaactaggtgaaattcccttaatgtcggataatgaataaccaattgctctcctatactttctaagctcagataatagtaggttcacttcatcactatttaactcagcattaatgatcacagggtaagtagagtttggaccaaggaatgcgtaccttagactttttggaagtggtttgagatcaaccttcgtgccttaagttcagaccagtcatctgaagttggaatgatcggctccctaggttcgtcggaagacaaggtcgagtggttgcttgagtacgtcctcgagagtgcaggatgaactcgagttgacccttcttcgctcattaccattacctctgttgctggtccatttaattcctcaaagggttctgattcttccatcgctttatgggagtctaacagcttctggtatcccaatgtttccaaatgcagaaactcatcttcaccacttttggttaaagcactgttaagatgatcttcttctgccagcaattccagtaactcatcagctaactgatccatttcttcgatccaaaagagtttcccttctatggtaggcttcttcatcgcgtctttgacatcaaaggtcatcctaaagtctttgccaaggtttagatcaattttccctttcttgacatcaatcatagctcctgcagtggctaagaaaggtctccctagaatcaacgggtccttgggctcttcatccatctccaggactacgaagtcagttggtatctccatagcaccgatcctgattgggaggttttcgagcaaaccatgaggaatcctcactaatctgtcagctaggatgagggatatattgcaggacttgtattgagtgaaccccaatcttttggcgacagaaagcggaatgagactgactgatgctcctaaatcgcattggcatctattgaaagccaatggacctaaagagcacggtagagtgaacgaaccaggatcactaagcttcttaggaatgattttcttctgtatgatagcgctgcattcatgactcaataccaccatctcttgcacttcttgaattctctccacaatcaagtctttcagaaacttgtgagagtctggaattagcgctagagcgtcaacaagaggtattcgcaactcaacctccttaatgttcttggcaaacatagctctatatttgtctgccaacgctttcttgtgacggccaggaaatggaagctgcggtttgtagggaggagggacaaagacctttactttgtttttgacagcaactggctttggagcagttggtgatgctgctgggatgacaggtcgagtggttggtcgagtaatgctgtcgagtggcggatcgagtggttgctcgagtgactggtcgagtgttttgtcagcttgatctttctcgagacttaaatcctccccatcttgatcttcactgtcctcggtgaccgtctttggttcctccctagttggaagtgcttttccactacgcagggtgatagcatgagcatattcttttggattctgaactgctttgcctggtagttggcttgtctgttttgtagctgaagaagatgtagaatgtccctctaagtaacggactttggtattcagtgtttccatcttgacattgagatcattgtagctacagtccagcttgttatgtaactcagatatcttctttgccatctccatggagctagaggcttgcctgtgaagcagctgttgtagcatttgttttgctgaggtgcaaacccaggtagtggtggttgctggtagttcccctggaattgctgcttaggaacgaaaccttggttgtagggaacaaaaggtttgttctgactttgttgttgttgtggaggatacacctgatcctgaggattagcaacgtttgtgctgcggtaggagaggttgggattgttggttttgaagttgttgtatcctttgtagccaccctggttgttgttgatgtagctacttcttccaactggttaccctcccc

SEQ ID NO: 3774 - DNA, 2154 bp, Arabidopsis thaliana landsberg
gtatttcttgtataaagatcttacataaaaagggaagaagtaatcttttgcgtatttatcagaaaataacaatgtttaatattaagatttgtggtgaaaatgtagaatctctagcccccttttcttggagtcttcacctctcttttatggtctctttccttcttccaatgtgccattatttggctattaattatagaattaattcacaaaataacttccacaatcaattcataaacttgaatgacaagtttattcatttgaccatagtaattactacatgaattaaactacaaattaatgtcaagatttgaccatctcctttgtgcaacgtggtccttcttggacttgaaaactgatgggccttcaaaatacttcagagatccagtttgcgggatccggtatcaacaacactcatcgagttgcttctcctgaactcagctggaggtggtggtgatctctgccttctttgcagctcctgaatttgaacagccataccgttcattgccctcttcatttttctcaccttctttttcaacccactaatcaaccttctctgaaacttccctagacccttgagcattcccagcttcttgtgaacttggccgggatctctttcttgatcggactcagcataatcttcgaagaaatactgctctgctgcagcttcacacgagtcctcatgctcatcaaactgctcagcacgactgtacacagactggtcatattcggcctggccatactcggcctgccgaaatgtactcggccgagtatgctcttcttgctcagcttcggcttggttgaactctactccttcttcttgtgattcactccctatgctcggctcctcgtggaaaggcacatggacattgactaagattgatggaggaggatcaaagtcaatgttgtttccagttctaactgtggtgtactccttgcaaggaagtgctagcctagagagacctagcttggagtgcttaaacttgaactggagttgcttaactggagcagacctatccaagaagcctttcttcttcaaatgctcaatatcaatatagttggctgtgacagtgggagtatgaagagggactccagcagctattaggatgggtgtgatcactcctccagcacacaagctgtctccaaaaccggattggtggatgccggttgcatattctctaaagcttatcaaatgatcaatcaacaccactcaaagggatgtatcagccctatccccttccatctctatcttcttccttatttgccccaaaatgaagcatagggtaagatcaagtatcttcagctctccctcattaacatggccagtggtcttcttcgggaagaaggcattcgcaatgtagaggtggagatacctaagcaccgggcttattaacgctgaactcttggccctagctaacttgtagggaagtggactaacgattgttaaccacaaatcatggagctcgtccttgttgaagatttggcgaatttcatactaggtagggaacttgaataaagcatcaacctgcctaatagcaagggagtagtgaattccatacaccatgaatgtgatatactccacccctttatgtagctctttctccctctcatctgcatagaagtggagcttcaaggtggctaggaacaagcagctctcctccttgtatccctcgcgcttgtaggaaaagaatgtctctagcttggccatctccatgagatattcaacatccttacagatccccaatgcttgtatggttggcctatggagatatcgtgtcccttcgaaactcagctccattaggttctggtagtgctcttcaatggtgggctcattcttcttccttggagtgttcattctccttcttgcaagaactggcaagacctcctcagcaatctctacatcttcctcagatgcttccctctctaacataggctcctcctctattgtagctggctcagcctcccaaaccctctttccccttgcaacttcctccctggcagcagcagaacgacccacagaagattctggagtcataattagccactgtactcggcctgtcaaccgagtaaaaccaggactcacagcgtcctgattccaaaccggacatttcggtctttagagaactgtcatgcaatttcaagggggggggggggggg

SEQ ID NO: 3775 - DNA, 442 bp, Arabidopsis thaliana landsberg
cgaggagaaggttgatgatagtgatgaagagatggagctttatgatgtagttttgaagagtaagcgaggagggggaacgagtgcaagtggaggtgcgaattcttgtaaagggagagtctttgggattgagaaggtgggaatgaagctgattccttaacatgtgagatgtcaaaagaagagtgagttagaaaagcgaaagctactttgttgttggctacacgtcctaagtctcttccttgtagaagcaaagaaattgaagagatcacttcatttataaaaggttccatctcggatgatcagtgtttgggaagatgtatatatatatatatggtgttcccgggactgggaagattattagtgtattatccgttatgaagaatctgaaggctgaggttgaagagggaagtgtggagatcaatggtctcaaattgggtttacctga

SEQ ID NO: 3776 - DNA, 3145 bp, Arabidopsis thaliana landsberg
tgagctttcttcatctcttcccgtaaaacctcaatctctgaagttgtctctaacagcttggcttcaagagttcttgagagctcaggctcatattctttcctcaacactagcagtttcttctctgcctcttcaacagcagttctataacattctcgtaaatcgtctttttccttaacaatattagcgtgctcctgcagattctgagcagccgctagcttgagctgatgaatcgcatctttcatatccgaaatctccttagaaagctcgttaactttggcggagttgacttggagtgcacgttgagcttctgcagcctggtttaaggccgtggctttgaaatccatagcggaatcaaagctctgtctaattttgttgagctgctgtttggcagcatcaagttcaacggtggtggagatatattgttctctagcgacgtcaagttcatggtgatgaggaggagagccatgacacttatcatgctcaagctgttcttcccgctgttggacagtttctttggtgtcaatagctgattgcttagacttgttgacagtctcaagtttgttgctaagatcctccattgtcttcttcgcctttgagagatcgtctagagcacgagatcttgtgctctcagcgttgtcaagcttttgcttgatcttcatgaattccttgtggaccagcattagctgtgtttccttgtcgcaaacgctctgaaacataacataaacaaatatttttagttttgcacacaacacaatctgttacctagacatattctggtcatctaaaaccatgatagaatcatagaaccatttcttgatcagactttaatgatccatgttgttgttattggattacttacctcagaggagagtcgagatcgccttggagtacttctttgctttgagactgcaacttctccgaacaagctcaccgcagctttcaccgattggaacggtgctcttgtgtctatttctcccacctccatcgtcctcggagattccggagctttttgtactctaatgttcaccattttctactatcttttttttttcagaaccaacctgcatacacaaacattctctatgcataagaaaacacgaatcatagatgagaaacatcataatcctcacgtgatcgtcatttacaatcaacattttatatctaatcctataaactaacaaccacaagatgtatttttacataacaaaaccgtgaagattgcaattggaagaaattagatgaaacgcaaggagacaaatgtatacgtaccttgaatttctctttcttcgtgttcttggttgcttttttcttattgtcttcttgttatataatccttttctcgtctacaataacgggatttttgattggttattaatcctttttgtctcttcaatctatttatagaaacttagttgatggcacgacacctttccttctcttctgtctgcacccacgtctctctgtctcaatctccttttttattattttcttaattaatgacttttaaaagctcttcaaaatttcagtttccgcatcaacatgttattagaacaaacaactaagataaacaaattctggttacacaaaagtaaacataacttctctgatttgtgtctttttggagatttgtgggttcaaatttttataaaacattattatggggtggaatgtataaatattccataatatagggtctgtttaattatatcaagcatatatgcacatctttttaaagaaactgatagtttgacattaattgacttgacactatgaccagcgtaatcacctcacgtgctcgtcacgtggccgtgatcggactaggagccgccggcctcgtggcggttcgagagcttcgtcgtgaaggtcataccgtcattggtttcgagcgtgagaaacatgttggtggactgtgggtgtacactgatcgagtcgaaccagactcacttagcgttgacccggatcgaaccatcgtccactcgagcatctaccagtccctccgcaccaatctaccacgagagtgtatgggttacagtgactttccattcgttacccgatccagtgacggtgacccaagacggtacccggatcatagggaagtcttgatgtaccttcaagattttgccaaagagttcaagatcgaagatatgatccgatttgagacagaggttttgtgtgtggagccgtcgccggagaataaccgtaaatggagagttcagtttaagagctcaagtggtgtctccggtgaagatatctttgacgcggtcgttgtttgcaatggtcacttcactgagcctcgtcttgctcatattcctggtaagtaattttttggttacttaaaagtgtgattagtgtgtaatttaatggttgattagtttcttaattatcttgtttttagtgttttagggatagagtcatggccaggaaagcagatccatagccacaattatcgaattccagatccattcaaagatcaggtatttgcaaaatttattatcttcttattcataatcgtagctcttaattatactaatagattcttttaagttatctacattgattgttgtttgacatgttttgtaggtggtgatagttataggaagtcaagctagtggaaacgacattagtacagacatagcaaccattgcaaaagaagtccatatctcgtctaaaatggttgcatccgattcatatggctgttacgacaacctacggattcaccctacggtagaaaaatgaaatataaagacaactaagaatatgaatatgatcatttgatttcttatatgtctcttgatatgtttgtagatatatcgcgcccgcgaggatggttccgtggtattccgaaacgggaaagtggtttttgctgatgctatagttcattgcactggttacaagtatcatttcccgtttcttaaaaccagtggttatgtgactgtcgaggataaccgtgttggacctctctacaaacatgttttcccacccgcacttgcgcctgggatctcctttattggtttacctttcatggttagtattacgacatgttagatacatatgggagttttaaaagattaagaatggtaggattatccttaaaaaccagggtaaaaattattgggaatatatccatgaagtaaaaaaaaagctt

SEQ ID NO: 3777 - DNA, 2478 bp, Arabidopsis thaliana landsberg
caagtttagcatgaaaaccaagtatggagcagcagttgcaccttctgtcctccttgctgctgcatatgtcgcttgggacggcgataaatcgtggtttatggagaaagaaagacgatgaaaatggtcgagatacaagaaaaagcatcggtaaaaacatttcagaacaaagaagagatggtaatgttaaaaacatgggtaaggaggcttcttcaggaagagatgaaagaaccctctcaaaatctgtttcaatgggagctattcgaggaggaaaattagcactacagagattgcttgatttgcactcataccgcggtgacacttcttcccttgcgaatgctgaactcgaatttgaagcattgctttccaaggaaaagccggacttcgggttgcttcaggttgttcatatatagaaacttttttgctctttcggatcaaattgcatttagttaatttcttctccctcatgcagagagacattgtgaaaatggaaatgagtggaaaagaagcaaaaggagctgagctattgaaaaaggcattggagaaagcaagaaaagaagggaaaggtcatgaggcttatgagattgagatgttgcttgtggagatgttgatctacttggtttgctttctgaatttcctttctcatatatatgaatttttttcaccatctttataataaatttatttctttgtaatagggaaacatggaagaggcttcaaaatgtaagtgtttagaggatgaagtcataacagatgcaagacgtcctctatatcaggcaagtcatatacatagtaatccttaattccatttttttacttattgttgtgaccaatgtcgttttatctctcagactataatccattaccttcaaggtcatcctatgaagcaagtcgaggagacattcaacaggttcagagagattcaaattggtctacaatggcctggaagctcagaagaatgtgaaattgaccaagtcacatttgatgagttcaagaaagttatggaatctctcaagcatgaaatcgaagacgtcaacaaaagaaagttgaagttagtcaaagataaaactatgagagatagtcttcattaatttcaagcaatattagtgtgttattattcaagaatgatcataagatttggtacataaataatgatactcttgacaaaatacatcaaactagacccaaaaaaacatttaatatacttatatacatgtatcattttcatgatgaaacaaatttgaatatatgctgaaaaatgttatcaagtaaggatgtaatgttttgcccaaaaatagtaaggatataaaatgtatcactgaaatgaatcaagagaatatgcactagatgactatggatggtaaaagaactaacaaaatagccatgatgtcagaccacactctttttcttcacttgcaattacttttttacccattttcgtattttatatatattacatgctatttttcaaaatcagataagacacttagaatcatctcatctttctttctcccaccaccacaaccaccacatcttccaccatcacaaccacccgatctctttttcgataaatctaggctctcaaacgttatttatattgatagatcatctctccttcgatttgcagaagatttgtcattttttattcgattttgattctttcttggaatctccgtcgttatgttttctttttaaattgtatgttatttttttttatacgacgatacttttttgaattacacgtgataactagaaatctctctctcccaacatgctactttttcatataacacattatttatttaaatcacatgtaattttttctaaaaacatgatttaaatgttaaaactttcttaaatctattattttatcttcgtataagcttgctcctggttcaacttttcaaatgaaacgatatttgtttatataacatgctatttgtgtaaaatgtacgttataaaatatcattttttttaataaatatcgtgctattttaacatgtttcatgcgatttgctaaaaaacatcaaatatatctatataagcctgcttttggttcaacttgcgaggatagaaaaactgacaatggtttttaatatttatagttagtttctaatattacccttataaaaaccagttagtgattgaatcatttgccactgctggattttagattacaattttctagatacatcgtccgatcttgatgaataacttaagacttcaatctaacatataatctaaaactatcagaaatatctatatctttaggtataaaatcgtggccaggaaagcagatccatagccacaactacagagttcctgggccattcgaaaacgaggtaattaatttttttttttaaagatagtagtccctttagactgtctattatgagtttttttctactagttctaccaaaaaaagtctctttcaataataataaaatgggtagaaagtctcattcaataattaataagaat

SEQ ID NO: 3778 - DNA, 1557 bp, Arabidopsis thaliana landsberg
aaacatcttacattttgaaatggatgaaatatttatcttccttctctttcttcatttgaggtttatatgaatttaatcacacattttaaataattaatgttaaaatgataaatcctatgtttttctattatgaattttaaaactagaactattgaagtattgattgtggaaaatattttaatatccagttattgaaaatatttttaacaatggtttttcaatatggtttcaaaattcaagatgatttgggaaaagttaagtttattgatcacatgcaccaatatatatatacactaatacacaattatatatattaatttaagcactaaacttactaatccttatcttaacataagatttatcccgtacccactctaattaataaacatatatctccgaaaattgtagaaccatataaaactttaacacttcctttcaagtttgagtatatatgtaaatcacaaacgctcaacttggacaagtagctaaaacaggaacttcccaaggctatgtggttcgaaaatgatgcgtaataatattgaactgcatctcttacactatgataatccgctatgatatttttagttttctcatggaacactcggttagcagcaatgtgcaatgctgatttcctatcacaaaacattaacatcagatcactatgcttcactactcctagatccgtcaaaagtctctaagcattttagttctcgtaatgtggcaagctggtagccatgcatatatactctattttgacgatttggtttacgccgttaacggttgttgaatgaagaaaatcggattttaaattcgatcatattcttttatttttaagctaattagtttgtgtattgttctgacaataaaaaaatttcagctaattttctaacaaatatcgaataaattgtgctttttcggatatttccccttcaatttttacaatagaatataatgatcgaatatttttgtatgaagtatattgttcttacaacaaaaacgtttttttttggttaaagtacgaaaatgatgatgattagccatcttgtttcagttctattatataagcccattaatagcacggaacgacctttaaccaaaacacagagatcatacgacagtctcctaccaaataaagaaaaattaaccataccataaattttaaatatatggcaccagctcaaaacccgatcagttctcaacacgtggtagtcatcggagccggagcagccggtctcgtagcggctagggagctcagtcgtgaaggtcacactgttgtcgtattagagcgggagaaagaagtaggaggtctctggatctattcacccaaagccgaatccgacccgcttagccttgacccaacccgttccatagtccactcgagcgtgtacgagtctctccgaaccaacctcccacgagaatgtatgggtttcacggacttcccttttgtgcctcgtttcgatgacgagtcaagagactcgagacggtatccgagccacatggaagttcttgcgtaccttcaagactttgctagagagtttaacctagaggagatggttc

SEQ ID NO: 3779 - DNA, 1305 bp, Arabidopsis thaliana landsberg
tgatctaggaccactacacttctatcatccatgtatatgtgggtccaatctatatgtttacaaatataccattctgttgataattcacaaaagtattatgtttgagaacaatatctgttatttttggggaataaaatttttatttttataattgtttgttttcaattgtcacaatgtctgcttccaatatatagctttcttataattataacattaaatcataacccttctcttatgaatccaaacagtcatataatctctagcactaatgtatattgtttccatacttaatccaatttggaggggttttaatgattaatttagttattttatttagataatattattttttaattcatttagttagatatggaaaacattattgtgtaatttggagtggattaataaaaatccaagaattattcaataaacaatgatttacataactaaataattaaataattgttgatagattaaaaataatatgtgtggtttctgctatagctacttggtaccctggttaggtaagctttcaggtagaagaaaacacatgtaatatatgcagaaacacgttttagctaggccaatttataaataaatatcaaacataccaatgaatttaaaacatattgtttcacattcctaaataaatgaaaatcaaacatatcatagaaatttaataaaataaatggcaccaactcaaaacacaatctgttcgaaacacgtggcagtgattggagccggagctgccggtctcgtaacggctagggaacttcgtcgtgaaggtcacactgtcgttgtctttgaccgggaaaaacaagtgggaggtctctggaactactcatctaaagctgactctgacccgcttagcctcgacacaacccgaaacatagtccacacgagcatctacgagtctctccgaaccaacctcccgagagaatgtatgggttttacggactttcctttcgtgccacgcattcatgacatctcgagagactcgagacggtatccgagtcacagagaagttcttgcgtatcttcaagactttgctagagagtttaaaatagaggagatggtccggttcgagacagaggtggtttgtgttgagccggttaacgggaaatggagtgtccggtccaagaattccgttggtttcgccgcccatgaaatctttgatgccgtcgttgtttgtagtggtcactttacagaacctaacgttgctcatattcctggtaaagatccatttctctatacttatttcaaataacccggtttctttgttcttagtctctgggaataaaaaaa

SEQ ID NO: 3780 - DNA, 1364 bp, Arabidopsis thaliana landsberg
cggaaaataaaaaaattgagaattgttaaatacccggtacaatggacaatggtatcagcatgtaccaccttcccatttttaaaaacaatggtaccatcctcgtgggcggtgtctatctgcaagatatcaaaaaaataaaataattaatagaagcaagaattttataatttgtttcgaattttttcttatcaagattaaccattataagaaaatagtttttacctcagagtgcatccagagattgttattaggtacaggacgtttttcgaaagtgttggatttacttgctctagatgcgatatgaacttcttttgcgactttagatatgtctctactgatatcggctccactcgcaaaattcccgattactaccaccacctgcaaattaatgtatggtttagtcaacgtttggtttattattatacagttaaagatgtatcaaagcaaattaatctattccatttaatccctcccacatgggttaaaccaaaagtgacttttatacattttaaagagtactatatgtgattattaattactatttaatgaaaagtgttttgcgaatctgcgattgtattctttgtttgtggataccacaactctctagaagatctgactataccgacatagtttatactatatcaaattttgagatattattttctgcggtccacaatgaaatggagtttttaattcactgaaaaaagcattaggaatcgaatatagaaaagagaacataaactagaaagcgtaataactaacaagaatttcgtcaccatcattaactcatctttcattatttttttttcatatatcatatacgtttcttctctcaacacgtatcccatctttaactatattttaattaacttaaaagtctaaaatgttgatttaataaagtgagtaaaagttacgtgttgtatcatcgttttgttttctataaaattgagacttggtccgtacgttaggttaatgtagtgaaagattatagctgtcaataataaagtcaattttagtattaaaaaagtctcgtagattatgaaaatacctcatctttgaatggatcaggaactcgataactatggctgtgtgtttgcctccccggccatgactcaattcctatacaattattcacatgtcaaaaccacatatacacacaaaaaattattacgaatttcgaaaaaaatttaccaatagttttttttgaaataaagtataagaaaattttgatattttaccaggaatttgagcgatgtttggttctgcgaaatgttcacaacacattacaacggggtcataaaattcaacgttggaaaaacccgcgccggttttagactggaccctcccatttaaccataaacccg

SEQ ID NO: 3781 - DNA, 1131 bp, Arabidopsis thaliana landsberg
gctactttttcgaattacacgtgataactagaaatctctctctcccaacatgctactttttcatataacacattatttattaaaatcacatgtaatttcttctaaaaacatgatttaaatgttaaaaatttcttaaatctattattttatcttcgtataagcttgttcctggttcaacttttcaaatgaaacgatatttgtttacataacatgctatttgtgtaaaatgtacgttataaaatgtcatcttttttataaatattgtgctattctaacatgtttcatgcgatttgctaaaaaacattaaatatatctacataagcttgtttttggttcaacttgcaaggatagttttgtattttcttatgccgtcatatagttatttatccatagaaaactgacaatggttagttacttgattcttttcaattatatagttagtttctaatattacccttaaaaaaatttagaagttgacttacaatgaaagaacccaaaaaagtgaatttttatggatcaatatcaaaccaattaaccagattggctcgaccaaaataaaggacactgagagggtgtattggacattacattttgaatgaattgaattttagtgacttttagctcaataagaccatttataacacaagtttttagctcaatcaaatagaaacagaaacaacaaacttaattcgtcattgctcataaaaaccataataaccataataaccatcacaaattatttttccacaatccataatccaaaataaaagaagatgattcaacttattaaatacttaaaaaaaaaacagaaaaaaaccctaagctaagatgtaaagaaaagaagaaaccatcacaacagctatgaatagtttggatactgataaaatcccgctactagatattgatggtgacggtgacggggaagctgccgtaggtgatgaagcggtagatgatgagacagccttaaccggtgatgaagcagcaaccaccggtgatgagtggctaactggcggtgatgagcggctaactggcggtgatgactgcctgactggcggtgatgagtgactaactggcggtgatgagtgactaaccggcggggatgagtgcctgacgggccgtggtgagtggcta

SEQ ID NO: 3782 - DNA, 1154 bp, Arabidopsis thaliana landsberg
catggaacattggattaaaaataaaaagtaagataataaaaagtggaatgtgtgtaatgtgtagtcacgtgaaagaagttttggggcaattaataaaataaaataaatggattgaattaaaaaagtccgtacggtgcagtcgtacagggtaacctacccactcccacctctttttttttttctgggtgttctcttacgtgtcgtaccgtacaaaccaacttgacttttcttgacaacttttatttaacatttagacacatgtgggtccaattctccactattcagaattgcccgttacatgccgtttggcttctgtctcgttaattacttttttgagaatatgcattagatgactatgaattgtaaaagaactaacaaaatagccatagtgtcagaccacattttctttcttcatttacaattacctttttacctattttcgtattttatatatattacatgctattttttaatattatataaaacacttagaatcatctcatctttctttctcccaccaccacaaccaccaaatcttccaccatcacaaccacccgatctctttttcgataaatctaggctctcaaacgttatttatattgatagatcatctctccttcaatttgcagaagatttgtcatttttttattcgattttgattctttcttggaatctccgtcgttatgttttctttttaaattgtatgttattttcttttatacgacgctacttttttgaatttcacgtgataattagaaatctctctctcccaacatgctactttttcatataacacattatttattaaaatcacatgtaatttcttctaaaaacatgatttaaatgttaaaactttcttaaatctattattttatcttcgtataagcttgctcctggttcaactttttaaatgaaacgatatttgtttatataacatgctatttgtgtaaaatgtacgttataaaatgtcatattttttataaatatcgtgctattttaacatgtttcatgcgatttgctaaaaaacatcaaatatatctacataagcctgcttttagttcaacttgcaaggatagttttgtattttcttatgccgtcatatagttatttatccatagaccaactgacaatggttagttacttgattcaattca

SEQ ID NO: 3783 - DNA, 487 bp, Arabidopsis thaliana landsberg
acgaaccaaaagatgaggaatccaacaaatatgattttatggaaggcttactagacacagcgaaggagtgagataacataacactaaccgatctcagtccgctacatacttggccatcttgagcttggtttccaaacactcaatctaataatcctgacccaatgagctttggtatgagaaagaaaacataaagaagatgtcgttagttgctatatgatacgttatccaaaaccatagattatcctacccggccataccgctcatgatgcctagatcatataacacacttatacacaattagtgcaacatttgattggcgttatagacttatcaaccatcacatacggatataaaacacggtgccatcgtgtgaatcattgacctctgtaaacatttgcccttctgtgctaacacagacgagtcagcattgggattaaaacatgtgcgcgttggttctgctactgaagtagattaagaagatgaattg

SEQ ID NO: 3784 - DNA, 755 bp, Arabidopsis thaliana landsberg
tgctactttctcgaattacacgttataattgaaaatctctctcaaataacatgctattttttcatataacaaattatttattctcatagcacattataaaatgtcacttttttgataaatatcgtgctatttattttgttcgattttgattttttcttggaatcttcatcgttatgttttctttttaaattgtatgttattttcttttgtatcatgctactttttcgaattacacgtgataactggaaatctttctctgtcaacatgctagtttttcatataacacattatttattctcataacatattataaaatgtcacattttttataaatatcatgctattcacatactcttacttttggttcaacttgcaaggatatttttgtattttcttatgccgtcataaggttatttactcacatacaaattgacaatggttagttactacattcttttcaattctactttctaatattaccttaaaaataattagattttttctctcctttttctgtcatttataacatcatatctagatatatctcgtctaaaaatattttgatgataacctgcaatatagattatgacgaacaacttttatagataacgattctaccattcagctcttctcgcaacactcggatacacgacaaacgattatgcatatatgatatatgatggacatactctttctgcttcatttgagaccacaacggtgatttaattatagtactcgatatagattacgataag

SEQ ID NO: 3785 - DNA, 606 bp, Arabidopsis thaliana landsberg
  unsure (1)..(606): unsure at all n locations
ctattgccatccaaagatctggcttcaagatcgtgtttctatatatgcttgacctttacttccgtggaatnttgaactacctgttatctgtcactcctgctggtgttggagaatacatgctggcttcttggtttggaatgatgccaatcactcttgctttggtgtacgttggaacaacactgaaagatctatcagatgtgacacatgggtggagtgagatctcgactactcgatggattctgataatatctggctttgtattatctgtggtcttgatcatctgcgtcacaaaaattgcaaaatcatctctggagaaagcattggccgagaatggagagnnnnnnnnnnnnnnnnnnnnnnttcctgtggtagcctctccctccgatctgcaacaacctcttgtaatcaagattgacacgtcaaatgaacatcacgagaagtaaaagtgttgtgttcacaatctcggatgtacattctttgtctgttgagtctgtagactatatatacccatagctcttgtgaggcccggtaaagggtaaaaaagcgcaaaaagagagaaaaatgaccgtgacacttgactgataggtaatatctttggtgaaaatg

SEQ ID NO: 3786 - DNA, 610 bp, Arabidopsis thaliana landsberg
ttcgggcaatcagctaagatattaaataacgcggagttcattattaaaatggagtaatgatgttttcagttttctatataaatcacgtcgagaccttagagtcttacacaacaatccttcttacatttctaccaacaaaacacaaaacacaaacatagcattcaaaactttgaaaaatggcaccagctcctagtccaatcaattctcaacacgtggcggtgatcggagccggagcagccggtttagtagcagccagagagcttcgtcgtgaaggtcacaccgtcgttgtccttgaccgagagaaacaagtaggtggtctttgggtttacacacctgaaaccgagtccgacgagcttggtcttgacccgacccgacccatagtccactcgagcgtctacaagtctctccgaaccaatctccctagagaatgtatgggttacaaggatttccctttcgtgccacgtggcgatgatccgtcaagagactctagaaggtatccgagtcacagggaagttcttgcgtaccttcaagactttgctacagagtttaacatagaggagatgatccggttcgagactgaggtgcttcgggttgaaccggttaatggtaa

SEQ ID NO: 3787 - DNA, 1067 bp, Arabidopsis thaliana landsberg
accccagaaatatttttaggtggatatttgccctggaaaactactgttagtgaacgtacatgcaaacgggccatggtgatgaagacacactctgtttgttcattcgcaaacagcatcttacccattggcttagactatatatattccatgctatactgtaaaaccatggacaacacttatagtcatgggacctgtctttactttcaccaccacaactaccacgtattgcaccatcacaaccacctgatctatttttcgataaatctaggctgccaaacgttatttatattgatagaacatctctccttcaattcgcagaagatttgtcattttttaattcgattttgattatttcttggaatctccgatgctatgttgtctttttaaatggtatgataaacacttgtataccacgctactttttcgaattacacgtgataactagaaatatctctctctcaacatgctactttttcatataacacattatttattaaaatcacatgtaatttcttctaaaaacatgatttaaatgttaaactttctcaaatctattattttatcttcgtgtaagcttgctcatggttcaacttttcaaatgaaacgatatttgtttatataacatgctatttgtgtaaaatgtacattataaaatatcatcgtttttataaatatcgtgctattttaacatgtttcatgcgatttgctaaaaaacatcaaatatatctacataagcttgcttttggttcaacttgcaaggatagttttgtattttcttatgccatcatatagttatttatccatagaaaaactgacaatggttagttacttgatttttttcaattctatagttagtttctaatattaccctttttttatttactgaacgagttacctatatatgtagaatatctttttgaaacatcgtattaagttttcaaagaatttagtgattttttttttttttaataacaactccaacgatgttatagttatttgacttattgtaaatgctgaaataagaaaggaagaaaaacaggttgtgaaaatacaaagagaaaacacag

SEQ ID NO: 3788 - DNA, 569 bp, Arabidopsis thaliana landsberg
gctttcttggaatcatcgtcgttatgttttctttttaaattgtatgttattttcttttgtaccatgctactttttcgaattacacgttataactggaaatctttctctgtcaacatgctactttttcatataacatattatttattcttataacacattataaaatgtcaccctttttataaatatcatgctattttcatacttttgcttttggttcaacttgcaaggatatttttgtattttcttatgccgtcataaggttatttactcacatataaactgataatagttagttactacattcttttcaattctatggttactttctaatattacccatgtttcattagtagttatatattgctcaagttgatgaaagactcggattgtgatgtacatgtatggcgagggctgtgcagatatgggtatgacgttatattagcataccttacgtaattcccaacatgattttatatatagtttgattggcctggttggatgtgtttataattataccgtattagctagtactactctggcggtttaattagggtcatcttctcatcaat

SEQ ID NO: 3789 - DNA, 946 bp, Arabidopsis thaliana landsberg
ttacaaaaaaaaaaaaaaaaattacctcgtttttggaatggatcagaacctcaatagttgtgggctatgaatctgctttcctggccacgattttatacctatggatacacatttttggttattctcaattaacttttacactgttattaaaagaaaaggtgagtatttataaattaatatttttaccaggaatatgagcaatatttggttcggtatagtgaccattgcaaaccacgacggcgtcatagatttcatcttccaagaacccgccggagtttttcgactggaccctccagttcccgttgtcaaccggttcaacgcgaaccacctcggtctcgaaccggatcatctcctctattttaaactctctagcaaaatcttgaatatacgcaagaacttccctatgatttggataacgtctcgcgtctcttgactcgttatcgaaacgtggcaaaaacgggaagtccctgacacccatactttctctcgggacattggttcggagagactcgtagatgctcgagtggactttggatcgggtggggtcaaggctaagtggatcggaatcggatttaggtgtgtaaacccatagaccaccgacttgtttctcccgttcaaacacaactacactgtgaccttcacgacggagctccctagacgttatgagaccggctggtccggctccgatcactgccacgtgtttagaagtgatttggttttgagctggtgccatattttgtcaaatcttaataatagtaggttttgtgtataagttgcatcagcttcaggccaaatataaatactatattttaatggcaagattacagatgttacatttcatctaatggttatggaattttattactcattccaatccacgtgttcggtgaacgacgtgtaagtgattagaaattttcaatttttatgtaccttttaagctcgggca

SEQ ID NO: 3790 - DNA, 622 bp, Arabidopsis thaliana landsberg
tgattctaagtgttttatatgattttgaaaaatagcatgtaatatatatataatacgaaaatgggtaaaaaggtaattgcaagtgaagaaagagagtgtgctctgacaccatggctattttgttagttcttttacaatccatagtcatctagtgcatattctcataaaaaaatatgtccgagtgatacatataaaagcatctccaactctttcctttatttttattctaaaatgaagtaactctattctaaatttgtatttttattcagcctaaaaccatgagttgaatgattgtatgtgtaaacgatctccgccgagtttgagagggatcgaacgttggctttgtaccattcagatttgtctttgaagctgattggcatctcctgagccatatgaacgataaatgtcattcgttttgcgtagcttactggaagagaacaaaaagaaataagaacaagatgaaacatgattcagaccgtcattgctagtagctgcaaccacaaaaataccattgcaatccgagcttgtggagccattccacgagcaacgcctaaagcgtatcttaaaagcatgctccttaactacagatctagggactatgatgaagtgtgagtaccatgcc

SEQ ID NO: 3791 - DNA, 350 bp, Arabidopsis thaliana landsberg
caggcgacatgggaagtgcctgtgcatttcaattcaaaggaacgagcttttactcatttgcgtcaaagagaactattcaagcgccatctgactcttttgccgagcctagattagcaccatggccattcgactagctagctatcttgacatagcccatctaacaccgcgtcggatgtcctaatagtggcctgcaaaaccaaacaatcgatctgattttactacttcaatggaccaatctcgtatactagccagaaacgatcttagattgagagatgagttggtcactttggagattatctaacatcggtcagacacacattggggacgaaacttactatctcactggatga

SEQ ID NO: 3792 - DNA, 4858 bp, Arabidopsis thaliana landsberg
atcttaccattcgattttttttcttttctgcttactctgtttcattagtcacaacaactaattctgttataacttcatggctaattcatgtttcttagagtaatagacttggggaagttttctgtgtctcattaaaccaaaaatttatataccaaaccatatggttaacagataatcaaatgctaccttatatcttcatatagaacatgaaattctgtttgtctcatttcttcaaactttgtttcagttagcttcaaagtaactcgttaagtgattaactttaaccttttagggctttagagtaatctttcgttgctctggcggtggcaacttttgttgatctgtttctcagtcataattcaagactgcaaactgttatctgaaattatataaccttgatggtcaaacgctacagttaacaggtgcaaatgagatattgactcaagacaaatgtagagaaaaatgaaacaaaacatgttgtgtcttagtttgtaacatctttaggatcttgtctgttatcatcttggatttttctgtacgtgaaataccaagagcagacaaagaaatagccaaggttcaagacacctccaatgaccaaaacccagtacacattgtccactctcccgtggttaatgtcgtctggtaaccacgcggtggtcctctgtatcaagtttattagagctgtacttaaatagaaggagattccaaacgccaccgaggtcacagaggttgctgtgttcctcatagactcagggaactctccatagaacactgcaacattcgccatataatgaaaggcatcgccaattccaactatcacaagaggtggtaacagccataacactgacataggatgctcattttcaactgttttcagcctttttgcttccacgatggcggagattgccatgctaaggatgttgaaaacttggcctataccgacttgttgcagtggtgtcagctgtttatgagttatcttctgatagatgggataaatagtccagttattgagcacgagaaagacgcatgaagagatgagtactattacttgtagagacccggccgggactttaaatttagagtcgagtcctcggtctgttaccagagcttggagaaccgtcatgcttgcttggacaccaatggaagttccaacgaataagattgctaaccatagaggaagaactctgagaacagatttaaaatcttctacttcctcaacagaacataacctccaagggttatgacataagccatcttcttgatttaagtccttttcgctctttaatgctgcacggttcaaaaacctgtacatataaaagcttgtttagttcatgttttagaattcacaacaacacaagctttttatattcacctgaagctcttggaaggcattccaatacaagtcttggattctttttcaacttcccggtgataatcttcttctttggaagaggtcactaccttgattttcagtatagcagcgactaagacgcggataaggcttgtgaagggacttcccattggtttgtcatgcttgtagaatctcttcccggaaatgaaaactatgaaactgatcaaattagcagctgcacaaagtccaaacccgagtctccagctagcattctcctgtgtatatacaattgctgtcgcgctaataatcgcgcctgtatttaccgtgaggaagtaccagttgaagaagcttcctttgtctctaggtttatcatactggtttgcaccagcagatgccaaagccacccgtgtcccagaagttccagcagtcactagagctaacgctgcatacaagaccccgaggtggagttttgatggcgattggcataggattgagcctgtttcacacggtctaggtctcaagttttcgaaagatgagatcagagtcaagagaaagatgccctgaaaaaaacgttttaaaacttgtgagctttgtagataaagatagtagagaatcaaggagttcttggactaacttacaagcagagaaatgaaagcagaagctgagattacggaaatgtttccaaagaaagaatcagcgagaatggcagtaacaacaggcaacatgctgagacatccattgacaatgtttgaaatctgagcagcagctatactcttgatgttatattcctcgatcaagaagacaatcaagttcagtacccatccataagaagtcacggaaaggcctaacaaagtagttacacgacatagaacccaacatttgtcaacgttttggtttcgaaaacataaaaccaaaacaatcaaaaacactagctaaccgagcatgaacgggaaagtgatccagccaccgcgcttgctgcctggatcgccagagctttgagcttctttatcaccagagactaaagtagccatgacagagaacagaggaaaacacaggaaacagaggagttacgtccactgtgatttgtgttatgatgcatttagaaataaataacactaaataggtatatataagcaagtacagagtagttatgttatgcaatgatttgctaatgatcttgtttagtccaattatataatattacctaaccgaattctgatatctcatcaactattgtcgtgttccaaaatcacgtggtgaatgtaataataaacaagtagaaaaggattttgccagacctaccacttttccttagtatccactaattcaccaatagtggccagagagtacactttgcccactatacattcatatcttatgatcaaaattgatcagagagaagaagcgtattagttactgtatattttttttttttttttttttttggctttacttttgctattaggcgttctttacaggctcattaaatcttcctctatatggatgaataacaagatacagtacgtaaaaaagcttccaaaattttgatacgaactatgaaaaggaggtctaaacaccatacgtgtatataacaaaactattttatcttcttctagcgaataagtaacaactaattaacaagaacacatcttcatctgaatttacaggtggttcaatgggagctactatgcttaacggtcacaactcacaagctctctaatggtgggtcaccttcttcaccagatggtagagtggttggtttgattaacgagaaaggtagagatcaaatggagtctccactaagatttaatggactgcatgatcagtcaatgtaaacagcaaccccatgaaaccttgtttcttttatcttgttagtcaagtcaccacaactttctaggtgagaatctccatatttcttgtagtttaacaaaacaaaaaacaaattagcaaatggactttagattccgtagcctctgatcatatgatgatctctagaagttaatgatctttgctaattttaccaacgccaatcgctgtagatattacttactgtagccagaacagtagcgctttagatggtctcataaaccactctcgataagtcaactcacaaaagaacttacggtgcctcatacaaacttatctcggtgattttaaagtctatcaaacaaaatttgtaatttgtttcatgacatatgagtttagcttctgaaggatttagtttgaagaaattttgtaaaatagtacatcacttttttcaaataaaatatggagagagaaaaagttatgattctgaaagacctaacaaggtagttgcaccaaacatatataacacccaaaataatcaacatttgtctcagtgtctgtgttttgtgttcaaaaatataaacaataatcatcttggccgcgtttgatgataacttcctctctctctcttgcgacacgaaaggcgatcgtcaaaacagtttttcttctttgctttttctgggctgccggcatttgccggtggttccagtttgtttaatcagtctagtttgcttctgttttcaataattatgatgggaaactttcaattatatcagatacttcttaaatatatttacttcatcctattctttttcacctttatgatgatggttgttattttctttgtcggtgatgtagttttcttgggaaattttttccattcttcggcaaaaatctccacatcggagcccatgattcgattcgatgtgatgcagtttttttctcgcagattgtctacaattacaaattgagatgtcaggatttggtgtcttcacaactattggcacaattcatggtggttaatcaaacatttgaagccaatcaatttgtcacaatgggaagacccacaaattcaaggcgtactgtcgtaccgttacccaaattctggggacaagatctgctttggagaaaacctccatggaaaccaccatggagaaagaggcaattcagagatgtatgtataatgataataagcaactatctatggaggagaatcagcagagggtttacaccatataaacaacattgaatttcaagcacaaccaagaccaataaaatctcattctttatgagagtttcgatcaatttgaaaggtgtgcgatgtaacagatggatcgctgcctatgattttcgaatgcgttaccggtatttcatcagtaaaaagaagatgattcccaagcaagaaagtcatacaaggttgacggagatgacgacgatgataaaatatttgaataagaatgcggcgcgtaatttgcttcatcttttttcgttacacaaactattggttgtatttgcaatctcattgattgattatgtatactctgattcatattaataaagtttggttagacggtaaaaaaaaaaaaaaatcatcttggccgcaaaaaatgatctagccaccacgtttgcaaaatcaccagacctctaaactagccatgacagagaacaagacggatcaggagttactgtcacttgtgtggg

SEQ ID NO: 3793 - DNA, 383 bp, Arabidopsis thaliana landsberg
gcttcatcatctccatcgtgttttctttaacgtctcatttcagttttactcagattagtaaacgtattttctaattggttccacatagacatgagtcctccttactcagaaaaaacctatagagcaaagtggaacaatttagagaatgttgaaactctctgtttccacattttacttagactggcaagtttatgctacgtagaagccaatttttttagttttacatacatgaatctataaaagtaaatagaaacacatagacacggcttctggtggttagtgaatggaggagagagtttgaatgatggtgacagataacagcaaaagctatatccaaatttggttaagaagctcttaagcgcgttggggtatttgcgttggaa

SEQ ID NO: 3794 - DNA, 914 bp, Arabidopsis thaliana landsberg
aaaatctaatcacttgaggtttgagtttaaagtctatgctcttacaggttttataatggattgactttgctgatgacaacgccagggcagtggtatcctttttagctgcattgtcttggatattttgataaataggatttatactgctccaactgtcttatgaatggactgttaaaaccttgaagtttacatacagataattgttggcattccatttccaaacttgtaagaattcctctaaaatctttcagctttgttccaaatctatcttaggggaggacagttttctaattaattactttcttgctagacatgatattcaagtcggactgaagaaaaaatataatgatacctacaagtcatctaaaagtcttcttggagggagtgaatggtattgccaacaggcctatcgtgcgctaaatcaagctgcaggtgcaatgtcataacttgcattctgtcacttggttcttccagtcaatagtcatactgtaacaggttattctgtcatggtatattgatgtacaggacgatgtatccggcataggtttgattatggtgccatcatattcctaggtaattataagatttccctagtcaacttgattaaaacattttgttcaattcagatatgatagctctgaggttgtcttgttttggtgtccagatgagcgatacaaagatcaaagtaacagagcgtctatttcaaaatggctaaggcagtctatcaaagtgtatgataattttgaagcatctatggaaggcatgagatcttttttcaacagtgtccaggttcaaaacaatctcattcccctccttaaaactttattacatatcattagaattctctgaatatcgcatgcaggagcaagttgacagtaagatgttagggtcccaggaggattcgttagaagaac

SEQ ID NO: 3795 - DNA, 599 bp, Arabidopsis thaliana landsberg
gatgtggaaccaaagcaaacaatacctgctcacacattcattcaagttaaaagggaagctgaatgctgcaaaggagtcattgaccttgactgcgaggtccaacctgagcctgggtaagcttatcaaaccatatctctcaaagtatataagattcgatcacaacatctcccaaagtataattgtcctaaacttaaaagctgtcatgtacaggtattgtgaggagtcatcggtgaccaactgtgatgaagatccagaaacatcttttgtctctggtatgatcaatggtattgcaacagccagaccatgttctagctcgaagtatgaaagctctagcctagaaacaggtctgagatctctgaagtctcctgatcaattcttaaaacggcatgtatctaatgcaaatttcagaagatctcctcttggagctgaatcgtctgtaactcctgagagatattccattggtgatatgcgtaatatgactctagaagcagagtcacctttgaacatgagtggtaattcacatgttttgaagagaagaaagtttactacatcctccatcatcattgaccttgaagaagaaaacagtaatgctcctgaca

SEQ ID NO: 3796 - DNA, 1915 bp, Arabidopsis thaliana landsberg
  unsure (1)..(1915): unsure at all n locations
cttcatgcacgttgttgaatccggaggaaaaagataaactttacaaaacgcaagattttggtgttgaatttttatagagtgtttgcagggcaactcatggaagttggctccttatgggagatcgatggtgtgatctctatattgtgaatctctttacccatgattggatcagtctacctcctgcggatttattgtggaaagattatgcgttacgccatgcaagtcagaggacaattagcacctaccgtgttaggtataaaccgtacgttggtaggaatatacgagaccctgtgttttggattgacgagaaaaccaaagattatgtagttctttggggacttatggattggtgtgtattttattgcaagaaacgagatacatgttggaatcaaatccccaaaacttcagatgtttccacatggtttacaaggatcacaagctttacttcctaaacaaaactggtagtttcaaaatctttgatttttgtggagatattccacaacaaacctttgagtggagtgttaaagttgaaagatctcagtttggacctcctccaccaagtaatccatggaaagttcttgccacaaaacttgtagtcaccgtaacaggaaaagtcctcaaggttgaagaaatggggggagcgaggcctagaacctggtccttccgggttttcgaggttttattcatcagaattcctcaagaaaaaagagcggcttattaattctctgggagatgagtcgatgcttttggatcaaggcatcactgtgctagccaatgacactggtggattcattagaaataccatctatttcagtgctagtcatgggaataacacacatgatatctatatcttcaatctcgagacacaaaagacggagccgctgcacacacttgatagttattcttcatcagttcaattctatggagctcaatggttcgtacctagtttcatgcactaaaatgttgatatgtcttttctagtcaatatatttctgtttttcttgtttcaatcaatatgttatttgaccctagttaatgatgatcaggtgatagttttttttttggcttaaaagtgatgtatactcaaaggatgttgagatgtatggtcagataatcatttctcttgtagctagagaactataaacataggaagttaaatgtaaggtccctctctataagccaagatgaaacaaaaatccaaaaacatatttgtattaaacaagcttatttgaatattatagagatgtgaaaaactaattttatttttttcacaaagatacaaacagcaacattgggttttagatttgagttgtgttcaagcatgtttgtctactcgaggttaactatatatcagcattatattccatggaagcatggttgttcactcgaggtttcgtcatttgagtcgattgtatttgtttttatcctaaaaaatgaaaagcttactcctcgtcataaccttatgatgtatgaagtgatgagatactttttgaccttttggtgaaacgttaatccgaggagttaatattattttgggttttgggtgacttcttttgatctgattttaattggtatatttttctttggaaaaccttttctcgggttgaagaatgacaataatctgctttgttttcaaactgtaacgaattacacatgtagaaaacgtttaatgtaactgtatgtgataatacagtttaggttctatctcatacgatgtcatagttcaggtgagataataagacatgtaccttaaaagtttctatattttgtaagtagtattttgattaaaaggtaatatatatcgtagcataaaataagacaatgaagattgttaggtcaatgcgatatgacttaaaagaccaagttattatcataagatgttntactctcaaaattgaattcatcatataaatgt

SEQ ID NO: 3797 - DNA, 1208 bp, Arabidopsis thaliana landsberg
aaccccagtccccacataactatataatctttggattcctcgtcaatccaaaacacaggggaacttagcgaaaagctatagtaaccgtgtgaaaagtgaaaccaatcatatatggttcgttcaatctttaccatgccaagttgtgactccacaggaggaagattgatcctctcgcgagtgaatatattcaaaatgtatagatgatacattgaatcttgcatcaggagccaacttccataagttgccctacaaacactctttgcaaattccacaccaagatcttgcatcttgtaaagtttgtctttttcgtcgggattgaacaacttacaagtactgttatcggtgttgtcttctttggggaagagaatcagcaaagcgatctgacgttcgggcacgcattgtctcgaaacagagtaccaagtggagcatacggatttagctcgttggaaattaactaagctgaggcgtttgaaaactaagttcaagagatctagaggaagctccgaccatgtattagggttatggttcttctccatggcaatacagtattggggagaaaggagaaatctccgaaaggttttgtaaatcaaacgatagaatacaactagggttttatatgattttagttgttcgttttttcatcgttaatatgagccttttttgcctaatcttgatagcccatttatcaacaactgtaacaaaccatttttgtcatttatttacataattgacccaattctttttttttctcaaacttttgcatcatacactgaatgagtgaatggatttaggagaaccataacttttgagtgtcttactggaaagttcataaaagttactcactgaaattcgtagacatcttttattcaacaaatcacaacacagcttgtattcgtagaattattcattagaggttgaacaaaagactgaaagagtaaataacatgatacagttgggccttctgactttggcttttgtgtttttcaggtcaatgagttccaaaaaatcaggttaagttggagtaatcccaacaaagctatactcttttccctacattcattaaagaatttttattcgttagattgttaaaaagtgcatatatagttgttccaccattatgcaaatatatataatcaacacaaaatttcattatgcaagttttcattcggtaacttatatcattgtagttctgcaatgttaccaaatac

SEQ ID NO: 3798 - DNA, 1716 bp, Arabidopsis thaliana landsberg
agggtattatctaacagacaaaatgagattttctttacttttttttcaaaatttttaaaaccaattataaaaaaaatcctaagaactaacgtaagactacctacgatactatcaataatgatgcttttaaagaactttactgagaagaaaagaaaaatgtcgatgatcaccaacgttagtaccctctaccgagagtccgagacgttgcaattcttcattagacacttaaaagagatttccttttttcgatgataataacctcagtattatttaggcatataacctcactttcaacttgtaaaagcaagtttaatttctttaaatttttcaactctctaagatgtattttttgtaacacagtctttttttgatgaatatagttttacattcataccagaaaataaataaaaaatatgccaattgatatgatactttcctacttacatagcaacacaaaaatcaacatagcatgtaaaggatcactacaagccgacaacaggtaccctacttgattacatgtagtaacatcacacaatttggaattgtctctcacgatccaatgcctcacgcattagtctaagcaaggcatttatattaaacccaaaggcccttttattcatcactatttagtttgctaaaataactacgaaaatccatgagaatcttatcatatattcctacaaatacttagtaatttgtacactgggccgaagaagccgatatataacagcctaaatgacctcaatactcgttaccaaatataaactctaaactaaaagattttatcaaaaatattcagatatttcccctgtttctccaatttgccatggagaggaaacataaccctaattcctggtctgatcttcctcacgatctcttgaacttggtgttcgaacgcctcagctttgctaatttcaaccgagccaagtgcgtgtgttcgtcttggtactctgcttcgagacaatcggtgcccaaaaatcagatccattggctgattctcttccctgaagacaacaacaacaagaacaacagttcatgcacgttgttcaatcccgatgaaaaagacaaactttacaaaacgcaacatcttgatgaggaatttgcaaagagtgtttgtagggcaacctatggaagttggttcctaatggtagatcctctgtttaatctctatattttgaatatctttacccgcgagagaatcaatctacatcccgtggagttactgtggaaagattacgagttaggcgtttcaagtcgcaaccgaatgaagtcgagaggtgggaacgtacgatctcctgtgttttggattgacgagaaaaccaaagattatattgttctttggggacttagagattggtgtgtattttattccaagaaaggagatacctcgtggaatcaaatcccccaaactccagactgttaccgtttgcgttacaaggatcacaagctttacttccaggctacttctctagtttcaaaatcttcgatctttctggagagattccacaacaaacctttgactcgcttgtttttgtggaccattgtcactttcgtcgttgggtcctttattccacacttgtagtcacactcacaggaaaagtcctcaacgttgaaaaaatgatggactgctctttcaccgttttcgaggtttgttcatcaggaagacggattaattctctgggagatgagtcaattcttttggaacaagggatcact

SEQ ID NO: 3799 - DNA, 574 bp, Arabidopsis thaliana landsberg
ggaaaaacccttttgaaaggaatcctttggtgaagaaagactgaactgcagctattataatcacttcccacaattgggcaagtagctttaggaaattcacttgtatagccatcaggtccaggagccttgttacttggcatcgcaaacaggaccttctgaatttcctcccctgtgactgactgcgtgagcatcgcttgatctgattctaaacatctaaatggcatgagaaccctcagatcttccactgtcatactttcgaaatcactaggcaaggtgttaagaaactccttaaagaacctctcagcctctactttaatttcttcactcgtctttagtacttctccagtcgggccatgaagttctcgaattgagttttgcatttttcgtacctgtgcagccttttgaaaataggagttattgtggtctcctacattcatcaagtgaagctttgacttctgtttcaaatatccttcttccaagtctgccaaatactgccaatctctgtgagccctagactcttccataatcgtttgcgttgatgaatgcgctaaagtatcaatttgtttggcacata

SEQ ID NO: 3800 - DNA, 1537 bp, Arabidopsis thaliana landsberg
ttcataagaatgttctcacgagtagacaaagcttttggtgctaactaagacacagatcatcctatgctcacaaataagtaatcgtgggttctttgtgatctttgtatcagactgattcttagtatgggattcagcgatattgattatgaagatgggcattaagatgttcttcaatagatgtcagggggagagatagtagtagctcagtttataacctcatgttgagttagactccataacaaaaactcccttaagcatatattttgtacccccttcgctagttaacgtgtagttaaacctattgtgcataaaacttggtaagagctaatcaaaacttcaaacaaaaaaagaacgtcaccatcatcattagttagataaaaacacatatgaaagaggaaaacccaaatagttgacatgtctgcgtgaaacttggtaagaactaagaaccatcaagctctagagaatcaaacggatgagcaatcatatttgtgcagtttctccaacttctctgtctcgagatcgaagattaaaataccatttgtcttcctacgtccatgaatgccactgaaatagatggaatttccattgagtccatcaatttcactggagggcacagtgatgcctagatccaaaagcattgcctcgtctcccaaagaatcaactttttcatatatcatcaagttccctgatgatgaataaatgttgtagacgtcgaagggccatatgtattcagacctatgctgtttcataatgacccttaggacatctcctcttactgttactacaagttttggatcgaaaaaaaaccaataatcacttggtagacgacgacagcgaccaaacgcattctgtcgtttccaactaggagaaggactaggaggacttttcttcagaaacgtaccacatttgaagatttgttgtggaatctcaccagaaaaatctaagattttgaaaccaccagacttggttaggaagtaaagcttgtgatccttgtacaccatgtcacgacaatttgaagttttgggaatttgattccacgaggtataccctttcttggcagaaaccacacaccaatctctaagtccccaaataactatataatctttggttttctcgtcaatccaaaacacaggggatcctatactcatatatttggactcgcttccgatgtgatagtgtgaaatgcgaaatctatcatctatgattcgtttaacctttaccttgccacgttgtgactccacaggaggaaggttgatcctctcgcgggtgaatggattcaaaatgtttagattacactttgaatcttgcataaggagccaacttccataggttgctatacaaacacacttcgcaaattccacaccaagatcttgcgttttgtaacgtttgtgtttttcctcgggattgaggagcgtgaatgaattgtttttttcgcttttggggaatagaatcagccaagggatcttagttttggtcacgcattgtctccaagcagagtaccaagacgaacacacagagttggctcgttgcaaattag

SEQ ID NO: 3801 - DNA, 191 bp, Arabidopsis thaliana landsberg
gagtatcccgtgaatttatagacaatgcccttttcttcattttttgagatcccttttcagtgggggattatgggcatctccctcacccaaatcattgtctctcttttcaaaaaccttcaactgctcgctggatatcatagaatcttcactcgtgattacatcatcaacgaagcggacatgcataagccagc

SEQ ID NO: 3802 - DNA, 764 bp, Arabidopsis thaliana landsberg
  unsure (1)..(764): unsure at all n locations
tcgaccatgtacacagaggaccgactactgcatctcctgctcgatctcttccaatgtgttaagcaacgcctcgtatggatctttccacgacctagttttagtccacgaatgatcaagatctgtaaaacccaacttagagggattgacatcgacatcaagattttcttgaacaataagggatcagacgagattggtgagtatataaggatggttatcgcccaagaaaagaaatggcttctcgaacgagttccgccaggaagagaaaaggaggtgcgagatcgttttgatatcagcggtattgtttagtacgaagtagcggagaacaaggctatggaagtaacttgggaagtaagacaacggaccaagcccgtgaaaccaatatcaaaaaatattttagatatcctattacgataatgattaaaagatttagaatatttacttattcatatttatctatttccatttctaattagattaaatctaaattaggttctatatatattgtattaatactattgaaatcaagaacacaataataaagagttttccccgaccctttttttagtttctacaaaagctaacatcggtggtctagaagaagctccgaccatgtattagggtttatgttcttctccatgacggcagtaaataaatatttgataaatctctaacaaaagttttatgtataatggaccgaagctcgggattttccatttttttgctttgctaaatatgagctntttctacccagtccgtcttataaa

SEQ ID NO: 3803 - DNA, 4230 bp, Arabidopsis thaliana landsberg
attgcagaatctctagtttcttaagatacttcttctcatgcgcatatttattcttgatgtactcttcattgagtgttaaaatcatgttggggttttggtgcatagactgggattgtatcaaatttttgattcacagattatctggaactctgcaactcgatcagagcttttaaattttgtggatgaacaacgcgcctgccagtgccctgatggttcatatgatctgaaaaatgctcaatctttttcgtatgacgcactgtcaaaagaggtctttgttggcaatgtttacttgaaggtctataatgatcaacccgactcagagatcagtgaaccagaatcattctgcaatgccctaatcgactttatatcatcattagtgcatactgagttgccctctgtttccgaggaccaaaatttgatcgaagacagaaactcatctaatgatactccagagcttcaaagtagcgtcgcagaaccgtcgttgattgaagaacattccgatcatcagccatcatctgaggggatgaagaacgaagaatgttttctgattgatcacctccaattaggattgactgctcttcaggtaattatctggcgcatgtgaatgtgtagatatcaaataatagcatgcctaaccttttctttgcgttttttgtagaacttgcttacaaagtatccagatctggcttcagtgttttcgtctaaggagagattgttacctctctttgaatgtttttcggtggccattgcatcaaaaacagatattccaaaactctgcctcaatgtcctctctcggttaacagcttatgctccttgcttggagacgatggtatctgatggatctagtcttcttctcctcttacaaatgcttcattctgcaccttcttttcgcgagggtgctctccatgttctttatgctttggcaagcacaccagaacttgcttgggctgctgcaaaacatggtggagtagtatacattctggaacttttattgcctttgcaaagtaatcattctcaactctttttcttctcccattggctttctgattacataaagtggaatcaatgacacaaaatggtcttgtgcagaagaaattcccttgcagcaaagagctgcagcggcttctttgttggggaagctcgtcgcacaaccaatgcatgggcctagagttgctatcacacttgtgagattccttcctgacggtcttgtatctataattcgtgatggacctggggaggctgttgtccatgcacttgagcggaccactgagactccagaacttgtgtggacaccagcaatggcagcatctttatccgcacagattgcaaccatggcatcagatatttatcgtgaacaacagaagggttctgttattgaatgggatgtaccagagcagtcagctggtcaacaagaaatgagagacgagccacaggttattttatttatttaaccctatatatgaatcagagcagcagggaaagagttcctttaagtggaagcataattattgatgaaatttttctctctaggttggtggaatctatgtcaggcgtttcttaaaagatccaaaatttcctctgagaaatccaaaacgattcttggaaggactgctggatcagtatttgtcagcaatggccgcaacacattacgaacaacatcctgttgaccctgagctccctctccttctctctgctgcattggtttctttgttgcgtgtgcatcctgcacttgcagatcacattggacatcttgggtatgtcccaaaacttgtcgctgctgtggcatatgaggggaggcgggaaacaatgtcttctggcgaagtgaaggctgaagaaattggctctgatggagtgaatgagtctactgatccctcaagtctacctgggcaaacccctcaagaacgtgtgcgccttagttgtttacgtgtgcttcatcaacttgcagctagtaccacatgtgctgaagcaatggctgcaactagtgctggaaatgcacaggttctctactctatttctctcctcctactctaccacacgctgttaaaaatggaaactagttgttggtgttacctatgacatgtataatgactcttaagttgattaaacaccaggtggttccacttctcatgaaagcaataggatggcttggtggaagcattttagcactcgagacacttaagcgtgttgttgttgctggaaatcgggccagagatgcgcttgttgcgcagggtctaaagtgagtaatcatgttactatatgataatgtctttggtactcaagctgacgggtgctcacatcttaattatctctaactgcaaaactctgttaagactgctgaagtgttaatctgacagtacctagttacagaataaaattgtggaaaatagtcgtttagaagaagtggatttgggtgagatatatctaattgtctgatacaaatgattgtgaaaattggtagggttggtctcattgaggttcttcttgggctgcttgactggaggacggggggtaggtatgggctcagttctcacatgaaatggaatgaatcggaagcatcaatcgggcgggtacttgcagttgaggttagtgttgaatttgttagcgagatgtttgttatgtgtgttacacatgtgaatgatgaaataattaatatatgtctcaggtattgcatggttttgcaacagaaggagcacattgctcaaaagtgcgtgagatacttgacgcgtcagaagtaagttgtgatattgaaacactaggaataaagtcttgttcaacatagtagttctctgttgttaaaaaaactcatatgaatctgtcacaggtgtggagtgcatataaagaccaaaagcatgacttgttcctgccatcaaacacacaatcagcggcaggggtggctggctttattgagaactcatccaacagtctcacttacgctcttaccgctcctcctccgccttcgcatccttgaccatttcttccttgtatatccttttgtaaagtccaatcattaccgtgctttttttttttctttctatagagaaatactgtcgtttgtaaatgtttgatgagaaagtagaaaatatttgtggtttccttggaccaacaatgaaaactacggtctgatgacaggatttgtagttgttgggtcgtagacgatatccaaacaacttgtccctttatattttgggattaaacttgttgcttattaagtcaattttctccattatctaaaataatctgctcactccgtaacttcttcagctgaattacttatttgaacaactcactccgttggtaataacgtaaaatccgaatcttattccaactaattaagaaagaatacgtaatcttttttaacaatataccccacagaaagaatgacttctacaagtgtagttagaatttatgcacaagatgtactaaaatcttttctctattaacagactgactgtattatcttatccacttgaacagtttctcgtcagttgccagctcagcttgaagctcctttcttcttccttcctacataaactttcatgcaaatcccatcgatattgagatgggtaaatgactaatctgaaaatcatttacttagaagttataaccttaaaacatgttgttttccacaaacggaacacctaatcgtctacttgtaatagctcaatgccagctccatcgactattttggaaccgtttgatgctgcaaatgattttatgtactatgttcccaacttgtttttagatatgttttttagaattgctcatccatgacatgactacactttcctttctgcatagaattctggcaaacggctataattgtacatcgttggagatcttttgtacacttgctttcattaatctacaaatatgctaataaattgcaatgtctagaactcaaaccgcatgccttgaatagaagcatgaattaaccctacatcaatcattggtctaatggggcttccactagaaacaattttttcatttcattttggtttggatatatattttcaatttggtttagatcgaaaagattcggtttatcttaagcacctccaagaaacagtctacaccttttaagaaatagtaattaatttacatctttaagaatgattcatattgtctctttcttttgactagaattggtgcccaaaatcttatccatttatttcaactctatataaatgatttccattttccagcattgttctttcatcacgtatgacatac

SEQ ID NO: 3804 - DNA, 565 bp, Arabidopsis thaliana landsberg
gaattgggtgtatctcctctgagacgcttaggagaactaggggtatgccacttttccatggaaaattgaaagcgagatccagatgattgaatgttttgttgcttaagaagttatgtcttattttaacctaaacctaggatttcattgcaacataagtttgattatatgggcttcatcggccaagtcttttgtcttaggcatgtgagtttaaaattccaaataatatttctaattggtttttgcgtaaaaatagtaaaaaagaggacaaaataagtttggttaaagaatggacagagaatttgaaatccattactcattagccaaaaacaacatatttgaagaagaaagtagaaatcatcatgtatgcgttaaacttggtaagaaccatcgagctctagagagttgatgagctgacgaaccatcaagtttttgtagcaactacatattttttctctcgatattaaagattaagatctgatttgtcttctctccatgaataccactgaaatagatggaatttctacggagtccctcacttcattggcggacacagtgatgtctatat

SEQ ID NO: 3805 - DNA, 605 bp, Arabidopsis thaliana landsberg
  unsure (1)..(605): unsure at all n locations
agctggacgtccctgcaattaaagatatgtgtcattaatataatccagatcatatctttattaggattataacaaaactaagtattcattgatatggattcgacagttcattcattctaatcatatatgaagaaaggcgaatactaatacaatttcaatgccgttgacgtgtatatgtataactaatggtctgtttcattaaatgattaaatcagttgtaattcaaatgtattttactggacatttcagacctaagaagaaaataggtatatttattccaaactctttcggtgtcaaaataggtatataatgaaatgaaatttatggtggagcatttgtgtataagacgtgagaatcacattgttgaattgaacctttatttagggaacaaaatcgttcacccatgttacctttctctcttcatgtcttgcaccttattggatccaagtgaacaaaatatatactgcttaattaatggggccaatatttcggaatttcacaaaagcccatattttaacaaagcaaaccatgaaattccgagatctattcngttnnngtaaatcttttgtagagatatctcctcactcaaataattattttgtgat

SEQ ID NO: 3806 - DNA, 4376 bp, Arabidopsis thaliana landsberg
ttgcgtattccctgatcatgttgccaagagtgcagaagtgactaaaggtgtcacaataaattggggactatgaacttcatgatcttgggattctaaggtaagttgaatgcgcccaaccacctctaattgatatcatttctatcggtatgatagctttatattacacgatgcagtgactttagctttggagtaatcctaaaacttgatagtgaagctatccaggtaacttaccaatcatacaaatgcctcttatcatgtcaatgctataatgttattatttatttcaagatttgctgtaactccattttatttcagattcttaaaggggttcctgacagctcagaggtctctattgtcaaagccagcgaaataaaatacaaaatttggaagaaaatcaatgtgcaagaccgttacaaaaatgtcgtcgcggtgaaagatgttgtcagggtcattgacggtcctagcaaagtgagttcctttgcagtctggtcgtttttttgttagcaaactctttaaatatcatttgataagtcttataccgatttatatatttgtgatagggtaaacaaggtccagtggtgcaaatctacaaaggagtgttgtttatacatgaccggcataaccttgaacacactggatttatctgcactagatgctcatcttgtgttcttgctggtggcaatttcaagacaccagccctggttcctccatctccaaggagattccaacgggcagacatgggatataaccgtatgtcagatttcttcgtattattttggttctttattcttgactcgtccagtgcatgttaaagaggggcccccctacgtatgacttgtaaataggtttagtctgaaactgttatgcgtaacttagaatgcattcgtttactgcagctggagctggagggagacatcagggtggacgagggagaaggggtgacgatcatttggtaggtacttatgtcaaaattcgtctggggcctttcaagggatatagtgggcgtttagttgaagtcaaagataagctagtgcgtgtggaacttgaggccaagattgtgacaggcaaggtccactgtaatttcacttctattcacagctggttgctgaatgttgaatgaattctaactctttttgtatgaacagttgagcggaaggcgatatcagatatgactgataatgtagtcgcaaccccgcagtataatatgggaagccaaactcctatgcatccttcccggactccaatgcggcattctggaggtttgtcaccttaatttcgcagtttcaagatccaatcatttgtttgtgtttttgtttctcatttgacaacatgtttgatatgtttatgtaaaaaattcagctacacctatccatgatggaatgaggacacctatgcgtggtagagcttggaatccttacatgcctatgagtcctcctaggtaagtttgtgttgcgtttctattttcaaaagttgatttcctctttaatctcctcttggttctcttaaatgctgttgtaatttttgcatcaatgtgaggttatctgttatgtttacaaacatggctattgtctctcaaattattctcagaaattcttaacacatgtctgagaattgtaaatcttgattgaagaataaacttggatatctctcaaattatggttgttatggcatcagggataactgggaagatggaaatccgggatcttggggaacgagtcctcaatatcaggtaagatttatacatctattgttttgctttcaaccttattattggcttaatgtctctgacatatgtagtcgtgttaattacgcattaaaatcgatggtgttgcacttgtttccagccgggaagtcctccttcacgggcatatgaagcaccaacgcctggctcaggatgggctagtactcctggtggtagttactcggatgcggggacacctagagaccatggttcagcttatggtaagatgcgtgtaatctttttcaaaatgttgacttttctagtctggcccgtctttttcttacataccttgtcatgcagctaatgccccaagtccttacctgccatcaacacctgggcaacccatgacaccaagctcggcttcatacttacctggtactcccggaggacaaccaatgactcctggaactggcctcgatgtcatgtctcctgttataggtattgtctattgtcggggtaatagtcaaaaggataaatgtttagtatagtccgaccttgcatcttccttctctcagtcccccttagttagaagtttccgtttctatggttgttttcttagcttattgtaaatgcaacaggtggggatgctgaagcatggttcatgcccgatattttggttgacatacacaaggctggagaggacaccgatgtgggcgtcatccgagatgtttcggttcgtcttttacctttcaccagttttatttaaataaagagaacttctagtgataaacaaaaccaggagaaaagtcaatgatcaaagttacacatagagaagctcgtagaccttgactgcgagaaatgattctgttcatgttgagtgatagctcctttctaatgctaatattcttcctatgtactacttttgtcaggatggaacgtgtaaagtgtctctcgggtccagcggtgaaggtgacactataatggccctcccaagcgaactggagataattcctccgaggaaatccgatcgtgtcaaaatagttggcggtcagtatcgtgggtctacaggtaagctgatcggaatcgacgggtctgacggtatcgttaagatagatgataatcttgacgtcaagattctggacctggccttattagccaagtttgtgcaaccgtgatactgttctaatgaacgttaacttttatcttgtgagactcgtatattgtaatcttatattcctcaatagtttataaagaaactttgaatcttgtttatcatcggagaaaacatctgaatcttatctccagttttgtgtttttcttgtaatgcctctatcttttctatatttttttagttcagaacgttaataatcgcctttaccattttttccctacatacctaacgattaagagtaactgtctaaagtgtagtaaaattaaaatggtagtaatacatggtttggcttgatttccttaaaaacttctaagcagcttgtgttttaaaacacacccatgaaaggtttcttaactttacgtgaactcaaaggcaccaaatgtcgccagtgcgatgcttgtgaattgtgacgatcgatcgtatatccactgccctttggtgcctttaaatcaattttcgggatatgacccgattgatagaaatatatacaaagtgatacgccttctttcatactctacaagattggtatttatacatcgggtgttggaacttttttttacataatagttttccggtaactttccgacaaaaacggctgaacggaattgtcaaatcgttagtgcattggaaagctggtaaagagtactacaagatgatatactcatacgtcaaaaacggagttgtattgaatgagaaataaggatgtaaagtgggaaacttggaccaaaccgaaccgaacagggttgagcccggatgcggattgccgggttgtcacgtcgtcggctagtgggcttcggccttgtggaccatcatgcttgtgagttattgggcttgctgagttgaatcttataaaatacttctcaggatagtcacaaatattctcaagatatgagagtctcagaatattctcaggataccctcaaaatatgtcatgcttattccaagaatattcttttgagacctacctcctctactatatagagaggcattcgtctttcattatttctcaagctctcaaacaagaaaacactctaaattctaaagtctctcctctcgctctattgcttcttaaaagtaagttcttagtttagtagttttttaagagtatatcatagatcaagttcgcttgagtttattcttgtgtcctcgagtataagttcgtgatcagttgtatctagggattgttaaaccgtgattgtttgaaagcacctatggtcgatttattgaattaaggaaaaagatgtcatatcttgtctcagtgatttactttttgtctttaaatacagtcgttgtaatttgttgttcttatcgtaatcttaataaaattggcatttttctccatttggttttgcactcctacaattttattatgaccgatttattgaattaagattgtagtagcgcaaaatccgagttgagaaaaaatacaagatttattaagataacgataacatgaaccaattacaaggactgtatctaaagacataaagtaaatcacagaggcaagatgcgataactttttca

SEQ ID NO: 3807 - DNA, 3043 bp, Arabidopsis thaliana landsberg
cttcggttggtctgtttgcagtgaagagacagctacggaacttatgtacacgatagaagcaagaggaaagtgtttgtagtgtttttgagtgaaccattgcggctgatgaaacattgcttctctttggttcttttttcttttttcttttgcctaatttttcactcagtagtatatacggtcgcagattccatcgaataagaacatgtgtagatccaacactattacacgaataataaacactgagcattgcttttggtgaaataataagtgcgcatatttgaatcgtttaatggaatttatcttgtaactttcttcgagcttcgttcatcagtgttgtggcgctactcgcaggagtctactctaaagctttatatcccatcttgtcacagatccttttaaataaatgggcctcgtcggccccataacagaaaaggtttttagttttgatcagcagtctcaagtttcaagtttcaagtttcagcagctaacaaccaacatggtcagggacaagatcacacactaaaaaaaaacaagtcgcgtctcttccgcattcatacatttcatttgacaaataaatctgaaattggagactttgactctctgtgcaattttccgtttaagaacttgagactatccatcatgatagtaataacccaataagccaatatacataattgtgccaagatatatctaaaaacaattaaaccaaaaaaaatgtatccaagtaatttaaaaaaaaatgtgtgaagggaaaaaagaaagaggataagacacttgtggagagcttgtgccaaaaaaatccaacggctcagattcaaccaacctcgttataatccctttgtaacaaatgccacacgaagacacacatacacacactaccgataaagaaaaaccagagaagagagagagataacaacaatggtttcttcgcttcttatgtcatttgctccggccacggtgagggtttacgccactagcacaaagggaggttcaggaggcccaaaggaggagaagaatcccatcgactttgttcttgggtttatgacaaaacaagatcagttctatgagactaatccacttctaaagaaggtggatgagaaagaaggcaccaccaccggaggccgaggaaccgttcgcggtggtaaaagctcagctccgacgccagtgccgaagaagagcgagggtggatttggtggcttaggaagcctcttcaagaaatagaagaaaaaatgtatagtaatttgcattattcatgcctctgttttcattctctataattcttcggatttcactttatatataagctactctttcttaatcttatttgacatcacatgatctagttatttatttttctgcaacattttcaagatttactccactacttcgagaaatctgagaataatagactcatatgatatgagtaatgctgatgcaactttttgtggactacaatgagtgacgctgttgcaaccttttgtgggggtctttaagatctttacacatatcagtctggctttttatacatctgaatcaattatacacttttgccaagttctctttaagagactatatctagcaagaataccaaatcttaaaacacacatctagcaaaatctatgagttatcaccaagagtcatatcccaatatggttcttcaagtttgattcaagtgttctatgcatgctggaaccatggatgctaaagggcaatggtgataaccagatctgacctggagatacagaaggcagcgaggaaagagctgatgatctgtgttagatattgtctttatggctataattgatgatagaacagagtagctgttaactggagctagcttgtgctgagagcaaaagctcttgctttcctttgacaaagactgcgagttcttctggtgcaaccaccatgcttaaccacttctgcagttcttcaccttctactttctctttctctgcaccaaaacatgatatttcatcagcaaaatcagccagttgtcacctgaaccaaactcaagacaagggatataatctttctcgcaagcagttatatcctatagtgtcctacatgttttcaaaaactgttctgatgaaaacaaataaacttctactaaaccttcaagttgagcaccaagcccttccaatacatctggattggcgcgtacaacagacagcgcaacatcgagagcagattgtaacaaaattgtcacttctttttgaacaagatcaactagtttcccctgtgtattaacatggaaggttaacttttgcatggacattataaaacaacctaggcaagtgcattgcaatatgaagatacctgatctcttccccatggcgagcctccagaatcgtcaatcccaccaccagaaagtgtagccacagacacaggtccgattttttggttaagaccatattcagctactgctttgtatgccatatcagttgcccgccgtatatcatcaaatgcacctgttgatatacgccctgagtaaacaacttcttcagctgcacgacctccaagaagggtaactaaacgcccaagtagctcatcaatgaagagcaaatatctgtcttcactagtaggaggaatgtatgtaaatcccaatgctcctcctgttcttggcaatatgcttaatttctgacaacaccacaaagatgagcaaaacttgaatcatttgcacgtaaacaacataaacaatgagcgtaaatgtagacaatgtttttccattttacctcaacacgtggctgtccagtaagaagatttgcaacagcggtaccaaccactgcatgcccagcttcatgccttgcgaccactgccttctcattgccttttaatcttgcagatttcttctctatgccctgaaacagagctttgtaaaaaaacacgttttgaaaattgccttacgtaatcagtagaacagcaaggttatagagataccgctattgatcgctccacagcttgaatgaagtcaattttctcaacggtcgtcttgttctttcttccagctagcaaggcagcctcatttaccaagtttgcaagatct

SEQ ID NO: 3808 - DNA, 4067 bp, Arabidopsis thaliana landsberg
catcgcatccatccgtaggagaggaattagcttcaatacgccatgatcgtagcgaggatcggaccttaagcggatccttctgttattctccgagcaaattcattggttcttcatacctaaaacgagatcatcaaagccctgtctcggtgcttcacggtccaatttcatctggtaacagtcctccgatgaggatttcacgcgatcggaacttagatggtggatctgctcttcgtgtaggatctagcagattgttcaatggtttcgtcaggaaagcgataggttcatgtgttgattacgatacagactctgttcttgtcgatgagcagctaccgtttaccatggacgatggtttcgaaggagaaagaagacaaccatatgctagggatttgcttagacgtgctcaattgaaacacaaaatcttcgaagatgaatctgtgatcaaagcattttacgaagctgagaaagctcataggggacaggtgtgtggaagaagaagtaaatctcaaaaacttgtcaataattttggttttgattttgctaattgatgtgtttgaatcagatgagagcaactggtgatccatacctgcaacattgtgtggagactgcaatgttgttggctgacattggagctaattcgactgttgttgtagctggaattttacatgatactttagacgattcgtttatgagctatgattatattctcagaacttttggatcaggagttgctgatcttgtggaaggggtaagtaaagaagtagcaatgaatgtgtttcagctaaagacttgaggatttaactgaattctgtcttctaaattgcattaggtctctaagctgagccagttaagtaaacttgctcgggagaacaataccgcttgtaaaaccgtagaagcagatcgtttgcacactatgtttcttgcaatggcagacgccagagctgctcttataaagttagctgatcggttacacaacatgatgactctatatgctttgccaccagtgaagcggcaaaggtttgccaaagaaactctagagatatttgcgcctttggctaatcgtttgggaatttctagctggaaagttaagcttgaaaatctgtgttttaagcatctccatcctgatcagcaccatgagatgtccgatatgcttgaggattcattcgatgaagctatgattacttctgcgattgagaaattggagcaagcgcttaagaaagaaggcatctcttaccatgttgtctctggacggcacaagagtttgtatagtatctactgcaagatgttgaagtaagttctcatttcctctctattcgaaactgcttgttggttttctggtttcactaagataaaggagagacccgggaatactgacacttcattttatgccaggaaaaagctaaccatggatgaaattcatgatattcatggcttacgtttgattgttgacaatgagaaagattgttacaaggccttgggagtagttcacaagctatggtctgaagttcctggaaagctgaaagattacatttctcatcccaagttcaacgggtgggttcggcaaaccgattgtagcttaagatgatgcaggcttctgctttctctaattatctaactttgggctttttgaattttaggtaccaatctttgcatactgtagtgatgggtgatggaactattccgctggaagttcaaatacggacaaaggagatgcatttgcaagctgaatttgggtttgcagctcactggagatacaaggaaggtgactgcaaacactcatcgtttgtgcttcaaatggttgaatgggcaagatgggttgtgacctggcattttgaaaccatgagcaaagacggatcgtcgatctgctcttctgagcccttgtgcagtttcccgtctcacgcagaagactgtccgttttcatataagcctagtggtaaccaagaaggaccagtctatgtgattgtaatcgaaaatgagaaggttagttattatatatctccttcaaattctgctcctttgaggatgtttctttgcttggagttataatttgataaacccgaaaatgcagatgactgtgcaagagtttcccgagaattctaccgtgtcggacctgttacgcagagcaggaccagggagctcgagatggtcaatgtacagcatcccggcaaaggaagagctaaggccaagacttaaccagacacctgtaagtgatctgaaatgcaagctgaagatgggagatgtggtggagctgactccagccatacctgacaagtctctgactgaatacagagaggaaattcagcggatgtatgatcgagggcttgcgttttcacggcctcaccgtgcagctactggtaccatggttggctggggaagctaactgattctcttaattacctttgttcatgtatatatactatagttgcatatatagtataatgcttcagaagatttgttgtaccttcggtattgttgattcccacacaacagtgtatataagatatgcctatatgttctaaaaaactgactctggtcattaatatttgattctcttacattctaaatcttcaaaccacacatctggatctggtccataaaaactggctctggtcattaatttttgattgtgttacatttctacttgttgatacataaatattatagattttttggtctatctacttatttgggtacttatttgggtcgtctagagagtgggaaagagaccctttgaggagtttggcttggaaggtctgaggtttgttgttgctgctgttgttgttcttgagaggactgtccaggatctgtcatttcttcatcgtcctcggtttcttcaggttctgttgaaaccgacttcttcggtatcacgagctgataatttgggctcagcaatgtgtcctgttcaggtgggagtggaacaccgggtcctgctatcgattttggcagaggtatcttgttcctacttgcagcaagctcaagcagaacctaaatcaaacatcaaaaacagaaacttcaagattcaggaaccaaaaggcatggatgtgacagacaaaaacttgaggttctcagtgatacaatttatgaggcaagagggtcacacacagttcataagtcataagtaagagtgataattccctaatgattcacatataccaaatgaccgatcatatcgcatctcttctcagacaatgaagaagaagaaacatggaatcgtcaacaatgcatacctctcttggaggaggctgtgagaagctgaaattaactttggattgaatagcgagcttcacatcatcacagtcaatgttgggtttgctagcatgctctgagtaaacctgagcatctgtcaacacttcgaccacataccggtaccataactccagaaactgatgtatcacacgaggctcgtagtcttctacacccatcgacttaagcagagatttcacaatcttagcatctctaggtacatcttcttcaccttctcctgccatgtttatccctaaacaactaaaaaaaaagtaaagctacagagtcaaattaagaacctttcttatacagaattgatgttgcaacaacacaagtttcaatcgaatctcacaagcaaacatcgtgtaacagcaacacattacataaatcgaataaataagaattagagcttcacgaatcggagataagaaagacaaaggagattctaacctagcttcatcaataagttccaaaacacaagattatatgccataaagaggcgataaatacctaatgcgagagagaaagtttggtggagagctagtggcagaaacacgacggagagattgatgaacggcggcgaggaatcgggaaatactaatctctgccactctagatctgatatttatggttttggtttgtaaatctgctgtaacgttgagggtgtaaatgtaatttaactaaaacgctatttattactagtattttgtatttcactcgtgcataggcccattaaagacccaaattagaacgacggtcgaatgtataatattaaataccgataatagcctcatttctcttccgtttacttgtccgtgtgaccgtgt

SEQ ID NO: 3809 - DNA, 2488 bp, Arabidopsis thaliana landsberg
acaccaaagagaaagagggaaaactaactcagaagatcttgattattcgatgtaataaagttttgttttctggttgtgtagccgtaccttcatgagtctcgccatcttcatgctttaaagagagctagaggctccggtggacgtttcctcaatacaaagaagcttcaagaatcatcaaactcactgtgttcttctcaaatggcaaatggacaaaatttctctatgagccctcacggtggtggaagcggaatcgggtctagttcgatctcaccgagctccaattcaaactgtatcaacatgttccaaaacccgcagttcagattctcaggttatccgtcaacacaccatgcctcagctctcatgtcagggacttgaggcacatgagaagaccttgctccgagagaactcaggctaaactccggagactggtgatgatacatgacgggaagtcatccttggctacttatgttatcggttacaaaatttcttccttttaaaaactttgctttcatatcctctacaatctctcactctatattgagtgacttgacgaactttcaaatcattgtcaaactattttgttaacttccgattctctgagagtacaaattgcattaccctattacatacaatgagagaagattcagggtcactaagagtaatatacacgcatagatcccctaatgctctgaagacaaactggacacttagggtttaactctcgttccacggttgaagcacatcgcctgcaacatactacatgtccacagggaataaacgcaggtactctccttcttgacacgcagatcacacacaattctccatctgggatttcatctgcatcttcgggttcatcatcgaccacagaatcgttcggtctctgtggcagttctctctgatggttccattgtttccatttattccaggtcctgaagataagacagttaaacagatttcaaatcgaaacattgcccaaatctaaaaccaaatcagatctctcacaactccagtacctgacagcagcatagctaaggatgccaacagacacaatgctcaagataacgctgcccaagaatataaagttggtctgttccataaggtcctcaatcatcttgtccttggtcatctctgatctgcaaagattattcataaatatttatatatgaacagcaaatagagcctttctgcaacaatggactaaatcttgtcaaatgatcaacagattgagaaaacataaagaagaagatgaagtaataatttgagctagaacgcaggcagatatataagaacgaaaaatattcagataaaatctcacaagaaataaggaagatcttggcacgatttgatttcaggaactccattattaaaactgtagatgccaacagctgttatatctttcccaggtggtaaaatcttctctatatcaagcagaccaaccttggaagagaaaggattacaaagttagccaagaacaagtaaccatcagttcctcaaaaccagaaatttctttgaatacatatatactcacaggataatcggggtacaaaaaggcttgaagaaacgaagaattaataggctgcaagcgattatacacagtggtaagcggaagaggttgccttgagccatccatgttaacagcgacaaaactagagttcgattgctgatcctttccaacaatgacaaatgggacctgcacaaagcaaaggatacacaaaacaagtttgatcatggatacagagccaaagttgaaagctctgaagctgatagagagactttaccgttctcgtaaaatcagcaccgtgtttgcgcaatgatctctccaacataaaccggtgaccagtggactgaaacaatctcttccatccactatacacatactgtcaacaacaaaatgatgacattagaaacatacatttcccttctgagatcacaccagtaccaacttacataatcctaacttaatcaatcacaatgaacacctaatcatgaagaaatcatccaaactctttaacctaagcctttgataagaacacaaagcaaaattaggtcaatgtcaattgcaatttgagggaaacataaacacttagggtttagagcaacgtacagtttgcgttctctgaatgataagagctttatctccagtctccggagagattaacacgttgttgttcttgtaaccctcatcaccggaaattttcggtttgacgactccgcgaaccacaacgattcgctgatcattgctcttcctgttatcgttagtctctgatttgtcttcagaagccggaagcagtgatcggaggtcggaaatggagacttcgggtgcatctttgatcttcttcaacgcggcgttggtagaagcatacttgagagcagaaccgacggcgctaacagctaaagtcagtccgaggattgcgccgtcgaaggagagagcgatgtccgtcaatagattcaagagagcacgctccggcgaggacattgtggtaatttc

SEQ ID NO: 3810 - DNA, 546 bp, Arabidopsis thaliana landsberg
ccctaatccttgtttttttttttggcaagtatgctcttatttggttacgctcaaattttggtaaataattgcaaacggtctcattccataaggatatttctatttatatagaaaaagctcacaaatcaagactatattaaaaactatgaaacaatacactaattagttatttgcctgaaacaaaaaaaatacttttcttttctacgggctgaaaaaaatctttcgatttacacttatcgaccaaaggtggtagttgttgatcagtgaccacgccctcttctgctcggcccagacgctaaccggtaagcaaagctcttccccaaagtacgttgacttgtcgagttgttcttcaccttcatgatcaccgacgattgatcatggcctttaatatctctcaacgcctttgatcgtagagctctgcaatcaactctctcaaacatcaatgatgaccccaccaataagaagatcacaaaccacagaaacacattcttcttctccatctcttataactttttttaaaaaaacttcttgagttctttcgctagc

SEQ ID NO: 3811 - DNA, 555 bp, Arabidopsis thaliana landsberg
  unsure (1)..(555): unsure at all n locations
aagtttaaaaccaaaatcttataagcataatatcgcctaaaatgttttaaaatttcctgattgtatttgagcaattgaggcctcttgtttnnnnnnnnnnnnnnnnnnnnnnnnnnnnnnnnnnnnnnnnnnnnnnnnnnnnnnnnnnnnnnnnnnnnnnnnnnnnnnnnnnnnnnnnnnnnnnnnnnnnnnnnnnacaccaaaaagaagatggaggaaattccaaataaaggagagaagagaaaaagaaggaaaccttgttctctttggctgtttttacgagttctccaagtatgaatgcttttgcctttgcattttggcagatggagttgaagtctccattcactccattctccacagcccatcgttcaagagtttgttgggccgggttagcgattgctacaaggaaggactcaaagctgtttccatatacccatatctaataataatagaatattgatgaagatgtaagaaaattannnnnnnnnnnnnnnnnnnnnnnnnnnnnnnnnnnnnnnnnnnnnnnnnnnnnnnnnnnnnnnnacgctatactta

SEQ ID NO: 3812 - DNA, 2169 bp, Arabidopsis thaliana landsberg
  unsure (1)..(2169): unsure at all n locations
ctcttttgcactcgacaagataggtttataacaaaccttatcattttcgattacaatgtctttgactggtccatcctggctactgttaggcttgtaagaagctgggcagtcctcagagtgagacggaaacttgcaagggggtttgatggaatctgaagaacttatggaagatcggtctttgctcattgcttcgcaatgccaggttacgacccaccgagcccattcaaccatctgaagcacaaacgaagagtatttgcagccaccttccttgtatctccaatgagctgcaaacccaaattctgcttgcaaatgcatctcctgtgtacgtatttggacttcaagtggaactgttccattgtccatcactaccgtgtgcaaagattgatacctaaaatccaaattaccaaagtcagattcattaccttttaacaagccacaaccaaccacaacttaaactatgagatatggagatatgaacttacccgttgaatttgggatgagttatgtaatccttcagctttccaggaacttcagaccataaactatgaactactcctaaggccttgtaacaatctccttcgttgtcaacaatcaaacgtaacccatgaatgtcatgaatttcatccactgttagctttttcctggtacaatcgaatagacaacaacattagtcttctagtttcactcacatcttttgttctgtaaaagggaggaaatataacttactttaacatcttgctgtaaatactatacaagctcttgtgccggccacaaagaacatgataagaaatgcctgctttcttaagagcttgatccaatttctctattgcagaagtaatcatggcttcatcgaatgaatcctcgagcatggttgacatctcattatgctggtttgggtaaagatgtttgaaacaaagattttcaagctgaactttccaggtagagattcccaaacgattagccaaaggtgcaaatatttccaacgtctctttagcaaacctctgctgcttcactggggacaaagcgtaaagcgtcttcatgttgtgtaatcgatcagccagttttataagaacagctcttgcatctgccattgcaagaaacattgtgtgcaaacgatctgcttcaacagttttacacgccgtattgttctctctagcgagtttgctcaattggctaagcttcgaaacctatacaaaacaaacatacacatggaagacaaaggtcaatgaatgctgaaaaactctgcctttacaagtgaccaagcaaccaaacaaatagctccgacataagttaatcaatgagagtacatatttcttaccccttcaaccaaatcagcaactcctgctccgaagtttctgagaatataatcatagctcatgaaagaatcgtcaatggtatcatgaagaaggccagcaacaacaacagttgagttagctccgatattagccaacaacatagcagtctcaacacaatgctgaaggtaaggatcacgactagctctcatctgatataacacacatgaaacgaaaagttgagtcacactaaaaccaaacaagaatctaaaactagtgattgagaattgtatcttttcctacttacttgtcctctatgagctttctctgcttcataaaaagctttgatcacagattcatcattgaaaatcttgtgtctcaattgtgcacgtcttagcaaatccctagcatatggctttatcgtatcaacctccataggaaacgttagctcatcaacgagaacagaatccgatcccaactcgtaatcaacacatgatccaagagctttcctaacgaaaccattgaacaatccactagctcctaaacgaaacgaaccatctagattccgatcacgagacattctcatcggagggctacaactacacgagaccggaccatgaagcacagagatagggctttggtgatctcgtctaaatgaattcacaaatttcgccggagaataaccaaaggagctgctaaagctcagatctttcaaatcatcactccgatcatagcgtagtgaagagaactcatctactgcggttgagtatgagcaagaggaagaagatgaagatttgactgatgcgctggagaaaagtgaagagagacctncaacgattggtttctgccgcgaggaaaccatggaagaggatgttga

SEQ ID NO: 3813 - DNA, 3208 bp, Arabidopsis thaliana landsberg
  unsure (1)..(3208): unsure at all n locations
aatgtctctttgtcctgcaaatcccaaacgtataaaaacaaaatagtaaatgctgcagttgtgttttattaatataacgagggcgagtttctgagatgtgcagtggatgtttttgtcatcttgtatccttttctattcctattcctatgttcttctctcgctcctttaaatgttttgcaggtcgtcgttttcatgtatataatattaacttctgctttttctcttttattttctttttaaaataacgttattatccgtttataaaaatttctttactctttatatactcctatttcaactcactagtcacaaagactacaccaaattgttcgttatgaattgaggcagttgacaaagcggtctaatttgtctgcggtttagtccttctcatttttggggcggataataaacctctgcgaaccaagtttatttgtatgtaaaaacggtccgcaaatggtccgctgcggntttcttctttttttttttgtcccgaccactgcgaactataattgatgaatggtaatggtctgatccattgacggttgtgtccgccccaactgccgtaactattcacaccctatttaccaaaaatatctgaaagttgttgtataattagattggtccttttaactgtggtattcttcataaacgagacaatacacatcttactgttaaaaaaattatgaatttgtggaaactttttaaccaaaaattggaagaaaaaaaaaatgggctcataatttttttttcttttgttttctatagcttagattttccaacttatatatttctaagctataaagtactatgtaacacatgattttaactaattccaaatgaataaataaatgatttaacgtgatgtgacaaacataattttcaatctacttttttttttttttttcattatgcttataacctgcaaactagtggaaagatataatgatgccattactcttaaatatatattgctttttggcaggtcctttttaagtcattttttgcaattccaatacatttcattgtcaggtttgctaattttcattaattttggactactttacaattacggaattaccacgcctcttaaccacaaacaacaaacgcaaaatggacttttcgtatttcagaaaaaaataaaattaaagctgtattaaaaaacaattacctgtcaaaataattttatggcgtcatcgtgtcgataacgcttcccgccattccgtctctctctcaccgcactttctgtctccccaacaaatacaaaaccctaattcacagaaacaatcagggttcaccagattctaaaaccctagctttttcatactgtgaaattacggaggtctctaaggatggcatcgctaagctggaagcaccataccctaattcaggctttgatttcacgaggtcctctcaaggagaaagaatttcactcaatcttcaccgccgtcaccggcagaaacccaggtctcgctctcctcttatttaatacgattcggatgaatatcaaacttacttttgtgtgttaattccggattgaatttctattgaagcacaatctgtaatttacgaattcctatgattgtttagctggtctggtttagttattgcatatgctgctgattgaaaggtttattgtagacttgtatcctgatgctaagggtgaattgaattactgggtaccttgatgttgaatgttgttaaaggaaccacattatattgatgaaattgttcgtttgtttttttggttgcagtaactgttaaaaaaatatttgacaagtaccttcttgagataaacaaggaactctcatatgttcactttgagttgaaggcttgtagagatcagtatgatggccaagtttgttatggagtcgttaacaatgtggctgatgatcaatccaaactcgggactaaatattctgttccccagattgcattttttaaaggcattgtaagtcactctcttggactctttttctctctggcttttcttctgttgttgatcaaatatctcaagttctattcatttgtacgagttatcattatctggatttcactcttctttgccacaagtttatataacatataaatttctcctttgtcattcccttttcttgctatgtgtgcactcagtggatggatatctgtgctacttttctgtgacattgatgactttaacttctggcagatagaagcaattgcacaggatgaagctgctcaaggttgcatatcgagctttgatgctcttaatattcgattggagaatcaggtcagtcatagtctctgacttatgtctatctaatatttacctcttcatttattgactaaatgaatccatccatatccattgttcaattaactgatcatggtgacttcaatactggttctaccttacagagtcgcttgaaagtatagtattctgttctgtatgagatatgatctcaaacgataatcaactttgtcacttgtgcgcttgtggataaaattgcatgcactctgagttgtgttttttgtatgaagtgttttatccccgtttatgattgttgaatcaatatgaataaacgaatctcaaatgtctcagatattctcatctatcagtgtggtgaagactattaatgaattttaaagctattattgctatggactgtataaatgtattctctttgtttcggttgacagatcttgtgttaatatctcagatatcaagtgaagccagcagcagtcaacagcaagtccctcctgctttcaagaacttttcaatgacacagaaggaaaaaactctcgatgaacttgtaagggacaagtggctgtgccgcacaagagagagaaacattggacttggtataagatctcttcttgaccttcgcagttggttcagaaacaatgatgttccttcctgtgaggtctgcaatgaagctggagtaaaggtctgcattctgaaaaaacctgattggattagaactcacattgtgatgataaacttattcgctactgattcaatatctgatgctttgttttctgacactcgtatccaacttttcaggcggatttgtgtccaaccgaaggttgccctgtccggatacacaagtactgcctcaaaaaattgttatctcaaagggtacacactacacacatattctttagattttcctcaataatggtatatgagtttgacttcaatagtattttacattctgatgacattgaaagc

SEQ ID NO: 3814 - DNA, 2301 bp, Arabidopsis thaliana landsberg
agggactttgttttacctgtttcaagaagagagccgcggtgatggatcctcctgcacgcccgcctgtgttgaccatatcagccactccagacttcatcatctcccaatagctctcttccagtggcatcctccacagcttctctccactcctttctgatgcagcaatcacttcctttgcaagctcgtcgctaggtgtatagattcctatcaagtaatgaacacagaatgatcatcatgagccaattttggactcaaaaacgacacaaagattgagtttttctgcagggtttttgagctgtgtacctgccattgaagttccaagagcaataacacaggccccggtcaaagtagcgaggtcaacaatctgcaagatatttgacaatgtttaactgaaaggataaatttaacagaaacaagctcctttagcttctcatatcaataaagtaatgcaataccttgtcgacgccttggttacaagcatacactagagcatctgcgagtgttagacgaccttcagcatctgtgttgttgacctacacacaccatcgccaacaattagcatttcataggaaaaacagtaaaagctcaactctgagggggaaaaatcatcagatacctcaatggtctttccgtttgaggcagtgatgacatctccaggtctcattccggttccactaatcatattttcacaggctgcaacgatgaaatgaacctggttgtggaagacgaatctgttcagttcggttaacaaactatagctttcaaaagaatctgatgggagaaactaacctcaacaccaggaggcttaatctcaccaatagctttcgcagcgccaagaacagcagctgaaccgcccatgtcgaatttcatgagctcaattgagcagccaggtccagtcttaatgttgtagccaccactgtgtacacaagatattcaaatcaacaaccactaaaataacaaagaaaagataccagctcgtaacagagtaaaattcaaagcaatacagaatgattagttacctgtcaaaggtcaatccttttccaacaagagcaagtttggtcttaacagagccattcggaggtttatagacaaggtggatgaagtgaggaggattagccgacgcagcagcaacagctaggtaagaacccatcttcaactctttgcattgctcttcgttcaagatgtttgcagtgaagacatcactgtacgtagaagccacctttgctgcttcctcagctagtacagctgaaacgatacaaaaatcaaagcagtttaggaaaactcagcgaacaccacacaaacacgaaaatatttgatttcataaatgacaacaattcataccaggagtaagcacattggcaggagaattaatgagctctctcccgaaaattacaccgtaagaaacatcttcagcatacttcagcttcttttctacctcagccccagttccaaatccaataatatcaacagctttcaaagatggtttctttgattcagacttatacctaccatcttcaaataaaccaagtactatgcctatccaaaaataaacaatgagcccccaaatcagttccaatttccaaaacagtactaaacaagactcgaacttgtgttatactaattgaagttacctgaagctaaagctgatacagaactaagcttagattcatcagaaacacttgaagcaagcacaatagcagcactagtagattgagaagcttttgaaactgtagctacagcttcaccaaggctatgaaaagccaccggagacgaaacagactgtccaagaccgatcaaagcgattctctttgatcctaaacccggaagcctgagaacagtcgattgaccaggtttcccagtgaaatcttcctcggaagagacttgagctaaaagtccacttaagtgagcatcgaccttgctcaagatcggattctcaaactttgagttaccgtctttggctaagtccttctctgtcacaccaactacgagtatgtctcctttccattcaattacatcgatctccttcgcagtgaacgagatctgcataatcgtcaccaaaagatcaaaacttcaaactcgaatcaatcaaaaaatcaaaactttgaactaaatcaaaactggattccatacaaaatcatttcaaaatcacagtgaaggaaacaaaccttgtgaggctcagtggagttgggttgagtgagaccgagagtgtgagccatggttattgctattgaagagaggtgttgtgtgattgaactctgaaaaggaagacgaaagagtaaacaatgaaaagttaggattggt

SEQ ID NO: 3815 - DNA, 458 bp, Arabidopsis thaliana landsberg
aaccctcgagaccggttgtttcattaccagttttggaactgatcgttatgaggtagtgctgcttatttttacaggcacagtgcttggtttgtttgaagacagccggtatgagtctgagtcgaagaaaccatcactcaaatctgtagatatcattggctttggctctggacctgaactagagaagaagctcaagtctgctgaacatgtttcttatggcgttattttggggaaagaactcgttaattctccagccaatgttctcactcctggtgaggattgcttcttgagcatcagccttagacttttcatttttttttttttttaataatgtgagcatcatgtctgttgaagtttatttcaaacatttttctctaatctgctttgtatcttaacagccgtactagctgagggagccttgaatctggcttccatgttcagggatgtcatgactggccaca

SEQ ID NO: 3816 - DNA, 5163 bp, Arabidopsis thaliana landsberg
  unsure (1)..(5163): unsure at all n locations
tgtgtcttagagttagagagagaccacgccagaaatacctttcttgtttcaccggtttttatacacttaaatggcgggcagtgcctcattcgccgccgcattattcatcggactctctcttctcttcgccgtcacggctgaagatccgtacagattctttgaatggaacataacttacggcgatatctacccactcggtgttcgccaacaggtatcgatatcagtttagtttattcccggttttcgtttatagatccggttattaaaaactatggatctctttgcattttccggtttagggtattttgatcaacggggcgtttccgggaccggacattcattcggttactaatgacaatctcatcatcaacgtctacaatagcctcgacgaacctttccttctttcatggtaactattttttcaatcttcattctaaatctaaatctgatttcataatacagtttaattcgatatttgatattgaattctgtcgttgtcgatagatagtagtggctaggtgtagtaggtatttttctttttctcgtgaatagtattttcatgtccttttttaaaaatagtgatgtaaaaacaaaaacgtgtttaaaaaaaaaactgtggtacgtaaagatttggttttggccacaccttatgtcggattcggtcgacgtaataattaattaactctcaacacgacattgattagttgggtgattacggttaaattcaattacatcatgttattatatagttttctgacttttgcttcttctttttttatatgcatgggaatttatgaaaagtgacagcatattttaaaacatttacatgtgggaaaatggtccaccctaccaaattattagctgtatccacggttgcccccttttccaggggcatgatttacaatttcataatagttttgggataattcataatagttttggggttaactataaatatttttgaaaataacgcaggaatggaattcaacagaggaggaactctttcgttgatggagtgtatggaacgacatgcccaatcccgccggggaagaactacacttacattcttcagatgaaggatcagatcggaagtttttactacttcccttctctcggctttcacaaagccgccggtggatttggtggcattcgtatcctcagtcgtcctagaatcccggtccctttccctgatcccgccggagataccactgtccttatcggagactggtacaaagcaaaccacacggtaattattagaaccatgtgatctggctctctcaactcattattaagtatttataaagaagatgcataagcttaaaaacagagtggcttaaaacagagtaactaaactccttaaccaacttcaactaattttcgattttgtctgtaatttcgtttgtgtaggatttgagagcacagcttgataatggtaagaagcttcctttaccagacggcatcctcatcaatggtcgttcaagtggtgcaactcttaatgttgaacaaggttcttttaacccttcctcttcttgagttctgattgattaaggcattgctcagagtttacactgatgatgtgagttcttctttgacttattcctcaggtaagacatacaggtttagaatatccaatgtagggttacaagactctctcaacttccgcattcaagaccataagatgaaagtggtggaagtcgaaggaacacacactcttcagactactttctcttcactagatgttcatgttggacaatcttactcagtccttgtaaccgcggaccagactccacgggattattacgtggtcgtctcttctcggtttacctcaaatgtccttactaccacgggtattttccgatacagtaattctgctggtggtgtttctggacctattcctggtggacctaccattcaaatcgactggtccttgaaccaggctcgagccatcaggtatactaactgtgcacattaaaaaaaaaacttcttttaggatttggttggttgtgctttaaaagttttgatttgttatgtttgtgtgttgtaggactaacctttcagcgagcggaccaaggccaaatccacaaggatcgtaccactacggtatgataaacactacaagaacgatcagacttgctagctctgctggtcaggttgatgggaagcaacgatacgctgtgaacagtgtctcattcaaacccgcagacactcctctgaaaatcgcggactacttcaagattgacggtgtttacagaagtggaagcatacagtaccaacccactggtggaggaatatacctcgacacatctgttatgcaagttgattacagaacctttgtggagattattttcgaaaattctgaggatattgtccagagctggcatcttgatggttactctttctgggttgtggggtaagtttcattctttgattcacaaaaagagagatcttgatcttgatagctataatagttggactaaagatggttcttgtgatacagaatggatggtggacagtggagtccagatagtaggaacgagtataacctacgcgatgcagtcgctcgctgcaccgttcaggtaaaccacggcttctgtatactaaaagccataatctaatcatgttttgttttgtcagatgtgaaccgtttgattaacattcatatacaggtatacccaagctcatggacggctatattgatagcactcgacaacgtaggaatgtggaatctaagatccgagttctgggcgaggcaatacttaggacaacaattgtatttacgtgtgtacacaccctcaacttctctcagagatgaatatccaatccccaagaacgctcttctctgcgggagannnnnnnnnnnnnnnnnnnnnnnnnnntgagctggtggttagatatagaaatgacggagagatggtcagccaaaccagctgacgcgttcttgaggcgggtttcttgttttatacacattcttcattttgctaatgaatgagaagagtttatgttaaaatcagtatatcagtttgtaacgatctcagctcgaggtctcattcttgattcttatattctttctttttctatggaacgaaacatttattcaatataattccacagtttcatcgtaaagcttattatcaataatgttacagtttcaaatggtatgaatattcaggtaacaattcaaaaacagaactttaaaaatgcataataccacaccaaatgtgtaagtcacttaacaaaaattataatctgtttgattacgtgttatttaataagacaaataaagaatcttatcttatgtattagcaggcattgggatttgaattttcagtgaatctacaaagcgatgtcgtttaatgcatatagagcaatgagttatgacttatctaacgttgaacactgaaaggagaaaaaccaggtgggacacggaagctgagctctaatcctgatcggagatggcgactagcgattctgaattcaattctgatcttcttctcgctcacaagcttcccgaggtttgttttcgttttcacattcttattgatttctgatcggatctttccgtgatcgagacaaaacttatctgtaatcgcactctcgttttttgttctggttttattcacagacgcgttacacctacaatgaaaggtttgcatcttctctcttcgtgtttctctccctactcttgtgtctctgtgtaaatgaagaagaaaatgatagaaaatcgaaggagattaggaaatttgaaaaaatttaaggaaagaactcgatgaagaaattgattttgacttgtgtaaaatagagatgtagcaatctatgctttgggaatcggcgcttgtggccaagatgctgttgattccgatgagctcaagtttgtgtatcacagaaatgggcaggatttgatccaggtatctcaattgattgatctggatttacctgtgatgtgttttgttattaaaaattgagtaatcgatgttatttgccttcaattataggtcttaccaacttttgcttcactattcacacttggatctttgacagaaggactggatttgccaggttttaagtaagcaaaaatgttctctcttatattttattgatgttttgaatgagatagctccaaatagatgatgatgttgttgttgtatcttgtctgcagatatgatcctagtctcttgttgcatgggcagcagtatattgaaatatacaggccattaccttccaaggcttccgtaagtagcttttattacgtgtgtataggaactgttttgatactaggaagtgtactctcatactgattggtttttgatgaacgtggaaattatatcttcaagaactttgttattggcttcttcttctaatatccaaactggtctttgctttatttttctgaattgatgttgtttgtgttgccacagttaattaacaaagtaagcctcgctggtttgcaagataaaggtacttgatactccaatcttaagcagaaaactaactactacagagaactagaaagttgactttaaattgatcttttttgttctctctgatgggaatcttttaggtaaagcagctacccttgaattagaaaccagaagttacgaggaagggtcaggggaactgttatgcatgaataggtaaaaaacgtctctataagtaaatagtgaactgttgtgcattaaagcttggaaactcggtaactaaattgggactttctctgcaggacgactgttttcctaagaggtgctggtggtttctcaaattcatctcaaccattctcttacaaaaactatccaagtaaccagggcttagctgtgaaaatcccacaaagacaacctttgacagtgtgcgaagagcgcactcagccatcgcaggcaagttaattcttgaaacaacttatttggatttggtatacttctgatattcatttaagttgtttctgttccctttgacgcctacttgtttactttatctaaccctctggtttatttctcctggcaggcattactttataggctgtctggtgactacaatcctctgcattcagatccagaatttgcaaaacaaaccgggttagtgaaccacttatatagcttcttattcagacattggcatgctagaacatactttgctagtttgcttttttcttgttacattaccaccgtttta

SEQ ID NO: 3817 - DNA, 4095 bp, Arabidopsis thaliana landsberg
agttagcatcctacctgactgcaagaccgaggttttcaacacagcaaaggtaacaataactggtttggacaatgacataacagaaacacaacttagcaaaaggctgatttgacattttgcaacaggtaacttcgaagtcctccaaggttgaaatgctacctgaagatttgaaatcttcatcaggtcttaaatgggaagtgttctcggagaaaccgggtatttggggcgcagcagattttgtgaaaaatgaacttgttgaccacatcaacaccacaaaggacacaactgactatctttggtacacaacaaggtcagtacctgaatactgttattgttagattaattgaattcgtcaagaaagaatctgaagcaaatgtactcaatctgctgcagcataacagtcagtgataatgaagcgttcttgaagaaaggaagctccccggttctgtttattgaatcaaaagggcatactcttcatgttttcatcaacaaagagtacttaggtaccttcaacactctctacaattcttttgttatttcttgcactcaattttctaattgattgcgcgtaaatgtgacaactggtttctaggaactgcgacagggaatgggactcatgtgcctttcaaactcaagaaaccagttgctctcaaagcgggcgaaaacaatattgatttgcttagcatgactgttggtctagcggtaattctataaacaaaaatccaaatatcattgcagttttgctacatcatccgcactcatacattcggttacttttttttctgccacagaatgcaggatccttttacgaatgggttggagctggacttacaagcgtctcaatcaaaggtttcaacaagggcacgttgaatttgacaaacagcaaatggtcctacaaggtaatatagttctcgtgcctagaaacctctcatgtgctcctgagtgattctgtttctaacaacattcccatgaaatcttgcagctaggcgtggaaggagagcatctagaactgttcaagccaggtaactccggggctgtgaaatggacggtgactacgaaacctcccaagaaacagcctttgacttggtataaggtaacgtagtagtaactcttggacaagaagcaagattgtagatgataaagttgtgtctctaaaaaaatctgatcttttggtaggttgtgatagagccaccttctgggagtgagccagttgggcttgatatgatcagtatggggaaaggaatggcatggttaaacggggaagagataggaagatattggccaaggattgctagaaagaacagcccgaacgacgagtgcgtaaaagaatgcgattacagaggcaaattcatgccggataaatgcctaactggatgtggagagccatctcagagatggtaaaactagtagaaagccattaatcagagttcctttgttcaaatttggttattgtctttttgttttttggatgattaggtatcatgttccaagatcatggtttaagtcttccgggaatgagctggtgatcttcgaggagaaaggcggcaatcccatgaagataaagttgtccaaaaggaaagtatcggtggtgtaagcaagtagaacaagttaaagatgatgatgcaaaacgtgagattgcaatcaagaaagacgagattttgtttgtgttgtatttgtttgttacaacaagtcggaactcgaaaaacgatgaaacaaaatccccaattttattaacttaacacagtttttcatcatcacaagctgtaactgggccaccgaccactgatatttgttacagtttatgggcttttgattcaactgtttttatataagacaaaggaatgcgagagatttatggcttggctaattatggaagaggaggaggttgacggcataccggtaaatgaattcgggaggcttgaaattgtaagaacatcaacggcaaagcaaaaaaagaaaaagtgaagggcttgtttgcgtaagagaaaatcccagcaagcctatgtatgtaaaatccgatttttattttgatctcttattagttttttataattgaatttgattttgattttccaggattttgattatgggtttgactttactggcatagttacgcctcctgtgagcactgattatgatgtcaccctttatgctaagcttggactttactgctacaattttcaaaaggtaaccctgaactgaataatatatattgtctctttattcatcatgtattataatcaatctcctaaccttgattcctctcttcatacattattgcttgcttgtcaggggacaaacttaaagtttgtgcgctgggaaaagtataatacgtctacgggcactgcttacattgataactacatcactttggaggcaatggatccgtcctgcaactctgtcttctcttttcagactgtgttcagtgctgctggatgttataaccaagatacttatcatgtacaagactggagggtcttggcctgcagacccacatgtacgtatgcttttcttctttaccactgtcttttctttcgagatcaatcaccagagaggactaactgtttatagagatcaggtggcaagtctgtgaatgaatattttgaccggcatgaggcaatggatcccttctacacaggtaaaatgcccaaatggttgtctgatgacgccttggcctttgacaacaaaaagtattacgtggtaagatgtccagaactggagtttaatcttcttttttagtttgagaagcagttagaggtgaatgcatttttgtcacaggtgcaagaatcagacttgcatgagaatgactggctgcttgtattcatggaaatggtattcttacaagaaaatcctgtaagtccttgaatttcttcttcttcttcttcttcttcttcttcttcttcatgtttcttttctcttacgcttgcttgccaatgtgactttaggaattgcacccttggagatcaacaaggtagttgtagaaactaaagaagattacatgactgaggcgcgtgagaagctccacgcagtgaatgctatattctacattagttacaagtgcacaggtttccctgctgatcacaaacctatcacatggagaagtgatttcgttggtgattacagagctgcataaggaataccatggatgggataccaggacacatgagtcttgaaattgctgctaaacaccagatgacaaagtgagggtaatgaagtcgagaataagaagaagaagaataatagacatacgcctcctgtatgcatctcgtctgttgcaatgctatttacttgaaacttttattatgttatatgactatgcacgatgttttgcttggcttgtctttatgtctacaactctaggcagtaaaacgagttgggatctatatgaattttcacctccgttaagtgctggctatctgtttgcaatgcatagtagtaataatttgtataataaccaaataacacaagatgtaccaaaccatgaaggttattgatatgatcagaatgtggaaaggcatggttaaatgacactttcctctccgcaagcttaaggttcttcttcagatgatgattttacttcctttattgcaccaagaatcaacctttggcgatcacagagcagacataccatagctccagagccaagagaaagcagacaaatcacatcatcgacaagatttcatccgaacttgatctccgttcattatcttctcaatcatctcctccggtaatctcaaacctaatatgggccgccgaccgctgatatttgttacgctttgtgggcttttttttttttttttttttttttttaatagtaaacaaagtaatgcgagagagatgagagatcgagagttgtgagaaatttagggcttggctatggaggaggttgaggtgctagcggcaagtgaattcgggaggcttgaaattccaagagtaacaacggcaaggaaaagagtgaaaaagttaagggcttggtttaagagaaattccgaactggcctatgtatgtgaaatccgatttcgattttgatctcttattaggtttcaagctcctaaactcagcgatggttttgattttgattttccagggttttga

SEQ ID NO: 3818 - DNA, 1097 bp, Arabidopsis thaliana landsberg
tctgaaattatcattttgggaaagttaacctattatattgtaatattcgtaatatttagatttgtttctttgattccaataaaaaaaaatagttcaaaaatattatagtttcatattcgaaaaagaaaattgttttatatgcatataattagccaaatcttaacatattatttcggtttgcatgccgatttggaaaacaatccatcaatatttttctcccacagcacacacatatatgaacgtttcatgtcctcgttgtcaatcataaaatgaaggtcaaaagcatgaacactagggcgatgataaccactctattgtttctaatcagcctcgccttcgctgaagatccatacagattcttcgaatggcacgtaacctatggcaacatatctcctcttggtgttgcgcaacaggtacgctttatatatctttaagtctttaacctgaacttcgccaaatgtttggttttgttaattcaatttaagtttgcttacccttcttctttcaagtagggtatattgattaacgggaagtttccaggaccagacatcatctctattaccaatgacaatctcatcattaacgtattcaaccatctcgacgaacctttccttttgtcttggtatgtctccttttccttcgggaatttcttttggacgtgagattatatgacaaattgataatcaatcacataaaacttgttggagaaaaagtttaaggctctcataaaaaaaggtacacaattacaatttcgatataccgttcaatttgtttgtatgcaaagttaaaaagctgtttcattttcttcttaaactcgtctccctcttacttcgattgcctttggaacaacttcgttgttgggacttttacgacatttttcccgtaatttattcgtggtcgacttgtggaaaactcctgccaaacagtgttaattattatctaaacccaaagattagaaccgaatacggatcaaaccgataaggataagaaaaaaaaagatattataaaacctaatttaaacccgtttcattatagatttggattaaaatgtcaatacctataatttaaaaactctaaagacaaactaaatccaatct

SEQ ID NO: 3819 - DNA, 1028 bp, Arabidopsis thaliana landsberg
aaaatcccaaacaaaaattcagcggtttccactcgccgcaatagaatagaggaagaatctttactggagaatgtatggggggagtcgatttgtgacagtttctttcttcttcttttttttgaatttgcctcaacctcgatcatgtttttatgattcagaaaaaaaataaaagaaagacgatgtgtaaaaaaaaaatcagagatagatgatgtgtaaaaaaggggaaaacccactagtttacataagaaactaaccttcagatctccacagaaatagacaaaacgcaaacaaagattttgatgaagctgattaattcgttagggctaggccgatatctgtagagaagatacaacaacatcattatgtccttagagatatctcacaacaaaccaaagtaaataaatataagagaataatttttgcttacttgaaacctggtaaatccagtccttctgtcaaagatccaagtgtgaatagtgaagcaaaagttggtaacaccaataatttaaagcaattaacatcgattactccaataataaacattgaaagaccaaaagtaacagttcaatcattgaggtacctggatcagttcatgtacacttctgttacacagaaacttgagctcattggaatcaacagcatcttggccagaagctcccgaaacccaaacgatagattgctacatctctataacaaaaataaaatcaatttcttcaattttccaatttccaaatctccttcgacaatcatttacagaaacacacaagagtacggagagaatttgcaaaccttttattgtaggtgtatagcgtctgtgaggaaaatcagaacaccaaaaaacgagatgacaaagagtgcgattagagacaattttgtctcaatgatgaaaagatccgatcagaaaagaataagaatgtaggaaacaaaaaccaaaacacggcccatatctaaatcaaaacacgatccatatttaataatatttacgttcaggtgatttttcggcccatttttctataaagaaagtttag

SEQ ID NO: 3820 - DNA, 856 bp, Arabidopsis thaliana landsberg
gggtgtctgctgggtaaaatgatgcactgttcacggcgtatcgttgcttgcgttcaatatgtccaagattgttagcaagtctgatcgttcgggtgatgtttatcacaccatagcggtatgaaccttgtgggtttggccttggtccgcttgctgtaaggttggtcctacaagatcatatccatgaaacaaacatgtttgcaccatgaagtgagcaaaccaacaacaagtgaaactacaaagattttgcttttgatgtaagcctagagcgcaaaaattcaaaaatatcatctatactagtaaatgaactgcttcgaaccccataacttttaagatcttgaaatagttttctccaaccactagcactgatgaaatgcaaatatatatataaaagtggtaattgtcactaaattgaagaataaaacaatacctgatagctcgagcttggttaaaagaccagcttaacttaattggtccatctggaataggtccagaaacaggtgcaacagaattactgtaatgaagaactccagtagtagtgagtatctttgatgtaaacctactagagacgacaacgtaataatcttttgcaggctgatcggctgttataaggaccgagtaagattgaccaacgtgaacatcaagcgaagagaaaagattctgaatagtgtatctcccttcgacctcaaccaatttcatcgtatggttttggattcggaagttgagggagttttgtaatccaacattttgatattcctagtctattaagtcttacctacagaaaaaataacggaaaaaactattaattaattcttcaccaagaccaacgtgggatgcaaaggggagggtatacctggtt

SEQ ID NO: 3821 - DNA, 2804 bp, Arabidopsis thaliana landsberg
cggccacgatggcacaggtttgaatattaatctgctctttgtcgctagctcggtcctgaagttcatatgctagcttgtcgcttgatttggattatcctctttatctagggttgttgttcagggtcctggaccaggaccacgttatggacatgtcatggcactggtaggacagaggtatctcatggcaattggtggaaatgatggtaagcagtttcactcgccacctcattaaatatgtatttatattctccttaaatagcttctttttttctcaatatccttatattaccagggaaacgtccattagctgatgtatgggctttggacactgctgccaaaccttatgaatggcgtaagctggaaccggaaggggaaggtccaccaccatgcatgtaatttgtgattccttcgcttcatttcttgtatgtgattctgtggctttcagttaagtgatttggatctcttgggtttgtatattataactaggtatgcaactgcaagtgcgcgatctgatggccttcttcttctctgtggtggaagagatgcgaatagtgtggtaagccaaagagtttttactgccatgttatgacgtggaggaaatccaaatgctgtattactctttgttaccattaaattaacactgcactgaacaaacttgtttcatgaagagaggggaatagcttttctttgcaaattacttcaaatacgagttcaaataggaaaatatctatcatgttcttaaagtgacaattagagtttaagagcttctttatctgtcttgatatttaatgttcgattgccatggttaatatgtctttgtgtacctctgcgtgatagcccctagcaagtgcatatggacttgccaagcacagagatggacgttgggaatgggccatagccccaggtgtctccccttctgccagataccagcatgctgcagtatgagattcttcttctttttttacttcttttagctagttccatcagaaaaaccaacatttggtggattattttaggtctttgtaaatgcaagactccatgtctctggtggggcacttggtggtggacgcatggtagaagactcgtccagtgttgcaggttagcgaaaggcgagaaacaatctcatgtttgtgttgttaatgagataatacttacgttttttgcttatacatacaatctctaaaatgatggatatgttacttttttttggtacaacttttggctgtcttaattgattaattgttagtgaggcatattatttctttctaaaagcatagttatattcatcctttaagctgcatcattcttctcaatggactgtagaagccaaaatttatttgcaatttatataaaactatcaaacagggatattaaaaaaaagttcactcatccataactcatgaggaagctacaaaattattttcgtaataactagtacatgcattcatgtaagcttctctgactggttcattattttctctttgttcagtgttggatactgcagcaggtgtttggtgtgatacaaaatcggttgttactagtcctagaactggtaggtatagtgctgacgcagctggtggtgatgcttctgttgagctgactaggcgatgcaggcatgctgctgctgcagtgggtgatttgatattcatctatggtgggttgcgtggaggtaaggaaaaaagcttgatagctgttataggcaatttaccattacacgtttgtccatgaaatgaaccaggcatatagtactgagaatccagtgatctactaatttggcatattatttattaagttgttagtgtatgatagtgtaggatttgttttttaagtaggtagtttgatcttttgttaaagtctgggacttaatattatcagtattagttagtaaaaccattatagagatcattcttcaccaaatatatgtgccgtagcttcttttctcttccctttgcagaccgtgcattttcttaaaaattatagctgctaaacttaattatattctcttgatcctataggagttttacttgatgacctattggttgctgaagatcttgctgcagcggaaacaacatctgctgcctctcatgctgctgctgcagcagcagcaacaaacacgccacctggccgttcacctggaagatatggattttctgatgaaaggacaggggagctaccagaatcagctcctgacgctgtggtgctgggaagccctgttgcaccccctgtaaatggtgatatgtatactgatattagcactgaaaatgcaatggttccaggaattcggttagtgtcttaatatgtggggtgtcgtattgttagcacacctatgcatttagttgtaaaatatttatcaaacaacattgtaggagaacaagcaagggtgtggagtatcttgttgaagcatctgctgcggaagccgaggctatcagtgcaacattagctgctgcgaaggcacgacaggtcaatggtgaagttgaacttccagatagggatcgtggtgctgaggctacgcccagtggaaaaccttcattatcattgattaagcctgattctgcagtaccaaatagtgttattcctgcaggggttcgacttcatcatagagctgtgagtcaatctaactctatcaagaaaaatctgtcatttaccgtaattccagctcatttaccagtggtttacatctctaatttctgatttttgttttgcatttatttttggaactttgtaaggtggtgggtgctgcagaaacagggtgagccttaggtggaatggttagacaagtattcattgatcaatttgaaatgagg

SEQ ID NO: 3822 - DNA, 2632 bp, Arabidopsis thaliana landsberg
aacacacaaaccgatgctacaaattacatactgaaaaacatgaatgaagacattatacaaacgaccaaacacacctctctatgatacataaataccccaaaactaaaacaacctctaaaatcctcctcctactcactcatctgtttgtgtccctcaccaaaagtccaataccacatatataatcaatactaagaaaaaaaagcaaagtgaagaaaatcaaatatatgaataaaaatgagaaaaccccttttacaaaacaaatactcttcctcctcactactactacaaattctttaccctttcatcatctgacttgaatgaacttaacctgtgaaattcttcgataactcaaaaccctcattgatccatctcgttggtaaatagcaatcgataattgaatggtttggttggttctgtacacaacatgaggatcacctagaggcggctgtcaggactcgggagaggtatgttatctcgcactcgtcactctttctgtagggtttatatccaagcaagagagccgcggtcatttggattttgtgggcgtcctcttgttggtgttggtggtctatttacgtttaactcctgcaaaatatcaatgcttagttacgccattttccaggtggaaaaaggaaggcattagtatctgtttgagataaaaacctgcatccatgtatcctctatatgtctttctggtgaagtttcaggtgaggttatcgctggaggcaatggatggataagcttaggaaccaccacaagatctctccccaacaccaagatagccccggcattgtttgcggtacctgagaaggaataaatatagatcattttttgtcagaaactatcagatcaggtcttattaccagcttaggagtgagttctcggttccataaacataccacaataatttgttgccgaaaagagcgttatcaaatgaccttgggcaaaacgctcaaatccgtccatcacgcattcatgcgcacgtacaatcaattgcagatcattgttgttgcaaaactccatgacacggtcaggctgcagttgtcaaattcttggtaagtaatagaacaggcagaactacttatggaagcgaagtagaattatattactcaatataattgtctaacaacagcccatgaatatgtcaagggtaagggactagcaaaatcagtactcttcacacttaggaagctcaaaatgagcggaaagaaaagatcactcaagctgatgtaatggagtatgaggtgaggaggggaagggaaagagagcagtaatcaatgcaaagtgtacgaaatagaagaaaaagaccactcaccccaaaagtaaccaacccagggcctctagcattgggccttaaaccttcgacactgtcattttcagttggatccgacctaacagattacaagatgacatactagtgagacaaggatcacggaaacaacatagaatgatacagcattagacatgaacttaccataataaatccataagtacaattgagcctgcttccatcgtaattggacgttggatattttctatctgctccacatgatttatcgaccgaccaattcccccatgcatacagatgattttcttctcaatcagtgcagccagaggtagccaattgaataaacggtttattcgatgccacacccagatcccatcacgttcaccctgcaaagtagccatgacatgagaccctaaaagtggagcaagagattcacagagatgagacactaccattcgctcaatacactctatccggaaaccaaaaagtgcattaatgtcggcagcttcatgatttccacgaatcaggtgtacgttatgttggtattcaacctgcagtgtcaattatagagcgttatagcatttcttattaagcgttaataatacctgaaaagagagcattaatatagttctctttaaactacctttaaagcaagcagaagtgtaattgtctctaggctgtgttgaccccgatcaacatagtctcctaagaagaggtaatcgatgtatctgagaacaattaatacagtcagtaatgtcagaccaacacataacatggcgcaagagatttagctgcacacttacgatatgtctccagctgttgatggtgaaccatattcatcaaaaaggcgcatgagatccccaaactggccatgcaaatcaccaaatatcttaataggagctttaagctgtaacacagtaggttcgcttgagaagatacgttctgcactgtcgcaaagatcagctatttcattgcaatccaagaaaaactggcgacgaactggaggcttccacccccgaggcttcaaaagatgagctacaacctaataaaattgagttgtgaatcattagaaggtattaatagtcaactcggaacctcataccattgaacaatacaaatgatctagtcggattacatgtctgtttaaaaataagtttccaaaactattaaaccaaggggtaatacacctccacagtatctaagtacacttcctatctttatcagacaaaccaaatgaccagtgccacagcagacaaattctctacaatagttcgagcacacaataacaatttcttgcaacacttaactgattaacaatttacctttttcggaacactattgatt

SEQ ID NO: 3823 - DNA, 2955 bp, Arabidopsis thaliana landsberg
tggcagtggaaagaagatgagtaaaggatggaacacatgggcattggctctccacagcattgcgatgcacccagagagacacgagaatgtcgtgcttgaatattcagacaacatcgttgtcataaacgaccagtacccaaaggtaaaaaagtcttgatgctgatttataaatatagtatctttcttcatgtgacaaatgacaaataggatttttcaactgagtttaggcgcggaaacacgcgctagtactggcaagacaggagagtctagatgggctagaagatgttcgcaaagagaatcttcaacttctgcaggaaatgcacaatgttggtctgaaatgggttgatagattccagaacgaggatgcatctcttatcttccgccttggatatcactcggtacttaagtcatcctttacattcaaagcactgctgaattttctgtttcccctgagtgtagacttcagatttgcactttctgttcggtcgttttagaggttaaacctaagagttcattagcaaaatcattgaaattgatatgtttaacatacattgagtttttctctttcaggttccctcgatgcgacaactacacttacacgttataagccaagactttaattcagatagtttgaagaacaagaaacactggaactctttcacgacctcgttcttccgtgactcagttgatgtacttgaagaggtcaacagccaaggcaaggccaatgtggcgagcgaagatctgttgaaaggtgagctgcgttgcaatcggtgtagaagcgcacacccaaatattccaaaacttcaatcacatgtcagaagctgccattctcaatttccagaccatttactccaaaacaatcgccttgtggctagagcagagacgtagtagctataacgaccggttctatttcggttaggatttttttttctttgttatctaattgttacgggtaatatatattgtgattttggttcagattcagtctctgtaaaaattcatctctgttcttaggttttcatcttcttctggttattaagtttttgattttgttcttgagttataaacttaaatggcaagaaaacaagacagataaaaagaaaaaaaagtcaaataaattttaacccaattgagatgtaagatggtttaaaaatgtttgatttaggttgaatcaattgatttttttcggactttacatataagaaaaagcacaaatattgaagaatattacggaaaaagggaattgtattacaccatcaatggtaatggtacagtacaactaactggaaagtatcaaaagcaattaaaaccaacggtcgaaaattcgaaaattcgaacagaaaacaatctaattcaattgcaaagaaacgagagatgcttgagtcacactcaagattcttttctcttgcttctactgaggattgggaggacgaccattagcagctgagccgcgagatccccactcaagcaactctttgcttgtatcatctttgtgaacaatcacttcaatgaaacaaagactatctttcttctccgttgtcgcagtcttaatcgcttccactaactcctcctcgtatctcacctgccaaacacaatgttacttcaacaccaaattcatacgttagttactagttgtaatcattaattacctttgtggtccagcattttccttcaccgttatgaatagcatcgacaagaccagtgtagttccagttcttgataacattgtaaggaccatcatgaatctcaacttcaatggtgtagccaccgttgttgatcaagaagatgatcgccttctgtccgttacgaatcatcgtggatatgtcctgagcagtcacttggaaactcccatctccaatgaaagacaacactctcttctccggtgttgcttgggcgtatcctagagtcgcaccaacagaccaaccaatggatccatactgcatctgaaactcgtacctacaatatagagaacaacttttctcaaaacttgtgtttgtttcgctattgtcacaatgttagaaatgtcaaagattcagtttctttgttagacacgtacccacatcctttaggcagctttagcttctgacaattgaaccaagaatcaccagtttcagcaatcacagcggtttcactagagagcatcttctgaatgtgttggaacattgcgttgaccctcaatggctctcctggtttgcatttcaatggcttaccttcaggtacaaagatcctctcatagttctcataagctgtctcgttacgcttaaccctcttagccaactccctgaagaaatcgctcatcagaacgcaaccaaacgttggaccattagccacaacgactcgatcaggatgcacaattattgctttttctttcttgaggagaagagagtaacctacggagctgtagtcgttgaagattggacctgcgaagatgtaagcatccgcagattcgacaatctcagagcagaaaggtgtgcttactgctccccagtaagtgccaatgaaatgaggatggttctctggtacaaggccttttgcagaaggcatcactgcgagagggtagcctgaagcatcagctagctccaaaaaggcctcacttgctttagccacacgcaactttgggccaccaaccataactggcttcactgccttgttcagaaactccaatgttgcttccaccgcagcttctaaacccatcgtgttgctcatcctaagaaacaatacatacaatagtgagaaatctaaaacaaacgttgattcgatgagtctgtttagagtaatgattacctaggagttagggcaaaagggacaggatcacgagcaaacgtaggatgaggagttgcagctaagttgcaactgatgctaatgtacacaggcttgctctctttcaaagctgttgctatcgccttgtcgatctgttcatgagcatcctccaaattgttcaccacagcctgaaaa

SEQ ID NO: 3824 - DNA, 4640 bp, Arabidopsis thaliana landsberg
ggaccaggagtaatggtgcggatgtactcagctatttctactctatgtgccttctccttgttggcctgaggcagcatgattgcactgatgtctctggtaagcagcttagcttcatctaagctaattccattgtcaacaagtcgcttgacatacctgttgagtgaggcggaagatgtctctaaagcatccttaggaagagtatagaggatcttctccattatggctgtgcacttagcagcgtgaatctcctgcttagaacgacgcctcctcggataggggacatgaagagtgtaaacgggctcgggctgcataggtacttgcacctcacaaggtgtagtccggatccagtgtcgatcacactggatgggtatcgatcgacaccgtcgtattgagtcgtctctgagaagagcatcccctattttgtcgatcgacactagaggggtatcgattgacaccgtcgtatttagtcgtctctgagaagagcatcccctatggtgtcgatcgacacaggagggtgtcggtcgacaccatctctgcaactgcaatctccaactcgtcttcagtgtccaattcctctcacacatcatctccttctctgatcaagatggcattacagctcttccttggattagcatcaggattaccaggaagaaaaccctcttgtctcttgatagattgtgcagtttgagctacctgtacatctagcttcttcaagtgagagctcagattgtcgatcttcccattaagatctgtgtagacagcatcaaacttcccattaaacttcaaaacaagctttgtttggctctccagaatctgctcaagcattgattccattcttgtttctgatgagggtggggggggggggggcttggtaagttgaattaccatagtttctctgaaagctactttgaagaaaggtcttctggaaagcaggctttggagtgtagttggaggaaccctggttctctgtaaacctgttgccactgaagttgccctgtggctgcccaaacttcctgtatccctgaccatctatgcagaatactcctttctctgactcaggctcaggctcaatagtctcttcttcagctacaaagtggacatgctttttccctatgagcaagttatgaactgaatccagcttagcattcacctctgccatctgatttcctgaaatagctccagcaatcttttttctctcaaaatcagcattcttggtactgttgctacaagcgaggttctcaatcagggtcgtagcatcagctggataacgtgtgttgaagttaccattgctcgctgcatctagaggtatctggtatctccaatcaactcctttgaagaaggtacctaaaagttgtacctcactgaaaccatgatgtgggcaatctcgttggtactccttgaaacgaacctaagcagccttgaaagcttcagctggaccttgtgtgaaggtagacagcttgtttctcaactcctcatacttagcatcatcgtaaaaattgttcaagaaggctatcttgatgcttctccaagtcttgagggaacctgctttaagttatttcagctaagaagctgcttccccaacaagtgaataaggaaaaagcttgcacagtaggtagtcctctgagactccattagccttgatgctcagaacaaggtcctcaaagcgctctatatggtccattgcctgctcatgagataagccatggaaagaatgctggccaactaaagcaaagtagccaggcttcagctcatagttgttcctctggaagggtgtgggtacgatcgctgatcgattagcaaagaacaggtcaggccagttgaaatccccaagagtacgacgtggtttcgcagctgaaggaatagctgcaggaatctggtgttggtgttgatcgacacctatgttgtttcgttcgacatcaatcgcatcgtcattcttctcccgagggtgtcgatcgacaacgagccctactgcatctctggcagctaattgcgcgttgaggcgcgcctaatttgcatcgacgtcctcaagtaggatgattccatgataatccaatctttgaccagcctcattgtaggcttgcccatcctcatcagctcctatgactctttcagccattgctaatctctaagttttcccaagtccaaaatagacaagttgataagctccttctattgtgtgctccttgtttgcctagccatacacctgaaacacagaaaagaagaaaacaaaaaaagcgtgagtaacaaaataaacgtaaaagctagacaaaatctctaaactaaacacaatgaatgattcccaagaacttcggcaacgacgctaaatttggtatggttcaaaattacctagaactactctctcaaataagagatcaattgcagtattttaggatcgaattcacggagttcttttgttcaaacagtcagttaaaaatcgagattaagctagcagggtatgagtgaaatagtaagtaaacaaaacaagaaagcagcagattgattagtttgtaagcgattaggaaaagaggtaggaacagggtattctcaggatactattggttagtcgatctaatactagctaggttattatcgaaccattcttaaactcaaactctaattttggaataaccggtggcgttccgcgaaactccctatgcctagagctaagaataaccggagaaaccgagaaatcttatacttaagcatgcattataaacgagttcaattcagttcacctaagtaaataggccgattcttattacacacctataaaccaggctcatcaaataaaaagtctaactatagatacctatggtgggtatatctattgtctggattcaatttctagttaattactctagaactagcattaaaaacaattaaagatgaagaattttatagataacctaacaaaagggcgatctactaaaccatatgaatccctaatgagaaactctaaacctaacaagcaaactactcagacatgggattgaaataaacaacatatttgagtaagaaagcataaacaaatcaataagagaaaagttagaaaagatctctttactgtattgaaaactgaatgaaactctgaagaataatcgatgaatagggttttgctcccaaagtacaaaagagataaggagattagcctctctaaccttaggtctaaacaatgaccttaaaaactatatatatgacctaaaaacgtgatgggccttctttggaaataagggaaagttctaggcagaatttggaaatcttcaaaacatcaataagttgcgtcttcaaattgccgtcaggtattggagcacgcggtagagtgtgttgaactctcggctttactgctacaaggaaattttcaccttgaggcattacctgtggggttcttgctatcttctccagcacttcggattctgaatctaagtgggacacgcataagttcattgcctctatccctcagcaagcttcttgagctccgatctctcatcttgagagactgctactaccttgaagaagttccttcccttgaaagtcttacaaaaattcaagttctggacctctgtgccactcgtattagggaattgccaagagggttggaaactttgaacagcttgagactacttgacctctctcgaacacatcacctcgaaagcattccagatggagtgatccaacatttatctagtttagaggttctagacatgacgcttagtcatttccactggggcgtccaaggacaaactcaagaagggcaagcaacacttgaagacattgcgtgtctccatcgtttgtcggttctctctatcagggtcgtatgtgttccacctctttcccctgaatacagttcttggatagaaaagttgaagaaattccagttgtatattggcccaactgcaaactccttacctagtagacatgacaaaaggagagtgacaataagtagtctcaatgtttcagaggcattcattgggtggttgctagtgaatacaacttccctagtgatcaaccattgctggggtctcaacgagatgctggaaaacttggttattgatagcacaagtagcttcaacgttttgaggtctctaacggtagatagttttggtggaagtataaggcccgctggtggatgtgttgcgcagctggatcttctacctaacctcgaagaacttcatctgcgtcgtgtaaatctggaaaccatcagtgagctcgtgggtcatctggggttgagatttcaaacactgaaacatctagaagtcagcagatgtagccggctcaaatgccttctctcgttagggaacttaatctgtttcctgccgaacctacaagagatacatgttagcttttgtgataggcttcaggagctgttcgactattctccaggagaattttcagtctccagtgaacccttggtacctggtctgcgtgtcataaagctgacgaatctcccgcggttaaacagattatgtagccaaaaagggtcatggggatctttagaacatgtggaagtgataaaatgcaatcttctcaagaatctacccattagctcaaataacgctcctaaagtcaaagaagtaagaggaggaacacactggtggaacaacttatctgggatgatacactacaagagaaaccgtcaacct

SEQ ID NO: 3825 - DNA, 3264 bp, Arabidopsis thaliana landsberg
ttaatcatcacatatctcctttggtaacattttgactatgtgtatgttttcaggctgtggtgaaccatttataggatgctcatgaacagatcgacaaggcgatagcaacagctctgagagagagcaagcctgtgtacattagtatcagctgcaacttagctgcaactcctcatcctacatttgctcgttatcctgtcccttttgacctaactccaaggtaaattaatataactgatcaatcctaatctcttcaagaatcaagctcacaaacgtatggattgtttcttttattaggttgagcaacaagattggtttagaagctgcggtggaagcaacattagagtttctgaacaaggcggtgaagcccgttatggtcggtggtcccaagttgcgtgtggctaaagctacggatgcctttatggagttagctgatgcttcaggctaccctctcgcagtgatgccatctgcaaaaggctttgtaccagaagaccatcctcatttcattggcacttattggggagcagtaagcactcttttctgcaatgagattgtcgaatccgcggatgcttacattttcgcaggtccaatcttcaatgactacagctccgtgggttactctcttctcctcaagaaagaaaaagccatcattgtgcatcctgatcgtgtcgtcgtggctaatggtcctacctttggttgcgttcggatgagcgaattctttagggagttggctaagaggttgaaacgtaacgagacggcttacgagaactacagtagaatctttgtccctgaaggtaagccattgaaatgcaaaccaggagagccattgagaatcaacgcaatgttccaacacattcagaagatgctctctagtgaaaccgctgtgattgctgaaactggcgattcttggttcaattgtcagaaacttaagctgcctaaaggatgtgggtacgtatctagaaaaaggaaactaaatcttttaccttttaacattgttgaagcagtcaatatataggtcatctagtaaagtcaacatctagaaattgctggttaaagagtggtggtatatatgtacttggtaggaaacgatataaaatgccttggtatttagcctgagatgatttatgggcctatatagatagccccagaactttttagtaattctctggaaaagaaaaaacacacaagatttttaaaaagtcgttgttctctatattgtaggtacgagtttcaaatgcagtatggatcaattggttggtctgttggtgcgactctaggatacgctcaagcaacaccggagaagagagtgttgtctttcattggagacggaagtttccaagtgacggctcaggacgtttccacaatgattcgtaacggacagaagaccatcatcttcctgatcaacaacggtggctacaccattgaagttgagattcatgatggtccttacaatgtgatcaagaattggaactacactggtcttgtcgatgctattcataatggtgaaggcaaatgctggaccacaaaggtaattgatgtttacagttggaaattaaacatatgagtccagggttgaagagtaacattatgaatgttgtgtttttggtaggtgagatacgaggaggagttagtggaagcgattaacacggcgacattggaaaagaaagatagtctttgtttcattgaagtgattgttcacaaggatgatacgagcaaagagttgcttgagtggggctctcgcgtctcagctgctaatggtcgtcctcccaatcctcagtagaagcaagagaaaagaaacgaatcttgagtgtcgctcaagcatctatcgtttattggcaatctaatcacatcgctacttttgttctttctcttatgtcttaagtactggtttcgattttttgaccgctggttttaattgattttgcttttaatatccttcctattagggaaccccttgttgacaaagttttcattataaacttcaatatttctgctttttcttaaacgtgaaatgaaaattgttgatggaatcaggatggaatattctaatcttattaatgcctttacgtgcatgtaaattattgagttctaataattatactaacttctcaatataaggtaataaaattcttgaacaatacgaatctagtatttctttaggttctttttcgtttctttggcagctacttaatgtaagttatatcatagttaagacgaaaatcagagacttaatgctgcattaatggttcatcttggcaaacaagttcaaagatacatatatagttaataaaaaaaataaaataaaaaatccatgttatactctaatatattttgaaaataaatttattttcatcattttctaacgtaaaatgtcttttcgtatcacaaaaaattataaattttttagtgcaaaataaaacgtccgtgtttcgtgtatataagtatcaatttatataagtaaatttctatctgtaaaaaagtaactaaatgtaagatgacagcaagaaaattgcaaaaatatttcagtaaatctttatgcttttggcacaaggaagtcagaaaccgaatgtaatttgcactaatcaacatgtacaactatataacccatctaataattccaatttattactcatcatcatcactaaaataaatactaaaaagtttcattttcttcataataagctttccaatggacaccaaaattggagccatcgacacgtgtaagccaacaactggtgacatcggaagtccaccaagcaacgccgtcgcaacaatccaagactccgctcccatcaccacaacctccgaatcgactctaggacgtcacttagcccgccgtcttgtccaagccggagtcaccgatgttttctctgttcccggtgatttcaacctaactcttcttgaccacctcatcgccgagccagagctcaacaacatcggatgctgtaacgagcttaacgccggttacgccgccgatggatacgctcgatctcgtggagtcggtgcttgcgtcgtcaccttcaccgttggaggacttagcgttttgaacgcgatcgctggtgcatacagtgagaatctgccagtaatctgtatcgttggaggtcctaactccaacgattttggcactaaccggattcttcatcacaccatcggtttacctgactttagccaagagcttaggtgtttccaaactgttacttgctaccaggtattaacacatttcaatatcaactaggcttgatcatcacatatatatctcctttgctt

SEQ ID NO: 3826 - DNA, 863 bp, Arabidopsis thaliana landsberg
ctacccttgctcgcatcacatgtacaattattgaattctaataatttatttcaagttaatacaagtcgtcttgaacaataatacaactgatcagtatatctttataaacaattaaaatatattattttcgtttctttgcacgttgaattaaatgtaagtctagagaggaaaatcagatgattaattctgaatgtctaattgaacattttataatataatcgtatgcattattcgtataaaaaactatataattactaaacaattttaatgcgaaattaaactgggaattgttttgaatctactactacgcacaaacaactatataatccacagtcttctagcagcattatactgcgcaccagaaaaactcagagagcttcatcatcatatcctaattattaagctcattttccaatggacgtcggaagtctaccaagcaacggcgtcgcaacaatccaagactccgctcccaccgccgcaaccatactcggctcctctgcagcgactcttggacgtcacttatcccgccgtcttgtccaagccggagttaccgacattttcactgttcccggtgatttcaacctatctctgcttgaccagctcatcgccaacccggagctcaaaaacatcggttgctgcaacgagcttaacgccggttacgctgccgacggttacgctcgatctcgtggagttggtgcatgcgtcgtgactttcaccgttggtggactcagcgttttgaacgctatcgctggtgcatacagtgagaacctaccagttatatgtatcgttggaggtcctaactccaatgattttggcactaaccggattcttcatcacaccattggtttacctgattttagcca

SEQ ID NO: 3827 - DNA, 5028 bp, Arabidopsis thaliana landsberg
  unsure (1)..(5028): unsure at all n locations
tgaaactggagctttaactccaacagaagactctgctacgcctacagccggcaaagctagaactccgcaatgaaactctgaaacttcccaccggtggaactcgactctatctccggtgtcaacttgcctagtggtggaactggagcaatgtctacttcgccttccattgttgatacaatctaagactcccaccattcgaattcaagatgaaatccaagaacaatcacgatttcgccaaagtaagatttagggatgtcgaaatcgatttggggatttctctatttcgtnnnnnnnnnnnnnnnnnnnnnnnnnnnnnnaacagaaacaatcagatccgttaatgcatgttaacgtctcggcggtttttgcctggtcaacgttttgatttgtattaaatggcgggtcaacgtttttatcatgttttatttggtcgacccaaaaattcacgtattgaaatatcactttttaaaagtttgcgtataaaacaacatttttcctttttttctatgaactttttttttgtttttttttttgcattactttgatttttagttttcgtcttttttttctcatgcgattaaaatatattatagctctatttattaggtctaatttaaaggggtttgttgaccaaagtgtgacaaataacgattgaacttgagcccatcagctctgttcacaacaccaagtccaaagaccactctttcttcctggcattctcgcctaggccatccttcttcttctattctaaacactttaatttcaaagttttcacttcccgtttcagtttctgcttcaaataaacttgcttgtttggattgtttcattaataagagccataaactcccatttgctatctcatccattaaatccacctcaccgcttgaatatatattttctgatgtctggatgtctcccatattgtcaccagataactacaaatattaccttgttcttgttgatcatcacacacgatatacatggctttaccctttgcagcaaaagtctcaagtaaaatccacttttattgcgtttaaagcgctggtcgagaacaggtttcaagcaaaaatccgaacactttactcggacaatggcggagaatttatcgcactacgagaggttcttcgtttccatggtatctctcaactcacctctccaccacacactcccgagcacaatggcctatccgaacgcatgcacatgcacatcgttgaaacaggactcaccttactcactcaagcttcggttccacgagaatactggccatacgcattcgccgcagctgtttatctcattaaccgaatgccgactccggtgctatccatggagtcaccgtttcagaagctgttcggatccaagccgaattatgagcgtctacgagtattcggttgtctgtgctttccatggctcagaccttacactcgcaacaaattagaagaacgatcgagacggtgtgtgttcctcggttactctttaactcaaacagcctacctctgtttcgatgttgaacatacgcgactttacacatctcgccatgtcgtgtttggtgaagcctcctttcccttctccaaccccacatcccaaaattctctccccaccgtaacctttgaacagagctcctcgccgttagttacgcccatactctcatcatcgtcggttctcccatctcgtttgtcttccccgtgtacggtccttcaccaacaacaaccgccggtgactacgccgaactcaccacactcatcacagccgacaacctcaccggctcctctgtctcctcgccggtcaaccacaacggactttcaagtcccacaggtacgctcttcgtcacccttatcttcttcttcctcatctttaaattctgagcccactgctccaaatgaaaatgggcctgaacctgaggcccagtcaccacttataggcccactgccgaatccaacccatgaagcctttattggtccactcccaaacccaaaccgaaacccaaccaatgaaattgaaccaacacctgcgcctcaccctaaaccggtcaaacccacaaccaccactaccactccaaatcgaaccaccgtctccgacgcctctcaccaaccaactgcaccacaacaaaatcaacacaacatgaaaacccgagctaaaaacaatatcaaaaagccaaacacaaaatttagcctcactgctactctcccaaatcgttctccatccgagccgaccaatgtcactcaagcccttaaagacaaaaagtggcgttttgccatgtccgatgagtttgacgcccaacaacgaaatcatacatgggatctcgttccccatgaatctcagcatcttgtcggttgcaagtgggtcttcaaactcaagtatctcccaaatggtgccattgacaaatacaaagcacgcttagtggccaaggggttcaatcaacaatatggtgtcgactatgcggaaacgtttagtccagtcattaaatctacaacaattcggcttgttcttgatgtcgcagttaagaaagattgggagattaaacaactagatgtcaacaatgctttcttacaaggaactctcaccgaagaagtatatatggctcagcccccgggtttcatcgacaaagatcgtcccactcatgtttgtcgccttcgcaaagctatatatggactgaaacaggccccccgagcgtggtatatggagctgaagcaacacctattcaacatcggcttcgtcaactcactctccgatgcgtctttatttatctactgtcatggcaccactttcgtctatgtacttgtctatgttgatgatattattgtcacagggagcgacaagtcatccatcgatgcggtgctgacttcccttgcggaacgtttctccatcaaagatcccacagatcttcactacttccttggtatagaagcaacccgaacaaaacaaggtttgcaccttatgcaaaggaagtatatcaaggatcttctcgcaaagcacaacatggctgacgcaaaaccggtgttaacacctttacccacctctccaaagctcactctccatggtggtacaaaactcaacgatgcatctgaatatcgatcggtggtgggtagcttgcaatacttagcgtttacacgtcctgacattgcgtatgccgtcaaccgattatctcagctcatgcatcaacccacagaagatcattggcaagcagctaaaagagttcttcgatatcttgccggcacatcaacgcatggtattttcctagacactacctcaccattgaatctccatgccttttcagatgcagattgggccggggattccgatgattatgtttctaccaatgcatatgtcatctatctgggcaagaatccgatctcttggtcatctaagaagcagcgtggtgttgcccgctcctccacagaatccgaatatcgagctgttgcaaacgctgcatctgaagttaagtggctatgctcacttctctctgagttacacatccggttaccaattcgcccttctatattctgtgacaacattggagctacctacttgtgtgctaatccggttttccactctcgtatgaagcacatagccatcgactaccacttcgttcgcaacatgattcagtccggtgctcttcgagtctcacatgtatcaacacgagatcaactagcggatgccctcaccaaacctctctctcgagctcactttcagtccgcatgtttcaagattggagtccgtcaactccctccatcttgagggagcgtatagagaatatatgtcataatgtcttaaaggacatgtttgtaattaatcaatccctaatcatatgtctgtattttagtataaatatgtacattacattcttaataaagttaatatattctcatttcatatggtatcagagcaaacgataccctaattttattttattttttttcaaaacacaaacctagccgcctaacatgggctcctccgcaaacggtctcccagccaccactgatgaagcaattgtcttcactccgcaaacaatcttcaacattaacacgtctaatgtcacgaaactcacctccaacaattacctcatgtggagccttcagatccacgccttgcttgatggatatgaacttgcaggacatcttgatggttctatcgagactcctgctccaacactcactacaaacaatgttgtctccgctaatccacgatacacgttgtggaagagacaagacaggctcatcttcagtgccttgattggcgccatctctccaccggtgcaacgattagtgtctcgtgcaaccaaagcctctcaaatctgggaaaccttaaccaacacgtatgctaagcctagctacggccacatcaaacagctccggactcaaattaagcacctcaagaagggacccaaggccattcacgaatacgttatgagtcacacaactctccttgaccaatgggctattctcggcaaaccaatggaacacgaagaacaggtggaacgtatccttgaaggtcttcctgaagactacaaaactgttgttgatcagatcgaaggcaaagacaacactccctctattacggagattcatgaacgactcattaatcatgaggccaagcttttgtccactgctgctctgtcatcctcgtcgcttcccatgtcagctaacgttgctcaacaacgccatcacaacaacaatcgtaacaataaccaaaacaagaatcggactcaaggcaacacctacaccaacaattggcagccctctgcaaataacaagtcaggtcagcgtcctttcaaaccttacttggggaaatgccagatttgcaatgttcaaggacacagtgcgcgtcgatgcccacagctgcaggcaatgcaaccgtcttcgagctcctcggcctccacgttcacaccatggcagccacgagctaacttagcgatgggagcgccatacacagcaaataactggcttctcgatagtggagctacccatcatatcacgtccgatctgaacgctcttgcccttcaccagccctacaatggtggtcatgacccca

SEQ ID NO: 3828 - DNA, 1660 bp, Arabidopsis thaliana landsberg
actccgtaaatgggttcttctcctctttagattctctgtttaccattagtttcatatataatccgatacgacatgctaatttgattgccgacttgcagtggcctatgagaccaaaactccttttattccgtttaacgagagagattgatagaacgaattatatatataacccatacttgaagatgtgattcttcaaaaactaaatagtatcaaaattgtttgaagaaaaatatattatcaaaattggtaaaaaaacatattaaaaaaatggcagtactctgtagacagaaactctccacaaccattattaacccaacacgtcacatgcatggaacttggcagcaaccatacactttcactaatgagtcattaccgctattagtagccattggtttcttgttagacaagaaatcatataatatacgattaaaattgaatataaacaaaatctttcgtaagcaattggatattctataggatacgtgagctgaatattcaactttgatataaatgaagttgaatatgtgtctcttggtccttgctttcgcattcatattacacacttgtgtgttgacaaaataaaatgcaaaattttgccccaactaagactttttctcgtttagcaaaaaaaaaaaactaagacttttctctttcgtaagatattattcatagatttctcattttcaaagttgaattacgtaagaaagtaaatatactttttcaataaatagacaacaaaccatctctgtttttcacagcaactcgaaaatgtcttcaacaaaactcatatcgctcattgtctccataacattcttcctcactctccaatgctcaatggcacaaactgtcgtaaaagcttcgtactggttcccggcgagtgaatttccggttaccgacattgactcatctctcttcactcaccttttttgtgctttcgctgatctcaactctcaaaccaatcaagtcactgtctcctccgcaaaccaacctaaattctcaacctttacacaaactgtccaacgcagaaacccttctgttaaaacccttatgtccatcggcggtggaatcgcagataaaaccgcgtatgcttctatggcaagtaaccccacttctcgaaaatcattcattgattcttcgataagagtggctagatcctatggattccacggtcttgatctagactgggagtatccgagcagtgcgacggagatgaacaacttcggaacgctacttcgagaatggcgatcagcggttgtagcagaagctagtagcagcggtaaaccgcgtttgcttttggcggctgcggttttctactccaacaattactattcggtactgtacccggtttcagccgttgctagcagcttggattgggttaatcttatggcctatgatttttacggaccgggttggtccagagtgaccggtccaccagccgctctgtttgatccttcaaacgcaggtacaacaatttattttttggtacagcattatatgaactaaaccaattaaatcccaaactttaggtcgcgaccatttttttgtttggctaaaataattcacaacttttttgtttcatgaatcttaagaagtaaagatatattcaatataattacagttagtgtaatttatctaaaatatgaaattttgacaaatttaa

SEQ ID NO: 3829 - DNA, 2431 bp, Arabidopsis thaliana landsberg
tactgctacgccgggacaacttggatcgggtacgacagtgaggagagcatcgtcaccaaagtgatatacgctaagcagaagggtctgcttggttacttctcgtggcaagttggaggtgacgacaaatcggaactctcaagtgcaggttcgtctccttaccatatacttatttgatgtatgaattggaaatatactaagatttatcatccgatccatataataaatagcacttggagtactctaggacgatagtttataacagtaggaactaggaagtttgatgaattgaatttggtttttacagcgtcagacgcatgggataatacggagaaggaatgatccgaaatttggttctaaacttctaaggttgccaccctgattctgacattggcaagtgaaggagaccaacaaacacgtttgctgccttttatatacctgtttgcttattttaaagaaaacaaactagttgatgtcaaaaagaagaataaaacaaccagtttgctcatatattgaattttttttctttgataataatttgcttcgctattgttgtacaaataaaaaaagcatgtttgcatatttttataggaaaaacaacgctttcttattaacaattggttatgaattggaaattcgtgaaacttaacaaattgattctacacacccacataagctatatcttgttcaattctttccgctattttattactcgatttttctgttattgcactgtttagttgatatacggtccaagattaaaacaattatatatattttattttgtggtgttgtgaaaactaactttttatctcgtatataattctgaaaaacataaattttatcatattagtgtttaatcacaacacatgtcaactattttaacacgcgttaattggaaaatttttatattaaaatttgtaacattttaaatatttagttctcatattttatacttttgaaaactttcgcgaattgagtttctatttcagtttgaatttatctcagaaataaacttcacggtttggaaatggtgttttttctcgggcctttactgtttgtttggcttatgctttccgttgtgaaattgtaggcttttgtttgttatttcgtttgtaatttttggttttttttctgccacttgtttatcactgtaaaaatctgtctccaatcaaaaatagtataaaacttaacattcattaaaaaaaaacagtaatataagcaaacgtctttattttgttttacaataatataagcaaacgtctttatgtttttcttacgataatatataagcaataaacagacctcttcagcaacaaatcaaaggaaaggaacagcaaacgtctttagcaaacaaatagaaaaagaaaagaaagcaaccgtgtttattctacactttgctttgttcttctttcacttttggtcgtctccgagttttattcttcggcgagaagttcatgtcctgtgttttactccgtagtatcccatgctattgatgctgtaaaaacccaaaagtcatttaaaactctttactattaataagatcagatactatttctttcgaattcatgtaagagaaagatataaaattgcagcaaagttattaatttcaaatgtgatcatgcaaattcaacgatatagtaaaaaaaaaaaagtttgattagaagttaaaatgaaaacgaacctgcacgagagagaccgcaattatagtcagctccaacatgccacgagaagtaaccaagcagaccagtatgcttagcgtatttcactttgtacacaatactctgattatcatcgtaaccaatccacgtgttgcccacgtagcaatagtatccgatcaccgccggatcatggaatgtggctgctccgttatcgacaatatagttccttatcttggcataggttatagaaccgtcgggtgatatcgctgctccatcggtgggtgcatcatagccgttattctcggcgtcttcgagagtccaagcccatccacagtatgggaaccctaacactgctttctttggcggaagtttagcctcatcaagccatttcctcaacccggagttgccgcttcgacctgtgttgtaattcagttttaaatttctatttcataaatatatatgcgaaaaatctaagtaaagttataattagaaataattaattctatgaagaaaattgtaaagcagaaacctgttatttggatcacattccatatatagtaatatatttcatgatttggttttaaaaaacttaaaatccaacagaaacatatatttaaacgtgtaaaaatgagtgtcataaacttctattttctgacaaaaaaaacttctattttctttctctattttttttgtgtgtgtggatagtaaggaaacacttcaattgtgttacgatttaattatggttcacacctgctgggctagaaggatcatcc

SEQ ID NO: 3830 - DNA, 1501 bp, Arabidopsis thaliana landsberg
actgctaaacataagatgaagaaataatgtgtatagtatgttggtctagcaataactttgtcaaccatgtattgatctaagatttgagtggatatatgtatctaattagagatatttcgttaggttggatctatagttgtgtatgcatatagtgtttttggaaaatggttttctatatgaagcatgataaagaaagaaaaaaaatacatatctggaacctaatcttaacagcccaatacaaaaagaaaaaacatttagacgacagagtccataggtgcatgggggatacgaacgaatcgaaccatgcagaatccgtactcatcttcgacgacgagaatctatgataccctgatgaagcaccggattagtggactcgtcaagcggtcttagcaaaccatatctgaagtaaagaacaggcgagttcagggttgttaatttgttataggtggcatgctagaggagaggcttttctttgatggtagagactatcaatttcagaagttgtactgctgatttgggtatatctcgatgaagcatgttgctcttctcagtccaatgttacagtagttcccgatataaggtatcctccggtgcgtttgagaaaattcattagactcccaaatggtgaccaatcgcctgaccaaaaccaggattctcttctattaatatgtaatttcctaaggtagaatgtggttataacatttacgtgaatgttgtaaaaatcatagacttattagttcgtagttagactactatatatggaaacatgtactgtaccaatagaaagggttccttggatttgatttgaattgtttgattcttctttttaacaaaacaaaatgatttgtaattctataaatgaaaagaagcattgcaattaataaacttatagttttattggacaatatatataataagcagataaagtttattttctgtataattacgaaaaaaacttcttcacttgctgttgtcgaaactgtggacagcttaaaccttctgtatagttctggtggttgccgtcgtagcatcccatgcctgtgaagctgtgaaatccccaaaatcgtcaaaaatcataacattttcaattaatattaatatttagaatttggtatcaaatcaaacctgcacgagatagaccagaattatcgtcagcaccgacatgccacgagaagtaaccaagcaaacctctctgcttggcatatctaactttcgtcacaatactctgattatcatcgtaaccaatccaagtcgtgccggcataacaataatctccgaccactgtggagttataaaccgttgttgctccgttatctactataaacttccttatctgaccgtaacctatcgaaccatctggtgatatcgccgctccagtggtaggcgcgtagtagctatggctgttggcgtttgtgagacgccacacgtaaaagtagtatggaaatcccaagacagctttctttgctgggagtccagcttgaatccatgtccctgctccagc

SEQ ID NO: 3831 - DNA, 1525 bp, Arabidopsis thaliana landsberg
ttactttgctcccactcattatacacatgctgatgtgtggccagtgtactccatgagatcttgtcaactatttgttttagtggataccacttttgagtatgaatgggggacaacaagtggcttcaatataatagtggcgttttggggacagcacgagggactctcaagaaccaaacccctcccaactagtgtgtctttatgagtgttttcttcttaatatttgagtttccacttctgttcttatcactttaataccgccttgggctaattatctcgtttgcttctttctagtccgtcattgtatgaggatcacgtggctgcctcttagcatcccatgcctgtgacgctgtaaaaatccccaaaatgccaaaacaaatcattaaacattaccttttcgtttctgataagaaaactaacgaatattttatcttttttagaattggaataaaaccgaacctgcacgagatagacgagaattatcgtcagctccaatgtgccacgagaaataaccaagtagacctctttgcttagcatatttcactttcgtaacaatactctcattatcatcgtaaccaatccaaatcttcttggcataacagtaactctgaaccaatgtcaaattataaaccatcgttgctttgttatccactatgaaccttcttatctgatcgtatccgattaaaccgtccggtgatatcgccggtccgctgctattcgcgtagtagttatgattgttggcgtctgtgagaagccatgcgtagccgtagaatggaagtcccaagactgctttcttcgccggaagtccagcttgagtccacgctctcactccggcgtcgccgcttggacctatatacatattcaacacgttatatatgtataggttttattactttatcttagcttagttcagttatttttttgtacctgtggttataggatcgtagagaggagctggtgagcaagttactctagacgaacccgattcataaaaatcgtaggcagcaagattaacccaatctaagctatcggcaacggcattaactgggtgtaagaccgaataataactgtaggagtagaataccgcagccgtcaaaagcaaacgcggtttaccgctgcttctagcctctgcttcaccgccaatcgccattctcgaagtagcttcccgaaattgtccatctccgtcgtaatgctcggatacttccaatttagatcgagaccgtggaatccgcacgatctagcgagcttaatagaagaactaatgaacagttttctagaggtggggttacttgccatagacgcaaacgcgaaattatatgtgaaatcaccgccgatagacaaaagggttttcacggtagggtttctccatcggacggtttgtgtaaatgttgagaatttgggtttgtttctggaggagacaatgacttgaccggttacagtgttgatatcggcgaaagcgcaaaaaaggtgagtgaagagagatgagtcaatttgggccaacggagattcgctctccgcaaaccagtag

SEQ ID NO: 3832 - DNA, 780 bp, Arabidopsis thaliana landsberg
aattatcgtccaattcgtgctattattacatggatcggatgataaatcttactatatttccaactcatacataaaataagtatatggtaaggagtcgaacctgcactagagagttccgagttgtcgtcacctccaacgtgccacgagaagtaaccaagcagacctttctgcttagcgtatatcactttggtgacgatgctcttctcactgtcgtacccgatccaagttgtcccggcgtagcaatagtctccgaccatcatgtcatcatgcaccttcgtcgctccattatctactatccacgtctgtaactgacggtaactgatctcaccgtcatctgatattgctggtccagtggtgtttgcgtcatagccgttaacgtcggggtctgccagagtccaggcccagccatagtatgggaatcctaacacggcttttttcgcaggaagtccggcttcagtccagtccctcacacctgagtctccacttcgacctaaccataaaagtacgaacagaaaacataaggtgttgcatgaagagatagtgtgtaaaatagtgaagatatatataccgtcggttggaagatacagagaggcgggtggaccagtcactgtagaccaacccggtccgtaaaaatcataggccataagattaatccaatccaagctgttggaaatggccagaacagggtacggtaccccttggtaattcgaggagtagtaaaccgcagctgtcaagatcaaagccgttgtaccgctgctattggactcggcgtcacggcga

SEQ ID NO: 3833 - DNA, 851 bp, Arabidopsis thaliana landsberg
aaggaagtttaatactttattcaagagatgaaaacactatttatttctgtcgaaaagatggtgttagaaaaatattaaggcctttgatttaatcgtatattgtcaattgtttaactaaaattttatatacaattattattttttattaattcgaaaataggtcaggcgaaaaaaaaaccatgtccgattggactgcatacatacggaaaatgtgggaccgacagagctaagttttgttttagtgaaattgaaagtaagttatcattttccaaacaagtgctcaacactatttctagttgccggtgcgatgacgataggcaaggaaacaaggactatcattggtgccaatgtgatagaagagaaggccgtccttgccccgcaaattgatgaacttcacggttcggaaatggtgttttttctttgagtctttactgtttgttttgcttatgttttttgttgattttctgctttactgtttgtagtcttatttctgatacttatttaactttgtaaaaacctctcaaatcgaaaatagtataaaacttaacattcatacaaaaaaaatagttttattattactgaaaaccaaaacctatttaccgataactaagaagaaacaagttataaggtatatttggggtttgaaatatatatatatatatattggtttatacgaataatggtaacagtggtagtattgttttgaagcatcttaaaatatatattcgtttatatttgatgaggactcgagtttctttggtgttgtccatgcaaaagttctagcttcaccgttcggaatcgatgtttcttccttagacagttagaccattggcagttgtttttatgtgtgt

SEQ ID NO: 3834 - DNA, 655 bp, Arabidopsis thaliana landsberg
actctactttggagagaatcagattaactgttatctgcttgttccgcaaacgtaaaccgacgttttgtgtaaatcacaaaatgcctgcgccattgaaaatcggttttcgtaaaatcgaaaccgacgtttctcaccaaagctgtaaaccatgtttttccgttaaaaatagtgtatgaaaatacaacttttatcttcaaaaaataacgaaggacaaaaagactgctaagatcgatgaaacgacgtataagaagaaaagaaagagtggattctaaagtccaactccgtagataaacaatttgtttcagccaaacataaataacagatctaaacatcaataatgttttcttctgtacacagtacatgataagccaaggattctacggtgggccgggcctagtagtatgtacgaaggaaaaaaaggaaagtatatatatggtaaggagacgatcgaaccaacgaaagagtctcgagatggcgccacctccaacgtgctatgaaaagtaacccaagcagacccttctgcttagcgtatctcactttggtcaatatgctcttctcactgccgtacccgatccaagttgtcccggcgtagcaatagtctccgaccatcatctcatcatcgcccgtcgtcgctccgttctttactatccacgtc

SEQ ID NO: 3835 - DNA, 2438 bp, Arabidopsis thaliana landsberg
  unsure (1)..(2438): unsure at all n locations
gggtggactttaataccacctttgctaccgatgggcgttcccgggaactcaacgcaacaacggacctgtatcactaatccgccattcattccgtggataccaggaagcaacctccttaacggtctaaccgatccccgagcaccagtcgatccgcgtaacgtcgtggatattgaaacattccgcatatacgaatgcacctaggagtgagcgatgctcccgacatagattgcgagatcgaagaaaacaggtgcaccccattcacggataggatcgctcgttttctcatccgagacgtcgagagcctctgtttcccggaatacgacggaacgagcgacccaaagactcacctgagattcttccgtacctgacagacgaagaaaatgaagcaggtcattgccgtttcttcgcagaaaacctcgaggtcacgccctcgaattgtttgctagcctagaagggaactttattgataccttcgaccagctcgccgccgctttcttaaaacagtattcggtacttatcgaacacaggacgtctgaagccgacctctgaagtcttactcaacttcagaacgaatccctgcgatcttacgtcgaaacattcaaagcagtctaataaaaaattgcaaacctaaacgaagaggtagccatagcagcccttcgtaacagtctgtggttctcctctaggttccgtgaggaactcactgtcaggaaaccggtctctttagacgatgtccttcacaaagctctccacttcgccaaagccgaagaggagctcgctgtgctggccttacgattcaaagaatctaaaacgcaaaacgctccccttgcaattaaaaaacccttcaaaaaggaaaaccaaacgcaagggcagcataccttattcgcaatagaagaggcagctgaggacgagaggccagaacttgacctcggaaaatattgcaagtaccacaacaaaagaggacattccaccgaggtaaccttacacgaactcaacgtcgatccgacctaccgacctataaagcagaaacgtcgcaagctaggtcccgaaagggctaaagctgtgcacgatgagatcgatcgtttgttcaagatcggatcgataagagaagtaaaataccctgactggctcgccaacccggtcctcgttaaaaacaaaaccgggaagtggagagtatgcatcgactttatggacctgaataaggcatgtcctaaagacagtttcccactaccacatattgaccgactggtcaaagccaccgcgggacacgaactattgtccttcatggatgcattctccgggtacaaccaaatacttatgcgtncagatgaccaagaaaaaacagcttttattactgaccgaggcacctactgttataaagtaatgccctttggtttaaaaaacgctggagctacttaccaaagattggtgaacagaatgttcgctaaccagctaggtaaaacgatagagctctatatcgacgacatgctggtcaagtcagctcgcgaaaaagaccacctcccgcaattaagagaatgcttcaaaatcctaaacaaattcgagatgaagctaaacacagagaaatgctctttcggagttccctcaggagaattcctcggatacctagtaacccagagaggcatcgaggccaatcctaagcagattgcagccttcatcgacatgccatcgctaaaaacggcacgggaggtccaacgactgaccgaccgtatcgccgtcctcaacaggttcatatccaggtctaccgataaatgcgtccttttctatcagctcctccgaaaggataaaaagttcgattggaatgaggacagcgaacaagccttcaaacaattgaaagcatacctgtccgaaccacccatactcgcaaaacccaaagaaggagaaccgttgtacctgtacacgacagtctcccgaacctcgataagcagtgtcctggtgagagaaaatcacgaaggacaaaaaccgatctattacgtgagtaaaacgttgatagacgctgaaacccattatccagcaatggaaaaactggcactggccgtagtcatgtcagctcgaaaactgagaccatatttccaatcacaccccatagtgtaatgacgtaccaaccaatccgaaccattctgcatagtccggcccaatcaggatgacttgcgaaatgggccatagagttaagcgagtacgatatagaatatcgcaccaaaaccagctagaatcggaatacaactttgtaattgagctccagttagcggaactggatggaaccaactataataagaaatggctcctccatgtcgacggctcctccattcgacaaggatccagagtcggaatacaactcacctcccccatcggggaagtcatggaacaatcgttccgacttggatcaacgcaccaaataacgagtttgagtacgaagccctcat

SEQ ID NO: 3836 - DNA, 1288 bp, Arabidopsis thaliana landsberg
ctccaaccactcgaagtggcttctctgtctagatccttctatctttgttgctgttccttaaaacaagccattactaggtatagatctgggaattcgttgattggatttgcatagtctcgccggtgtctgttcgtgtttcctcaacgttgactttccccaatctcacttttttctttaaaagtctattcattaccaaggaactctacgtccggatgatttcgtgaatttgaatgactaatcaattccttgatacattaatctgaataagttgcgattgtcaaaaatgacttttttgcttgttctcactgttaaggtacctgttggaagagctacccttggccgtatcatgaatgtgcttggagaacccattgacgagagaggcgaaatcagtaagaagtcttagccacacccacacttaatttatgtctcacattctgcaaacttgtcatgacaatacgttcttgctgttactcagagaccgagcattacttacctattcacagagatgctccggctttggttgatctagccactgggcaagagatcctggccactggtattaaggtagattctgagtcctagctctgcactgttcccacaggtcacatgtgttgtttcttatttcgaggtgattcttcgttttacttttcaggttgttgatcttcttgctccttaccaaagaggaggaaagattggtctctttggcggtgctggtgttgggaaaactgtgcttattatggagctgatcaacaatgttgccaaagctcatggtctgtttaccacaagttgttctgaccgtattagtctctctgtttctatttattaagtggtgcttcttctgatgaataggtgggttctctgtgtttgctggtgtgggggaacgaacccgtgagggcaatgacttgtacagagaaatgattgagagtggtgtcatcaagctaggcgagaagcaggtttcaattcattttaattactcttcaccttgctttgttctgaaaacggcatttgatttaatttgttactcaattctctctgttttcctgtcttaacagtctgagagcaagtgtgctctagtgtacggacaaatgaatgagcccccgggtgcccgtgcccgtgttggactgactggtttgactgttgccgagtatttccgtgatgctgaaggccaagacgttttgcttttcattgacaacattttccgtttcactcaggtgagccttgttcctagctttgtcctattactcagcccctgtgtgccatttatgcattgtacttggtatactctttt

SEQ ID NO: 3837 - DNA, 2002 bp, Arabidopsis thaliana landsberg
ttttatttctccaatgctttcgtttttaatcttacaggactgatttcactagtaagcctagtggtggagatatactacgtattgaaacactctatcacgctagtaaagaaaagacagagatctacattcttggacagataatttggttacaacatttggttacaaaagctaagagcgacgctcgaggaggtcctagactttcttctatcaagtctccattggatactacgaaccagcaattgatatgtgaaccactcagtgtcccaatagtaacagatgaggagcaaaagatgttacaagaggcaagcaagagaaagagaactccatgtgttagcaagagtcaggattttgattctgagtactcgcgggcaagaaagtgtgaccctttgagcaaaagcagtgagtattttcgtggagtgagaagaagcaaatcagctgcagtgaagcggtattcttcgggttttccgcttcttgactttgctattgacaaggaaaaagtgttggatgtgatcgatcgggttgatgtgccaagagattataaagcattgttaaaagaaggtagcttgagcttctaatggagagttgtgtgttttgtagggtctctgccaaagcacagaaccggcttctgattcatacatgtttggttgtgtatataaaagcataaaagaaagggtatggaagaagctgtaatgtgacgtaatgttgttagatcatttgcaatatttcaatatagtgatacattttcaggcatgggatgttatactgcttgcgatgggtaaatgatgatgatgaagatcaccataccacttgcacaccattctatgaatcaaaataacataagagactggcatcaagaaatcttaaacacatattgcaattagaatctgcaagatttttcatctttatttcaacaaaggaagcaaaacaaccaaaaatttgattaacagtgaatggatctgttcagtatcatcttgccagctctcatggaatttgaaccaaaagaaactataattacggaactcagattccgtttggtcggagagtcgcacgcattggtttttttttttcgttattgtcaggaaaaaaaagagaagtattaagcatgaaagatctgaatcaatctcttaagctgctgactctttagcgatcttctctgcctttgcaaccacctcatcgatacctccaaccatgtaaaacgattgttcggaaagatcatcgtacttgccatccaacaaaccctgaaacaaacacaagatgatttaggtcagttactctacataatccattttgataacaacaaatctaactatggcaactagatatagacatcacaaaggagtcttctatactaaaagccagttgtaggtcaacttcaaatccacagacatgttaagggagcattgaaagcttataggaactcacagcaaaatgtttcaaaatcataagattatagcaaaaacttgttgtgtgtatcatacctggaaactgttgatattttctttaaggtcgacatattttccaggggcaccagtgaagatctcagcaacgtggaacggctgactcaagaatctctggatcttacgggcacgggcaacagtcaacttgtcatcttcacttagctcatccatacccaaaattgcaataatatcttgcaagttcttgtagttctgtagaactttctgcacgccacgagccgtgttgtaatgctcctctcccagaatgtgaggtgacagcatacgggatgttgaatccaaaggatccacagcagggtagataccaagctcagaaatcttcacatttacaaaatagaagtatctagatgtcacctttatgagatttacacaagtacattgtaagaagcatcagaaagacacaaattcacacctgtcttgagagcacagttgtggcgtccaagtgagcaaaagttgtagcaggagcaggatcagtcaaatcatcagcaggtacatagatggcttggactgaggtgatagaccctttcttg

SEQ ID NO: 3838 - DNA, 2099 bp, Arabidopsis thaliana landsberg
  unsure (1)..(2099): unsure at all n locations
aatgacatacatcgtataaattaacaagaagttgctagacaatgattcgtgttataatattaggatcgcaaaacctaaatattcttcagttaaccatgttaacagtttctgtgagagagtagtattcacaccttgtcttgtgctgctgcagcaaaggcgattgtcgtctatatatgttgcctggacgccaatcatccatgatccaatggtggtatcatcaaacgcatatgtcttcaacaatccactgcatttatatatatatacacaccatggtagaaaatatacaatgattacaaaccaagctttgtttgacatatatactcatcttctgccaaattgtgaaacnnnnnnnnnnnnnnnnnnnnnnnngagccagattctttgagagtattaccagcgaaccagttgcatgacggaaatacctaaataaatcgaacaaagaaactgagtacacacaacgaaggtcacaagggcttgacataaacgagaagacctatgaggtataagacacttacgatttgtcgtccccaaatttccaccactcaggctcataccattgacttcccctgaataccaagaaacaacccatttaatatgagaatgagaatgttaattatgagacttttgggcaattgtcacagctaggaaatctcaattatgtgaactgaagatagttgagaatatacgaactcttcagtaatcacatctccagatttcatgcacccaatgtaagcaccatcttgactacgacgactttcaagaagcgcaatcatcccctctgttagaccgaaaacatttgttactcaaagacatcgttgataccctgattggatcaaacatagctttgcaagacaaagagatgaaagaggaagtactaccaagatccaagtcaacgttgtcatcaactttgacataaaactctgcgtcccaattctgaacagcagcactgtagaagaacttcactttcttcggtaactcttcttgggcttcctcgtgattctcctaataatccatcatatttcgagagaaaaatgtagattggaagccacatcagtgagaagaaattcatatatgaaggcaatgaaaagaagcaaaagagttatccttacttacaagaatcaaaaagtctttagttgcacgattttcttcgtcaattttcctatctaggctatcacctcggttagcactggaaatttataaagcattaacattagaccatgaaaaactttaaaattctaaagaaatgaagaataaagtgagtaggaaaacctccgaccaatcacaaagcgtatgacaactcctctttcctcaagttttttaagagcatcatctaaatagaagtaaatttcataagagaatacttaatatattgtaccaaatatttttaatgaaacattgttaaatgaccatacaaagcaggggtgataattctaccttggggcatccaagagcctctaaatttattgggcttcaagtgactcacatagcctgcgtaaactactataacagctagcatttttttccctgaagaagagacactttcctgatttttaagatagccttgactcttagccagagtcaactccatttcagtttcaacaattctcctctcaagatctctaataaacaacgagtacataatctattattacaagcacacaacataaaccacaatgcatcttacacaatcaaccaaaaccaacttacttgcatcctaggaccataagcttgtcatccaccgtaagaaccttaggcttctacaccctccaagaacattatcaattgataaggaattaagaaacaaacaacatttcagtagagcaaaagaaatggcccaaacctgatcataactcttcttaagtatattattgagtaccactctattctctgcatcttgccataacctaatcacaagaaaaatgttcaattacgacaccagaatatttgacaatcgaattctaagaactaatctagagtcattggagattcgattatcaatggggaaaaacgaagcacaggtacctgccagcgacgtagagccaagcgacgcaagagaagaaagccattataaccgaagtcttagaggaactctgagaaga

SEQ ID NO: 3839 - DNA, 709 bp, Arabidopsis thaliana landsberg
caatttaataaataggaacagagagactaataaggtcagaacaacttgtgctaaacagaccatgagctttggcaacattgttgatcagctccataataagcacagttttcccaacaccagcaccgccaaagagaccaatctttcctcctctttggtaaggagcaagaagatcaacaacctgaaaaggaaaaactaaatatcagctcggaacacgaaagacaacacatgtgacctgtgggaacagtgcagagctaggacccagaatctaccttaataccagtggccaggatctcttgcccagtagctagatcaaccaaagccggtgcatctctgtgaataggtaagtaatgttcggtctctgaacaacagcaagaacatattgtcatgacaagtttgcagaatgtgagacattaattaagtgtggctgagacttcttactaatttcgcctctttcgtcaataggttctccaagaacattcatgatacgtccaagagtagcccttccgacaggtaccttaaaagtgagaacaagccaaatgtcatattaccattatcgcaagttagacagataactagaaggaatattaagggcaatatcaaatgattagtcatccaaaatcatctggacatagagttctctggaaatgaatagacttttgacgtaaaaggtgtaattgggaaaagtcaacgtagaggataaggaggacac

SEQ ID NO: 3840 - DNA, 3608 bp, Arabidopsis thaliana landsberg
  unsure (1)..(3608): unsure at all n locations
gatttgaaagctcgggagttgaatctaatgttttgttatttttatgaacattgcgaacttcttggagaacgttggaaagaattgacgatacacatctccacggtcctaactcctaaatgctcaaaacattgctgacatatcaaagatgaaagatctactccaaatggaactaaggatgcaacatgtagagcaactgctactgcatttaaaactatgtcaaaatggaggcaaaggattaagattcaaggaagttagttaaagggtacatgtgaagaatcgattatgatttgtggaagttgttcactttcataattcttataccataaatccataatcattgcaaagtgataacacagttgagagagactaacctgagaagttagctttgtatgcaactgctttctcaagatatgcgccattgaaggtcgaaccgctgaaatcagactctctcatgtcggcagaagtaaagttggctcttctgcaatatcagtaagctacttcagttcacacaattagaacacaaatcttgctttgatctttattggggtttgctaattcaatattccattcattaaaaattgagcaaaccacaaaactcttgcttcctaaagattaaagctttaaactctatcatgacaaactacagtcaaatttttacctgaaattttcattggagtgaactgttttgctgcaaaagaaacagagttcatctcaacgaactatcagtctatcaccatcaaaaacaaatgaaattctttaaagaactttaagacaagaactctaaatgatacctgagatcagcagaaccgtactgagcagccgagccaatcccaaactcgccacgtgtatcggcctcgaacctgttaagctctgccatggcgcggaacgccggagctcgaggctataacagccgccgccattgctgcagacaaaatcctcttccatgtatttgactcagcgctggaacaacaaccttcccttttcgaaaaacaattcaatcccctaagtttctaagacactaagatttgcaaataacaagaaaaacattgagattctatgttttgctagtgaaagtattcgagtctcactcacctagtgttccatgaatctttgatttctaagttacgaacgggaacttagctgtagacgtctcaatgggtatctctgaaaatggtaaggagatcttgagacagaagatgaggatctcgaaatgtcaagtgacttcataggtagaggagatagagaagagaaagccattgttaaaagtctaaaactttgcaggggagaaatgatacattcaactttgtagaagaagagatgaattttgcacgtgtgaaggatttcgaactttatccactttgcttgggcaaggtgtgcacacgtatgtcacttatgttcacctgttttgttcttggttttctattctcttccaattccaagtctttcacaatttactttgactttgttcttccttgtgacaaagaacacagaagcagtagaaacaaaacaaatcagatctttagtttggctttcaacaaaattcagtaacaaggtcatgaacagaaacttattgctttgcttatataccgatgtctgcgtgaaatgaatccaactaaaaaaaatcacaagaatttcacaacgcaaactactttagaatgtgtattactcttcgaggttttccggattgaagtcggggtctacaggtgcaccgttcttgatctttgcttgaagctctaaactcttgggaaatataatctcaattcctaaaccttgtgtagagaaatacctctccaacaatatctgtaacataagattcaataagaaagatagcagttacatttcacgaactcgagattgtttactgttcgccttaccacagcagcatatgcatctgatctgttctgtctttcactcttgctaagtcccctgaaataccataatgctcaaacattaattcagacacaccgtaatcgaaattttcatgaaagttcagtgatttaaggttgttgatagatagataccaatgtacataaaaagaaaaactttatagacatcaaaaccagaattgctaaactaagaacagagagagattcagaaacgaaactaacattacaatcattctatctgaagcttctgacgttgttccatgttcatcaaatacataaactctccaacccctgcaaagcacagaactttaccaatttcatcacacttcatcgatatataaatgtgtgagtgtgagtgtgcttcacctctcggcggcttgaatagcgagccgtccagcaacagaacgaattttgttcgattgaatcgtctctttcccatcagaagatctcggcaacccaattataaattcatcagcctcttcttcttcagcaatttctaaaagcctggtctcgagtttttgccctctcgatttcaaaacctaatagtaatacccaattcatatcaacttcattactgaatttgaaaacgcaacgaggtcgagaaatttcgaaagttaccgtgagaggtttaacggtgtagcctttactaatagcgattccggttcgagataaacctaaatctacgccgagactgaacccacctctccaattccggtctattttccggcgaacagcattaggagggatttcgtcaattgacgtcactgccctcaacggtagaggataattacgatatcctataggagataagcgatgaacgagagaggtatttacgtacttttgagttctgaatgaaattgctgcggaagaaaaagagtgaagagaacacattgctacagagagcaaaaagaagacgaacagtattacagtagttcgttccatcgccaaaaaaaagaagctctgtttctcaaaccctctgcgctaatccgaaggttctgacttttaatatattacatgaaaaaaactattaaacaaatttatttctccaaaattgtaaattgtgataatgatgtttcagtgccttttttttctaaatcaaatatcaaataaaatcggaaaaaaacattaattattacagataaatctatgtataaaaaatgagaaggaagtaaaaataatcaggtacgggagagagcacggacagcttcgtcagagtaaggatgaataaaagcactgttcatttgccaaactgtaaacgacgccgtaaccgtcgcatcaagagcattattgaacaagaagagcttggctgctccatagattgcagttgttggatagactcttgatgttatacatgttcttccaccttgtccgaatgcttctactatcgaatgatccacctattgaaaataacaaaaacataatgtaatgagttaatggaattagtatatcaaagtatataaggttaatatatgattcagttatttaccaaaattctcatggtcaatttctccccttttagaaccggtacgatgctaccgtatattggtttaacgacatcgtttgcaacagatgacctgtcataggaaagtgtggtgtttacgtaaccgaatgtattatggcatagattgtaatgtgtagtgattntaagacattgataccttgaggtgtctgtgcagaagaaagttttgagctctgaatctgttcccttagctacatagaagt

SEQ ID NO: 3841 - DNA, 1390 bp, Arabidopsis thaliana landsberg
gttaagtacaagatgggtattctgaaccaaaagaatccggccaaaagtgtgtggaaggagtcatctatatgtaccaagacatggaataatttcgttctacagtttatgaaggtgtctgacatgttggaggctgatgctgggtttcttgtgcgtgacacagttgtgtttgtgtgtgaaatattggattgttgtccttggtttgagttttcagacctagaggttagtttatactttatttattcaataacaagataataaaaactcttcaattgtgtatatattttctgcatcgtggagtttttcctttctttcttgcacacttggaaaccttttatgttattgaaatcttacattatggattctacgtttcttctattcgtctgccaggtactggcttcagatgatgaccaagatgccttaaccactgatcctgatgaaattattgattctgaggaaagtgagggcataagcggagatgaggaagacacatttcgagattttctttcccgagctggattccatctcacgtttggggagaatccttcacaaccacaagttactctccgtgagaagcttctaatggatgcgggtgcaattgctgggtttcttactggcttgcgtgtatatcttgatgacccaactaaagtaaagcgtttacttcttccgactaaaatatcttgtaatgatagaagcaagctaataaagagtgatgaatcttcccctagcctaatgaatttgctgatgggtgttaaagttctacagcaagccattattgatttacttctagatattatggttgagtgttgccaaccttcagaggaaggctctcactctgagccgtctttattatccccaaagacagatggttgcgtggctgcaacttcatcggagtcaacaagggaacgaggagcagcagaaccttcgcaacatcttgttgacgaaagatttaaatctgatacagatgctaccctcagtacctcagctgtaccaagctcagagatgaatgggatcgatttgcttgagaaagcccttgcaatagagcctatgtctcctcctaccacatctgctgggcaatcttctgatgcttcagtccaatcaaaggtggggctctcatactgcttaaatctatctaccagcgttttgttttgctccgttgtttttctgaccatctggttaaatttttggtctttagacaaaatggccggaacagtctgaggagctattgggactgattgtgaattcacttaaaacccttgatgcggctgttccacaaggttgtccagagcctagacgacgaccacactctgctcaaaagattgctcttgttttagacagagcacccgaacatttgcaaccagatttagttagtctggttcccaaattggttgag

SEQ ID NO: 3842 - DNA, 1739 bp, Arabidopsis thaliana landsberg
gcagtttcattgttcatcagatttatgcttaatatgggtttctgaggcagatctggtcactctcgattgatgcttctagtttgcatccattgaaatgatcaggcattagcatgtctgttgtatcttctatcatgtgttattgttgactgttgaaatcgttagttgatttatgtttgaccactttctttggacttggtgtctttttatgttccttgaataaagtggaatgttttgcaactacaattgttagcttctacaagtttgaatgctattgttttgactgttgctttaagaatgatgttatgcacaaggcttatctgtttctcctttgcaactactataagctaatcaagtaatcgtcaatgcagaaaatgggagattctacggggtgtgggaaaggaggactaatgattccaaatcataagtctgctaattcttataacctctcccttgagttgtctcttgttgactctgtttgggattgtaatgttcggaccatgaggtattcctatatacctgagtggttgtagtctttgaaatcctcttagacaacgagtttagtgcattttactttagttggaatcaaagagttatagcaagcaataatggatcacacgttgtgcaagcaagttgttcagccagttactaggaaagtgaagaagcatggtaaagatgaatttgatcgtatcaaacaagctgagaagaaaaagagacgtttggagaaagctcttgctacttctgcagccattcgggctgagcttgaaaagaagaagcagaagagattggaagaacaacaaaggttagatgaagaaggagctgcaattgcagaagctgtcgctctgcacgtcctactgggcgaagattctgatgattcatctcgagtcaagtttggcgaagaaacgggtttcggaatggatctgtttagagatgaaagaaccaactatgttcctcgccaaagttgtgctagctatgcggttcaagggattgggtttgtgtcaaatggttatggactaggagatagtaactggtcagtgtcatataagccattcatgaaggatgtctgggataacaacatggtaatatctgcagatttgattgctgctcaggctgtttcgtcactacagatatctgaggacgctgataggaacgcttatgtcttcaagacgatgttcgggggatgacaaaagccatcgtgccaaacttggctgcagaaacaagtgtttgctatgagtagagttgcagtttttttctttattctagaaccccttttggtgtgaaaattcctcctcgttgtttatcttttgatgttagactagctgaaaagatgttttctgaattctctttgtaacattcacaaatacgttctaagttttatacagattacagagtacctcttgaatcacgtgattatccaaattcagtcacaatttctagtgtattgagactaataaaccttttgatgttaagatttgacagtaacaagcgagaatgatcttaacaaaagcacacgtgagctaaaaactcaagaaaaaatgacaggttccaacgttgatacagagtaatgggtacagacgaggagaatagtgcgtgtgactcttagaccggtggatatacagctaaccgaatgcattgtggtggatcggtacggttgctactgaaacagttgaacatcagagtcacggctttgtttcttctgaatggtgactgcatgatttgcatcttcatctttggtccctatc

SEQ ID NO: 3843 - DNA, 3853 bp, Arabidopsis thaliana landsberg
  unsure (1)..(3853): unsure at all n locations
tttactcgtgtttacactggttagctacttacacaattagcgaagattatctatatatatcagtgagaactgattactgacattatatatttatatgttatagagacaagaaccaaaaataggggaaaactcagctgccagagtaagtaatttatattactcatgaagagtttctttgtattgtaatttctgatgaggtgtttctgatcaactattttgtagagtgtaaacaaaagatcacaacctaagtgtgtattggttgattggtctggtggtgatgaagacgttggtgagggacgtattctatcttctgatcctgatgacttagtcaatgactgtcgtctaggccctacagatcttaaagtgttggttaaaacagctactaaagcagatgcatttctctggagaccatcaactaagatgtttactatggaggaagcagttggacatattattgcatggccagcgactaagtgtgttctgttggacaaggaaatccaaatagaagacattgcgcctttggtaagtttcttatcgtttcttcgatgtactcagcctatttatgagttggtattggaggagctgttttctaaatgtttgtgacatggcctacgagcaaactctccgaataaatgtaaactgctggatttgtctaatgatgatgtgattgttgctgagggtcgatggcagacacaagaagaaactgcaatggttaatggactacctcttggaccaaaggcagtgaaggcatttgtggattcagtgcttcaaccagaaacatccatatggaggcctacaatggatatgacctaccttgaagactgtttgatggcttttgtatcatggcctgtcaacaaagttgtcctcagatacctcatctacaactcagcattctggctcaactgataaaccagctcaatctaaatctgcaaaaggagcaaagtctacagccacagtttctaaatcagcagaaactacctctaannnnnnnnnnnnnnnnnnnnnntctcctattgaggatacaacatgtccaatctctaaggtagatattttcagttgtaagatgtttcgttctttctgttgttgcattgtatccctaattcttagtatttgttgcaaacatagcagagtatcaatgtcgatgcgtccaaggtaaataaaaagtgcagattaatggacattaccggaaagaaacgggttgtagctgagggacgatgggcaacaagcgatccagctcacaaggttcactttgttcccttgggtaataatgcagttaaagtgtgggttgatatcgtgaaggtaagcaaggcagaagtttggaggccatcagaggagatcgtcatattggaggatgcacttggctcagttatagcatggccagaggataaagtgataatgacttgatttggagtgaaacttgtcttgaaactacatgctgcttctaattgtttggattataagtgaaacttgtcttgaaacttgtatgattaaactattgtgttgtatgttttgaattacataaaacaggatttggcaattttataaatcaggctttttgtcaattcaaattaacaagaaaccatcgcatctaataagctgctataaaaatggcacatgttcaaaatgctatcgtagagtatcatagcaataaaaatatgtaattaaatagttttaaataaataattaaacgctataacatgctataatatagcacaatctgaagcaacaagaaaataacagagcacactgaaatatagctatggtttagtcacctaacatagcatggataatggatgattaaataatttaaaaaaataagaaatccttattaccaaagcttttcgatactgctattgtcgaactctctaacatagtatatgtatttaacgctatagtatgtaaggcacctaccataacaggggcataagatagcgttcatgaaaacgctatgtatcactattcatagcgtttctctggtgttgacaatgtcgatatttgttgtagtgtaacagtttttggttttgaatcgtataacaaggaagcactactttacttttccagatctggttgtggttctagttttcttttcaatcatacacatgacatgtagtcatatttcacttcaaaacgctaaccaagattcttcttgcttcttaaactattatagtatatttgctctttaacactaaacctaaactctacaccataaatcccaaaacctaaaatctaacccctaaaccctaaaccctaaatactaactcctaaaccttaaaccttaaactcgtaacgctaaacccttaaacctaaacactaaaactcaaaccatagacccgaaactttaaaacctaaatcctactttagcttccggaatccggttgcggttttagttcttatactcattgatacacaaagcatctagtcatatttgactactaattttggattaaaattttgattcaaagacacatcatatgcatcgattccagtagaccacaactcttttagctcctcaataagaggttggaggaagacatcaagactagctcgaggatgatttggctcaacattcaaaattgtaagaaataagtactttgtattcatgcacatactagggggtaaattatatggagtcaggatcacaggccacaacgaatgattacgagacatgccaaacggattgaacccatcagtacacaacccgagataaacgttacgaggttcttccgcaaaccggggatgtaactttttaaaatatctccactctgccgcatctgaaggatgattcatttctccctcctttgattgatgctcagcatgccatcgcattgctgcagctgtcttgtggctctgatacattctttttaaccggtctccaataggtagataccacatacgactatatggtactttggttcgtcgacggtcatctttaggcttccatctttatgcgccacaaaatcgacaatgatattcttgttcgtcttctttccagaaaagcatacaattgttcgagcaaacatcaatcgtatgatatggaagtcctaaattgcgcatcaacttttcggtttggtaatgtgaactggtagcctggtttccttctggtaaaaaatctgtaaacatttcgcaaacggaatccaccaacttttcactcatattataatccgccttgttctacatgagtcgagatgctaaggataactgcgactggccttcacgacaacaatcgtacaatggagtatttgcaccttctaacaagtcgtaaaatttctttgaatggttacgaaccggttcttcgacattttgataactactatcctgatgataactatcatgatgatagttatcatcaaaccccacgttaaaattaaatgcatcgttcaccatatccacatatggattttctacaacattactcacttcttcatgattcgaactaaaatacgtcatatccgtgtaagtactcgttcctatatccatattcacttcttctccatgcttataccaaacataataatcaggcataaatccttgactaaacaaatgactattaactcttctagatgatgtgtttttcattcttgcatacactacaaggacaatgaaatttcgggtttcctagcgttcaccactccctctagtttcctctaaggtttcctgcaaaacaaatagaatcatgagtaatctagaattactcaatgagtttgggattcccaagaaacgttagtctaaccccacccataaccccacatgcaacatgcaataagataaatatgctaacaaacaatcagagatacgaagagaacgtagcaagcaatagacaaaacactcaagaacttacaagttttcgttagag

SEQ ID NO: 3844 - DNA, 990 bp, Arabidopsis thaliana landsberg
ctacgagtaaaacacaaggggattgataccaaacaaaaagttttcataaactgaatatattagatctggttcaaaactaaaaaatggctgacaaaacaaaacaatgtcaaaacaagaaagaaagataagtgaagagagaagagtgggctactctatagctccattcaacgtctgcctccaccaccacccatcttagcagccttgggtgcagcactcttggggatatttcccttcacttgtgacttctgttgctttgatgcatactcgaccttctttgccttcttctcgtccttggtcttcttgattctctccttgatctcactgcataatcatcagattagctttgaatcaatcacatttcagtttcaaaaaaaaattgatgtatatagtgactgtcttcggggaaagaaacaaaccgtagggcagcttctctagcggcatcacgaacttcaggtttctctgctcgcttcttctgaataacctccaaagtagcaccgacaatcgaccttgagtaaggcttcttagttgcacgtctccttctcttcacagcctcttgtgctgcgtcctgtaagaagacagaaaacaaagatcacaacagaattcaatagtactaaatcatgaaaacaagaagcaactaaaaaaagaaacattaccttcttgtgctgctttcggtacatagcagtccagcaaagcttagatggcttcaacttgttgtggaaatacctcttacatttggagttgagaaacaaaaacacctaatacaaccataaaaaccaaagatgatttaatcaatacagatacatagtaacaacagataagactcttcttaacaagtagagcacacatttaaccaaaataaagtacctgagagtccgatcggataaatctgatccctctaccagggtaaattttctggccactgaatcggcaaagctcagtcctacaatacaaacataatcaatggtttagtgataatccaaaaccaacccg

SEQ ID NO: 3845 - DNA, 519 bp, Arabidopsis thaliana landsberg
ctcgcaacatgtcttccaaaatctgattcaccctttctgtctggccatcggtttggggatgataggctgagcttcgtatgacctgggtcccaagtgattcctacaattgttcccaaaatcgtgccacgaatggtgctcctctgtccgagactatagtccttggtatcccatgcagacgaactatctggtcaatgtagatttctgcatacttctctatcctgtgggtggtgtgtactggcaagaaatgagcagtcttagttaatctgtccacaataacccaaatagaatcatggtgcctggatgtattgggcaatcccactataaagtccatgcaaatgtcctcccatttccaagatggtatgggaaggggttgcaaaggacctgctatcttcaagtgactagcttttatcctctggaaagtgtcacactcagatacgtacttggcaatttccctcttcattctggtccacaataaaaagttctgagatcatggtacatcttgttgctaccagggtgcat

SEQ ID NO: 3846 - DNA, 6639 bp, Arabidopsis thaliana landsberg
tctgactcgttgtgttttgtaatctgacttcattagtgttgtttgggtcccaatccaattccccatgtccggcacatgctcgcctttctcggtttcacgcccattcaaatctttcccttttcataaatttcaccatcacggttaacggtaattcgttggtgtatcttttcaaaaagcgcctcatctttacttttgtttgtttgttagattgcttcatatttttcattttcttattcaactctttgtttttccttgaacatcacacttcaaaagaccaaaactagtggaacccatataccgcaccatgggggcacgctcttgtgttattgccataacagaacccatcatccttctgatttgtttaccttaagccacaacttaaaccctaaacctccacatttcaaacccttttctctcctacatgtatcactgcttcacttccacttttcatcaacctcaagttcccaagccctaactatatgtatatataaataactctatatttgattcattaatttagggacaccaaatctattcaacctaaaagccttcttttcccctatattgaccaactttttagcgaatcagaagaggaatggatgaggtatctcgttctcatacaccgcaatttctatcaagtgatcatcagcactatcaccatcaaaacgctggacgacaaaaacgcggcagagaagaagaaggagttgaacccaacaatataggggaagacctagccacctttccttccggagaagagaatatcaagaagagaaggccacgtggcagacctgctggttccaagaacaaacccaaagcaccaatcatagtcactcgcgactccgcgaacgccttcagatgtcacgtcatggagataaccaacgcctgcgatgtaatggaaagcctagccgtcttcgctagacgccgtcagcgtggcgtttgcgtcttgaccggaaacggggccgttacaaacgtcaccgttagacaacctggcggaggcgtcgtcagtttacacggacggtttgagattctttctctctcgggttcgtttcttcctccaccggcaccaccagctgcgtctggtttaaaggtttacttagccggtggtcaaggtcaagtgatcggaggcagtgtggtgggaccgcttacggcatcaagtccggtggtcgttatggcagcttcatttggaaacgcatcttacgagaggctgccactagaggaggaggaggaaactgaaagaaaaatagatggaaacgcggctagggcgattggaacgcaaacgcagaaacagttaatgcaagatgcaacatcgtttattgggtcgccgtcgaatttaattaactctgtttcgttgccaggtgaagcttattggggaacgcaacgaccgtctttctaagataatatcattgataatataagtttcgtcttcttattctttttcactttttacctttttcactttcttaggttttgttttaacgtttgattaatacctgaaggtttttggaaaattttcgatcggataaaaggatttatgttgcgagccgaaacgcaacggtctgatctcggattgatctttatatatataggggctagtgttgtgatcttccttgagttgatgtttataatgtagtagttgatattgaatgaaatcttcatgttttttgataaatgattatagcttgatcaagatttagaagttagcatagaaaaatgcatgagaagactggttaaaattttcgtgcacaagtagctaaagagaataatcttgcttccttgtttaatggcaagacttgggaacaagatgattacattggcatacacttttctagacttttttctaggttatagacacaagtcaatactttgtattctagttacatttataaaactaaaatttcgattgtaaactatagaacaaaaaattatgaaaatcaataattgtaccctggttaacttataactaagaacatccccaacgatatatcttagcctaatcttagcaaacatcttagcattaggttaagaagtaattcgttcttaaccattgaagatgctctaagagcttaaaaaaattctcctaaacaaaaatatgaatcgaaatcctatcagaaaaagtctagcccggaaatctctggacgtgtgggccgaatctaaaccctcttaaagcccaatttgattaggatcaagagaaaggggaagccctaaagattggcctcctgcgttcatcatcaccttctctcccgccgctttctttcatctttacaaaaccgattacttttgtcggaatctgacgtcagcatacctgctaccacttccagagttcaatcgatcttcgcctcgttgaaacgttttccctcttcgattatcaacagtgtctccactcgtatcatcaccgcctccaactaattttgccatctctctcgttgttccaatttgattctactagtgagctccgatttaatttagggttttgaaagatgtcagttttgaaaaattacggcttgatctccattgattctgccctccattttcctcgatcaaatcaattgcagagctataagaggttactctctctctctctctctctatgcctaatcttattgggattatagttactggtattggatttggtttcgacagctctctagtgtaattgaaatttttgtatcacaggtagaacaatgaatatattgagttggttactaaagcaataactttttctcttgaagaatcggatttgtagttgtgtttatatctgttgatcgattggctagattaatgcttagacattgccttatgatctctgagtgattgatttatttgctcatcaaaccagaaggaatgcaaaatgggtctctccaatagcagctgttgtacctaacttccatcttcctatgcgcagtctcgaggataaaaacaggtgcatcttctattccttctcatgtttactattgtttttgttcatacttcagcagctatctcttgtatttttgtgttggcaggacaaacacagacgacataaggtcccttagagtgatcacagccattaagacaccgtatttacctgatggaagattcgacctccaagcatacgatgacttagtcaacacgcagatagaaaacggtgctgaaggtgtgattgttggtggtacaactggtgaaggccaattgatgagctgggatgagcacataatgcttatcggccatactgtaaattgttttgggggaaggatcaaagtcattggaaacactggaagtaactcgactagggaagctattcatgccactgagcaaggattcgccatgggaatgcacggggcactgcacattaacccttactatggaaaaacatccattgaaggcatgaatgcgcattttcaaaccgttcttcatatgggaccgactattatatacaacgtgccaggtcgaacgtgccaggatatacctccccaggttatctttaaactctctcagaaccctaatatggctggggttaaggaatgcgttggtaataaccgagttgaagagtatactgagaagggaattgtcgtttggagtggaaatgatgatcagtgccatgattctagatgggatcacggtgccactggagtgatatcggttactagcaatttagttccgggtttgatgaggaagttgatgtttgaaggtagaaactcagcgttgaacgcaaagcttcttcctttaatggattggctattccaagaaccgaatcccattggtgtaaacactgctttggctcagttaggagttgcgaggccggtttttcggttaccttatgtgccattgcctctgtccaaaaggattgagttcgttaaactggtgaaggaaatcggaagggagcattttgtaggagacagagatgttcaggtacttgatgatgatgacttcatcttaatcggtcgatattagagtctcttccctgaagattggttgtgtttatactttcttcgttcagttgttagttatttagctgatgagaaactcacagatggatcaagacttctacttgttgtaatgtttggtctgttacttttggtgatgaatctaatggcttttgcttactctatctctctctccctctcctctctggatgattgtgttttgtctttgcgtgtttgctctgttgtataaaacgacatgatggttgtctgaggtttgggtcgtcggaaacatctctatcacggatcggcatattaagcaacgaaattttttagttgaaagtgatcatggatatgtatgttaatacttggtacatgaaaaagaataatcaaagctttcatagaagagtaaatcacccataaatcattagtttgattttattttagtgccattaaaggttggaaaaggaaagaagaagacgagaagaatcaataaacaaagttcacgaagatcactgaagcaaggaggttgaaacaggggagtattttgggtgaagcagagcaaacagagcattgttttcatggtggagaagaagagctttcttttttaaagcttcattctctcgtatgatgctttgattctctacgaaaagcttcaagttcctcatctccatctccttctgttccttcagtaatcttctcctcctgtttacaatgaaaaagaaagtactgttttatataattcagaaacgaaaatatagtcaatgtctgaggacgcttgatatatgcggagtatgacattgaacctggtgagattaaggatacgaagatgggtttgtgtcttagatttatgtttgatatggtacgaagcagatctcatagttggtgtgtcagtgtctgggaatggtggctctgaagttgtcagacacatcttcttatggttttatcacacaaaacgagctgagtaaactcaatgcaagagtaagctttatatagacgatctataaagctgtagttgtttcttttgagatagagagtgatgaagaaagacaaggcttttgaaggtaatgatggcaaaaggaaactcatgattatagaggggccagagatatgcatgagttcaggacgaagatgatgaagaagaagaccaaaacagactcttctctttctcagactctctgtttcttgttcttgattgaatagttactgtactaatagtgcaaacttagtagaaaacacttgagaggtacatacctaaatcgaccataccaaatcattcaatttcatactaattgattactttagttgtaatcaactacagagaaagatcacatgaaatttggaccaactatgcatgtactacaatttgattttaaaaagttaatccataagcaccttttattttcaaaagaggctcaaaagaaaactcctttaccttaataccaaacccatttcaaaggtcgaagtcttggattcgcggtttggcatctcgtgttcaaaccaggtttccctcataattggggtctaattttaaggaaaaaaccttggttccaaagagacatatatcttgttcctatgtaaaatgaaatctaagcatgtgatatgaatagtagaaaaaaaaaatataattgatctaaggactaggaccactataaaactcttactcatttcttgtgttgatatatttttttgagatgcaaccaaatttgaaagacaaacaagaaaagaaataaagaagggggaagaaaacttatactaataaagactaaattgcaaattgtaggagctagtcaacatccggaattattatcatgcttcaaaatgatcaaagctgttatgattctctacctatattctttactatttttagactaggcattgtccaccacaaacaaaaagatgaaagttattcttcatctcatacaagctaaggcataaaaaacacagaagaaggaatcataaatagcaaacgatttcgtgggtaatttctggagttgctacaatgatgagttttgttttgatgcatacaagtggtccatatcaaaatcaccacgccccttcattactgcaagatggtaccatatgtgaatctctaactagagtagcactcccatgcataatgcgtctctatctatgatatgtaaatattcaaatctttaagcattatacttacattgtcaaccacaaaaacattatcagcaattcctagtttcacagattaggcatgaaatttgaagattaaaagagaatcacctaaaggaatctagtttttcagttgccaagcattacaaaaaagtggtgaggactccacaaattgcagatatgataagctatgttatcggggaaggagctagttgatgcgatcctttggattcaggctcattagacgttcagataatagctttgcatcgagtggttcagacgcaacattatctttcgtgttcttccttttcaccaacattagacaccgtctgaaacaatgaaaaaggcggggtactttgaagcccaaacagtctaaaatgagtgtcgtcttaccaactaataacgacaggctgtgctgataacgtgggctctcttgggctgtgaatataagttaatgggcttatatgaaacctgtattttctattttgaaaagaaagttataaaggacggtggggaccacaagacactctttcgttttctctccacgtggggatttcacaggtttcaagataccaacgggtccatttttttttgggtg

SEQ ID NO: 3847 - DNA, 3567 bp, Arabidopsis thaliana landsberg
gcagcaccatgtccccatggatctagctttgtctattgcaagagatatctcaggggctttgatggagctgcactcaatggatataattcaccgtgacattaaaagcgaaaacgttttgatcgatctggacaatcaaagtgcaaatggagaacccattgtgaagctttgtgattttgatagagctgttccgcttaggtctcacttgcacgggtgctgtattgcccatgtgggaatacctcctcctaatatctgtgtcggcacaccacgttggatgtcccctgaagtcttcagagcaatgcacgaacaaaacttttatggacttgtacgttcctccaaacactgactctcttgttcgtcaacgtttatctttactccttttctcttatgaggttgcttttgttttcgcaggaagtggatatctggtcatttggttgcttaatcttcgagttgttgacactacaaaatccttattttgatttatctgagcttcagattcatgaatcgctacaggtttgtctcactctcacttacatgatcgaaatcttcttaacatcatgagtttaataagtttgttctatcttactcttaaccagaatggcaaaagaccaaagctaccaaagaaactagagacactgatctctgaaacagaggaagaagaatcaacgaacaagctctctgaagtgtttgatctaaccgaatctgacttagacacaatgagatttctgattgacgtgtttcaccagtgcactgaggagtctccttcagaccgtctaaacgcaggagacctccatgaaatgattctttcacggaaaaagagagagtaaaccaatctccttcaggtacttacacttcttcacaaagctcaagcctttaaaaggctttgaagctttaaaagagaaaagatagaaagatttggtcttaagattagatttacggccaagattttgggcctgaagcttcgtaagcttatgggaaccacagatcggtaggtagtaattatttcttgtaatctctgtttgtttcttcattttgtaagcctcaaagcgttcttagattgtatcatttgattctgtagacgccattgtatcattcttcttccaagtttttatttaaacaaagagcatttgaacaatacatatttgatggacaacttttctttaaaccccttcgagattccgttatcttttgtacaatattttttttagcgtgcataaatatatggattgaagattttgagatagatgtgatgtgaaccatagtattatacatgaaagaaaatttgaaaaagttaactatcgagattccgaggaagatgtcaccggagatgtccttggaaccggcacgggaaactcatgaatctcatcaatccaaggattagtcttcttcttcttctccttggacggatcgatagttctcaaagctctccaaaccgcactattacacttaaaaccggatccaaaagcaatctgccaagtcctatctcctctcttaatccttcctttagcctcactatacgcaagctcataccaaagcgagctactcgaagtatttccaaaccggttcaaagtcatcctcgaaggttccatatgccactcagataaatccaaattcttctcaatctcatcgagcactgctctgcctcccgcgtggatgcagaagtgctcgaaagctagcttgaaatcaggaatataaggttttattttcttcacattaaagacttttcgcgccactagtgttgcgaaaaagagaagttgttcagacattggtagaactagcggtcccagagtagttatgttcgtcttgagagcttctccagctatagccattaggtttttggaaagtgagacaccgatttgtttgttgtcgtcgttgtcttcgcgttggtaaacgcagttaaaggcgttgtcgtcagatcctttgtgtgtacggacggtgtggatgagttggtatttggagcggccgagtcggaggagcggttagagaggagaacggcggcgcacccattcggaagatgcagtttgagagaagcattgatcggtcgttgcctaaataccagtttagggttatgttctctgtgctcactactagtgcatatgaatttggttggacctgcatgcatattacaataaaaaaaaaaaagacaggacccttaacgcatatttattagtccatattacaattcattacaaaattaggactctaaaagcatatgcatatatataattataaaaatatgaagacaaatgatactgtatgtaaatcgatgaatgtctatgtgtacgtatgtctattttttaacgtatttttaaaaactgttttcagttttgctatttttcattgttctaaataaaaataatttatgtttgacaatttttttttttttcgccatttgacaatttttttggaaaagtaaatatcgtagaaccaaaaaaaaaaaaaaatcagatgcatggcacattggcaccatacgtaagaccttacgtgtacttgattatttatgaaacttatactcttaacaacctagttgttttcggtgatattgttcaacaaccttttctcgattgaatataactaaacatgacacgtcacctatcaattttgtacaactgttcataggtacttactagaatataatttacctacttaccaaaaaaaagaatataatttaccttaatcaatgtttataattgactaatcccaaccttaaattggtctttcatatcattgtcaagttcttctcgtgtaattgtatagtgaaaatgacacatagattgtatacacacacattgacacatagattgtataccaaatatgtagttgctataaagacaatctatagtcattcaaattttcacaactaccacctacctacaaaataagcctggcacaaccttcataaatagtaataatagaagctagagattttaccatttttcatataaaatcagtaaccaacttttataagataacgacatgacgtgaagaaaactagaaaagtcccaacctccccacctaaataaaatttaattttctctttgtcacaagattttatttcttatatcagaatgttcaattgaaagcgaatcttagtatcaaaaaataaaaagttgtgaagttgtaatgatggactaaattcattgaataaataattacctgaagaagctgtttagcgagatcaatggagataagaccagcactacaacccattccaccaaggttatagctcaaaacgtttcctctgagcttatatttattcacgatcatagccgataacgaaggcgtcggattaaacaagctacaattcacgacaagtatcccaatatccttaggattcactccggttttctcaagcactgcgtctatagctccaaacataaccgtctcggcttctttccttgcttcagacatacaaggattaggcgggacacgtaagagagcctccgggaagtaagtcttttgtccaagaccggaacgttcgaggatcttttgttggaaaaaaaggaagtcttctgtgaagataccgacacgctgagaccggtccatgacgtttctcgtgtgcaaattaga

SEQ ID NO: 3848 - DNA, 6384 bp, Arabidopsis thaliana landsberg
cagcacgttgagttgcataatccaaatccaccgcttcatacagtgggttatatacacacaaagatgtctcctatggaggtagcaaggaatgcaagtgaagatgctcggtcaatttgtttccgagagtacggttctgcaccggaaataaacatatatggcgatcccagtttcacctttccgtgagtttcaagttgactgcattttttatttcttagattcagtttgtagcttttgttctcatgtggttaccaatatctttttcttctactcctgtaggtatgttccaacgcatttgcatcttatgatgtatgagctagtcaagaactctctacgtgctgtccaagagcgatttgttgactctgatagagttgcaccaccaatccgcattatagttgctgatggaatcgaagatgttactataaaggttggttaccctgcactttttttctcctttttgctagccatttcgttctttgttgcatcggtttgatccaatcattgttgtgagttaatataacaggtctcagatgaaggtggaggtatagcaagaagcggtcttcccagaatattcacctatctttacagcactgcaagaaacccgcttgaggaggatgtcgatttaggaatagctgatgttcccgtgactatggctggatatggttatggtcttccaattagtcgcttgtatgctcgatatttcggtggagatttgcagatcatatccatggaaggatatggtgagtcaactacttcttcttccgtttcatattttcagatcaatagacataaaagtctcttaacctgaaatatctcaatcagcattcataagacagattcagttttgattaatgtgtattgttgaaatgtgcagggactgatgcatacttgcacttgtctcgccttggagattcgcaagagcctttaccctgagaacatctctatgtcaggcaaagtaaagaaagctttgacatgtatttatggtagatgagggatatctacaatactgaattatttatgcttgtccagcttcttctaatgtacagactacagacattattttctcgtattacgctttcttgattttagactcagatatggagctttttccaagtgagttaatctcctatgatttgttttgattcgatccaaaaccaccttgtatccgaaagtcagcaaaacattattggtttatattcgataaaacagctacaagaaggtcctggatttggatcggttactttaaatattcttcactggttcaattttttccaagatttctgaagaacaaataagagatcaacacgacggcgtttgtgacgttgacgattttataacagccaaacgtcatcgtttctggatttatacataacgacgtcgcgtggtttctcttttttttttttttttttttttgggcagagtttcctccttgtctttcgtgaacccccagcctcacttcttcttccaaaagccgaacccagactctgttctctagttcccatcgacgttcttgatcctctctggttcgcacccgtgtttttaatcaattctggttcgcataggtgactccggtactgtttcttcgtcgatgtaagtcttttctttgtctcttgtagctcaaaccctaaatcgttgcatccttttgtgttatgatgctcaactatgacttctgcaaaaccatcttcggatttcttcaccttaaatccatggctcagttcccttattcgtttgatttctgtatagttactctaatttgtgattgagattgtatttgttggatttctcggcatggttgtgttatggtctcgtggaactgtacgcgtgagcttagcttgattatatcgttgatgaatcatgtggcattaattctttgatattgcgaaagcttaggtcgaattatgtagaatcaggtctctggaagatgatacctgtatgtcaaagtttttgtatggtaacatgagagagttttctcttcttgcagagccttttcctatggccacaacagaagatactccagcttctgctggtccaagatatgctccagaggacccaactcttccccaaccatggaagggacttattgatggaagcacaggaattctctattactggaatcctgaaaccaatgtcactcagtatgaaagaccttctgcgcctcctccccactctgccacaacaccgaagctagctcagattcctgtaccctcttcaggacaaggtcaccaagctcagcatgaacaagcaaaaccagttggtcatgtgtctcagcagcatggtttccaacaacagccacagcaatttccatcccaacatgtaagaccccaaatgatgcagcagcatccggcccagcaaatgcctcaacaatcaggtcaacagtttccccaacaacagagccaatcgatggtgccgcacccacatgggcatccttctgtacagacttatcagccaacgacgcagcagcagcagcaagggatgcagaatcagcattcacaaatgcctcagcagctgagccatcagtatgctcattcacaacaacattacatgggttttcggcctcacatgcaaacgcaaggacttcaaaattcacatcagacacctcagggtggtccccatggtcagcagtttccgagccagcaagagtacaactcattggctccgaagagggagggggatgagttccatgggggtaagaaaactgggttttctcaaccccatttaccaaattctgaacgttcaccatctcaaaatacccactttgaagccaatgcagcatcacaaaagacgaatgcaaacttggctatggctcagaaatgcaatggacctcaagcaaatgctgcagtcacacagtttcaacagccaggggcgaacctaattcaccagcaacttggacctagggcgccaaatcaaatggaccagacaatgttgcaccagaagtctcacgtttcccctttccaatcaaataatacttatgagaataatctacaatctaggcctggtaatgactcgtacgttaacatgagaatggaagtgccggttaggggtgcccaaccacttcatcctgcagcaatgcctaaggttagctgcagatgatctcttctcctatctgtcttgttaaatatttctgcctcactgttatttcttacgaaaaataagtatttaataaaatgctatgcaggatataaggataagtggtggtccaccaacaaatgctgatcccgccatggggcaaacagggcatggaacatatggacacgctggtccagcttttccaaataaatccttggtgcggcctcattttgtcacatctcctgatgttccccatctctctcccgttgaaatataccgaaaacaacatgaagtcacaacaactgtaagttcatatttcttgaattcctttgcttaacttgtcagtttaatgttttaaagctataatgtgctgtaatattttgcaattgttgtttcagtgaatgtttgtccataaaactctactgagaatgtgggattggacgaacttcaactggaataagtaatagcattttagaatagtgttaaaccttgcactttctcatgtattctaatctgtttacggcctttaataattaatcgtttgttgcgcagggcgagaacattccagcaccatacatcacatttgaatctagtggtctcccacctgaaatccttagagaggtcagttttataatgaactttatcagtggcgtaggttcttcacatatatggtgtgctaatgtttttgtctttgtttttcagttgctttctgctggatttccatcgccaacaccgatccaggcccaaacatggccaattgctctgcaaagcagggatatagttgcaattgcaaaaactggttctggtaaaacattgggatacttgatccctgccttcattcttctaaggcactgtcgtaacgactcccgcaatggccccacagttttgatcctagctcctactcgggagctagccacacaaatacaagacgaagcactaaggtttggacggtcgtccaggatatcatgcactgtaagtttaatttgagtctcgttgacagttatcgctaggctgatagagccatactgtgtttttgtttacgaatctatgttctggtcatcagtgtttgtatggtggagctccaaagggtcctcaattgaaagagttggaacgaggagctgatattgtggtggcactcctgggcgtctaaatgatatactggagatgaagatgattgatttccagcaggtttcccttcttgtgcttgacgaggcagaccgaatgcttgacatgggttttgaaccccaaatccgtaagattgtgaatgaaatacctcctcggagacagactcttatgtacacagccacttggccaaaagaagtaagaaaaattgcaagcgatcttcttgtgaaccctgtccaagttaacataggcagggtagatgagttggctgctaacaaagcaataacgcaggtgatgatcatctaaaccattttatatcactgtaaagcaatacttacacataacttggtgatgaggttactgaagcaaacccatccttataacgcagtatgttgaagtagtcccacaaatggagaaagagagacgtttggagcaaatccttaggtcacaagaacgaggttcaaaagttataatattttgctccacgaagaggctttgtgaccatcttgcacgtagtgtcggacgtcattttggcgctgttgtgatccatggagacaagactcaaggtgagagagattgggtgcttaaccagttccgaagcgggaagtcttgtgtactgatagctactgacgttgctgcccggggactcgacataaaagacatacggtttgttgtaataattcctggtatatatctctttgcttgtttgttatcaagattacttacctttgttcgtgtttatactacttctcgagttctgatccaactaggatttcacaactggagttgaagactatgtccaccgtattgggagaaccggtcgagctggtgcaactggagttgcattcactttctttacagagcaagattggaaatacgcacctgatttgatcaaagtcctggaaggagcgaaccagcaagtaccgcctcaagtaagagatattgcaatgcgtggtggtggtggtggtggtcccggttatagccaggatcgaagaggtatggttaaccggtttgactctggcggtggtggtacccgttgggattctggtggtgggtttggtgggcgtggtggtgggtttagtggccgtgagggtgggttttggaggccgtgagggtggatttgggggccgtgagggtggatttggaggccgtgggggaagatttggaatgagagatgactcatttggacgtggcgggaatcgtggtcggggttttactggtcctgatgctggtcatatgaatgtgggtggtagaggcggatttggtcggtttggcaataataatagtatggagacccgaggctttggtcgtggtagtggtagaggctttggtcgtggtgttggacggtttgacaacagaagaggtagaagtcgcagcagaagtcctgatttggttcggccacggcgccgtagctcgagctatagccggagtcgaagccggagcgggagctatagtcgtagccgtagccgtagcaggagctggtcacgttcaaggagtcgcagccctagacatagccgtgaccgaggtggtcataacaggagcagaagctatagccgtagtcctagtccggtttatgaaagacgagatagagcgccacgtgtttctgggtttgatattaaaccaccagttgaatctgtagtgaacctggacatgaatgccgcggcagcgattgaaaacgtggttcctacatccttgtctgagagacaagggaatggggttgttgaatcggaggtagaagcggctttagtacgaccagtggttgatgaagaaccctaaaaccaaatcatagaatgatataaatcctcactacggagatatcacaagctcaccccaaatttttgggtattgaatggattcaccaaatcagacagctgacacgtcttctcagatttgttggctgaggtttctttattttcatttttttatttttttctcatgttcttggtgatcatggagaattagtttgtaatgtatttgagaatttttatcgtttatgtaaacgccttctattgccttcagaaaaatctagactagcatcaaagggaagaacttgggaaaaactgtaattctagtcttctagatagacagatacagcatttagagatgataaatttacaatgttcttggaatggtgaacgatgtttaaattcaattcttgcttacatcattgcatgaattctttagattgaacgtactttt

SEQ ID NO: 3849 - DNA, 1403 bp, Arabidopsis thaliana landsberg
gtcgtttactaatcgtcatagatttctcatatgcatttacattcgttttctatcttttataaagagtgttcccactaacaaataagtcaaacagaatagcaaatatagactaaccaacaagccttcctggagagctagttgcttcgaggtttcaatagcttcctcactggaaatctgataagaagcaacaaaacaggtgaagttaaaaaggaaaattgttgcttgctgaaagtgaaaaagatgaatgtatagttatagagaaccaaaccaacagatcataccgctatgtattcatctacaatagccagatccaaattcttgggtacaaatccagctccaattccttgaatcttgtgaggtcctgcatttcaaatacatgtcaaataaacgcaagataaaaagaataacgtgccagagaaacaagaaaaacaaaatcactgccttaccgggttttccaccagaaagtatagcactttccgtgggttcgacaccaataacctggttcaagtaaacatcaactaattaaatataactacaagtacaagtaaacatcaactaaatctaattacggaggttataacatctacagttgattccagctgatatgctacaagccctcttgctatgtaccttcaattcaggttttctttctttaatgaatcgaccaacaccagtgatagttccaccagttccaatccccgcaaccaatatatcgattttgcctcttgtatcttcccaaatctcaggaccagtcgtctcataatgaatctgcatttaatcttatatcaaaacactaacaaatacttgcagcttttaccaatggaaccagtgaatcccagatataatcgtgatgattcaaaactgtataccatagaaactctacaacaatccaaaaggaagtgcggaagaatttcactatcatctctaatgaaccctttcacacaccacctcttactactgtacaaggccagaagtaatcgtagctcataattcatgtcacagttagagagtatgatgaaacaagaagtaattacagaccttgggattggcagggttgtcaaactgttggagcatgtaggaattgggagtttttttcaagatttcttcagccttctgaattgctccagtcataccttttgcaggttcagttaacacaagctcagctccaaatgccctcaaaagaacccgcctttccaaactcatggacgcaggcatcgtcaagataagtttatagccttttgaagcagcaatgaatgcaaggcccaatccctgtgttcccactcgtagattccacaagaacactctaaaacatttgcagcaagaaaacaaaatcagagggcttgacagttgacactcaatacagaatcattcaacaacaataaaaggtcaaatccataatcaaa

SEQ ID NO: 3850 - DNA, 753 bp, Arabidopsis thaliana landsberg
  unsure (1)..(753): unsure at all n locations
atgaacactctccataacatccatatccaagatttctggtttgaatccaacaccattgccctttatagcatgtggacctaactcaaagttcaaaactctaccatcagcaaccgcaatgaggatatactaacaaagtctttaagtattcaaaattctcacctggtttgccaccgctgagtatgttgctttcagcaggctccactccatatatctatcatttggaagacattcatgatcaaacgcaatctacttttttgatattcacaagatttcttcagaacttagagatcactcaccttgacattggggtttttagatttaaggtatcggccaacaccagagactgtgcctccactgccaattcccatcacaaatatatcaacatttccaagtgtatcttcccaaatctcaggaccagttgtatcaaaatgaatctgcattccaagcatcatctctaaatcaaatgagaatgcacaataataataaaaaaagatctctttctctaactcataagtgtacctgagtgtttgcaggattagcaaactgttgacacatgaaagcatcaggagtactatcaaggaggtcataagctttcttaacagttccacccattcctttggctggatcagtgagaacaagctcagcaccaaaggatctcatcgtcactctcctctccagctagtgtacgaaggcatcgtcattataatcctgtaccctttcatagcagccatgaaagccanactgattcccatg

SEQ ID NO: 3851 - DNA, 923 bp, Arabidopsis thaliana landsberg
cagtgtaataagaccaatgcccatcactttgttcggtcgcatttcgttgcgtgggagcatcacaagagaccaaatcaatccgaatattagaaaccctagagtgtagaacaagctattgtcctccgggatcatgtaagtctctggacttttcgaccaagcaccaagaaacatcgacatacctaacccaacaagcgtgttaaacattggacctgcgtagcaaccagacaacgcgatttgtaccccatctccaccgttcattgacaatgcgatgtttgacactaagtcacccattgagtttccccaagcaagtacggttagaccgagtattgacgggttgattccatagattccaccaaatgtaaccaaaagtgcaacaagttcgtttgcaatcatgtagaaccatacgatgctcatgatgaatccaccaagtacccaagggattaaatatatttgaggtggacggtcgggctctgtgtttttgaacgcgagatatccaagagtagatccaatcgcaattccgataaaataggctacaatgcgagcttgaagactcgtatcatcttggctgctccaaagaaaggaaagtaggacaggcgccagcgagacactagccaccgcatacgtctttgaccagctatcttcctcaatcaatgggattgtcaaccgtctaggaacagtcagtggagtttccagcaaagatgtgattttagaacataacgagctctcgacttctgcaccatcttcggtccacccccatggaggtctttcttcatcatgaacattggcttttgcgaaatggtttgaatagatggctacatttgtagcccacatccactgtggtagagaatcatgtaaccgaggtggaccttcaccggtgtcaagctccatcaacgggctgtacataggaatatcctcttcacact

SEQ ID NO: 3852 - DNA, 3328 bp, Arabidopsis thaliana landsberg
  unsure (1)..(3328): unsure at all n locations
aaggccacgaggaagacaaggatgaagtatttacttgtttatcaatgtggattgcaggaatgggctcagggacacacaaccaataccacaaacatactttggcaactgtatggctcctggtatcgtatcagtcaagaaacacgatttgctaggagaaaaatgcgttttggcggcttcagatgcaatcacagcgagaatcaaagatatgttatcaagcgatctgttgaagacagcaccaagatggggacaaggagtacgtaaatgggtcatgtcccattatccaacctcaattgcaggagctccgaaattgggactgtatgacatggattttggattaggaaagccctgcaaaatggagatcgtgcacatagaaacaggtggttctatcgcattctcagagtccagagacggcagcaatggagttgagattggaatagcactagagaagaagaaaatggatgtgtttgactcaattctacaacaggggatcaagaaattcgcaacgtagcagcccctttctcatccaataacttgtagcaacgaaatgactctatgaaaagcgttgttggaacggatagacttgttgtttaatatccatatccaacctcataaatacgggcaaaacatactctttagtccgaaatataaactcaaaacaagaaaacaaaaagataatgtgaaattgaaagagaataatgtagtgatcttgtttaactcaagtctcatggttaaggagacggaagctgatgagaacactgagaatttatgagttttttcagactacaagcactaagatacaagtgcaagtgtatagtttaaactcaaatagatttcaataaaaacgataaatgaatgagaaagtctcagtaaaatccattgaagtcaaagaaattgcagcttctgccaaggggttctccctgtaaaacaaggtctcagctccactgcacctcgtaagattggattagatcctcatcgacattcccaagaaataataactcagaagaaagacaaaatagcaatgaaaggctcggataagaatacagctttttcgatcaagaattatctgaagcagaactggcgtatcaagctgttacaattcatcatcccagccaatcaaaacacagaaacccatataaaaaaaaacaaaactttggctcatattaagaaattcaaccatgtatttaccgtatctgcttcattgaataatctcagaagcgcgggtaagtttataatcattgccacataaacaaacgttgataccaaatcgataccatcaacaaacacagctcaaagcaaaacatacatagaaaagagagatatagacgcttttttgacacagaaaagcctaaggaatacggcaaatctgcaacacaaacgctaaaaataatctagcaggagctttggggcttacttcttcaagtaccttagttatcagattagcccgggaggctcctgctaaccacactatatatatataatcaaaccctaaagcgattgacgaagaacccaaattctaaagatcgattctaattgtacgacacaaagcaaggaagaagatgacttaaatagcacgcggctggtcaaaaccctagcctgattctctctatgccaagaagtcgaaattgcccccgttagtttattgttgcggttagacgttaaccggcccccgttaggtttgtgatggctcaaatatgcccggccttacaaaattcaaattcatatgcgaatgttatgccttaacttgttacaagatcacaaattacaaacttcttttgcaggtaattttgcatattattttcttataatttaagaatagtattaagtataattatacaaccttgatttcaaaattgtgtatgagcttacaaaaatttcatgagcatggtaatatgtcaatctttgaacaaacaccaactactacctggtgaaaccttcactccactctccttcatcttcaatctaagtctctctgcctcttcttgtcttccaacactcatatatatcttccccaacaacacataattcgcgggattctctggctctaccatcaacaattctcttgcagcaatctctgctagctcaatctcaccgtagttcctacaagctccaagcaaagccccccatgtcttagccgttggcttctcaggcatagcttgaatcactttataagcttcttcaaatctccctactctgcttaagacatccaccaaacacgagtaatgatccttgcttgcacgcaaaccgtaatctccctgcattctcttaaagtatacaagagcctcatcagctaaaccagcgtgactacaagcctttagcacgttcagaaacgctatgtcatccggtgttactttcgccaattccatttcttgaaatgtttttagagcagattccgcgtcaccgtgaagtgcataagcggatatcaagctactccaagcaaccacatccctatcttccatgctatcaaacaccaattgcacatagacaatgcttccacacctcccatacgcctctactaacccgcttttcaactgagggtgcggctcaattagattcctaaaagcatatgaatggatctcttttattaaacgaaaagccccaatggctgagcaagcagatactaacgcaagaagggtaatcaaattaggcttgaatctaaactctatcatcttcctatagaattcaatagctctataagacccatcttctgtaccaactaaaccctttatgatagcattgaaagaagactcatttggcataacatccatagcttcatacaactccactgcttccttaaccttcccacaatgtgtgtaatgcgaaatcatcgcgttccatactaccgcattcctctgaggaatttcgtcgaacagtttacgagcatgagaaacagacaagcatttaccatacatatcgagtaacgcgcatccaacaaatgggttcgacagaaaattggatttgacggagtgtgcatggactgaatcaccgagaacaggacggaaagctgcagcgcaccgatttgagagcgagtgagaagacgtgtgcatcgagaggtaaggcgaaagaagaatgcatttgaagaaagagattaagagcttgttcatggtttccttggttcgcgtagagcttaattgtttggtgagagagatccatttagtgcagctcgacgcgtacgaagaaggcatggagtggtggagatagagctttcggtgttggcgtcccgttcaagaaattcaaattcgtttgttgttactcgttatgttctaacaccanacacacagtcgttgantgttgtggtagtatcccgctgtccgcgggtgccgggttcgtc

SEQ ID NO: 3853 - DNA, 603 bp, Arabidopsis thaliana landsberg
tgtaatacatgaattggctaattcatgaattatgttatctgttgcattttaagctggttggacccgggatcagtgggggcacactcgtttcaaattattcaatggttctgctgatatggtgacaaatcaaaaacagttgaatgcactcatgcgtgcgcttttaaaggttgtgataaatcttttttgttttgttattaattattatgtcctcttacatattatgttattgcaattacatgccctttaatttgacaagctgtagttaattgctacagacaatgcaagaccatgctgatgcttggcctttcaaagaaccagtggattctcgcgatgtccctgattactatgacatcattaaggatcccattggtaagaagatatagttaaaatatcaatttcgctattaattatccagaatttgtcctctttttaagtagaagtgttaaatcactttggtaaccaaaaaatggtttgaacacagatctgaaagtaattgccaagagggtagagtcggaacagtattacgtgacattggatatgtttgttgcggatgcgagacggatgtttaacaattgtagaacttacaacttccccgataccatt

SEQ ID NO: 3854 - DNA, 1953 bp, Arabidopsis thaliana landsberg
  unsure (1)..(1953): unsure at all n locations
aaggcaccggttactgcgaagaagccatcgtgaaggatgtttatttaaggaagcactggaacgagaaagtcttcaagcctgactcgtgtttctcatgatgtggacactcctgtactttctgttggctgtaattccaaaggggaagatttggatgtccctggagtacataccactgctttnnnnnnnnnnnnnnnnnnnnnaaagccgaagaaaaatgtttcttttgctgttgacactactgaggaacctgattccaataaggaagatatgcaaggattcattgatgaacaggtaagtcatgtacgtacattgctaaatattttataatccatatgtataactgtattgtctgcttcgatacagtatggcgctaataatgaaagtgattttactgcaaatgatggattggattcttcggccgctgaagaagagatattagacactggatttttaatagttccttatgctggatccacacaatcccatccggtatgtcgtctactaatactcttaacaatctgtttaaatggtgtatgtacatattcgcttaagaagttagttaaactatgtttcaggatagaggaaattttgttgttggtaagactgtccttttaggttcaatgcctgggactgtctatgttacacaagaagggaggcctgtggaagaagctactgttgacaccgagatggaagaagttccatctaatgtgtctgcaagagtttcaaaggtagatcttctggtaatagttatatacagatttccattactatatgcatatatattacattaatttctccacttatctaacgcttaactctatggtagcttatgtttcaggataatggaccaaaggatgttgctgaacctggcttagttggtacccatacaggggccgatgaaatagctgatgctgacatagagatggtagacaatccatcaggtttaccttcaacatctgcacaggtatgtgttagtcacttgttctttttccatatgtgtacgcccataagactttgcaaattatttttgtttcaggaagaagcaagagatgccagtgcatcgactgaagctaatggcagcgagtcagaagaaacttatgagccttctgatggagatacagctcacgtacctggcacaagtgtacgtacatttttatcactatgttctgtgtacatatatattgtttcatacattactaaaaagtttatttccgatgataaattctacaggttgaggcgttaggagaatccaaattagtgacagggatggaagttgaaatacctgagaagacccacagtgatcccccgtcaccatttcaagtagttaacaatgtaagctaactcttgcaacaaataaaatgtactatttactgttcaaatgtataaaatttatattatgcaggtcatacgggagttggataccaaagccgttggtgatttggctgcagctactgatgtggaggtaacaatttgtgtgtttcaattcctattctcggaatagcatacagaggattatatgtgtacattatatagacttgtgtacgttaacttgcacaggtagtcatggaagagccgggtattgtcaaggggtcttgtaggaactgaggatccaacccagggtcagacacatctacttaccaagcgggtgggcgacttcaagaagtgtattaataagaacgggttcaaatggggtaaattattgtccgacattgctaatggagttcacataaaccgtgaacccaatatgaagtggatgaaggatgtcgatgttttgtatgctccgatgaactggaagagtgaacattgggttgctttgggaatcaaccttaatgaacggctaataactgtgtatgacgctttaatatcgcacacgcgggagtcggctgtgaaggcgagaatgactcctatttgcgaaatgatgccgtacttagacagagcgatgtgcccagatgt

SEQ ID NO: 3855 - DNA, 2430 bp, Arabidopsis thaliana landsberg
cgaaaagatccaatccaaactgggttgggttgctacttgattttcccacaacacacttccggtggttcgcgatctatcaagatggaaatctcccgcttaccgatggtcaaaatcgccttgtatggtcgacgaatgtctcagtaccagtagctccaaatgctacttgggttcagcttatggattctgggaatcttatgttacaagacaacagaaacaatggtgagattctttgggagagtttcaagcatccttatgattctttcatgccaagaatgactcttggcaccgacggtagaactggaggtaacctaaagcttacttcttggacaagccacgatgatccttcaacaggaaactacacagctggtattgctcctttcacgtttcctgagcttcttatctggaagaacaatgtcccaacgtggcgtagcggaccgtggaacggtcaggttttcatcggtttaccgaatatggattcacttctgtttcttgatgggtttaatcttaacagtgataatcaaggaacgatctcaatgtcttatgctaatgattcgttcatgtatcactttaacttggatcctgaaggaattatttatcagaaagattggagtacttctatgagaacttggaggataggtgtaaagtttccatacacagactgtgatgcatacggtagatgtggtcgattcgggagctgccatgccggggaaaacccgccttgtaaatgtgttaaagggtttgttccaaagaataacacagagtggaatggtggtaattggagtaatggatgtatgagaaaagctccattgcagtgtgaaagacagagaaatgtaagtaatggtggtggtggaggaaaagcagatggttttttgaaactgcagaagatgaaagtaccaatctctgcggaacggtctgaagctagtgaacaagtttgtcctaaagtatgcttagataactgttcttgcacagcttatgcatatgatagaggaattggatgcatgctttggagtggtgatttagttgatatgcaatcatttttgggaagtggcattgatctttttattcgtgttgctcattcagaactcagtgagtgaaatatatctagtagttctcactttgtttccttctccatttttgttttcttcactgacttaagtttttacttaccaaatttttgtagaaacacatagcaatctagcagttatgatcgcagcacctgtgataggcgtcatgttaattgctgcggtctgcgttcttttagcatgccggaaatacaaaaagcgtccaggttagagttttgtttattcatgaatgttagattctgattgtttcttttatcataattgttttgcttcattgatcattaccttagcagctccagcgaaagatagaagtgcagagctaatgtttaagagaatggaagcacttacaagtgataatgagtctgcttctaaccaaatcaagctcaaggagcttccactctttgagtttcaagtgttagctacatcaactgatagcttctctctaagaaacaagctcgggcaaggcgggttttgttcctgtttacaaggtaaaatcataacaaaagaagttttctggagggagatatgtgtacaaattatctcagactaagtgattggtaatctttttttttagggaaaattacctgaaggacaagaaattgcagtgaagaggctctcacggaaatcaggtcaaggactagaggaacttatgaacgaagtggttgtgatatctaagttgcaacatcggaatctagtgaagttacttggatgttgtattgaaggtgaagaaagaatgttagtatatgaatatatgccaaagaaaagcttggatgcatatctttttggtaaacttatcacctctaactctctttttaactctgtttataccgtttggctcgggatgattattgagaaggctaatgtttttgctaacttttctcagacccaatgaagcaaaagattcttgattggaagactcggttcaacataatggaaggaatttgcagaggtcttttgtaccttcacagagattcaagactaaagatcatacacagagatttaaaagccagcaacattttgttagatgagaatctaaaccccaagatatctgattttggacttgcaagaattttccgagcgaatgaagatgaagctaacacaagaagggttgttggaacatagtaagtatccattccaaaatacacaacagacattacgaaattcggttttattcaaatattgttattgcagcggctatatgtcaccggagtatgcaatggaaggtttcttttcagaaaactcagatgttttcagcttgggggttatatttctcgagatcataagtgggagaagaaactctagttctcacaaagaagagaataatctcaaccttttggcttatgtaagt

SEQ ID NO: 3856 - DNA, 1322 bp, Arabidopsis thaliana landsberg
aggaggaaacgtcacgataacttcttggaaatccccttcggatccttcgcctgggagctacactgctgcactcgttcttgctgcatatccagagctcttcattatgaacaataataataataacagtacggtgtggcgaagtggcccgtggaatggccagatgtttaatggtttaccagatgtttatgcgggtgtttttctttatagattcatagttaatgatgacaccaatggatctgtcaccatgtcatatgctaatgattcaaccttgagatacttctacatggattatagaggatctgcgatccgaagagattggagtgagactaggagaaactggacggtcgggttacaagttccagcaaccgagtgtgacaactacaggcgatgtggcgaattcgctacttgcaatccacggaaaaacccgctttgttcttgcattagagggtttaggccaaggaacctaatagagtggaacaatggaaactggagtggtggatgcacaagaagggttcctttgcagtgtgaatgacataacaataatgtgagtgctgatgggtttttgaggctgcggcgaatgaaactgtctgactttgcaagaagatccgaagcaagcgaaaccataatgcttaaggacttgtttgcagacatgttcttgtatagctgctgctcatggcttaggatatggctgcatgatttggaatgaaagcttagttgattcgcaggagttgtctgctagtggattggatctttatatccgtcttgcacattcagaaatcagtaagtattattccacaacatctctcacattcttactttaatgattgcagttatattaattctgctatttcttgccaaatctcaaatagaaacaaaggataagcgaccaattttgatcggtacaatattggcaggcggtatttttgttgtggcagcttgtgttcttctggcacgacgaattgtcatgaagaaaagaggtcagactttaataaaattatgtttacttcttataaccgttggaatttttaattttagtaaaaccttgcatccggtctcagcgaaaaagaaaggaagagatgcagagcagatttttgagagagtggaagccttagctggtggtaataaaggaaagttgaaagagctaccattgtttgagtttcaagtgctagcagcagcaactaataatttctcgctgagaaataagcttggacaaggtggctttggtcctgtttacaaagtaagtatgacatataaaggttatagcaataagtctttctattgggaatcaggtgtgtatcatattgacttttttgtgttgcagg

SEQ ID NO: 3857 - DNA, 1160 bp, Arabidopsis thaliana landsberg
aaccggggctcttcgaaagtggtccaattaactagtttatatcaactttagatttgataccagtttattatataactaatgggataagtaaacataaaatgtaatgaacacaaactgatttacgttgttcgtgtaccaaggtctatttgaaaggaaaaccgattttattaagaaattaacccacattgttatactattttcccaccgagaaaacaacaaataaaactgttaaaaacgcagctttagaaagagtagacaatgggatgccatattttccatgctcaaacaaaccctttagaaatggaaggaataacacaaccaccgagatacatccacaagcctccgtcaaagccgaaccacctcctccatgactacaacttgaaagtcgtagacgaaccaaaaaaccagctagagcggcaagatttaccaacattataaatgtaccgggaatgaaatgacacgagctgtcaaattcaaatttacctaactctaattttagaccatcatcgtctccttgagatggtttagattcatatcctgacctagtctcaggcatattctttttcgcgactataaaaccgattttcgagattccaagaagcttgagtatgatatcttggatgctaaataaccaactgctagtggctattattctccaaagtgattgggagacataccacgattttatcgaaaacccaaggatcatgaattgccatagagtgtagagacaatgcatccccgcaagtgtgactattatgcctagacaaggtccctaaatccacatacaatatataagcaaatattaattttttcctctaattaatttaatgaaactaatgttactatactcagagagagagagagagagagagaaagacaccttgggaaacaaggcagagttgttgagtaggcaataagcaggcaagagacagtaaacgagctcagggattgaccttatacacatgagaacccaaaaataagctaatctttgtcggaattttattttccggcggaaaccgcatcaacggactttgtttgttgaaaaggacttcgatcgatcccgttgcccatcgccggtgttggactatcgcctctggtcctactgacggagttgatcctagaaacgcgggagggtccggagaaatgatgaactagtccat

SEQ ID NO: 3858 - DNA, 1024 bp, Arabidopsis thaliana landsberg
caatcagtctctacatccagcatatgagatctccggtgcatcttccactgtccgcctcaacttctcgactccctctttgttttacacaaaaagaaacatcaagaaaattctcaatacataagatgaaaagctaagaacaaatcttcagatcatgtgcaactttattaggtatctcaattgtttcaaaagaagaatttaatctgtaaataagcacaataatattatttgtaaacataaaaatgtcatacacctaaaaaataatcaaacccttttttaccttcgtcttttcccagtctctattgaattcagaatcctctgttgcgacgcttataggtttcagaaaatatctagaaggagctctaactctagtgttgtacttcttgcagaacggtacccaaatcttggcgaacttagaagcttccttgagagagaaataagtgagaggtgagcatccatcgtccgacacataacaagctagtttatttgccggataatttacagctaacagcgaaagcacggtgtccacaaccataatcggtggctctcgaaccggatctgctgtgggcacgaacatatccaccgaaggaaggtcatgaaccctgaaattacaatattttatatgccaggttaatgaaatacataaaagataacatagaactgaatattatcttgatgattaaactaaggctaggtagcaaactagctcagactatatacaaagttaataacaataatgattgtatatatgctaaaaataatatttgtatatatgatttatgtgtaaaacgaaaatgatacctttcatcaagtctatcaggaaagggtttagtatcagcaggactccattttaggcaagtaataagcagacataccaagaagaaacaaaattcacaaaagaaagccacgagccaaacgttgtcgtattcactcgtatgtcggattcggtgcaagagaagagaaaagaaaaggcctagaaccgtgagatatacagctcttagaaaatagttcgtgtatgagatccttt

SEQ ID NO: 3859 - DNA, 979 bp, Arabidopsis thaliana landsberg
aaacacctcctccatgactataacttgaccgttgtagttccatgaaaacttcaacaagggcggctagattgaccaagacaatgaatgtgccgggcaagaaataaagtgagccgtcaaattcagttttacctgagttcggaccatcatcttctctttgagatggtccaatcccagatcctgacatggtttcgacgggcatagtctttttagatactaagaacacgtttttcgagagtccaagaagcttgagtataatatcaaagatgctaaataaccaactactagtggctactattctccaaaatgactgtgagacataccacgattgtatggaatgaccaagacacataaattcccatagagtgtagagacagtgcatccccacaagtaacattgttatgccaagacaaagtccctaaatccacaaggaaaaagtatcaaagatcaaaattgaaatctccttctaaatttttcatatatatgatgacaaatagaacaatatgatatttagtatgaatgacagagaaagagagagttaccttgggaaataaggcagagttgtggagtaggcaatatgcaggcaagagacaataaatgagctcagggattgaccttacacaaatggaaacgcaaagataagctactcgctgtcgaaatcttaattttctgcaaaacaatcctagcaacggactttgtttgttgaaaagaacttcgatcgatcctgttgcccatcgccgttgctggatcattgcctccagtcctcccggcggcatagatccaagaaacgcaggtggatccggagcaatgtatgagctagtccaacctctcgagtggattccgatactagtgttcatatcttctgacattgaatcgtataaccaaccaatctgcatgatttatatggtaaaggtccagctattttgtaaaatacaaagatgtaagagatttaaaatctacgtacggttttgccccagctggt

SEQ ID NO: 3860 - DNA, 1365 bp, Arabidopsis thaliana landsberg
aactattcttgtatctcttaccgttttttctacttgctaaaaaacttatacgattttgtgtggccaatcggtcctatattttatatatacaagcattcatagacgtgacgacgcattattttacttaaccctatataaacatatccaaaaaccgcaagaaagctcacaagaaatctcctcccatggcagattcaagttcttctctccctcctctttgcgagaagatctcatacaaaaactattttctaagagttgtggatctcacgattctaggccttctcttttctcttctcttgtaccgaattctacttatgaaccaaaacaactccgtttgggttgggggcttcctctgtgaatcctttttctctttatatggcttcttattaccagcataaaatggagtcctgcttcatataaatcatatcctgaaagacttgatgaaaggtatcaatttatattacacttacaattatatatacaatcatgcatattaaaagcatatgttcttttaattttgtataaaacctaagtcctagctagctgaaacctaactcttaagtttttttttcctcacgaaatatcattcatttttttctgttatctttctattttagtggactagctagtaaaaatttgaaaatataagactcttagtaattaaataatttcagggttcatgaccttccatcggtagatatgtttgtgactactgcggatcctgttcgggagccgccgattcttgtagcaaacacgttgctttcgctgttagcagtgaattatccagcgaataaacttgcttgttatgtatcggatgatggatgctcacctctcacttacttctctctcaaggaagcttctaagttcgccaagatttgggtaccgttctgcaaaaaatataacattaaagttagagctccttttagatattttttgaaccctccagccgcaacagaaagttctgaattcagtaaagactgggaaataaccaaggtaaattaaagggtttaattgttttttcggcgtatgagtttaattttgcaattgtgtttacaaattaaatgatttcgtttactttcaagaagaacacataatttattttcaatcaaacattatttgtaaattgtagaaggtaaagtagaagaaatcgttgatgtttcgaatttgtgttctttaaaacattatgacaatgctgtgatttatagaaagataaagaaaaacaaaatcaattaattagcacaatcagatttttgcgtttaaaacaattgggacgaagatcaaaatttgttcttagcttttgatattaattgttccaaattttcgtataattattaggaatattcttgaaatatgttttgtatcaacata

SEQ ID NO: 3861 - DNA, 938 bp, Arabidopsis thaliana landsberg
  unsure (1)..(938): unsure at all n locations
gcatgtccaacgtagactgcgacatgtatgtcaatgaagcagatgtggtgcgacaagcaatgtgtatatttctgctaaaatcaatggattcaaaccattgtgcttttgttcaataccctcaagatttctatgattctaatgtcggtgaactcaccgtcttacaattagtaagatttatctctttactttttctttggtttatttctaatgttaatatnnnnnnnnnnnnnnnnnnnnnnnntttatatttgttataccaatccgtacttaatcttagttccttttatttattaaaaaattaactagtacttgggacgaggaattgcgggaatccaaggacctcagtatgcgggttcaggatgcttccatactagaagagttatgtacggtctttctctagacgatttaggagacgatggaagtctttcttcaattgctacaagtaagtacaaccaacaaagacataaaaaaaccaatcttttagcatgcaaaattctgatgttttcattaattatactaacatttttgttattccatcgttctactattcacatgtcaaatcattcacggttctcgttgtaatttcattaagggaagtatttagctgaggagagtctaacgagagaatttgggaattctaaggagatggtgaaatcggtggtcgatgcgttacaaagaaaaccatttccccaaaaaaaccttaaggactctctagaaacggctcaagaaatgggacattgtcactacgagtaccaaaccagctggggaaaaaacgtaattctcttctcaaatgaatcactatagtattttagacaatattaatgtgttttcttatatataaatcatgtagatcggttggttatacgattcaacaacggaagatgtgaacacgagtatcggaattcattcgagagggtggactagctcatatatttttc

SEQ ID NO: 3862 - DNA, 776 bp, Arabidopsis thaliana landsberg
cattgtcattacgagtaccaaaccagttggggcaacgtaaattaccttcttaacagtttacacaatattatcgtgttgtttacaagaatctattaacctttacccataataatgcaaatcctgcagctcggttggatgtacgattcagtggcagaagatataaacacgagtagtggaatccatttgagaggatggactagctcattcatttctccggatccacctgcgtttattggatccacgccgacgttaggattagaggctatagtccagcagcggcgatgggcgacgggagcaatcgaagtcctttttaacaaacaaagcccgttcatgggaatgttccacgggaaaataaaattccgtcaacgattagcttatttttgggccctcatgtgtttaaggtcaatccctgagcttatttattgcctcttgcctgcttattgcctactccacgactctgccttgtttcccaaggtgtctttctctctctgaatatagttcagttaatttcattgaattatttagaagaaaaagtttaatattttcttctttttgtgtgtgtgtggaattagggaccttgtctatgtacaatagtcacacttgtggggatgcactgtctctacagtctttggcaattcatgagccttggtttttcagtacagtcgtggtatgtcgttcaatcactttggagaattatagccactagcagttggttatttagcatccaagatatcatactcaagcttcttggaatctcgcaaatcgggtttgtaatc

SEQ ID NO: 3863 - DNA, 4790 bp, Arabidopsis thaliana landsberg
atcccaagaagcttctgggctgctagtagttataatatctcttggttgtgcagataatggatcttgtggacgagttatttgtgtttatattcactagtttgaatgagaggtgcaaaaaagaactgcaagctgttggaaagcaatacccatttgaacctttgaaggtaaccatatgcagtgtgaacaaggagtattggaaactgagttttatcttaattggattctgataatcggcacttaattgcagtttctaccaaaaacattgaggttaacgtttgaagaaggggttcaaatgcttaaggtatggcttgtatatttggcgttttagctgtggttttcgaaagtactatcaataatttttgtaatcttgatgtgttgacaggaagctggtgtggaggttgatcctcttggcgatctaaacactgaatctgagagaaaactaggccagcttgtattggaaaagtaatccaccacttctttctacctgatcgatattcttttcattttcaaattgatttagttctgcatctcattgttacaaagttgttctaacactattgcgttgttgattttcgatgataaaaacaggtacaacactgagttctatattctgcatcggtatcctaaggcagttaggcctttctacacaatgacttgtgccgataatcctctttacagcaactcttttgatgtcttcatcagaggtacatctttgagtgattcttttttaccttgtgtgttcacaccaattatgctactgcacatttgatactaagtttacgtgttctgtcctaggtgaggagatcatatcaggagctcaacgtgtccatatcccagaagtcttggagcaacgtgcaggagaatgtggcattgatgtcaagacaatatccacatacattgattcattcaggtaaattactaactggactagctcggttccttttacttgcttatctgagttgttctctaagcagagcattgctacatatatgttgacaggtacggtgcgcctctacacggtggatttggagtggggctggagcgagtggtcatgcttttctgtgcactgaacaacattcggaaaacatccctcttccctcgtgaccctcaaaggctttcaccctaatatcttttcaactgaaagctattgagtgaataattgtccaactccacaaatttttctcatgaagcttttagagttttttacttcttgttgtctaactctcctccttttgtataagtgaatcttggtttttgttttgtgatgtttatgtttcattcacactaatttgagtcttttaattgcttatgaaacaattcggctagaaattttaaggacaaaatattaatttgaaaacataatgttgatatgttctaaatataacgctaaagcgttaatccaacgtatatagagactatatctatggttgctgtgatcactgatcatatttccatagataatcttggagtgcgaaatttgttacattaacaactagggactagaaggctgactctaaacagactgaactagccattagaagatgagaactggaactgaatctcatctggttgtagctcttgcactcatggatgtgtgataattcgtacttctgtatttcctgtaagacgtataaacattatcgtactgagttggttcgttgggatcagctgtaagacacaccactaaagagtaaggcacacgactaccgatctgcatctttctgactatcccagggatcaaaccaggaggaaagagaggataaggaggcggcttctcaccagcaggtggttgggttggtggtggaacagaagcgttaagcggtatggaaccgggaaaggcaccaggaggcatcacatttgggataaactgttgggttgcgaccggattcagatgctctaaattcattgtgctagagctgtttgttggctgttgtagcattcctgcaagtgcataaagataaaaaaaaaattgttggtgtatggtcaagtctaaaccgaattcttcatatacataggtggagtaatagtttttgtctctctcacggaattaggattcttattttcagttgcaaattaaaacaatcctagaagctttttacatggatttgatgaaatgacaattgatttcggttcggcgtacataggttttgaaattacaagtgatttatgtttggttcacatggttttgaaatgaaatttgattttggttcggtttaaattgaaataactaatacagttttgaaaaaaaaaaaaaaaaaaaaaaaaaggctttcggagtcacgcgaggctgttttggaaataaagcgagtatatataaaataggcatgattttgtgggtttaccaattacccctacagaaatcgacgacacgcgctcaacgcgaggttggtgcgagtgggcatggaatggagcgcgtggcgcgaggttggtgcgagtgggcgaagtccggagtgcgctgattggctgaaaaaatagaaatagtgttgatgtagctcctcctctcctcctctattattaattcttcgtcattcttcagttctgaaagttgggtggttttaagatgcaattgagttttattctgaggtttttggttattttgaaatcattgattaatgtcaccaaaaaaaaaatagaatggattttgagatactaaaaatttcattttcattttgttctacaaacattgaaaactagattcagctgagcccctgaagaaatcaaagtgagttgaatattttctgaacatctgaaaattggtacaagtttgttctcattttgctagtttccttgttttttttaatgttttcttgactttaggagatgacacatggaggtgttgcatacaaaggttgctgcaacggcctataacattccccttaattccaacaaaagaaacaatgtgtccaatttctttcacctacctactcttggaagatctcagtcagagaactccaagtacctgagacaccaagaatgacacccagcagcaggatccccacgtctaaagctcgttgcttccactccatttcgtctttgaagaccatcagatgaaacaaagaaggcaacacaaagcccaacgcacaacagacgctgctgccaaccaatgacaaaaaatcagcaaagtttggcaccaagagagccaccaaagtcactgccaagacgagcagccatctgagccagacgcagtacattccactccagaaacgtctctccacaatctcaaacacagggttcatcatcaagggaaaggtgaagaaaaggttgatacagagccccagctgcacaagactgctcaccactcctgcccctaagttagctgtgattatatccattgtatcatccccaaaagccatgtagcctaacacaccaaaagatccatacatcactgcaatgaatagcatgctgagtgccaacactttgccaaacttgtccttatccttattctcggattcaagaggcaaaaccattccaaccccttcaaaggcgtaaacagccactcccataccatagaagaacacagacatgccaccaaaggcgacaacttgaggcctttgcaccaccgtaatcttgatgtcctccacaatcaccaccgccattgcacccaaatcgaccacatcagcaaatatgctcagaggagccaagtgagtgagtgtcttaatagaattcaaacccagctgaaacggaaaacatccccatatgtagagactcttaggagacacacccattaaatgcctcagactcatcaaagtcgtactcttggttggcttagagagattagctaaagtattaccgatgaagataaggtatccaacacaaaacccagcctgagacaaaataataagaatgtcgacgacgaacctcccgagattgccgcaggcagcgaaaccaaggtccccaaaagagccgatattggagacaccaagcttgcgacggatatgaacaagaagcatcatgcaatggttgatcaaagcagcgacggaaaagagcgtaagcaaacccatgagccatccggttcgtttgaaggcgtaaggaagaccaaggacaccagcaccaacgatagcaatgaagacattagcgaaagtcttgaacttgctcgacaatggtcttcctttaccaagaagaggtgtgtcttctctcgcccttccttgttcctccaaacccatctctatacctgattagagatgggctctggagatcaaaaaaattcaatgcaatcggagatctaagatagccagagtgaagatagacgatcctgcggcatttgctctctattactccttggaatgctattaaaaggccaaacctttccatcatttttgctattaagatgagattgtggcttattgtggaatgcattacgatgtacatgttgcatcgtattatacgaatacttgaggaacacaaacaaacatggtaggaaaatttagagtgataatatatcagccaaactattaacaactttattcatttttataagccaccactttatacacgattaataatgtgaaaagtttatcaaattaatcaaatctcccaccctcttattatcaactctcaagatataatatccacacaaaaaaaatgtcaaaagtgtgccactggatccttccttattatcaaatggttagattctcttgtatggctatgaatgatccgacaatgttacctccgacgtccgggaacgtctcactcccgggaagtggtcggacttttccttttcgatcaacttccactggatactttaataaatgtcctctcatgtctgagccttcgtgaggggcgggctgttt

SEQ ID NO: 3864 - DNA, 882 bp, Arabidopsis thaliana landsberg
ggctcaagaagtgggacattgtcactacgagtaccaaaccagctggggaaacaccttataattctcttttcagtttaagcaaataatattatattgtttcgaaaaattctacaatagtgaaagtaattatgcagatcggctggttatatgattcagtggcggaagatttaaacacgagtattggaatacattcgagaggttggactagctcatacatttctccggatacacctgcatttcttggatctatgccggcaggagtacccgaggcgttactccagcagcgtcgatgggcgacaggatggatcgaaatccttttcaacaagcaaagtccgttgcgaggattgtttagcaagaaaataagattccgacaacgattagcttatctttgcattatcacctgtctaaggtcaatccctgagcttatttattgtctccttcctgcttattgcctactccacaactctaccttattccccaaggtgactctctctctgacactcataataaggtttaaagttctgttttggtttaaatgaagttcaatttactttcataaaattaattttgaaggaaatttttaatgttttattattattattatttgtgtgtgtgtatgtagggactttatttaggcataactgtcacacttgttgggatacattgtctctatactctatgggaatttatgagccttggttattccgtacaatcgtggctagtctcccaatcagtttggagaatagtagccactagtagttggttatttagcatctttgatatcacactcaagcttcttggcatctcggaaacggtgttcataatcactaaaaagactgtggctgggaccaagtcagcattagggtctggaccctctcaagg

SEQ ID NO: 3865 - DNA, 599 bp, Arabidopsis thaliana landsberg
agaatccctaaaaaaaaaactgattaaaaaaatttgtaaatctaaagacaaacacaatcgcaaaataaacaatcaaattcattaccttagtcatttcccaatctctactgaattcagaaccctctgttgcggcaaaagggtttaagaaataccgaaaaggagctctaactttaaggttatattttttgcagaagggaacccaaatcttggcgaacttagaagcttccttgagagaaaagtaagtgagaggtgagcatccatcatccgatacataacaagcaagtttattcgctggataattcactgctaacagcgaaagtacggtattcacaaccataattggcggttctcgaactggatctgcggtgggcacgaacatatctactgagggaagatcataaaccctgaaatttcaaggtcagctcaaataaatagaaagataacatggaaatgaataatacgtctttagaattagattaagatctaggtagcagctagttaagactttatacaaatttattaagaatattgctttcgatgtattaataaaaataatatttaatatttgtgtatcacatgatttctgtttacatgaaatg

SEQ ID NO: 3866 - DNA, 577 bp, Arabidopsis thaliana landsberg
tacttctttaacctaggactacatggttcacacttataaatgggatctccatttttctcatttaatagcttgcaagtttaacagtattttttttgagaatcactttttctttctttctaattcacaacttaaaactgcttcaattcacattagttaattatagttttgggcaaacattttgcacgcaaaataaagttacatatatagaattattaattaagacaatgtcatggtaaacttagcgtagtaacacaacaaacacatatcaccatactacattcaaacagagaaaacaacaaataaaactgctaaaaagccagctatagagagagtagacaatggggttccatattttcctttcttaaacaaacccattagaaatggaaggaacaacatcattaccaaaacacatccgcaagcctctgccagacccgaaccacctccttcatggctgtaactccaccgttgtagacccacagaaaaaacagctagagcggctatattcaccaacacaataaatgtgccaggcaagaaacaaagtgagccatcaaatttcaatttaaacaagtctgagttt

SEQ ID NO: 3867 - DNA, 3516 bp, Arabidopsis thaliana landsberg
  unsure (1)..(3516): unsure at all n locations
gaaaccttgccttgtgaactcctccgccgtcgaaggaactcttccttcttccctccctccactcgttcatcctttctaaatatcaagaaaacaccccaaaatattatcttaatgtatatacatagtcaatttatttcgatattccatgaaaaaacgtaggaatctcagaatatatatgtaccttgagataaaaaagagtatactatgcttggagattgattttgtatttacagtttcatgcataagttttcgtatttacaaaatcatctttggaagtgaacattgaaagaagtagtttttttggttgcgaagattagagaggtaagacaaaatcgatgtcctgatgacacaataaacaaacctataagtcgagccgatcgatgtagttttcttgtacatgtacatcaaacaacatgatgagagggggggatgagataatatcagttattattatttgaacatacgtttttgattcttataatcgagagtacatatagaataagagatcaaatattcatgaccggactggagatgggagaattagaataattgttgcagcaacaataattttcaatagccaatcggccgtgacttctgcctatatatgcttgacaatgccctccgcctttcttcatgcattttatattgcattctggtgtgctcgtacatccttttgtacattttgatgattgtcctgttccgttcataaacaaattcatcaacaaaaaatttaaaagcaaaaatgtccaatttaatattttagagttttatttttaagataaaaaatgaacaaattttgaaaaaaatataatatatataacaaataaacatgttaccagaaatcataggtatgaggaggagagcaaacaccatcaacgtgagtagtcgatgagatgaaaccattttggttgtcatttgttatttttgtagaggattctataactccttctcaaactatagtatttaagtctcaggaaaaagcaaaacctactaaaatcgagtttcaaagttattgttaaaacaaaaacgaaaatctagtataagaggagcatattctaaatatttgtaatttaacttaccttttgtatttgtaatattttaatacttattgagaatgatttgtggtggtcttgggtgtacatttatatagacatacatacatatacatattggaattatgtttcattcaaagattcatgaattcattatctgccatatgttgggattatgtttcattcaaaagacatccaaatttagtttatttaactaggtaaattaataaatttcgtaagtgcatgaattctcttaaaacccaacccggcctaccaacctgggtcgcgggtaaataccggttcaagacagagatccaccacggcgtcaataaaaatagtcaacgttttgtccgttgactgacatcgtcttctttgctgcttctagggttctactattggttctctaacattgtcgttatgatgtccaacggtggtgattcgtcggaaattgtccgggaactggaagagttaaagctcaagaaggcagaaatagagcaccgtatttcgaccctcgaagctaagctccaggatacggcggcagttgaactgtacgacgccgtatccaacggtgactcttatctgacggcaccggagcttgaacatgggttatctccagatcagatttaccgttatagtcgtcaactgttacttccttcgtttgctgttgaaggtacttttgctcaaacactcaaatgcaaactcttttcacgtttgtatttagccaataggaagataatctgagatggatgatcctgagttttgtgatgatatagctgaaagattgaaactgtatattggatttcttctgtttccatttaattgttttgattcagtttagtgatgtcggagaaatttgaattctggattacttatttacttattcttctgttctgttctatctgtgtttgattatagggcagtcaaatcttttgaagtcttcggtattagttattggagctggaggactaggttcacctgccttattgtatcttgcagcatgtggtgttggtatggtttccgactcttacctcaaatttatcttcagatatcgatagagtagcttctatataccgttctttctccagaaactattggttctccttccttcattattaatgttctgtgttatctctttgttgtgttcctttaggtcgcttgggtattatcgatcatgatgttgtagagctcaacaatatgcataggcaggtacgacttggaacactctgcgttggcaactctttctttttcttggctctaatctgtggtcactggctgaatgtaagtactacttttggctgatttgtgtctcttttgatttgtttgttattcagattatacacacagaagcatttattggtcatcccaaagtgaaatctgctgctgctgcttgtcgctcgtaattcaaactccttgcggattaatatgatttcgtatagaattatcacaagcattcgagaaaattatgaccaccttgactcgtttagtctaatcagaattcctttttccttatttccaggataaattcaacgatcaaagttgatgaatatgtggaagctcttcgcacttccaatgctttggaaatcctcagccagtatccttagatatgcaaacatgttttaggatgtctcagttttctgtatctttattagtctcctcaaagtaaagcattgaaaggctgtgtttccgtaactgtataaattagatatgatatcatagtcgatgcgactgataatcctccaagccgttacatgatcagtgattgttgtgtcttgttaggaaaggtgaatcattttctgaactctctgtatatacgctgtaaacaatggtgatacctgagtacttcaatagaattatgtagtcagttttataggcaccggtgttgagtattggctgagcgtttgtactttgtatacagcctttggtgtcgggtgctgcgcttgggatggaagggcaggtatgtgatatgacattcgctacattattgtgttactctttatagatgttaagccacatattaaacacttaactgtcattatgatttttgtgttcaagcttacggtttataatcataacggaggcccgtgttaccggtgtctttttcccactcctccacctacctcagcgtgccaaagatgttctgatagtggagttcttggagtaggtacttgaatggcgattttttctttttctattgcttgcaaatctctaccaatttcgtccatctttaaatgatcttttccactttatctgttctcagtgccaggtgttattggttgtctacaagcgctagagacaattaaactcgcaagcctggtgggagaaccactctctgaacggatgcttctttttgatgctttatcagcaaggatgcgcattgtaaagttttactattttcatttctgatcataactacactcaattgtgtntccatctgcataaactgatggagagtgtttgacaggtc

SEQ ID NO: 3868 - DNA, 2920 bp, Arabidopsis thaliana landsberg
taataatttagatgttgattttgtttaattgggttgttcttttgtgaattgtaaaattcctgctggaagctcacctcgatcttctctttcttagccatattcttagcaacgattccagttttcaggtcaatgtcgatgttaacgttattagcaattagaatgcgtttaaaatgctttgttgaatatctcttaattagttacgacaaatttgtatgtggattcaaaataaatctaacacccatcgtaacaatcaaagagagagataaactattttttcaaataagcataatctggaattttatggggaagaatggagaagacaagacgacaacaattttgttatttcttttttttttttttttttttaatttttaaagaggtttgacatataaagtggtttggtatcgggttgagtgaatttttattgggtttggtcagcaaaccgattaaacccaaatatatggggaaatagatgaaaactatcgattttggggagatatagatcgaaaagtatcttttcggggacaactggattgtagtcatagttcgggctctatctggcatgatgtcatagttattgtggggaaatagactgttttttcgaaaatgttagacaaagtttagatagaaccagtgatagcaactagataggaagaagatctttagtgtgaaagagtttacctgagggtcgagtgtgactgagcatggtgtagctcgccggaaaggctgtgaatttcgccggaaaaacatgttatatacttatatgtatctctttaactgtttactttcaagaaaataaaaaaaaatcacaaacggaaagcaaaatttgccgatatgatggtaattgcttcacgataatcttctagcttacctatgttgcatgaggtgcttgttgaacagagaagggtgatgttgtattagagagaatttgagttctactttagaaattcgtattataattttctatttttctctttaaatttctctatttttattggttggtcaaaaactcattgcattaaagtaaattttttttttaatctttaattgaataacactagattataaatagaattctaaaatctttcataatactcttgaaatcttattcagtttatatcaattctatatttaatcatgagcctataacaattttgttggagtattatatctggagaataaattaaaccataaatagtttatttataatcaagttgaacaaatttcaaatcatccaaaacaagatcatttctctaatattgatatatgcaatgacaaaagatccaaaagtgttgacttcattgacattcatttttgctatctttttatttttttgtacgaatactcttaagatctttttcagttgatatcaatccaaactttaattatgaatctatcacaatatttttgaagtacacaaggaattgatttatttataatcaagttagaaaaattttaaactacaaaaataacattgttacacagaattgcatcaaaatatcattattgtttttatatgtatttatgaagtaaaaaaatattaaaatcttataaataatcagctttatacacaaaaatatataaattaatatttcaagtaacaaatgaatctaaccataaaaattgtaacttcaaattatgcttttaattttattaacaatacaaaaataaacaaatagtaaatataaattaacataaagaacaatcaatgtaattttttttaacaattttcaaaacaaacccacgcgtagcgtgggtactcatctagtaaaattaaagccaaaagagactcgtgctgtcaagagtcgagacgtagtacgacacaatggtcacaagggtgtggtgaaggaggatgaaaaattcagagcttgcacagagattcaacttttctcagagggacaactggataaggttccagattgttctgctggttttataaaaggactcgtttttgtagtatcaaaaacatgtaaaaaaaataaagcttgagagactttttttcattcacagagagctagagttgcaaaatgaagtttggattaaccatatggcttaactgctacactgatggtgagtacaccattgtctccaccattctcaaagaacttgcttttagggttcttgccattctcctgctgtatttcaatcttggtgtaaaagattacatcactgctcaccaccacgagcctgctcgacgtgctgctggttgggcaggtatgatattcacttctttctctgcccttgatgctgctttgagggccaaacacaagaagctcaggttatttgatgaaatctctatagtctccatctatgtggctctatgggctatgcttttctcaatgtttcagcagataagcatcttgttcatgtgcatttgcggggtctctgcttttatgggattattcaattatatccaccggcgctctgttggggtcttgaatgagccgcccaagcccaaagaagctatgacatccttgctcaatgcaatgaagaatgagcaagaaagtacacaatctcttcttgctgcagcaatgattttggctgtgactgagcctgagaatccaagcaccctcacgttggttaacgcattgaaagaacgttatgttaccgctccttccatttaacacttgaaacacccaatgtttgcttctgtttatgtattttcttctatctagttgactttttggattttgtttcttaggattattggggttcaatcctttgactcttttcggatttgtggttttatttatgaatttgggtttcttaggagtctcttgcgtttaacctatgtatgtctctgcatttacattaatgattaatagaaaattttgggtttaaccctatgttcgtgtctctgtctttacggggatcggtacatatctttcagtaccaaacaaaccatactgaaaccaaattt

SEQ ID NO: 3869 - DNA, 1063 bp, Arabidopsis thaliana landsberg
gaaccttcttcacataatccattgatgaacaccaccaccatcagaatctctcactttatttgacttgaaaaaccaaattacaaccaaaaaagaacagatttttgcttaatctgatttgcttagcatttaatcacctaatcattcaaaaatgttttgattcgtatctatttttcttttaccaacaactttacagaaccaaattgctactaaaatagaataaaaagaaagaaaatttaaaaaacttgatagagaatcagaggaagagaagattgggattttttgggaggtggtagaacaaaaaggtcagagaagatattattttggagtttgatgacgtggcagaactaacctacgtgtcaagtaggaccagataaatttacgcatgctgagattagtgacatggacaaaatcaaaagcttggactgcgaggggttggtttagagattatcgacatgttaaattattgtcgatttacaaaaaacaaattacatatttccatttgtttcagatagattattattatcttcacacaccaaaaaaagatagattaaaatcatgacagttacgaaaatgcaaagaaaaaaggaaaattgacaaaacaaaaaggaaactccaccaaataagtttccgtttccttttcctagtagtaatccgagttgtgtaattgtaactagaaaaacaaaagccctaacttttctataaatactctacgcatcaccacagatctctcattcacaagtctctcatacttctcccaaatcacacaaactgattaaacccttttctagagaaatttctgtagatcaagaaatacatcaatggcagtctccgataataccttttcaatctcgaccatgttcaatgctttaccaaaccctacagaaacctccggttacattcctcctcctggattcgccccacgcgcctccgccacgcccttgcacgcagctctgttcaacctaatgactgacggcgatggtgtgtcttactttaaagagatgatctcaaagtcagacaaaacagagcttcagaggatggcctcgttgcttacgtcaaactccga

SEQ ID NO: 3870 - DNA, 573 bp, Arabidopsis thaliana landsberg
aacgtggttagatattccggttggatgattttaactgttttccggaacttcaaacagttgatattttaaccggttgttgaaatcaactgttttactctattttaactggtaaagtcagaacaagactactatttgagcccattgttttggtgagtctaggcccaatttcgttcagtgtaataaagttaatatataggcccacgaacaagtgacgcgcatctacgtcatgacatcattttttgaaatgtcatgacaaaataataaataatctctaatactgtaaaatgcaaaagcgaaaaattatctgtaaaaatgatgaaactgtttttgttttttcatcacattttcggaatataaatattaccaaacaaaaatggtgttattaaaaaaattgtgttagaagcacataatgaaggaatgaaaaaaaaaaaaaaaatgaatagaaagaaaaacaaaagatggtgaaaacgaatccattttctgaaatcgagaaacattttcactaaagtgggaacaaaacaaaagaaagctccgaagattttttaaaatagtaaataaaaagagagataagtt

SEQ ID NO: 3871 - DNA, 638 bp, Arabidopsis thaliana landsberg
atctagaggatccccttttcaaattgtgtaaactcttcttcataagaactccaactttacaaaacaaaatagtagtttatgacgaaacacttttcttaccagagttatgtaactacattgaacaccggaacaattaaactattgtaagctggtttgaaaaataaacacagagttataatcagcaacgaagcctaaatgagtccaagatgtttgcaatgttgcttccgtgagatctacgcaagagacggataaaaggcatgagcttctgcaccaaaccccaaaacagatccatcctagacatcttggtgaatctcagagccttgaccaccacgaaattcccaaattcattcctcgccagcctcatcaacctgtctccatcgcaacccaaaagctccacaaccaccacaaccattgactcctccacctccaaaagcttctccacgatgtagcttccatacttcttaaacgatagctcaatgcactgaccataaagattaacggcgatgttgtgaatgcaacgcgagtcatacagtgtaagcacatgttggaccacaaagttcctgaacatcgtggttaccggagacgttggatgcgcaatctagtagtgatcctgtagtaggatcgcagcgcggttatga

SEQ ID NO: 3872 - DNA, 1757 bp, Arabidopsis thaliana landsberg
gaaagagatttaacacaccagaatgccaacgcagattgcttgacactcggaaaaagataataattgcaatggatgctgcttttggcatggagtatttgcactcgaagaacatcgtccactttgatctcaaatgcgaaaacttacttggtcaatttaagggatccacaacggcctatatgcaaggtaacatatatattgatgaagatcgttttcccctatagactgagaatcctgagaaactgctacttaagtatgaaactctgatttctacaggtgggagatcttggcttatctagaatcaaacgtaacactttagtatctgggggagtgagaggaactcttccatggatggccccagaactcttgaacggaagcagcacccgagtttctgagaaagtaaactaatccaaccactatcctattagtttcactaacaacacaactcacatttgttttcgatctgaacaggttgatgttttttcatatggaatctcgctgtgggagattctaaccggagaggaaccctatgcagatatgcattgtggagcaatcattggtaagtcaaaaaccatcactcacaatttcacttacctcaaaacaaaagccactctatgctcatttatttcctctttttaaggcgggatcgtgaagaacacacttcgacctcctataccaaaaagctgttctccggaatggaaaaagctgatggaacaatgctggtctgtcgacccggattctcgtcctccattcaccgaaataacatgccgacttcggtccatgtcaatggaagtcgtcactaaaagcaaaagaagagaaaataaaccctgacttcaaaacttcagaaatcaagaaaacgacgggtcagttcatcgacattttcacatctatcgaaaaatctgcatatttattctcattcttcaactgtgtacaaaaacataactgtaaatctcaaaatgtcaaatgtaaatattattgccaacacagaagatgagaaacagattttgcattgtaagcacaacaaactttagtgtctacacatccttgtacaagagctggtactttggtatcctctctggcggtattggacattgaacaatcatcttccctttcattgctcctcgatatatggcctatacataacacaataacaaaaacagagtatttaaattagtaacaactctttaaaagcttttaggaattaatgaaactgaattgttcttgttacctcaacaacatcaataaagtcttgttttatatgaaatgcaccaacccatttagtatgatccgcagttctacaatataaccaaaccagaattaacataaaacaacctaaaccggctttaatcagctactagaacaagagattaattaattacccagaatccaatttcatatgatgcgcattgaagaagaagatcgtcgaaggaaacaacgtgatatcaaaatacttcacatacacttgaacatcctctgaatcaacatcaaccaaagctaccttagcaaatttcgaaacatctctcaccgatttcgcaagctgaaaagaaaaattcgaaaactttaggggttttgattaatcgaaattagagaaatcgaattcaaagatagacgaattgaatacgatttcatcatgctgaagacaaacggcgtcggaggaacgaccaaatcgtaaaacaagaacttcatcaatggtgtctctgataacccgatcagtctctccttcgtcgttaacgtcttcagaagataactcatttcggcgt

SEQ ID NO: 3873 - DNA, 2055 bp, Arabidopsis thaliana landsberg
  unsure (1)..(2055): unsure at all n locations
tctacatttggctcacatcagagatcctagggtttatgttcattgtgttggacgtacagctagagggggtagagggggactggctgcaagcattatcactgaggtaaagtagtaaatcatagaaccacatgagacatcgaccttaagtgttgttggttatggttgggcttacagcctactaacccttccatatccttttgcagaccgatgtgaaacttatccataaaatagaagaggaagttggaaaaaagatggaaccatacaacaaaaaagtaatcactgacagtttagaagtcacaaaggtaagattcgctgcgttatacatcaaagttctgatcaaatactgagtcataccagctgcttcgccatggtgtctaggttctagtacacctgggtatttaagaagagtaagatcagttattggctgcgagttatatcctgacatgtttaactgatccaaacttcgaaatctatatctgcaggtctcaaaagccaaaagagtggcaatgatgaagatgctagataatggattcgaagacaaggttaaagaccggaggaaattgaaacggaaaacacttgcggataaagggttgcttaagaaacggagcaaaaggcagaaatcaacagaaaattgatgactaaaaaatcatcttcaagttttgttctcttagctgcattttgagcagcaaatctctaagaatctatgtttaccaatgttcttactttgttcacatttagcaaatcccgtagtcttgaatctcgattgttcacatttggtaagaaacgttcttacattaatctatcatatttccttctcaacactagcgagaaaaacaaatttatttatttttttttgttttgttttggtaaaaaaagggggaaaggagaaaagggtcaacaaatatctccctcctgaccccaaaacacttggaaagagtaaagataaacctataaaatatcgaatctgtttcactttgaagccttgtgagctggtggtttggattggttcgaagtagctgcagttgacataacacgtaaccgaccagctatctccgtgaaggatggtcttgctgttgggttaggcgcccaacactcctacattaatattcgccagtccgagtcacagtagctcggtatggtcggcctcagtgtgttgatcactatcccacctgcgtttaaaccattaatttatgagtaagataagaacaagtcgtgtcccatccgattttaccaattccaggccagaagacaccagaaccgaaaccgagatgggaaagaaaataagctgactataacctcatgttttctgaaaatccttcaaagtaaaactcaaacccaaccaaaacacacacctattatagcaccgtagtgcatattagcatatggttcctcgccggttagaatctcccacaagactataccaaaagagaagacatcgacctgcaggaaaaacagttataactcaatttgttcccattctttatattcactatgaagtatttaattttaccttctctgaaactttgctgctgctaccattgagaagctctggtgccatccatggtaaggttccgcgtacaccaccagataccaatgtatttcttttgattttcgacaaaccgaaatcaccaaccttgaggaagaacaaatgagtgaagagtatgaataaattttgttcaaagacatcatatgaatcagcttttaccttgcagattgggcgagaaggatctttgaggttcacaagtaaattgtcacatttcaaatcgaagtgaacaatgtttttggcgtgcaagtattccattccaaaggcagcatccatggcaatgattagtctcttacgacgatccaggtgtctgacaatattaaaatgtatagcaagtaacaatattaaaatgaaaagcaagtagtcttaaaccgttcatcagatagnnnnnnnnnnnnnnnnnnnaagagagatttgtacctatctttcctgactagaacatgtctcagagaaccatcaaccatgtactctgttacagtagccaatgttgcaccaggtccatcttttacaac

SEQ ID NO: 3874 - DNA, 1828 bp, Arabidopsis thaliana landsberg
cttctttctttttcttctttgattataaaaaatttcttctagtgatgaattcgaagtacacaacttttctcatccttatccttttctaatcgatgcagattccagctctatgtcttctactgatgatttcgttgcagataccacgcctgaactcatgtttccgttttatcatcatcctttatcagcctacgattattcatcaagctatattcttcaagagaaggcatattgctgctttatgtgtgtttattccctctttgacaaagaacccatgcttttgcctgatatcgactatcactgtacggagtgtggcttgaatatgcacaagaaatgcatcaagcgccttttcctcaactggccatttctatgcaatcacgttctcaatatcttccaaaatactttcacatcatctgacaatatagatgacttctcttgtcatttttgtcaaagtaggattaagtcgtcgtttgctcgtttcacgttatgcaacataaacgtggatgaaaagtgtatggtggaactgcaaccaccactcaaaatttccgaaccaaagcaccacaagtatagcctcaccatcttgttatggctagtcaccttcatatgtagtccttgtggtgtggaaggcgatcacaatccttatgtatgtcttgaatgcagtctgatggttcatagagattgtattgaggatctaccgcgagtcataagcataaatcgtcatgaccatctcatttctcatacttttcatcttggtgaaagagaaggaggttgggagtgtggagtttgtcaaacgatgattaattgggtctacggagcatataaatgctctcgttgtcctagttatgtcgttcattcaagatgtgctacaaaaaaagaagtatgggatgggttagaactcgaagatgtgccagaagaagatgaagaactcgaagatccattcaaggtaattaatgaaaaaggagatattgttcattttagtcatgaagaacatgttctcagattggatgtgaattatgttcatgataatgatactatgcgctgtggaggttgtattcttcccatcaatgatgatccatgctacaagtgcgtggaatgtgatttctgccttcacaaaggatgtgctagtcttcctcgaaagaaagcccattttttgcacaaccataaacttagcctacgggctcataaggatgacgtttatgtagataaatgcggagcttgtaaaacttattctaatggtttcaagtacgagtgtcacgacaaaagcagctgtagaggtaatataaagtatgatatccgttgtagctccatatcagagccgtttcaccatgatgatctgcatccacatcctttatattggaccttggaagaaaccaaacagtgtaaggcttgtggcacagagatacttaagcctttaagttgtttggtgtgtgagtatgctctatgtataaggtgtgctactttaccaaaaaaggtaaaacataggtgtgatgatcacttcttgtcactatgccatgatgctggaaactcgagcggtgacttgtggtgtgatatttgtgagaccaagaccgatccaagtgtatgttactacacttgtgataagtgtggggtcagtctccatattaattgtgtactaggagatttatattatacgaaggtaggactcgtctatcctggtcttgaagtacttcccaacaatggtgctactcgacctttctgcaacagctgtaaagttcgttgcaagttcagcttccttatgaagcaaactctaagagaaccttgtcgtacttttgttcaatacgttgtattcctagagcaaggtaactataatcat

SEQ ID NO: 3875 - DNA, 765 bp, Arabidopsis thaliana landsberg
aggatcaacaacgcaggtcaatagatgatcaatcagagtccttcaggtaaaaaccactcttgtgtgtgttttcatttagacatgatcataaaactgaaatctccatgtatgaaacacagatctccatttacaagaagaggcaatggtagatcatacggagatttaactgttccagaatcagacatatccttcatcagttccggaagaccaagcattgaccgtatcttcccttctctatatgacaacaatgatccaagccgaactcctcctaggctttcaaatttctcagacatggattatagttctagccttgatcagtcttccaactatggaaggagatcagtggatatgaactcacctactgatttcgagagcgaaagattttcatccgcctctcagtcaatagtaagaccgataaaatcttcttcaatttgtatataactagtgttattgacattttgacaattaccaaaagcaggatgatgtagaggctgagatgaggaggcttaaactggagttgaagcagactatggaaatgtatagtacagcttgcaaagaagcactcacagcaaaacaaaaggtaagagtttctgtaaaaacaagtgtttatggttttcaaaaatctaaaacatgttttggtaattgtaggcgactgagcttcaacgttggaagttagaagaagagagaaaactagaagaagcgagaaatgcagaggaagcagcattagccattgcagagaaagagaaagcaaagtcaaaagcagct

SEQ ID NO: 3876 - DNA, 1055 bp, Arabidopsis thaliana landsberg
  unsure (1)..(1055): unsure at all n locations
tgctccaagcagaagaaccatgttagggtgccttatactgcataacacttcaacctgtgtttggttgataaatagtagaaagcttaattaaagtctgttagccaagaaagagtccaaggtgtatttcatagacattgttacgagacttcacctctttctgaaactgtgacctgccttgagctgcatctgggcgcaaagctttgacagccacaggtgtgtgatccagataacacttgtagacaggtccataaccgccttctccgatcttgtatttatcatcaaagaactctgttgcatcctcaatctcctcaatggagtacttcctgtatctgacatcctttgctaaagcattcacggcttttgttctcgcctctgattccttcagagctttcatttctgcatcgactctctttcgggactcgatatcagcaatcctttgagctgcctcagctgcttccattgctgctttggactttgctttctccttctccgcaatggctaatgcagcttcctctgcaagctttgcttcttcgaatttccgttcttctgctaacttccaacgttgaagctctgttgcctgcaggttcaacaattcgcttagtaggaactagtgagaaacaaaaatgaagcaacactaatcatttttgcgagagtcataccttatgttttgctgtgagagcttccttacaggctgtactgtacatttccatcgtttgtttcagctccagtttaagcctcctcatctcagcctctacatcatcctgattacaattctaatctggttacatactcttgcatctagcagttacaagtatgtaacccgaaaaaagattcacagatcagtcttannnnnnnnnnnnnnnnnnnnnnnaacctttcattctcaaatgagccagttgagaaagcagttggtgagctcaaatccattgacctccttccgaaggtcattgactcgaagctaccatagtcaacgtctgagaaatttgatagccttggaggagtccggtttggatccgaattgtcatataagggaggagagttgcgctctatgcttg

SEQ ID NO: 3877 - DNA, 735 bp, Arabidopsis thaliana landsberg
atctgacaaaatccctcctggttattcagagaagatgcaaagctcagccaaaaagcgggaaatgagcggacacaatatatttgcagacgggaagtcggaatatcgggattactatggtggtgcgaggagacctcctggtggcgagagcagcatttcattggtctaaaataagtcttaaaccacagacactcttttttttttttttttttttggtttaagacagacactcttaatatgttcatgtttaggatttagttttaaacaaagtagtttgtgttcgtgtggtctttttttgtctacggtctcatttataatgtagaacttcaacacaggctcatgtgttctcttctctttctgtgcctctttcttcatcttttaatcatttgagaagacgaaggcaaaaaaaaatggcttcaaaattcttttagtatgatgtcgtttgaataagatatcaaaagtaagtaggcgactccactggggatcgaacccagagtctctggtttcgtagaccagcgccttatccattgggccatggagtcatctctgtctaatttgagacgtttaaattaaaaattgtcgcttaatctatcattaatgaatgcttttgcctcttggactgagttctctaaagtgattggaaaataaaattctattttgtgaaaacatagtgtacactatataacaatatatataaataaataaaataatgtcacttggcccgttggccgacaactg

SEQ ID NO: 3878 - DNA, 438 bp, Arabidopsis thaliana landsberg
ttacaccgtgcagaaatcaggtgcagtcttggggatggctcctggaatatcaataggtttgttgaacctgcagcagagtcatatataacaccttcaattttgacagctgatccaacttttctggctaaaagactcacagcaaaaccggaaagaaaaagataaaaaaacacacctgagaaagccacctttcgaggaggaaccaaccaccaatacctcaatcatgacctgatttgcgtattcgactaaagctctcgccacatctgactcctccaataacacatctttgcattgtatctgaacatgttccatttcaggttataagcataggaagagacagagcacaggtaaatttgttttctggcttatattacacaagaatgatggagactcacatctttgcgtgaacagaggcaacgaaaaggaagaaacaactgttat

SEQ ID NO: 3879 - DNA, 6798 bp, Arabidopsis thaliana landsberg
  unsure (1)..(6798): unsure at all n locations
ttcttcttatgttatctactgctttcggcagaccgatatcaagatcagcgaaagtgtagagctggtaagctctcatttgttcgtcttgtggagctggtggtaatgcaccacggagaggtgcttgccctgcaccgaattccggcggagcaaatgtggtgtagctaatcttgtgagcgtaagctaatatgtcctttaacttgagctgagatgaaactgtggttgaagaagaagaagactcattatcattgtcttcgtcatcttcttcaattttgcttcgttttggtttgcggtaatcggagtagtcgtcaacaagcatatcgagaacacgttctgcatccttgagtttgttagcgaaagcgagaagagatgaatctttggatttgatctcacgcgccaccttctgcttcgcgtcttgcagatcgaggatctcttgaagctctgtaacggcttcgaagagctgagtctggagggaattgaattgagagaggatctccttcgtggatgaaggactagggttttcaagcggcggcggaggtggtaacgagtgtgaggagaggaacgaagggagagagccacggaaagctgagagccagatagctcgattgggagagacgtcgaagagcttagatgtcaaaaccgccatctgctggagaagagcttgagctcgcggtaatggaggaaggagcgatagcaaggcggaggatgaaacagccgccgaagctgaggctgaggaagcggcggcgacggtggaggaaggaagtagattaggctgttgttggatctgttggtgctgagattgggaagatgaagaagaggttggatggccatgacgagtaggcgtcggattttgtacggaaggagagccaggacctgttaaccctaatctcgccggagattgtacgatctgatgctgtagcatcttcgccgacggcgaaagaatctcttaaatcgaagataattaaagagacgaagcttctcttctctgtttagtgttcaactgtttatacaaaattcgcaaaccctcagtatcaattagaaggttctaaagacccgctaaaaccataccgatacggttcaatttcctaattaccattaacctggctttcgaacaattgttattgacaataacagagacgaatcatggacgttaacgcttgatacaagtgcaatacaacagagttatgtatctcacttccgagttaagtaacaatttgctactgtgttacatagcttttggttaaacagataacgagaaaataaccaatcagagaacgaggtaaagaaacttacatattacaaaaggcatgaaaaaataattatcaaaaagaagatacaattggtaaccattttctacacacacatacatatatctcccattcacacgactggttctgaccgaaaaaacatatgaacctcttgtttgtgacgacgactcagttatgttctcctcagacaacaaccgtacgatgcatctgacacaatccaccatatacagagatcaatagcaatttggtagaccgtaagagcaatattcttaagaccttaagggtagtgtaatcagaataatagcagcaacgctgagaatataacagttatgatctacagatcattcttattatgacgttcgatcatgtgagacaataactacagtaacaaatgagaaacattaaggtgaaaaccttagtgaactgtggtgttaggtttcgatataatctattaagtcaatgcgaacgttcttattatagtgttttatattggtgtcggagggatgcggtataacaccaaacttacttgatagctggtagagagttgttgcgagcaagaagtcgtcaagaagatatataacttgttgagtgcacaaacagctaagagcttaagtgttcatgaccttcctctgcagcatcaacatattcagactaaattatggttagattatatctcatagagcacaacaatcctcatttaatcattggaacggttaaaaacataacacactaaaggcgaactagtcttaatttctatagttaaacttcaaggcagatagtaagtaggtttgttagctgttagagactttttctcactcattcttaacacgaaaagacaaatgtgcctcacatactcaacgagcacagaagtaatgataaaattataacttacagtaggttcaaagtcagggtttgacaagttcactgtgaggtttctcatcaacagcaaaacctgcaagaaaaactgtgattagtgacggatactaggaaaaagaacaatcactgacagctacaaataggtaccatgacacctaaaactgactcatggttgtaacaatcccattatttgaccaacatctccatagaatcatggtactttggctttttggtgtttccaactcgtgaatctatatattgcaagtactgatctttatatttaatcttctcacacagctgaatttattcgggaactcaaagaagaagactaaatgattgatatgctgcaacacacatatcagttaatctaaaggcaagtaaagctccaactcacagtttcgaaatttataggatccatttccttgagctttttcatgcggcctttgctgtcaggatcgaacacactcccaatgaagttataaacctcagcaaaatcaggaagacctgcaaagcaaccattacaacagcgtcaaccacaaaatgaaaactaagaaatagtccctcaattgttcagataattaccatgcattgagggagcttgtttcgccagtctcaaacccttagaatctgatagtgttctgcttgagcttccgataccagatgctgaaggactagtttcacttatcatgtcatttgatccaacatcaactgaaacaatgatatgtaagccgcatttagcatatgaaaacttcagaagatagagtgactagactaccaaagcaaaatataaaaactgagtacagatgagaacgcatgccttctgctccacaaagagtatcaagttcatcttctggtggaataaccccacttacagcaatgtttaacaatgcagatgtatcatcatcccatggagtatatccaggcaggttatttatttgagtaggaaaggacatggaaacgtgaagcgacatttgagctgcagatttgagttgaaatcagattgattacatgttactccatctgtcaacccaaagtaatatctattacaatagaactaaccatttttcgatgccttttgaggatatggatgagcagctttgcgcttaggcctagggggtggaacatgtgctaaagtcccatttttttggacctttagaaagtatttctgggcatggctcctgatctgcagtaaatcaaacaggcacaggatgattgagtggggaaatgtgccaaggttgtatattaaaccaaaaatccaaagaagctgatctcaaacctgaataactgtctttgaaccaacaaaatcttctatctttttccagtcacgatcaaacctaaggacacgagaaaattgtcaggacaaagtaagattcttttttctaaaagagagagaagcctttcacacacacaaaagagcaatgtaatatgtggaagtaacgaaccattaccaaaatctgaattgtagtttaggactgtagttggaaattggtttcatgcatagctctaaaagctgacttgtagtaagttttttcagttctcatgttaaacatttttaataaagaaagatacgacttctgcaaaataccactatttatgcagaaaccagatgccaagtcctctactcaatcattttggcaacctaagataagcttaaaccatacttcggttttatgagaagaaacattcatcagcgattaatataaattctgatctatcgaatatacaatccaacctaacaaatcaaagaagacattgttgcttctgcaaaatccaattgcatacgcaaaactccagatgatctaccacataaccaaacttcgatctgattaagcaaattaagtagaaattacgcgaaattacgcaaaattcagctataaattagagctcgaaacacaaagaatcagtcaatcaaatagctggtggaagaaaaaaagagcgcggtaaaattacaattgaagagcttccagaaacttgtcgtgttctccttcagtccaactctctctagacttggtgattgtgtaagctttcctcaccttcttctccggtgcttcaccagcttccgtcgttgcaatcgtcgtctctgtagcatctgtagaagtttccgccggtattacttcggcgaccaccggattggttgaggtcattatcggtattttattcaagatagagatcgtctagagagagagagactgaagagagaaggggttagagagagaaatgacgacgatatccacatggcgggcaagaagttggtgtataatatgtggagacgcttcgcttgcaatttcaggccatccatttttctcctttttcttattttatttcttaaaatttaaaatcaaagtaccaaatcggtttatatataccggtgtattttaacactacaaatccggtccggtttggaagttgtaaaaatagcctttcaaatccaatccatttgatttacatgaaattagaaaaccagaaaaactgagccacaatgatgatacgatgatgatcctaaccgttggcgaggaatgagagactttgttattgtctttggctcctcctccgccataaccaatcctcaccatcaccaccgtcgctgttacgccacagcaccagagtccaaccggaaaactaaatccaattcttctttcaccaagctacttccgtcactaccgcagcaacattcaccttctcctgcttcagtctccgcgactcattctctctctagccacttctccaatgtcgtaagatggattccagatggctcgcttgagtattacgctgattttgcctcgaagctagctgaggatggtcgaattgaggacgtcgctctcatcgccgagactttggctgcagagtccggagctaatgtggctcgtttcgcttccatggttgattatgatctcttatcgaaagggatttcgtcgaatcttcgacaaggtaagattgagagcgtcgtttacactttgaagagaattgagaaggtaggaattgcgccattggaccttgtcgatgattcgtctgtgaaattaatgaggaaacagtttcgagcaatggctaactctgtgcaagtggagaaagctattgatctaatggagatacttgccggtaaatactatatcaattcttgctgttacactgtgactatgaactcttgaattgattacctgcttcttatttcaggtctcggattcaaaatcaaagagttggtggatccttttgatgttgtaaagagttgtgttgacatttccgatcctcaattagctattaggtaaggtttgtttcccacataacgattcaggttaatggttttcaaattcagaaagttatcacaagaatgctggatattgtgagttctgctaacgatttgatgattattgaatccagatacgcatgtcttttgccgcatacagagttattgctttgtagaattattcatggtttcggaaagaaaggagatatggtctctgttatgacagcatatgaagcctgcaaacagattttggatactcctaacatgtatatatgccgaacgatgatagatgtttgtggcctgtgtggtgattacgttaaatcgaggttcatatatgaggtaattccctaattatactgtatttttgcgtaagtatcctttacgctcgattttgcctgccatcctgcatttgagattcgtagttaattcataatcttgtggcaggatcttctcaaagaaaacattaagccaaatatttatgttatgaacagtctaataaatgttaatttcccataatcttgggtacacactaaaagtatacaagaatatgcaggtatgttctttttcctgtctcttgaatacaagtatttgaattgtctagatagtatattagatttaggagtggatatggactgaccttgaaactctacatgtcatgggcagatacttaatgttcaagctgacatgacatcctacaacatactactgaaaacatgttgcctggctggacgggttgatcttgcccaggatatatacaaagaagcaaaacgaatggaatcttccggattgttgaagttggacgcctttacatattgtactattataaaggtacaatatcagtatttttggaaaactaagtttatcattagtttttgcttttatatccctaagtctctgaataatgccttaagatcaggtttttgcagatgcaaagatgtggaaatgggcactcaaagtcaaagatgatatgaaatctgttggtgtaaccccaaatactcatacatggtcatcattaatcagtgcatgtgccaatgcaggtttagtagagcaggcaaatcacctatttgaagaaatgcttgcatctggctgcgagcctaattctcaatgtttcaacatcctactgcatgcttgcgttgaagcttgccagtatgacagagcttttcgtctttttcaatcttggaaaggaagctccgttaatgaatccttatatgcagatgacatagttagtaaaggtcgcacttccagcccaaatatattgaaaaataatggtcctgggtctttggtgaatcgcaattctagttcaccttatatccaagcttcaaagagattttgcttcaagccaacaactgctacatataatatactcttgaaagcctgtggtactgattactatcgaggaaaagaatngatggatga

SEQ ID NO: 3880 - DNA, 4032 bp, Arabidopsis thaliana landsberg
  unsure (1)..(4032): unsure at all n locations
caaaaattacctaacatacttttcccatgcaactcacccagactttcttatttaacatagccttcgtgtcttcacacatccaaacacgtctcttcatgcactctctcgcttctatataagtttacagtaacataacaggtttatacatatccaacaaaagtcccataaactaaacaataaacactgctgtctcttcttcttcttcttcttcttcttctagaacagtgcgttatgagagtgttttaaggccgttaatttgttaaatcactctttaaaataatttcttttgtatctatggctcgtattgtagcagctaatgatgatgattccatggagctaaacaccatctcctctatacacgattcaacattagggcaacttctgaagaacgttagtgacgtcagaaaaatggctattggagacgagactccagttcacgagtccttaaaccaagactacaacgatggttacatgcgtacagttccattcgttctctcattcgacaatctcacatacaacgtctctgttcatccaaaactagacttccgcaatctctttccacgtacgagaacagaggatccggagatagctcaaaccgcgaggccaaaaactaaaacccttctcaataatatctctggcgagactcgtgacggagagattcttgccgttctaggcgctagcgggtcaggcaaatccactttgatcgacgctttagcgaatcggatagcaaaaggaagcttgaagggcacggtaacgcttaacggagaagctcttcaatctcggatgctgaaagttatctcagcttatgtaatgcaagacgatcttctcttcccgatgcttactgtcgaagaaaccttaatgtttgcagctgagtttcgattaccaagaagcttacctaaatccaagaagaagcttcgagttcaagccctaatcgaccagttagggataagaaacgctgctaaaacaatcattggagacgaaggacaccgtggaatctccggtggagaaagaaggcgagtttcgatcggaatcgatatcatccacgacccgattgttctcttcctcgacgaacctacttctggtttagattccacaagtgctttcatggtggttaaagtattgaagagaatcgcagagagtggcagtatcgttataatgtcaatacatcagccaagtcacagagttctcagtttacttgatcgtcttatcttcttgtcacgtggacacaccgtctttagtggttctccggcgagtctaccaagctttttcgccgggttcggtaatccgataccggaaaacgagaatcaaacggagtttgcactcgatctaatcagagaactcgaaggatcagctggaggaacaagaggattagttgaattcaacaagaaatggcaagagatgaagaaacagagcaatcctcaaaccctaactccgccggcttctccaaacccaaatttaaccttgaaagaagcgatttccgccagcataagcagaggaaaactagtctccggcggcggcggtggttcctccgccataaaccacggtggcggaaccttagccgtccctgcattcgcgaatccgtgtctggatcgaaatcaaaactctcaccagacgctcaatcctcaactcccgacgacaaccggagctactcggaatgcgattagccaccgtaatcgtcaccggattcatcttagccaccgtattctggcgattggataattcaccaaaaggagttcaagagcggttagggttctctgcattcgcaatgtcatacatgttctacactagcgccgatgctcttcccgtgttcctccaggaacgttacatcttcatgagagaaactgcttacaacgcttacggangatcctcatacgttctctctcacgccatcgtctcattcccgtcgctcatcttcctctctgtagctttcgcggcgacgacgtattgggcagtgggcttagatggaggcctaacgggccttttgttctactgtctgatcattttagcctcgttctggtcaggaagctcctttgtcacgtttctatcaggtgtggttcctagtgtgatgttgggttacacaatcgtcgttgctattttggcttacttcttgttgttcagtggattcttcatcaacagaaaccgaatcccggattactggatttggtttcattacatgtcattggtgaagtacccgtatgaagcggttttacagaacgagttctctgatgcgaccaagtgttttgtgagaggagttcagattttcgacaacacgccattaggggaactaccggaagtgatgaagctgaagcttcttggtacagtgagcaagtccctcggggtaacgatatcgagcacgacttgtttaactactggttcagatattctgaggcagcaaggtgtggttcagctgagtaaatggaattgcttgttcatcacagttgcttttgggttcttttttaggattttgttctacttcactttgttactaggaagcaagaacaagcggaggtgaaaacaactagaagacccaaatcaaaacatacttgtattttctgtttgtaattccttgaattgtttaatgaaaatggtttcttttcatatatataaaaagaggtatgtctcctggattcccttatctcaaaatcttatagaagaataaggatttccatattcacaaaaacgtctttacaaacaaatttgacttatcttccaaacgtttcctactaacagactatcaagtattataaacctaatgtcatacctgagattgtgtgtgtgagcagataatgatgatgatgaagccagagagccttggattatcttcattggtctccttaagatcaaaagatatgatgaacttcgattttgctttttctgtttccatcagactataacaaacattaaaaatattccatcatgtaccgtgtaaaaaatcattgacatctagatttccatctccatgagcaactgcgtcttcgggttctggcatgaagagactcgttgatgtctcctgcacaaggaataacacaaccagttctcaatccatatcttgaaaataaggatctacaagtttcataacaaacatatggcaaatgcaaaagaagacttaccttggtatcaagaagcatatctccgttgctgtcagtaatgatgttagcaccatgagtttttagccattccaaacagtcctccataccatcggtctccttttcatcagtaccttcgcttgcagcaccagtaaatcccaacacttggactatgtatgagaccgggattgtaggacgacaactacgagacataaaattcacagccttgtaacgcatcttctccacatagagatctgcaaacataacaatttcaccatatctttacatatctactcattcaattgtttaaatatatcaagagagttttcatgtatcatatgacccttacccatgaggcaactattcatgtttggtgcagtcttgtagagtctgaagaacataacataattccctgatgtgacagctgcacgaactgaaagagcatgtctaactgcttcatccttcttatcttcttcggataatcttcaaaacagaggtcacaaaattactcaatctcatgcatacaaacccaattcaaagaggtagtagtaacctctttgcactggtaggaagagatgttacaaaaactcaactatcaggtaggtggacagaacattaataattccattactaactcaaagaaattgtgtagcaaaccatattctgatatttctacaaaaccttaatttataaaaaaaattcccatgaaccatgaatgcatcatgcttaaaaggagcccagagatgggactttacaactactaacctggacatggatgatagcagttctcggttgttgttagagtgtagagtaatatagagtagactgtacgcagcaaactccagagagcatccttctataccttccgcataaagagtttttaactgtgacaggcactgtaacaaaaaaataaatagaaatcaatttagcaaggctatacataccc

SEQ ID NO: 3881 - DNA, 811 bp, Arabidopsis thaliana landsberg
tgggatataatcatactacattatcaaagacaaacaaaaatttagtaattgtttaaataataactacgagacaattcactgaactgtaaggtgatatcttaaactactaactaaattgtaaggcattatgctaaaggaaaaatgtcttagcctttgttgttttgtctcactatgccaccatttatggttttctttgttttgggctggagatgccatatgagttttagggttttcttcttgtatggatgccatatgctttgtacaacattatattttcttcgttgactaaatatgtttaatatacatagagttaaattgtactaaagttaccaatttattgaagattctgtggtgtagtggttatcacgtttgccttacacgcaaaaggtctccagttcgatcctgggcagaatcagttttttcatataatgctaactccttttacaaccagaaaatgagttatgtttccgtttaaaacaaaaagtcttcaaattcctgaataaaaaactagcaatgtccaaaaccaaagacaaaactggagaaagtgtcaaatatagtcaatgcaagcttaaaccattgcaaaatgaaaacaatgcatgtcacaaataaaacttaaatgggtccgaaaacaatggaaatcataatacgaacggatcagaataagttctcaggtgaacttcttaattacgacttatcttcattcccccattgatcttgatgatgacttccaaataattgtaaatcgaaaagtcaaaacaattatctcaagaaacaaaaaccaggacgctattaacaatgttcatgttatttt

SEQ ID NO: 3882 - DNA, 3015 bp, Arabidopsis thaliana landsberg
  unsure (1)..(3015): unsure at all n locations
gggtccatcatagacctgtccgcgttctccttccatcataaacactcgacttttccctttcacgttcatcccaacaacactcgactctcacttctctcatcaaccctcactctcaagctcaccaaacactcgatctcaatcaccaattcgccttaaccacttctcgctcataaccactcgaccactcttcgccaccaccacctctcattcgtctccgttttactcgaccacaactctcatcgcctctccatcatcaccgcctgctccctctctccaaggaaacaactcgacctcaccatttgattcactcgaccgccactttacgtcttctcaatcatactctcattcactcgacctctcgacaagagcacctccgcctctccatcgccacttctcaccttatcatgccaccaacaacactcgaccgcgactcctacatagcctcatcgtttccaccgctttgccacattcactcgaccaagctaccaccactttctcttctcaccgaatcattcactcgacttctccactgctttccaccgctcaagctccattagttcactcgacatcatctcattctcaaatcaactcgttcccaaatcaaacgagaagaagaaggaagacgccaccatcaacaaccgcttcactctaaccacgaaactagtttcactcgaccttacaaaatcactcgatcacaatccacagaccgaaaaagaaaaaagaaaaaaatcttcaaaaccgataggttcactttaacggtttactctgctgtattgtgtttttggttttattggaactaacgtattaacgtttatctttgagtttcatttgttttcaggtttcatcatgagtaacaacaatggaaaatcctttatggatcctgattataatgtagatgaagctgagtcttggtccactagaccagagagagaagaacacgtttacgagagctttagaggagaattcgaacgcaccgcagctcgacgtaatcagagaagagctgaaatcgccagaggaaagagagcgatgtcgagtagatatgagatgattgatgaagatatcaaaactgagtatgagcccgagtcatggcgcaaggagacgaagctgctgaacatacccgacgaggttacaatggaggaatatatcaggttctttaagatgaatgatttctggggaacgaggtatccgtgctatgagactttagcccagttggggttactggaggatgtgcaacatctgttcgagaagtgtcatctggagacactcatgtcttacccttacgctgcctatttggaggagacaatcgagtttctttccacgctgcaagtggagatgtatgaggcactcacagactttgagctggataccatggggttaggcttcttgacgttctcagtggatgaacagcggtatcagctttcgatcaagaagttggaagaactgtttggtttccctagtggaaagggaaccaaacccagatttgacagagaggagcttaaggatttgtgggccactatagggaacaatctaccgctaaactcggcgcggtccaagagcaaccaaatccagaatcctgtgatccactactttcagagatcggttgccaatgtcttttactcnnnnnnnnnnnnnnnnnnnnnnnnnnnnnnngacatggagatgatagattctacgcttacagggattctccgccggacgaacggaaagaatgtcttgagaggcgatctcaacaacgcaccaccagtaatgcctctgttgatccatctgtgtggatacaggaagtgggcattgacgaacgaaaagaagaaggtgagaggagcactatgcgtgggtggcgttgtgacgccaattctggaagcttgtggagtaccgctcaaggaaccagggttagcactgaggatgatgaacttggatcatttacgcatatgtgagttcttggagtttgacatggctggcgactttcaccgctacaggttcgagcaatcatcgattagaatcgccaactaggattctcgagggcaggaacattgacttcaagtgctgcgcttgaagatctttatttcgagggcagtccgccaactgaggagatcagtcacacagaaggagctagaacagaagatgttgatgagacagttgaaatagatgaggcggagtttgacacgagtatgtatcatttcagtgagcatatacctcctgcgagggaaatcaagagtttgagcgaagctcacaagaacaacagtaagctgcagaagtggtgcaagaaactggataagttacacgccaagtgcctcagggctatcaagtttcttaaggacaagcttagctgctcctcttccacgacagctatcccgcagggacagctccctcaggacatgccctcgaggagatatgacgcgcttgaggcaagtcggcgtaggcctgagccaagtcaccataggcctgagcctagtgaccgagtagtttcacaggtccctacgaggcattcatcattcgagcctcgggagctcgggagaaagaacaaggctgcactggctcggtctggcagcaggagtacacgacttctccagtcccgtagcttatgcgaccgcggtgctggctgcagcagaagaagagaggtcgagtatcatcagagcggtgctgaccgcgacgaaggagcagaggtcgagtacccccagggggaagctgagacacaatagggagattcttcgatggcctaggagcaatcacaggcagctattgacgaccaactccgctcctttttccactgaggtaagcacctcacttcaccattgtaatataccatctcttgtttttaatttgtttctgtgatgtgttttgtcctcagtactctcttccaagtttattcacacagtggactatgtgatttaagtttgggggagggctcagccagtgtgtgttccattgtttatattcttgagtctgcattcatctaaggcatagagaaacaaaaaaaaattgaaaaatttcagaaacccatttcacaaaaatacagtg

SEQ ID NO: 3883 - DNA, 2323 bp, Arabidopsis thaliana landsberg
ttgggaacaaaatgtcacaagtactgatttagtgatctctatggctttttcttgtagtggcgcaactgaccactaagatcaagcatctatcctcggttctacataaaaaggtaaactttcaatcttttttttttaatctgaagctaccagctccgggtttctactgtaacctgaccttgcatctttataaccttaggacaagcattcgcggaaaggacttatagcaatggtgcagagacggaagaagctgttgaagtatatgagaagaacggactgggattcttactgcctttcactgtcaaaactcggccttcgtgacaacccggattacaagttttgaaatttttgtgcaagggacatcatagaattgtgatctcagtactctctttttgttctttttcattatggcaaaagagataatgtgggtctctcttatcaatcatattggggaggaaagttgttctactagagattatgattgcaggctgtttaggcgaaaagagaataaagctgtgggatactttcgttgacattgtctttattactttgaatgtgataataaacttacttctccaacttatctttctcaatgcatctatcttttactgccactttatcctttttaacctttagggttggtgcatgttaaacatgaaaagtgaacacctacggaacagaaactgaggtgattcggaggaaagaggtgcacggaatcgttagtagtcttttatcaatggctttacttttggccttttaccaaattaggattcaaatttcgaaagtcagcgatggtttattagagtagagggagtgaaccgttacttcaacccggttaatattgggattcaaatttctaaagtcagcgatggtttattagagtagagagagtgaaccgttacttcaacccggtaaacataaaaaagggataaagcaattgaatttgaaacgacacttgagagtttatttattacatcttcttcgacttcctctcctaagaagtaagaacagtcactcatggcgttttatctactcagaccaaaacaaaagttcgacttgaacccatttctgatccgtattttctcaacatcctcatcaagcctaccctctcaattaccgtcgaacttctttactaagaaacctctcttccaccgggcgagggattcaggcaatgtttttgaccggtttgctattaatcgatatcggagagagaaacctgtaagtttactccttcttaactcgtcaagcattctactttgtcaaagcgattagtctaaaacgagatcttccatagactatgtttgcatgttttgttaccattaagaaatgtggtaaaactggaaaagtctgatactttgtgcatagttctaggatgaaatacaaagcgaggttttaataacagagcagccaaaggaagaaaaaaggaggagacctggaagacccaagaagaaacaactagtagagaagaaaccaccattggacgaaaagaaaagcagagctgcaagtatagcaaggaaaacttttactgcttttggtagctctctacaaaatgcactaaagaatcatcctgattacatatgcagtgtgacgcatgcaatggatgttttaaatggtctacctagagtgaagaagtggttgcctttataccgtgcttccatggaccatctgatggctgatgtagctcaccgccaagcctttttaacagtctctgatcctgaggatatgattcgctacttgaggtataagacccaaaaaatgaagagggagtgattgctatttgccttggtgacttgttttcatgttttttgtcttcactttttgttactactctttgctttgatttgcaatgtagtagtgctggttacttctatcattgaataagaagatggctgaacatttgaaaaaaaaatcaacgcaagcttgcctttggcttgacaattttattacaacgagagtgacaaatataaactcaaagaaaggttaacccctgtttctccattcaaactattatgctgataccttttttcttcacaaatggctcaaataatcagtctagtcaatgtgtcatcatctcttccattggcacggtatgctatagaaagcaactcagaagaatcctgggagactacgcatccatgacgcataaagaagttcttgagtgctttagttggagaaaacccacatggcggtacgattttcctaagagatggatttgcaaacaccatccaagtgtacattttcttatcagcattagcaaatacttgaggttaatctctggggggcgtatgcagctctgcacaacttccttcacccctaatgaactcac

SEQ ID NO: 3884 - DNA, 813 bp, Arabidopsis thaliana landsberg
ccatataaatatatctagaatcacaaagtctaaacctaagacaagcagtcatagacacacatcaaacaatatgtaactcatagatatattcggcttaactctaaactaaataatcaactaaatatattcatataacaaataaaacacgggtcaccttagcaaaatgggttgattcctcggttttgaactaggaacaacaaaaacggcttcaggaacaatctcgggctgcattggtttagactaaacgatcaagattaaatgcaattataatctatgatttaatctaatatccaaaccaaattctaaactttgattaagaactgattaattagattaattaaatctctcagtttagaaactcaaaaacttcaatcacgtgacctttatccaactccacaaattcggtttaataaacgattacaaaacaaaaccaagactaatcgcatgaaaccaccacctctacacatgacgacaaccacaagtcaactcacgtccacatgaattaagttatggttcttcttgtcttaattagattaagattattcggtttagactggttaagatcaacacaagatatcacagacacgagagttcagattggtcgtttacctttctcggcgattattttctggcggatcacctgggcagctcggcaaagcggttcaagctcacggtggcttgtcatgcaaacaaatcaatagagaataagacaaagtcagaaacttcatgaccaagttacataataaatctagggatctcttacccttaacgaccttgccaatggactacgacagctccgatgacagtgactaa

SEQ ID NO: 3885 - DNA, 590 bp, Arabidopsis thaliana landsberg
  unsure (1)..(590): unsure at all n locations
ggctgatctcttggttttgatttgttctcgcttgttcgcatttaattggaagataaattcgtttgcagttcagaatactaatatttggggagttttaagtggtaccccaaagtatatgctcgagcctccaaaagatcaactagttgaaactgtaagtcttttccttcttacttactgaatcattttagcttgtagccattttaagatttttttgacatcgattttgttgatcaaatgcagtatttccatccggataacatgtcatctgcggagaagatgaaaatcgagcttgcaaaggtcagagaagagttcaagatgtcagaatcggattgtggttctgcacgtgttcaaagtatctgttcttataagtgttggcttttagctattgaagacgatattacatttgnnnnnnnnnnnnnnnnnnnnnnnnnnnnnnnnnnnnnnnnnnnnnnnnnttgggaacaaaatgtcacaagtactgatttagagatctctatggctttttcttggagtggcgcaactgaccactaagatcaagcatttatcctcagttctacataaaaagggtaaactttaaatcttttttttta

SEQ ID NO: 3886 - DNA, 1444 bp, Arabidopsis thaliana landsberg
  unsure (1)..(1444): unsure at all n locations
tagaggaacccgaaaaaaaaaaaaaaaaaaaaaaaaggaaaacaacatagaaaaaaaaaacaatagaacaagaaaacaaatataaataacaagcaaacatgtaaataaagcacaatcctcttgatttaccgcttcgttctattaacataaattcttaaaaataaatctctaccctaacaaaatcccttgagcctatattaaatcatgataacctaaccctgaactaaactctctctgagtttagatttcaattctgcagagcttttttaaacgaccaccatacaagaatcaccaaaaattctctaacacttatgtcaacaccaacacacaaataagcttgaccatacaagcaccaaaccgcgaaactacgtcgacaagatcacacccaatctctcacatcaaatctgtaacaccccggtttcaagaatatggtggtgcatgcggagatgtttaaaagaattgatttggccacctatgtcaccaaagtgcacttatcttttggtcaaaggtcctgagagaactccatagttaagcgtgcttgagctggagtagttttaggatggatgacattccgggaagtgattgtcggaacaggacaaagcatgagaaaatataatgtggtgatttgtagggttggtaacaaatctttaaagccttccggacgtagcgcaccgaccgtcagacaagggtgatggccccatggcgtcagagagaacgtggagccactggcaatcggtgcgttacaaaatctctttaggattgttactataacaaatccccattctcatgagatcacgtcccctttatataacaaatagaaacttgcacctcaagtttcttcaatcacacaaaagacatatttccaaattccataaagaaaaggttttcttttttgccaatttctttttctcttcaagcaaacttcctttttgtttatatgagtctttttgtcttacagcaaagataatttttctttttcttgacgtgacacactctcctaaatccaagtactcgaacttctcatcatcatttatgcatttcagcttcctgaatcatttcttgcactacttcgacgactagtacagaacaacgaaatgattggtaaagactattgggtaaagactaaagagtgtgattcttactgtctaagctgggtgtggctagggaggaaacaacccatttgttctatagagtgggcattatcgaaaagtccctcagtctctggtgttttctctccttcggttccttcgaatcaagactatttattctagtcaaatagattgaaaattaactgggatctatttcccatgaaatatgtagtttaattggaagacgtagacaaaataatgtcaaagaaaactaanatatttttacacatgtcaatgtctgtttgattggtagggagtcgcgttaatttatgattttaacacttcttcaactttta

SEQ ID NO: 3887 - DNA, 3252 bp, Arabidopsis thaliana landsberg
  unsure (1)..(3252): unsure at all n locations
aaaattttttggactttaaatgtttagaggggattttttttttttttagcacagagcccaaaaataatatttaagtctgggccgggaaagaaagtaagattaaattttcgatgaaagaagttataacacaaaagtctggagaggcaacaaaggtagtctgtctctgggtaatatttgaacaaccttttctcactctcacattaaaaaagattccctagcttagaaacagccatgggcgtgaaccaacttctccaaaacaatgaaaagcaattgttttctttaaaagtggaaaattaactattaaatttgaaaaaacaacccaaacattttttaataccgtaaaaatactagaattaaactttaccaaaaattaatataattctttaaaaaaaactaaagtcatatttaattaaatgttttatatataaaatatataacattatatatgacatataaattactatcatatatagtccgtaatggccattaagaactgctaaatcaggggtttgaaattctaatccaccaacaagtcaaacataaaggaacttttgcacttttttttttttgacagcagactaaattttattaaactattaaaagcctagtaacaaagtaacaacaattcctgcttaatgttaaggaacgggtaaaattctggtaataattaccttcacactaacgtaattacaggaattgatatctcaaagttgggcccatgaagtgtttacgttaaagcccataatataaaggcacatttatttcgggttctaattggattaacctgaatagatcggatcctcggaaatcaggcgaagaagacgactaaatttctcctgggattagagagagaggaaggaaagatggcgtcggggtgggggataacgggaaacaaagggaggtgttacgatttctggatggatttcagcgaatgtatgtctcattgcagagagcccaaagactgtactcttcttcgtgaagactacctcgagtgtcttcaccattccaaagaggttaggtttcgcctttttcctttttttagggtttctttcaattatcgttcctgtgttgttgtatgtgtcatcaattcacgcttttgattgcttgatctgtttcattgatgattcgtcctgttatcggtcgtctgtacgatcatcgatagtttctggatcacgagtttaagtcattcctagatccgttggaacaatctctcagtctggtcgtttcgtttgctacatgtataaaaacataagctttctttttgcttgaaactagaaaagttgaattgcaatctcccaagtatatatgtggatgctttcactaggttgcttgtagggattaggttaatataataccacttcccttatctgagatttagtttcatggccatgaattgtttagctgttaagtttggaagttgagacttactctttatctcttgtctctgtttgatctttcaaatggaacgatattgtctctcttctctatgtgttgaaatcataaatttgaatgaaactgaatgtataggcttgcgtgtgaacttttgagggaatcaaaagctttattattgttgtctccaatattgtttttttcttctttgcttagtataagcctatggtagatgaactgataaggagcgcatatttgtgtattttgatctagttccaacgaagaaacaggatatacaaagaagaacaacgtaaactaagagctgcctcaaggaaaggcgaagaaaccggggatgggactcatactcatcactagtcgagattttcctcctatctccaaagtttgcatctttcgaagaataaacaaaagtttcttgaagatttctgtatcttgtgtgccaaacttcatttgatcgtattcagtttgcttttgcaatggatttttttgtctttgctttgtctattacctttgaccgagttgtaatatgcctttggctactcatcaaacacagactccttctttaatggtaataatttctcctacagttatattaaaatcattattcgagagacattaaaaacagaacagtgggtggaataatgaaaaggtcctctataaatagttgtcattgactttcacttagtcttctctgcaactcctatatgtaatgtgtctagagagaaccagctnttccattgggtaatatcaaaatggggacgagatctctagaaataaatgtgacatcagcaaaagggcttaagaaagtgtcgaagatggatgtttttgtggccgtgaagttatccggtgatccaaaatgctctgaccaccgtgagcagcggacacaagcggcaagagacggtggaaccagccccaaatggagcaatgatgtcatgaagttcatcatcgaccaaaacttagcagaggctaaccgccttgtgatcactttcaagatcaagtgcgagcaacgtggaggagtagataaagacatcggcgaggttcatgttcaggtgaaagaacttctggatcatcttggaaacgataagaccggtcaaagatacgtcacatatcaaatcgggaaatccaaagccgatattagtttcacttattcgttcactggtccggtggaggtcccgaccggtggcggctgctcacggtacgcagctcaagcgccggtgcgtcctgtatcgacctaccggcccgttttgaacggacccatgttgagtcagttgaacggacccgtgttgagccagttgaacggtcccgtgttgagtcagttgaacggtcccgtgttgagtcagttgcagggacccgtgttgagccagttgaacggacccgtgttgagtcagttgctaccaagtgttggatcgtttagttacaaccacgttccttgtcagccaccgatttatccaccacttgctcagcctgagattcttccaccggtatgcttccccggattgtatccgccgagtaacatgccgggaagtccacccacaatgtatcaatctatatttcctggcttatcatgtccaccagaaggttattcaacggtggctccgccgctgacacaaccgggactatatccaccgatgagtccttacagatattaattgattgtcaacgtctggaagcctagtcgtcggtttggagttttgttgattttatgtaacttatgatgtcatcaattcccccaacttgtgtgtgttctttttttttcgccctcaacataaaaattgttgtgtttttttctctctttctaacaaaatcacaccctaaattgttgcgttctttacttagacgtctttg

SEQ ID NO: 3888 - DNA, 2891 bp, Arabidopsis thaliana landsberg
tctccaatactaaatcggtgctaaatgaaccggtcggtcgtttctatatttgattcgttcggtttatcctttaaccggtcgaaccgaagcttcttttgttcgtatgaagaaaactaaaacccaaatctctctctggtacaccatgagaggagctctgttcagaaatgcatctctctgcgttcgcagaatcattctttctcctaggatctcccccaatgttccctttctcactccaatcgccgctccggctcctcccaaattcagatttttcagttccgaatccggtgagaactcgactactgccactgagtcttcgccgactgattcatccgataagaaggatctcgttgtagaggatgtcagcaacaaaggtaacagactctatcctctcttcaagcttgtttggttacctcacacttgaaatggccttgtattagttgaaatgtgtgagtctaattctcatctcgccatttctgaatgcctcacagttttcaattgatccttcgatataagattcgtagcttcttatctcctgaactactaggtaatcgtttgaaattgactttatatgttggattttgtggtctcagagcttaaaagccgtatagacaagtatttcaatgagggtaatgaagatgctttacctggagttattgaagcacttctacagagaagacttgtagacaaacacgcagagactgatgatgaattgatggaaaaaatcgagagtctacctttcaaagatgatgtcaaggatgaagattttgaatccgatttcgaagaagcgcattctactgacgaagaacttgaggatttgtacaactctcccgagtatgtagctgaaaagatgaggaagaaagaatttttcaacatggacgataacaagtgggatcacatgattagagaaggtatccaacatggctgtcttaccgatactaaacaatgcgaggagattctcgaggatatgctcaaatgggaccagcttcttcctggtaatgctcttttatttttcaatcttcccgttcatcgactcacatccttagacatagattaggttgattaatagactattgtgcctcgttatagctaaacacactctcttagtggaacttatcttttgtagttaacctttctatttggattttaatgaatcatggtagtagaaccattcttcttttcttaactctttcaaggtaatgtactatgtcggatttgttgcttctcggatcagtagggctgtttagagaatatattggtttgttcctgttatgcgtatgtatgaacatcctctaactgtgtatcttcattcagatgacttgaagaaaaaagttgaagcaaagtttaatgagctcggggatatgtgtgaaagaggtgaaattgaggccgaagcagcttatgagcttttcaaggaatttgaagatgagatggtaattcagtatggggatcagatggaagctgagggtcctccccaatttggtgaaacagatacttctgacaggaatactgacttggatgatccctccggtaaaggcccaatcctcaggtggcaatcaaggatagtttttgctcctggaggtgatgcgtggcatccaaagaacaggaaagttaaaatgtctgttacagtgaaagagcttgggctctcaaatcatcaggctaaaaggctaagggaacttgtaggaaaaagataccattcagggaaagacgagcttacaatcacctgcgagaggtatataaactataaatcttaagcttttcgcgagacaagaatgttgaatcatgtaatgtttttgtcctgtcacaggtttgaacaccgagaagaaaacaggaaagactgcttgagaactctttacgggttgatagaggaagctgggaaagccaacaagatcgctgaagacataagaacttcatatgtaaaacagagactccgagccagtccagcttttatgcagaaactacaagccaagatcataaggtctaaagaatcaaatgccatcaacgcttgaaaaaaacttttcccggttcgcgcctttcttcttgtctcaccaaataatctgtggatcgtcttcttttggcaatcatttgatccggtacgggttttcagatcgatgaagaatctttgatggtaactcctattttagtttggtttgcttcttgtatctcatgaagacatgaaccttggctgtgctgttggtaactccatttgtcttcgtcgggaaactataaacagaacagtccgaccactttttcatgctaacttcgagattcataatgcaatgttggtaaaaatagacaatgaatgaaactttttcatgtataaaaaatatggaaacttggggttgataatgaattgttcatgttaagactaaaataaaaaacagaagagggtgcttgtgtggttagtctcaattgttaaatcaacaattaagttctccgattaggcgttgaattaaccggtcgcccgtttttaattttcatcgttcgattttcaacttaacctgtccaccagaaggtcccttttgtgcctaattttgatgaaatgtcgtcatttcgtcgttgaagctacaacacaaaatacaaaacgttgtagttagattgctgaatctctttgtaccggtcaaactcggtcataccgagtatcaatccgaatgatccggtaggaccgggattttaattaggaatccgaatctctaaattccagatgctaccttatacgtgtacgtcttctccgcccttcttattcatttctactctgctgcgttatttctccgtcgtcctcaactcatcgccggcgtttaccatccgctagatccgtcgcctctccggtcgactatttatatggaatcgtaaatttacagacactaataagaatagtttgacaaaatctgtagctg

SEQ ID NO: 3889 - DNA, 1099 bp, Arabidopsis thaliana landsberg
tccagcttttatgcagaaactacaagccaagatcataaggtctaaagaatcagatgccatcaacgcttgaacaaaacttttcccggttagcgcctttcttgtctcaccaaataatctgtaggatcgtcttcttttggcaatcatttgatccgttacggcttttcagatccatgaagaatctttgatggtaactcctatcttagtttggtttgcttgttgtatctcatgaagacatgaaccttggctgtgctgttggtgtctattagagactagttaacgttttctcagaattatgaatctctcctaaagttaaggtttcagatatgtttacgggttcagactgaaagtaaccaaaggaaagaattggtacaatttttgtttgggttttgtatcagatgtctttctaatttttaaagaaattcaatcagtaagataagaaatggaaactaaataaattattgcttcaatatacgatagctatacatctataaacgaaagtaaaatggtcggactgttctgtttatattttcctgacgaagaaaaatgaaatctcaacctccacaaccaccaccgcaaccggcaccgccacaacctccgccaccggtagaggtgcctgaagtggctctgttgtcggagactccgtcggcacaagagaataacagagcggagaggatacaacaaccgatcacagccaggaacacaacatgaaacaggtaactagcatcgaaatgtgttgttgtggtggccatgctcattacatcttctaataagtgtctcgccatctctctttctctagttaatgtggatgagattaagttgtttaacgtgaaaagctttcctacttatagccgataaattcgtacgtaaggccactgacttttgataaattattcgttcagtagtaagatttctttgtaattaaatttttctttttaagaaaagaagacttatttgttaaaatatagaaaagactgcaatacaagacttaccagaaagtcatccattttagtctactattctcctcctctcaactaaacacatttgactgcggaaccttgatgcaatcacgtatattagatgaagatagaaaacgatataa

SEQ ID NO: 3890 - DNA, 1678 bp, Arabidopsis thaliana landsberg
  unsure (1)..(1678): unsure at all n locations
taagttgttttacatatgaagttcttatgtcttcagcgatcttgttggctttcccagcttcttctatcaacccgtaaagagttcttaagcagtctttcctgttttcctctcggtgttcaaacctgtgacaggacaaaaacatttcatgattcaacattcttgtctcacgaaaagcttaagatttatagttatatatacctctcgctggtgattgtaagctcgtctttccccgaatggtatcttttccccacaagttcccttagccttttagcctgatgctttgagagcccaagctctttcactgtaacagacattttaactttcctgttctttggatgccacgcatcacctccaggagcaaaaactatccttgattgccacctgaggattgggcctttaccagggggatcatccaagtcagtattcctatcggaagcatctgtttcaccaaattggggaggaccctcagcttccatctgatccccatactgaattaccatctcatcttcaaattccttaaaaagctcataagctgcttcagcctcaatttcacctctttcacacatatctccaagctcattaaactttgcttcaacctttttcttcaagtcatctgaatgaacatacacagttagagaaatgttcatatgtacgcatcacaggaacaaaccaatatattctctaaacggccctactgatccgagaagtaacatatctggcatagtacattaccttctacgagttaaaaaaacgaatggttctcaacttctcataccatgattcagaaaaatccaaatagaaaggttaactacaaaagctaagttccacgaagagattgtgtttagctataacgacgcacattagtctattaatcaacctaatctatgtctaaggatgtgagtcgatgaacgggaagattgaaaataaacgagccattaccaggaagaagctggtcccatttgagcatatcctcaagaatctcctcgcattctttagtatcagtaagacacccatgttggataccttctctaatcatgtgatcccacttcttatcatccatgttgaaaaactcattcttcctcatcttttcagctacatactcgggagaattgtacaaatcctcaagttcttcgtcagtagaatgtgcttcctcgaaatcggattcaaaatcttcatccttgacatcatctttgaaaggtagagactcgattttttccaacaattcatcatcagtctctgcgtgtttgtctacaagtcttctctgtagaagtgcttcaataactccgggtaaagcatcttcattaccctcattgaaatacttctctatacggcttttaagctctgagaccacaaaatccaataaatgaagtcaatttcaaacgattacctacagctattctactagttcatgagataagaagctacgaatcttgtatcgaaggatcaattgaaaactatgaggtattgagaaatggtgagatgagaattaaactcacacatttcaactaatacaaaggccatttcaagtgtgaggtaaccaaacaagaggatagagtgtgttttacctttgttgcttacatcttctacaacgagatctttctttctcggtgaatcagtcggcgaagactcangggccgtagtcgagttctcaccgggattcgaggagaaaaatctgaac

SEQ ID NO: 3891 - DNA, 1888 bp, Arabidopsis thaliana landsberg
  unsure (1)..(1888): unsure at all n locations
cgactctctctagttatttaggtagctataatgatctaggtaatttctgatctcaacttcttattttctccatcattttcttcagcttgccttgaatttgtaggttcatttgcactgtttctgtttctgttctataatctttacatgtggtttgtattacatctctgatagtggctaagtagctaaaagaaatagatcattggtttgaagtatggtgtatgaatcgatgatggagaaatcatcttaaactgtcaaatgcttaagaattttctatgatctttatcatcatctttgttttattacaccttacaatcagagatttttcaatttggtgttctagatatttgtgtagatattggtatactctttgaaccataacgttacaagagatgttagctttattcttttgaatatgatgatactcaatgctgatatttcttgttgtttatacattacagtgatactagcatttcttctgctacttcattttcaaagccgatgtactaccaagaccaacctccagctctgccaagagctcctccagtggcacagcctgaaaccacctcggcccaaagctctcaagtcttacctcagactgaaaacacttcagcccaaaccacctcccatgtcttatctcagccaggtacgtacacaactatggatcaacaacaacaccaacctctggctcaacaacctttcttacaccaaggcgttcagtatatccctcacccatcacaatacataccaatttactctcatcagcaacaaaactaccctgtttacgtgatgtccgtcccacaatctcagcagtatatcccagcaggaactcccccgctctacccgaactcaaaacccggcacaaactcgagacctgaagctgcccagaacgtttaccgagctgctccccctcaggttattcagcttcagcaacagcatcagtacatgggttacgctggagctcctcaacatagcacaaacgcaaacgccaattacggtactggagctcctcaacatagcacaaacgcaaacgccaactacggtggaccctttgaatacacaaactctccaaacgagacagtgtattaccacacacaagctcctgctgcaaacactgccattccattagcgtctccataccaaagcatgacaccagcagcagccgcagcagctctagccgatatgtccaagcaaatggctcttgacggcggcaaacagcaacagcatatggctgcgtctcagccgctttaaacgctggatctttggtaataaatgcgcaaagtgttaagtatagccgacacggcgcgctctgttctttttgcgtattacatgtaacgtcctgttacatctcgttagatatacataggatttgctatctcgttgttcttatcgtagtttgcttatgtctctctctcttttctgataaataaatatgttttggatatttttttaagttctatattggaattatcttgatccgaagattacacaaaaactcaagaaatggaacaccagtgtatactagatatagaactgtgaagtgatctgttgaggttgcttcatgctttgtcactttaagtgatgcattcaacacttgaaaacttgatattgccgctcagaaaagaaaaaaactccattaacaagtcaagagaacaattccagcttgttaaacacaacataaatctccattagcttcattacttataaaactttcaatcacatatctccaccatggcctctgttaagaccataaacatgtagcagtgattgaagtaaccaattcatcctctgcaaaacttgattccttagctagcttctangatttcctcatgcgcatcgagatcaaaatcctttgattcactcgaacatatgcataaaacagaatcatctt

SEQ ID NO: 3892 - DNA, 2106 bp, Arabidopsis thaliana landsberg
ggaagagagaggcaggtggcagtaaggggccacagaggttccgaagatcgatcatcaaggatgaaggatgagtataaagcttctgacaaagagcatgtcacgaaagatacattaaggcatgctaaacagagaaagagaagggactaccctggtgaagaaagttcttcccatcatagaggacatgaagacttctctgcacggacagacaacattgttaacaatgagaaaaaaccaaggcaggagaggacaggtgctaaaattgataagtttattgatactttggatggccagcgattgcaagacagaaaacataaagattctagacgaaagattaaagaacagcgagagggcacagaatcacttagcaagcaaggggagcaaaatggcagttccgtagtgacagtatgctccatcagcctatgattattttttgtatctcatccaagttttgcaaactgcacatagcatgtttatcgtgaatgcaatatatcccgcaaagttttatgttctgttgcgtaacttacctaagatattacatggtttggtcagttttattctgcttcacggtcagtactgatgtttctttcatatcttccagggatcaaaaggaaccaacgacgcaaggaattgcaggagtgagatcccacatcagcctaacaccgccaaaagacacaaggaaaatgcatcctctggtgatgagatacacgattcaaagagaggacgtacaaaactggagcgttgggcaagccacaaagagagagaagatgctgtctctgccaagtcatcatccatttcctcaaaactagaagaaaaggaaaacaacactaatggccgtcttagtgaacctgttcatggttctattggaaagagccgggatgtaactgaagagaaaattggccatgatcttgcagacacaaaagatggaagcgagaagggaccaggagaccggcacttggatacggttgagaaactcaagaaacgcagtgaaaggttcaagcttccaatgcccacggagaaagacaccacgggagtaaagaaaatggagtctgagacactgccctccgcaaaaattgaaggccctgtggattcagaggtgaaagcagagcggccagcaaggaaaagacggtggacgagtagctgagagtcataaactggagttgaaataaaaagcgatgaactgtggccctctttggctgggttgaggaaagtttgattctcaatgtagcttacgatgcttaaacggatgacatgagattctcccatcccacggagcagttgtagcagtaatgcgatgaaagatcaagctcaatggagattatttaggtgtttagggagagtatgtgtgggatgagcgaagttgtgtaagaatagggagggaatacgcataaggataactctgagagaatactcttggagtagttgatgtaacttttgtcaaagattattggtcttttagttttgttcttatacttagcgcctccggagagagcgagaatattttaaaaatacttgacagcactgtattatatactgtagtaattttgttactattttaaatttgtactcggcctttggtcttgatcattagtgttaacaatgtgagttatcagaaagcaacaactatgaaagtagagactgtggtaacgaaggatcgtaaataaaatatgaaagattatcaagactcaaaatctttaccgaaaaaaacattcctatgacaacaaagaaagtttctgtagagcttttgatctataacaacaaatcactgtttgatgcatattttggttaacatgagtaaaacatagataactcaagttgtgtcagtttgaaaacgctgagggcaaacatgttacaacctatatgaggttatatggtgtgatcaatctctttaggctgtataaaggagtcccaaagccatcattgccagcaaggaaaggctgagattagcagcaatggcaacggtgcctgaacgaggaggagtttgtggcggaccaccttcagttccattggaggccaactttgcaactggaggcagaggcggatcaatcacgtctttggcatcaaaaggtaggtttgggggaatagctggtggttgtgcttccttgtctg

SEQ ID NO: 3893 - DNA, 1081 bp, Arabidopsis thaliana landsberg
caggtctatgcttcagggttagccaacgacttgcgcaccagctttatctacagctatgatccctctgctgagtatctccagtttgtggacaatggacagttctctgttaatggtgtcatcacagatttcccgccaacagcatcacaatcaatcagtgagatgacttgctatatatgtttcctcagatagctgattattaagaagaagctaaagcgtctgttttcttgcagcttgcttttctcaccaaaacggcaatctccccaaagcagggcatgcattggttataactcacaatggagcaagcggagactatccaggctgcactgatctggcttaccagaaagcaatcgacgatggagcagacataattgactgctctgttcagatgtccaaagacggaatcgctttctgccatgatgctgcagacctctcagcaagtaccaccgccaggactactttcatgtcccgagccaccagcgttcctgagatccagcctaccaacggaatcttctcttttgatcttacatgggccgagatccagtctgtgaagcgtaagaaactgatttcttttctatagatttcttaaactatcttattctcaactaagtcactgagcattgggatatatttgtcttcagcacaaatagaaaaccccttcactgccacgggcttccagagaaaccccgcaaacaagaacgccgggaagttcacgactcttgcggacttccttgagctcggcaaagcaaaggcagtcaccggagttttaatcaacattcaggcaagccatttaacttccaaatgctccttgactaacacaaggaagctccactaacactgtttttgttgacagaatgctgcttatttagcctcgaagaaaggcttaggagtcgtagacgtagtcaagtctgctcttacaaattccacactcgacaagcaatcaacccagaaggttttgattcagtcggatgacagttcagttctatctagtttcgaggctgtccctcaaaacaaaaaagtcttgagtatcgacaaggagatcggagatgctcctaagacatccatcgaagaaatcaagaggcat

SEQ ID NO: 3894 - DNA, 1234 bp, Arabidopsis thaliana landsberg
ataccacttttcttcttagatttgggcaatgcttttttctcacaaagtcacaattccccttaagataaaaattcaaaagaacattcgtaaccaatgcacaggttgaattaaattatcatagattcgagtctttgatccgttacgaaaatatgaatgtttagagagactgtattcgactatttgctacgaatatttgaatatctagactgtttagattctactagccgctaccaaaattacaatgtgatagagtatctagatcatattataaaattttgagtgtgtattctttttcttttgtaccgcctaattcattgattgcatctaaatcagatacgagagatgatccaatcaatgtacattaaaagtgtgcgatacatatacacatcaacatacatagataaacttgaaagttagccgcgaaaaatggaacttatataatgttttccgatacaatagctttactagttaacacatgattaatgatgataattttcatcaaataataagttatcccaatatgatgaaactgacaattttagctaacatctcttggattacaactacacattacagaaaataataaccaattttaaaactacacattagtctaaatgatttatggtatattatctttcaccagtttgtttgtttttctgattccattatcgctaatgtggcatttattaattagtcacactgcaagctctttccatgccttatacgatcacgaacattcataagctgtgggccaactttgagtgcacaatgggacttcaaaggccctacactacttatagatgaaagtggccatttggtgaggactgtatgactttcgtgtttacccaattttcacattcgtgcttcaaatctatccttgtatgtgtgtgtgcgtcttctctattattccataaaatgcatgaccagaatcattgatcttttttcccacatacatataaaaaaaaaaactaaaacctgacatggagcaacttattccttgagatatgttcataagttcatagaaagcagttcaagtagggtagactattctatagagggacattcaagagttgcattacagcttagagaagtgtacaacatgagtttgttttcttcgcttgcttgtaaaacatctgtttcatccaaacaccaaaacaaaccaatattctcatgtcagaaactatttcatctatctcccattaccctcagaatccactgaagaaacagtagtaag

SEQ ID NO: 3895 - DNA, 1503 bp, Arabidopsis thaliana landsberg
  unsure (1)..(1503): unsure at all n locations
gaacagaaggcgtttgtagtggggatacaaagagactaagttttatataacgtttaagaccaccaagtgttagctgctgtaattggaactaggtttcttcttaaacatagccatacagattattttttcctgtttttacaatatcagttttaaatgtttaatctcataatcaatatcatgaaatggatattcttgaatcccggcacattattttccatgtacatcaatgcaatcatggactagatagtatcctgtaaccagacatgtcccaaaaataaataagcgaaacacacagaatttttcaatcgccatagttccagtcttgcagagtttaagaaaccagacaataagattgtacatgcataaaatacaagtctatggaattcatctcttttatacaaaaatctgctagggcaatacaggagaccagttactactgccacttccaaaatgttgttcagggaactggaaatatgtttatacaggattcccatgctgaaaaggtaagtgagatttctacaaaagctaaaaaaatcagtagaatcttcctggtgctttgcagttacaaaacttcgtttaatgtttttcaggaaagaccagtgttgccaaaagaaccacttagcttgacttgagaagcttcgttcagacttattttaattgtgtgggtctgtgttaatctatatatgtcaatgcattccacgagatccgcttcacatgtcagaagaacccactccttatcatcatccaggtacttaaggtcaaaccaggaaatgtcatctatgttgaaacgcctagcaatctcttgcttcagctctgcgaagccccaactcgggagtaaggtaaaccgtattctggcctcaccaaatgtcgctttcactttgatggcacctctagctcttaaactcgtgttgctactacctgttaatggagatgaattatcaagaacaagaggctccttgaatgttttatggctctgggttcttgcaagacattttgtttcctcctgattcacattatgcagttgtgcttcgctatgagctctctttaacaccgcatcagcatcctcagcaactagaatgtttccagtattctcattattgttgcttgaaccagagctcttgctgcaagaagatgatggtgacctggggttttcctctgccataataccattatcggnnnnnnnnnnnnnnnnnnnnnnnnnnnnattactcttcaaggaagggccattgctagacatatttggggagttcaactctgggaagcttgtatagaatgaatcgagttggatagagccctgcgcaccttggacagagtccataactagttggagtttcttcaacgaatgcccaaccttcttgatttttcgggagggccatcgcattattccatggtgcctgcatatgcttttcaggtagatggacaactgcacacangacgaaacctgtcagatcactgtctgagagacagataatgcctgatgaaatgttgtgagcatgagatgat

SEQ ID NO: 3896 - DNA, 2448 bp, Arabidopsis thaliana landsberg
caaaaagtttctccgccaaatctctccaaagccctttctcctatgtactttttgcttcttcttctactgcggtcgctcgttcgtctccttcttcatacgtaatctcgaagtcccgttgtttcaatcctgccatggccgaagggaagttcgatctgcctgacgatgtcatcctttccaaatcttctgatcagttgaaaggtactttcctctcaatcttcgacttgtttctgtctttggatatttgaatttccttctctctcgatcgatttgattgcgtagaaacaaatgtaatcgtttagtttctggatgtgaattccatatgatgcggcagccatgtatagctttgaattttgacctaacttgtgttatttagggttctacgaattcaatctatctttattaaccttgttatgtccgctttcgatgcattagaaccttcatgttggattaatacgagagacggaattctcttttgtttcttattctatactttgggatctggaattaagaacgaatgattagtttgtgcatctactagtggttttcttactttgtatctgtttgatatctctgatttccttcacctattgactaccttgtttatgctattctgcagaattggcctcagataacagcattccgttgtctccgcagtggctttacacgaaatcaagcgagagcaagatggtaatacttcatctagaatgatgatatacgtttcttgtctttttttcaccttattgtatcagatgatgctatgtctgttcttcgcatctagaaagtgtcaagttcttaaactttttactcttaattcttcttctgatgttcttgctatcttgtaggatgttcgatctcctactcctatgcccatgggaaatccaagtgacccaaatctgaaggatgcatggcgcttggatgcacccgaagacaaaaaagactggaagaaaattgtgtctgagaatgaaactaatcgcagatggcgtgaagaggaaagagaaactggtttactcggtgctaggaaagttgatcgacgaaaaacagagcgtcgcattgacaatgtctcaagcagagaaactggtgaagttaaaactactgctgcttctgataggtggaatgatgttaattctcgtgctgctgtacatgaaccccgtcgcgacaacaaatggtcatctcggtggggtcctgatgacaaagagaaagaagcccgttgtgagaaggtagagattaacaaggacaaggaagagcctcagagtgaaagtcaatctgttgttagcaatgtccgtgcaacttctgaacgggactctgaccctcgtgacaaatggaggccacgtcataggatggaatcgcagtctggtgtgcctacttcttatcgtactgcacctgggtttggacttgatagaggacgagctgagggcccaaatttagggttcactgttggccgaggaagggcatctactattgggaggggttcttcaacttccttaattggtgctggtagtgcttcagcccctgtgtttcggtatccaaggggtaagttgcttgatatgtatagaaaacagaagcctgatccttccctaggtaggataccgactgaaatggatgaagttgcctccataacgcaagtggctctgatcgaacctcttgcttttatcgcacctgataccgaagaagaggtgtggtccccactgataacttgtttccatttccctttttcataggtgtgcatcaatttttctgtttcttgattgtaactgagttttcctgtgtttcttggcgggtatcttaatattttctattaggcaagcattaacggcatatggaagggaaggatcattagtagtgaagtttacacttcatctggggaagagtccttaggtgaaaacagtctgtgtatgttatcttgtctctagttacttggcctcttatctttccacctagcatgatatgacgaatgcctctctgaccttagtcttttgtatgtactgcagtgaaatgccgcatacctgagtcaggtgagacaaaagtggatggtgctttgctagggtttatgaatggtgacaatggctccatgaaaaataatgattccggtacgtgcatgatgggtgttaaccgggtcttggtcttaagtatcatgtatttattagataacgtccattcttatcagtttacgtgcacttttatgtcctatatattctgtctaaaagtccaacaactattgttgtaggattacttggtagtcataatggaggtctgggggcagcttctagcgtcgcaagattgaattcagtggcttatgaaagttatggatcttttggatgctggtaggcgaagtttctcatggaagtcctaaagcagttagatcagtttttactaagtcccctgtgttggatgggagaaaatctgtgttgggtcggcgagcaagattatatgggcgagctgcagcaacca

SEQ ID NO: 3897 - DNA, 2144 bp, Arabidopsis thaliana landsberg
gtgaataagtcgtgatctgctgctagagcgaacgagtgtagccttccttcttctcttgtgctcccgggactcgaatgacgaatgtctagcagggacctgtgagactctctgctcactaggctcaggcatgtgctgacttggctcagactcatcaaatctcctcgatggcatgtatcgaggaggttgtccctgtggaatagctatagtggaagaggagcagctcaacttatctatcagaaacttgatagtcttgaggcacttggggagtagcttgtcctgtttcttacaccagttctacagcttgctgttgttcctatgagcttcactcaagctcttgctctccctcgctggaggtacatgttcactaaaatgatacatactagcgtcaaactccacttctctgtcttcatccatcccatcctcagcagcttcttctataagatcatcctcatccaatggcggagcgttctcatagtagaggttcccaagctcaggcctaaaatcaatgttatctccctctattatgcgtgtaacctcaaggctggggagaaggatgctggctttcttatctgtagagtgctcaaacctgaaacggtccctatcgccaaccattgcaaactccaggaattcgcagtgatgctgatgctcgatatccattgcccgtggctcaagtccatcagatgtgattgggactccacaagcgatcagaatcggtgtcagaacaccgcctatgcaaagagcgcatcgtgctctcttgtggttattgctgacagcccagctcttgtatccacataggtggatttgaagaagtatagagagagatgtgtcattgatttcaccttggagagacatattgttcttagtttggcggagagtgcctttgagagtcatagcgatgatctccatatccgaattggtaacaatccctgtgatctctcgggagcaaaggacattggctatagaacgttggaagtacctgatgaccggactgcgtatctgattgctcttcgatatagaagaattcagcggtacagagctgcgaatggtgatccataagtctttcaactcttctctgtcatacttggacttagtacccgttccacttgggaaaccaaacaatccttccaagcgtttgattgatagcatataatcatgaccatacatagagaatcgcaagcatcccaatccttcgcattccaaatcatcggaggtcataccttggtaaagctccacttatagtgtggagaggaactgaatcgtttctccttcatatgctacatatggataagccattagagtgtccatatgacaactctgatacaagtgctgaacatcctccaaaaatccaagttgtgcaagtgtggtcgagcatggatatcttgtgctacagaactcattcagtttgaagagcctgatatactcctcagcaggcaatacatcaagttcgtgaagaagtttggtggctctgcgagtatgctcaggcatgtactcggcttccagatcctcatctataagctcatacctctctgtcattgctctcttcccttgagctatctcagcttttctcttgaagttatcatattctttctgttctctttttggccttgaagacgacgactctgtctcacccatgttatagtcaggatcaattgaagaactgccactgtagttactcatgattctcctgcaaaagatttagaactcaaaacccaaatgtcaataggttagtctcaaagataacaatgaaaccaaaatcgctatgcaatgaaatggaccaaattgatcgagtatagccttgtactcgagtaaactgggctgtctccgagttctgctttagtgaatcgagcaaaacagaaaccggtggtcgagtaaacctttggaggtcgagtaatgttgaggaagtcggtacagctggtgagttcagacggtcgagtgctttgtcggtgagccagaattggcagggacgaagccacaaatcgatggtcgagtcttgtggatgtaatcgagtagctcttgggacttcgacggcaaactaggtggggactcgctgcggcggcgtagagacggtcgagtatggcgagaacaaagagacgatgatcggtgaagtgaattggtcgagtatagcaacgaaattgacattgggg

SEQ ID NO: 3898 - DNA, 1179 bp, Arabidopsis thaliana landsberg
aactttgcttccgtgcttctccagattctcaacgtagtgaaccatcttcaagaacagctggttctccatcagtccagcatttcatcaacattatcgtctttctatagatactaatgtgaaatcttgacaagtctcacaaatactcttcaacctccagtgtcgcaagctctacagagaatccaagatctaagtggcaaaactaatgatgcggacatagagtaggaagaaaatgggactgtgtttagctaagtatctatatgcaaaaaccacaaacataaatgaatatctatatgccaaaacgaaaacgaacctctagacgatataaccagataaaaaaatcaaaacttcctcatatggaaagttttgttagagagatagtatacctgtctccagactcggtaggaagatcgttttccgtaatgcacgtcaacatcctttggaaagtgcattcccgaaaaactgacgtagtatcaacatagtcaacaaaagagacagagaaggttctctgaaactatagacttcttcgtaagaaagttgctgttaagtgctttcttgctgacaaatttcacttacaaatgcagcttgtgccccttcaaagttcatctctccaagcaactactaggacctcaccgtaaaatcatatcctctttgctacactacacttgaacgaagcttttctctccttctcatctttaaagctccaaaactaagatataaaattctgcatcagaatgtctactctaaacgtttcaaactagtactgagcaattctgcacactcaatcaacgatgtccaaatagatgcccaccttcaatatttgcataaagcaaggaattattacggttcaatgatcccagctcagatctaggcagataattcccatctcgtggcaagctggtggcccgcctatcagaaaatgcagaagtctcaaaagctgatgaaacactcagaagactctgtagactgattactcagatgactctgtagactgattactatgtcaatgatgaagtaactcccatgaaaagtcgctttgatttgtcttctattgatccatttgtcctcaatgagtaggaatcttcacccagccttctaacatcgacctcattttatgttgtttaggatcaatattcaatctatggaatagagattcagcccagtcacctgctagcgatgcat

SEQ ID NO: 3899 - DNA, 511 bp, Arabidopsis thaliana landsberg
catgcaactccagaccccgaccaagtccaaaaccactgacagcaagtagattcagtcctatcgcagtcatatgctataagctgaacgctcaaacactgctcgaataatccctgttgcaggttttctgaaacgaaatatcccgctcatattgatccagatgaccctcaaagactctcttagctgctgctaatggaaggctgttagcctgattacagaagggcgtcattggtgattcccaaaatgagttctgagaagctgctcactatggtcagatggccatagaggaacaatatgtctctgttccttcaatagtatattgagcctcattccctttaccaattgaatcagcattgacattacaaatctgagcttgaataaacaagctcaagacaacttaattgaaaaacgctgcctcctgacacaattcaaaaatggaagtcattccagtgtctccacttcttcttaatggagcttcttctatatcccttaaatatagccgaatcatacataa

SEQ ID NO: 3900 - DNA, 1535 bp, Arabidopsis thaliana landsberg
cccccaaaataatcaagcctcttttactctataaacacgtggaggtttccttggacctataatgaatgctacatatgtgaaaaaccaacattaatctcactgaaagacatatatgcgaagaggagagtccatgagtttttctttcttcctcatctttttcagacttattctaataaaaaaaagtgaaatcataaaattattgggaaaattcccgaaaaaatccgaactatttaaaatatgtcagaaaactacgtaagcttttttcgttgtcaaaaaaatatacaaactaacttgggttggaaataaaaaacacgatgtattatttttttccgattacctcccttcgccgtaacggccgttaacagcgttaaccaaatcggttaacattttcaattttatttatagaaaatttctgaaaaaaccacgacttatttaatatttgccaaaataatacccaaactttttttcgctgctagaaatatatacaaactagtttaaagttgaaataaagagcatgatgtaattttttgttccattcactcactttatcgtaatggttacaaaagggtaaccaaataaaaatacatttttttttcattttctttacacgtggtaaataagagtggcgataaagccgattttatccccttataaacccataatctatgttgaacctctttgaatcctagtgttaacatagcacatatatccatttcagaaattaaccacaataaactgaataaattaataagaaaaactttcgttaacaaagggggtattttttttaatttattgttgcttacatcgaatctagatacatgatagatattaaaaaaactttttagtaatttaggataaaacatacccatcaataacatgattttggttgatattactcaagaacttaaggttttaggggattgctttaatagtcaagcttttttaagaatattttgtaaataaaattaacaacatttgacaatttggttagggaaatcgaaaaataaatatagatcgtgtattatatttccaatttaagttagtttgtgtatttctatgacaacaaaaaagtttatgtatttttttggcaaatattaaataagttaggttttttccagaaattttttgtaaataaaactaacagtatttgacgatttggttaacgtcgttaacggcgaagggagtaattgaaaaaacataataaatcgtgtcttttatttccacccaaaattagtttgtgtagttttctgacaacgaaaaaagttcagttagttttctagcagattttaaatagttcggtttttttttggaaattttcccaaagattttataaacaaatcaacttgtttaagtgttctagcttcgttaaattggtagcaatacttgagttatacgtaacataataccctaaactaaaatcatattaagtttgtttctttcattcataaatcataacgaataaatcatacatcatctgttggaataacttcttctagggcctgaaaattcctaaattttctacaaaaatctcataa

SEQ ID NO: 3901 - DNA, 1629 bp, Arabidopsis thaliana landsberg
cctaataatcacaaaatccaatacagatcactttcagacaacttttaactttaccaaggatgtatataaatgcaacaataagaacaacaaagatccaactagcttacaagaagcaacaacttcgataatggtattggcacatgtattaaaggaagatcggagcaattcagcaacatatatatctctaaaagagaatcaaattgctcaccaaggacctttaaataatacatcattgtcattgagaaagagatcaacttgctgagtgctgactttgtagccacgcagccagacggcagtttccttcgaaagaagacatcttctaaatacgagaccattacttatatgatcgtagaaaggtaggcctacgttgacaattcttggcgaaataaaaaaaggaacatgcattacactatctcttgttttgcctcttacaaatgtagagattaagaaacagtacacatgtataaaatgaaggatcagatacgtattttgcgaattttgtttccagtgatgatgatatgaatattggtgttttacaaaatttccacaatgttcttcttataacaaactcaaacaagtttcttcgtggaagattctacagataatttttgtttttttgtctctgtgtttgacttgctaccacttcttaaatctttatgaagacagcaaagagcaaactgtgataactgcacacattatatattacttaaagggttttggtaacagaagagaaatgaaaagctcagccacaaatgtggaatgaggaaatacattgcaaccattcacatagagagtagaggccagtggacctacagaggaacttataagttgtctgatgttggtattacatatacttaaccaacatccatattacaacagcaagaccgacgatccccagcactgacaagagcattgacatgcaagagcaaccacttctcatattcttgttcatgacagcaaggctcttctgcactctctgtaataagataacagatcaatgtctttaattagccattagcttaagcataatgtggttcttggttgagcaaaccgaaaacagatcaccattacatcagtgttactcctaatgaaagtatggatcaactaaagcttgggattcaccaaagtaattagtttgttgaaatatttaagagttgaagcatatattacccttaagcgagagtcagtaacatccacatggtaatctaagtcatcctgcataaaggaaaatccaaatgtgttagtatccgaaaattcaaatcaaaggcgaaaaaatgaaaagctagtgacatacaataagcctagtctgcaagtcaagctcttcactaacagccagagcaatgtgttttgtgctcatgactgttccctccaattgctcaagtccttcgtcttgttctactcacaggaaaataaaacattcaataggaaaaaacaaatacagaaatcaacatctgcattacgtttactaggataagagaggttttacctctcataacttgtcgttgatatccaacaattccttggttatccatgccagtaactctgctcatggaatcatccggcttgatatctggtccgagcaagctgtctctattggcatagtttgacatgttcaaagcattcgccatc

SEQ ID NO: 3902 - DNA, 1464 bp, Arabidopsis thaliana landsberg
ctctgtttttggtctctgttttaatcgtgtttagtttttgtttcaacttgaaaacagaggaagtgagaaatttactgtattggcaacaacagagcaagagaacaagtatctgaatttcatagatgtatggtccgatggagtaagatcatctgaaaaacagagtacaacttcaacacctgtttcttcttccaatggcaatctctctctttactcgcttgatctctcaatgggaggaaacaacttaatgggccaagacgaaatgggcctgatacaaatgggcttaggtgtaatcgggtcgggtagtgaggatcatcacgggtatggtccttatggtgtgacttcttcactagaggagatgtcaagctggcttgctccgatgtctaccacacctggtggaccattagcggagatactgaggccgagtacgaatttggcgatctctggtgatatcgaatcgtatagcttgatggagactcccactccaagctcgtccccgtctagagtgatgaagaagatgactagttcagtgtccgacgaaagcagccaggtttaggagttatggagtttggtaataacgactttttgtttgagttttggcctttcttcaatcttgtgcctgtaaactagtactgtaaacagtcactttgattaattatggagttatattatcaatgcttgtttagtttttatttaataagtgcatctccttttatgagaaacccacaaagtttttcaaacaaggtttttttaatattttattataatttgattatatgattaaaattttattttaattaaaatattaaaccaatagtgagaatggacatgtaatcatgagttgtaaagagtatctcaaagtttctcactacactctctctctttcattttcattattttgttttttttattgcgagaaactcttatgaaaaactcttaatggagatggtctaatttatcaagttatttgaaggaaaaaaaaaaatgattaatcgaattagatagatagttgtattcccagtaaacaattatagttttttttcaaaaagggtgaaaatcttaaattccgtttagttttttctaattttgaaaatatgtctatcttaaatatttgttctttcttttacgaagcgtcacttgttttagtttatatatatgataatggagtgatgagggaaatgtatccaatttagactttcagtaaaaaataaaacgctgtggtacacttctcaaccatgaatccaggttaagtagctacgttctcgatcttgctattattagagtttgatgatttcgtgatgcttcatcttcttctctattttcagaaatatgtagaattgtagatcaatattattattttttctcggcatcgtgcctctacgatatggtcttctttagatttgtgatgaatatgaaaatgcttgtaatggaatacttcggttctgtaatgtaaaccctaaatcctta

SEQ ID NO: 3903 - DNA, 557 bp, Arabidopsis thaliana landsberg
gacgagcccagaagcatttggcatgtatcggagagatggggatgcattcgtttgttgtcacttgtaactgtttgattgaggggttgtgcaaagcaggtcatgtagatcgtgcaatgaggttgtttgcgtcaatggaagttagagatgagttcacttacacttctgttgtgcataatctatgcaaagacggacggcttgtttgtgcttcgaagctgctcttgtcgtgttacaataaaggaatgaagattccgtcatcggctagacgagcagtgttgtccggcatacgggagacggtatcttaccaagcagcaaggaagacacatatcaaaatcaaagcagctattgagtgtaatacactaatgtacccttaagacattgaaaagtatctaatagaaaaattattgaattgtacatgagcataagggatgttttcatactaaattctagtcgagatttgacaactctcttaaccatttgaatatttgtaatattagccaaagtctcatcaaccatatcaatgactcgagttattaagcaacaagctcttcaatatagct

SEQ ID NO: 3904 - DNA, 1516 bp, Arabidopsis thaliana landsberg
ataccgcttatctttgcgtctctcttggatatttgataaatgaattggtttcaggtgagcgcgtactcatcgtttgtgagaaagggaataatgggtcttggattggaacaacacagaaggagaatagatcttaatacaaacgagcctttgtttaccaattgtacaagggacttcatcggcactcatgactacatattctacacaggtttcaccatttttaactccattgtccttgttttcaactacatcagaaataacaagttaacttaattggaagatttttttgtgtttgggtttcagcggatacattaatggtggaatctctattggaattactggatgaagatggattaagaaaagacacagctcttccttccccagaatggtcttctaatcacattgctctcttagctgaatttcgatgcacgcctaggacaagacgcggttaaccgccttcaccacccaccatcatttgcttacagataggtttttttttttttgttccgatcttcttctttgatcagactatgacatcaactgtttagacgaaacctttaccaaatctgtgatagagatgacacaaagattcaaagggattctgagtaaggcaaaccactctatgaagttggtcattctttattatgacccctgtgtggctctgtctaaacctccttttatatctcattttgatcctcaatatagtgaaaaccctttgacttttcttttccttggatcaattttaatgtttgaactgctttgtatgactaaatagctcatgagaataatatgggtctactagggggttttcttttttcacattgaacaaagagacgattcgtgtctactacataaccatttaaagagcaaacatacacatctgtggctgctccctaataataaacaatagagataagtgagagagaaagagaacataatcggttcttgaagaattgaagttaaagcttagtcccacgcactagccactccaggaccatacccttggttaggaacggttccatatcctccaggaccatagtaagcaccaccacctctaccataaggtgcataaccaccacccggaacatttccatatccaccacctggtacgggtccgtacccaccaggcattgctccatagccaccaccaggaacgcctccatatccaccacctccaccatagtagtcagcaccaccaccgcctcgactaaaagattctctcctgaagtcacgaccaccaaaccgtccaccagaccgccggttcttaccacctccaaatgaagcacgagatgcgtatcgagtcagccagtcagggacctcctggttagcttcttgcattagctcagccagtggcttggccattgttgtgttgttgtcattgaagaaagcagttgctagtcctgaatttcctgcacgtcctgttcgtccgatacggtggacatagtcatcaatgtcgtttggtagatcaaagttcactacatgagccacgtgcggaatgtcaagaccacgtgctgccaca

SEQ ID NO: 3905 - DNA, 3439 bp, Arabidopsis thaliana landsberg
acgaaaagacgctagtcatgaaataccctgatcatttctgcttcgtcaaggcttctaatggtaacccgtgtttaaagcttgtaaaatggcgtgatgagttcgcattctcggcgctgcagaagcgaaacgaggacaatgatgtttccggggaggagtctagataccgcgagttcaagagaggtcagtctacgttgacttttcctatgagtttccctagaggatatggagcacagaagaaggtcaaagcatggatggatgagtttcaaaaacttccctacatatctccttacgatgacccgagtaacattgatccggaaagcgatctcatggagaaacgagctgtggctgttttgcacgagctcttgagcttgactatccacaagaaaaccaagaggaactacttgagaagcatgagagcggagctcaacattccgcacaagttcactcgtctattcacgcgataccccggcattttctacctctcattgaagtgtaagacaacaactgtgatcctcaaagaagggtatcgccgaggaaaactagtggatccgcatcctctcactcgtcttcgagataagttttatcatgtgatgagaacagggtttctttatcgggcgagagggctaggcatggtctctaaagaggaacttttgcttgataggccataggatgaccttgaggaagaaggctctgaagaaaaagatattgtggaagtaagtgagcttgaagaagattctgaagctgaatagcaatagttgttgaatctaattgttgtatgttaattcacacagagcaacaatttatgtacctgcattttatctttttgaagtaacggaacggagtttaaacaatgtaagcacaaagtccttaaaatgatataaagagagattgtatttcaccaagaaagattgtcaacaacaaagggaaacaaaaagacaaattggatttcaaactaacaaatgaaattgttagaagaaaccaagaacaagatcaaaatcggaaaaactactgtctatcttttaggacaaatcctaaaaatagcctgaaaaaacagagagatccacctaatagcaagattagttaaatccatctcttgaatgagagatctcaaaggtgggggcaaataacacgtgctctcttgggaatgtagaagagaagaaataaatagttcaggttaaaaagaggaaaaattggggagcctaattggctaatcccaagcactggtcactccagcaccatacccaccgcttggagcaccaccgtatccaccaccaccatagcctcctccgccatagtaatcactgccgcctcctccgccgccgccgcctcctcctctactgtaagagccttcccttctgaagtcacggccaccaaaccgaccaccagaccgtttcttaccaccaccaaatgaagcacgtgaagcatatcgtgtgagccactcggggacctcttgattggcttcttgcattagctcagcaagcgacctagccagttgtgcattgttctcgttgaagaaggcagttgctattccagatttgcctgcacgtcctgttcgtccgatacggtggacatagtcatcaatgtcatttggtagatcgaagtttacaacatgagccacgtggggaatgtcaagaccacgtgctgccacgtctgttgcaaccaaaataggtgtcctcccagttttgaaggacctcagtgccacttctctttcctttgaattcataacaacataaagaagtcaatcagattgagtcaacagagaacaacttactgatgatgatctttaaagagttcatttcagtaatatcatcgaggttgtttctatagtttggttttagctttagtgtgcacaattatccaaatttcaacttaactcaatcaacgaacctgttgtgttctatcgccatgaatggaggttgctggaaactcattcatgcacagccaattttccaaagtatcagctcccctctttgtctccacaaaaactaatgtcaatgattgctgtgtataaaaagtgaagaaaggcagaattagtcagagcttcagtgataataaatcttggataagtgaacagatggtaaataatgcattaccttgtcttgggtctctctttgcgcgtgaagcaggtccatgagatggcttctcttgtcagactcttggacaaactcaaccctttgggtaattaaatcagtgcttgaaccaactcttcccacagccaaaaatatatagtttgacatgaaatcagctgcaagtctctgcacaggaaacaaatacggtaatattaaaagaaacgttaagaaccaatcattcttgtgcgtgctgaatattatgcagctgttctcacataagaaatataacactctaaagactaaatcatcaaagattcacctcatgatctgggaaggaacagagttacagacataaatccaagaacactgttatcctgttctttgttaccatgctacttcactagaatagaatttaagagcaagaaaaaggtgtttcatggacaagtaaaccaacctgaatctgacttggaaatgtagcactgaacagcattgtctgtctcaccccacgtggaggcatgtccatctgctcaacaatctttctaatctgtggctcaaaacccatgtccagcatcctgtctgcctcatctagagctaaaaacctaatcatctgcattgagactctagctctttcaagcaaatcatttaaccggccaggagttgccacaaggatatcacatcccctctcgagttccctgagctgaataaacaataaaatatgtggtcaacaaatcgatgcttgaaaactgtttgactaactaacacctgtaacaaggattaaaaattccaatgcttctgcatgttatgtaaagatgatacaagcgatacgacaatgttaactagcatatgaaaaaatttgtaatacaagatttgattttcgccaacattatgcattgctgacttcaaaatcagaacatatgttgacaaaggagactggcattgggaaggaaagagctagcagaactcaaatcagtaagcgaaagctgctactcacataaaacaaaaaacagtgctagaatcatgtagcaaaatccaaactccaatgacaagctaaaaaccaataaacaaaaaagtgtatgataattacctgctggtgaatgggtgttcctccataagcaacaacaaccttcacaccagtttggtaggagaattttttggcttcatcatgtatctgcaagaaaatcacagaatgagaaatgtgtatattatatacacgtacattttttctttctgaagaaactctattcttgttggtgtgtatattacctggcatgccaattcccttgttggtgagaggatgactgcaaaagggtaaaccgcccgtgaaccacggtgtctttctacatgctgatctttcatgattccactaatta

SEQ ID NO: 3906 - DNA, 949 bp, Arabidopsis thaliana landsberg
cttcgtggaaattaaaccacgtcctgatacagagtagaaagaacaaaccagtgagcgaggaaacgataaaagggaaaactcagggatacttggaggagggcaaaacctaatgctagtctcagtatcggagatattagcaagtataccgacgattaaacctgaaaattacgacggaagaagaagctagggataagagaaatcaaagagagagagagcaaaagccaaaggaagagagaaaggattataccaatgagaagcgaaccgctggcttcaggaagatagtggaatcgatgacggcggaggacatggccgagaacgaaggaaagcacgagcatcataatctgaagcagtataccaacgccggccgcttgctgctgcttaacctggccctgagggtcgtgctccaccggagaaatcatcacttcctccattcagatttgagattggaccacccaacgaccttgagagttgagactttggggaacaagagtcaaaccgcaaatacgccgtcgttttatcgtcaccatgtctctctgtgtgtttaagaggatttttgagtttttactggtacacggatatgaatcacaggacaaccaacatacaatgtaacatcttgaaatcaatagacgagagtgaaaccaatgtccaccaaactgagcattatacaacattattagaccagtagataataacataatcacagttaatttttcttataagcaatagcttaaataatgcataggttcttcaggccggctgcagtatgtagtaagattatctacttattggtctgaatgcgttaaactaaattaatctaataattacatgtcttttaagtactagtattttcttggatgagtaatcaaactgctattttttctgtcatcagtaattcaaattggttatcatctaaattataaaacaaaatatttctgttatgataaaatat

SEQ ID NO: 3907 - DNA, 1130 bp, Arabidopsis thaliana landsberg
actcactagcacattttaaatacgtatcaaatgatttacatatacactacatattaggactacaagtaacatagtagactttatgagttggattcgggaaaaatctgtcaaaatcttctctcattttgatcctcaattatagagaaactgtgacactgatgactgtttttatgacaacccctactaatagcctaaaaagatcaaaacacctaaaacatcaacaattgttatatatccatctcctgagtgaaatctcataggtgtaaggggcaatacatactctctttgtgaatgtagaagacatattttttttgtcaaaagttgtcaccaaaacaaaaagaacattggaagcttagtcccaagcacttggaggttctccaccatatccaccacttgaagcaccaccatatccaccaccatatcctcctccgccgccatagcctcctccaccaccataccctcctccgccgccataccctcctcctccaccgccatagcctcctctactgctaccgaaagacccttcccttctaaagtcacggccaccaaatcgaccaccagaacgccggttcttaccaccaccaaaagaggaccgtgacgcataccgagtgagccactcagggacttcttggttagcttcttgcatcagctcagcgagcggtctggccagtgaggtgttgccatcgttgaagaaggcagttgctagtcctgatttgccagcacgtcctgttcgtccaatacggtggacatagtcatcaatgtcatttggcagatcgaagttgaccacatgagccacgtggggaatgtcaaggccacgtgctgctacatcagttgcaaccaaaatcggtgttctcccactcttgaaggctttcaatgccacttctctttccttcaatgcatatatagcaacacaataacttagttcctaacacttattgataatgatgatcaaagagtgcatttcaatagtttttccttcagattttgacttatgtttaagctttagttcaatgaactatattttaacacgagatcttctctttggtctcaataatgaatttgtacgactggattttgatgtccacattaacatacaacattttcagctttaagttgaataacaacctgct

SEQ ID NO: 3908 - DNA, 371 bp, Arabidopsis thaliana landsberg
actattgctcctttcggtttcacgattctgtttcattgtctctttgttctatttgatgcattgttgttcaagagcacctttacaatccaatttattttattctacagcaagctttgactctagtttttgtggagacaaagaagggagctgactctttggagaattggttgtgcatcaatggtttcccagcaacgaccattcatggtgataggtcacaacaggttagtgagttgttgatatcaaaattaggatattgtagagtattcttcagtgcaaccaaagctaaaaccttattgtattttttatgcatacaaggaaagagaagtggcactgagatcattcaagactgggcggacacctattttggttgc

SEQ ID NO: 3909 - DNA, 1161 bp, Arabidopsis thaliana landsberg
acttaaaaacaacttaaaaatgtggaggtttagctggaaataatatctaaccagttcactgtaagtaagtttaggaccaccatcagagtaaacaaaccaccatataaagccagcaacagtggccaggccgacataaactgcaaagaaatatagacagctcaagcagataggtcctctagaaggatatagaagcttgaaggcgaataaattcaacttttactacttgaccacaaagattccacgatcttagtttcgaaagatgattagataagttacagagccaacattttaagtttacctccgataaccaaatagcggaagaataaccacccagtgaccactgcttcaccaacctggaattcaacaacaaacagaacaataatgaagataaaaggtgtgactagtttgagaagaaattagcacactactagcagatagtcaattgagaagttctaaatcccttcttcattaaatgacaaaaccttgcaccatcatcactaaaacccataatactggtaacagccaaagggagatgtaaagcatcataaaacctaaaaaatgagtatagtattatgagctctcctagtgatttcacactaatgcaaatcgggcgaaagcaatcgtttgtcacattacttctctcaatgaactaaaatacacaagagataccgtccagttacatctgctacctttcggggttttgccttcataacatcggaatcttgtttattaaagccaatggcagtggcaggcaatccatctgttaccaaattgacccacagaagttgaacctacaattatttaccacgaaaatcatagatttagacggagcttgataaaaataaactttgcagataagttactaccacgctaaacaaactcacaggtgccaaggtatcagggattcccagtacagctgcaacaaatatacagaccacttcccctatatttgaagaaatcatgtatctaatgaattgctttgtgttattatatatagcccttccttctgcaacagcctgtcaagatgagaaacagtttaggatttgcatcaacaaagatactgcagtgtgatttatagtctcgttttcctttttttaatatcagactggggagaaggatgggccactaagatttgcataatttaatagatgtgacatatga

SEQ ID NO: 3910 - DNA, 3727 bp, Arabidopsis thaliana landsberg
aaacaattctcttccagagctttttgacatggtctttgaggctgatgaaagcaaaaggctaaaatctgccatcagcaagctaagagagataaagtgtctcttgcatcttttatgatcaaatgaatctgttagtcactttatgttagtcccggatggttaaaaatgagggttcttcatccttttattatacgctcaacgttttgtatacgatgcagatgagtgcctgcagcaactggatgtagaaaaggaatacaatttgtggtgtttccgcaattccagtagaatcatttaactgacatggtgtggtcatttgaagtttggtttcctcttatgtgacacgtatcattattgtcaccatgcctaattgctatatactgtttttggaatcttttgcaagacaagacaaaagttttaagtggttatcccttttgagtccatgtagggaaaaggtcagttgatcatttcaaagtttgaatttttaccccaaattcgtttggtttagtatttgctttcacgtctaaatcatgaaacaccgcgtgctctaactctgttttagagcacttgatatttaaaatcttagccctttaattttgtccatctattactacaaatagtctcatggtcttactctttgattaaagataacaaaaatttcaagagaaaaaactaataaagtaaagatctttgtgtgtattgtggtgactggtgaccattgcataattgaaaagttaagtaaatgggtagggaccaatagaaaaaccaagtcaaattacatatagagataaacttgtctaatctctcccgccacccactcctatcttcctctaatctcgcctctcatctctctctctttatcactctcccctctcgtcatataaagacattaaactctaaagtcatctctcttctatctatctctctgtctcttcttgagagctaaaaagaacatcaaatggccattatcgacgttgatgattcattcaagagaccaggaactataccttttagctgggagatccgacccggtgtacctaaaacccgaatgtctcaacccggtaacacaactcctcttcagcctccaaagaaactctctcctctccgttttaaaccattgtctcactctcagccgcttctcccgccggcgttatctccaccgtcttcttctttcatctccaattccaaaagccgtcctttatctcctctcactccccattccttttctacaaccccatcgaagcccaagctaccacgaacaccgtcgtcgctttctggattttactctccgggaccttctttccgatcatcgccgcgtgctttctcggaacggtggcagctccaccgccctaaccggattcgacccgaatccgaaccagaaccaagttccgatttttctgttgccgggttcgggtgtttcccgtcgcctaagtttaggttgaggaaagttaagagcggtggtagtcggagaaaatccgggtcgagatcggagaatgattattattgctccgacatggagacgatgtcgccgtggactgtttcaagccgtagatcggtttctccgagatggtaatcacccaagtcgtcgttttcttctctccgattctcgccacgattcgccaacgaagctgaatgggttgggtttggactcttttgagcacattttcaatgaaatggctcgcgatcggttctttagccatccgaaccaacggaagcctcttgaatcgcgcaaatcaaattaaagcaagggttgggctaaaatgggatttttcaaaagtttagggtcctatatctaatgtgctttagagttttcacatctgtgtaatataaatttgtggatctgtggatgtctaaagacaattcacattttgaattttgaagttttgagtgtggggaaaaaagattgtaagatatgaaaagtaacattagtaaatgaatttagaaatcacactaaaaagttaacatttttttgctacatacaacttcttaaactatggaaaaagggtcccaataataaaatacaaaactactatcaatctaattaaatattcaattttccaattaagtatatggccgaatcagtcaatttaaaagtatagggctcaatggaaatttaaaaaacagtttggggttcctgggtaaaactttaaaaagcgatcctgagttgacgtcactgttaaagctttcagctttgtaatgaaaactcaaagtaggaggacaccatgaaaccgtcgcaaccgctatgtaaccgcattgttgatcagcttattactgccatgattcagaaccgtccattagacgccgttctcgcttcttcaacggtggcgaaaccatggactcagcagctcgtctccgatgtcctccgttctatccccagattcttctttatctccccacgatccatcggtcggcaaaagggttttcgtcaccgttcaccgttaaagcagagaaacctcagtgatgaatcacaacgacgtcgttctgaagttctagttctaggtcccggtgcgtatatggatcctaagaaagtctctatcgggttgcagaaagcattggagttcttcttttggatcgaaacccacttcgggtttgatcataatgagatcacttgcagagatatggcttgtctattggccaaaggcaatgactttaagggtctctgggattttctccggcaagtctctagaagagagaacggtaaaaatgtggtcacaacagcgtctataacctgtttgatgaaatgcctaggagaagaaggttttgtgaaagaggcattagctacattttataggatgaaggaatatcactgcaaacctgatgtttatgcttacaatacaattatcaatgccctttgccgtgtggggaattttaaaaaagctcggtttctattggatcagatgcaattaccgggttttcggtacccaccggatacctatacttacaccattttgattagctcctactgtagatatgggatgcaaaccggatgcagaaaggcgataaggaggagaatgtgggaggctaatcgaatgtttagggaaatgctgttcagagggtttgtacccgatgtggtgacttataattgcttgatcgatggatgttgcaaaacgaatcggattggtcgggctctggagctgtttgaagatatgaagacaaaagggtgtgtaccgaaccaagtgacttataattctttcataaggtattatagtgttactaatgagatagaaggtgcaatagagatgatgaggacaatgaagaagttgggtcatggtgtacctggttcgagcacgtacacgccgctaatacacgctcttgttgagaccaggagagcggctgaggctagggatttggtggtggagatggtggaggctgggttggttccgagagagtatacatataagttggtgtgtgatgctctgagctcagaaggactggcaagcacacttgatgaagagctgcataagagaatgagggaaggaatacaacagagatatagcagagtcatgaagatcaaaccgaccatggctcgaaaagaggttgttcgaaaatattttcacaagattgacgggaatcaaaattttgcaatggaggaaatctgacacatggtataattccggctcaaatttgcatggctttcatgatacattagatagtttgattgaaacactaattatagacttaagtttatgccagagccactggaagatctaaccgatcaagtgactaaatgttt

SEQ ID NO: 3911 - DNA, 582 bp, Arabidopsis thaliana landsberg
cataagagacaaattaaagaaaatgtcagagtacaaacaaaattgatttgctttttggatataggagcttctacaaataacttctacaacaaatacaaattgatttgcttattcgccctacccacagacaattgccaagaattttaaacagaaataagtggacaaggaacttaatcagcgagtgtgccacaaacctgtagtgcccatgaccacgatctcaaattttcatcccgtagaagcacacaaccgaagaagcaagggacggccatagttattaactccaacccatattccaagtggcatctcaacagcacttaagcgatgtgttgtatcgaaaacaacagcatctccaaagagttcatatgactgaatggaagaagcatacgaccaggcaatattttctaacttatcatttgcatccaaagtaaactcgaacttaaagttagggtctttctcctttatgctttggcacatcctcaggaaatcaatgttctcatcctcaggatcgagtttcttgaatgactgaagcaaattcctgacatccttttcggtgaatggtaaaaatcctggctcgacacactt

SEQ ID NO: 3912 - DNA, 494 bp, Arabidopsis thaliana landsberg
ataaaaataatcatccatattaacagaaagctactatgaatttacacaaataaaaagttgcaataaagaaacacggaagaaaaaaataactgtttatgtaaatagataattatgatgaaaagactaacgaaaaaaagaaaattgtcaatattttaacgaaatattgcgataaaaacacaacaaaaaaatgataaagaaacaaacgaaaagttgcgataaaaagacattaacagaaaaataaccactatgttagcggaaagttacgatgaatagacatgaagtaaatgttgtgataaaaaaacacaatcgttcagaaaggcaaaagacatttttttttaattcatcatgaaacaagtaatttatggtaaagaaccaaaatttagaaattagttaagaagataaaccaatatatagagttcaagagtcacaaacattgaagtagacagctatttataggaaagatgcgttgaacagacacaaataaaaaatataac

SEQ ID NO: 3913 - DNA, 569 bp, Arabidopsis thaliana landsberg
  unsure (1)..(569): unsure at all n locations
tcttcttctgtatacgaaaatctttaantccacatgattgtatctcttgttctactttctagattcttactgtcttccccctaggatcatgtgaggctatatgaaaatccgcagagaaccttccacggtatacctttttcacaggtctctttttctcttgaacatatttcaatataccatattatcagagaactctgttcattagtcctccgacaatgaacctttccattatgagactgtttcatacgccctccatgtcctcaccgccccttttatttgtctttgtctctgaacaacaagtttatcccaccacatagatgcaatattctttaatctgattgctaccatcttaccttgcttgttttcagggatgcccataacttcaaataacctataaacgctgatttgccaatgtagaaaatcctaaactccaatagtaccatagaacaatggaatgtcagcctatacacnggaatcatgattattctgtcaattccttcgctcaactctaatcatggaatcgccatatgattggtcatagcagttagagccatggtaacagccttgat

SEQ ID NO: 3914 - DNA, 348 bp, Arabidopsis thaliana landsberg
aaagcgttgcgggttctccatacgccgtcacaggacagaaggaaaagacggagttggcaaaggacttactaggcgctactttgtttgtcaccgtgctggtaacacacctatcaaaactctaagcgaaggaaaaccacagagaaacagaaggtcttctcgatgtggatgtcaagcatacttaaggattagtaaacttactgagttaggttcaacggaatggcgtgttactggttttgctaatcaccacaatcatgagctcttagaaccaaaccaagttcgttttcttcctgcgtacaggtccatatcagatgcagataaaagtcggattttgatgttttccaagacagg

SEQ ID NO: 3915 - DNA, 2220 bp, Arabidopsis thaliana landsberg
ttttgatgatgtttctgttttgctgtccatgtatcttattcttgtaaatgtagtttattgtctaactgcatcttcactttataaattactaggtgttcaaaaaaattgttattaaacacgacaaattcaagactggacaagatgaatatgtcgagaaggagatactggatgtcaaaaaacaggacattctaattggtagcatacctgtcatggtgaaatctgtcctttgcaaaactagcgagaaaggaaaagaaaactgcaaaaaggggaattgtgcctttgatcagggtggatattttgtgataaagggggctgagaaggtgagttaaaccattttgggatctttttgcatatccactatcatgggatttctattttgaactattttagtgtatagcttagtggaaattagttctctttttctaatatatacaagaaaaaatattttcaagttgttatacttctccctaacgttattataatctgtcttgcaggtgtttatagctcaagaacagatgtgcacaaagagactgtggatttctaattcaccatggacagtctccttcaggtccgaaaataaaagaaatagattcattgtgcgcctctcggagaatgagaaagcagaagactataagagaagggagaaagtactgacagtgtacttcttgtcgactgagattccagtctggctcctcttctttgcgctaggtgtttcgtcagacaaagaagccatggatctaattgcttttgatggtgatgatgcaagcattaccaacagtctcatagcttctatccatgtagctgatgcagtttgtgaagcttttcgctgtgggaacaatgccctaacatatgttgaacagcagatcaaaagcaccaaattccctcctgctgaaagtgtggatgattgcctccgtctgtatttgtttccatgcctccaaggtttgaagaagaaagcccgattcctgggctatatggtgaagtgccttttgagcgcgtatgcgggaaaacgaaaatgtgaaaacagggacagtttccggaataaacgaattgagctcgctggagaactgttggagagggagataagggtgcatcttgcacatgctagaagaaagatgaccagggccatgcagaaacaactctcaggcgatggtgatttgaagcctatagagcattatttggatgcttctgttatcacaaatgggcttagtagagccttctctactggagcatggtctcatcctttcaggaagatggaaagggtttcaggtgttgtggctaatttgggtcgtgcaaatccattgcagactctgattgatctgaggagaacgcgacagcaagtcttatataccggcaaggttggagatgctagatatccgtaagtgaattccacctcctctggtatatttaaatatatctcacgtattttaacttactggtctggtctgcatttactccattttacatgtcttcagactgttttaaagatattcgtaataactttaattcaatgtagtatatgatggcgatcactgtttctgcagtctcttgtctgtgtataatacttattttgtatagatgttactgctattaaaaaactctgatactgtctttcttgtttctttctcccttggtcaatctatctgttgaactcttgagattatccattttggttccttttcaatgtgagcggttagacaattaaatcgtgttgggaaactgaactatagctgcattgtttgtaatgttggccacaggcacccctctcactggggcagagtatgctttttgtcaactccagacggtgaaaattgtggtcttgtgaagaacatgtctcttctgggacttgtgagcacccaaagtttggagtctgtggtggaaaagctcttcgcttgtggaatggaagagctgatggatgatacatgcacaccattgtttggcaaacataaagttcttctcaatggagactgggttggattatgtgcagattctgaatcctttgtcgcggagttaaaaagcaggcggcgccaaagtgaattacctcgtgaggtatcttctgtttcagcaaatctcttgctatattttgatattcttgggttacttggtatttgctttggatttttctgcttcagatgtgtctatgtcgaatattgtttatatatatgaaacgttctctgcagatggaaatcaagccagataaagatgacactgagggaagaattt

SEQ ID NO: 3916 - DNA, 788 bp, Arabidopsis thaliana landsberg
ctgcctcactgcgctttagtttgagtgttttatgcttgtgtgcaatgactcttgtactgtcaaacttttgatgatgtttctgttttgctgtccatgtatcttattcttataaatgtagtttattgtctaactgcttcttcactctataaattgactaggtgttcaagaatactgttgttaaaagcgacaaattcaagacaggacaagacaactatgtcgagaagaagatactggatgtcaaaaagcaggacattctaattggtagcattcctgtcatggtgaaatctatcctttgcaaaacaagcgagaaagggaaagaaaactgcaaaaagggggattgtgcctttgatcagggtggatatttcgtgataaagggggctgagaaggtgagtttaactaatacatacatatatgcatattgccattcaatacgtacaataactttattttctatgccaaaacggattttgtttgtcagcaatccataaaacggattatagttacaattttctatcatcagataatagtgtttatcagcaaaaagatgttacaaattagacaataacctatttggttcattttattttcctaatggagatgaagtaagaaattaagaaacttaacttatttatgactttgtatacttcgttagcatcaaagatataaactttttctttcctttctggcttgaccatgaagccatgagtattcaaatcttacaggaagcgttctttgcaatcttaagctctgggacagatgatttgactctaatatattctggaaaaaaa

SEQ ID NO: 3917 - DNA, 443 bp, Arabidopsis thaliana landsberg
tggaagtgctgaccttgcatcatccaacatgacattgctgaaagcctttggcgacttccaaaaggccacacctgaagaaagaaatcttaggtttggtgttagggagcacggaatgggagccatctgcaatggcattgcccttcacagccccggtcttatcccttactgtgcgacgttctttgtcttcaccgactacatgagaggtgccatgagaatctcagctttgtctgaagctggtgttatctatgttatgacccatgattccattggtcttggagaagatggaccaacccatcagcccattgagcacattgcaagtttccgtgctatgcccaacactcttatgttccgtcctgctgatggaaatgaaacagccggtgcatacaagatcgctgtcaccaagcgcaagacaccatctatcttagctctgtctaggcaaaagc

SEQ ID NO: 3918 - DNA, 2300 bp, Arabidopsis thaliana landsberg
  unsure (1)..(2300): unsure at all n locations
aaaccctagcaccacggacgaattttttcgatatctcgacgcacctgacgaattgggctactgttgcttaccgattcgttccaattcccatcacccttcgtctctcttacggcggcgaaagtcggcannnnnnnnnnnnnnnnnnnnnnnnnnnnnnnnnnnnnnnncatcttcttcttccgatggatttgatgtcggtgagaaatccagctatgtggaaaagaacgctgagcttagaggggatattgatacaagcgacgtaattgaatcaactaaggactcaattgatctatcttcagaaaaggagaacgatttggatgtaattagttcgtctgggaatgatatggatgtaattgattcgggtcggaaccgggttgacccgtttcaggaagaatccacggtgaccaccgtgagcagcgatgatcaaggagacgacgactacgccggatcggtgccacagtttcgggagccacctaattccactgagtggtctctccttgggtttttggttgggctagtgatcaaagcaatcgaatttcaagtcagtttcatgacaagcttactcacatttcctccatggcttctccgtaactgttttctcttctttttcgatccctttagcacgattaggtttggcagacgctttttaatggcaagagtagcaggaataagtgatatgatctttggttatatgaatccttttaggttaaaagatacaaaacaaatgttgagtattgtgtgcaagtttggttggggtatgttttgggctgtttatgtaggcattgtgttgtttggcttgttggtttcgtcgcttatgattggtggttatgtgattaaccgtatagcggataaaccatttgaggtcaaggagaccttgaattttgattacaccaagaatagtccagaagcatatgtgcccatatcctcgtgtgctggtgttgaatgtgagggaagttgcaaggaaagtaatgaaatgtcgaagatcaggggtttgcgagttatccctcgagaccagaagttagatatcattctttcaatgacattacctgagtctgcgtacaataaaaatctcggcatgtttcaggtattggcatgagatatatatcttacactctaagtctaagcattgcagtttgctctggcttgaaatagtttctcatgtgtattcgtttttgtccaataaacatttacttatgttttgctcatccattttgatatgggatcatgtgtttattgaaggttcgggtggacttcttatctgtggatggtcaaacgattgctactataaggcgtccgtgcatgttaagattcagaagcgagcctattcgtcttgttcagacattcttcaaagtggttccgttagtgacaggatatgtctctgagatccaaaccttgagcttgaagttgaaaggctttgtagaaaaggacattcccactgcttgcttaaagataataatcgaacaacgggcagaatttcgacccggagcaggtattccagagctgtacgatgcatccctatcggttgaatccggtcttcccttcttcagaaaaattatatggaaatggcggaagactttgttcgtctggatcagcatgagtttgttcattacggaattgcttttcacgttggtttgttgcagacctcttatcatcccaagaacacaacctagagacagatcgccttcaaacccaactggagtctggaggtagattatgaatcaacagttactgtacatcatgtttttaacacggcaatggtattttcacttcctgttaactttagttccaaaagttctttgattaaattgtaaattcatgcttactaataaaagttaaatcttattatatggttcggatttaaaaatgtcctttaaaacgagtgtgatgagtgatataatggctactttcagtctctcttcacaagcagagtgtataaatgattagtagtacttaatttagtcaatattacatgtacgtacaagaggtctaatatgatccaaaagtatataagcagtccaaaagctagagtcatttactttaactgtaatcccaagaaattctctgaacctctctattatttcaaactttttttccttaactttctgttttcacatttatatattgctgtacaatgagaaaatacatggagaaaacaatcagagctcaaatatgtgtcaatgacttaaaaactgttattttactaaaaataactcagagctaatcacaacctgaataaactgaactctaccaaatcaagtcctcttctgttccaaagccagtagcttgaagttagaaccttt

SEQ ID NO: 3919 - DNA, 1467 bp, Arabidopsis thaliana landsberg
aggtccatagtctcgttaatatccagtgcgatacctaagacttttttagtaccctggaattataagatcagtaaaaagagaaaaaacatttagcttagcaaacacctaacaactcttcgtttatcaaatgacatgcttttggtcttatagagtgagatttatgaaaagagcacgaaacttacagtgttatcttcaagtacatcgtagatatgcttcgaatccacaaggaattcccgttctccaggctcatttgactgtgcacggacaatctccttacccatatcttgtagcaaacggtgcatctcaatagtatcctctcttacaaatatgagagacttatcaacaaggttttttaacccaatattaacatccaagtcactctctgctagaagcaacttgatgtcatttactttctcaccattgaaaagacatgcaatgtgacgaaatattgcttcatcctttttgttgtttaatccatcgtagctgactcttagtgtcttctcaattttcccatctaaatcattttgaagcctcggcatcatatccatccagtcctctatgtccctaccccgtagatacgaacccaaaactttaagacccaaaggaagattaccagcgcgcaatgcaacttcagaagaaagctccataaaaccatcaggtggagaattcttcctgaaagcatatcgacaaaacatctcaagagcaagttcttcagatgggagacaggcctcgtaaacatgatcaatcccatgggcccttaagaaatgtttgttttttgtaaccacaattattctactcccacttccaaaccattgagttctacccactaaggcatctagcacatcttgatcatccaaatcatcaataatgataagaactttttgatgcttcagcctttcttccattgcaccgatcttcatgttctttatgcccaaaatttcaaacaggaaattttcttgcaaacgcaacttcatgttatagtcatctggattggctcgaccgtaaccttccatactcttagatatgaaagccctgtctatgtaaacactactttgaaactgactagagagattactaaataaagctcttgcaatggtagtcttaccgattcccgaggtaccccatatcccaaccatcctcacttcgtcagattccaaatgcaataacaatctcaccttctcaatatgatctttgatgccaacaaagtcctcaaaatcatttgatggagttaaattcagtttacctaatatatgactggagatttcttcaatcattgtagcttcgctattgctaacgagaagaaaaatcaatgcacaaacatgaaacaaatatcaatgatcacatctcacgtagaaacatttattccaagacttacaaacacataccagttcttagaatgatatccgaggatgtttgaaacatcagtcaaagctaaaaaccactgatttttcacttccacagtttggt

SEQ ID NO: 3920 - DNA, 566 bp, Arabidopsis thaliana landsberg
ggaaaaaccgagacaggtatgtcttcggtgagatcggataagacagttattttttctttaggaggaggtccttgtggtattgctgagagcctccagcaaagtgggccattgcatgccgtgagacacaccaatatcaaaaatatgaacatcctttttctctatgggatcttgtgctaaaatctgaaggatagcagagatttatacagatgtccaagtccaatcaatggtaggtgaatgaatgtaatcgtaaagacttggtgcttgtagaaattgagaaatgataacgtgaagacataatatatgagatgattttgttccaacatgattatttgcgttggtcaacttcgtttgaattatgagatgtcacacaatatttgactaaagccaaaagtgattaccatgtgatcggtcttgttactaattatggtttatatgattactagcagatatgattatgttgtatagtctgggactaaaatcttatctcttttgaaaatggactataaaaggcacaaaccggagcttttaaagcaattatttttcataaatcacaaatccatgcagat

SEQ ID NO: 3921 - DNA, 235 bp, Arabidopsis thaliana landsberg
tattcactcattccggcttcatcgtgcaaatggtttatgatatttttcgcttaaaggtgaggaagttctctcatgagggctttgagagaggagcaaaagtttgagattgatatgcttgtggcaaagacggtttcgagaattggtaatctcgttgacgttgagaaagttcaaacgactacgattccttggcgtaaaaaaattgttaggaagtgtgagagaattagttctaagccga

SEQ ID NO: 3922 - DNA, 1435 bp, Arabidopsis thaliana landsberg
tctggttttagtttctatatctatcaatgttctttcttgtctgcccaaggaattttttttatgtagttgatacagaattccgaccatgtagttgtttctaccttcatttgagatgtatgtgtaattgcattgctttctttaaaacaggattctgttttttgcttaatgaaaactccgttcatgtaacttatctgtgtggttttctgtttggagctatgctaataatatctaccttttacacatatactccgttctaacacaaacgggaaacatgtattccaatctgcatcttcatcaaaaagcaatcaagaaggtaatgccaggaaaaagattcaattattggtagccactgaaaaagcaacgtgtttacgaattactcatcatacaaacaaattcagattcaaacgattgaatttgggataaaacaaagaggctgatgacaaaacaggagtttctaaggttaccagattgttccatatgtgtggccccaaagtagctaacacaccatagcttagcctattaacaaagactcatgctgcattcaataccttcacatgattcttttttctaaaagaacaaatttcaatcattcaagatatgtcattatcaactctcacaaaactttcatcaattagaatttcacaacaggaaaaaaagttagagatcgtatcttaacctgtttgtaatattcttctccacctttcaacgcagtgagaaccatgcatcttctgcctgttcacaacagtatatagaatgtatctatccaagaaaactccacaaacaaacgaagagtcttagaaagtcaaagctggtaatttgtatcaataatacagttaagtgttcgaaaatgactgaaaagttttagattattgaggcataatgaattgggagcagaaacaacaaagagttttagctggcagcttgctaggagaggaccgcactcacgtagatgtgattctcaagtcactttccacattgtaatctcaaatccaccatgcacgtgcagaagcaataaacaggtaggtgataatgaaataagggtcgtccaatctaattctatgacccacaaaatgtgagagaatgtgactcagtaaatgcacaacacattggaccttgtctaccaatttcaaattccaggaagaccgaagaaacaaacgagtaaagacgaagaaacaaacgagttaaggcaaaaaaccaaacagttctgtgaaactattagctgcacatgctcaattgataatcgaaaacgaaatccaagggaaagattacgacgagtagcaatgctttcttgaaaacaaaaaaacaacgatcactagtaaatctctcatattgtgtgaaaacagatacccttaaaaagcaacactaaccttaaacctttcataaaaaaatcaacatcttcgagaaactggtacaatcaattaacgaaacgagaatc

SEQ ID NO: 3923 - DNA, 2334 bp, Arabidopsis thaliana landsberg
  unsure (1)..(2334): unsure at all n locations
ttgggagattcttcttgcacacagctggagcaatcatagatgttcgacaagggaagatagggctgtangttggcgatcatactatgcagttcgatatgaacactttttcaagaaaccgatcatagaagggaaaaccttcttgatagattcttttacttcatccgaatctgaaagaagtggttaagaacgagattatgaaactgttggaagcagggattatctatccgatttcagatagcagttggattagtccagttcatgtagttcctaagaaaggaggtgttacagtagtcaagaatgagaaagacgagctgattcctactcggacaatcacaggccatcggatgtgcatcgattacagaaagctgaatgctgctaccaggaaagaccatttccccttaccatttatcgatcagatgttgcagaggttagcaaatcataagtattattgcttccttgatggatactcatgattctttcaaatccctattcatccagatgaccaggagaaaacgactttcacctgcccctatggtacatttacttattggagaatgccctttggtctttgtaatgctcttgcaacattttagagaggtatgatgtctatcttcatagacatgattgaggacatcatggaagttttcatggatgatttttcaggttatggatcatcgtttgaggattgcttagagaatttctacaaagtgttggcaagatgtgaggagaaacatctagttttgaattgggagacatgtcactttatggtgtaggatgggatagttctcggacacaagatttctgagcatggaatagaaagtgatagtgctaagattgaggttatgacaagtcttcaagcgcttgataatgtcaaaacggtgaggagtttccttggacatgctggtttcaacaaaagattcatcaaggatttcagtaaaatcgcaagaccactaaccgctctactctgcaaagaagtcaaattcgagtttacacaagagtgtcatgatgcctttgagcagataaaacaatctttgatcagcgcaccgattgttcaaccaccagactgggatctaccttttgaggtaatgtgtgatgcaagtgattttgcagttggggctgttttaggactgaggaaagataagaaacttcatgccatctactatgcaagtaggacacttgatgatgctcaaaggaattatgcaactacagaaaaggagttgttagttgtggtgtttgctttctagaaattgagatcttatcttgttggatccaaggtttcacagatcatgctgccttgaagtatttgatgcaaaagaaggatgctaagccaagacatttgagatggattttgcttcttcaaaaatttgacatagaggttagagatcaaaaaggagttgagaatggtgtagctgatcatttttcacgcattaggatcgatgatgatgtctctataaacgatttcttgcctgaagagaacatatacatgactgatacagctaagaagatgactacaaacttgatagtttgcagaatcgagcttcagtgtcgatcgacactcccattatgtcgatcgacactcacatttcagaggaagtagatagtcgaagttgtgtgatggtgtcgatcgacaccactgcacctgtcgatcgacactcttctgaatcaatgagaaatgggtcaccaactgagaattgcgccgtcacagcggtcgagaaagattacccatggtatgctgatattgttaattacctagctgcagatgtggaacctgataagttcacagattacaacaaaaagagattccttagagagtataggcgatattattgggatgaccttatcataggtaattagcgacaacataaaaggtagcttagtagtcgctgaatcaaataacatgactatttggcgactaaaacacgtagtcggtaatccatgcgtcgctaaattaattagtcgccaaatcgtagccgagtagcgactgagctacgactaaactatacgtcgctaattgagtcgctcaacagcgccatttggcgactgttaggcgacattgttgccactatatagtgacacttaggcgactatttggtggctaatgtagcgactgttttgctactacttggcgacttttttgtttaagtattggtgactgaattgcgaccatttgacgactgattacaggtcgaattattgattatacattctgtttttttagttaaaactgtaattaacaaacttgagaaagcaaataaaaaactgtatttcacaaacaaaactgtaattaactaacaagctgtattttataaatcagaaccttgattcaaatacaca

SEQ ID NO: 3924 - DNA, 1515 bp, Arabidopsis thaliana landsberg
ttgttttcctagtttgaaattttcatatataagggaaaaaaaaaagaaacttacaaagccaaaaccagcagtcttaaatgtaggctcaacaatggcatatttggagcagtattgagaaaggatagccctaaggtaagcaacttcgtcgaaagctgctgatatactaccattggacaaaagcgcgtgacattcttcggaagacccaaaaggcttgagcttagaaacattaaatccctcttttattagaaaatctttaacaaaagccccgtgttgatagcctacatagtccccattttttatgagatctttcacatttatggccgctggttgaaaacgttgcaccgtcaagaaagaggtgagatttgctgtgtagctctgagtgagcacaagcaccacaaagcaccatacaaccaccacaaaccttgctaagttgctcactaccttctcacctatatgcacacacacaaattacttcatcattaggatcttgattcttgttaataaaaaaattatcacattgaaaataagttgacatttaatatataaacaatgtaacaatagtctcattttacataatatagttttcaaaagaaaagttaacatttatcattattggtgtaagaacttacggtgggcaaaaaccatggtggagaaagagaaccaaaaactagtgccgatctggtggtgaggcggtccacggaagtcggtgttgactctatgttcgaacaaccacacaacaaaaccaatgaggacgaagaaacaagcagtggtgacccataagtctaagccccaaggtttgaggaacacccatgtgttcttattctcgttgtctctcaccggcaccatcatagacactcctgactctgtgtatggtaacgtaaagtcagcatacaaagatctgtacgctgtgatggttacatctccaacaactgcatccaaagtctgtttcatttttaataatttgttagagatctaatatattataaaaagacataatctattatatctaagactagttcagtctactcattgctaactgcttttacatagaattgcttgcacttttagattttatttaagaaaaacaagaaactaaccccgttatcgactttatagaccaagtcatcgtagtcatcatccggagactcgaaacggtagtattgtggaatgactgaatatggtaacttcttaagagcagcttcaaagatgtctatggcgtaaccctttggagttgttatgttagtgataggatccgtgattacctccacaaagttgaagaagcctttctttactggaacgcccactttaatcttcttaccattagttggaatctcccatcctttaggaacaatagtagacttccctggccatatcaatggcccaaacctctcccctgtaaatgacgttgttttgtttgaatttacattcacaagtccattgctcggtgtccaaaatacagacaattctctcttcatttccgacaaaatttatgatctcaaactttggtgactcgag

SEQ ID NO: 3925 - DNA, 4673 bp, Arabidopsis thaliana landsberg
aagcttggttaaatcaccatcgaccccgtctttcctccagtcaacgatgatggcgcggagtcttgtcttttcaatggaggagatccaccatctactgtggaagtagcagccaaaccgaccgcgaatcaaccggcacacggggcgacccgtatcgacccaccatctttcttcttggaggacctcaaagccatcctcacaaccgtgacgaaagatctctctgaatcagtcatggagactaatcgccgactcgacgagctgccaaaaggaaggcggctggggtcagaccgcgccaaaaccgtccaagacgaggtcgagcggctcctaaaagccggcctgattaaagaagtacaatatccagaatggctggccaacccagtcgtggtcaaaaagaagaatggtaagtggagagtctgcgtggattacaccgacctaaacagggcttgccctaaagacagttatccactaccacacatagatcgcctagtcgaggcaacgtctggaaatcagcttttatctttcatggatgccttctcggggtacaatcaacgaaaaacctatcttctataccagtaaagccctgaatgacgccgagaccagatatccgaccttagaaaagctggcgttggcggtgataacggcagctcggaaatttcgaccttatttccaatcacattccatagtgttcactgatcagccactacgcacagtgctccacagcccaaaccagtctggacgaattgcgaaatgggcaatcgaactgagtgaatacgacgtggaatatcgctttcgcccgagcctcaaatctcaggtcctagcggacttcatgactgaactatccccggatgtgattgacgttatcccggacgaaaactggatactctactcggacggctcctcatcattacaaggctccagcctcggaattctacttcagtcaccaaccggagaaatccttgaacagtcacttcggctccagtttaaggcatcgaataacgaagcagaatacgaagcacttctcgcaggacttcgactcgctaaaggcctcggagccaggcacatcaaagctttcagtgattctcagctcgtagtctgtcagttcagcgaggaatttgaagctaaaaatgaaagaatgcgagcctatctttcattagttcacgatctgtccaaacagttcgaccaattctctctggtcaaaattcctcggactgacaactccgcagcagacgctttagccgcacaagcttcaaacacgaaccccgatatgaggcgaacaatcctcgtcgaaagcatagcgaaaccaagtatcgagctaccaagtgtgacctgcgtgattatagatcccgtgacggccatggacgtagatgtagacgcaaccaacacgccaaacatagaagtggatccggaaccatcagattggcgagaccccatcaaaatgtacattgccgacggcgtagttccaacagatcaatgggaagctcgccgattgaagacaaaagcggcaaactacatgatgatgggcggcgagctatataggcgaaatgcgacaagaactttcctcacttgcgtggatcaaaaggaagccctaacactcatgaaggagacacatgatagagacggcggtaatcactccagcgggcgagctctggccctcaaaatctagaaagacggtcattactggccaactatgttggcgtactgcgaggcctacgcggcgaagtgcgaaccgtgtcaaaggcacggcccaatgaagaacgtccctcccgagatattgcactcggtcacggcgccatatcctttcatgcgatgggccatggacatcgtgggaccaatgcctccttccggatctaaaagatttttgttggtcctaactgattacttcactaaatgggtcgaagcacaggcgtactacgaggtcaagtcgctcgatgtcgtcgcattcatcaggaaaaatattatctgtcggcatggtcttccgtatgagatcgtcacggataatgggaaacagttcgtctcactcattaccatgagcttccttgctccatggaacattcgcatgagcaactcgactccttgatatccacaagggaacggacaagccgagaccacaagcaaaacaatcatagccgggatcaagaaaagacttggccccaaaaaaggaaactgggcaaacgagctggaaggcgtgttgtggtcataccgaactacaccttggcgacctacgtcggtgtctcctttctccttagcttacggcattaagccaatggctccgttcgaagctggaattccgacgttacgcagatgcatgatgtcaaatgaccataaactaaataatcggcttcttggcaaccacaaaggcttcgccgaagaacttcacgatcaagccatcatccggatccaaaattaccagaatgcagcggcaaaatactataatcgaaatgtccgagaacgtcgctttcacgtgggtgacctaatactacgggatgtttacagtaacaccaaagaaaagaacgccggaaagctcggagctcgatgggaaggaccttacttgatctccaagatactccaaccaggagtctatctgttgatgaccatgaagctgaaagaagtggaaaacccgtggaacgaagcccaccttaaaaggttctactactagattaggatatatatatatatatatatataatagctagatatacagatcgccttgtcgatctcattcatgtaatacgaactacgaatggcttgatcccttcaccgggtacataggcaatccttcgcaaggatgcaactataccttctaaaaaccttaattctttctctgttcttgatcaaaactctaatctgtttcacaagggattagaatcccctttataattgagtcttgtatgaaatacctaatgaagagaaattactagatttgttttcctcttttaaacaaatctattgtgtgaatccttggttcaacaattttcctgagaaaaaaatgactagatgtttgcgaagtaatggattgagcacaactacaatgggagtttcgttttttcagcgagaaaaattcaagctttgttaatggcaatgtgagtgttttgaaggtgaatgcaaaacatctggtggatctagtcaacaacaaagtgatggattttggaatttataactggattcgagaagcacgttactacaaagtccttttgacttgttattattgatacagctccaaaaaaacatgatactgaataatattattgcacataagatctgccgagtctacacctttctgcatccataacatttacaaattggtgttgaccactcaactttacatttgccagtgtgataaccagcaggcctgcaatcttgtgtgcatagactgttactacaaggaccaggtgacacatatgcggttcggccttctatacatggtggcttcttagcctttactcttgatattcctactgcagtgtataggaaacattaatgaatacatattagtcagaaaatcaaacacaaattaaagagatttcatatatcataatgtatacctgttaaaatcaagaaaatcaccatataagtgatgaaaccagtagcatttacacctttagccattttcacttttaatttcttctttttgattgaatgctttacatatgtaaaaaaatcatctaactgttgtatataaagattttgttttctaaaaaacgagaagataatgtagtccataaaaaatgcctataaattagttagagatgaagaaaaagtataaatttgatggaacacatatttcctcctccatttttttcgatcgttaatttagttttaccaaaattaaaagtcactactcttttctaaataaatatgtaactaatagattgtttattgtccacaacttataagaacttgtaatctaatccacttatttcccaaaaaccgtttgaactcacaactcctgcccatctccctaaaggtaaaaaccgtctttccaacccaccaagaatggcaaatccacaagccaattcaataattggcatatccacatattttggaccaacaaattaaatggcattttgaacaatataatctcaagattttacaaggtcttaaaaacattttagaaactttgtaagaacctttcaaaacttttaaacaatttgtaaaatctataaaaggtttttagaaggttaaggttgtgataagattttaaaaggtttttaaaattaatttcagaaagtattataaattgtttgaaaacttacatttgtataacttgatagcaacaatgacaagttcttgtgtacttttgcatcatactcatccatctcgtactccatggtgtcactagtggaaaaataaaaaaagtccatgcttccaaggtgggacatttactcatttgtaaaattacaagaattataagctcttccaaactaaccactttggacccttatttctcattcaaattaaattcgattttgacatagaaatgcacttttttttagtgttcaaagtcattggaaatttagccggacttatgagaactcttgcaatttatttgtctccaatcatacaaaacaaataatttcagaattaattaccaaaataagtgagaatcaacaacattggtcaaatcaaatactcttgcaattcctctacaaatttatccacgtaaccagttaataatt

SEQ ID NO: 3926 - DNA, 2533 bp, Arabidopsis thaliana landsberg
gcaccgggcatgtgaaagtggcggcatctgacctcagggaacttggttcattcgaatatcatccttacttcaccaagcgacttgggtctatggccatggacagacacgataaggagaaggaaatggcttcagtgctactctctgcattgtatgctgatgttattttacctgatcaaattagggatggatttataagacttctcagatctgttgatgaccttgcggtggacatccttgatgctgttaatgtccttgcattgtttattgcacgggccatcgttgacgaaattctccctccggtttttctggttagatctaagaagattcttccagaatcttgcaaagggtttcaggttattgtaactgcagaaaagagctatctctcagctcctcaccatgcagaactagtggagaagaaatggggaggtagtactcacactacagtagaagaaacgaagaaaaagatatctgaaatcttgaaggaatacgtggaaaacggagacacttacgaagcttgtagatgcatcagggaattaggtgtctcgtttttccatcatgaggtcgtgaagagggctttggttctggcgatggattctccaaccgctgagtcacttgtactaaagctgttgaaggaaactgctgaagaaggactgatcagttcgagtcaaatggtgaagggattcttccgagtagcagagagtctcgatgaccttgctctagatatcccatctgccaaaaagctgtttgattcgatagttccaaaggctatttctggaggctggctcgatgattcatttaagataacctctgatcaagatggagaaaaatcgagtcaagacggaaagctaagacagtacaagaaggatacagtgaacataattcaggaatatttcttatcagatgacattcctgagctaatccgcagtcttcaagatttaggggcacctgaatataacccggtgtttctgaagaggctcataactcttgctctagacaggaaaaacagagaaaaggaaatggcttcggttcttctttctgctcttcacatggagctattctcaactgaagatttcataaacggtttcattatgctcctggaatcggcagaagacacagctttagatatcatggacgcatcaaacgaacttgctctgtttttagctagagctgtgattgacgacgtcttagctccacttaaccttgaagatatctcaaccaagctgcctccaaaatcaaccggaaccgaaacagtccgctcagccaggtctcttatctccgccagacacgcaggagagagactcctaagaagctggggaggtggaaccggctggatagtggaagatgcaaaggacaaaatctcgaaactcctagaagaatacgaaacaggaggagtaacatcagaagcttgtcaatgtatccgcgatctagggatgccttttttcaaccacgaagtagtgaagaaagctttggtgatggcaatggagaagcagaatgatcggttactgaatctgcttgaggagtgttttggtgaaggattgattacaactaaccaaatgacgaaagggtttggtcgtgttaacgacagcctcgatgacttgtcgcttgatataccgaacgcgaaagagaagtttgagctgtatgctagtcatgccatggacaatggttggatccttcccgagtttgggatttctgcaactcagtgattagtggttctcttatcagtttcttgtgtttgtgcttacgatactttcctcactatctacatatatgtatggattcagttagtagataaacatgagatgtttatatgttcatgtgtttctgtctggttgttgtgttttgtctttgtactgatatcttttagtgtgttctaatttctgatggatttttgttacattgaaaataagttattagcatggttaatttgtgttaacttattactcttgtgatattttatgaaaattatttataaatatagaaaatatggtaattaaattataaaaagataaataaaaatatatttgttcggtcggtgagataattatgactccggttccgggatagagcaaacaaaaggatagaccaatactcgttgccaaacagctttatcctcgtttttatatttgttttgatgctttcttcttctgctcaactttactgtccggcgtactcagcaccatcaatggaccgcccggagacgatcgccgacaaatgcgaacccatgaccgttgactctccttctcgacctctaaagcttgtagttttagctgaccttaatttcaatcctcctgagactgatgatcttgactcatccattccaatccctactcctcctcccatcactaggtacttctacatacgtatttgtgtgtgtttcagctaattaacctatttctttctgttgctttcgactaactttcttttgctgagatttttttttcctctgttcggaagaaacatatgtttgaagtgacatttttgttacggggttgaatatattgatgtcttcttatgccgcagaatctaaaaatcg

SEQ ID NO: 3927 - DNA, 1493 bp, Arabidopsis thaliana landsberg
  unsure (1)..(1493): unsure at all n locations
tccttggaggatttggattcaaagatctacagtgttttaaccaagccctgctagctaaacaagcctcgatacttcacacagattcagatagtctattatctcagattctcaaaagcagatactatatgaattcagattttctctcggctacaaaaggtactagaccctcttatgcctggcaaagtatattatatggcagggagttactagtttcaggcctgaaaaagattattggaaatggagaaaacacttatgtctggatggataactggattttcgatgataaacctagaagaccagaaagtctgcagattatggttgatattcaattgaaagtgagtcaacttattgatcctttttctaggaattggaatttgaatatgcttagagacttatttccttggaaagagatacagataatttgtcaacaaagacctatggcttctagacaggattctttctgctggtttggtaccaatcatggtctttacacggttaaatcagaatatgatttgtgtagtagacaagttcataaacagatgtttaaagaagcagaagaacaaccatctttaaatccgctttttggaaaaatctggaatctaaactctgcaccgaaaatcaaggtattcttatggaaggtgctaaaaggtgcagttgcagtagaagacaggttaagaacaagaggggttttaattgaggatggatgctcaatgtgtcctgaaaagaatgaaaccttgaatcacattttatttcagtgtcctcttgctcgtcaggtttgggctcttactcctatgcaatcacctaatcatggttttggggattctatttttaccaatgttaatcatgtcattggtaattgccataatacagagctttctcctcatttgagatatgttagcccttggatcatttggatactatggaagaatcgaaataaaaggttgtttgaaggtataggttctgtttccttaagcattgttgggaaagcacttgaggattgcaaagaatggttaaaagctcatgaactaatcttctctaaggaacctacaaaggacttgacatggattcctcctttgatgaatgagctcaagtgtaacattggaatagcttggtctaaaaagcatcaaatggcgggagtttcgtgggtggttcgaaattggaaagggagagttttacttcatagcagatgttcgttctctcagataagttctcactttgatgcaaaaattaaaggttggaattatgctgtggagtctatggatcaattcaagtttgatagagttacatttggagcatctactcatgatattattaaagccatgcataaaccaaatcaatggccagcattaagagctcagatagatgacttgttgatgagagctaaggataaagaattatggttcatggcaatggaaccgcatcattgtaatgagggagcttctgagatagccaagagtgtgattactggaatgagatggcanagctatgtagct

SEQ ID NO: 3928 - DNA, 5809 bp, Arabidopsis thaliana landsberg
tccacatgttcttgacaaaaacaatggaattagtaacatataacattcaattttgcttaatagcacaagtgtattcagttagataatttacctttttggcatctaagccactaattacattttgcaagtcctcaagctttgtcagcaaatcagcttgtgtagcttcaagcttctccacatgtgaatctctagctaacatgaatgctaacttagttgcagtgactcctctgcccatacctctaagtcttccaggcttgtctttacctaatacttgactcacaacatcttctttaagatcggtgaatgatgatgagtccatttcactatcaatagatttgattttttcctgaaacagaatgtaatgacaataagtactagcaaaacaaaaaaagaaagcaagtgaatgattgtcttacaatcgtctctgcaaattcagggttgacaggtctcccatctgagtgtgtatgacctgctatccaaaccttgcttcttgtcaccaatttagggttggaactctttttttctacaaaacagatagtgattagttgatggtaaccaatttacacaagcttaattgattacagagtagacatatactataccatctcatgggctaggcgaatcattcctttgcggctggtggtgtgtggaatatgtgccttcctcaacatcctgtacttgtcacttatttccttcaaaatcaccttccattaaaacaaatcatcttctaaagatttatagttacaaaaatacacaaccttgaaggcagtggtcttcctgttcttcacccaagcattccaagccgtcacagattgtatgttacttggtttcagcgaaaacaaatccgtcttgctcttcactgcacgcactttcgttgtgagcttcgacttagaagacctccacacacaacccatttgcttaaaaacagcatccttttgccaatcttctttcaaattgaacctcccctacacattgaaaacacatagttaaacacaatcatgcaatgattaaactcagcaaatgagtatgatatacctgaatttcttcccagagtgtgtccctagtctcatcaggtaggtgcctccagtcatgaagcagaacaggtacatgctctctcacaagaggaccaagtgatataagtcaaattaatcctaagaccactctctcaaataaagaggttggttacaacacttagggatcgaattcacgaagttctcggatcacgcaatagactaatggctatcgaattaaactaagtaaaatagtaaataaaataaaaagaaacagaaagtaagcaatagcagattgtgagttgtgaaaacaagataataaaagcgtcaggcttagggtattgtcaggaaatagatgatagtagatatagaaatagctaggttgttgtcgaaccgttctcgaactcaaactatgatttagagtaaccagtgatgttccacaaaactctctttacttagagctaagataaccggagaaaccgagaaatcttatactaaagcatgcattgttatcaagcttgattagttcacctagtatctaaaccagaacccttctatgagcctacatgttctttcttaaatgcctaaactcatctatgatagttcaaataacaaatacctatggcgggaatacctattatctaatatcaagttctaggtgatcaatctaaaactagcattaagaataatcaagatgaagaactctaagaataatcttaaggggttttcgatctactaatccatctaaatccctattgagactccctaaacccaacaaggtgattactcagatatgataacagaaacacaaatcataatctgaatagtttgcattgatgaattaagagtaaatgtaaagaagttaaccattcgaataggctaggataccactctattcgattaccccatccttaggaatttatcgtcaatctaatttctctgttttatcgttatcgcttaatcgttctcattgcctgtttctttgtttttccaattactcgaccaacttactcgaccacacccagtgtctggcaagagactgtgcagtcgaatacagttgtctcgtttcctgtttgttactcgaccagcatactcgaccacatcccacttctggcatcagcctgttgtggtcgagtgattttagtaattctgtttttgtttatgttttctgcattttcacttaagactgttagaaaccccaaaactgttattgcttggcttgacttagtgacttgtgatcacatctcatctgtttgcatcacacccatttggattgacaaccttaagtactacaacgacatgatagtgctttaggattaattgactaaaaaactatacctctttgatggtgaaagacccagaccacctggattttagctttaatggaaataacttgagtcttgagttgaaaagcagaacttggtctccaatgttgaaatcttttggtgcgatcttttagcatagcatgctttcgatattactttgtagatcttagagctctcatatgctttcagcctaatctcttccagttcatgcaggtttactgctcttttctcttgagctcccttgatttccaaattcaaaagtttggttgccaaatggctttatattccacttccacttggccacttgtctgagggtgatagggagtggcaaccttatacttaaccccatgttttctcaatagaccttcaaaaactttgtttatgaaatgtgagcctccatcacttatcaccaccttcggaataccaaacctggggaaactaacggacttaaacattttcaggactactttgtggtcgttggttggtgctgctattgcttccacccacttggagacgtatccactgctaccaggatataagcatttccatatgagggagggttgaacggacccatgaagtctattccccacacatcaaaaacttctacctcaagaattggattctatggcatctcattccttttggatatgttcccaactctttggcatggatcgcatttcgctatgaattcctgagtatccttaaatattgtgggccaccacagacctacttgcaaaattttctgggcagtcttgaaggttgcgaaatgcccaccataggtggatccatggcaatgtcccagtataccttgaacttctccttcagagacacacctcctgaatagcccatcactctcctttttatacaagtacggctcatcccagtagtaatggtggatgtctctaaagaattttttttttgtatatgcatccaaactctgggggatcataccacttaccaaataattgactaaatctgcataccatggcaacttttcttcttcaactgcatatgcttcttacagcatgtccttgtgtcgatgtttttgttaacgaggtcgtagaacataagctgttcttcgggcataatgtcatctatcgggactgaatcttcaattctcaccctggagagataatctgcaactccattctcaacaccttttttatcaatgatttccatatcaaactcttgaagcaacattatccaccttagaagccttagcttggtttccttcttggcatagatgtgccttagggttgcatggtccgtgtagaccttcactttggagccaaccaaatagcttctaaatttctcaaaggcaaaaaccacagctaatctccttttctgtggttgcatatcttgtttgagcttcgtccattgttctactggcgtagtagatgacgtgaagtttaccatgaatcttttggcctaggacagcccccaactgcataatcggatgcattacacatgatctcaaatggatggtcccagttgggtgcttgaacgataggggtagacaccaatgcttcctttatcaaatgaaaagctttaagacaatcttcatcaaagttgaactcagtttccttgcacaacaatctagtgaggggtcgagcaatctttgaaaaatcttgtatgaacctcctctaaaatcctacgtggcctagaaagcttctgatatccttaacggtcttagggggttgcaactgaatcatgacatcgttttttgccttgtcgacttcaatttctctaccagaaatcttatgcctgcaattccttcctaaaccatgaagtgacatttctcctagttgagtactaaattggtttcctcacacctttctagaaccctctacaaatttaacaaacatgaggagaaagaggattcatagactaaaaaatcgtccatgtatacctccattatctcctcaataaaatccgagaatatcgaagtcatgcttctttagaaagtcccaggagcattacataaaccaaaaggcattctcttataagcaaaggttccatagggacagatgaaagtggttttttcttgatcattagggtgaattgcaatttgaaagaaaccactatagccatcaagaaaacagtaatacacatggttagctagcctttctaacatttgatcaatgaatggcaaaggaaaatgatccttccttgttgtagcgttcagcttcctgcagtcaatacacatcctgtggccggtaacagtccgtataggaatcagctcattttgtcattcttaacaactgtaacacctcctttcttaggaaccacatgcactggactaacccaatcactatcttaaataggatagatgatcccaacttccaacaatttcatgatctccttcttaacagcatccttgagattcgggtttagtcttcgctgatgctcaactgagggcttagactcatccttgaggtgaatcctatgcatacacaagtctggagagatacctgtaatatcatcaagagaatagccaagagctttgcgatacttgcgcagcatgcttagcaataaagtgagctctaccttgtttaaagaagcattaacaatgacatgataagtagagttttcacaaggaaatgcgtaccttagccttggaggaagtggttttagatcaactttaggagctttttctaggctccaatcgccaattgttgctgcttgggaagatgtgccaattaactcctcttgagcaaccaattgcattacatgctcaatcctatccagcagcttaccatacccgtcgggaactttgtctattgagggaatcagagcatgctttaaaggatcagcaggtgtcatcttcatgagaaattcgtcagccagagaagagatagtatccacatagaaagtctgcccatcgatggtaggcttcttaaccaccttattcatgtcaaactgcattgtaagatcacctacattcaagtctattctgcccttccttacatcaataatggcaccagttgtggctaagaaaggtcttcctaagattaaaggatctttcggttctttctcataagataaaaccacaaaatctgtaggaatgtagctagtaccgacttgtacagggacatcgcataggataccatcgggtctacggacagatcgatcagcaagaacaagagtgatttgggtacgctctaattctgtcaaaccaagccggagcgcaactgaacatggcatcaagttgacactagaaccaagatcgcacaagcatcgatcaaaactctcgttaaggataccacaattgagaacaaagctacctggatctggaagtttctgtggtagaatcttgttctgaataatgtcgctaacctgtgtagacatcgtcatcacagctttctcagtaagcatatccttagtaaccatcctcttcacaaactgtctgataataggagaagacttcacatcatctataagtggcatctctacaatcaacttatccatcatagc

SEQ ID NO: 3929 - DNA, 1109 bp, Arabidopsis thaliana landsberg
  unsure (1)..(1109): unsure at all n locations
taagctgataggtcttatgtcactcattctttctggatttgattttttttataaacataaatgagtgtgatgggatcgtagggaggatgcctgtttcaaagaaacccataatgtctgcaataatttgattcttaattaaataccaatgagtctggaaaaaagtcgccgtgaagccatcaggacctggtgaactttcagcattaatggaaaagacagcattatagatttcttgttctgtaattttctgagtgagatcatgattnnnnnnnnnnnnnnnnnnnnnnnnnnnnnnnnnnnnnnnnnnnnccatatttgcaggataagaagaggtgaacagatcctcaaaaaactgttctgctatttttcctttttccttattgagagtgtgctcaataccattttcatccaccagaaaactcaagcagtttttaattctattagcttttacagaggcctgatttaacttttatattctatccccaccagccatccatttatccctacttttcaatctccagaaagattcctcctctctaaaggcaatacccaactgattttgaataacagaaatcttgttccaacacggaaatagagaactcttttcttcatccaattcaaaccttaatctcttaattcgattctcagcattataatccttcccttttttccactgactaacagatttcctacagtcaaccagtcgatgcatagaagaagaattatgagaagaaatattacctatccatgctttgtgaataacgtcttggtattgagggtcttcagcaaatcttttatcaaatctaaaagttcctcggaaaagctcctgatcattgacaaatttcaccaaaaccggtctgtgatctgatccaagcttctccaaaaaccattgatgtgaattaggaaacaaagaaaaccactgtgaatttccaaaacagcgatctaatttacattgaatccattctccatttcttttccctacccaagtgaaactattcccagttctgcccagttcatgcatatcacaggttgatacacatattcttgaagtcctgaaaggaggattctactctagatgggccacctatcttctccttattagacaagatatc

SEQ ID NO: 3930 - DNA, 540 bp, Arabidopsis thaliana landsberg
cttcctaattcatgcatatcacaccagctaagcatatctttgaatggttgaaaagaagaagacagtctacaagggcctcctaacttatcttgattagatgtgatatcattaaaatcacctatcatacaccaagctgatttcctgaattcaccaatagagcataacttgtccaaaagcagatatctgagacttgccattggattcccatacacacaagaaacaaaccagctttgagatcccttagtcactttcaaatccaaaagattcttgtcttcatacaaaaactcaatttctaagttatttttccaaaaaagagcgagacctccactttttccttctggttctattgtatgaaaataatcatacccaagccaagtaaagattttcataacaaaaggatcagaattcatggtctccatgaggaaaaaaatatcaggaaaatgatctttcttcatttcctttaagtatcgaattgtccaaggattcctcagtccttgggcattccagctaaggacgccttattgatactgcgacagttca

SEQ ID NO: 3931 - DNA, 7194 bp, Arabidopsis thaliana landsberg
caaacgcaaaacaaaactaaagcttaccatatttctcagttttcgttactctttacttctcctgttcacgatggttaaccatcaaaatctttacgagttgtctccgatggttactggctgaaccatttgtgtcatggtattaagaatttacaaagaattctcaacccgaacgctttcaaactacgtcttgtcttggccgatgaatgggtaaacaattttcttcaatttattttgcattttgcggaatttttatttacccgtgtatccctcacccctaaaatgttgtttgtaacaggacacccaaatagaagcaaccatcggacctcgtttctctcccttctactttgacaggatcgaaaagaatcaatggaaaacgataagtacgtttctcgttcgacctaactgcgaaccaataagaacaactcctcatgagtttcgcattctattcatggatcacaccattatcacttcttccacatcaagagcaaccggtttacttaacaagttcactctatttgactacattgtggatgatgttgttggcaaacataccttggttggtaagtaatggattcttcataaattccattcacttttttcaaaaaatttattttttaaacacatatctctgacatatttcttatagatgttatcggggcactcgttaatgttgggatcatgactaataccgcaagtaacgagaatgatatggccagattcaaattgccgttcacgatcatggataaaaagtacatttcttaaaacctcaatttacagtttttttcaaacatatcatgtttatacattattatagtaagtatataaccacatatttttacatattttcagcaaggatacattggtatgtgaggcttatggagatattgcagtggacttggagaaaagatttcgagcatttcgcaagaacaatgttgttattgctcttgcttggtggaaaattagtagattttatccaggttgtaactggtttaagattgttagccatgcacctatatcaaccatgtatccagaacctgatgttgaggaagttgaagaaatcaaaatggttgtcgactaatagaagatgattagaactatctcatcttcttttattttttttcaaagttgtaatatttttataaatgataagatatattaataaaaaaagttatttctttgttcaaaatttctcatatgtaataattgtaacaaatattttattaagtagtacagtaggaataaggtgtataaattaagtgcaccttactaacgatcggttatatcaagattacaatctttttatcagaaattagcaaattgcttgagttttaaaaggaatataattggtgatctgaaaatattgtttcccaacatatctaatttctcaacatatacttgtttacatgactgatagggtggattgttgaaacttttagttgaaatccataagcaattactatcgtggattgttgtttatggataggttaataaattactttcttgtcttttataccctaattataaacgatgtattctcttacttttttccgcatctgattttagttccctcctcaacattgagaaactaatttatagcgggacaatttaccaccgattataacttgtttaatataaccgcagaaaaactttaaactactctttccttaataatctatataaacacccaacattcattaatgtttttcccattacccatttcttcagttaaaaccaaaaaacagagaaattatgcagaagtttacgaagataagcaacaatgaaacatcatctgcctcagatgtgaaaatggttgttcgtccaaacccaaagtacttagtattctacagttttaactactactttaataaaaatactaacaatctctttccttttttttccaacaggttgctgctatcccagaagtttacttgccggccccgctgcttgctaaaattgttagctacgttgcagaatctggtgttgattctttgaaatcctttgttaaggctggtccgttatttaaagcggctgtctattccaaggaaacactaagttgtgtccgccttgacagatcttggtattttatgtggtggtcaatgcctcattccatctattatcatttctttacaaaatgtcttgacgccaacaatccacatgctttaactgctgtattatacaaaggaatagcatacgagaatttggttgctgaatgctatagatctagtttatggatggaaccttatggagaggacggaggatgggtacaaatagatggagcttactgggctcaaccccgagttcgagagagtattccacgttgctcccgttgcaaatctcgggcacacaaaagatctaattgtccaaaatattgaaagacaatgttttaatactgtgttatccatcattatctgtctatctacatgtttctatttttctaaaacttgtttttctgtttttaagcttctgctagtctgtctttttaatgttatattctcgtttgctattcaatcttcgtttatatatttgctaaggcttatccatcttattttgtggttggtgtttcatgattacagtctatgtatttattacctgattgtttatggagaacttgttcccccataaatgagtccctgttcgattgcatgttaaaagacatccacgtctatattttatatatcataaagttgtgtctatttggacaacaaaatttggacacacaatgatttattttggacatgagaaaacttactcacatgtctaatttttaaaaaattttgtaggactcacgacgtcgccactaacccatctcaccaccacaccccaacctcttcaatgtgacaaagtattagggttcccattctatcacgatctcaaagttacaaaaattttcattaatagatcgctatttgtacacctttagtactatccgaatcgataatccaaaatgcccaaaatcgtctgcgaaaaaggcaaatgtatccaccctcaaccaatggcccctactagacatttctggcgacccccaagtgcccttgaacctattaggggaaatcaatttgccgtcctgcctcctcgtcaacctttggttcaatttcacctacaggtaatgtttaactactaatctttgctatctgaacaatcacccaaatttaggtttaacttttggaattattttatatcagcctcctccattctctaatttccacatgcctgaacacgtagctgctaaaatagtaagcttagtttcagaggacggtgttgatatgttaaaggcttggattcaatcaggaccagatggcaaagccgctgttttttccagggaaactctttcttctgttcgactagataagtcccctgtattcattcacatggctcatgaatcttctagttatcacatgttttacacaaaatgcctagccttcaaaaatccctatgcactatatctttagagtttagtgttggcgtttcatatgtgtgagctccaggaagcaattgctattttggatggtattaaagacgtgttcccacatgctggtctactttacatcatgctccatagttgcgctggatcaatcccgtgggaattttatagtatgtacaagcgaaggtactacaaatttagtgaagtcgacttattcgcagataagctaatgttccatatcaacgaggttggtccacgtcgccaagggacatacaaaaattcctgggagtttgaggattacggtgagtgttggtcggaccatcagaacctcaatgagtatgagggacagtggtgtaacacatgtatttacttttacctctcccaagaagtagcccttatttcataagtaaatttcagttcagttcttctttttgttcttcacatttgcggcaaacttaagaatctatgtttttttttatgagaatttatatatgaagttattatatgtgaagttacctatcggttttttcatatgtgacgatattaaattaaattaagtagtacttgtccactatttttcacaattataaagagaacaagtcttcgaccgttacctcgtctccaacattttatggaactgattttataactgcacccattctccccactaagctttatccctctcgaatataaatattttatagaaactttcatttcctttctccctttataacccgttctgctcaatacaaacattagagattctccccaccccgccgatccagatcttcctcctcagtaatacatccatccaccttccgctgccatcgttgttgtaccaaatcgtggacacactgcaaaacaggttttagttcgcaactaaacaaacaaatatgtttcctttacttattcctaaaattaatcattcctctaacttatcatcgacccttttagcagaaaatgaagaattccaggttatatattccggaaccaatacttgctctaatcgttagctacgtttcggaacaaggaatagacgctttgaaaaattggattaaagctggtcatgttgggaaattagcagctttctctgacgaaacgctaacctgagtgcgtctagacaaaagcccacacttcatctacatgtcttcctataactctctttatttctctttttacttgaaatgtctagaaaaagggaacccgtatggattgtatctccatagcttgaatctcggattccgctgcctcgacctgtgtggagccatttccatttttaatacttgtaaagatagatttcctttagccaaactactctacattgctctaaaccgctatgcaggtaacgaagtcattgatgatttcaatagtttcaatcgcgagaacaagtgtttctttgatgtatccttgatggcaaacaaacttatctgccacatttctgcttcggaacctaaatgtttcggatcttactccgagacctttctttacgaggaatatcctgactgctggctaatacatgagcttaacaatgaatttaacggagaaagatgttcacaatgcctctacttctacctcttccgagacatccttctgctttcctagtttagtgagatacacatcctgttccagctttattatgttttcatctttcacgtttatctttcgtttagtctaatgtgtttggttattcgtaatctctactaattctaatccgagtttaatcacacgtaattaagactccttgtaattattcacatgttagtaaaacccattttaccagtttctgatacaactccttctcttacatagtagacaaaagataatagaaaattggatagttctatctgtatacaattacgttgaatagagttttgtatcataaaatatattaataattggcgcaatcaagctttaatttgattcaaatcaacaaaaatacctttactcattacatatagtaatggctttacaaaaaataatctaaaaaaacaactacaattactaaaaatggaatataactacttttcatgttaaaacatcatctccatatggataagagtttatggatagttaaacgggattgcacatatttgcggtttagcaatatatgctaattataaactattttaacacaataaataaacatatatacttatatttggtacatcaagaactaggtttacagaaacggaaaaacatttatgggaatgtcttacaataagaaatgaaatattttacaaataaaatttctcattgtattagatcaacttgtcctgttatgacccaatctaaaaaaaacaactacacgtactaaaaatggattagaactactttacctgtttaaaaaacatctccatatggatatggctttatggataagaaaacggtattgcagaggattccgatacaatcaggatataaaatcagcaataactaattataagaactgaaatattttacaaaaaaacatagcaactagttttacaataagaactgaaatattaacaacttaaattcaaaaaatacaatttttcattggattagatcaacatgtcctgttatgacccaatctaaaaaaaacaaatacaagtactcaaaatggattagaactactttaactgttaaaaaaacatctccatatggatatggctttatggataagcaaacggtattgcagatgtttgtgatacaatcaggatatgtttcagcaataactaattataagaactgaaatattttacacataagataataaaaaattggatagttctatacatatacaataaagttgaatagagatttgtatcataaaatatattataattggcgcaatcaacctttactttgattcaaatcaacaaaaatacttttaatcattacatatactaatggctatacaaaaactaatctaaaaaataactacaattactcaaaatggattataactacttttcctgttaaaacaacatctccatatggataaggttttatggataattaaacgggattgcacaaatttgcgttttagcaggatatgctaattatagacgattttaacacaataaataaacataaatacttatatttggtacatcaagaactaggtgaaacggaaaaaaaaacatgggaatgtcttacaataagaactgaaatattttataaaaacatggcaactagttaaagatcatacatatattaacaacttaaattcgaaaacacaatttctcaaattggattagatcaacttcgtccctgttatgacccaatctaaaaaaaacaactacaagtactcaaaatggattagaactactttaactgttaaaaaaacatctccatatggatatggctttatggataagcaaacggtattgcagatgtttgtgatacaatcaggatatgtttcagcaataactaattataagaactgaaatattttacatacatcatagcaactagttttacaataagaactgaaatattttacaaaaaaaaatagcaactagttaatcatcatacatatattaacaactaaaattcaaaaacgcaatttctcaaattggattagaacaacttgtcctgttatgacccaatcctttgcagcgtgagcacctgttctgctgcgtccttcctgtcttaggtttctacgtttaccatgttaaccaacatgttgcattagtttggttagtttttcaaaagcttagacaatgtacgagatttacaaaatatttatctaaccttatattcccctgttgatggtattcttgctaccttag

SEQ ID NO: 3932 - DNA, 587 bp, Arabidopsis thaliana landsberg
gcgatgctttcagtgtcaacgcctaacacatgataagaatcattgctcttttaagtcttcaagctcaattaaagcgatatcaaggaatttactggaccaaggtaagagagtatagattaatctgcaggatcttggtcaagaaaagttggatactgctatgctgtaagaacaaggggtgctagtatcagcttttaaagaccctaaaacatctgtgaaggatttgtggaaaccttctattcatccatgtctgcctttgattgcaaatacacaaacggatgatttctgtactgagatgccagatttggatattatcacaggtttcagcaagggttatgatgaggctagttcttcgggtagcagtaaaaagaatctctcacgcaagaaaactcctgcatcctggtctcgtcaggggaaatcaagacaggatttgcctttgaaagaaaagatcattcaagaggaggagattggtcgatttgataaagtgtttaaaagaaaagcagtggtagcttctactactgaaccaaaatgtatcaaaagagagaaaactacggtggttccaggggaaccatcgtggatcagtaagcatc

SEQ ID NO: 3933 - DNA, 788 bp, Arabidopsis thaliana landsberg
gatcatgctaaatatttctaatatcttacccttccttactctgaagtaaacgtgtgcagatgtagaataagacatttttcaactcaaactaatcaacaaatcaacactctgatgttgactatctgtcaagaagtccttcgtattacctagtctatactctttagaccctcagcgcaaaattctcctataaaggagacaatcaacgactcctctgatgcattaattcagagtcaaaaacataatgtagccattgagtaggtccattagcagcataactctgccatctcaatcctgttatcacgctttttgctatctcattagctcccgtgttacactgtcttaattccattgccatataccaatgcggtttatccaaagtgagatctagcaatgcatccaaatgtcctctcaaagctggccactctcctggtttattcattgctttgataatatcatgagaagaagctccaaaagtaactctatcaacatgtagtttatccatactctctaaagcccattcccaccttttcagtttagcttcaaagttagaatgtacctgagaataagatcgcctactgtgtaaaagcacctctcctgtatcatttctaactacccatgaaacaccagctaattgagttgtacttgaccacgccacaccaatgttgcatttcaattcattccaaggcggaggaatccatttcatttctttctttgtgtcttcagactgagtctttggatcttgagaagataccaatgattacaatcctcaaatgctttcagtactatgc

SEQ ID NO: 3934 - DNA, 469 bp, Arabidopsis thaliana landsberg
gtctgaatagaaaggaagcttggggtttaattggtgattttaatgacatctgatcaaatgatgaaaagcttggtggaccacggagggctcttgcttcgtttcaggcttttcaaaatatgttggatacttgtatgatgtttgagtagggaagttcagggaatggttttacgtggggaggtactcgtaatgaccaatggatacagtgcaaacttgatcgttgttttagaaacccttcctggttttcactatttccaaattcacatcaatggtttttggaaagatttggctctgatcatgggcctgttttggtcaattttatcaatgatcatgaattatttcgtggtcacttcatgtttgataaaaggctagctgatgatccctcttgcactgctgcaattcacaaatcttggaagagtgagaattcttaagggacttattcctctatattgaatctgaatgaatgtagaat

SEQ ID NO: 3935 - DNA, 487 bp, Arabidopsis thaliana landsberg
  unsure (1)..(487): unsure at all n locations
tcatatcctgatttaactgtgtataaattatgatttgtacctgaccagcaataagcatcctcttttgaaagcatcggtcgttgattaagaattaattgagcatctttccatggaaataagtctctgagcatgttcaaattccagttctttgaaactggatcaattagttgactgacctttaaagtaatatccaccatcacctgaacactctcaggtcttctcgttttaccctcaaaaagnnnnnnnnnnnnnnnnnnnnnnnnnnnnnnnnnnnnnnnnnnnnnnnnnnnnnnnnnnnnnnnnnnnnnnnnnnnnnnnnnnnnnnnnnnnnnnnnnnnnnnnnnnnnnnnnnnnnnnnnnnnnnnnnnnnnnnnnnnnnnnnnnnnnnnnnnnnnnnnnnnnnnnnnnnnnnnnnnnnnnnnnnnnnnnnnnnnnnnnnnnnnnnnnnnnnnnnnnnnnnnnnnnnnnnnnnnnnnnnnnnnnngat

SEQ ID NO: 3936 - DNA, 2103 bp, Arabidopsis thaliana landsberg
ctgcatctgttgtggatcacaatgtccctaaagagctatggctagataagaaaccatgatacaaacatctgagaagatttgggtgtgtagcatatgtacatttggatcaagggaagctgaagcctcatgcacttaaaggagtcttcttgggatatccatagggtactaaaggataaaaagtgtggttactcgatgaagagaagtgtgttattagctgaaacataatgttcaatgagaatcaggtgtacacggatcttatgttaggaagtgaacctatgatgggagctcagtaagttgtaaaggtagttgatgagatctatggcactgttaaagaaagtggtgagagttccaagacaggtggagttatcatagaatacatcaaacaagattcaaattcagatgatatgattacttaagaaccgtctattgccagcattgatctcaagaactatcaattggccagagagagtgttagaagagcttcaaaaccaccatagaagttggctaattatactcaattctctgttgcggtgtgatatacctctatttttttactgttttagctataatttaggtataggtattagaatctttttgttatttctatagtcattttagagtctattcatgtacttctaagatcaggacaagaatggagataaggaggcattttggagcaaaacgtaaagaaactaagttgaaggacgaattcagttccatatcaagttgagagtgtcgaccgacacactcttgatgttgattgacaccagttgcggcccaacaaaagtctaagacgatttagactttgaagaattggaagtttgccccaaaagatttccttatttacattatatatatatatatatcaaggtcatcgtttagacctaacatttattctaagcttttaacactcattttctataagactaagattttgaagaccctcttcttagagtttcatcagagatttcaataccttaccgcgaagagatcttttctaaactcttttttttttaattactttatgctttctaattcaaacatgttatctgtttctatgatcatgtttgagtagtatgcttgttaggtttcgggtttctcattatgtttatatatgatttattagatcgccaacactgtaagatatctgtaggattcttcatctttggttgttcttaacgctagttttagagtagctaattagaacttgatcttaggtaataggtagcattccaaagggcatatattaccagaactatcattagatgagccggggttttagatgtgtactaagaacggtctatctacttaggtgaacttattaaacttgattataatgcatgtttagatttaggtatttgcggttactctgtattagtgatttgagttcaagaactgtttattaacatcctagtcattattagatctactaatcatctattttctgagaacttccctaaacttaacgttttaatatcttgaatttacatcctcataatctgctattgctagcttttgttttattttattttcttacttattgtttagcttaatctcgacactataacctattgtgtgcacaaaagaactttgtggaaataagtccctaagtattagaattgacctcttattagagaaagagtagtctagggttaatttgaacacttatcaaatttggcgccgttgccaaagttcttgggaatgaccattaggttttgctttcgagattttgtctagatttttattttccttttgttgcctactcctttcttgttttttttttcttttctgtttttcatgtgtatatataggctcacaagaatcacgaaagataaggacctcgtcaatctgtcaacacttgatttgcgtacacaagaacgcaccaaccgaaaaactcagagattagtaccagtggttaacagataagttagagctaatggataaggagtttgaagagatgacgatgggcatgcctaaatgagactggacaaagattggatgatcattgaatcatcaaagctgagaatcagatagatgaataggcgcgactcaacgcgcagcttgctgctcgcaacgaagcagggcttggtgtcgagtgaaacc

SEQ ID NO: 3937 - DNA, 4056 bp, Arabidopsis thaliana landsberg
  unsure (1)..(4056): unsure at all n locations
ctgcatcaccactatacctgatgtccatgaaaggagctaccacaaacgccattccttgaccgtcacctagcaatggaaagattgcgaagacaaactctgtcgaaaaagaaagtgaactggaaggtgatgttgtgaagttcattggaattttccagaaagcatgaccggtgctcttagttgtattatttgtaagatgcaatcggccatcatcgatacttgccatgccgtcaagatgcaggtctgcttgactgaagtcatggtacacaaattcatcccggtcttgagctagcaccaaagacaacacctggacacatattatcatccagaannnnnnnnnnnnnnnnnnnnnngccatgtagaacatcagtgatcttctctcccgccttagtttgtgaatttcagattcttttccatgagaattgtattttcaaactgcagagttgacctttacatggatggcacttacaaagaaaagccaagaaagattctttcatatacaacggtgtggctaaacgcgaggtttaaattagtcagggtcatatgttttcagtttggatattctatctttacatacgtgcacatatctcttattctgagcatttggaatagtggtatgaacaagttataataaaacatattctaaatcaagaaatgctctagttgcatgtagtttaacttctttgactttctcaatgatggcattgttttaatttatgtgtattctgaatgagcttacttctctttcttctttgtttatgttgaagtctcctgcagatgacaatggagtttctatgacctactctgctcggctttcacctctcttggacacgctttagataagataatttgacgaggcacaaaatgcatagattttcaacggaagcaagcagaagaaatgtctttacttctgtcaattgaaaagtgacaagaaaaccacaagacaaggttttgacttttaaacatttatgaattgctaacttattggattgtgatctagtgttttttttttttctttctctaaagatgaaagcggggaaaatctgaactataataacctaatagttaaatgtgaagggaaatgattgtcagtatccaatatcccaaaaattcctcatagtgttactgagcatatgacaaattatgagattgtccatgaatcttttcaatcaacaatactaacaagaaaactgctaaatgggaatctaggataagttgaggtttgaatagaacactcaaaacataaccaacattaactagtttgggacactcattgagtccaagatggttgcaatcttgcttcgaggagacctatgcaagagatggcgataaggcatgagcctattcaccaaaccgtaaaacagatcagccgtgaggatctcatttgttaattccagtgccttgcacaccacaaaattcccgtactcgctcctcgccaaccttatcaacatctctgtcttgcacgccaacagatccagaaccactgttgccattggtacgtcccccgcctccaaaagccgctccacgatgtagcttccatactttttaaacgagagctcgacgcagtagccacatagtttatcagcaatgttacgcgtgcaacgggagtcacgtagtttaagcacgtgttggaccacaaagttgccataaacatcgttgcttagcaaaagagcgttgttcgcgactatgtcaaggagctggtctctgtagtaaggatcgtccaagtcggttatgatttcgttgagcgcgatgcaaccgtactggtcacgcgccaggaaacacgcgtatcgaagaatttgatcatacatcaactctctcttgtcctgttgaaaaactctcatcccctgtatcgtcacgtaggaggcgtacttgtcagtcatgacatggatgaagaggcgcatgatagcctcaaagaagaagacgtccatgtcatctgacattcccatgagtttctgtagggttttggagccgttcttgtttgttgtgatgaccatgaagtaatcgcagtcagacgtcattaaagacgccatccacataagcgttcccgtgtctaatactgagatgtcgtctttcaaatcttcacttccagtcatgaagttgaaaatcctttgaatatccatctccgctttacggatgtggaataaggaatagccgccacgtgaaggaggagaaggaactgtcaaaggctcctcattcaggatttcttgtatagtattgaacattgtcgacattgaaaaggaattgttgtttgccattgtattacgtcgatatacagaattactctcaaaagttagaagaagatttttgttgtgtgattttggagaatgcgagagatagtattgttgtatcgttatgatgggtatatatagagattttcgttcccttctcctgacttctcccataaggaattggaaactgtattagtaatatccgctcaacggttataatcaaatcaaatataaaatgtatatatggttagtttttttactttgttttctaactaattaatcatatccaaatattaccatatcacgatgtttcctttttcttcttttacgtctagatgctattgtttaatttgttcagatgctattgttttactttgttcagattcatatctaaatattttttttaaaaaaattgtatttattttagttactgtaaaacgattttaaaactgtaattccatgagcaaattaagtgaacaaatttcattaaaaccacacaaataataaccataccacaatatactgaaaaacaaagaagagccattcctcacaaggagacccattcccaacttatttttctacgaacaaaagcaatatgaataacacatgagaccaaacaaaaacccaccactttgtagtataatagcatcatcatataactcaacagctgacaactctcgtgaactcaaaaccgtctgtgttttcttgtggttttagtttcttgggacgttaagccttagtcggaaatcttcttccatgagaggaagtccttctctgagcttcacctttggctcccaacccaacacttctttggctttactaatgtctggtttcctctgtcttggatcatctggtgtgttctccaccatctttatctctatgcttgggttaataagctgcgtttaatacaaacacaacacacattaaggaaccaaaacatgaagtaaatgcaggatttatcacagcttttagagtaaaccgactctaacctccttaaccgtctcagccagttccaccattgtgaactcacctgagaaacagaggggttttagaaagaagcaaatgaaacaaaaacaccacactctagttacaggggttaaggtaaatgttggaatggaaaggcggacctgggttaccgatgttgatagggccagtatcattgccttccataagacggataagtccatccaccatgtcggagacataacagaaactgcgggtctgtgtccccggtttctgaactgtcaatgcctcacccctacaacacatttaatggaaacacagctaagcagagatgaaacaaaacttggtttcaatgaagttgagagagcaaatgactttaccggagtgcttgagcaatgaagttgctcacaacacgcccatcatcgatgttcattcgaggaccatatgtgttgaagattctagcaatgcggatttctacaaatgacaaacaggccaatgagaatcttaaaggaatcactggataaagaaaaagtgatgcagtgagtttagggaagtagaaaactgaccaatgccatgttgtctgtggtagtcaaacatcaaggtttcggctacacgcttgccttcgtcatagcaactccgaaccccttttgataatagcaaccaggttaagtttacaaagctgtaaaaactgaaatgcaagaagattcctctataagatgagaacatttgaggtttaccaatagggttgacatttccccagtagctctctggttgagggtggatgagaggatctccatacacttcagaggttgaggtgagtaaaattctgtttcgaaaagaacaaatagttacaaagccgagcattttg

SEQ ID NO: 3938 - DNA, 2285 bp, Arabidopsis thaliana landsberg
  unsure (1)..(2285): unsure at all n locations
acatttgaccctgagctaggaaaacctcatttaaccttatgttttgtcataatatcaacttagtgttggataggatagttcagattaattactacatcttgacacaaacattggtgtatctactatctagtgaaaacaaatcagtcaaagctgaaacattctgtctcgtcatcagcaagaaagtaacaagcaaagtttcaaaaaaataaaagcacagagaattgtacccatgacttgttgtcttgaggataagactaccaaagtaattgacccacaaaactgtaagaaacatctaaatgatgacagaggcacattaatctattaccaatccannnnnnnnnnnnnnnnnnnggcttttgtttgatagtgtcttccaaatgtcaactcagggttttctgcagtcagaaaacacaattctcatggaaaagaaaaaagggtgcagaacaatctgagattcacaagctaaggttggagataagatcatcgttgtcctgatggctggagttctaggatcagtggttttctggttgataattggtatccatgtaacctttttggtgttcgctcaagacggagatcaatttgtgtactacgacttcaggaatgcagacctgaaccttgatggaatggcaaatacagaccatggtccattgcatctaacaaataatacaaacacgggcaccggtcacgctttctacaatattcccatcaagttcacagcgtcttcactcaagtcaatttcctttttaacaaaatttgtctttggcatctttcccgggggaaaaatctaccaacggtcacggaatggcatttgtggtatctccaaccaaagatctcaggtctgacggcagtgcaaattcaaatttaggtattttcaatagaggaaatgataacaagactacaacccatatccttgctgtagaacttgacactactaaaaactcggagtcatttgacaaaggtagggacgatgtgggtattgatattaacagtatagtctcagttgaatctgcggacgctagttactttaatgctagaaaaggaaagaatataagtctgccgcttgctagtggtaaaagtattctagtctggatagattatgatggaatagagaaagtactcaacgtaacgttagctccagtacaaactccaaagccagattcgccttacttttcaagcttcattaaaccaaaagtgccactcttgtcaagatccatcaacctttcagaaattttcactgagacgatgtatgtaggtttttctggttctacaggctcagtcaaaagtaaccagtatatccttggatggagtttcaagcaaggcggaaaagcggaaagccttgacatttcacgactttcgaatccaccaccatcgcctaaaaggtttccattaaaagaggttctaggcgctaccatatcaacaattgcttttctaactctgggaggaattgtgtatctttacaagaaaaagaagtatgcagaggtgcttgaacaatgggaaaaggaatatagtcctcaaaggtactcctttaggatcctttacaaagcaaccaaaggtttcagggagaatcagctacttggagcaggaggttttggaaaagtctataaaggaatacttccttctggtacacaaatcgcggttaagagagtctaccatgatgcagagcaaggaatgaaacagtatgtggcagagattgctagtatgggaaggctaaggcacaagaacttagttcatctccttggttactgcagaaggaaaggtgaattgcttttggtctatgattacatgccaaatggaagccttgatgactatttgttccataaaaacaagctaaaagacctcacttggtctcagagagtcaatataatcaagggagttgcctctgcccttctgtatcttcatgaagaatgggaacaagttgtactacatcgagatataaaagctagcaacattcttttagatgcggatctaaatggaaagttgggagactttgggttagccaggttccatgatcgtggtgtgaatctcgaagccacacgggtagtaggtaccattggctacatggcaccagagcttactgcaatgggagtcaccactacttgtaccgatgtctatgcttttggagcttttatccttgaagtggtatgtggaaggagaccagtagacccagatgcaccacgtgagcaggtgattttgagttaagtgggttgcgagctgcgggaaaagagatgctttaactgatactgttgacagcaaactaatagactttaaagttgaggaggcca

SEQ ID NO: 3939 - DNA, 5381 bp, Arabidopsis thaliana landsberg
tattggtacatagagcaggctaaatccacagttgccgcaacagcagcagctggaataaattctcgcctcaacattgatgctctgcaaaatcgtgttggacctgagaccgagaatgtctttgacgacagcttctgggagaatttgacagttgtggtgaacgctttggacaatgtcactgcaaggctttatgttgattcaaggtgtgtgtatttccagaagcctctcctcgagtcaggaaccctaggtgcaaagtgcaacacacagatggttatccctcacctcactgagaactatggtgcctcgagagacccaccagagaaacaggctccaatgtgcaccgtgcactcatttcctcacaacattgatcattgcttaacatgggctcgctctgaatttgagggtttgcttgagaaaacaccagctgaagttaatgcatacctctcagatcctgttgaatacatgaaagcgatgagaactgctggtgatgcccaagcaagggatactttgggacgtgttgttgagtgcctcgagaaagaaaagtgcaattcattccaggattgcataacctgggctcgtctgaggtactctctgttggcccacacccttcattgagactatatgtaaaatgattttcttctctttacataattgcttgcttacaggtttgaggactacttcgccaaccgtgtgaagcagttatgttacacatttcctgaggatgctgctactagtacaggagctccgttctggtctgccccaaagagatttcctcgcccactccaattctcctcaaccgacctgagccatatcaactttgtcatggctgcatctatcttgcgagcagagacattcggaatccctactcctgagtgggctaaaacccgagcaggactagccgaggctgtggaaagagtaattgtccccgactttgagccgaagaaagatgcaactattgtgacagatgagaaggctacaactttgtctacagcttcagtcgatgatgcagcagtaatcgatgaactaaacgcaaaactagtgcggtgcaggatgagcttgcagccagagttcaggatgaaggcaatccagtttgaaaaggtgaatcataaatgtatccaagtatctttcagattctgtatttgaattataagagcaacaaactaacattattttgctgttcttaggacgatgataccaactaccacatggatatgatcgctgggctagccaacatgagagcaaggaactacagtgttcccgaggtggacaagcttaaagccaagttcatagccggaagaatcatacccgcgattgcgacatcaactgcaatggcaacaggttttgattgccttgagatgtacaaggtcttagacgggtcacacaaagtagaagactacagaaacacatttgctaacttagcacttccgctcttctccatggctgagccggttccacctaaagtggtgaagcaccaagaccaaagctggactgtttgggaccggtgggtgatgaggggaaacccgaccctaagggagttgctagactggctaaaagagaaagggctaaacgcatacagcatatcttgcggaagcagtttactgtacaacagtatgttctcaaggcataaagagaggatgaacagaagagtggtggatcttgcaagagacgtggctggggttgaattgcctgcttatagacgtcacgtggatgttgtagtcgcttgtgaagatgataatgatgctgacgttgatatccctctcgtatcagtctacttcgcctgattagagaattttaattaacgtccccaacgagagaagcttttaataattactgtattcttgggatatgaagttgagtttcagagatagagagagttttgatgtatgagaatagagttaacttcttaaaatttagaactaaattttcaaatttggtgtttttcacttattcattacaaacataatacgattaaacaatcctaatacaaaacgtttttctcacacatcatttactacaaagttaaaatcagatagttattattagcttataacagcaactacgtacaaagaggacatttcacaagtccattctcattacattctctgcatcttgtccacatattatcattactactctcttcatcgtgatgctctgcaagcaatcttgtgcttccattgcagctagaacatatcaaaaacctttcgttctcgcaagactcgcaaggtgaatcaacctgtgagattccttgtagtagcttcttcagcttcccgttctcgttcaatgccacaacttcttctgctccaccaatgtacctacctctaatgaacagcctcggagaggtaactttcccaccaagcaacctccacatctcttctctaaactctgaatccatggaaacgtctctctctctatacatcacctggtgattctccaacaagaatctcactcttctgcaagcttcaaatgttttcctcacacttcgcaggcccgtcgtgtagaatacaaccgaatcttctcctccgggtgggcaattctctttaaactccagaagaatccctctttcttcttcaagattatgttcctctgcatcctcaagctctagtagtgttggtgtaacacaacctttgctttgaccagattcagcgactatttcgtctcttagatgatggattgtgcgatcaatggtactcttatgaagagttaagctttgcttcaacgtcttgacagtggtgatgagtttgattttcttcaccaatctttccttcattcccttcattgctaacaaaacttggatctttcaaaaatctgaaaagaggatttagagaagaattctgatcaagataagatcgggtacgagaacaaaaacaaaacaaaacttagtggctaatgggttcttcgttttcaggtttcttctttggttaacgtgtgggtacccaattttgatgaataaagtttcaaaagctactttctggtttagctttcaaaagtctttcttgatgggttttcatcagaatgaaaaaagaaagaaaaaaagtctttgttttttttttgtgttgatgggtcattgctacaataatgtaagatgtgatgataaaactcacacctcaattacagaagacaaaagacactcatgacatgagtaatgattttacccaatcaacccaattttgccagaaggctaaaaacaaaaaaggaagatgttataatggagctttaagaaatataaatctttctggtaagagtcatcaattgatttagcctgtcttgtcttttacaattccagaaacgtgcaatgatgtaagattggtaaagaagcttagctttagctagcttgcaaattcgaattagtcaaaattttctatttaatcatatactttattctgattactttttcgcattacatatgatggttgagaccttgtcagttataccgttccaagcatttgactgattgccataagacctggtgatacatcttatggtgaagaaagcacattcacattggtgtccaaaaaataagatcaccttcacattcagggtctgacataactgatatagaaagaattaacaattttcctaaactatctatacaatcaccaatacaggtgaagctgctctaaatgtcagccacagatgctctgagtccaatgtcgaacgagaatttgatgcatgttaactccttcttctttgcatcaagcatcttcattttcagcaagtatgaaccctgcacaagaaaggtaagattagaatctgttatcttcctgtttttgtaccagattttcgacagtaatatgcaacattaagacattcaacctaagccatcttatatctctcgatacaaaggtaatccttatatatatattggccatccattatgaatgcaacacattccacaaaacaaagcaattatgagaacttacaggaggagtataaccaggaagaacttgagagtgtgcaaccaagaaatctccggtttgtataggacaactagtctcagtgcagaggtcatgagtctcagagtgaacatgccatccaaagtatgaaacttcaatcaccagcttcccaaacgaaatctcacggcctttaaattcccccaaaacaatgaaacaaaagaatcataatcataaacagtgattgttcaactctactacgaatcaagacacatgagtacaaacatcctaagcagaaaccacattgtatcattggtatcaatataagcccaaaatcttaagataaagactggaaacagtaatgaacaaaacctgtgttggcagagatggtgaaagtagctggctcgcctggtgctataggattaggagatatatcaacctctttcactttaacttcatactctgcgttctcttctacaatcaaatcaagcagaatccaaaagccagtcagacaaaaacaaaatttccctgaaaaaaaatcgaatttttacaccgaccaatatgagccaaaagcaaaaagcatcgaactttagaactcaatttgaattcaaagccatcacgaggagaaacggaggttgaaacacgtaccacagtaatggacatcgatggctacaatcggtgaaacaaggaggagaagaaaaacagcagcgagaggaagaatggcgaagatcctcgacatggtgattgatataaatctctcggaagctataagaggaagatgatgatcaaagcagcagcagagtagagttgcggaatctttggattcatatattcaaggaatgtaggaagagatctggaccgttcttttagctaggtcagagtttctggaaacggacggctcgatttcattgtttggtatgaatgtgatatacacttaaatttatttaggataaacatgcttattaatgttatttattttagtaattatctcattttaatcatatttatctcttacatttttctatagttttttgcgcaattgttatttgctttgtttaataaagttgactttgatctctgttttgactttagtcttttaccataattaacggattacttattataacgctttgctgaatgagaaattgagaatggttacgttgaggtagaattctttttgcttttttgaaatttcaatagtttggcaccgaaaaatagtgtgccttgccaacttcgactctactatttgctatttagtatttatgcagctacatttcttcatttccttttctttataagttttcgtctctttttagaaaatatgaaacgtcatggtcttgctccacctctcctatatattatttaaaatatttttgctatgaagaatataatgcatgtttgtgcagaaccaaataacaatcgtgaaactttacagcttagatattattatatactatataaaaaaagttgtcaacaataactttctgtttataa

SEQ ID NO: 3940 - DNA, 1371 bp, Arabidopsis thaliana landsberg
aagtgcaaatttttagctccagagatcgcctttgctaatcaataaaattgaatgcatttaattaaattgtaagagcaaactcgcactgatacgtagaataaatttgttgcttttgccttcacgacaccattacctatagttaatactccaaaagaaatagcagattcaacatacaacgtgcaagaccaaaaaacaaatgactcgtaatctccagagaatcataattcataacatgggagattgtccacaaaaaacataaattccctctcatgtctttttgttagaaaacccatttatctttcttaaggcccaacaaaaaacataatcccctttcatgtctttttgttagaaaacccaattatctttcttgaggcccaatttgaaaacccacattttctttcacctaacccaccaaagcctttccacatgttgacgtgaacaccaaactaacacgtgtcatactgccagtggttatgataaatgctcataccataccagagtcatagagtttctggttggtgaaagatttgacggatgccttcttctcatttctcaccaactccctccaaacccaacaaaagtgtttatatttgcaaagccgccaaagtgtaaacgaaagtttataaatttcatttctgtgatcttacgtaattggaggaagatcaaaattttcaatccccattcttcgattgcttcaattgaagtttctccgatggcgcaagttagcagaatctgcaatggtgtgcagaacccatctcttatctccaatctctcgaaatccagtcaacgcaaatctcccttatcggtttctctgaagacgcagcagcatccacgagcttatccgatttcgtcgtcgtggggattgaagaagagtgggatgacgttaattggctctgagcttcgtcctcttaaggtcatgtcttctgtttccacggcggagaaagcgtcggagattgtacttcaacccattagagaaatctccggtcttattaagcttcctggctccaagtctctatcaaatcggatcctgcttctcgctgctctatctgaggtatatatcacttcgtttcgtccttctctgtaatctgaacttagattataaagattgatactttaccattttgctgtggttttatagggaacaactgtagtggacaacttgttgaatagcgatgacatcaattacatgcttgatgcgttgaagagattgggacttaatgtggaaactgacagtgaaaataatcgtgctgtagttgaaggatgtggcgggatattcccagcttccatagattcaaagagtgatatcgaactttacctcggtaatgcaggaacagcaatgcgtccacttaccgctgcggtcactgctgcagg

SEQ ID NO: 3941 - DNA, 1692 bp, Arabidopsis thaliana landsberg
  unsure (1)..(1692): unsure at all n locations
gtcttatatggagtttagtcctgtttgatttaaagttcaattcttgatcaagataagctagcttttgatttgtttctgtacagtaatgggaaacatttgatgcagaatacttggtgttgcagtaagtgagctacaagatagtttcaaacaggaggcgtctgagtctgttaagcagccttcaatgtttccaagaaannnnnnnnnnnnnnnnnnnnnnnnnnnncttgcactgtctgttggagtaacaggtcatttaagtgataaaagttttcgacgtttaacttttgatatgatggtcgcttgggaggtgccttccgctgctagccagacattactcagtgtaagtaaggacttttgatttctgtgtctgtggtctattgagtcaagacttggtccttatattttcaaacatggaagcaggttgatgaagatccaaccgttggtttagaagccttctcacggattgctccagcagttccgataatagctgatgtgatcatatgtgagaatttgtttgggatactgacttccgtctcaaacagtgttcggcttcagttttatgtttatgacaagtatttgtatggacttgaaaggtaaatataatctttcatccttataaacattctccagaagaacattgtgaatctgaatccgggatcactttctagagcaataaagaagatgaagagccagtccgagtcatctttactttctggtgttcgatcaaaaggagaaaagattcttgagctcgatggtacagttactacccaaccagttcttgaacatattggaatatctacatggccaggtatgtttttctctgcacaagcaaagtgtgaaaattctcctctctatttggttgattgaatttagtattgttaaatgcaggtcgcttgattcttactgatcattcactatattttgaggctataaaggttgtatccttcgacacaccaaagcgttatagcctatctgatgatctgaaacaagtcattaaacccgagttaaccggtccttgggggactcggctttttgataaggccgtctcttacaagtctatttccctgtaaggaatgatgttattatgacttgttttgtattcacttcttttcttactggttcagttacatattttaatgtctcttgttctgtagaccagaaccagtagtaatggagttccctgagcttaagggtcacacacgaagagattactggctcgcgataatcctagaagttttatatgttcacagatacataaagaagttcaagatcaacactgtggcgaaagatgaagctatctcaaaagctgtcctcggcatattacgcgtgcaggccattcaagaagttggtttgacaaaccctgtgcgttacgagaatcttcttccgttcaatctctgcgatcagcttcctggtggagatcgtatattggagacgcttgcagagatgtcgagttctagagtacttgaccgaactgccaaagccaaagaaggtaacattatttacgtattatgcaaactgtaatttcctggttttacagaattctatgttgataaaaattcttttatcagggacattgcactcgatctcggcctcggatatggtttcgcagttgggtttggtgtttggagcaccatgtccaaagagcataagttggctactggtaggtgaggtgatggctgggatgtgaatcct

SEQ ID NO: 3942 - DNA, 530 bp, Arabidopsis thaliana landsberg
aaaatacaaattttgttctttgtgtttattgtgtgtttgattattgttttttttatggtgtagacacagtatgtgttgctactgtgttcatttaaagagcaattgcaacaacatgtgcgtgttcatgcaatggaagctgtgatggcttgttgggagattgagcagtctcttcaaagcttaacaggtgagaaaatgaatcctgtgattagctcatgaatccaatagttagttttatgacattgacaagttttgtgttttattggtgagattaggagtgtctcctggagaagggatgggagcaacaatgtctgacgatgaagatgaacaagtagagagtgatgctaatatgttcgatgggggattagatgtgttgggttttggtcctttgattcctactgagagtgagaggtcgttgatggaaagagttagacaagaacttaaacatgaactcaaacaggtaataatcaacaaacttgttctttgaactagttcatgaactaacaatgtagagggctttgtcttgttgatga

SEQ ID NO: 3943 - DNA, 3953 bp, Arabidopsis thaliana landsberg
ccattaaaacaaaaccggtcaaacaaattagtttatattacccaatcgttatgaagttaaattaacctcacattaaaggaattaatggataatgtaaaaattctaacaattactaattttggaaaattaacaaatattctttataataaaagaaaaagcctctttcctttttcagcaacatataaatcatactcccattaaaagatttttaatgtaaatatctgaatataagatattttttacaacaacaaccaaaaatatttatttttttccttttttacagcaacaagaaggaaattttttttttttgtcaagaaaaggggagattatgtaaacagataaaacagggaaaataactatccgaactctcttaattaacatcttcaaataaggaaaattatgatccgcatatttaggaagatcaatgcattaaaacaacttgcacgtggaaagagagactatacgctccacacaagttgcactaatggtacctctcacaaaccaatcaaaatactgaataatgccaacgtgtacaaattagggttttacctcacaaccatcgaacattctcgaaacattttaaacagcctggcgccatagatctaaactctcatcaaccaatttttgaccgtccgatggaaactctagcctcaacccaaaactctatataaagaaatcttttccttcgttattgcttactaaatacaaaccctagccgccttattcgtcttcttcgttctctagttttttcctcagtctctgttcttagatcccttgtagtttccaaatcttccgataaaaatgtcgggtaaaggagaaggaccagctatcggtatcgatcttggtaccacttactcttgcgtcggagtatggcaacacgaccgtgttgagatcattgctaatgatcaaggaaacagaaccacgccatcttacgttgctttcaccgactccgagaggttgatcggtgacgcagctaagaatcaggtcgccatgaaccccgttaacaccgttttcggtacgtgtctcgttttcttagctctcttatacttgaaatctagatctcgttcatcgtagtcgtgatgtagttagatctagttagatctggataacaatcgtatatattggatttagtgtttcatctatagatcttattggttagatcctgtttatattgattcaactatgcttattttagtaatttcttgctcggactagtactatctgttggtttttggaatttgtaagtttgttagatatttattgctatttttgttgattatgcttcagatctttattgcttgatttattactaaatccgttttttatttggctgttgcagacgctaagaggttgatcggtcgtcgtttctctgacagctctgttcagagtgacatgaaattgtggccattcaagattcaagccggacctgccgataagccaatgatctacgtcgaatacaagggtgaagagaaagagtttgcagctgaggagatttcttccatggttcttattaagatgcgtgagattgctgaggcttaccttggtgtcacaatcaagaacgccgttgttaccgttccagcttacttcaacgactctcagcgtcaggctacaaaggatgctggtgtcatcgctggtttgaacgttatgcgaatcatcaacgagcctacagccgccgctattgcctacggtcttgacaaaaaggctaccagcgttggagagaagaatgttcttatcttcgatcttggtggtggcacttttgatgtctctcttcttaccattgaagagggtatctttgaggtgaaggcaactgctggtgacacccatcttggtggggaagattttgacaacagaatggttaaccactttgtccaagagttcaagaggaagagtaagaaggatatcaccggtaacccaagagctcttaggaggttgagaacttcctgtgagagagcgaagaggactctttcttccactgctcagaccaccatcgagattgactctctatacgagggtatcgacttctactccaccatcacccgtgctagatttgaggagctcaacatggatctcttcaggaagtgtatggagccagttgagaagtgtcttcgtgatgctaagatggacaagagcactgttcatgatgttgtccttgttggtggttctacccgtatccctaaggttcagcaattgctccaggacttcttcaacggcaaagagctttgcaagtctattaaccctgatgaggctgttgcctacggtgctgctgtccagggagctattctcagcggtgaaggaaacgagaaggtccaagatcttctattgctcgatgtcactcctctctcccttggtttggaaactgccggtggtgtcatgaccactttgatcccaaggaacacaaccatcccaaccaagaaggaacaagtcttctccacctactcagacaaccaacccggtgtgttgatccaggtgtacgaaggagagagagccagaaccaaggacaacaaccttctcggtaaatttgagctctccggaattcctccagctcctcgtggtgtcccccagatcacagtctgctttgacattgatgccaatggtatcctcaatgtctctgctgaggacaagaccaccggacagaagaacaagatcaccatcaccaatgacaagggtcgtctctccaaggatgagattgagaagatggttcaagaggctgagaagtacaagtccgaagacgaggagcacaagaagaaggttgaagccaagaacgctctcgagaactacgcttacaacatgaggaacaccatccaagacgagaagattggtgagaagctcccggctgcagacaagaagaagatcgaggattctattgagcaggcgattcaatggctcgagggtaaccagttggctgaggctgatgagttcgaagacaagatgaaggaattggagagcatctgcaacccaatcattgccaagatgtaccaaggagctggtggtgaagccggtggtccaggtgcctctggtatggacgatgatgctccccctgcttcaggcggtgctggacctaagatcgaggaggtcgactaatttgttggacattgacctctctctttctcctatctctatctcttttacttgctttttttttatctgttaagactttttatgttgggcttttttaaagaagcccattttgtggtgttttttggttagtacttttttgaacaatggttggttctataccagtttagctacgatgacggataaaattaaaagtttgccattttctctcttattttggttatggtgtttgttctatactcgtcttctttataagttcaagttcgtaaagaacataaaaattacttagagaaggaaccaacgataataattaattaatcaattacgagaaacccattttttattatgacatttgttgaatttatcatttctaacacagactaaagtcaattttacccttgttttgttgaaaagaaaaaaatctaaatctttttcccccacaaaatcctaaaacaaaattgatctctccatgtagtgttctccacgacgagatctggtgacaactccagtttaagcaagaccaaaagacttgaagagataaaaagctattaaatcaatctctttttctttgggtttttattagtgaaaagaaagtagaaaaaaaatctcaaagctttcatgaattggaagtttcaaatttggtttagatttgaagagataaattggaagtttttattaaattaatgttgatcaaaagcctagtgaatcttaagcattcaatttagttggtctatgtgaatgtgttgttgatgcttatttttttttttttttggtcaaccttgatgctttggttatagctttggatttgtgattttatctggattttttactttgacgttttatgctttatttcaaaactatatacggagcttcggcta

SEQ ID NO: 3944 - DNA, 997 bp, Arabidopsis thaliana landsberg
caatctagcacgggtgattggagaatagaagtcagctccaccatataaagagtcaatctcgatggtcgtttgagcggtggattaaagagtcctctttgctctctcacaagctgttctcaatctcctgagggctctcggttgaccggtgatatcctgcttgttctttctcttaaactcttgaacaaaatggttaaccattctgttgtcaaaatcttccccaccaagatgagtatcaccagctgttgccttcacctcaaagataccctcttcgattgtaagaagagagacatcaaaagtaccaccaccaagatcaaagatcaaaacattcttctctccaacacttgtggccttcttgtcaagaccataagcaatggctgcagcagtgggctcgttgatgatacgcaaaacattcaaaccagcgatgacaccagcatcctttgtagcctgacgttgagagtcattgaagtaagcaggaacagtgacgacagcgttcttgaccgtagtgccaaggaaagcctcagcgatctcacgcatcttaataagaaccatggaagagatctcttcagcagcgaactgtttctcttctcccttgtattcgacgacaatcattggtttctctgcagttccggagatgatagtgaaaggccataactgtctgtcactttggacagatgcgtcactgaatctacgaccaatcaacctctttgcatctgtcacaattagcaaacaaaatagagtttagtcaaccaaacaatcccaaaacaaaacatcaacttcaactaaaattctttgttcaaactaatgaaaaatcctaaattcacaggaagagttcataatataacgcaaacaagtgattcaaaaacttctaagcaattaagatcatcctataaaccctaaaaactcttacttcaactcaaatacgaatcaacagagcataagatgagattaaccaaaccctataaattcgtactttaactcaaatacgaataaacagagc

SEQ ID NO: 3945 - DNA, 1581 bp, Arabidopsis thaliana landsberg
aaccaaaatttgatttaagtatttctgataactttaaaatttacaatttaggaaatgaaatcattattttttgttaagggttagtcacaatacaaggccttataggcccataactctaccacaaacttgcgtcgcaattaataagccgaccttcgtatggaacgttcaagcaggttcaaattttctataattctcagttttgtacaatttccctttttctccttttctcctttttcccagacaaggtttgcctaggatttggaaaagttatcattatcctcaaactaatctaaccttatataaacctagctttgacgctctttttcttcacaactcaaaaccaagcaaaatctctctggtgctcaaaacttttcgtctcttctttttagctaaagcttttttttctctgtgataatggctggtaagggagaaggtccagcgatcggaatcgatcttggtactacgtactcttgtgttggagtatggcaacacgaccgtgttgagatcattgctaatgatcaaggtaacagaaccacaccttcgtacgttgctttcaccgactctgagcggttgatcggtaatgctgctaagaatcaagttgccatgaaccctgttaacaccgttttcggtatgtaactaatctttttctctcttttttatttctctagtcaagttgagttacgaatttttagggtttatatgttttcttaatttttagggtttaaaggtggtcttaatatttaggatttatagtaagaaacaattttagatgaagttgatcaaaaagaatttttgtttattgattgcatatttcttaaataacaaaactctgttttttactctgttttttttttttaatgattgtgatagacgcaaagaggttgattggtcgtagattcagtgacgcatctgtccaaagcgacatgaagttttggcccttcaaggtaacccctggacaagcagacaaaccaatgattttcgtaaactacaaaggagaagagaaacaattcgctgcggaagaaatctcttcaatggttctcattaagatgcgtgagatcgctgaagcttaccttggttcttcgatcaagaacgctgtggtcactgttcctgcatacttcaatgattctcaacgtcaggctacaaaggacgctggtgtgattgctggtttgaatgttttgcgtatcatcaatgagccgacggctgctgctattgcttatggtcttgacaagaaggcatcaagtgttggaatcaagaacgtgttgatctttgatcttggtgggggtacttttgatgtttctcttcttaccattgaagaaggtatcttcgaggtcaaggcaactgctggtgacactcatcttggtggcgaagattttgacaacagaatggttaaccattttgttcaagagtttaagaggaagaacaagaaggatatcagcggtgactcaagagctttaatgagattaagaactgcctgcgagagagcaaagagaactctttgttcaaccgcgcaaacgactgttgaggttgactctttgtttgagggaattgatttctattttccaatcactcgtgcaaaatttg

SEQ ID NO: 3946 - DNA, 931 bp, Arabidopsis thaliana landsberg
tcttcgtgatgctaagatggacaagaactcaatcgatgatgttgtccttgttggtggctcaacccgtatccccaaggtccagcaattgctcgtcgacttcttcaacggcaaggagctttgcaaatctatcaaccccgatgaggctgttgcatatggtgctgctgtccaggcagctattctcagtggtgagggtaatgagaaggttcaagatctcctcttgcttgatgtcacaccactatctcttggtcttgaaaccgctggaggagtcatgactgtcttgatccagaggaatacaaccatccccacaaagaaggagcaagtcttctcaacttattcagacaaccaacccggtgttttgatccaagtctatgaaggcgagagagcaagaaccaaggacaacaacctgttgggtaaattcgagctttctggtatccctccagcaccaagaggtgttcctcaaatcactgtctgttttgacattgatgcaaacggtatcctcaacgtctcggctgaggacaagacaacggggcagaagaacaagatcacaatcaccaacgacaagggaagattgtcaaaggacgagattgagaaaatggttcaagaggcagagaagtacaagtcggaggatgaggagcacaagaagaaggtggacgccaagaatgctcttgagaattacgcatacaacatgaggaacacaatccgtgatgagaagattggcgagaagcttgctggagatgacaagaagaagattgaagactcaattgaagcagccattgaatggctagaagcgaatcagctagcagagtgtgatgaatttgaggacaagatgaaagagctcgagagtatttgcaacccgatcatagcaaagatgtaccaaggcggtgaagctggtggtccagctgcaggaggaatggacgaggatgttcctcct

SEQ ID NO: 3947 - DNA, 765 bp, Arabidopsis thaliana landsberg
ttactcatgcgttggagtttggcaacacgaccgtgttgagatcattgctaatgatcaaggtaacagatccacactgtcttacgtcgccttcactgatagcgaacggttgattggtcacgccgcaaagaatcaggtcgccatgaacccgattaacactgttttcggtacgtttcactcgtttcctcttgctaaatttgtctttcgaacttggattataagtagatctgtaatcggtagatccatagcgatgatttagggtttcataagaatgttttaacattgctggagctagtgagattcaattttcgatctaatgttactaattttagcctttaggcaaaatatacatatagcatcgttttaattcgtatagtatctgtggtctaattgtgttcaattttgttgtgtgacagatgcgaagaggttgattggtcgaagatttactgatagctctgttcaaagtgacatcaaattgtggcccttcacgctcaaatctggacctgctgaaaaaccaatgatcgtcgttaactacaagggagaagataaagagttttctgctgaagaaatctcttctatgattctcatcaagatgcgtgagattgctgaagcttaccttggtacaacgatcaagaacgctgttgttactgttccagcttacttcaatgactctcagcgtcaggctactaaggatgctggtgttattgctggtttgaatgttatgcgtatcatcaacgagcctactgcagctgctattgcttacggtct

SEQ ID NO: 3948 - DNA, 479 bp, Arabidopsis thaliana landsberg
tcacggagtgtgttccccacgttgtaagcgtagttctcaagaccattcttggcttccaccttcttcttttgttcctcatcctcagacttgtacttctcagcttcttgcaccatcttctcaatatcgtctttggacagacgacctttgtcattagttattgtgatcttgttcttttttccagtggccttgtcctcagcagagacattgaggataccattggagtcaatgtcaaagcagacagtaaactgagggatacctcgtggagcaggagggattccagaaagcacgaattgaccaaggatgttgttgtctatggttctagctctctcaccttcgtagacttggatcaacacgtcgggctggttgtctacagtagtggtgaactcctgttccttcttagctgggattgttgtggttctttggatcaaagtggttattgacaccaccaatggtttcaataccaagggagagaggtgtgt

SEQ ID NO: 3949 - DNA, 527 bp, Arabidopsis thaliana landsberg
tttatctaaaccaatccatatatatatacacatagaccatcctttattttctctcaaaccttctcacaaaaaccaacggaaattctttctatatattaaaaaaaaatcaacacaaaggaaaaaaaaatggattacgttttgattgttttgccacttgcattgtttctcatagcttacaaattcttattctcatccaaaacgcagggcttcaatctcccaccaggaccaactccgtttcctatcgtcggccatcttcacctagtgaaaccaccggtccaccgtctcttccgccgcttcgctgaaaaatacggcgacatcttctccctccgttacggctctcgccaagtcgtagtgatctcttcattgcctctcgtaagagaatccttcaccggtcaaaacgacgtcattttaacaaacagaccgcattttctgaccgcgaaatacgtcgcttacgattacaccactataggaaccgccgcttacggtgaccattggcgtaatctccgccgtatttgctctctagaaat

SEQ ID NO: 3950 - DNA, 993 bp, Arabidopsis thaliana landsberg
ttttaagaggatattagtttaggctctaatcgtaccgtattcatggattaagttaacattttcaatgtccaacaaattttagaacggggatcaacgcagacaattgggaaacctaactaataaaaatgaacaagaaaagccagaatcgaaaccaagagaatgaatcataaaacttcaagattctacccacaaaattttaaaaagccaaaaccagcaacttcgatccctcaacaagtatgaaaagtcaattaccttatgaatttatgatagaaaaatgagagagcttctagttctacataaacaagttaggcttgttggccttgaaggtagtcttgagctttctggtgggaggtctaaccttcctgaagaccaacgggaacttgatcttgctgttgtgaaactgcttcgtactttccctcttgcagagagaggctgggactgttgctgtcttaataatctgaatgcaagggaaccttactctgtgtcttgacgccatctcagtgtacatttgctccactgctccattcaaagtagtgtcacggtactctttgtacatgttatggtaacctgtacggctctggtatctcaaccagattccaaaattcttgatcgttgttgggttcttctcaaagatctgtcacaccaattagtcattttaagaatcaagcaacacgaacgacaaaatattttacagaatcacaaacactttacacaatcaagttaagaccaaatatctaaaaatgttccataattctgagagactactaccaagaacaaatcaaattcagatcctacagcaagtacctcgttgatggctagcatctgtccattactcttcttcaccttcttttgcctccttaagtagtacctgaattcaaaacacatacatgaagaaacgattcaacatcacaacgattcaaacatcatgaaattggtgagaatttatgataaaattaaactaaccagaacttggatttggcaagaacctcgttc

SEQ ID NO: 3951 - DNA, 521 bp, Arabidopsis thaliana landsberg
caaaagacagtaagatggtgaatttacaaaaggagaggttctttgttgctcattatcgtggagcagccatttgttgcttcggtatcttgtggtgtgacttcaccatactgtgtaatttgcaaaagagagattacaatgttacatagttcctatgctttaaagaaacagtgttgtgtgttacttcactaagtggatggaagttaccttatatcatgaggagtgatgaacatccactgtgaaccttgtttcaatgcgaaatcaatcaatgtgtctaagctgattttcctgctaactgcgtcctgaggttgcagaaaccgaatcgttaacacgttatttctctcaaggtgtttgaattttgttttagaagctccaagttatgagaagaagtggtgtatgatattatactatgcaaaccgagatcaagttgtaagaaataaaattcccaaaaggagattaccatacacacatcaaactcgtgcattgctcgaattggggcttcagtcatattctgaagagctaat

SEQ ID NO: 3952 - DNA, 1569 bp, Arabidopsis thaliana landsberg
gtgaatagagactttttgttgattataggggaaaattcaaaaatcaagaagtagaggcagaaaatgatataaaaagttatcatagatagggtgtaacggcatcacgagtattcatattttggtaaagagttttttcttcatttcacatgcttgaattgtattttttttttggtgagtgataggaggcaattggcccctatgttttattcaaataaatgtaaagaaattacaatcggacaatcatgggtatcgtgtacccatcggcatcttccaacaaaatcggattaacaatatccggtggaaaatttaaagaatggaaacctaaaggtaaagaaaaagcatagttcgctaacccatccgctagacggttagcctccctatacacatgtgacacacggactaaccagtcccttgataaaaagccatagcacaaacgtactaggaacgacagggggtgagagtcactgatccctgaagttaaaaaacccaccacaatctccgagtccacctctagctccaacctcgcgacccgcctctcccaagctatgtaaagtccatagtagaccccccacagttctgccaaaggagctgtacaaatcccaatattaagcacaaagcctccattccaattaccttcctcatcccgcaacgcaccacctgcagtcgcctcttcgggattcccatgcgacgccccatccatatttagcttgacccagccctcatttggtttcctccatgagacttgtcgctctacccgcacaatctccttcgtattcccggagagctttaagtgagcagctgaaacctcatttgccaaatccttaatgaaccgtagtctatcccgacaacggccaacctctccaaaaacatttccacaacgccatttccaaccccaccaaattgccaatgcaaaaactgtggaccaaacactgcctcccacctcaccgtgttctcccagatttacatacaaccactcaagaatagacttctcaaagaaaaggcgccgtttgctcaccgggacaagccgtagccatattccttccattgcagggcaatctctgagaacatggataatagactcttccgctcccttacaaacttgacagatgctcgtggtactcaaatgtcgacgatgcctttcttgattcgtcataatggcttgttgtgctactaaccagaggaagagtctcactctctcaggcgcagtcacgctccatactcggtcaaagaatcgcttcatatcttgtctcggcgcctcatctctagtaagaaaagaataggcggtgctcactttgaatctcccatcttgactctccccccacgatattctgtctctagctcccgttatatcatctaaaacaaccgattgtagttgtaatctgttataagaagatatatatggagctatcgcctccatatcccaaccgatctcatttctccaaagatccctagctcgcattcctttccaacctgccggaagctcctgaaccaacaactcagctagaggaatatttgttagccacttatccatccaaaacagaatctccagatccatgtttcctctagaat

SEQ ID NO: 3953 - DNA, 4771 bp, Arabidopsis thaliana landsberg
aatgtatagtacattgagtgaagagtgttacagagtatttaatgttttataaatctttggaagtggtggctgggatgaggagggatggattcattcctggtgctaccatatgtgaaagattagctgattcgttgtttgaagtaaacaggaaagaggcacaaatgctgattaccattgtggttaagtgtggtattaaaccaaaatcgtgttctcaatatggtctgaaatgaagatgtggtcgtagtcgaggaagacttatcttctttcttattacctaaagagtgagatgacacgcctttgccttaccaagtctccaagtccaactacaaaaacttaatgtcgaagatatggtaatctagctgactagctcaactaagactcaaagatacacatgaagtatagtgatgtgcacatagttgttccatacctccaaaagatacattctttgaaagatttgtggttccggatgaagatgaaagggaatggtgacaggagaaggattgatatggggaccgaggacgaggaacgttagtttgattaggtccatgttgctgactcttccatgacaaccaaaataaggtcgagggactacattgaagattgaaggtaaatcgcacaattttgaatctcataacttttttttctttctttttaatactataacaggagaacaaaatattagcaagcttatggcaataatattatattttcgtttaaaaaaattcaaaattatgttttgatagaatttttgtcaccattttagtcttttgataaaatcatgtatatgtaatattattttcccttatatagacttcatatcttcaatattttccttgataacatttcttatattatctttattgtgatatttaataaaatatagctcgttgattggattattaattattgcgactaaacttaagattttatttttgttatttggaatgtaatctgttatttcttgaagtatatatggctcagtcagataattatatatatatgtaatgtaatgtgtgatctctagatatggatggaacctaacatagaaaaagaacaatagatacattgcattgtgtctgaaaacccaaaaatactattcgatagcaatgtctcttgcaaccacaatgatcgccatctttcttcaaatcattacatattttctcattaccaccacagcctcatcacctacagggcttcactatcgacttgatccaccgtcgctccaatgcatcttcttctcgagtctttaatactcagctcggatcaccttacgctgataccgtctttgatacctacgagtacctgatgaaactacaaatcggtactcctcctttcgagatcgaagctgtcttagacaccggaagcgagcacatatggacacaatgtttgccttgtgttcactgctacaaccaaaccgctcccatattcgacccttccaaatcctcaaccttcaaagagataagatgcgacacacatgatcactcttgtccttacgagcttgtctacggcggcaaaagctacaccaagggaaccttagtgaccgagacagtcacgatccattccacttcagggcaaccctttgtgatgcctgaaacaattattggttgtggccgcaacaactcagggtttaaaccgggttttgcgggcgttgttggtctagacagaggacctaaatccctcatcactcagatgggcggtgagtacccaggtttgatgtcttactgttttgctggtaagggaactagtaagatcaattttggagcgaatgctattgtggcaggagatggggttgtatcaactactgtgttcgtcaagaccgcgaaaccaggtttctattacctaaacctagacgcggtcagcgttgggaacacccgcattgagacagtggggacaccctttcatgccttaaaagggaacatagtgatagactctggaagcactctcacgtactttcctgagagctactgcaacctagtaagaaaggcagtggaacaggttgtgacagcggttcgattcccgcgcagtgacattctttgctactattcaaagaccatagatatctttccggtgatcacaatgcatttttctggcggtgcggatcttgtcttggataagtacaatatgtatgtggcatggaatacaggaggagttttttgcctggctattatatgtaatagtccaatagaagaagctatctttgggaacagagcacagaacaatttcttggtgggttatgattcttcttcactgctggtttctttcaagcccaccaattgttctgctttgtggaattgaagaaacaaaccctagagagtctcttttccatcattttcaacttcagtttgtttttctcggttaacttcagtttgttatttatatatatcttatcaaaataaaagcatagaccatggatatgtttatatgaataatatgcgaagttacttagaatctgtatatttcttgcattgatatgggttgcttaaggattggcaagattaacaccttccaaatgataatattaacaagtttgtagaaaaacagaaagaaacctataatacgtaaaatctcatattccaaacctctttagagccctagcagccacaagttgtgataattaactcctcccaccgagccgtttgagccctctcatatggtcaaatatacacttcagactctggtgagataccataggtaggagatggttttatggcaagaagattaagttatccaaaaccaatatctatctataaaagtatattttgaattttaggttcatcaacaataactttagactaaaatttccaagaaattatacattttgctatagcaaggtgatcatctaatttccattaatacaaaaaagtcaatctaaaagaatgtaaaacctagagagaaaaataaaacttagtagtaacaaaatgtaaaattcccccaagttagaagacgtaatggcaataacaaaattgaacgaagttgacaaaattgaaaacttaacaattacgacaaaaggtctaacatgtataaatatgtgcatgaattaatgaagaacattacattgtgtctgaaaaaccaaaaatattattcgatatcaatcaatgtctcttgcaaccacaatgatcgttctttttcttcaaatcattacatgttttctcttcacgaccactgcctcatcacctcacggcttcaccattgacttgatccagcgtcgttcgaattcatcttcttctcgactgtccaaaaatcagttgcaaggagcatcaccttacgccgatactttatttgactacaacatctatctaatgaaactacaagtcggtactcctcctttttagatcgcagcggagatagacacaggaagtgacctcatatggacacaatgtatgccttgtcctgactgctacagccaattcgatcctatattcgacccttcgaaatcttcaaccttcaacgaacaaagatgccacgggaaatcttgtcattacgagattatctacgaggacaacacctattccaagggaatcttggcaaccgagacggtcacgatccattccacttcaggagagccctttgtgatggctgaaacaaccatcggttgtgggctccacaacacagacctcgataactcagggtttgcatcgagttcttcgggtattgttggtctaaatatgggacctcggtcgcttatctctcagatggacttaccctacccaggtcttatctcttactgcttttctggtcaaggaactagtaagatcaattttggaacaaatgctattgtggcaggagatggaacggtagcagccgatatgtttatcaagaaagataatcctttctattatctaaacctagacgcggtcagcgttgaggacaaccgcattgagacattggggacaccgtttcatgccgaagacgggaacatagtgatagactctggaagcactgtcacgtactttcctgtgagctactgcaacctagtaagaaaggcagtggaacaggttgtgacagcggttcgagtacctgacccgagcggcaatgacatgctttgctacttttcagagaccatagatatctttccggtgatcacaatgcatttttctggcggtgcggatcttgtcctggataagtacaatatgtatatggaatcgaacagcggaggacttttttgtctggctattatatgtaatagtccaacacaagaagctatctttgggaacagagcacaaaacaattttttggtgggttatgattcttcttcactgctggtttctttcaagcccaccaattgttctgctttgtggaattgaagtaacaaaccctagagagtctcttttccatcattttcaacttcagtttgtttttctcggttaacttcagtttgttatttatatatatcttatcaaaataaaagcatagaccatggatatgtttatatgaataatatgcgaagttacttagaatctttataattcttgcatggatgggttgcttaaagattggcaaatattagcaccttccaaatgataacattaacaagtttgtagaaaaacagaaagaaacctataatacgtaaagtctcatattccaaacctctttagagccctagcagccacaagttgtgataattaactcctcccaccgagctctctcatatggtcaaatttacacttcaaacattggttttgtagttctattccagagttggattaaggccaagctagaatgaagtgatatatacatatttactgatttgtatgacttacacagggtgttg

SEQ ID NO: 3954 - DNA, 541 bp, Arabidopsis thaliana landsberg
ttgtaaactctgttggcagagtaacattcctcgttctttttgaatttcaatcaattcagagttagcccacttgcagcttttattgtcatcaaacactacatccctgcttactacgattttccgcgtggttggatctagtaatgtataagccttggagccgtttctgttccgagatagactagaatcctcgacctctcatcaagctttcttaggtgtgggaattcaactttggcataactcacaaccaaacacgcgtaagtgttcaacatttggcttctttttcttgagagcttcatagggcgtttggttgataagagctcttgttcccactctgttaatgagatatgttgcatgtcttatcgcttctccccacaagtaatttggaacactcatgtgtttcatgatgcttctagtcattcccaacaaggttctgtttcgtctctcaactactccattttgctgaagagtgtaaggcgcggtgaggtgcctaatgattccttcttcttcgcaaaatgtctgaaattcttgagataggaactcg

SEQ ID NO: 3955 - DNA, 1994 bp, Arabidopsis thaliana landsberg
acgcggtggggatatttaacatgattgttcgtttttaaaccgcgagaggctaaaccaaaacataacttagtatttctaggtaaaattatgtgctttgcaatattagtgatttctttctttggtcatgtttatctataagaagcattgagaaaaaatgaacttataaaagactttgatagaacaagttgcaaactccagaaaaaacttgagattatagcagattgtgatttgaatttcgattaattgtgtaactcattcgcatattttttcatttaaacatgtctatgtcatatgcttttagtgacagtacaaataaatcgaaacaaaactgaagttaaaaccatgaaaatgtagaaaagagaatctcttggtttgtttcttcaactccacaaagcagaacaattagtgggactgaaagaaatcacatttgaagaaggatcataacccaccaaaaaattgttctgcgctctgttcccaaagacagcaggcattgacggatcattacacccaatagccaaacaaaagattcctccggtaatcgtttcgagatacatattatacttatccaagacaagatccgcaccgccagaaaaatgcattgtgatcacgggaaagatatctatggtgtccgagtagtagcaaagcaagttgtcactgcccatgtcaggtactttaactgctgtcacaacctgttccactgcctccctcactaggttgcagtagctcattggaaagtacgtgagagtggttcctgagtctataaaaatgttcccgtcttcggcatgaaacggtgtccccaatgtcgcaatcaggttgtcctcaacgctgaccgcgtctaggtttagataatagaaaggattatctttcttgataaacatatcggctgctaccgttccatctcctgccacaatggcatttgttccaaaattgatcttactagttccttgaccagaaaagcagtaagagataagacctgggtagggtaagtccatctgagatataagcgacaaaggtcccatatttagaccaacaatgccggaagaactcgatgcaaaccctgagtactggaggtttgtgttgtcgaggccacaaccaatttttgtttcagccatcacaaagggctctcctgaagtggaaggtatcgtgaccgtctcggttgccaagattcccttggaataggttttgtccgcgtagataatctcgtaatgacaagagtttccattgcatctttgttctctgaaggttgaagatttcgaagggtcgaatataggagcgaattggctgtagcagttaggacaaggcatacattgtgtccatatgatgtcacttcccgtgtctatctccgctacgatctcgaaaggaggagtaccgacttgtagtttcattagatagatgctgtagtcatataaagtatcggcgtaaggtgatgctccttgcaactgatttttggacagccgagacgaagatgaattcgaacgacgctggatcaagtcaatggtgaagccgtgaggtgatgaggcagtggtcgtgaagagaaaacatgtaatgatttgaagaaaaagaacgatcattgtggttgcaagagacattgattgatatcgagtaatatttttggtttttcagacacaatgtaatgttctttattaattcatgcacatatttatacatgttagaccttttgtcgtaattgttaatttttccaaatttgtcaactttgttcaattttgttattgccattacgtcttctaacttgggggaattttacattttgttactactaagttttatttttctctctaggttttacattcttttatatatactttctgtattaatggaaattagatgatcaccttgctatagcaaaatgtataatctcttggaaattttagtataaagttattgtcgatgaacctaaagtactatctaatattaatatatttgatttaactttagttaaattttcactacttaataatatcatcattggtgag

SEQ ID NO: 3956 - DNA, 3702 bp, Arabidopsis thaliana landsberg
aatgaaaaattcaaaatttggagctgcacattggcgaattccattaattacaaaaaagtatcagaattataaagtttcattcactaatccatttttttttttaacattccatttgctagtccatccattccgaaattttgcaataatacgggggtatattcgtcattgtatgttagtattttttagagaattgatatgtttataatttgcatgttttacacaaacttttatcaccattttgagtctactttcatccatctttcatagcattcaccatcatttttgtacattttgcatctttagtcgagtctaggactagtcttgcatacattctgcattttggagttgtttcaggtgttttggagctattggtgctcagaaagagggaaaacagaacagaaagtcacacttccaccaaacatactcgatcaccaatagtagagagggaagcagtcagctcagcagtccatctagacacttctactcgatcatagacgagaccaggcagtccattctgccagatatactcgaccatagaggagaggaggcagtccattctgcaattctactctatcgtagaggcgaccaggcagtccactttgccagtccaccagttatactcgatcgcagaggagaagaacaagttcatcctgacagctgacacacttactcgatcacagaggccaagaagcagcccagaccattctgtcaaccaacctactcgaccaccagctcgaccctttgatcaatccgcactcaaccagacaacatgagcatcggaaagagaagagaagagaaggtccattcaaagcccattcgaagcccatcaggaagcccactttgagccgacactcttgatcacaccgtccatgggccgtaaatgagctcgaagcccgctttcctatcttagtataaataagtctctaagggttttgccctgagacatgcactttagagacacgaattttgcaccattattcagtagccgcttttcattcctgcaactttgtatttcgatttttcttctaagttattcagattttgctttcattttgcttgttcatctttcgtttatatgttattgtctttaagcatgttgtctgagtagtgattaggatttctgaggatgggatagagtagttgtggaacccctggtcgaatctgttggttaagtgtagattttttgaatcccttgtggattagttgtgtttactgcttattcctttctgatcaactggaatccgatcccagacgttccagcgcccagaaggcgtttaatggaacgttggatctactagttccagtgataatcgtctctatcccaagggattggccgtttagagcggttattggctttaacagtcggttcttattgcctgcttagttagagatcgctaataggaattaggtctgtgtctagctatgcttgaggatttctatcacgggagtgaattaatctattgttgaacctgttgtctagggatagcttaattgagatttgttaaccaactgaattgatcaaggagaccatactattcgattaccccatccttagaaatttctcatccatttgatttctctgtttacttacctgcttcattcacttgctattgaattttagtattttttctgttttcaaccattctactcgatcacaccagtctactaacagtgagactgcgtgatagagtaaactggtccatttctgcattttcactctctgtcatcctgttgtactcgatcacatggtcccttctggcagttgaccctgcgatcgagtatatcagtcatttctgtgactttttactgttttctgcatcaacactaggactgttagaaaaccaaccaaattctgcttggcttgacttagcaacttctgatcatatctcatctgtctgcatcaaaccaatttggattgacacctaaaatactacaacgacaggatagtgttttaggattaattgactaaaaaacctactatcaaaaatatatacaaactaaccatgataatgaagagaatcaataaattaactatgatatacaatgttttgtcagagggtagataaaatgaccattaaacctttcctttcaatttttatatttcatcgtcatcaacacaacatcttatttctcaccatcatcaacacaacatccaccaccaccctcaacaacactaccaacagtcaagatttaatcgcccaccaccctcactccaaccaaatcaatattccctctaccatcatcaacataacctccaccaccatcctcgacaccacggccacaagtcaaatttaatctcacaacacaaccaccactacccccactccactcaaatctaatcccccaccatcaacatcaacacaacttccacaaccatcctcttaaccattgccacaagtcagatttaatctcccaccaccattctcgacaccatcgccaccatgctttaataactaataaagagatatttatcaatatttcatggtatacaataaaatcgcataaattcttgcaattatgttctatatatttcatgctattcaacaaaatcacatgaaatcttgtaattatgttctatataatttcatgagattcaacaaaattgcgtgaatttttataataatgtccagatttctcaatatatcatgctattcaataaaattgagtgaaatttttcacaacaatgttcatatttggcaatatatcatgctattcaccataatcacattcatttttacaataatgcctcctcaaccgccgtacaacttctctgctacctattgttctctaattctgataaaacgtagaaagggttatttggtcaatgtccctcttctaaaaggtgggtccatggttagtttctaatagaaaagaagtccaacgttattttcttaattattttacagtcaaaggttattcattaatattacccataaaactatattagatatatctagtaatgatgtaataatacaaaaatcatcattaaagtagaataatataactgtgaaaacaaaaaggtataaaatgaattttttttagttgaatgaaactatttataaaaaaaaaatgtttgatttcttctccaaaaattagggttgattttcataaataactaaaataatcattttgtaatgatcaaaagtgtgttatacgactatgatttgattgggttcgaaaattgaattgaatcctggctacaaatcaacccaactattgacatctaaacaaaaccattattaatttcaaaattcgataaaccctactattgacatcttctacggacggccacaccggagattcagcttctcgttccgtacgatgtcggcgacgctccgacgcctcattctccgcacctccacaaatcgctcccgtaatctatcttcgacgtttctttccaccgccgtgaaccacctatctctatcattctcttccgtctcatcttcaccggaatcacacacctccccttcccggattcgaacccgaacaccactcgaaactcaattcgaaacatggattcagaatctaaaaccaggattcacaaactccgacgttgtgacagcgttacgagctcaatccgatccagatctagctctcgacattttccgatggacagctcaacaacgaggctacaaacacaatcacgaagcttaccacactatgatgaaacacgcaatcaccggaatacgggacaacttcgtc

SEQ ID NO: 3957 - DNA, 1012 bp, Arabidopsis thaliana landsberg
aaattggtcttccaactttttaaaactaccatttgtttttcaatttttaatgacttctaaaatcaatgataccacaaaaactcataaaagtctttgttgtattatctttagcctctcccagcttgaattgctgccatcaaattagccatgaagaaagcatatccaacagcggtatgttgcggagtgtagttgtctccaagtccaaacttttcaaagttgagttctttgttcacaaacttacccggcaacgaccttttcgacatagcttcttgccatatctccaagaactcctccatcaatttttttgccattcccattgatgatataggaagatactccacctaaatagtacacacacataattataggtttcaaatgaaagtagtgcataatagcataatggcataagttgctagcactaaaaattcgtataatgaaaacttgttgattggaaaaccgtagattatgcaaattttcttaattgacaaattttctgcctaatcacattagaaaccgtcattacgtgggttaccaatcatagctaataacctttagttactgagttacattacaaactccaaattatgaattaactagagtgttagataatcattaacattgattattaatatatctcaatgtactcaaaagatataaaatttgttacctccatgactacgcctctaatggtctcagcatgagtaggaacaactttaccaactctcaaacgaaaatccccaagttgatactcaagcccttcaaagtaaaacgagagtttgcatttgtaagactgaaggctctccatgatcatttgaattgaagaatctgcttccacgacgatcctttgcgacctgatgacgaaatagtacttatctggctcctccagaagcgaaattcctacaaattcacgcgggaactcagcttgattcgcctgatcttgcaacatgggtttgtaatagctgagagtggctttccatgttccctctttgacgccattgagactctctatgct

SEQ ID NO: 3958 - DNA, 551 bp, Arabidopsis thaliana landsberg
ccttcgtagttcttaggccttcaatgaaaaaagatgcaacgggaactcttgtcatttctagattatctacgcggccacaacctattccaagggaaccttggtaaccgagacggtcacgatccattccacttcaggggaaccctttgtgatgcctgaaaccactattggttgtggccacaacagctcatggtttaaacctactttttcgggcatggttggtctaagctggggaccttcatcgctcatcactcagatgggcggtgagtacccaggtttgatgtcttactgttttgctagtcaaggaactagtaagatcaattttggaacaaatgctattgttgcaggagatggggttgtatcaaccactatgtttctcacgacggcgaaaccaggtttatattacctaaatctagacgcggtcagcgttggggacacccatgttgagacaatggggacaacgtttcatgcgttagaagggaacataattatagactctggaaccactctaacctactttcctgtgagctactgcaacctagtaagagaggcag

SEQ ID NO: 3959 - DNA, 1618 bp, Arabidopsis thaliana landsberg
ggatcttcattctacgctaattgttattgttatcgttattcttgatctgggcgtttttgtggaatttccatctaaaattagaaatttggataccaaaatccactccaattgaataaggtttctgaagaattttcgtttgattttgagatcgaaaattgcgttttctcgtttttgttttgttatcgctaacgcatcaggtcatatatctcaagtttatattttgtggcagcttgtgatggatccaacacagaacacaagtgcagggattggtgggagcaatggtacaatcagatatcaaaccaatgatgggacttcaactgtgaccgttgctgatgattcaaaggagaatctttcccaagtcataaactctattgagaaaactttaggagtccttcatcagttacaccttaccgtcacttctttcacacccgcgtctcaactccatctcctccagcgcctgtaagtaactcctctactcatctgtgtttattgttttgggtattgtaactattgtttgaatgaatatgtgtgtgtgtgtgtatttgcagtaactctcttgtgatggagctagataacatgactaagttgtctgagaaatgcaacattcaaatccccatggaggttcttaagtgagaaaacaagtcctttttgtttttagtatgcactttgaagatagatacttttacttgcttacttatgtttgcgttttcgtatagcttgattgatgatgggaagaacccggatgagtttacgaaagatgttcttaatagctgcatagctagaaatcaagttactaagggcaagactgatgcttttaaggtgactccttttcttctgattcttaatttgtgtatgattcttaaggttactgagtctcttaatcaacattttgttataaataggatttgagaaaacatattctggaggagcttgaacagaatttccctgatgaagtcgatatgtatagagaaatccgtgctagttctgctgctgtaagttgttaacttcgactagtattgtacatcttcattaatatattatagtaagtcaaggggattaaacagttttggtcatattcaggaagcgaaacggttggcgcaatcgcaaagtgtgttaccaaatggggatgcaaaggtcaagaatgagctataagagcccaaaggatcctttttatgtttaccttgtactcttgtagaatataatgactgagtcgatgaatgtgatgtaacacgaacaatcccaagtggaatttctaataatatctgttggttctcttcacctggctaatatagtttgagaatctctgcttgttccccccatttttactcgagtggactatcttactcttagcctctgagatctctttgatttcatgagactatcaaagaatcccacatagttacgcaaaacagattcgacttctatcaatggatttgtctatttcctggacgagtaatcttggttctgcataaaatgtacactatttccgagagctgaaaaagtgagaaaagacacttagatttcaatcttaattaacggtttgattcggtttggtttgtctcacctacatttgcatcgattgcagcatgggggacataatacgcagtggctgacacgt

SEQ ID NO: 3960 - DNA, 335 bp, Arabidopsis thaliana landsberg
taatgcccttgaatttcccactacctaacttacctctgtccctgatcaagcgtacctggccccggaggatcatcaccatactatgactatcggaagcagccactctagtcataaactgggcctatacacctagttctccgacctatgaacagacgctactactcgtgactatctgttcaacatagtgcgtggacttcagctcacattcatctaaaatataactgggtaaaaccctaccttcctcggtaaaatgcccagttacacacatataacccggcatactagcctgagccgcccacagggactacgtatacgaatctctcccacgatgcggt

SEQ ID NO: 3961 - DNA, 2680 bp, Arabidopsis thaliana landsberg
ccctgccggaatgtacgttgatgaggatggtcagctctcatggttcaatgcaggagtcagagtcggagttgggataggccttgggatgtgtcttggtgtaggcattggagttggattactcatgcgttcgtatcaagcaacaactagtaaccttcgtaggaggtttctctgatcatcacctaccataaactaaaaacccacttagacatttcgagatctactaagaatgtcggtaacgtagtgggttataaaagagatagaattttggtagatagatgtatagagcttttggttttcacctgtttgtgtccttttgaatatatatatatattcggctctgttcatatactttagtagcacaaaagagagttcccatcttgctccagtcatgttcttttgttctttcttttctcaagtctgtctatgtcgttgctcttgtgtagaaagagatttcgtgttattgttgttgttgtcaaacgctggagtttgtctttcggtttctggtcaggaaataatgtggaatagggaatgtacatgtttcacctgtattcagtatctgtttgcaattagtaaattaaattattacaacaagccaagtggaagacggcgtcgtttatcataaatgtcaaaccgatgacgtcttatcgggggagcatgagcattggactaaaaaattattgtcaatttgtttaaattgtattttgggccctgaaaattattataaatgaaatttagccccttaattttgtaagagtttacaacattgaaccctaaatcattatgttcccaaaatcaaaatttcactcctcgagagtagcgagaagaaggaggagatgagcaagatccgttcgtctgcgacaatgccacatcgcgaccagccgtcaccggcgtcgcctcacgtcgttacactcaactgtatagaggattgtgcgctcgagcaagactccctcgccggcgttgctggtgtcgaatacgtcccgctcagccgcatcgccgatggtaagatcgagtccgccaccgccgttctcctccattccctcgcgtatcttccacgagcagctcaacgccgactccgtcctcaccagctcattctctgccttggctctgctgatcgcgctgtcgattcgactctcgccgccgacctaggtctccgacttgtccatgtagatacttcacgagccgaggaaatcgcggataccgtcatggcgctcatccttggactccttcgacggacgcatttactctcgcgacacgctctatcggcgtctggttggctcggatcgcttcagcctctttgccggggaatgagacggtgccgtggtatggttttgggtatcgttggcagatctgtatcggctcggtatttagctagtagaagcttggctttcaagatgagtgtgctctacttcgatgtcccagaggtatgtttgttggcaatgtctcgctaagcttttaatatcttagtgtaaactgactctttagggaccaaaaaaagtgctgagttcttagctactacattcctaaactgcttactatgatggctctctttcaagttcctctcccttggatgttatatttgttgtcaatagttgcgtttgcgtctgttcagggagatgaagaacgaatcaggccctcgagattcccacgtgctgctcgaagaatggatacattgaatgatcttctagcagcaagtgatgtcatttcgctacattgtgcattaacaaatgacacggttcagatactcaatgcagagtgtttgcagcatataaaacctggtatgagttttcttgtcaaatgaaatttgattctccatgaatgtgaattgaagatgaacttctgctttctcgcattcccttcaattctggttgattttatgtattaggggcttttcttgtaaatactggaagctgccagctgttggatgatcgtgctgtgaaacaacttctaattgagtggcactatagctggctgcgcccttgacggtgctgaaggtccacaatggatggaagcatgggtatgactttcttttccagtgactaaacttcacatttgcgcctgcctattctcttgtttcatcatcttcttctgttgtttatcctgcatccattatatcttgttttcattgcaggtgaaggaaatgccaaatgtgttaattctacctcgcagtgcagattacagtgaggaagtatggatggagataagggagaaggctatctctatcttgcattcatttttcttagatggtgtaattccaagtaacactgtttctgatgaggaagttgaggaaagtgaagcaagtgaagaagaagaacaatcacctagcaaacacgagaaattagcaatagtggaatccaccagtaggcaacagggagaaagtactctcaccagcactgagatcgtacgtagagaggctagtgagttaaaagaatctctgagccctggtcagcaacacgtttctcaaaatactgccgtaaaacctgaaggaagacgtagcagatccggtaagaaagccaaaaagagacattcacagcaaaaatacatgcaaaaaacggatggttcctcagggttaaatgaagaaagtacttcacgaagagatgatattgctatgagtgacacagaaggagaattaggcgtccagttctccaagagcttcaactgaagattccgtcagtaggagaac

SEQ ID NO: 3962 - DNA, 2676 bp, Arabidopsis thaliana landsberg
tctctcgcttcattttgcatatccagtttacgttgcttaaacctgatttatgtggttattaattaaagaactaactacttaaatgcggtgtggagaggattcacatgatctatgggatacacatgatttcataaaaatctagaataatgttttaggatgataaaatccatagtttcaaaacacatacacgtataagtgaatttaagtagaggaaagtaatcactgagagtgacaaaaagtagataacagaatagaataatagttttcataaatgcttccaacctatcaccaactaccatcaccacataagttggacggtccatttaatgaatgatccgatatgtcaatgtttgaaagttcaatagtattttacaacatttcttaccataataatcgtgaatttcagaatgattcttattatatgatatgttaacaggaaggttacatggtgcatgagaccaaatcagccacaacagtccctatagagagtctcaagaaccgcataatcttccatgatcgccgtcttgtccaacgtccgaccccattaaacgccttaatcatttacctttggcttcctttcggcttcatgctctctgtcttccgcgtctacttcaacctccctttacccgaacgcttcgtccgctacacttacgagatcctcggcattcacctcacaatccgtggccaccgtcctccacctccttcccccggaaaacctggaaacctctacgttctcaaccaccgcaccgcccttgaccccattatcatcgccattgctctcggccgtaagatcacatgtgtcacttatagtgtctctcgcctctccctgatgctctcacccattcctgctgttgctctgacccgagaccgtgtcgctgacgcagcccgcatgaggcaactcctcgagaaaggtattttccatgctcaattatcgttatagaaaagcagagtatctctgtttttactctggttttctacacatttatttggtttcattattatcacattatctctgttctgaaaataaaagctatcacctgagttttgattttttatgtaacattaatattatagaatcatacacattccatctacagaaaacacaaatttttctgatctttatacacacataattcctatctttgtaactcttttttatttattttgcaacaggtgatttggtgatctgtcctgaaggcacaacgtgtagagaaccatatctactaaggttcagtgctctatttgcagagctgagcgaccggatcgtgcctgtggccatgaactgcaagcaagggatgttcaacgggacgacagttagaggtgtgaaattctgggatccgtacttcttcttcatgaacccccgacctagctacgaggccactttcttggaccgtttgcccgaagaaatgacggtaaacggtggtggcaagactccttttgaggtggctaattacgttcagaaggtgatcggtggagttttggggttcgaatgtactgaacttacaaggaaggataagtatctgttgcttggaggcaacgacggaaaggttgagtctatcaataagaccaagtccatggagtaataatccagctagtctggttgctgctattttgcttgggagtgaagttaggtctttcgggttttcccaattacttttttttttgttttttttcatgtattgttcgaggaaaatgttttgttgaatatgcactggataatgaaactacatttgaatcaaagtacgtacatgtagtgtaccatttccccttgccttaactatgaatgatttgtaaactcaccttgtattataagatatcatagagaaaaacacattctcgactcttttcattagaagggcgttgagttgctcgtggaagaaccgcagtggcggactcgatcctaccattggcgatggggacggattcaacaacttcttcttctttcttctgctagaggagtgaaattttgattttggaaacataatgatttagggttcacacttgaaatacaaagtgaaattgcattagaactgcatagatatttagagagtttgtgcttaatcttttatccaatgtacctgcttacgatcaatttccaccttgatcatggctctggatcaatttttctagtttccttttgttttcacgtgaaacttaacacacttgttttttttttttttggtaggcaacttaacacacttgttgatagatacattcaagtataataggacttagttatgtagctagtacgaagtaaaatgtatttattttagactatataaacgtatatgatttgcttacaataatttcccataaagaaaataaaaaggtttgcaaaaaaatagaaaaagaaaagaacccggtaaaattactaattggagtatattgctttttctttcttttttttgtcggctggagtatattgcttacaatttcatattgaacaaaaattacaagctgtatttttgttcaagtgttttcttttggaattaaagaaaaaaagtgtatatgaataaatcagggacgtgattggccttgttaaaccactgcaactcccgtatttaagtaaacggcgacgccttcaccaataacgccgttacattgaccgttagagacaccgtcgctcttcttcaccactagactctttatgattccttggagatctctcttatacag

SEQ ID NO: 3963 - DNA, 2689 bp, Arabidopsis thaliana landsberg
cttgacgctttttgtatgggttgcttaagatcttggcttctccttcttttccttgaagagggccaagagttaaacaccagaaaccttcacgaccttgaacctaactccgggaatatctcccacagcgtgacccttacgaccaaatccagcaatcaagacctcatcctgcaacaccataaacaagaaatgtatcagcatatgaatgaaactaattcatagtgtgatgattgcatagtcatttcatgtgactaacgttttcctcgatgtagttcaaacaaccatcattggggacaaaggcagcaatcttctttccattcttgataagctgaactctagcacacttacggatagcagagttaggctgcttagcctcaataccgctgcatcatcaaacacaagaatctaatcaacgcccaatgtctatactcaacaaatcaataaaaaaaaaagtaaacttgaatgttatatcagacttacattttctcaaggacaattcctttagcgtgagaagaaccagcaaaaggcttcttccactcatttcccaagtgagacttcttgtactgcttgtcagcccacctctggttaattcggagtctcttcagcttacgcccagctcccataccacgtgtcttactgttaacaaatcatcacaaaataacatttgagaacaacttcactcgataaaccatagttaaaactcagaaaatcaataagaaattcatctaaataataacaagacgatagaagatttatctcgaatacatcagcaaaagtgagcttcaaaacccaagagaccatagatactcatacagcgaattttaaatctccagttatcaaccatactagaactccagagtagctcaaaatttacacaatctattgtggatctatacataaaaaacatttagcaaacatatccagaaatgaagacgcatttgctatagaatcagttccaatcaaaaaccacaatcaaaagtcgaaaacatgtaacaatttccaaccaaacaaaacacagcagactctatagaatccttcataattaatggaaacaacaagtgaatcagataaataaaacgctaaacagagaaatgagataggaacacgaaggatagatctaatagaggagaaacgtaccccatgtttgttgatggaggagaaagatcaacaacaaagagctatttgcaggaagcacaaagatgataagctcttaagcggctgagaaaaccctaaacctagtgaaggcagtgactcttaatatatgcgaagctggttctacctcagcggatttctaatacttggcccattaattaataggcccataaaagtatgggcttttaaaaaattgactataattgtatgttctcaacttctcataattcttttgggcttttaaatgctgaactataaaccgttgatctaatggacggttaagatgacgtacacgtataatctgatgctaattaatactgggaatgaatacttccgccacatcagcataacccgtaatccttacggaaccggctgtaacaggtaaaagggacacacaaagagtgcactgcccgcacgacagtcactggttcagcccgtccccaccaattaaccgtcgataccacgacagaccgacgtggacaaatcagaaccgtttacttcaaaaagacaattttgatccagtggtccatgtttattaatgcgccacgtaaatccgaaaggaagagagagtcaaagaaaagctccagaacctcgtcaatggcggactgcgatttctcaccttactagccagtcaaatcaaggaggcgatggagaatattgaaaaagacgaacatgagaaaaaaagtttagctgaagaataaattgaagattcgaatcaaaccattagtcttgtgttgaagctgtttctacgtcatttggtaagataaacttttgtctcctttcgctttcttaagggaaaaaaaaaaagatgattcgttattccaatttttgtttccgagattttaaaaagaaaaatagggagcttgaatttcacgctatgtaaaagtgtcactcgtagctcatttctctctctgattcttctatataaatgaatgtacaggttttgctgtgaagagttggttcgggtttaagttcggattgggaagatggaggagattagaggagtgcctacgtggcaggaagagttagcgagcctagttgacgccggattacgatacgacggagcaccgatcgatttaacggcggctacaaagagatcgggttttgtgtcggcggatggatccggatccgaaccgaaggagacattgaaagatcaagtgacgggattcatgaaatcgtggggagagatgcttcttgagctcgcgaaaggatgcaaggacattgtgcagcagacggtggtcactgatgactcattcctagtacggaagctccggaaaccggcggctaaagtgtcgaagaagcttagctttctaaacgagttcttgcctgaggatcgtgatcccattcacgcttggcctgtgattttcttcgtcttcctcttagcactcgcaggtaatcaaatcaacacaatgtgttatcttagcttagtatctgaggttgattcattattgtttatatgtagcttaaatagcttagtattgtaggtttgattccttgcattgacatattgaactttgaagtgcagcattaagctttagtc

SEQ ID NO: 3964 - DNA, 1040 bp, Arabidopsis thaliana landsberg
ttgatgagaaattctggttacttggctactctactggtagtattcatacatgggctggaatgaaatattttcctgagaaaattgcaggtattaacagtgttcttatactgctttatactttgcaaaccattggaataaacaagactgttgctcattgggtttggttttgtgaaactgcaggagctgcaatggtggctcccgtgatcaatccatatgagccaagcatggttaaagaagaggtggtaaaaacatgggagcaatggctaacaaagaggaaattcatgtactttttagctcggcggtttccaattcttctacctttcttctaccgtagatcttttctctctggtaacctcgatcagctcaatcagtggatggcattgtcattaggagaaaaggtactaaatctcctccattgtagatcacaaacacaaagagaggaattctctaggagaaggagtcatcatatctgctaactctgttttcatctttcaggataaacttttaatccaagatccaacgttccaagaagtttaccaaaggaacgtggaggaatcagtccgccaaggaatcacaaaaccgtttgtagaagaagcggtgcttcaagtatcgaattggggctttactctttcggaattccgctcacagaagaaatgtgcaaccaacggtgtcctttcttggctcatgtcaatgtacagtgaagctgaatgtgaactaatcggatttcgaaaacccattcacatatggcaggtgagttctgcaccatacaatgcatcagttagtttatttagcaaagttaatcaaaccttgatttctgtttctttaaagggaatggaggatcgagtggctccaccatcaatgagtgactacattagcagaatgattcctgaagcaactgtacataagattccaaacgaaggtcacttctcgttcttctatttctgcgatgagtgccatagacagatcttctatgctttgtttggagaacccaaaggccagcttgaaagagtaaaagaaacaaaggacactctagtggaaac

SEQ ID NO: 3965 - DNA, 542 bp, Arabidopsis thaliana landsberg
aatcctaaatggccttctttttgacgttcctccatgttcatcatcgatcttgctccttctttttcacaaattaaaacgaacaactgctgtcaatagtcgaatgttgttattcatattcaaattggttctcatgtgtgtgtgttcctaacattttatacacaagagacaacaaaacaaaacaaataaaaaacaatggaaattcacctaaaattaatcagtgttccaacatgatgaaatacaattatgagagtgaggaaaaaaccttggaagaacgggattgagatttccaaagaagaacatgttgttgccatgtgatgcagatggaaaccaaaaattgtttgcaaaaaaaaaaaaaggaaacacaaagaaggaggaagcagagatagcgagaagatgattaagaagatggaaagaagtaggaaggattagaaaatcatgttccatagtaatcataacctttagcttttcccatcaattctcaagataatttcaaaagagctaggaactagggatttgattttaagatttagggatttcaaaat

SEQ ID NO: 3966 - DNA, 1315 bp, Arabidopsis thaliana landsberg
gcaggctcaagctgttctccatccaagtcttaacccgttattcgagctgttttggaaaacaaaggtctcacccaaggtacatcacttcttatggagatgcttgagtaacagtatttctgtggctgggaatttacaccaccgtcatctagctagagatggatcatgtcttcgctgtccaccacaggaagactgttaatcatcttctattcaaatgctcttttgctagacttgtttgggctatatctccaatcccagccccgcctgaaagtgagtggtcagattctctataccaaaacatgcacaggatattgaacattaatcagtaccacccacatttgggagatgacggtatggtagctccaaggattctatggagactgtggaagaatcgaaatgacctcgtttttaaggggaaacagtttgatgcaccagatgtaattcggcgggctgtagaggatgttgaggagtggaggcaaagtctgcagcggagttttctaccaaaacacatagagagatctgagcagcaagtgatcaagtggaagcaacccccacatgggtgggttaagtgtaactcagatggagcttggaatgcagaacacagcaagtgtggcatcggctgggtgcttagaaactccgacaagaacgtgctttggatgggtgcaagggctataccaatggctcaatccgccttggttactgaggctgaagctttgcgttgggcggtgttgtcactctctcgactcaattaccgaaaggtaatctttgaatctgactcccaacaattggtgtctattcttgttgataatggtgatatgcctactctggaccctattatacaagacatcaagttcttgcttcagcattttgaggaaacaaagtttgtgttcatgcatcgtggaggcaatggagtggcagataggatagcaaaggaatctctttctcttgagaattatgatcctaagttgtattctatagtgccaaattgggtaaaatcgtttgtggaattagacaagttgtaaaactctgttgtttaatgataattattgttgttgagccaaaaaaaaaaaaaaaacatattcattttcattactttgttatcttttataaaaggaaaaaagatgactaactacacgaaatatagagaattacgctgtcatatatatcaagtataatattgtatattgagctacacgaagtacatgtattgcatgaccatatatatgaactatatgacgtcatgtggttaataccatgaacatacaattccggttaaccgatcagttgacttcggcgttgacaaacaaaaaaagctaac

SEQ ID NO: 3967 - DNA, 2140 bp, Arabidopsis thaliana landsberg
tggggctgagctgccccgtagcacgggttttatacctcttccccttgttcggagggcaaattcgttacaaaacatgatgatggatgaagatgttgagcaggccactctggtttcttacagtgacaagccaaggaccttcccggatatgcgtagtaaaacttacagtccattggttaggacataatacccttctctctcgagcatatctttcttgcatctaaacaccgtcatatttatacaaatatgtattggtgttatatctggttttatttctatttcttttggtatctttataatgagttgttttgtgcagataatccgcattctgagaaatttaaatgttcgtgccctttctgtacttctgcttttgagctttggagggatcttttacatgggagcacgtacttctcccatcattgtgttcgtctttgtagtatgcatcatcagtttcatgttgtcagtatacctgaccaagtgggtattagccaaagatgaaggacctccagaaatggttcaggtaatttcacacaagttttaatttgttctattcgtgattgtgtcttctttgttactcagttgcattttcagttctgtgctatgagcttattcttttctgtttagatatcagatgctatacgtgatggagctgaaggatttttaagaacgcagtatggtactatatccaaaatggcgttcttgctagcttttgtgatcctttgcatatacttgttccgtaacttaaccccccagcaagaggcttctggtttaggaaggtgatcatacatcttctacagaatcttttcttttatcttttgtgttgttataaataaaactcaaatgtataactttgtgcttcaggacaatgtctgcatacattactgttgctgcatttcttttgggtgcactatgttcaggtattgctggatatgttggaatgtgggtgtcagttcgtgctaatgtacgggtttccagtgctgctagacgatccgcaagggaagcattgcaggtttgttttttagtattaataggaattcctgtacacatggccaaatactaagtgatggatttaatgcagatagctgttcgtgctggtggattctcagctctggttgttgttggtatggctgtgattggtattgccatcctgtattctacattttatgtatggttggacgtggattcacctggctcaatgaaggttactgatcgtaagtcatagcttcctgttctctggatatctttccttttatgtttggccattctatagtaaccagctatattctatgcatcagtgcgctgagttcatgtttattttcagagattcaaatttaatcacaaacagtatcttcttataccaagttggtacatatatgggtttgaggaatccgttttgctgaatttcaagaaatggctatttgctaaagaagcaacagcatgggtcgagtcttcatctgtagaaccggaatgcaaacttttttgatgttgttctcaaatgtttaacgtttgcaaacccgaaattgcatttgcatgtactagtgttactttttagcttaatgatttgactttcccatttttcttacagtgcctcttcttcttgtgggatatggttttggtgcatcatttgttgccttatttgctcagttgggtggtggaatatatactaagggagctgatgtcggggcagatctggtcgggaaagttgagcacggtattcctgaggatgaccctcggaaccctgcagttatagctgatttggtattagttctttcatttcacgatcctttgtgtatgattttgtcgggcctggaaccttttgtcatcactgaagcttcactctcatcttcttgcaggttggagacaatgttggggactgcgctgctcgaggtgctgatttatttgaaagtatagctgcagaaatcatcagtgcaatgatacttgggggtacaatggctcagaagtgcaaaattgaaggtttgcgaggcatcttgattttattttaaagagttgtactgttggtatttttagcaataaaattgcaaggctagttatactgtggtcaaactaccagaaagggttttagagttacctttctttttgcttcatgatttttttatttcttactcaactttatacgtgtatc

SEQ ID NO: 3968 - DNA, 2491 bp, Arabidopsis thaliana landsberg
catgtagcgacacgaactcacagtaaagaacaacgtgggaacgttctgacgttgtcatgtgttagaccaaaaaaacaagtcttttataaattgggtgttaaaaaagagcagtatttttcttcaagttaggagaattttgcaacgatgggacaaggtaaagaagttaagacgagaccagatcctcaagttgagattcaggttttattacattactctgctgttctttgttgattatccgagttgtaatctctctgtttcttgatgagctaagtcacttgttgttaatcaggaaagaggagaaatattcttcttttatagaccaaaggttaacaaagaagaagctcacagtgtggacgatgttcaaaggctatacatagtgatgcgtcctgagtctggtgagaatcccaccgaagagaaacaagaccctctttcaggtaaagaaggctccgataaagattccggtgacggagaggcgagtggtagctcctccggcgccaagaaccaaggtgaaggaggacacggcgtcgaggtacgtagaagaagaattaaaaacactacggattgagctcttattacaggattaataatatgggtctttttttttgtagaaagtgaacatcgaaaaacagcttctgctacgattcattgtgatgggtaagaaaagtcttcctgatccgagcaagaagtcgcaacctttttggggtttcgtggaaatggtgacgaccaatgttgaagatgttaaaaatgctctcaaaggaggtaagaatttcgtgaattgtaaaaggatttggtgaattttgtgatatatatttgttttctttgcagaggagtatgagacgaagactcgaggacatagacacaaacctccggcgagacgtgtcggagaaggaatatacagaattctccgacataaacctaatccgacaagaaagcaccacacacatcttgtctacaaactcgaattcccatcggtttcgcagaccagagaacacgagccacaagagtcgctgaacattgagccagaaggatccttcttgatccaaatacgaaatccagagcaaggaggaggaggtaggtcagggtttggtgggctacagagaaagagaaaggcccagtttccggtccatattcaggctcatttaggtcatacccggtttgggccagccgacccacctgatttcctgaattttgaaggatgtgagttgttactgatctctgcttccgacgatatagaggaagagttagggatggagttggagcctgagggtgacggtgaagaatcgacatgcgatcttttgaagactttcggggacgatgttgaagctactccgttgcttcgtggtacatgggagtaatagctgatgctcactagtcactaatattcctagatgatagctactagctagtgtttaaagtatggacggctttaggtggttatagtttgtctttctcgggtaaaatggtgatgtgttctcttggtgtcaagttttgtgtaaatctgtataaccaacctttttgaaaaaatgactcaaaagtttactttaaaatgtaagatgtcactgtgaagtgctcaggatcattgatttaagaccaactacgatactctcttttcagaggagaggaaaaacatataccacttaaccatattgcatgaattcataaacctacctcactcactctatatatgtgcaaaaaggatttgatgtcttttttcagagaaagataggagccatgacaagcgtgatagtcgccaacattttgatgagaacgtgaatcgacggtcctgctgtgtccttgaaagggtctcccacacttgccattttcagaataacgatttctcattagaagacagttcgactaaactttataagtaaaaggaaatgaccaatgagaaaggaactaagaagaagggaagcacaaggaaaatgaaagattgcttacgtatcaccagttactgcagctttgtgggaatcacttcctttgcctcctagagctccagtctcaatgtatttctttgcattgtcccaagcacctcctgctgtatttaagaatagagccattaagataccacatactgtcgcaaacattagcattgcagctactactttagctccaagcaaaggttgtccagtgtagtatcccaagatccggaacacaaaacctgtggacatcaaatagagagcgttggttccttatgtctgtttctttctcgtttcacgggcttaaccaacatttttactgactcaccaactgcaatgggtgatattatagccaaagctcctggttttatcatttccctcaaagctgaagatgcgacaatggcgacacatcgaccataatctggcttctccttgtagtcctgtgacataaagttcaaaaagacacccgatgaaaaaaataaaaataaaagggaacggactccagcggaattacatttaccattatgccaggcctctcaatgaactgtcttcttacttcgttgacaacctca

SEQ ID NO: 3969 - DNA, 620 bp, Arabidopsis thaliana landsberg
tatacagctattgactgatttatgtgcagctcatttgctgcggtcgcttgtttttgttgttatcttgtgagagacggctttggttaagggagagggctcaaaaccaagccctgctccaaatcttttgcagccaaataacataggaaccaaattgtcagttcaaattcatttcacactctttagattagttttggcttactttggatccaagaccagattctgaacctctatgaaggctgagctagctgcgttagaagctatctttcccatctgatatcaaaaaaccaattttttcaacaaagtttgtttaatttattacaagccggctgagtcaaagattgggacgatcaaatttgtttattttttactaaaacattatttggcaaatggtttgatacagttttacaaacgtttaattatgagattactaactttcatttgactgaacatgttttcagtctttcaagtaatgaagaccacatgcatgatcaaaaagaaagaggatgacagacgacctgatttgatggccttatgggctttctgttttctgatatatataagtttgtttcaagttttctacgtccatgggtccttctattttagcccattatgactttgag

SEQ ID NO: 3970 - DNA, 1527 bp, Arabidopsis thaliana landsberg
atatagtgttcaagagatcgagtaaggtacagcaaacttcgcagagtcaagaaaagttggaaaaggagggaatgggcctgtgtttagaggtcatcttgatcacacaagtgttgctgttaaggttttacgccctgatgctgctcaagtaagatcacagtttcacaaataggtgacaaaatcactttctttacaaattttctccatttactctgttttcactaatgtttacttgtattacaagaaaaaggttgttgaatgaaatgatttgtaacttgatgagttttgacgatcaggttgaagtactaagctgcataaggcatccaaacatggtgcttctcttaggagcttgtccagaatacggtattctcgtctacgaatacatggccagaggaagcttagatgatcgtcttttcagacgcggaaacacgccgccgatttcatggcaattgcgtttcagaatcgctgctgagatcgctacgggactcttgtttctccaccagaccaaaccagagccaattgtccacagagacttgaagccaggaaacgttcttctcgaccacaattacgtcagcaagattagcgatgtcgggcttgcaagactcgtccccgcggtagctgaaaacgtgacccagtacagagtaacatcagctgcaggaacgttttgttacatagacccagagtatcaacaaaccggaatgttgggtgtgaaatcagatgtttattcactgggaatcatgcttttgcagcttttgacggcaaaacagccgatgggtttggcttattatgtggaacaagcgatagaagaagggacattgaaagatatgcttgatcctgcagtaccagattggccattagaggaagctttgtctcttgccaagttatcgctacaatgtgctgagttgagaagaaaagataggcctgatcttggtaaagaagtgatgcctgagcttagtagacttagagagattggtgaagagagtcttgattctgtgtattatgctggacaaggacgatcttcgcatcctagtcaagtctcttatacatcggtaagagtttttaatggcaagacattgacatcagattggatgtgatctctctatgatgttaatgtttttgtgggtattacaggaaggtaggagtgctcctttaatatcgaatacaggatcttctatatcaaacccatagttttgaggaatctgcgggtaagatacaactatcttgtttcatctttaagtaccaagtttattgagaaaaacactcatggttaagatttgatttgcaggagataacttgagtagaaagcaagccaagagcaatttatttagaaaaaaatcagttgcttatttgagctgaagaagaaaggtggctatgatttattagagagaagtcggatttgtgtataaaagttttgtattttctgttaaagaaacaatatgtatatatacgaggaaatatgaatttccaatgcacatttctgttgaagaaaaagtgaaattatatattttcttaagaattttaacatttgac

SEQ ID NO: 3971 - DNA, 2204 bp, Arabidopsis thaliana landsberg
gaatgacactaggtggaacaatggctaagaagtgcaaaattgaaggtgcaccatctctctttaaagttacttttggtttttgcaaatatataacttatggtgtgagttcctgactcataccgagaaaattaaatgaactgctaggattatataatctgaaatgcaaacttaggaagagttgcatagagagttcaagctcgtaaattacattctgtatacagaataatctacgctttattgcatgttttggtcactccttgaggatttgagggtacattgttacttgttaggatttaaaaagtcgacataagttgtatagagttattgtttgaagcaccttgtacgaacctgctatgcattgtgtgaaaattgaaggaagactacttttcatgacagcaagctacacttggctgcagtcaaaaaatttcaataacattacccatttctagcagtggttgttagatatgcgctgataaacatcctattaaacctcttgttcatgcttgatacttactcaaatctttctctattatgcagatccatcaggctttatcctttttcctctagttgttcattcttttgacttgattatatcctcaattggtattctatcaatcaagggaacacgtgatgctagtgtgaaatctccggtagaggatccaatggctgtacttcagaaaggatattctctgacaattatattagctgttataacatttggcgcggtaatgttgtcacacataaccattgattgtcttgttcctttcattctttttacaattaattctgctttttatgggctttttggttcagacttttcattagcctacactagccttgttattactgaaatttcgaacaaattctttgctatattcttctgacagcattatttatgtttgtagtcgactcgctggctgctttacactgaacaagctccatctgcatggttcaatttcgccctatgtgggttggttggcatcatcacagcctatatctttgtctggatatccaaatattatacagactataagcacgagcctgttcggacgttggctcttgctagctcgactggtcatgggactaatatcattgctggagtaagcttgggcctggaatcaactgctcttccagttttgactataagtgtagctattatttcctgcgtattggttgggcaatacctcgggtctagtggacgaaaatggtattcccactggaggtctatttggaacagccgttgctacaatgggaatgctaagcactgcagcttatgtccttactatggacatgtttggccccatagctgacaacgctggtgggattgtcgagatgagccagcaggtaagatgtcacatgattggcttgaaaggctcttatgttccatctttattctatgtagaaataataaatgtttcgtgcagccagagagtgtccgtgagatcactgatcttcttgatgctgttgggaacaccactaaagcaacaacgaaagggtttgccattggatctgctgcacttgcatcattccttctctttagtgcgtatatggacgaggtttcagcgtttgctaatgtgtctttcaaagaggtagatttcgttatgcatcgttgctgtattctcgatgttgagacaacttctcatactcatcctcggataaaatcaggttgatattgctatcccagaagtgttcgttggtggattattgggtgccatgcttattttcctctttagtgcttgggcatgcgcggcagttggtcgaactgcacaagaggttgtcaacgaagtaagaaggcaatttattgagaggcctggcataatggtgagcatatttttccttttgagtgcttcaccttttcttgtgtattggcttgtaccgttgttgactagcaaatatcttgttgcaggagtacaaggagaagccagattatagtcgctgtgtcgccatagtcgcatctgcagctttaagagaaatgataaagccaggagctttagctattgcatcacccattgtagttggtaagtcagtaatatctactcgtttttctttacttactgtattgaaagtttgaaaccacaacattgtgaccaaaaacaaacctcttgttctctctttcaggtttggtgtttcgaatcttgggttactacacaggacaacctctgctcggagcaaaagttgtagcttctatgctcatgtttgcaacg

SEQ ID NO: 3972 - DNA, 995 bp, Arabidopsis thaliana landsberg
gagtttgccttgagggcaaacattaatgatcttatacaaactcattaattgaattaattctttgttgaagactatgctaatacttggttgaaactgcaacatttggttttagtgaaatggggatacctaagtttacggtctttgtcaagtttgttggtacacctcgatctaaggactgcattatctttgacatgtgttgttaaccttagcagcatataataaaggatcagttcctccatactgaactagatattaagttacattataagcaagatctgtacaattttaacactttctccacaagggaaagacactctattgcatctccttatactacgagcatgcaaattgaggattcaagattgttgtctctgtaagtaatatctgaatcatgtaattgcctcttcttgtgtgtagattagtttttctttactgaggcactgagatagaagcaccactcatatgttcctgcaaatggttagtaaagaagaaatcagtaggtgagtatagtaatatattcgagtttcgattttcgcttttagtggttctcaccagtttcaaagaactttggctaccagttggagatggtagagggctattgccgactactacagaatgtgatgattcatcagcaagtgttcttaatctatttagctcaggcaaaataactttagcaagatcaggtctatcttttctccttagctctgcacatttaagagctaatttagcaaactcttcagtgtcttccattggccaatcagaaacaactggatcgagtaaatcaaccaaagttcctttctctagtgctctctcgacataatgagttagacccattggtggttttgctgttatcaactgtagaaacataattccaagtgagtaaatgtctgatttcacacccaacattcctgtttgttgatactctgggtcgatataacagaatgtgccagcggttgaagtcatgcggtattgtgtcactgtgtctgcaactgttg

SEQ ID NO: 3973 - DNA, 1220 bp, Arabidopsis thaliana landsberg
  unsure (1)..(1220): unsure at all n locations
ggttcactgaaaatcttagaactgtattggtaccccacctcaatcaagattaatacaagtcatgacatatttaagaaaatactgctcatgtctgaaaatgatcctttgaaaagataacaataactttttgaaactcagtacaatgattatagaatatacacacaagacgaaaatgaatatttttcataaaaaaaaaagagcagaagacttacggtcagtaacattcattgagcctggtgaacccacgcccaaccacacataaaatgtagaatagaggatggcgataccaatcacagccataccaacaacaaccagggctgaaaacccaccagcacgaacggctatctgcattatatctgccacttagtatttggaaacgtgtacatgacatgttaccaaaatagctaaactaaagaagaacctgcaatgcttctctcgcagatcgtctggcagcactggagacccgcacattagcacgaactgacacccacattccaacatatccagcaatacctgagcatagagcccccaaaagaaatgcagcaacagtaatataagcagacatcgccctgcagcaaaatagtaatatggctaagcttcattcacaacaattcaaaagataaaataaatcttgtgaatgtaatcatgtatcagcaccttcctaaaccagcagcctcttgctggggagttaagctacggaatagatatatgcaaagaatcacaaaagctagcaaaatggccatcttggatatagtgctatactgcgttctgaaaaaaccttcagctccatcacgtatagcatctgatatctataagtaagagaattacctcacaaattagaattacaaatttttgatgagaacaaagaaggaaaaatgtcaacatcatgactaacaccacataatctgagtgagcttacctcaaccatctctggaggtccttcatctttcgctaaaacccacttggttagatatattgacaaaaggaagctgatgatgcatactgtgaagacgaacacgatgatgggagaagtacttgcccccatgtaaaagattgctccgaagcagaaaagcagaattatcgaaaggacacggacatttaatttcctaataatccggaatatctgccaaaaaacaactaaactntatacaatntcaaagaaaatgaaaacgagatgctcaagaaactaagatgctaaacgaaatagaaggaaactagtt

SEQ ID NO: 3974 - DNA, 928 bp, Arabidopsis thaliana landsberg
agttttatagaagcttgaaaattcaaagatacaacataggcataattcgaaccactcatgactcatacctgctggctcatctcaacaatcccacctgcattatcagctatgggaccaaacatgtccattgtaagaacataagctgcagtgctcaacattcccattgtagctacagctgttccaaatagacctccagtggggtttcccttttcatctattagtcccgaggtattgcccagccaaaaagcagaaatgatagctacacttataaccaaaacaggaagagccgtggattccagacccaagctgaccccagcaattatattggttccatgaccagtggagctagcaagagccaacgtccgaacaggctcatacttatagtcagtataatatctggatatccagacaaagacataggctgtgataatgccaactaagccacacatgaagaaattcaaccaagcagatggagcttgttctgtgtatagcagccagcgagtcgactacaaaacaggggcaatggtgtcagtgaattccattgaaattacagcactatcaagagcttcacttgcttagatgggcccttatgtgcatgtaaagtcaactatcgataaaactgacaatataacatcaaaaagctactgctcgacaaccacataatgaacaaaaataatcaatgacattaccgcgccaaatgtcaaaacagctaatataatagtcagcgaatatcctttctgaagaacaaccattggatcctctactggagatttcacactagcattgcgagttcctttgatcgatagaataccaattgatgatattaccaagtcaaacgagtgaacaactagaggaaataaaataaaaccagatggatctgcatgatacacgaaaaagttgagtaagaaataaaaaatcatgaagcaaa

SEQ ID NO: 3975 - DNA, 874 bp, Arabidopsis thaliana landsberg
gtgtttggccacattcttcatgtggcttgtagcttagaatagacccccatactcatcatgtttcatgttttgttttgttccattgattcaagaattgttcttggacttccagatgattggatcaagtataatagagaacatatacttataagtcttttgatacgaactttggacttacagtctgtaacttacagatagaagatcaagtccagcctcatcaagaatctgctattttgatcctcattgtcttgggatccatcaagagattgtgaggcttaaaatctctgttatgatacccaaatcattctctcttgaaacagggtaaaaccagagaacaatctacttgactacttgtgactgtggccatggcagaaagctattcctttgtttagtttggtacacctgagaaaaatttcagattgttacatttggtttaatagactattacatatcagtcaagtgagtacaaatgatgagagaaaagagtggtgacaaaaagctctaattggtggattttgtgataaatttctttacatctgtgtccatgtatctcaaacctaatcgtactctaagatcaattaatgtctcatcacgtcatatttgagattttgatgtataaccttccacatcagggctaaagtgcatgctagactccaagatatactatatgtaatatataaatttgtagctagtgaaactgtggaaaaacaaaaattatagtactgaaacattttagtttatgaaacgattctttagaaaatagatgacaacaacagaagtttttttaaaatcaacgttattgttctttaccatacggtaaacacaatgcgacatattcacatcttcagcaagaaccacaaagaacattgcacgt

SEQ ID NO: 3976 - DNA, 1447 bp, Arabidopsis thaliana landsberg
  unsure (1)..(1447): unsure at all n locations
ttttctcaataccacatatgtcaaagcttttttcttgttcagtttatttgtactcagtgcgaaaaaaattgagcaggggtcaagacgtaccacgaggataacctaaagcgtagacagtttcaccnnnnnnnnnnnnnnnnnnnngctccaaaggatttatatcctcccaaaactcttcactatcaatacctaagatagctaagtcacatccatacctaaacgctttaacttcagctttgtatttagtgggtgaaccatgttttctcacttgcaggtataagtgatcacccacaacatgagcgtttgtaagaatcctcctcccggagattgcaaatcctaacatagatattccaaagccgaacaataccatacgattttttaaaatttggaagtctaataaagaaatcacacgagagagagagaaagagagatgtttatgaataccagagcttgagtattctttctcagttgtttgccaaggttgaacaacatttggctctctagaaaaggagaagatcttcaccaccgcgtctcgagccacatcaacatcgctcacagaagaacaacaacgagatatcaaagaagcattaaaagacgaacgacgacgaagaagggaaggagaatagaaaaatcgatgaatcggagtgctcgtggagttgctgaacctagccacaatatgatgaacagaccggaacaacatgttcttgttaagtactatgtttactcgtattaacgatacataaatatatcatttacttgatactcatattttcgatccataataattacactacaaatctttttaaagattttaatggaaattgttaacattttaatataaggcttttatataatcaaatgaaactatagattctggtagcacataattaatctgttaagctctctcttttttttttactatgggaaaaaggtccaatgggcttaggcccaattatttaaacagaaaagattctaactttctaatggaaaataaaatttgcgatcaagcaactactctctctctctctctttcttctgccatcgccaaaaacttgtcttttgcttcttatttggtaagcttgcatttttctctcacccaatttctaatttcatgcttattagatcgttaattgaatctgcatcccgcagtgatcattctttgatttacgaatttgtttttttgttgtgattgataatcttgttgtcgatttttgtcaattttatggtttaatttacaaagtgtatattgtgattgaatcgactgggagggtattgagagttgtttgtttgaatctaacaaattcaagtgcaaatctattttatagccacttatcttctgctagtagatctacttgagttttaagagatgtgacttctttaataccattgtgaatttcatggctaactgataaaaaggtctcagctctgatcttttgattcaacggct

SEQ ID NO: 3977 - DNA, 928 bp, Arabidopsis thaliana landsberg
  unsure (1)..(928): unsure at all n locations
gaaaacttaacccttaacctagtaaacattagattcaaccttgtttgaagtttttagcacggatccaaaccggagaaacatcccaaggaatctgattctcaattgtttgtctagacataagatgcgttgacggtagagaagaaacgatacgaacatcagatctcagcgttttcttgaaatgctctacatcgaaaagatctgagaattcactgagaaaacacaacaagagatcatcagtaactcgaatcataaacccagaaaagagagatgatcaagttgtgtttttgttacctttcgtctccccagactcgattcacttgcaaaacaggaacaacaagagcagcttcaagaatcatagcgattacaacagcatcaacgatttgatttcgttgttgattaagtcctccagagacaacaacaacaaggaatcgtttcttctctttagaaaccctagctgatttcttcctgtaatccaaactaaaatccaaacaaggcttgtatccttcgccattgggttgtttccaaaactctttctcttcctccgtcatattcccggaatgtcctcctctcgccggtaacggaaacaatgtggaagctccggagacagcgagggaggttaagatctgacggtggtcgacgtcggagatgaagaatttgagagacgaagtggaagatgtggagacgcaagttgacgatccagggtctaaagaaaatgtgagaaacgaaattcccgagaaaacgagagaaagagagatgagaagaaggaaaaactgtggaggtgggcatcgagtttggtgatggtggtttaggtatcggggacttgatttcttcacgggagtgaagaanaggagagagagatggcagatggagatggcgatgcgaagtaaagatggtttttgatagtctcatcgattcgcattgagcagct

SEQ ID NO: 3978 - DNA, 1656 bp, Arabidopsis thaliana landsberg
aggcatacgaaatgaaactccaattcacattcgatgcagtggtagtaagaatcgagagagctcactacagctctcaagcatatttggcaacaaacttttcttccaaaatgttctttagcattcgaagatacataaaacaatttatgctcatgagattcatgcatcagacagcgcaaaaacgaatctgcacacctcatgtgaatgtaaaaaccgcattctaggcagccaaaggggacactgtcaatcttctccctacaggcaccgcaaaatgttcgaccaccacttcgtatgtaatcaaggcgtctgagagggtgttccagatgcacgggatgtcgaatctctttcggaagatcgagacagcgctcgtggagaaacgagtaacagtaaacacaaccgtaacatatagaagagggagaaagagggagctcacaaagcaggcaagagcctctagcatcttgtcctggtttacaccttcgaagcaaatgttcatgactgtaatgaagcatttctctaacgtcccaaccagtgaaaacgttcttcagtagtgcacaaccgagatcaagatagatctcacattctttacattcatagaatgagcaagaagacatgttcccacaacaagagcagacaatgtaaccaggttttcgatcatattggaatagacaaaactcaagaggatgttgtgagtgaaaaccatgggaaaccttttgcggcagcttggagcaagtcttacatatatcaaaattgcaaggcttacatgcgtattcaacaacttggtcttggaagcaaatgttgcagatgccttcagctacaatctccggcgaggtcaaagggcatgagtgggagaaatgctcgagtttccccatggggaagaagcaagattggaatcttgatctaagagtaccattagataacacagtaatcttgatcaaagaaccttcatgattcaatatcccaaaagcataactaattgtgaggtgagagagagagagagtaataaagtagtggctcaataattgtttctcaacgtggtgtggttggaaaatttaatattttttatttcgtttactgaccatgcttaattggattctattgagcccattttttttttttttggtatcattatggtaattgaagtaatactgatacttaaaaattgttattgaatatgaaacttaaaagttgatgaagagtcttctcggtgtgaagtacctttcactagacagttctttattcatatgcatgttcgataacatatcaagaagcataaatccaacagatgataagggtcaaagacgacttcttttggctaacttacgacacgtgaccaacaagataggtctagacttctgaagaactgccacgtcttggcaaggtggcaggttttaagaccatggcttgagggcataaataagttttgtggacaaaaggggaaaatgagttaagaaggatcggtatcatcaacgatgtcgggagcacaaggagcagagccgatggattcaagaacggcgacaacgtacgagtcagtggaaggaggacagaacaagacgaagcttgatataaggtcaaaggaagacgaacgtgggattcaagttgacaagcttcaagacaaggtctctgatgctgctggtcttggcggacctgtctttggtgctg

SEQ ID NO: 3979 - DNA, 1080 bp, Arabidopsis thaliana landsberg
taaagggaggcagaaccaaattaagaggaatggtcactggcttgaaccacatgcatcatcatctgttctcactacaagaagaaaatgagttggttctgaggcataacatagtcggacggaccttgtggttaaattcagaatgggaggcagaacactacctaaaaggtcaatgagatcacgctcaaggtgcataagatagatttctttctgttgtttctcttctgttgtttccctacggtcatcctgtacgaatcgggaaaaaaattgatgaaattcgaatattatttttgataaaaaaaatgagagtcggttaactctttaccttagacattatcctttcagtgggaaaattcctatcgcaaggatagcatttgtaagatatacgatccatgtaattgtcacggacagaccatttttccctgtgagaagtgtatacttgtgtgagagtatgcacatgccgttggttcctcacattagctggaaacccaatacactctacatgggcgttgaacatacagtcaatacatccgtagaacgacacaccacatggtctagagcacacaccgcaagctcgagtcaccctcgaatcattgttccaaaagttatagaaatagtgactatgagacttgatctttcttggtactatcactgctttgatgcattcaatatggaaattgatttcgcagatggtacaatgatagccatattttgttatattcagttggcaggccgtgcacttggatccacttttaagtgaaattgctagcatgtgatcaacatgaagtggatgaccaactagaattcgcctcccaacttggatacacatagggtgatatatatctttacacgtcacacatgaaaaagcctttccacaaaacttctcatcacaaatagaacaagtgataggatatgaccttgaaacgataacttgaaacaagctatgtttgtcttgtatgcaaagtcctaaccatgttccaatgattttctgacccctttgtaatgcaccatgcatttttttatctttcaaagcgcagttgatgtcgatgatgaaattgcatatacgacagaagagattgaacc

SEQ ID NO: 3980 - DNA, 906 bp, Arabidopsis thaliana landsberg
  unsure (1)..(906): unsure at all n locations
tcacatgggtcagaaaatcattggggcctgggtaggactttgcatacaaaacaaacatagcttgttttaaattatcgtctcaagatcaagtcatatcaattgttctatttgtgatgagaagttgtgtggaaaagctttatcatgtgtgacgtgtgaagatatatgtcaccctctgtgtatccaagttgggaggagaatactagttggtcatccacttcattctgatcacatgctagcaatttcacttgaaagtggatccaagtgcactgcctgccaattgcagattacaacaaagtatggctatcattgttccatttgcaaaatcaatttccatattgattgcatcaaagaagtgatatcacaaaggaagatcaagtctcatagtcactatctctataacttttggaacaatgatttgagggtgactcgagcttgcagtgtctgcactagaccatgcggtgtgtcgttatacggatgtattgactgtatgttcagcgcccacgcagaatgtattgggtttccagctaatgtgaagagccaaaggcatcaacatacactcacacaaatagacatttctagctggagaaagtgttctctctgtaaatcatccacctggggtacattatatgcatgccatcactgctttttcctatttgacaccaaatgtataatgtctgcggtaaagagttaactgattttgttgaaagtgaactatttattcttcttttatgtttttcaacttcatcatttaatttttccggattcatacaggatgaccgtgaggaagcaacagaagaggaagaacttcaagacaactatcaccatgtaccttgagcgtgatatccgtggccattagaaaataaaaagagcctttatgaggttntgcctacttccctccctgngttt

SEQ ID NO: 3981 - DNA, 546 bp, Arabidopsis thaliana landsberg
  unsure (1)..(546): unsure at all n locations
ggtccaaggtttttcgacgcttacttgtatggttagaaactgtggnnnnnnnnnnnnnnnnnnnnnnnnnnnnnngaattgtcggaaagctcttcagtgtttgaaccagtgtagtcctttggatcaggtgtgtagctccagatgcattgcttcttatgagagtccttactttgaagcattctctctttttgtactacagaaacaaaactatttagatttggatgcaaagatccctgtgaagccttatgtgcctcccatgacgagttttcgagggaaggagttgtgtcatgagacagcggaagacttgtttgttggctggttaggggacttggattggagctggcgtgttgtggctggacaaaacccggcttatgatcagtttccatgtcagtaccagcttttttacagagggaaagggaagtcgtcgttttggtatgagcccgtgtttcaggtcaggacgctagagagaagttggtgtggagaaggagaagatactcggttaagcgaggaaagatccctgcaacatttcgtttcaatgttttggac

SEQ ID NO: 3982 - DNA, 5729 bp, Arabidopsis thaliana landsberg
gagtcgtgacaaatctgaaccgaatctaatgtaacttcttgtgttagtattgttcctgttagggatcaaaacaatgaatcctcgtcaatgatcatctattattgcacgagcaacaaaacactttcccaattcgaaaatgaaactaaaatcactcatcctcagaattctgtgatatttacctgggaacgagctgaagaagatgaaacagagtaggaaaccgcgaaaatcccaagaagctgacggaatttggattgacatcgcgattctctctcgaatcgctcgattaaatccgatcaatgtataattagggatttcgattgacaggagaagctaagttgaaaacgatgcagatcaggaggtgctgttggatctcgtcgagcttttggctatggagttggagaaatgcgtattgattcgtataccaggaggaagaaaggaacaaaccgatcctcttgtgttgaccgctttggttttcttatttatattctctaatttatactatgtcaactattcgaaagattttatttaatttgccaaacagaagtaatattaaaattttaaacaaaaatattttgaatttttatacataaatacattatgattttataatgataatgaaatatttaatcgtttaatatagatgtctaaaaatagatgtctaaaatttacaacaacaaaaaaaaactaaaaaaaaaatatgtaatatcagtttagaaatctcttttgagaaaaaaagtttctagagatatataataagaaattagaagagaacacaaattacccaagcatatttctaaataattcctttatataacttaaaagttatttgtacaaattatataaaatggaaaatggtttaatgttatctttataatttatgcatgattattcattttagtttgttacttgtcactcaagttaactattgcccatttttcttgatttgaaggtaaattttgattactgactgtctgtcgatatgggtgggcataaatacatggtatttgtcccgtatccgttacttatcctgtattcgacttggaaaaacaagtactcgtctttgtcaagacaagtaataagtaatatagttttgatacttgcaagatttggttatttgttttgcatagacaatgctttgtttactttcctcaaaatcatatacataccaaaaagaaaagttatatgttatatgtttattttcacaaacaaaaataaaaaccattatttcattattttattctaaaatgatgattgatgaagactaattggcatgatcatcttcgttggaagttgagtttgcccacgaagaatgcaaacatagaagctaaggcaatgggaaaagcgatttgaacaaccgcggtaaccgccaaaaggtcatgatgaaatccaaaatagtctttcaagaatcttgcaaccgtcgtggattgtccaaagacattgatctcttcatgaatatcgccgtattgggacgagataaacccgttgagtgtccaagacgttggtgttagataatataaccaaatccaccaccctggtacttgctgcaattttcacaaaccaaaagaatacattacaaaacattttcttcttggtaaagattcttgttcaagaaactaaaggatgggtgatcttaccgtttgggggatcaaaaaccccgaaaaaaggttgaaaccaacataaaagagcgattgaagaatcgcggcaaccatgaagtttggcgtgatggagacgaggaacatcgcaaggtagttgaaagtgagtagtgagcaaaacatagagtagagtgaccaaaagactttgtaggctgaaggatagaaaccgatcattggatatgttacgatcacaaactcggcagcttgtatgaatatataaggtatctcagtcaccacttgacccaatgcataagcagtcgctgagtacatccctgcgaatctttcccggtacataacatttctctctgtttcgaaatattgaagagctgatgcacaattgtttatccctaagaagagtaccaaaccgtagatcgctccaaatactgtgaacatactctgttgagtatctctacaaatgacaaaacacaactcaaaatgttagcaaactgggatctaaagtgtcatataagaggtatgttcactctccacttacagattttggccttgtttccagaaaagtgcgccgaagatcaaagaagagactaaagtgtgcatcatacgcattaggttataagaagggcttctccaataagacaagttcattttccatagaatagatttgaattgtccccaccagctttgtgcaaaggttctcttaaactgtatatcacttgatcctgaatctggctggctcaactgtttcacaagctctgagtttcgcctataacaatcacacatgttttcattacaaccacattcttagaacaataacagttattaatgcatagtttaaaagcttttactcacttgtaaagagcagagtcatggtagatttttgcgaaatcgacaccaagttcaatttctaccgactgtgaactaacatcaagcatccatgttgctggattgtggttgtcttttattttaggaatttcaggaacactctgtttttcaatccaataaataaaagaagttaacatatctttgtaaaaacaatcatagactaaaagtaaaatttatgcaaatttacctcaaaatactcgataatgtgacgtgaatgttggcctaatggtcctgtgtagatcatgcgaccacctcttttaagaagcaccagctgcaaattcaagtttggacttggtttataagataaaacagtttggggtcaaaatataacaattcagtttattgagccaattatgcaatttacctcgtcgaaggcttcaaaaatgtcgatactaggctgatgaatagtacagacgatggttcgtccagtatcagcgacgttcttcacagctctcataacaatggcagctgctcttgcgtctagccccgtcgttggctcatccataaatataatcgacggattcgccaccaactccaccgcaatcgtcaatctcttcctttgctccgtcgataatccactaactccggtgactcccaccaatgaatctttaatctcatctaattcgatcgtctcaagcacttgcttcacgaatttctgtacaattttcaacgtttcgttacttaagcttttgatttcgagtaatggaagagaagagaagagagaaaacagaggtttacggtttttgttgtggcatcgatctcaggagctagacgaagccaagccgagtagattacggattcttctacagtgatgtttggtgagtgaatatctgtttgttcacagtagcctgagactctagcgaatgtttcttggactttagggaagccactgattctaatgtctccttcgatgtatccgcttgttttccttccggctagaaggtcgagaagagtggtttttccagctccactcactcccattagtgccgttaggattccgggacggaaagctcctgtgatatctgagagaagttgtagtttcttctgatcatatccttggtctctcatctcctgagatcatcatcattggaatattaaagaataagtgagagccgtggcgatagtcttgagatatggtttatagtttgagttatgatagctttaccactggcatgtcaacgaaatagttcaagtcttgaaatgttacagtgagaggcttgaatggtaagaccattttgtctgtgtcagcagaaagtgttagtgggagaaaaaaaatagagatgtgagaagagagtcaacaaagttttcaccttcttcttcggtctttacaggggagtctgtggtctttttcctgacagaagaatcttctgttgacttttctgttccttgcagctcagagagtttgtcttgcgaaatcatggctcgagatgatgtgggtgctgtgatttggtaaaggctgtctaagtatgtggcgactgtgttttgaaagaatatacatttacttttagtagatgatgatggatgtacttacatttcaagaacgttagagccagagtgaaaatgatgttgaagagcacagtgaaacccaacaaggcacataatgatacccagtacatgtaaccgttgtagtccattccacgggtttggagtatggttcgtcctaaggtaaaattattgggttgcatctacatgtgtaaccagaaaaattctgagaagccaaataaagaagaaggttgggtgattaagagagaagaggacggttcgaaactaagagagatcacctgattccaccttggagcaagaaactcgtttactgataacccaatctcaccgtaactcaaaggatttgcccagaaaccccacttgagccatgctggcatagaagctgcagcaaacacagaaccttagagtcatgcttgaatggtacaacttgtgaggtaagatttagcacagtaatggggtgaaatcttacgtggtggaatgacgaaaccggcaaagacaaatgtgaataatataccaaaactgccagctgtgattgaagcaactactgtctggaagattgcagctagacaccggaacatggatatcgaggtgaagtgaatagcaaagagtagaatgaactgcttgaagaacctggaacattaaacttcattattttactcttgactgagcatttccagacttgaatgtgaaccaagcaacagaggggaaagctcacctggatgcttcaggggtgtatccaatgacatagtatgagaggcaggtccaaacgagagattcaaagaacgagagagggacctttaacactgttgcagggattgcatacgcccatgcaggatagaaacacaactgcttctgcttataaaacacggctagacgttgagccgtcatagacaactctgggaatccgtcaacaagaagtataatgagggcgaaaaagagggcactcatgtaagaatttccatgaatgatatcaatacccatccgtgttcggataaacactgtcatagtgatgaatgcggccataacaagctgcgcacataaagctagaaagctcaggaatactatcgacatctaaagaagacaaggagaaaatctgtggaatggaaactcttattgtacctgagcagtcttgaaaatatagacgaaatagtttctcttcatgagaagatactctcttgatatgcatgctatgaacagctcccagtttggaagagaatacacactgaaggacaaagcatccttatggcttttggatctatcatatggctttgacagagtgtcttcgatctttttcccaatactcaagtccttgaacttcttcgacaacatttctaccgagacaaaactgtaaggtaaatcctcgtgccaccagtattgtgcttgatcttttttggatataaccttcaaagcagaacaagagaaggtcaacaactgatgacttcaaaagcacagaagtttcatcttagggaacaaagctttggttttttacctcctggagaaagtctgcaacacccttcctttcagggcatcggaatccacaatcctcaaagaagttaaggacttcaccgcgtggaccatgatacacgattcttcctttggccatcagcataatgtcatcaaagaggtcataggattctggggcggggttgaagaagcgaaacaagtacagtagcgcttgatatgtgagcaaactgctgaagagatttgacaatctgaaaagctgtggagctgtct

SEQ ID NO: 3983 - DNA, 425 bp, Arabidopsis thaliana landsberg
gcaaagcccaccactggtcaatcccatacttattcaccgtattataaaacaacaaaggctggggcacatggcgtgctatgatcaaactcacactcaaaccatcactattaatacaacaagaatatcgatctctatatactacacgactctctttaccacttctttcacacattacacttacatccactcaacatattaacacttgctagccacacattactctaataaaaaactctaactcttacctaactcgtccaccacctgcctacccaacaaccaacataccataacatcaatccacttaacccattcttagctaatcctaacctccacaaacatagactcactgtatacccatttcatgccagactaatacgttactgcaatactatgcccactaggctacctaactgggccgatattct

SEQ ID NO: 3984 - DNA, 3544 bp, Arabidopsis thaliana landsberg
  unsure (1)..(3544): unsure at all n locations
gaacggagacagtggattcatacgcttcatcaggagctggaacatctactgtcctttcagaatagtgtcggggaccttcttgctatatctaagattgtcactagtacacctgcaagtaatgtgtctcgccccaagagttttggaatgtcacgatgctctactggccctggaaaaagggtgctccccttcacagcaaccaaaccagagccagtcaccacttccactatgcttcggatgaagcaatgtgagagcctccttaaacgattgatgtcgcagcagcattgttggctctttaatacccctgtggacgtcgtcaagctcaacattcctgattatttcaccattatcaaacatcctatggatttaggaactgttaaaagcaagttaacttccggcacgtattcaagcccttcagagttttctgctgatgtccgtcttactttccgcaatgctatgacttataacccgtcagataataatgtgtatcgcttcgctgatactctcagcaagttttttgaagtgagatggaaaactatcgagaagaagtcatccggaaccaaatctgaaccaagtaacttggctactcttgctcacaaagatattgcgatacctgagcctgtggctaagaagagaaagatgaatgctgtgaaacgtaacagcctcttagagcctgctaagcgggttatgacagatgaggatagagtaaagcttggcagagatttggggtccttgacagaattccctgtacagataataaatttcctgagagatcacagctccaaggaagagagatctggagatgatgagatagagattgacatcaatgatctcagtcatgatgccttgttccagttgcgggatctctttgatgagtttctgcgagaaaatcaaaagaaagattcaaacggtgaaccctgtgtgttagaggtaatcacctttctatatctcattcttgatccatttgttaacatgactgataaacagcgaaaactttcttgatgtagcttttacatgggtcagggccaggaaattcattgacgcaacactgtgatggttagcatacactggttttgttgtttgagctaattcgcatgtcctactctatgattaagctgtcatttcctcctcgttacttgcagggagtgaattggaggacgaggatgttgacattggtaattatgagcaccctatatctcacatctcaactgtcagaacagaaaaaggtatggcgttagagaactacagtggtttgtttaatcttgctacattgtatttgtctttttctctatggagcttttgcagacgtttgatgtttgcagttattatatgtacttaaccctcggaaccattttacttccctcttgtcagaagtggccgtccatctagaatactcaatgttacttctgtagtttttttggagtgaaacttactgaccttactgatagcaactcatattacacacctagtatgatagtgatagacctgttacattttctgcttgttttactcccaggtcgctgtttgctattttctatagtgatcatattatctctaatcagtgattactcctcttttggtgcaaaagatgttaagttttgttgatattaattaataaaccttggttttcttattccctttctaaaagcagattccgtcggtggattgaatcagatggaagatgcatccagagggaagctaagtcttattgagggggcagatggtcatcaagatggtaagctcagaagtgtagcagaaaaatatctgtgctctaatatctgagggtggcatctcactcttgacccattaataatttaggaaatagtgctccaaaagagaaggaactacctccagaaaagcgttacagggctgctctattgaaaaatcgatttgcggatataatcttgaaggctcaagagataactcttaatcaggttagctgtgtttgtggaggtgtgagctgttatatctggttagccctccctctttgactttcaaaattatatttgtgagatcagaatgagaaacgagtcccagagacactgcaacgtgagaaggaagaactggcatctgcaaagaagaaaggtattcttgacttgctagtttcgattttctgattgatgatatatccaagtagtatatacgtacnataaactgtccttcttattgtnttgtgctccagaaaaagcacggttccaagccgaagccaaggaagctgaagaagctcgtagaaaagctgaggcacaagaggctaagaggaaactggaacttganaaagaagcagcccggcaggcattgcttgaggtaaatcaaaatagctgccttgtaccagtttggttttataaactgcaatacatgtatattgatcattgccatgactgaatggtacaccagatggagaagtcggttgaaataaatgagaacacaaggtttctcaaggacctagaactgctcaaaacggttaacacggaccagttacgaaatctaagagatgttggctctgagtctgatgggttggctgtatttgggtttggaggaagtaatcctctagagcagctggggctatttatgaaacatgaggaggatgaagatgaatccgacatgcttgcgtttccagatcccggcaatgaagtagaagagggtgaaatcgactgagattcatgagtgtgttgtgtcttggataacagcagtcaagtgtacatgagttattgtaaaaaaatgatagttagattgatatttaaccaatgcgatggcattttatccgagtaaacaatcaataacactttgtgtagtgagtaaaattttggttaattcaataaaccaatgaccgacagcaccgagagagagagggagcatgtctcagagttaattctatagatttacactcgagtttggtaatagagcttctagactctagtaccagcgaaattgttgcgtccaaccaatttatgttacctacaaggcaatcgtcagtgtttaggtaagttgcatcttgaattaggtagagtgcccttttgaatattatagattagtttggccagtcccccaataggtgctatgatcatcagcacaagcccaaaaatgatgcaaaactgctccaaaaaaaaagatttaacttagctgtaagtgtcatatttagcttttgatctgaggactacaaacatcttacccagttcatacaccatgagagactaaatctctttggtttctttaggatcagccacatgatgcatgggatctgaaagataacatatcattatgtttgttagagttattaacatgttgattgaagtttgatgatatcaagagcagtttaagagtagagtattcgcgcttacaaagtatgtggtcggggcgaacacaaatcccccaaaaaatgacagcaatgcgctgtaatacggtaaaccgaccgctattcccatcgtggcggctgcgatatagaggtaagttaatcaatcatcaaaatgctacccctctgaaaagaatgtgaatttagtttctatgaattgcaaaaatcacagagacttacccacaaaagtccatcgga

SEQ ID NO: 3985 - DNA, 866 bp, Arabidopsis thaliana landsberg
taaaacattttggcagatgacctgatagttggttcaaccaaagctctgttcatggatgaaataacaaacggcttagacagttccacagcgtttcatattatcaagtctcttcagcaagtagctcacattaccaacgcaactgtgtttgtttcccttctacaacctgctccagaatcatatgacctctttgatgatattgtgctgatggctgaaggaaaaattgtgtaccacggtccacgcgacgatgtcttgaaattcttcgaagaatgtggttttcaatgcccagaaaggaaaggtgttgcagacttcctccaggaggtaattaaaaagctaaaaactctgtttcttgacattgaacgttatttgatcccatggtcctgatcttgttttgctttgtaggttatttctaagaaggaccaaggacagtactggctgcaccagaacttacctcacagctttgtctcagtagacactttgtcgaagagattcaaagacttagagattgggagaaagattgaggaagctctctctaagccatatgatatatcaaaaactcacaaggatgctctttccttcaatgtttattctcttccaaagtgggaactattcagagcatgcatctcaagagagtttcttctcatgaagagaaactatttcgtctaccttttcaagacgtttcaggtacattgttcttcctatttgcagatatctatttcttttggtctagtgttgatactaaagaatcttatattgctcagcttgttttagccgcaatcatcacaatgacagtgtttattcgaacaaggatggacatagatatcattcatggaaattcttacatgagttgtctcttttttgcaactgcc

SEQ ID NO: 3986 - DNA, 1703 bp, Arabidopsis thaliana landsberg
ccagaagaaaaaaaacattttataatatgaggtcgaaatataacattttataatggtgaaaccttcagaagatgaaaaattcaaaataaaaacctatggaacagtagtggataacgtttggtccaaaaaaaaatcaaattgttgaatgaatgaataaatctacaccacaaattcgcagaaaaataaaaataaaaaggtgtatatcataaattaattggagccagcgtagactatatagtatttgttagtatgcaaggtttgctttatcatttatgggtgtgtcattcattcatgtgtgtgaacgcagacatagtggattagaattttgtttgacttgagttaaattttcaaattctggtttaccaaaagtatgaataatcaactaacgtataccaaacacacatccataaattaattaaattatatgattttcaatcgacaacttacatcaacaattaaaaaataaaatcaagaagaacacaattacatatatgattatccggttcaaccaatcattgcacaactttaaccggatattgatcaatcgaaccagcccaagcattaccggtcatctcctccgtcgaaaccggtcgtaacgctttccaaaccgcactattacacttgaaacccgatccaaacgcaatctgccaaagtcggtcaccagctttaacccgacccttagcttcggtataagccatctcataccaaagcgagctactcgaagtgttaccaaatctgtgcaaagtcattctagaaggttccatgtgccaatctttgagatcaagattcttctgcacttcgtctagaaccgctctacctcctgcgtgaatacagaaatgctcgaaagctagcttgaaatccggaatatacggtttaacttttaacttgaacatcttccttttgaccaaggaaatcaagaacatcaactgctctgacaatggaagaaccatcggtcctaaagtcgtgatgtttgttttcagagcgtctccggcgacagacatgagctctctacctaaagagacaccgattgttcctctctcgtcttccttctggtacacgcaattgtagttcttgtcgtctgatcctttatgtgttcgaacgacgttgaccagcgagtactttgacttcttccggtcttgacggcggttagagaggagaatcgcagctccgcccattcggaagatgcagttgcagaggagcattgaccggtcatttccgaagtaccagtttagggttatgttttccgtgcttaccacgacagcgtaagaattagggtttgctttgaggagattgttagcgagatcgattgagattaatccggcggagcaacccattcctccgaggttgtaacttttgatgtcttctctcatcttgtaatggttcacgatcatcgctgatagagacggcgtcggattgaataagctgcagtttactatcaagattccgacttcggccggtttaattccggttttctcgaagagggaatctaaggctccaaacataacggcttcagcttcggcacgtgcctctgacatatttagcttcgggggcgttgaagttatgccacgtggcagatacgtctcgtctaccaaaccggcccggttcgagattctttgctggaactgaaccgtgtcatcggtgaatgatccattttcctcagtcatcgtcaagaacgaatctactgatattttacgctcgtcttc

SEQ ID NO: 3987 - DNA, 8803 bp, Arabidopsis thaliana landsberg
actatcccaccggacaccattgtatgaactggatggataaggagctttgtgttcatcttgatatctcgaacctgcgaggagacgatcatatcagacttcccattcccgcatcattacattagaaagcatatatatatatatatatataattaacacacgcatgactgtaaaaggcctcaccataagaagaagatggtggatatctccaattatctctattctcgaatggtgcatgcctcattctctcatggttatcatgaaaatttctttcatcacaattcggcacataatgagatctgtgggagtacgatggagcgtccctatgcgacttcaaaacgtggcccggctctctaaatgagaattgatgctgtggtggcggtggagggggaggaggatgtggatgaggatgagagggataaggcctatgctggaaattagaaccatctgcctgtggaatactattcgtaagttgtacaccagaaatataagacgactccggaccttgataatgcattgtgcttccagacagtggcgggttcatcctaagaggaccagcctgttgatctccctgcatatttaccaataacaataggataagtgaccatatcaagatatatcatcatctttcttgtaaaacgattttacaacaaacaaacgtacatgcacgttgcgatatcctccattttcaaacccattcaagtaggaatcaggcatggcacactccccctgctgtgaagggggagctggtggcggtggtggcgaggaagatggcagtggtggagatgacaaggacatatgctgatgtgaagtgccaaagacgggccgatgctgctgtccaagctgacaattggaatcctttgttttatcagcttgatcagtgtgtgtgcagttttcagttccccaaggcggagccacatcttccatttcaagctcaccatcaacatcttccaatataagcgtatgcctttcagccgtggatgacgagacattttcttcaaggattctggactcatgttcaggggtgacagactcgaaatcccctccatccgagtcactgcctccctccgagtcacaccctccctccgagtcactccctccctcctcatccttaagcaatgcgggcatgcaaaatccagggagctggagagttgagttactgataagtaaagatgaattagttttaacgaatctagagacaggggtacatatatagattaaataaaaaacgaaaaatctaaccttccatattcatccaccagcatatcctccatatctctcacaggatcatccaacgacctttctgttcgagctgagcgccgagaatagaggcaagcaggaactatactatgtgaatcaagttctcttatatggtgacgaacaatagattcaggcaggatccgtctttcaagccaaagcttcaaaacctataaatagcagagaggttgagaaacaataacgatccgaaagagctagcaaatattattgcatacctttaagcactgtttccgattttcttgtgtggtagctccagcaggtacagcagccgccaatagacgaggtaaaattacttgaatggctgaaagataaacacaaccagtatcacctgaaaaatagggtagtattcaaggtcaattccgcatttagaactttgctgatgcggcttatcaaaactcattgcacatacgacatacctttcagacctttggagcactgagcgatagaatccacaaggaaaaataagtccaccctcctctttaaatttgactcactctccaaagtatgagccaaaatctccatagcctagttcaggaggttcatcaagacttattaacaacgaatactgcaaacgagaatactctcacaaaacacactaaaatatgcaaaagtcatcccttcttcatcaaccaggtaatccaaaaatactcaaataatctgttgcccaacccttccaagaagtggtggctgtcaacagtatcctacgaagcacatgaaacaatagcatgattcaccttaatactatgtttgatttatcgaaattattatgcagcctcttctatcccaaagatacgtactattattctatttacatggcctactatagaaaatgttgcttcaaaaacacagatgcaacatatctaggtactatattaacaatacgtcagtaatgaggacaacaaatttgaaacccgcaaaagctgacccaccctctatatgacttgttgcggcaacagataggtaatcaaaaattgcagaaaaataaattttgctacctttgcagacacaccaaatttcatcaagtccatagccaaacaagttgctcggccaatactctcctttgtcctcaccaatgagcaaagtgcatcctcataagattcacgagtggattgcacatcacaactaacaactttctgtccctgacatacacctgtttcgattttctcttcttctttgacaatggcatcacaatcatttttcttctcaccagttggaatatttgggctgccactactgttgttctgcatatcatttgcactttctgaagtagaaatgtggtaataaactgagctgctatgtggagtgcccctcgcaggagtgtctgcagtattagcaggagaaaaactcattttttctcttgacaggttctcagatactaagacagaattgttggtttggacctgctgcttttgagcattagtctcaccactgcaatagcacacgcagtattagttcagtggtgaagcagaagcctgtcttatcattggaactccgcaaacattaagataacaaaaaactgaagcttactggtgtctgcctacaactccataacaattaacaaaaaacttaaatatgaaaaacctaactataataggaatcgaaatacttaggaacaaatcctaaaaggaaaatatacaaagaaaataaataataatcataggaaacataattcttttgtgaatctctactacagacagaaccctagttttgtgctacatcactctttgtatgaggaaataagaaattccttctgtgctttagggctcaaaaagaaacttctaccaagagagctcgagacagtacaggaaatactaacagtagagattagcattaaaagaaaatattcacgagtaaaagcagaatacacgcactaaagaaatactaccatagagactcacatcatttgagctgcctactgtcctcaacagcgtcctcacatttggtacaccctatttcattcaaaggtacattttcaccatctatcacatcactttcagttgcggagatgggtagatttggagtacattgagctggttcgacaatagcacattcttcacccagacttccatgcccttctttcagcagcatgtttacagtttttggcatgttctcagtctcctgcttattcaccactaaacaagacgatggagaatgttctatagcttcagattgaacaacctgagccacacaagcatcaattttactgccttcttcattcagatattcacgagaattttccaatgatacacaagcatcttggtcgttgctcctgtcctggccagataattaaaaggtatgcttaatgagcatatctcagaggcattgtttgcagatgaatccacagtattaggatccatggagggttcaattttagcaacttgacagtattgtacggctggaagatcagactcactagttagcagcttcaggacctcagggcacacagcttctggaacgctagctgtctgagcttcgccagctggcaaactgctaacttgattatattggggtccagctgatttatcatctggtgtcttgctaagctcattccaccccatagcatattctctctctctcacagtctgaacgcaagcctcagatggagacattccatcatgagatttctccacgggagatggtgctacattgaccatgtcccctgagagcttagcagacacttcaaaaaatttagattcttcaactgcaaaagtatcatgactagaaatgatatcagaagggcttgtctgtgctgttgcactgaccacagtgtccttgggtgatctttcttccgcctgcaaagagctattggcctcatgattaccataaaatgctctactcatcctgactctggctcgtttcaccagaggtaagtgctcatccccattctcttcacaaggcctctcagtaaacttttcatgagaattttgtgatgtctgaacattattacgtgctccagcctcaggaactgcttctccttcaactttagcctgaggatcaacaacatcactggttccacgttttctggtcggctttctcttctttctcttaaccatgatattaatttggaaatttagccccttgttgaggtcataatctccttcgagaaactttccaccaatatcaatttgttcgactttggaaccagaatctacaccattgccttcattcctattattatcagattcaaccgttgcaatttcagaggcattttcttcgtcacttccatgggaatttaaagatgatgtagccacatcatctgattcagaatgacctgatgatcttctgatccttttttcccttcttaatgctccgtcttccacgtcatcaatagtctgtccaccatcgttgttttgtaacatggagctttgaagcttctctgtttgcaaccttgatggacttttcgagcgctgaactggacatgtttcattttgtggagcacaattttgagatcgtacccctccatttcttttccttgaagaatatgtagctatcttgcgtggttctttaacaactgcactgtcacaggctttgttacgtggtccactgttatcacgcagggctagcatttgttcagcagctgaagcatcctcatttagcagagtagattcatctctaccatgactaggatcagaattcatttgtgttagacttgtcgcagttggaatttcaatgacctgaggcatcagtgttgtattctcagcactcccaagagtgccttcttcagcagatttgggatcactagctcgttcttgctgcttaagcttctcataactctctataatctccttcacagcacgaacaaaatctgaccctttcgcatggcgtcttgtcaaaagtgattgcttcctctcctctgtaaatgcttcaacatcgccaggattgcagaaagctctgcatatgaattacaaaaaaaaaaaaaacaagaaaatgtcaccaactccatatgattacatacaaacaaaattctcactgatatttatgagggcaaagcagaaagcgagcactgagaaaatttggctcttgcaaagctgctgttcacagaatgctctctagactacaatgaattcatcactattctctattcaacctaacagattgagaacaattttcaaaggagaacaaaaataaaccaatccaaaagcttcaagcacaatctaactataaaatattttaacttaaaaaacgtcctactagtgtctgtactcttataaacaaacatgaaaaagatactttgcagggaaagaatgcaaccaaaaccaaatcagataactatgttaaacccaacagcataaactaaatgtccaacaagaagcaaatgttcccaagtatctagatacagagacattaggcactacacataaggacgatgtgagtgattcaacagggaacccccagggtgaaaattacacacttaaatctatatatttaaatttattacgctgcaactaaattaacattaacagctcaaatgaacccacatgtgtagaccaggctgggttgaagagggaaaaggttaaagggataagaactcacatctgttgtgttccaaaaaagtgaacaaacactttcttcgaatcgggtgatgcatcccacttttcaggctcactaacctgaaatcgcatccaacaataagcagaaagaccagaagatcgaaaaaatagaagctaaaaaggagagcgctgagagaggagaaatattatgggatatcagatgcggctgaaacaaggacaaactaaactagttgtgttcccgtctctactaacaacaagaattaatggatttcagctcctttgagaaaaacctcatatcgattaggcagaagaacttaaaactcagtctacaatcggacaagaaagaatcgacttaacatgattttcaatcctaggagaagcaggtacatgtccaaataaataaaccctagatagataaataggattggtaacatgtggagaaacttataggccatccataaagaagcaaacgcaaaagagaataataaatacataccacggcaggccaagcaggaaaacctttgactttggcaagcacaaggtcgcccaccttccgctttcggcaggcagcagctacggcggcagccttaccaccgcctttcctgcggctcggagccatcaagtaaagaagcgaattctaacactccaagtaaagcaagaaccggaggcgagattgggagtgtataggattttcggtgacaggttccccagatgaactcgcaggcattgaatccccgccccaatcagaagaagtgggtttgctagacagtggagaaaatgaaaccctaatccaggacaagacgattgtctgtctgtagattgttttttttttgatgcggaagaaggggattcacacacgaacctagaaaaaaaaaactgatgatattattgttgaatggtccttgttaacgtgcgccctagctgctgcgtaggttaacacttgacacttaaaatctcatagtattgaggcccattagtggctcaacatggcccatttaagattgaacgggtttttccaaagtgttaggtggcctgttggacaaaagatggctagcaacatacatagatggacatttttgtctccaccaaaatcacaactgtaatcatcttctcaaaaccaaaaataacaatcaaaggtagagtagttaaatcgtttcagaccttactcaagttaagaaataccttgtcgaatatctcagaggttcgttttattgtcatctaatttccgattatatcccaagtgttgcaaggcttttattgaacagctcaagtggtttgcattggtggaaacatctgtggggcaagtaagaaaatttgaacctcaattgttcaatttcattcttaaatggagcctcaaatggggaacttttagtatatatgtgtcttagaagaagcagagtttacgcatgtattcattttgttatcatactgtttttatgttaaattagtaacaaaagttttcatactctctgcttatgccaacattggtggttacttatgattcctatataggtcagcagaagtatgtgtctcatgttccttggtcttccaatgtgtgaaagcggtatgcaaaaccaaaagacttggcggtggctttgaaacaagatcagctttcattgctgccgcagcttctggtccttgttacctattaaatcaacgatcgtgaaactcacactggacagagatgtggataagatgataacttgtcatccccatagtttcgttggtatctctatatttctctgttgataaattaggattgttattttcagttgcatgttaaaacaatcgaagaagctttttacatggttttgatgaaatgacaatagatttcggttcggcgtacataggttttgaaattacaagtgatttctgtttggtttagatggttgtgaaatgaaaattaattttggttcggtttgtattagaatagtacggttttgagaaaaaaaaaacaaaagaaaaagtcactcgaggctgttttggaaacaaagcgagtagatgtaaaataggcatgattttgtgggtttacccctacagaaatcgacgacacgcgctcaacgcgaggttggtgcgagtgggcgtggtccggagcgcgtgacgcgaagttggtgcgagtgggcgtagtccggtgcgctctgattggttagaaaaatgaaaatagttgtgtagtagctcctccacttctcttctattatttcgtttttcgtcattctttagttctgaaagttgtgtagttttaagattcaattgagtcttattacgaggtttttggttattttgaaatcattgattactgtcacaaaaaaaaaatagaaactagattttgagatactaaaatttttattttcattttgttctgcaaccattaaaactagatttagctgagcccctaaagaaatcaaagtgagttgatatgttttcttcactagaaaagtttttgccacttttatgacatagttatcgagtatactataacattatacaatatttttaaaaaatagcataacaattggtttataccataaaaattagagatgagctctaacaaaagttaagcttattagaaaaaacactaaaagcgtagaagattactttcatggtggattcgcccaaacttgagttgagaagaacagactgctagggctttttcttatagttttcgttttttttttttttttttccatctcttttagttttcgtttgggacattaaatgtctataattaataacaaacgattgggccttaaatttagctcaggcctggaataagcccatatagtcctcgtttttatgtcactctcaaaacctcgaaagtggtttctatctatcacttgggcttttattacttgttaaaacaaatttgatccaaatctcaaatggaaccgacaaaatagaaaatccggttctctcaaaaggccaaacacgtgactgttaggaacaaaaaagacgttatcactgaaagatgttttgactttgagaaagtttttgaatatcaaacatagtttttaaatttc

SEQ ID NO: 3988 - DNA, 3718 bp, Arabidopsis thaliana landsberg
cagatagaacgtgtgactgtgaccaatgttcgaagccacgaccttgtatagctcgaacacaatttgtttttgccaccaagcagtgaccacattgggcgtcctgaatagccaactgcttactcttaactctgcgccacggcggatatttatttaattcaattgaaaacaataaaaaagtcttttctatttttcgcccctcataaattatttatctggttaagatgataaaaatatggtgtttattgaaaagcaggaaagtaccaaagaagaactcaggtttaaaccaaaacgggtatacgattgctttgtcagacagaagattttgattaaaaaaacagaaagatggaaaaaatgtcaccgagggagatatagcttaaggaggaaaagagctacattcagagataacaatcacttggcttcataatcttattgagaaggagaagaagagttggtttagtgatgagccttggcttcggccttaatctgcgaattcttctttatctgcatatgaagaagaagcatttgttggtatcatcataacttattagcagatcacatcatagtagaaaattagattccacaatctgaatgaataaggattgggatgctctaaaggaagcaacataggctctactttcataccgagtttcttagggtttggaagccagacacaacatcgcaaacttatgctttacaaaggcaagaaattacatttcagtgatcaagttgcaaatcattgacaaactcttctactaaacatcaagtcaaaactatgatcattcagtggaatatgagatcagaactcaggcagaaacattggggtcaaagaatcatgttacttgtgtatagatgaccaaaccaaaaggagcaaagtagcatactaatagtaacggcacacatgattcgatcgagaatatcattttctcactaaattcaaaagccataaacattcgaatttgctgctataatggcaagtgtcagatttaggatgtcaaaatgaaacccaatgaaaataatttctcatctgataaaaacaagacaaggaagatagagagatgtacctttaaagccttgagcttgatgttgccgtagatgagacccaacccgaaagccgaagcacgagcaacctaaatcgataccaacaaacaaaagactcgataaactcttcaaaatccaaaattcgacaagtcaaggctacagatcgagaaattgatccggggtttaccagagcaagagtgctggtaccggagtaaagtcctggaggtggcgccattgattagcagttgagattaaaccctaaaacccccaaatcgatcgaatcttccgaaatctcagattcgcgataatgaaagaccagagcggctccttgtctctgtcttctcagaaaagcaaatcattgggctttatatgggcctttattcaatagtaccaaacgtcaggcccatatccttcttactattacgcccaaatttgcatgcacattaagtaaacgattaaggatttactatcaaattcgatggatgtaatgtaaccttttgttaaaaatgtcttaagtttagtggactcgaatctattagtaatatctgtgttttattactatggatcatactgtatataaataaatttacgataaagaaaaggacatgaaacaaccaagcattgaattttctttcttttactcgacatgtcaacgtgttgttgttataattacagcctcttcgttcagacatctctcatatagaaaaatttgaaaattagacaaaaatactccacaaccggtggataagtaatatgaatatctatttccttcaattgcttgcactcagcaactttaaagaattatggagtggttccaatcctatattttgaaacatcttatcaatataagattaaggaaagctcaacttctataactcaatagttaatgatactaaaaaggatctttgtgccgataggattttcaagaaagctcattcccagaacaaaaacgtattaggatttgaaggaggatcccttattatggtttatgtatttggccaaatgacaacgacgttatcacttaaaatatttttctaacaaactgtataccaacaacataaaagcataatatataaattgtaaattggatttgcaggtttgctacatgcaattctgcaaaaacgaatactaaaattaagctcattttcatcccatatatatatatatatatataaaaatttataaagaaaataaagataagtaaaaagtattggaaagctatcgacatttaaaaaacaatctgagaattaaaaatgtatggttgaagacccttagatcagaacatcgtcgcggaatcggacggtgaagaatcaaccaagttgagaatgctattccagtaattcttgttatcctcatagtagttatactcactctcattccccacgcccgccgtcgcttcgtttttcccggtgggtaaactccggccgaccgaatcaccgatcaatagactcgtgaatccttctcctattcctccactaccacagttgatttgcctaatccagtcgtgttcgtgttctttgaccagactcacatcggaggaggttgacgaagatacggcgagttcaatcatcgccgaggactcattgttgttattgtttctatttctgctgctatccgtcgggattcctaaaggcatcagaagattctcagagaatgtcaccgtcgatgtcggagattcaagctgttggtctccgtttcctgtcacaattttccattgatacgttaccaaaaccaatcaaagttgagagttttttttaagacgatgtgtcccttaccttggtttggtttagtccagtttgttgatgttttttgagtgaagcaatgttgttgaggagctgctgatttgttaaggttgttattgttttggtaatgctgtaaatggagaagctttgattctctagctagccttgcttcagcttcgagtcttgcactctcccattgagccatatgactaagcgtggctgcgttctttgattgtcctgtggaagacgaaagagtctcgtttttgtgcttgtgagtcactggatctatccccattttgatcagacgtttcttcaagtgtgtgttccagtagttcttgatctcgttgtctgtcctctttggtaaatgagttgcaatcgctgaccacctatgacatttaaaggacgacgatcaatttgctttcaaagcaatcacttggttatttggtttgaaagcagagattgtgattgagtcacctgtttccgaggagagcgtggagttgaatgatggtttgttcttcttgtacagtgaatttgcctctcttgatgtcaggtcttaggtagttagtccatctgagtctgcaactctttccacacctttggagacctataaggagtttgaagcaaagctttggatagagctagaagaaaatgtgtggttttgttgaagagaaaagagcgagcaagttaccggctttctcaggcaaagaacgccagcttccatggccatgttcttcaatataagccaaaagtttctgatcctcttctggagtccaaggccctttcttcaacccggccttatcacaacatggcgatctgcccattgttttcccacacaagttattagtctaatctactgaagaaaaagctagcttcaataaaatcaacggtttaataacctagtgtatgagatagttgtcattacatgatcatggtcagta

SEQ ID NO: 3989 - DNA, 1345 bp, Arabidopsis thaliana landsberg
  unsure (1)..(1345): unsure at all n locations
ttttcatgattctttttttgtttgtatatagatggtcagcgattgggactcgggttgccaaagagaacagacaacgagatcaagaactattggaacactcatttgaagaaacggttagtgaaaatggggattgatccagtgactcataaacccaaaaacgagactcctttatcttctcttggtctatccaagaacgcagctatacttagccacactgctcaatgggaaagtgcaaggcttgaagctgaagcaagactagctagagaatcaaagcttcttcatttacaacattaccaaaccaaaacatcatctcaacctcatcatcatcatggattcactcacaagtcattgttacctaattggacaacaaaaccacacgaaggtaaaccaaagaaacacactatagtctgtgcaaaatttaaactttggaactttgtttgagttttgtaagacaatgcagatcaacaacagcttgaatctccgacatctacagtgtcattctctgagatgaaggaatcaatcccggcgaagatagagtttgtcggatcatcaactggtgtgactctgatgaaagaacctgaacacgattggatcaattcaacgatgcacgagtttgaaactacgcagatgggagaaggaatcgaagaagggttcacgggtctcttgctcggtggtgattcaatcgaccggagtttttccggcgataaaaacgagacggccggcgagagtagtggtggtgactgcaactactatgaggacaacaagaactacttggacagcattttcaactttgtagatccttcaccgtcggattcaccgatgttctgaatctaagggttgatatttgttgggaatgtttttgattcttttttagtttctagtttttgtgcttaaactctgattagacaatttttaaactaatccaatttttgcgctttcttttttctttaattactgtttcactaaattatgctatttggattaacattccaaaaaaaggacgtcgtagagagagagagaaaaaaaaaagacaagcatgaagtttatgtttgttcaatttcttagaattttaaagatagtttatgcatggttcatagatttcaaggtccggagaccaaaactgttccatgcaaaatactttgatcccaatgtaattaatttttgttaactattaattagtgttttgcttgctatttgtttacgtagttttgtgctttaatgatgcaaaagataaaaagaaaattccaacanaacttgtttagtcgtctatttctagagattcaaagtgtgtntctatatttcttgtagattattttgcttcgagatgctttaagtaaaataacat

SEQ ID NO: 3990 - DNA, 1182 bp, Arabidopsis thaliana landsberg
  unsure (1)..(1182): unsure at all n locations
gaaagggccatggacaccagaggaagacatcatcttggtttcttacatccaagaacatggtcctggaaactgtatatctttcccaacacacacaggtttgttttgtttcttaatcaaattaactaattaatagattaattaaacttttgatccacctcttaaaccctttttatgtatttatcttgaaagtgtactaggggttgtgatttcttctcttttttatttctttctctggcttggttggtatgaacatttaataaaagtgtaataaatagctaataagttatgtcaccgactctttcgtccacatatctctaattaccatttaatccctttttccttgagttaattgttttgttaatatggtgttttaggtttgagaagatgtagcaagagctgcagattgagatggactaattatcttcgacccggtattaagcgtggaaattttactgagcatgaagagaagacaattgttcatcttcaagcccttttaggcaacaggtatattttaatgcacatgatccatatttttccaaaaacttacctttcttgggtattatatatgtatataataagatctaaatatgtttttctttgtatatagatgggcagccatagcatcataccttccagaaaggacagacaatgatataaagaactattggaacactcacttgaagaagaagctcaaaaagattaatgaatctggtgaagaagataatgatggtgtctcttcatcaaacactagttcacaaaagaaccatcaaagcactaacaaaggtcaatgggaaagaagacttcagacagacattaacatggcaaaacaagctctttgtgaggccttgtctttagacaaaccatcatccactctttcatcatcttcatcgttaccgactccagtaatcacacaacaaaacatccgtaacttctcatcagctttgcttgagcgttgttatgatccatcctcttcttcttcatctaccacaacaaccactacaagcaacactactaatccatacccatcaggggtatatgcgtcaagtgctgagaacatcgcccggttgcttcaagatttcatgaaagacacacccaaggctttaactntatcatcttatctccggnttcagagactggaccactcactgctgcagtctcggaagaaggtggagaaagatttga

SEQ ID NO: 3991 - DNA, 456 bp, Arabidopsis thaliana landsberg
tacagactgcctcaccagtaacgatctcttttcattcacaacatgtttcatcactttgtgttacgtttattttcacaacattctgtctgtatatatatttgtgttgtttcttttaatcaaggcgagaccaaagcttattcacattatggaacttcaaattcaacagcgaaagcaagctgtgaaggacattaagatgtttgtgtgcattaactttattatattaatggtatcagtatcatccatccaagattcttcaaaagcttgttgtggtaacgttcgatgtattatagcaacgttgattttgttgtgtgcaagaggagagaagaaacacagcgacttctataggatgccgtcggtcaagatggagaataaagtttctacacattgtgtatatagaagttgaattaaagaaatacataaatcgtattgtaatgttactccggcaaaatgttgtgc

SEQ ID NO: 3992 - DNA, 894 bp, Arabidopsis thaliana landsberg
ttcttgggtttgtgattgttttgttctggcttccacttggttggtatgatcatttaatgaaaaggaaaaattgtaataatatccgatttatggcaccagcttttttgtccatatatcacaaattaattactcttttaatgaaattatcttgttgttgttgtggtgatttaggtttgaggagatgtagcaaaagctgtagattgaggtggactaattatcttcgacctgggatcaagcgtggaaatttcaccgagcatgaagagaagatgattctccatcttcaagctcttttgggaaacaggtaaatacatacatattcacatgcacatgatctataaaagtatacaaattcttttatttttttgggtatgcataaagataaggttttgaactttaaataacttggggaccaaataattatgaaggtgggcagctatagcatcatatcttccagaaaggacagacaatgatataaagaactattggaacactcatttgaagaaaaagctcaagaagatgaatgattcttgtgatagtactatcaacaatggccttgataataaagacttctccatatcaaacaaaaacactacctcacatcaaagcagcaactccagtaaaggtcaatgggagagaaggcttcagacagatatcaacatggctaaacaagctctttgtgatgccttgtctattgacaaaccacaaaacccaactaattttgctattcccgatcttggttatggtccatcatcttcttcgtcctctaccaccaccaccaccaccaccacgagaaacactaatccatacccatctggggtctatgcttcaagtgctgagaacattgctcgtttgcttcagaattttatgaaagacacactaaagacctcggtgctc

SEQ ID NO: 3993 - DNA, 301 bp, Arabidopsis thaliana landsberg
caataataagcatacatattataggttataactctatattatttgttataactcataactaattaagccctcaattttaaaaagagcccactttgttagttctagacagtcttctagaactagaacatcccttcttgtcctgctagtgccataccaaccatctcgtggctttgctcatcaaataaccatttctcaaacaaagacagagacccttgtgatattagaccatgatcttggtccattgttatttccggtttgatcacttgatcatggaagaagcttgtctcctgagtcaagtttt

SEQ ID NO: 3994 - DNA, 497 bp, Arabidopsis thaliana landsberg
agataaacccaaacccttatgtgtgtatactgaaggttatcaattaaatgggtgtgatgctaacaatcaaatgggattagggtactaagtaagacaagcatatagttggggtgttctacagcctaaggaacatgtgaaacagaaataagtgaaacataaatactcgaccaacacagctctttgaagactgggtgaggcgagtgcaacaaaataaacacaatctcgactgcacagtctgtgcagacaactggatggtcgagtatgaggtcagtaccagaaagaattacagaattagcacagatgaccaacgcagtaacaatagtagagtaataaaaattcaatcagataagattccgagagggtaattgagtgttttgttctagttacaggtgatgcatgtaataattatctaacacagttattaccaattagtgcacgacagaacctagtacctatccaactaatacatgcagagctactacagctacgatacagta

SEQ ID NO: 3995 - DNA, 974 bp, Arabidopsis thaliana landsberg
gaaaccagatggcaagaggggagagtttagctatgaggaagagcagattatcatcatgcttcatgcatctcgtggcaataagtacgtatggcatttctctaggcttgtttgtgctcatatcagtttagtgaagacatgatcatcaatgttttgatatatatgtaccctgtgtttttattttattttactaggtggtctgtcatagctagacatttgccaaaaagaacggataacgaggtcaaaaactattggaacacacatctcaagaaacgtttaatcgatgatggcattgatcccgtgacacacaagccactagcttcttctaaccctaatccagttgagcccatgaagttcgatttccaaaagaaatccaatcaggatgagcactcttcacagtctagttctacaactccagcatctcttcccctttcctcgaatttgaacagtgttaaatccaaaattagcagtggtgagacgcagatagaaagtggtcacgtgagctgcaagaaacgttttggacgatcgagctctacatcaaggttgttaaacaaagttgcagctagagcttcttccatcggcaacatcttatcaacatccatagaaggaaccttgagatctcctgcatcatcttcaggactcccagactcgttctctcaatcatatgagtacatgatcgataacaaagaagatctcggtacgagcattgatctcaacatccccgagtatgatttcccacagtttcttgagcaactcattaacgatgacgacgaaaatgagaacattgttgggcccgaacaagatctccttatgtccgatttcccatcaacattcgttgatgaagacgatatacttggagacataaccagttggtcaacttatcttcttgaccatcccaattttatgtatgaatcggatcaagattccgacgagaagaacttcttatgatctgtctatagatggcttggcaatttccc

SEQ ID NO: 3996 - DNA, 6411 bp, Arabidopsis thaliana landsberg
gaatgtcatttcggcccggcctataaccggttttgtactaaggtaaaaagaagaggttaatgccatggtatttcttacatgtattgcaagtataagacctaatattgtcattttttacgtttgcatgttatatttttgtttgtaaatcaaatgtgaaaaaattcatgacctaattcctaaaatgttgattgtagtacgggaacttcagggggagcacaaaagatgatgccatggaatgaaaaatatttagacaacttgaccttcatgtatgatcttcgtatgcatattataagcaagtaggtccatatatatatttaaacgaaaacttacgaatgataaaaattattgataaaataaagaaataaatcattgattctattcgttaatttctagtaatgtgaaagatgtggagaaaggaaaggcgatgatgttttacttcactaaactcgaatccatcactccctctggcttgcctgctcgagtcgccagcagtagctatttaaagagcaactatttcaagaaccgtccatcaaactggtattactcttacacaagccctgatgaagtcactctatgtccagacaacaaacaaaatctctactgccatttgctttgtggtctggttcaaagaaacgaggttacaagaatgggttctatcttcgcctccgttatggtccgagcaatcaagtttcttgaagattcatgggaagagttgtgttcaaacatccgatcagggcagctcagcgagtggatcacggacattggttgtcgagattcggtgtctctagttcttggtgggcctcatcctgaagcggcagacaccattgaacaaatatgcaaccaaaaatgttggaaaggtataatcacaagactttggccaaaagctaaatatattgaaactattgttactggttcgatggtgcagtatgttcccacattaaactattactctaataatatgttacctctcatttcaacaatctacgcttcttcggagactcaattcgggttaaatctcaatcctatgtgcaagcctgaagatgtatcgtacacattcatgcccaacgtgtcctacttcgagttcataccagtggatggagacaagaacgatgttgttgaccttgctgatgtcaaacttggatgttgttatgaggctgtcgtcacaaatttttcaggtgaggtaaataataaaacattatgaatattaaaaaccatgaaattaattaatccttttctttgttgttgtggatgtgaatgttttttcatgctctttcttgcttcaggcttgtatagaataagagttggagacattctagtggtgactggtttccataacaaagcacctcagtttaggtttataagaagagacaacgtggttttaagcattgacttggacaaaactaacgaagatgatctgtttaaggcggtgaataacgcaaaactcactcttgactcatcacatctcatgctaatagacttcactagctatgctgatatctccactatcccgggacactacgtagtttattgggaagtaaagaacaaaaacgaagacaagaagagcaaaaagcacatagagctcaaagaagagacattctcggagtgttgtttactaatggaggattcattagacagtgtttacaagatttgtcggtttaaggaggaatctgtaggaccattggagataaaagtggtgcgtcaagggacatttgattctctcatggattacttcatctcacaaggtgcttctattggtcaatacaagactccaaggtgcattaaatctggaaaagccttagacgtattagaggaaaatgtggtagccacattcttcagtacctgatagataataatgttgctaagttatcaataaatatgcatgtgcatatgctagctgcgtattagttttctaaattgttggagtttctttttctttttctctttattggaaaaatcaatgttaaagtgtttttagtccatacaaaaacaatgtcgttttcgatagaatttcgtatgaatatttatgagcttaaagcctcaatcaacaagtttgagcctaattttaacaaaaaagtataagccataaaagacctcacatgatccattaatttctttttgattggcgtatggctaatatgatagacaaaattccaattcactacatgcaaacacgtaagtaggataccagttcccatatttttttttgtcacaaaaaccagttcgcatgttattatcacgttgtgttcacgtacttattaaatttaattagtttgtcacaaaacgtaagtagtgatgaattagagagtcaaaaccacatgcatggtggttttgttatttagccctttaattttgttgacattatgagagagtaattgtttggcgcttgcacgaagtcacgaacttcaacaccgttcaccaccaccgccaccggcaccaccactttccatttttctctttatcactaaaagtcatcttgacaaaaaatcaaaaaaatcaaattattaaagaagacaaaaatatttattcgttaatttgtataattgaaggctgtaattttctagatcttgctacggaaacaaatgtaggtaaatattaatgagagtatattgcagagcaaaatagcaaaatgcgaataagagtgctggaggtatccaaagaaacaggttttcaagatttgacttttacagttttactaaaaggtttctacatttatagcaaaatataaaatgatttttcattataaaaaaattagaatttgcttgtcagggaaattctaataaaatgttccaccttttaaaaaataaacatataattttaaataattgtctatcgattataaaaattacatattgatacatatgaaaagatttggactaaatatggatatttatccagattcggatcgagaaattcatataccacactttaagcattcttatgatataattttgttattccgactatagtaaatattgtttcttattttggtcaaacagtaaatgctaataaaatacatcacattatcgacaacgaaaataaaatataaaataataattgtcatattatcgacgtcataaaaaataatataaaatgtcatatttttttgaataaaagatattttaacctatttatacttctccgtccagtcatcaaagtcgtctcattgtcgtcgtcgttatttttatttctcgccgggaaacgaaaaaacagaaaaagtttgaatttttaacttcgaaaagctatggatccaattgaatcagtggagtacaatggctttgaaactaccaatggtaactctcacaacgacgaccatggttggaagaaagtagtgtacccaaaacgtaaccggaagcaaaaaccggcggatcaagcggcggcgacgaagaatggtgtcaccgggaatctaattcccaatggtactttatccaatggaggaggcaacgtcttccgttctcttgaggagcaagctgaaggtcgtcatctacggatcctcgccgcgaagaaagcttccgatacggcggatgtgtcggacgggggaagatctaaatggcgatctaacgggtacggcgacgaagggtatgattttgatgacagcgacagtgaaatcgcggtggggaaggagaatttgaaagcggaggaagttaagaaaccgaaggttaagaaggtgaagaagcctaaggttactttagctgaagctgctgctaagattgatgtatctaatctcgcagctttcctcgttgaagcttcggtatgtgcatagttgttaatgtcgatttgatctgtttagttttagtcgaaattgtgatctttttgctaagtaaaaattgaaactttgaataggaatcatatgcgagtcaaccagagattcagctaatgagatttgctgattactttgggagatcactctctcaagtatcatcagctcattttccttgggtcaaaacgttcaaggagtctcctttatctaagttgatcgatgtgagcactatctctctgttcatctttatgattctgaatttgagtcaaaggtttagctttcgtaatggtgtagctatgggaatgtgattgtttgacttatatttgaacagattccactttctcatattcctgaagcagtgtataagacatcagctgattggattaaccaacgtcccattgaggcacttggagcctttgtattgtggggcttggattgtattcttgctgacttggctgtacaacaaggaggtgtcaagggtggtaagaaaggagcacaacaggcttcttcgaaatctcaggtattatggtagctgaacgttatagtcttgttgggctgaactacaccaattagattgcctaggttttgtggatgcatatgtcgatttttggtcatactactactcacttttcttttatcagactattattgtcagtctggttgaacttgttatcaattaccattgtgttactagctttaccgttttttgattcttttgatgaataggttgcgatatttgtggcggtagcaatggttttgcgtaagaaacctgatgctttaactaatatattgccaactttgagggagaatcccaagtatcagggacaggataagcttccagttacagtttggatgatggctcaggtgtgtgaaggtctattcataatagtataaacgaagaaccaaaatgtattgttttgatgattgagatgattctgaaatttgctttctcttaactgccaactatgcacaggcctcccaaggtgatatatcagtaggcttgtactcgtgggctcacaacttgttaccggtggtcagtagcaagagttgcaatcctcagtcaagggatctcattcttcagttggttgagaggtgagttaagtttttcctttgatgtcctgttttctatgtgatgattatctaagcttggttattgtgtttttattgcaggatcttgtccaacccgaaggcccggaccatacttgtaaatggggctgttaggaagggagagcgattgattccacctccttcgtttgagatcttggttcgacttacattccctgcatcttccgcaagagtgaaggtaaagaaacgttgagatttgaatacaatatttaagtgaatgcggattggttttgacctctagaatggtttgacacgcaggctacagagaggtttgaggcaatatatcccttgctgaaggaggtgtctcttgctggtgctcctgggagtaaggcaatgaagcaagtcacacagcaaatattcacttttgctctgaaagcagccggggaaggtatgacaaaactttctctaaatttctacctacacatcctctagaagacagtgcaattaaaatttgtaatgtcttggtacagaaaatcccttattagccaaggaagcggctgcaatcactatctgggctctcactcaaaatgttgattgctgcaagcattgggtaagattcactctttcttttcccacataggaggaggttattcgtgagtggatttttacttattgacgtttccggtttgtgggtcaacaggagaatctttataccgacaatttgaaagccagtgttgctgttcttaaaaagctcattggcgagtggaaggagcgttctgtcaagctgactcctgctgaaaccctcactctcaaccaaacaatgaagagcttgaggcaaaaggtttcaaaactaatattcttttatatctctcggccaatgattcattactcattactcatcaactgttaaatacccaacgatgttttactaaactacagaacgaggaagctcttactgagggaggtaatggtgtaagccagtccctatacaaagacgcagacaagtactgcaaggtgatcgctgggaaactctccagtggtggctgcatcaaaagtatagctaccactgctgcacttctagctgctactggttttgctggtgctgctgctctgtctgccaaccctgaggctatagcttacctaaagaacctggtggagtcattggacatcaacaaattcaccgagacagttatgacagcattgaagaactgaagtgaatacatatgagggagacgataagcaagagaagaaagtctctttatcgtcggtgtagagaagtcctccgccttttttatgctctctgattacaaacctgaccggcattagggggaggttaggaggctaatgagtgagaaaaggaggtttccgtcttgtaatcatgtacttttgaggagtttttttcaaagctcaatagttgttgtagttgagagagttgagactgtttctaatttaagatattctttgttttttttttcttttgaaaaattaagttatatttccatttgctcttatgtaagctcgtagtccatttgttcaatccatatatacataacacaactcttccgagattgtatcttctgaagaaattt

SEQ ID NO: 3997 - DNA, 3090 bp, Arabidopsis thaliana landsberg
gacaaccataaagttgatagagaatgatatctaagataactaaattttcaaaatgaacaaaaggaacatgcgtggtcaaaattactctaatcagttaggtaagaagccatatgtatatatgtttgacgacttaagacatggagtcaataaaatattatctaacttgtactttgaaacaaacaaacaaacaaacaaaaatcaaatctagatgtatatattaaaaaagaggatagacacgttgtatgctgatcggtggttcaattcaaaaacaagaaggaaagttctttacggaaagtaaattaaatgaaagatgcattgaacttgaacttgaattctaacctacacaaattccttttttcccaaatataataattaagaaagaaaaattcgacaaagggttattaatagtaagtctttagttagtgtgtaacttattataacaaagttacatcaactagctaaaaacaattaagctgtcatatgatcaagatataattattgtattagttaccttggtctggttgatgttgatccgatttatcaagctcttgtttgaccggcgggtctgtcggattctctatgacacggctgagagcggagaccatggcggtgacatcagtctcgttccaagacgaattatcatccgccgccgccgatgtttccggtggaaccggtccctttccatacctccgatccacttttacaacaaagtatgtactcacacgtatatgtaacacacaaacacaccaagagaataataggtgtgtgtatatatgtacaagactttgaaaggaactaagtttgaaacgaattgatgatgatagggaatctgtggagtgactaggacatggagcttggcttggtgatgaacaacaagtggggatcgcaaataagggttttcttgggtttaggctatgatgtgatgttatgaggaaagaagaggtgacaaaagggttttataaagagaaggatctacaagaaaaaatagatgataaaatattaattaaaatctttggagtggtgcggggtgggaccgttcaatgagttcatagttctctttttctttttctcaatctttaaacttttttggagcttataacttcgcatgttttggcagcagtgttatgcacaaataaggaatgagtgcggacccaacatttctaatttttcatctgtttttttactaaaaaataaaataaactaattgggtcagttttatttttattggtatatttgtatatgtatttgttccagtatattatctattaaaattttgaaattcgatcgtataattgatttgttatggacaaatcaattattatatatgcagcaaagtacgaaaaataatttttgtaatctaattttaggaatcaaagcttgtatgagtgtatccatttgaaaatcatatatttacagttaaccatattttatattaattccggataaattgggcctttgggccgtcgcctgtatgtaccaccttttggaccgggcctgcttctattgacgagtccaatcttttcttttgcttggagagaattttgcaaagttgcaattatttttctaaaagctgcaagattagtcaggtactaaactgcatataaaattttgtgttttggacactctactaaaattatgctaaaatcatcataaccaaaacaaaaccaaactacacatggtttacctggtttttgaaaaacacacgaaccgaaagaaaacgaaaccggattgttattttggtacttgttgttagtcatggactcatggctcagggtggtgaagtgtaacgaagggtttggtttcatctcaaagttgtttggccatcttccaagtctttgccaacttcagttcaatggaataaaatactctgtttctgagtaaagactcggaaattctcaatggtgttttccgtttaaagaggaaaatcagataaagactgaatcaaatatatatattaaaaaaatataaacaaacattcagacaaattagtacactctcaaatcacaacaaatcaattgaaccaaaccctttatggaaaaaaaaagaagacaaatcacttgaacctatataaaaccaaggaagaacaatcaaatactgaagaatttggctaccacacatgtctccaatacttgcaaggctttccctgacttaatgcatctaggagtcttgtattgaccggtggaagcaccttgtgagatgaagaagtccatgagagaatcaaacgttccttgacgcaccactcttatctcgagaggcccgatcgatccgtctttgaatcgacatctcttgtaaacattatcaagcgactcctccattaccaaacaacacgtggagagtgcctcttcatcgagctcaaactgtgccgtctccttctcctctccctctttggtatctacttccaagtaaaccacgtagtgacctggaaatgttgaggtgtcagcataactggtgaagtctttcagatcgagacctgatgactcgagtacgagcttcgcttgactcacagccttaaacagatcttcttcgttagttttatcggaatcgatgcttaagacgacgttttctcttcttacaaacttaaactgaggcgcgttgttgtagaaaccagtcaccaaaacaatatctcccactctcatcctatacaagcctgaacaaaaaaaaaacattttcacaaacattagttaaaccatgtagaaaaaagtatgcattttattgaattcatgatcgatgtttttaagctcaccagcgaaatttgtgacaacgggttcataagtgcacccaagtttcacatcttctaggtcaaccacatcgttcttgtctcctccatccattggtatgaactcaaagtaagacatgttgggcatgaaagtgtaagaaacatctttcggtttgcacagaggatctagattgatcccaaaggtagtctccgaagaaccgtaagtttgttgaaacgagaggcaggtcgttacaatagtagttcaacatgggaacgtactgtcccattgaaccagtgacaacggtttcgatatattgggggttgggcaaaggcttttgactattacctttccaagaattttgggtgcatatttt

SEQ ID NO: 3998 - DNA, 2623 bp, Arabidopsis thaliana landsberg
aaaaataattaaactaaaaataaaacaaaacaaaaccaaatcccaaaggattggtccaaaatctgtgtttacaaaatatcaatggcaatttcgtagtaaagataaaaaacaaggatattgtttttaatctttctattaccctattattctcttatatatatatactcttccctccggtcaaatctcgtcgtcttgtttggtctctgtttttcacgccggagatagagagagagaagtaaaaaagcgagaaaaagctagaaactttagaatacccaataatggatccgatcgaatctgtcgaatacaatggcttcgagacctctaacggtaacgtcgaccatggttggaagaaagtcgtgtacccgaaacgtcaccggaagcaaaaacaagcggatcaagcgacggcaaatggtggcaaaactgttgcttcaaatggaaccgtagctaacggcggagataacgttctctgttcgttggaagagcaagctgaggatcgtcgacgacggatcttagcggcgaagatgactgctattgattcagatgatgatggtgttgttagatctaaacatcgatctaatggttacggtgatgatgggtatgattttgatggtagtgatgatgagatcgcaacgctgaaggttgaggaagttaagaagccaaagcctaagaaggagaagaagcctaaagtttctttgcctgaagctgcatcaaagatcgatcctttaaatctcgaagcttttctcgttgaagcatcggtatgtgcatggatttgagatttgagatttggttttgatctgtttgtgatttagctgaattgtgatctaaagtttcgttttttcaatgttgggtttataggaatcgtatgcgagtcagcctgagattcagctaatgagatttgctgattactttgggagagcactttctggagtctcatctgtgcaatttccatgggtgaagatgtttaaagagtctcctttgtctaagctgattgaagtgagtttgtgtttttaacattgtttgaggttttggaattggattctaggtttaggttttgataaaggtgagatcgtttttgtttatgaataggttccgttagctcatattccggaaccagtgtataagacatcagttgattggatcaaccatcgtccaattgaggcacttggagcctttgtgttgtgggcttttgattgtattctcacagatttagcagcacaacaaggtggtgctaaaggtgggaagaagggtggtcaacaaactacttccaaatctcaggtgatttggaaaacctttctcgatctctaaactctgatctttgattatcaatgttattacctttcgattactaagtccattattgtacattcgtataggtggcaatatttgttgcattagcgatggtattgcgtaggaagcctgatgctttgactaatgtattgccaactctgagggagaatcctaagtatcagggtcaggataagcttccggttacagtttggatgatggctcaggtttgtgtgatttgttttgtaaatgagtattaattgtgtcaagatttgtgttttctgtgatctttattctaatttttgtaaaactgtaaaatgtggacaggcctcccaaggtgatatagctgtaggcttgtattcatgggctcacaacttgttacctgttgtcggtaataagaactgtaaccctcagtcaagggatctcatcctgcagttggttgagaagtgagtaaaaaacttcttgtggtcttattcttgctgtgtttgtagtcagtcatctaatcttgtttatatgcaattttcttatcagaattttgacgaatccaaaggctcgtaccatacttgtaaatggagctgttaggaagggagagcgtttgattccacctccttcatttgagatcttgttgcggcttacattccctgcatcatctgcaagagtaaaggtaagtcgtattgctggaattttgtaaaacgaaaccttgattcattttgttgattctcacaagcatgatcttcgttgcacacaggctacagagaggtttgaggcaatatatcccttgctgaaagaagtggctcttgctggtgcaccaggaagcaaggcgatgaaacaagtcacacaacagatattcacttttgctctgaaattagctggagaaggtactattaacaatcttgattcccttagttttctgcttccctcagctccgctagattagagttttaatgttatcgttgttacaggaaatcctgttttagccaaggaagctacagcaattgctatctggtctgtgacccaaaactttgattgctgcaagcactgggacaatctctacaaggagaatctggaagctagtgttgctgttcttaaaaagcttgttgaagaatggaaggagcattcggtcaaactatcatcatcaccgaatgatgctctcactctcaacccaactatgaaaagcttcaagctaaaggtaacagcctccacactttctaagctttaatttcaccctccagtctcttgtaaatctaatctccgatactttcctgtgatgatttagaacgaggaggtcatcactgcgggaggagccaatgcttctctttacaaagaagctgacaagtct

SEQ ID NO: 3999 - DNA, 9508 bp, Arabidopsis thaliana landsberg
  unsure (1)..(9508): unsure at all n locations
tttaaatgtgagcatgcattagtttctgagactgtaaaagaaaagcccacactttgttgctccctcgtatgacgcgcgactttcccactaactttgcagtgagtgttcgctattctctatgcttcaaattcaatccatcctttctccatttctatctcaaaaggcctttctctttctcgatctaatcaattaatcttcttctttttctttcttataaggaaagctatacacaagaagaatacaagaaacacaagcacaacacagaaacatgcgtaaattgtttcaccgaataaagtaaaaaattatcaatagttaaacacaaaagattacaagtcctcttaactatttttaacagaaaatgtatgtaccaacacctctggttacgtgattttctcataactttggtgattggtatattggtatcacatcgctatatatgaaccatgacagtacataaataaataatcatatggcacgtataagaagcctctaataatcttccttaattagtctcctggaaccagaaagtatacataattataaaaagcagcggtaactaacgaagatttataatatttgaacacaaaaaagcgtgctcatatgtaattattgtgagctagtatagaatgatatatgaaaatagctaaatattattgtaaatgcggattaaaaatgactgaaaagaagaaagagcgtgcttggaaacggaacaaacaactagctagtattaaacatatactttttcatgttatcagagtaagtagtaaagtggagcgcataatgagtggatgcttttttaaggttatgttaccaattaaaactagtgattaaattatgattatggaattattatatacgaaaactgaaattgtctcattcgtatgtcatgcttctttgcgccccgtgctcgagtaccctattcattaatcactaccctctcagtatttcataatttctatgattgctttgttttcttttattatccatgtacaatattttttccttaatgggattattccatgtgcaattttgttaacatgtttatttgtgtttataagatattcttttggtagaaattcgtcattcctttgctttgacattttttctatttatatcatttccctatatttttcttatgtgttacgtaaatgtgatgttaacattcgatatgatgagtcattgagatgaaaaacgcaaaattgtgtaaattttctctaagaaacaaataaaagaaaatttgagtaattggagagaagactgaaagttgcgagttaaaacagatccggagctccggaaagcaaagcggatcggaccacagcgatgatgtcagtaagagaaacaaggccttgtagcccaccgttctggtccacgacccaaactctgtgtacacgtttcgtggtgaccatatggatcacctgggccaaggttgatgtcacgtgacacgtcacgagctccctccctggtgttgaggtagcagcggtgaacaagagagttcttgggattttctcgacgaactctagtgcatttagcggcaaccacgaacgcaatgtggctaaatgacatcccttcagatcactagccgagaatgtccccaccactctccgatttttcccctgcaccagcaaacaccaaattaatcaacatttgatcttaatagatactgatagatacatgtataagtaaagacacctacgtcgacgagctgtttatgatcctctccctcaccagaggcttcgacgataggaaccgcattgagcattgctatactcatgcattgtattgcatctttcactctagcctggtattaaacattacaagcgtttaacttaggatttaatgaataaagatgaaaattcttgacttgtgaaatttacctggctagtgagggctaaaacagtgttgtgaatagcggagagatcagtgacggtgtgggagaggataccatgcaattgagaggattggtcgaagaagaaagagatgagatccatctgactcagcattgcgtaagcagaagctgactctaccaactcaggtcctgttatattttctgtattactgtccaatggaaccaataccctgtggattcctttactcaacatctccatacaatccatgatgctgctttcatcaatgaccatctttgattagtactctatccgttcatatataatgttaagatttttgacaagagaaaaatgttttgcatttttctatgaaaaatttgcattataatttctaatttctaatttagtttgaattataaaaaatatgaaactataaacaattaatgactgaaatatgggtatatatattaggtgttgcaaaagaattcttactatgtgagaaaagtgtacaacatctaacattataaaagggaaggattaattatactgaaagcaatttaattttacaaatcttctatactattaacctggtattaggattgagagaccagaggctaagaccctcagggcaatgaccaatgatagaagagtcaggggcagccattttcttatctagcccactctcgccgtcattgccggcgatgtgagccacaacgtctagcatggtcaccattcctatgtactgttttcttgcacttccgctctgtttgtccaactctactatcattgatcccccggctcccagccattggcctggtttggcagccaccggtacagctctaactcggtttgccaccggtttgataccaagaatagtcttgttagtaattcttgatacttaaaacggttgactccaaccaaaaaaataacaattatttagccgtggtttaccatagtgttcaaggcgtcccctagagtggcattatcaggaacttcgaccagccgccgcttgtcgatcatcagatctttgaccttgaactgcatcagacggctgtacgactgcatgaagatttgtatttgggtgatagtcaaagtctcaaagaaaatgggacgaggcttatgaacttctaatctttgttttgatgctttcgtagttacttcattattcatatatgtcatgttactagtaagatggcacgtattacatgtgttgctccatgggcatgtgcttttcgtatgcacagaccacgcgtccgtttattcagattctcgtgttacaacaaaataatgattttaaggttcagaatcaaacatatgaaactttttatcaattgctatctacggtttgttacaaaaacaaatacagtgcccagttcaaaatacaaattgaataatagcccaacatatcgtaaatgggaaaatgggctcagcccaaataaaaaaaaagtaaacgataaggagacgtcgggtcccgttcacgaagcggtcggatctagggcccaacacaagacgaatgaagggaatatctcgtgaaagcaataaatgcagaaatcgagaatcatgaattttatttatttcgctcctcgagttatcccgtgaaagtcataaagacattgcgaacgtttttatggacccaccaattgtttcttcagaattatacatatacacactgacaatttcgaacctaaaccgcattcacacaacaacaacaactaagaaatggcacgatatgaattcttccgccaaatattcattgtcttgtctatagtttctccgttggtcagatctttcactgtgatcacctccgactcgacggccccatctgctctgatcgacggcccacaaactggattcacgatgaccaatgacggcgctcgcacggagcctgacgagcaagacgccgtctacgacattatgcgtgcgaccggcaacgactgggctgccgcgattccagacgtttgccgagggagatggcacgggatcgagtgtatgccggaccaggataacgtctaccacgtggtctctctgtcgttcggagcgctctcagacgacacggcgtttccgacttgtgatccacaacgctcttacgtctctgagtccctcacgaggctcaaacacctcaaagccttgttcttctaccgatgtttaggccgcgccccacagcgcataccggcgtttctgggacgcctcggctcgagtctgcaaacgctggttctgagggagaatggttttttgggacctatccctgacgaattgggcaatctcaccaatttgaaagttcttgatttgcataaaaatcacctcaacggctccattcccttgtcgttcaaccggttctccggtttaagatcgcttgatttgagtggtaaccggttgactggttccattcccggttttgttcttccggcgctgagcgttctggatttgaaccagaatcttttaaccggaccggttccacccacactcacaagctgtggatcgttgatcaaaatcgatcttagccgaaacagagtcactggtcctatcccagaatcgattaaccggctcaaccaattagtgcttttggatttgagctataaccggttatcaggtccattcccgtcttctctccaaggcctaaactctcttcaagctttaatgctcaaaggcaacacaaaattctcaacaacgattcctgaaaacgcgttcaaagggctcaagaacttgatgattcttgttctctcgaatacgaacatccagggctcgataccgaaatcattgactcggttaaacagtcttcgggtccttcacctagagggcaataatctgaccggagagattcctttggagttccgggacgtgaagcatctaagcgagctgaggctcaacgataacagtctgacaggaccagtaccgttcgagagagacacagtgtggaggatgaggagaaagctgaggctgtataacaatgctggtttgtgtgttaaccgggacagtgacttggatgatgcattcggttcaaaatctggttcaactgtaagattgtgtgatgcagaaacgtcgagaccagctccttccggtacggtccagcacctatctagagaagaagacggtgctttgccggacggagctacggacgtgtcaagcacttccaagtctttggggttctcctatctttctgcattctttcttgtattccctaatttcatttttatgctaatatctagttagaggagggatgataaaactgctgtaaatacttcccgagtttaataatgttagttagatgccttttctgcattagttggattgaatatcgccaccatttatggctacaaaaaaaacttgtaagctcgaacgtgttccttctgtctatatactctgttctttgatctctgttttatctttccggagataagagacttgtattgcttgttcttccatgttttgtacatttggcgtttattcgaaatgggaaaaacctcttaaaatagtttaaatttgtcgttttattttctctcatcgaagacgttagttaccaaaattccgttatacacgtacgtatgattacatcacattcaagattttgattatagtggcaaaccatctttttaagatttagggaccttactatctatctcagtaaagcacaagacagtacaacatcttacaagtctatactgcaaaataaagctaaatcacacacacggtaagaaaattgagtatatctcaagtaaatgtgtcctcgcgatctccctctgtaatgtcagcctcctccatgttgctgaactccaggaaatgagtgggtcgatgctcctcgtgatagaactcctttggggatccgagtttgacactgtatttcatgctcaacgtgtgcttcactccagtgnnnnnnnnnnnnnnnnnnnnnnnntcaggaacctatcataacatcagttacaaaaatcagatttcaatggtttatatcatccaaggacaaaagcacaattgcaaactctgttgtcttaccatgtaaaacccgaggaaccggtcactcagcagcatctgaaccttttcataatgggtgggaaggtaaccgtgaggattgctgccattgtccttgttaagccgcccccattcatatccggtttgggtcaacttatatgacgtcaaagaacaggagcccggagtgaaactgcaggtcaggatgatgcatttttctccatcccattgcttgttgttctccagaatacgggaatgagaggttacatcctatcaaagaaaagatcagttagcaatgaggttaacagaaggtaaagataaatatatatatatatatacctgtggtgatagctgaggcagctcgttaggctgtgtgtgcaaccatcccaagggctcaagatcatttaggaaatcatgctcaggaagagatgacggcaggtgaactagctgatgatttccccactgtggcaccatcacaacacaacggatctccttcacctggggattatccgggggactaataccatataaatacccagcaatttgagtacgaagatccgcaacgcatatgaacttcttcaaaatgttctttggcatgatgtaggtgtatccggtttcctgtgacaacaacagacagtgtttaaggtcgacacctgaaaggcttttacttaattgacaaagtgaattggattctaacctttatgtcatctgagttcacatatatgtgattgactctaaggtaaagattagtggctgatattgcacgtacacgccaatctgtcttggaaccgaatgcagattgctcgtaagggcttgtggtggtgacaatgagctcatcaccatgaacatttgtagttcttgttgtgactgcagtaagctggctggcttcctttgcctgcaaataggatatagatttacagtgaacaaagaataatagtcacagtccactctcacaatgtttgtgtttgttagaaaacctgatagaacatagaagtaacagttacgagtacctgtttctcaatctcagctatctgttgcctctgttgagagggtggagtaatctcagctccaagaataatatctcggatctctgattgtgtcagagctgaggtattcacattgtttttctttgcgtagtcagaaagaataagatctctaagtgctacctccacctgaatttaacatgatcgtgagtaaggaaggactatttcaaaaaaagagaagaaagtaaaagctatatatcacataactcactagtaaataaaaacagcagatatagaatgtaaagagggatcctatcaaataaaagaatatagcaagaagaagtacttggaaagtggcagaagagttaccttcatccattgatcatcagtgagagagggccagatgtgatgtggctcagtgacaacggacttgtcaggcttcaacaacatcttagccttctcattattcacgtgaagcgcacgaaggatcaaaataagtcttgaaaaggcagtataagaagaaatactcttcaaccaatcatcatatatattaaacaagaccatctgcggttctgtagccttcaaaatcaggtcaccaaatttctctatctttaggcaagcctggaacggaagctgcagctcgcttcccttaataacaatgttagggaaatcaagcaagtgaacctcaaggggatccaacattcctttccgtgtgacaataatctgctttggctgttcttcaacagggagagatcgcacaagtgcagcaacctcttctgcagttttccatttcgctagctggccaagacgcttctgaccagcccaaacacttgtatggataacctaaaggacaagaaaaaacagttacttaagattctgtagcctgttactagagaaacagaagtagtagttttgtagaacaatgcatatatgcctgttcttaaagtgaagtgcgggagaggaagaaataccttcaggaacaactgcccagttcttggattgaaaatgaaaatcgcaccattgattggctttgtcgttaaatttccttcaaatgtcttgtgaatcgtgacacgataaacattggtatcatcaacaaaccatataatctgattgctgaatatttcaccatagttttgagatgacaaatatggctctgtaggctcagacgagtatagctgcaaacctttccttatcctctctctcaacacatatagagccggattggactgcaatatgtaaattttaaacggtaagtcatagatctaaacaaaacgagtactgcaaaagacacccaagaagaaaattgattaccttcatgatcttgttcatcgcttgagcaagaagaggctttgaaccagggaaccaattaccaaaggcagaatgcaggttgtatgccagatcaagcccaatcattacacctgcacagatttagtaagaaaatttgatacatactgcagaaaagtaaagactaacaaaacaaagtaaaatggaaaaagtaataaatacctgttggagatggatagatagacatgttgtcagttgtatagtccatgaatttggccctagtataacgctcaatatcatgagagtcataatctccccatcgaagttgcacatctatccaatacttgttactcgctttctggtcgaacatatccttcgactctgcaaccaggctaggcttagacattggccatttatgagcagcaaatagaagaacatcagcacaagagctgttcattttataactcttccttggatgaattgtctccttctgtacagtttctatctccaaagcgtccaactcttggtccaatacttggcagagatccataacaacactctcatggatcttctgccacaaatgggcacggaaaatctgaatcaaagatatcttaagtgtaggaatctttccatgcataaatattcctgtcagatccaactgcacttggaaacccacatagacattcgctcgattaattgttggcgaccaccaaagcgtgaatcttctatttggaatctggttcagaccagacctctgagcattagtcaacttcttatatttcatcgactcctcaaaaccagatgccttctcccagaaaagtccctcccaagttggaaagctggattcatgtaaagaaaattattttagcaaaattgatacggaaagctgtgagcaacaaaacatcaaatgtcaatgtgaaagaaagaacataataaattgagcacgaacgaaaagcaagactcactatgttcctttaaataaggtgtgctcaagaataccctcaacacctccaagagcttggatgacatcagttcggtaattgttcaagttccacaatttaccatcatgcctctggtgtgtccaccagaaaggattttgtttcagggcttggtactgtttgaagtcggtccggaccctccaacctttatcatatgctaaagtgtgcctatccttttggaacagcgtatttatacgcggaattcccctatcccaagagtcctgtcaaatattttttaacatgagttattatactctaaaaattaaacatcaagacttcccaatcaaacttttattctaccttgtcgatctccaaaagagaataaggcaacacttagatatcctctaaaaatccctacatcaagtagttgacacacacaaaaagctacttaaagaccagcaaaagaggataaagctagcaaactgatatcttctcagaa

SEQ ID NO: 4000 - DNA, 977 bp, Arabidopsis thaliana landsberg
  unsure (1)..(977): unsure at all n locations
ttgttagatttccttcaaatgtcttgtggattgtgacacggtatacattggtatcatcaacaaaccatatgatctgattgctgaatatttcaccatagttttgagatgacagatatggctctgtaggctcagatgagtacaactgcaaacctttccttatcctctctctcaacacgtatagagcgggatttgactgtaacatttaaagtttacacaataagagtcacatatgtaaaagccaaataaaaataagcacaccacgaatagaagttctagtaccttcatgatcttgttcattgcttgagcaagcagaggtttggaaccagggaaccaattaccaaaggcggaatgcaagttgtaggccaaatcaagcccaataattacacctgcgatgatttcatcaggatatgagacttactgcagaaaaaaataaattgacaaactgaaaaaggctattaagtacccgttggagatggatagatagacatgttgtccgttgtgtaatccatgaatttggccttagtatagcgttcaatatcatgggagtcataatctccccatcgaagttgcacatctatccagtacttgttactcgctttctgatcaaacacatccttggactcagcgattagactaggcttagacattggccatttatgggcagcaaacagaagaacatcagcacaagagctattcattttgtaactcttccgtggatgaattgtctctttctgcacagtttctatctccaaaggttccaactcttgatccagtacttgcaaaggtccataacaacactctatggattttttgccacaaatgagcacggaatatctgaatcaaagatattttaagagtaggaatctttccgtgcatatatattcctgtcaaatcccactgcacttgngaacccacatacacattcgctcgataattgttggcgaccaccagagcgtgaatcttctattcggatctgg

SEQ ID NO: 4001 - DNA, 3800 bp, Arabidopsis thaliana landsberg
tcgagagtgcaagtttcgtaaccctagcacaaggcagattgtggaattgcccataatgagatctaagactaatgtgtggaattggtttggacatgatccttttcatgatgaatacaaagtgcttagcttattttgggaggtcaccaaggaacagacagttgtgagatcagaacatcaagtgttggtacttggtgttggagcttcatggagaaacactaaaagccaccacactcctcatcgtccttttcatccatactcacgagggatgactattgatggtgttttgtattatagtgctcggactgatgcaaatagatgtgtccttatgagttttgacttaagttctgaagagttcaatttgattgaattaccctttgagaactggtcacgcaccattcacatgaactaccaaggaaaagttgctacttgtcaatatatgcgtcttgcaagtgatggctttgtggatgtttgtgtccttgaagatgccgacaagagtcagtggtcgaacaagaagacttttgttttgcctatttctcagatgaatttcgtccatggagaccggttggtggtgggtgcctctagagacagtggtaaggttttgatgagaaaggcaaatctcttacggaatcaacacgcacgctttttcctttatgatatggagaggaatgaaatagcacgaaggattgaaattagaccatcattacttggtagctttaacaagaccaatcagtttctcaaagtttgttatacattccaaactaagtaagatacatgccaaaccaagaccatattgatagcatcatgtatttggaaacctaaattttgatcatagtacgttattttgttatacattccaaactaagtaagatacatgtgtagacaagcaatcaatacaaggtaaatgaacaatttttgtctctaaactcaagttgaagagtggagcttcatccttcgaagagaaaagtaggctacgagacggtagccaataatcatggctacaagagcactcacttccttaagcccactctctatttcttccccgtttacgctttccatgatttcttcatattgtacctttacaaggagcttgtatgtgtggtagttgaatgacatgaaacgtatccaagcaatgaaaaatggaactttctgccatatttataaagtctgtcaatcactacccatacatgtttataatattgaaatttgaagctgagtattcttaccttcacgaaatagccaccagcgagcatgaaagtcattacggttaccgatgctaaagttgtggccttcttcaggtccattaagctcgcccctattgctaatccaagtccctaaaacaacatcatcatcattagttgttacttgttagcattttctgttcaacatgtcctttgtttttatgtacgtacctgagctgcaacgatgcatagaaagaccgtgagcacacttaggaaaaaagattcagctcttaatctcaatccagccatgaaatatacaacaactaggaaaagcacaggtaatatcaagtcaagtggcaggtcacttgtggttctagccacaaaatatgcacttaatctatacatatttgactctcgttccttgctcagcattgctctctcctgaggaaatgtgaagatcgctgtgaataccggaaagaaaccccagaatacagcaataaagaagagtagccctacctgagatgcagagagagttccaacttttaaggcagacaaccaattacagctagtttctagaccataaacatgtttctacctgatcttgtaggcctttgggatgttatgtctgattgccaccagagtaaacctaagatgatagcagtggatagaacttgagtgactcttaaccagctgaaatagtcatgtctccgttctttaattcctcttaaggaaagtaaacaatactgttcccaccagcttaatccccattcacgtttggggcaagttatcatcagtttaacttcttcatcaagaggaactggagccataagtttcatcttttccataactgcaatctgtgtcttgtaagcttcctcaagatactgtgtttcaacatcacatttaacatttcttacataaagctctaaacgaattcttgatatgtaaaggagatctttttctcacctcatatacaactgtaggagctggcttggaagatcctatctcgctgcaagaatttcacatcttcattttctctttaagagctgaaggtacggagatatcgttcatgtttccattaactaagtccagcaagaactctgctgggttcatggcgagtagaggagaacatcctatggaagagaaataagacattgcttctgatgctttcccaaagtaaagcaagcttcctctgctgagtacaaccagcttgtcaaatctgtgaaagagcctactagacggttggtggattgttgttacaattgttttacccgcctgcatgccaacaagtaaaaatttagatatggtcaaatccataaagaaacatgatttggagctgtaaagagtggagttcttacctttgctatacaatgtagcatctgaacaatcttaagagcggtagtagagtccaaactagaggtgggttcatcaaggagaagaagtgaaggattagtcatgatttcattcccaatacaaacccttttcctctccccacctgagacaccgcgcacaaatgaccctccaatcattgtgtcttggcacctaaaacaacaattatcacaatcttctaattaggttccttcttaagacttagattgaccatcagaggaagttcctaagttgttagacggtagtataatagatgataatgtaccgttccaatccaagctcttgtatcacactagcagctctttgttctttctcctgctctgtgagagttttaggaagacgtaacagagctgtgtaggtcagtgtctcttttacagttaagtgaggaaacagaacatcatcttgagtcacaaatccgatcctgccatgttgctttcccgtgtcaactgtaaacttatatatacatctacatattcatcaacagaccaaggtggaatcttcttattacctggtttttaagtgcttagaatatggcttatcattatagctaaccgacccaccaatgttctgctgattaaatctgccaccaagcgcattaagtagtgtagttttgccacttccagaaggtcccatgagagctagaagctcccctggatatgctgaaccactaatcccattcaagatgctcttttctgatgaagatgtcattcctttggttgtcaccttgtatgtgatatctatgaactgcacaacacatgataagaattgatttggtcagaaagaattgcaagtaaaagttcctatatgcttgaattttcatgaaaaccagtctttttccatagaaatatgactagaatttctctctgatttatacaaggcgatactaatataaccatacccttttggtccagcgtgaagctctgcttcacatgttgccgataacaagtaaatggtagttgagcctcctaagcttgacttttgggcaccaaagttagaccaacaaagaaggcaaaacagaggtttccaaatgtcttaatgcaatgatgaagattattctacttgtaaaatttatggatgtttcttcactatgggagaaatagcgatttcttgtttaggaaacatcatatgagatacaacagacccattgaagtttggactgaccaatggcagcaaaattttatatatttcttcggactttttggtgttgatggtttaattacatatctccatcagaca

SEQ ID NO: 4002 - DNA, 4048 bp, Arabidopsis thaliana landsberg
  unsure (1)..(4048): unsure at all n locations
taaagattatgatttttggtcgacagtttttaaaaaggtcaaaatgtcaatggagaagccacctttggcctccggtttagctcgaacacgatcggagcagctatatgagacggttgcagcagacataaggtcacctcacggctccatggacgctaatggtgtgcctgcgacggctccagcagccgttggaggaggaggaacgttgtcgaggaaatcaagccggaggttgatggggatgtctccggggaggagtagcggcgccggaacacacataaggaagtctaggagcgctcagcttaagctcgagctagaggaagtgagtagcggcgcagctttgagccgtgcgtctagcgcatcgctcggtctttctttttccttcaccgggtttgctatgccgccggaggaaatctccgactctaaaccgttcagcgacgacgagatgatacgtaagtcgtgcgaactttatctcactagtcactagttttagtccaagggtagtttggtcatttgagttactatgttcccatactgagagggtagtatggtcattaagacatgcaattaaatgatacaataataatgataacaacggatacatgattggtgtgcgttgctttgcttttttgcatgagagagtttggataaattattttatttaatagagacccaaacaattggccttctaatttgttccacgtgttctctttctcgtgcaactgaaactcccaccacttattttcttttcacttttttttcttttaaattcactttctttttgttgttttttattttcttttcacttttcaatggcttattcagtggtgcttgcaattatacatacgatacttgttgtataaaatatggatttttgtcaatcccagttgtttgaaatgataattgtaatttaatatttattcgagtgcaaactattctttaaatcttatatgatgaaaagataaggaaagtgcttccaaatgcccgatactgtttttaaaagagatcgtacattaacaaaagttatgacattaatttgcttaaagaaatactaattaattttgtcaaagatgcatgcctaccacttaaatagtactttgttttttttacttataaattatatatatgttggtattttgtcaatctgagcatttgttttaaaaagtcaataattcaccactagtttctcataattcataaactcgttcgtaattgttctctttgtttatttgataaccatcagtccatcacagtagcacagtcttcatgattcatttcgccttcacttagtgtttgtgcatatatacttatgtaggtagaatctttcaataaaaagcaacaaaataaaaactagtgatttgtaacgtcacgtagtgattgattcaccaacattttaacagctttttatgactaaagtaggtataaaaataggtgagaagaagtcaaatatatctctactaattagtcaataatgggtcccatttttggagtttttagtgtttggtctgttgtaatctgtcaatagtgtacctcaaagtccaaatcttacgtaaaagcgtttagctggctgacaaagattggccaacttatagtttatacatcgtataacataagctcacttaccatagtagtttaggtgttaaaaatcacccacttaaagattcattcactgagtcaccgacttcttttggttttttaagtaacgatgaatcaacagtgtaacgtaactgtttcagccgaagatattgaagcgggaaagaagaagcctaagtttcaagcagaaccaacattgcccatctttctcaaggtaaataattatatcaaaccaaaacaataaaagagcaaaagaaatgttagaaattggactgaagtatagtaagtagctagtggttttcgtgtatgggaatgatctctttggtactgatcttctctgtttgcacaggcactgagaggagatcaaaagaatatcacacatttgtctctatctctgtgtatctacttttcatcagcttcaggtcttgtacataatctcatcttacatgaaatttatgtacaagacttaagatatccatagttaagattagactaattaaggggggaaaagaagcgaaaatgtgtaatacgatctttttatttttttaaataggtttcattttcatgagttatgtatatataatctcaagacttagtagtggtttttgtgaaattgatgcagttcagggatgttacatacaaagtggtgatcaagaaattgacttcatctgtggagaaagagatattaactgggataagtgggagtgtgaatcctggtgaagttcttgctctcatgggaccctcagggagtggcaaaacaactcttcttagcttacttgctggtcgaatctctcaatcctctactggaggctctgttacttacaacgacaagccttactctaaatacttgaaaagcaagtcagtgtttttggctcttaaactcacattttcttatatgaatgaatacatataagatttaacaattggttcttggtttggtggcaggattgggtttgtgactcaagatgatgttctgtttcctcatcttaccgtgaaagaaacgctaacctatgctgctcgtctgcgcttacccaagactcttacgagagagcagaagaagcaacgagctttagacgttatccaagagttgggtttggagaggtatgctggctcgtttagaggttccaaacattaacaaactaaatgtggtttttattttaataacttggatggttgcagatgtcaagacactatgattggtggagcattcgtgcgtggtgtatcaggtggagagaggaaaagagtttctattggaaacgagatcatcattaatccttctctattacttcttgatgaaccaacctctggtttagattccaccactgctcttagaaccattctgatgctccatgacatcgccgaggtttgtttgtttgttcagacaattactatctttgctttgattgttttctgaactttgacgaaaatatgttcggaacaggcggggaaaaccgtgatcacaacgatacatcagccctcgagtaggctcttccataggtttgacaagctgattctactaggaagaggaagtcttctctactttggaaaatcatcagaagctttagattacttctcttccattggatgctctcctcttatcgccatgaatcctgcagagttcttgctcgatcttgccaacggtaacatcaacgatatctctataccttctgagttagatgatagagttcaagttggcaattcaggtagagaaactcaaactggcaagccatctcctgctgctgttcatgaggtaattatagaagcaacaacatttctagcaaatcagtattacctaaaaccaaattgagttctgatatatatatcggaaaaactgtaagcagtatctagtggaggcctacgagactagggttgcagaacaggagaagaagaaactattggatcctgtgccactcgatgaagaagctaaggccaaaagtacgcgtctaaagcgccaatggggaacgtgctggtgggagcaatattgcatactattctgcagaggactcaaagaacggcgacacgaatacttcagttggttgcgtgttacgcaagttctttccacagctgtcattttaggtcttctctggtggcagtcggacattaggactccaatgggactacaagatcaggtatgttatcatttggttttgaaatatactttttttttatgcacactatactaatatcattctctacattcttatgcttctttgttgcaggctggtttgctcttcttcatagcagttttttggggattcttccctgttnnnnnnnnnnnnnnnnnnnnnnnncaagagcgagcgatgttaaataaggagagagcagcggatatgtacagattaagcgcatatttcctagctcgaaccacgagtgatctccctctcgactttattctaccttctctcttccttcttgtcgtctatttcatgacaggtcttcggatcagcccatatcccttcgt

SEQ ID NO: 4003 - DNA, 1929 bp, Arabidopsis thaliana landsberg
  unsure (1)..(1929): unsure at all n locations
aaagtattctccttgcatttgtcttctccattgtttggcagctacttgatgcatccttagacgaggaagggcttttagaactgacatctaataagagatctaaatggccaagcagcccacacgacatggatttagacgggctggaaaattctgtgaagagaaatgaaaaccatgatgcactagagaaagcaaacactgaaatggctatcgagctaatccaagaatttttgcagaataaagtcacatcgannnnnnnnnnnnnnnnnnnnnnnnnnnnnnnnnnnnttttaactagcaccccttatttttctctagttgtctgatttttttcattgtagacactgctggccccatgagcttgatttcttgcaaatgaatttaaattgtaacaatttcttcagattaatttctcaaccaagccctctaagtttcctttctcttcagggcaacacactgggaagatttcagtcagcgctttagagtactggcaaccaaatcaatgacagtgaggaaatcaaaacatattaatccagaagccctaacacagctggcatatcatacacgaaaatttcttgaaagggacagcaagaccatccctcgaggagaatttcatgcgattgtctcctctggttctaagttagcattgaccagtgattctgcactttggttgcccattgatcttttcttcgaagacataatggatgggacacaagctgcagcagctagcgctgttgaaaatctaaccggttagaagatttatctctatttttcgttcgtgcatttcttctctcgtactcatctacatatttattattatgggctttattttcaacacaagcaaacaattgcaggtcttgtaaaagcattgcaagcagctaatagtacatcatggcatgatgcctttctagctctatggttagcagccttacgccttgtgcaaagggtaggtatctattccgacaatactaagaattttaagctcttagcggtagggtaggttgttctggtcttggtgcttttaggagaatctatgtctgcgttattgctttttcatgcatatgttggaaatattatctgaagtaagtactaacatgtgtgaggcacccacttctgttgcacatataaacttatgcatgattcataattagaaggtcatattatgagaacgtcgagcgttatgaatattttaaatttctgagtcacatacttctttaagtctactgacaaatatatgttgtaatttgaaggaaagagatccaatcgagggtcctgtgccccgcaccgacacttttctttgtgtattactttctgtcactccacttgcagttgccaatattatcgaagaagaagaaagtcagtggattgatcaaacttcgtctagtccaagcaaccagtggaaagagaaaaaaggaaaatgtcgacaaggattaattaatagcttacaacaacttggtgattatgaaagcttgttgacaccacctcgttctgtacagtccgttgccaatcaagctgctgctaaagcaattatgttcatctccggcattacaaatagtaatggatcctatgaaaatacaagcatgagcgaatctgcaagtggctgctgtaagtaaacttgctatttattttttgctctttcaatgttaaactgatccagcattctggttttgaattttgatcaagagtgcggttttccttgtttactctaaagatgtttgttgttatgggtgtgtatctgctctggttttatttgtggttgtgacggcttagggttcttcattgtagatgtttgttagttttctctctagtgccatgctattttgcttgttcttcctcgtcattttagactattaactgtgtatttgaatgtgactggttttgtaattgtgacatgtgttggcacagctggtaacatgcgccatctgatagtgg

SEQ ID NO: 4004 - DNA, 1735 bp, Arabidopsis thaliana landsberg
tgggaatctgaaactataagtgggagagaaaagacattgattctccgtttaagattacgactgtggcatttgaataatatattattgaaaacgattgggaattttaagatatttattgaaccatgtctatctttatgaaatttccggaaataatttaaatagttttattatacaaactgttatgtacgaaaactaaacaagaaacgacatgaacgagtatacgctttcttgtttcttgtgcctatacaagagtattaactttagtttatactatgtgttactagaaacagtgataaaaattactattaatcagggggtagaaccgtcgaaggatcttgggagcgattacgtcggacattaagaattgcttgtttgaagctatggtaggcgagaaagaggaaaacaacggtggcacaggcaagaaataagacaataacaatatcggacacaaaatcgaatttctcatctctggtagcaaaccgtaccaatcgcacacctccaaaaatagcaacaccgattagcgacagacatgttaatccaagagtcataaacgcagccggtattacccaatttaatacatctcttcaaatgttcgaggccatattcttgatttttttttctttttttttctcctgatttgttttggtttattcgatgaaaaagggcactggtgtatataatgtccacttaattactttgaaattttattattcatttatttgcttcacgatgggaattaagtcaaacttgcatggtaataattcaatgggtttgtatttaataatctgccatgttgctagagcgtgtccaaatctcgttttctgtctaatacttttgagattttattctaaatgacatagaagcatgagttgagctagttaaacttaaacctatagttccttttgaattttgattcttaactaaatgtatcttcaaattatatttcttggaaaaaaatttaagattggttgaactattcggttttaatacggtatttaacccgaaatatgttttttttttccttttataaatcagttttcttgttttattataaagtgcagtacttaacaaacgaattagacatcactaattttttaaaagacgcataaataatgcatgttctttgtaacaaatcgatgaaatcactaaattccaaaacaaaaaaacggctcgataactcaaaaagaagatctcgtactaaatagtcaagcaaaattattcatagatgtcaatccctttaatcaacggccgcggtgagggcaaaaagtgacgacataattagctttagaacatgtcgcaatgctagttgggtcatcgtaggcgtatgagtaagccttagggcaagctaccttgaagatcttagagtaagccgttggcttgcatgactgtgggttaccgaacaagccggtacagcaatagcgtggtgagttaaacgcagagcatgcgcttttacaggctactacctgtgtcccgtcacgtgaacggacttgtagaccaaccgggcacatccggttcaggtcgcttacgcaaccagcgtaggtacactttcccgtacccttcaccggcattatcgacatcgccaagttatatctaacatcattgattaacaagataattaattaatattatgtgagtaacaaatatgtgtaaaactattgatgttagaaagaacaatttgattagctgcttggtttcggcttttttggtacaatcaggttttgtagagaaaaatatt

SEQ ID NO: 4005 - DNA, 3156 bp, Arabidopsis thaliana landsberg
tccaaatacaaatttgaagtaaaaagctttgggtttctgttaaattattggtggaaagtatcgatttttagtttaacccacaacatgtttgctctctttgaaacattgggcttaatttcccgtattttagtgtctttgtaatgcctattgacctaagcattattcatttggatgctcatctgatctcgttatcacgtgtcttttacttgaataacgatggtgtgtggactctttgggtttcaggctcaggttcatagacatgttcataacttcagggaggtacaacaatgtaccctcctctccataaagactggtggctgtagtgaagactgttcatattgtcctcagtcttcgagatatagcactggagttaaggcacaaacactcatgtctaaggacgctgtcattgatgctgctaagaaggtttgcacttttcttgtgaatgtttatttttgctgaatgtagaatccttagcagaatgtatcaagaagaaggggacatgcattactatgtaccaaaacgttgtttttatcaatccgagctctatctctatccaaaagactctaattgtttaatgaagcattttgacgatgtaatgagctcttctgatttgaattaacaaatttgatgtgttgttaggcaaaagaagctgggagcacacgtttttgcatgggtgctgcttggcgagatacaattggacggaaaaccaacttcagccagattcttgaatacatcaaagaaataaggtaccttactattatgctttttaagttgaactttgaatttccttgtttatactacattatatgatccctttttcagctgcttctgaatctaagctaacttaaaagataacccaccgaaccgatcattaatggttctagaatgaacatttttgcatgtcaaactaaagtgaaaatttcaaagtgtacttgatgtatccgtgagcagaatgaatatgatgttgatgatggtgtctggctgaatgtgtttactaactttctgggctctcactttaaaacagaggcatggggatggaagtttgctgcaccttaggcatgattgagaaacaacaagcactagagctaaagaaggctggcctcactgcttataaccacaatcttgatacttcaagagagtactacccaaacgtcatcactactagaagttatgacgatcgccttgaaactcttagccatgttcgtgatgctggaatcaacgtttgttcaggtaactttgatatgaaaatagtattcttgtatgcctcaattctatagaactaaaggattgaaacctgtcttcagcttggtcattagactcacagttttgtaatattcgttgattttgataaatccatagatacgacatgttctcaagtgttttcttttaccgataaacaggaggaatcatagggcttggtgaggcagaggaagacagaataggtttattacacacgctggcaacacttccttctcaccctgagagtgttcccattaatgctctacttgcagtgaaaggcactcctcttgaagaccagaaggtatatctccacaatctaaaatcacaaattgcaagtcatagcagctacttagtaggaaatggctttgagaaccgtttgtgtttttgcagccagttgagatatgggagatgatcaggatgattggaaccgcacgtattgtaatgccaaaagcgatggtgagactgtctgctggtagagtccggttctcaatgtccgaacaagctctctgtttccttgctggtgcaaactctatcttcaccggagagaagcttttaaccacaccaaacaatgattttgacgctgaccagctcatgttcaagacattaggcctcattcctaaaccgccaagtttctctgaagatgattctgaatcagaaaactgcgagaaagttgcttccgcttctcactaatatcattatccactttttttttttgtttggagtcgggacactatagagcagtcccttttactatgtagcatggtttgacgattttgtgatatcatttttcgttaatcgttattcgaagatgtctagatttctcatctgaaagtaaacttattattctagagtgtcatgaaaattgaagagaaaagttgcaattaaatctctcaaggctgagatgggctttaaattaggcgtaaacttatcaactagattttggcccatgttaagcccattaaagcttcaaacactatccaagtcaacaagcttgttctgttctgttctgacttctgagatcgtcttgttcaccaaagagaagaagactaactgtgttttttttttctttcctcgatgcctagatcaagcagatgggtcaatcagcgagctacctctaagattaaaaaatttatactctttttgggtgtagcctttgtcttctacctctacagatacccttcttcgccatcgacggtggaacaatcatccacttccatctacaacatttccgttaaggtataatcagcttaaactaggaactttagaagccaatttttcacactctaggttgatccgcgtctatatttagtcctgattctgaagaatcattctaattgctgatgtttatttatgaaaattttatgttttaatgcgaatttagctaagataatgaatctagacgagtgcctttattttaaggactagttgctaatgcaactgtttagtgttagatggggaaatgactttgttttgtgtgtctgtgtgtgttttaagtgaatctttcaatgactatatgccccttaagttcatctttatagtaacgagttctactagtttatttatcataactcataactccgtatcaatttctcaaattgaaaatgtaggatattgaagggaaagatgtgagtttgagcaagtttaccgggaaagtgcttcttatagtcaatgtagcctctaagtggtatgttactaagtacttaattgttcttacttattgcatataatgtcacattacattggcgttatatataaaatcttgttgtgatgaatgagcagtggtctaacacatggaaactacaaataaatgaacattctgtatgccaagtacaaaactcagggtgtgtctctttatcttgctgagcctttctcaggttattaacaagttgaaaatttttataagtattaaaggaagta

SEQ ID NO: 4006 - DNA, 400 bp, Arabidopsis thaliana landsberg
taaaattttcattaattcccaatttaagtttttacttatgttgctctcaaatttggggacaggggcatcaagaatttcctctaaaccgaatcactcatctcgactctcaagtctcaccatacctttttatagcaacaatagcttcactacttcatcatggtcaaatttgacaccaagaagtgaaggagagctcttaccatctccaacactaaaggcctttacattcaacgagctaaaaaccgctactagaaacttcaagccaaatagtatgatcggtgaaggcggttttggttgtgtctataagggttggatcggtgaacgctcgttgtcaccttcgaaaccagggtccggtatggttgttgcagtcaagaaacttaaatcagaagggtttcaaggacac

SEQ ID NO: 4007 - DNA, 1160 bp, Arabidopsis thaliana landsberg
gtttttatttggagaacacctcagtgaatttgtatctagatgtttcctaaattcgctcgtcttcatcggatctgctactctttgggtccataattcatataactcttactgttataaaattaggttttggggcttatgatcgactacgctgccttaattttcagcactgtgactcgatttgagttttcctccttttgctactagattagtctctttccaattatgcttgaaattagggtcactaattatgtatctgttcacgtttctttgttgttgaattgagttctaatgagttagatgatcactgtaatccgcaggattctccagtttttcaatatattaatgatctctctccaatagagccagtgaagccaggacgcccagagaatatcttgcactcactggtttttacatctccatcatcatcatcatctctattttgttccccgcagttaaactcttaccgagattccagattttttatcaaaaggttacttgattactccttttacttgtcttattgatagtaagaaagatttgttgttggttgctgacaatggtattgttgtgtggttatgttccttgtttaggcatcgttctctagatctatcgagtccagtagtcctcatcggtgagactctaaaaaactcaccagatgctttatgggaggagaagctaaagtgtaggcctgagaagttggaaaatgtttctgaacccaagccatttaaggagcagataagcttagcaattgagttggcgaattcattgaaacacggaagagatggatgtgatattcagatggtttcttgtgatgaagtacctatggatgctgatgatgaaataggaagcggtggtggatccagagagctgtctgatgagttatgtagacagtcttttgatccacttgactttgatgctgattcagatggagtacttcacactgatgaaatggaagctgagagtgggtttggtaaagaagtaataatgtttgatgttgctgatatccagaactatgagcaacagattccaaggaccacagatcctagattttattctcttgcttctgagcctcaacagttttctatctactgtaataactcaaattatgtcgaagagcgggaaggttcgtgcagtgtacaagttgcagctggagctccaga

SEQ ID NO: 4008 - DNA, 4999 bp, Arabidopsis thaliana landsberg
  unsure (1)..(4999): unsure at all n locations
gtcttccaaaccacagagaaaaatgtaatatcccaatgagaaaattgcatttttggaaactatacgagtatatcctgtcactatggtatggaaaaatggttttgtttatcttctcaaaatttccaagttattcactagtttatgtaggttttattttgattctaaggacaataacctgcactgaatcttgagtgctagatattctcaccatttatgtgacttctgtttttcatttagctgaaactttgacgcaagttcagatgctaatgctgatgtttcatcattttcacaatattaaacagatgggatccttcttggaggcattttgataatgtaccagttccacaactacatgcagccgattctccttctcatgtactcattttggataccacaaatagtcgccaatgttgtccgggattcaagaaagcctctgcacccatattacatcttgggcatgacagctacacggttagctataccgttatatgtttttggatgcccacacaacttcatgcgtgtagagcccaacaaggtttggtgtatatgcttgtgcacattcatggggttgcaagccgtcattcttcttcttcagcattattttggttcacgctgctttgttccccgtcaggttagtttgttttgtattcatgtaaactacacatgaaacaatatatctaataaagtgaacactaagttttcagttcggtttcagtttggcttgaatatttcaagtctcgttcccattgctaagttgtttttgactaccactaatctctttcttcatcgttttgcctacacgcagatgctaccagagaaatacaactaccaccgaagatttaatcgggatgtaagccgcaccactgattgtgttatctgcatgaccgctattgatctcagacagcataccagtgattgcatggtactgcagttttttcctgcttctcttaactatattttttccccaatagacagaatcatgagtgtggttgttctgaaaacaggtaactccatgtgaacatttctttcactcgggatgcttacagagatggatggatataaaaatggagtgtccaacttgtcggcggtctcttcctccagcatagaggatgttttcggtttgttaggatgtacagacttcactcagattattgcgggtaacaactcaaatctaaattttttattttactttttttccttcgaagtttctttgcctattaggtctatagatagggtcttggttctatctgaagaaaatttgttgctaacagaaatatgatttcataaatgagaattcaaaatgataaaacccaaatctctgtaaatagttagcctacgaggaatcatgcttttatttgagtgtttcaggtttgtcggttcctttttttgtctgactgtgggatgtattacttatttgtcaaacattcctgaagtgtgattgttcacaaaatcgcgaagttaactgctgcaaaatttgatcctgaaacaggtggggctggttctttaatttcaggtccttgcagaggtttagaagatttttagatgaaaacagagcaaaggtggaatctgtaactgcggctagataccgcagatagacaattgtgttctgtataaactgtattacgttataatcttagtgcatattcttcaccccacaactaaatctttcacacatttctagttctttcattttctttgcatacatagcatcttgtcattgtgcgcataagagtgaatccttatgtgtcagctggaccaggagcaatggaaggtcctgcggtagatggagcaaccagtggagccatgggtgagcattcgtggtcatagcagtctatggggtgctcaagtacagcatcacagactttttggggacgctgaagcggtttgtcaggcagacagttgtagcgatcatcgatggctattcctctggaagtcaggttcctgcagataccttcttcttcactgannnnnnnnnnnnnnnnnnnnnnnnnnnnnnagctgggcaaaacgcagactccaagagggacagtgccagtgaacatgttgtgttccagatttagctgctcgagatggcctagcccagcgagactgtaaggtacaggaccaactaaactgttgtagctcatgtccaggactcttagcttgtagagatacccgacttcggggggtagacacccagataagcttgagttgattaggagaagctcttctaaggtatctgcaaagcgggctatggttggaggcagacaaccgctaaaatcattgttggcaaagacgacaacagaggcggttgttcctgtgaaatctcgggggatgaggcttgttaaccggttgttgttcacaaaaatggcatcgaggggattgctgaagagttttggaggcaaggggccttcaaactcattgtaacgaaggtcaaggtactttagagaagggagtgcaaggacgacatccggaaaaggacctacaaagcggttgttgctgaggtcaagttcatagagtaaggatagattggcaaacgaacgaggaagtatgccacagaagcgattgctattgagatggatgagagcgaggtcagagagaaggccaatggcttcaggcaggaaaccagcaatgtcaccatgattgagatcgattccggcaacaactagagtgtttggattggaaggggatggggcacagaagatgccagtgtagctgcagactgagggaccgacccaatctgcagttaagttctttggatcagaatagattaccttcttccatgctttaagtgcacggtacgcttgctgaagatgctgtttagggtttgtggagtgacttgtgtggtggtgaaggctatgttttgctgttgataccaaagagaaatgataaagaagaactgagataaggacaggaaatgttatagagagagccattcaaagacaagttatggatcctttgtcttaagtgtggtggatttatatataaagacaataagtttggtctttggtgcaacgattacagaggatgaatcaggtagtggtataagatcaaggaaaaggacttaactccttacttgtagctgtctggagtggtttgaagtgggatttgagactgacacatttgaagaccaaatcttagtgttggacttagatcactcattcgcttacaacccaaggaaaccgaatctgaattatacaaactttcgcataaccatacatttaaagttcttttgatctctcagcttatgttgactttttaactgataatattcactaaaactgttttaactacaaaaaacataaacatggtattggttttctttgtatttattcttttgtcaacaaaagtcatagaagtatagaactaagacaaagggccacaacttgacagagacactctatattctaaaagcaacatttatacgaacggacacactgctttattcattcacagacctcaagggctattctttcatcatcctcatcgtttagccaccaccagagccatacttcttacccaacacaatgagctggagcttgtcatagccggccagtacaccagcgcctgcaaccgcacgaaggatgttggcacctgcacccttgaagagtgacttggccccttcgttcttgacgatctgagagaaggcctgaagagagctcttgtacttcactgcttcacctgacgtcatcatcattcttctgcgaaccgtgtcaattgggtaagacgccagtccagctccaatggtgattccccatcccagtaagaaactagcaaggaagctatcctgtacagattatagcaatgagtaaacagtaacagaggactcaatatgttgaagtgaggagttttctttgttttttacctggagaccatcaactagaaccacaggcttcaaggaatcatacaatccaaagtaaagcccccggtacacgacaattccaacgcatgagatgttgaaaccacggtaaagcccgacaatgccatcagaggctatagtcttcttgtacacgtcgaccatgccattaaactgccgctgaccacctttcttggccgccttcgcatcattggctaaacgggtacgagcgtaatccaaagagtacacaaaaagcagagatgatgcaccagctgcaccaccagacgccaggttccctgcaaaccacttccagtagccatctttttctttcttgaagttaaacagcctcttgaagtaatctttgaacgcaaagtttaaagcctgcaaaacaaaactatttgcttagcatacccatctcgacgtctatacaaataccacgtcaaagaagagaaaacaaacctgagtggggaagtatctgataacattggcagtgtttcctctccaaagagcaagcattccttcgtctttgactgttcgagcaaaacaatcactgattcctttatatggctcagagagacgcccagctttgatcatttcatcttgattctgaatcaagagcttcacacgctctataggcgcggctgccgtcttcgaaacagcagctgagactcctcccataaggaaatcgatcaagaaaccagtaccagttttctcactaggagcgtgagctaatacaggaaatgaaccatgaggtataagagacgagccaacgccatggctagttggctgcaatagactctgcaaacctccattgacataagcaccagagacacagtaaccacgagcttgcacactcggagaaagtctattgatcaagtaagattgtccatgtagcttctgaaagactgatggatgctttgatccatccattttttgtacaaatcagtaaaagctgactctgaaaaacaaaacaaaacaaaacaaaacaaaaatacaaattaaacaccacaaaatcttgctttctcgaaaatttctatatttgcatgcttaaaaaagaatgatcataaccaaaactggaacaaaaacagagaagacatcatcaacacatttcatacgatcctagttagcttcgttaaagacaccatttcgatctgtcaactataa

SEQ ID NO: 4009 - DNA, 1093 bp, Arabidopsis thaliana landsberg
cagtctcatgtccctgagggatatgagttgctcatcgactccatggccaatacttcttaagttttacaagtctgtgtgttcatattctctcctttagatttgtgtacagctgttacttcttcctttaaattatctttgcatatggaagaataaaaagaagaaatatttcagagaagttaaggtcttaaatgatagtttttattggattatcctgttcaagttcaatgaaacatttactagtaccactcgcagataagttgtaagttggtgtattaaaaacaaaagtggtggagatgcgggggatcgaaccccgtgcctctcgcatgcaaagcgagcgctctaccatttgagctacatcccctcttgaaatttgttggcgtggaacttaaggaatcttaaaaatacagaattctacaaccttaaaataaaaactaagttaaaaagctaaaattggagatgcgggggatcgaaccccgtgcctctcgcatgcaaagcgagcgctctaccatttgagctacatccccatttgttattatcttgtcgggttcaatatatcaaatgattgtaataataaaaactggattgttgcagcttctgtcttaaagaaagcccaaagctttcgatgttggacggctgcttttcaggaccaaaaaacgacaaattaagagcggacagcaaacaaaatactttttgtcgtcttctttcacttttgaaaatttatcccaaaaaacattataaaaatgaaaagtctcgttcaaacacattagtggggaagatttagggttaaaagctcgtttaaacacatcaatctgtccatttcaaattttttgaaattatttttgtaagggaactagagataagcatatcttcattgaattaattgattaattgggaaaagtgattaattgtacattggttttctacatcttcatacttttttatatacgattatgtatttgtaggcccatgaaattctttatttatcagattcaaaacctcaatacgagcgggattcaaaaaatatatatagcactggtcgaatataagcgttgcttccaaagcctgattaaccgagttcgggataggtgggaaa

SEQ ID NO: 4010 - DNA, 216 bp, Arabidopsis thaliana landsberg
cagagacgatttttttttaatgtggaaaaaatacccgctaaggcaaagccaaattgagaggatcgcgcacgggatctagaactattgcgacaaaacacacacacaccgtaatcgaatcattgcccttcgcccggttggcgccgacgaccattggattgaagaaggatagaccgcttacaaacaaaacacttattactgaacccggccatgtaagta

SEQ ID NO: 4011 - DNA, 3608 bp, Arabidopsis thaliana landsberg
  unsure (1)..(3608): unsure at all n locations
ttgtttgatttagatcacgaagattattcgctggacttaacagggttggcacagtggatggagcttccggagtttgtagttttcggagatttgcttgcatccaaagatttaagagctagggtttctgttttagtagttcaacaacaacaacaacatggatgagtgtaacatatgtcagtgaatgatctcaaaaaaaaaaaaattgaattatactcgcatcatgggtaaatgttagaatttacatttgacgtggaaatagatttaatataattgatctaaacaacattggttaatccattcattaccaaattgtttttgagtaagaaactcatgcatatattgttcctaaaatagtatatatcaaatcaataatccggtatttttgagagatgagttgttctgctctaacatagtatacaaagatgagtttgacgcagttggaatacattgataagccagttaattattgatttatctaaatttagtgttcattaaaattgtattttaaatgtatgcaaataatccatttcgtactacttagcacagttaatttgcacagaattattccaaatatctaaatcttggcgctttgttgaagcaaacactactgctaaaaaaaaataaaaaaaaatagaaaataaataataataaataaataacaaaattgaaaatttcacctgagctttaatgaaaaaaaatacgagtaatgtgcacaatgtagttctataaccactcctatgaatatccaatgatttctaaaacacagattatgtaagagaaaaattcaaacgtgagatatctccattgttcatccgagctcaagcacaacaaaggtttcagtgaaactgatcgaaaaataagtgaaaatgtcttgtattttacttcgatttcttacattgttcaacatgaaatttcaaactagtttaacctaaataaatatgttcgatcttgaccagtttctctatttccctctatgttgttttagtgttaatataaacctgattttctataaatataaagattaatatagttgttgatcgcaaaaccttatgcgattatatttgtgatgaactgatcggctaagtggattttccaaaaagttacatttgaatggtctaaataaaatttacaaaaaaatattcttcttacaattaaatttcgaagtctataatgaaaagaatggtaaaattgcaaaatgattatgtacgtatataagaacctaaatcattagctgttgttgttgtataannnnnnnnnnnnnnnnnnaattaaaatcctgtgaagtcaataaatctccaataataccaagctccttaaactcactccattcctcaagcccttctgtgaacacactcgtccttccgttccctcttcccactatgaacatatcgaaatcgcttaccatcgatcttagcaaactcgatgtttcagccgcgtcttcaatcgctttctccgagtagaaaatgtctactaatgtattgcttttcacgtctctaagaagttcatcgtcaagcattttatcccacaccgtgttctctcgtgctttctcatcggtagtgatcagtcgaacaatggttatattgatccttgggtcacgggccattcgtgtagcaagtgtcactgcttctctatcgtctttaccgcctaggaagatcatacaaatattgtaagatgataagtttggaactgtgccattgatggttttccgtccggaactgcttcggtatacaaagactccgacagaacacggtgccacgtcgagaacgctcttgttaaggttccggatcatgttattgttagagataagagctgatccgtcagcagaccaagtctggtgaaaaggaaggagtatgagagaagtagtgttgttgagagcaagcatacatatatctccgtgcatcgtatcgggcatagataaagccgtgtaggtgcttacgaagaccgaaccatagaaatctttacgaaacttttcaaaggagacaagtacattgtttgaataagacgtctcctctgttctgcgagtttgcaatttatgtgaaatgaagatcggatttgcttgtcctacaagctccatcaagtggagaacgtaggtagctacaggagattcccgggacggacaaatagcttcaagaagattaatcattggacttatatcatcagttctgtaaatgcaagacagaatccttagctcagagtttggtttcaaatgctgcatattccgcttctcgtaccccgcgtacatcctcgaatgatcgtataagtaccgcaagatcggaggaatgattgcggagttcaacgttatgtaaagacacgccacagtgaaggtctcgggacggacagactgcaatgttcaaagcataaacataagataaactttgtattgaaatgattaattatgattatgaacttcattatgtgtgtatacataattacatacccctctttggtaggccaaggcgtaggcaccgagctcgaagatgccttcaaacgacatgataagagatagagcgaagcaatcttccatcggcataccatagaacaaagcaggaacagtagtaaagatgaacttgacgacaaaagatgttaccatgatgagtataataccattgagaccttcccaaccaaataaagccgaaatatcgatctccgtggaagatgaagcaatgaaaaacggaagaaaagttccgaatatagccgactcatacttctgaatgatcgcagaacctaaaggaggaccatgaggaacagcaagacctaagatgaaaggtcccatgaaaatagattgcttgcaccaattggcaagaatggctgaaccagaaaccataacaatgattgtacttaagtagattgccttgacgggacgaccggaaggtgtttgtttaatagtgtagaacattaacggtctgaaaacatagatggcaatacatacaaagagaaccactatccctgctcgcatcaaaggacgattccctgcaataacatcacctataaacacactcccgagccgtgtttgttcgtccttgagctccttcataaatatgagaacggaagcgagaattgaggtgctgaaatcacttatcacagcagaagatatcgctagacgaccaagctctgagttttgtagcctgagctcaaagagaaggtttccaacaacggggaaagaagaaagacattggattgagtaaatcacaacatactctaatgaattgagagtatggtctgagtttttcgttccaacgtcccttaagtttccgaagaagataacggaacaaactaacgtcgaaagtaaaacagaggagagcccaatggtgatagcttttcttcctgtggttcggatcaaacccgtgtccattttaactcccatcaagaaccagaacatcatgtaagaacaagcagcagtgagactaaacacaatctctttgtaatcctctgtagaaaagaatcttctcgctgctgaattctcctttagaaaagacttgcttaaaagaacaccagtctacaaacaaagatcaacacaaacctcaaatttcaaatccagataacaagaaaacgaaatcgagattttcgattacttacaagcatatgagaagtgaaacgtatcatgccaa

SEQ ID NO: 4012 - DNA, 3043 bp, Arabidopsis thaliana landsberg
  unsure (1)..(3043): unsure at all n locations
gtacatcctctaaggatcataaatgcgttttatgagcggaggtatgactgcagagttcaacaagatgtacttttataaaaccgtaaaggtcaccggccgaatagtctgcaatcaaaatgaatactaagctcagtttctgagtgtatcaaaatgtgttagatacattttgaaggaaatatatcaaatacatttacttacccctctttgatacgcataaccgtaagcaccgaactcgaaaatgcctttgaatgacataattagagacagagcaatgcaatcctttgctggcataccgtataagaaggcagggagagtcgtgagagcgaatttgacaataaacgatacagacactaggatgacaatactcttgagatctatccaagactgtaaaatcgaagtatcgatctcttccgcggaggtagccacaaagaaaggaaggaatgtgccgaaaaccacagactcaaacttctgaagtattgcagagcctagaggtggaccgtgtggaacagctaagcctaagataaaaggtcctatgaaaatagattgcttgcaccaatcggcaagaatggctgatccaaagacaagaatgatgattgcatatatatagaatttctttacgggacgaccagaaggtgttctcttgataatgaagaacattaatggtctgaatatgtatatggcaaaacaaacaaacaagaccactgtgcccgcacgcttcataggacggtttccaacaataacatctccgataaaaactgatccaagccgagatttatcgtccttgagttcctttagaaagactagaaccgcagagaggatcgaggtgctgaagtcactgatcactgcagaagacatagcgagacggccaagctctgaattctggagcctaagctcaaaaagaaggtttccaattacaggaaacgacgaaaggcattggatcaaatagatgaaaatgatttcaaagaaactcataaccggttctccctttttcgtccctacatctcttaggatcaagaagaagatcaaggcgcaaaccgttatagagagtaacactgaggaaagaccgatagctacagcttttctcccggtgctgcggatcaaactcaagtccattttaactcccatcaagaaccaaaacatcatgtaggaacatgcacccactaaaccaaacagagtctctttatagtcttccgtcgagaggaatttcctagccggtgtattctccttaagaaacgacttgctcaagagaatcccagtctggcaaaaccacacagaatatcaaacataagcaatgcaaacaaagaggaagagagatttgaagattcaagaattgagtaaagttcttacaagcatatgggaggtgaaacgaatcatgccgagacgtctgaggaagaaatggaagaattgccagagaatagtgacgataaggaaaatgatctgaacatgtggaaacatgtaattccagaactcaatgtttgcttgaggatctgggagcttcggggagggccatagcccgctcgagctcgggttaataggcaagataccgcagatcatgtttgcatctctccatgtatctctcaggtaagggatcctatcaccattaaactccattggacaaaacttgttaacaagaacaaagatgatagaaacaagagaatcatatgattataaaaatcgaatcaagagctataactgtcttaaacaaaaaaggttttggtaacagaattgaagagaagcagtgaaacaaaaaaacatctgggttttgtcattaaacaacaactctctaaaaatagtcaatcttgtgggaacaagagacggcgacatagtttttcagatttctggttatttgttagttttttaaacagcttgttagtgttaatttaagcattctcatcacttcaacagacaaatgaatacaatataacttcaagtaaatatcataacttgcaagagaatattatactttttagcgtttccagattccaaaaatagcaaaaatacaaatgcatcaaacaatctaaaggaaaaacttcacaaccttcaatcctcaccacaagaggctactctcttttccctctctatacgttcctgcaagttcaaaacaccaaacacagtgcgatggacaattagcatctgcgtttgcggctagaccttaaaacgcaaaactccgttcaacagccaatattcccgaccaatgtttatatgccgatgttcagagttcagaacatcagtttaactacttatttcatgccaattaagacacgaactaagacaaaactaatacttagtttcatttatggttaaaagccacatgatcatggaaaatcaagaaataccttgggatgcagtaggagtcttgaatcgttgaaggtttagttagcgaaaacattgatcttaactcgagcagtgacatcggggtgaagcttgagttcggctatgtattctccggtttcacggatttctgggagagagacaaggcgtttgtcgatgtccctgcaaaacacagccacagagaagcagataaaaccatattaggttcttcgaacaacactaaaaaccaaatgtagactgatccaactaaaccgcccacatgagaaagcttgtagctttttatgtggaaatgtagaattttctatgttgttacttttggagctgcgatttgatgatgtcgacgaggtcttgagctgtgacactgcaggaaaatataaagttaagtacaggctaaacactattctcaagactgttaaaatctagatttgcttaagtaggacttacgatccaaatatcagnnnnnnnnnnnnnnnnnnnnnnnnnnncttgaaagcaccaacggtttggaataccatcgccagttgttgtgcctcttctttcacctgcaaaaaaggttccacgcaaagaaaaaaccaacaaacagatgaaaatcaataaccaaagagttttttggtgatcactcaaacaccaaaactttacatgacctcaaataaaaacaatcaatgtattaatatcagattaccctttgcttctctgcctcaatccgttcgtc

SEQ ID NO: 4013 - DNA, 593 bp, Arabidopsis thaliana landsberg
attctgagttttatctggcttgtaaatttatttcttacacacatgtacattgtacagcgaatttattttataaacacatgtatagcaaatgagtttacttttcaggagtgttttgatcccattgtggcaaagtctggtcgtgatctcattcctgtcatggtctatgggtaagctgtactatgatgaactcagattcaagttcctttttcattcaaatgttaatagtaattgatcatcctggtaattcttccaacatgtttgcaggagaaacatatctggccaggagtttggaggaatgtactgcttggtcctgatggtgaagtatgtctggtgttcttgatgcatttatctttctctctgtattgttgttttaccatctctcaatctttctaattgttttttgctgcgtttttagttccctagttgtttctgccgcgctgcttaggatatttggtcagaaagttgcagaacttcctattgtagctacaagccgagagtatcagggaagggtaagcttttggacatccaatgtttctttgctgggtcggattcgcttgtttgtttataacttgtgacaaacccaatttgttaat

SEQ ID NO: 4014 - DNA, 307 bp, Arabidopsis thaliana landsberg
aaatacgggggttgtgaatgaattaaggagtgactaatcttttactatcatatatatcgatcctgcattatatgcaggccattagtaaagatactgtcattattaacactcctatcatggctcatgatttattacgagctttcattaccaatagacggaagcaagataaactttaatgggataaaaacgcttctgctcaatgaatgcaactggtgggtgaaaagacagcctaggaaacctgcagtgctgaactcactcacagatgcataggtctctgaggtaagaaggacgttgactaatggcaaaa

SEQ ID NO: 4015 - DNA, 1473 bp, Arabidopsis thaliana landsberg
ttaaagatacagaggccacaaactctattgcatatacagagaggattgtgactggaggtccagaagtggccactaccgtccgatcactctctgaggattatgatcttatggtagttgggagagatcatggcatggcatcaccggacttcgatggactcatggagtgggtcgaactacccgagttaggtgtcattggagatttgctagcgtctagagaactcgactctagggtttctgttttggtagtccaacaacaacaacaaacgtgaaaatgttctgtttgtttgtgtataatatatttattagaaggtgttcatatatacatttctcattcttttaagaggttttcactattgcaggactaaaattagaaaaaaaaaaaaaagatgttccattaaaacttcagaacaagaccgatgagacggaaccgagagaataaaagagttcagaacatggctaaagtacacataacataactaacatattaaatgctattgtttcgggcatgagattgcaataattacaggtttggaccgaaaacctattaacaagaaaaagaaaaacataactaacgtatgaaaaaaaaaaaaaaaaaaaaatttagattctatttttatatttaaaatccgtaattgagatttgagaaaggaaaaaaaaaaactaattttatatgtaaccaatttttaagccaaaactcggaaaaaaaacatctctaactattcacagattgaaataggttgaaatatatacaacattcaaaaacattgtaatcattacttggaactcaagaaagtctttgtttctaatcaatttctaacatgaaatggtaacaactagggcttgacatctctgtatatgtgccgaggcaacttccagaagccccaagggagtctcgttgccatttccagctgatcgatcgatgtttctatccccaagaaacactcgttctattagtcatctcctgatttcttaaaaatcctagatcatctgttgttgctgttgtatcaccaacacagaagcttgacaatttagatcctgtgaagtcaagagatctccaatgataccaagttcttcaaactcactccattcttcaagcccctcggtgaaaacactcttccttcctttttctcttccgacgatgaacagatcatactcattcgcaatagatttcaacaattgtgatgtttgatttgcgtcattcactacttcctcggagaagacaatgtcagcaccggctagaacgttgcttttcacgtctctgagtagttctaagtcgagcatgcgatcccagtcggttgcttggttcgctctctgttcggaagagatgagtgaaaccactgtgatggttattcttgaatcacgagccattctcttggcgagtgataaagcttctctatcgtctttacctccaagaaagagcatacaaacttggtaagatgagaagtttgcagctgtctctttgattgttctccg

SEQ ID NO: 4016 - DNA, 521 bp, Arabidopsis thaliana landsberg
ctcggtcagagatgagtcggatcacagtgactttgactctagggttttgcttcatctttttcaccaacgagagtgcctcccgatcgtctttgcctccaatgaagatcacaccaacgtcgatattaaattttcttgttcctttcagcgacaactgtccacggtccacaagaatcccaatagaacaagatgcactcttgaggagtgactcattgagacgtcttatagcttggttctctgactcaaacgccccatctacggtccatttcctccccgaggggacgataataatcgatgtggcctgttccaaagcgaccttgcaaattttatggagcattaagttctcgtgcgtgatggcagggaacatggtcatggtcactgactccatgtggctgaaggcaaggctggcggtatggatgttggagtcaggtacatacacgatttattcgattgttgtgtgagattaggacggtaacggttttgcctgcaggcttaacgagacggaggactgtgaccacaatggc

SEQ ID NO: 4017 - DNA, 526 bp, Arabidopsis thaliana landsberg
  unsure (1)..(526): unsure at all n locations
gcccgatcattaggctgtctgaaacaatggctgatccatcagcagaccaagtctggtgaaaaggaaggatgatgagagacgttgtgttgtttaaagccagcatacagatgtctccgtgcatcatcttcggcacggataaagccgtgtaagtgctaacgaaaacagagccgaaaaaatctttgtggaactgttcgaatgagacaacgacgttttcagaattataagacatgttctcacttttacgggtttgtaatcggtgagagatgaggactggattggcttgtcctactagctccatcaagtgaaggacgtaagtagctacagggttttctcttgagggacaagtagcttcaaggagattgatcatcggacggatatcgtctgttttgtagatacacgatagaatcctgagctcggagtttggtttcatgtgaagcatgttccgcttctcgtatcctgcgtacatcctcgaaggatcatannatgcgtttaagagcggaggtatgactgcagagttcaacaagat

SEQ ID NO: 4018 - DNA, 2050 bp, Arabidopsis thaliana landsberg
  unsure (1)..(2050): unsure at all n locations
agtttttttaggacacttttcgtgcccaatgaaaaccacacttggtagcgactcgtaggggcttttacatttgacacgaaaggaagtggttataacataaaggcctcgcggctgatcaagcatggggaagtttcttttactatggtggtcctggtcgtagtcctttttgtgcttgattatgttatgcatcttatatatgtaagaatattgtgtatcaatctatctatgtcagttatcaccagcatatagtattatatgtggtggtgaaaataaagtttaagatatcattatagttttgagactataactagtgtaagctagtgtcaaaaaaaaaaaaaaaaaaaaaggaaaaaaaaaaaaaaaaaacctagtgtaagccaaattcatcaatagggttaaaaagatagtttaatggattgagtattgagttctcgaggaagttatattcttgtctaaagtgttatcacatttaacaaagtgaaacggcaaggttttggttgccacaagataaacaaaccatgtcgttttcgaattgtgaaaacagcacgtagttagaaaattcatcaatctgaaaaggaaaagggtttcaaactctctctaggcggtctccgaattagcaaattgaaattggcaaattgcaagagttttcgattcaacaatggtgtggtttcagtgcgatgattgtggcgagagtctgaagaagccaaggctaccgagacacatgagtatgtgcactgccactaaggtacactaaaattgaaactctctgatgattctcttcttctcttaacctctctctgatgattattttcgaatcttctgaccatcacagttttcttgcattgactgtggaaacatgtttgggcaagttagtgttcactatcataatcaatgcatcaccgaagctgtaagtatttatttgccaattttgatcaatcttatgatgctaatcactaatgggttaagttttttagatttagttacgtttttttcttggtaaataggagaaatatggtccaatggtgcgatctaatggagaaagttcgaaacaaaagcacgatttcgatataaatgccgagttgttcaacagtcaatggttttgtaggtactttacacacatcgttagccttccttccattgtctgttaatggaggctttgttccaaacttagtcttgtttgtgtgtgttctcttgtggtgaggtacttaatattttctatttgcagcttatgtaatgcaactatgacctgcgagcaggattattttgcgcatgtctatgggaagaaacaccaagagaaagcaaatgaggttgctgatatggactactcgaaacaacaatctgaacatccagcagttgacaagaacaatttaacacaacaacccgacttagatatatatgtcgggttatcaaacgactatccatggttctgtaggtaggtaatcttacattgtttaggacattattgggtaaacctagctcaaaatgtattgttgtttgtgtgttctcttgcggtgagattttatgaagacatgcattaaatatgatttatttcgttccagcttgtgtgacataaacgctaccagcgagcagactttgttagcacatgccaatggcaagaaacaccgagtgaaagttgaacgttttgatgctgaacaacagaaacgacaatcaacacaacattccacggtggataagaaggactactcaaaacaacagatcgaagtcgatatannnnnnnnnnnnnnnnnnnnnnnnnnnnnnnnnnnnnnntaatctcttgatcacatatttcaccttttcactaccattttctatatcacgttagaagaacggatatgcgcttttgatgtgagattagtgatctgttaattatggaataattgaggaggattgtctacaatttttaggagtataataatgatcgtttagaaaaaacctatctatttaactntggatttgtcaatgactcattgaaactctgtgtccttagtaagagtgttcacaaaatctacatgccacctgagttaggtagttcgtactaggataattc

SEQ ID NO: 4019 - DNA, 1201 bp, Arabidopsis thaliana landsberg
gaatccctccaaacctttgaacatgatcaaagtgaggatgagtcctcaccctatctgtatctcttcttgattccctgtcttgatttcgtcttgaagattgaccaacttcaaagcaccttctatggtctgtgaagtgtgtagttctcctaggttgaaagttgtttgaacccgatgacaagtcctatctggaaatgctagactctccaacatacgtgttattcgcatttgtagcagttgcaagttgcggataagcaacttcaaattcattttgattcacttgtggaggatccactcttggaggtggagtcatgggcactggaaatgaactctcggtcatctgagactgagaattcattgttgatctttgaacactatcatagaaagggctctttctcttgcgatgctgagaggacgctgacggtaaggacagtaggctatattgtgagtaaacctgaaacaactgctacaaagcctcctgagacgttcatattggaatctgatggttgcagtttcaccagaatcaaagatgactctctgaaaaacttcagtctatccgtaataccaaaacaaactctaactctaatataagcaatctgaggagaggtcgcttcatgaaagtccagagaaatgatctctcctagatcttgagctatctccagaaccgtctcttcagaaatataaggcagaggaataccacgaatctgcacccagagatcaatggtagtgacaaagttgtgagccagagccacctcccagcgagtagctgcaacaaaccaattgttaaaaagccacagttctcttctttgcaccctcattagatcaatttcattcacaaaaagaaactgaacgtaagttgcatcaagaactcttccatgaacctgagtcgtcaatctccaagatcttggtaaggctaccacaacagagttaaggttttgaacttttggattcagaggcctagctatcagactcagtctattagtagcttctaccatcacataagcctcatggggaatgaacagggctggatcctcctgtcctaattctaaattctgaatctcatcccacaactcatcagccatattgttaagagaagagaagaaaactagaagctaaagggatgggaaataaactgacgaagaagagaaaaaagtataaaaagacaaaaagcaagacagaaccgactgaaacaatattaaaataa

SEQ ID NO: 4020 - DNA, 1445 bp, Arabidopsis thaliana landsberg
ggctgggcagaccaacactattgcaacacccattgtcctcctttaaaaccattaataaactgatacgtacaacaacttacttgttcaaatttcagacttttctattcaagcattcttacaatgcctaattgtaccactttacctaattttcacatatacgaattagttaagcctggataactataactactaaagaatgtaagaaattaatagtcgcttatggatgaattcttgtcgatagtatttttacattttctccaatttacttttcacatttacacataaatgaacaaagattgttgtaaaaaaaaactaataaatgatgaaagtagcccttataaacctgcagatataacctaaagaattttttcacgagaaaatatgaatccctaaaccctaattaattttttctttaagggcatttaggatttttccctggtcctccgtaataaaaataactcccccaagccctattagacccaccttgaatatcgtaacaattcggatgatccgcaagtactcgaagattaggagaagggaccaaattgttatcccaatcaactacttggatgtttctgaaataagaagattttgtaaacccttcctctgcaaaatgcccactttccatctgtgttgaagtatgggctccaaaaggactcgaatttacgatttcgccaccgtattggaccatgcttgcgtgctccttcaggtgtgcgaacaagaacgatggccaatacccgactagaatacccgacccgaattccagccaccaattcccatgcttcggatcctgaaatttaatttaatttagtttattttatattaaacagacatagtaactcttaacattcactccaacaagagcagacactcctaatcatgataacaacagagtctttgaagtaggtcaatcctcaagaagacaggaagtaagaagagaaccagaggatcctagacttcaaactcgtctacacagtgcttcaagaatgggagagactctgaaacctccaaaaagagataacaactctaacaagacttctgtttttttgttgaagactgcagggaatctaggatagcagcttcaagtagttggatatgttttttggttctgacatatccttaactttgttaaatttcaggtttatggtttcatgtttctagttttacttctaagtatcatcgtgttatgtttgaatcaaaggtttgtaagtggttagaccactgaaacactttttgtaagatcacagtgacatgaatgaatgaaagacaacttttagtgaaaaaaaaaaaaactcttaacattttatttctctgaaaaaacaaatttactttatatcaaaccatactttagttacagtgtatgaccggcaatcgtagtttatctaatttgcatcgaacaattacattaacttatatgaattttaatgcacctaacacgttagagc

SEQ ID NO: 4021 - DNA, 949 bp, Arabidopsis thaliana landsberg
tgttggaatattagataggttatcgtggcatgtagttaattattgtggatgacttggggttagcagctcaaaaaaggatttgataggtgtgtggaatggatttcttttgtccttttctagaagtcagtttctttagtactaggttttctcattttacgacttaataattgttgactcggtctagatagattatgatatagtttatggttttatattatatttcagtactagaggtctttttatattctttcttcttaaggttagtcggttatgtcttgcgtttagagtctttatatatagtgtcagtttcttcctttgttatccatcccattaacttctagattccctccttcttggttcaatatgtcggatgagttgtgggacgagattcagaacttggaactaggtcaagaagatccaactctctttatacctcatgaggcttatgtgatggtggaggctgccaatagactgagtatgatagctaggtctctgaatccaagagtcaaaaacctcaattatgttgttgtagccttaccaagatcaaggggattgacgactcaaattcatggtagagtacttgatgctacttatgttcagtttctttttcaaaatgaaattgatctaatgatggtgcaaagacgggagccatggctctttaacaattggtttgtgcagctactagatgggaggtggctccggctcataactttgtcacaacaatagatctgtgggtgcatattcgtggaattcctctgtcttatgtttctgaagagacggttatggagattgctcaagacctgggtgagatcattatgctagactatcatgatgcaaccttagcacatatcgcttatattagagtgagggtgtgttttggtattacggacagactaaagttcttccggagaatcatctttgattcaggtgaaactgcaaccataaggtt

SEQ ID NO: 4022 - DNA, 584 bp, Arabidopsis thaliana landsberg
ttaatccagattatcaagtcagtcggaggtgtcaactgtgggatttcgttgctcagttaactcatgagttgttaatcaaatagagtgttaggtgtggaggtggattagtttttgtccttttctaatgattgttttcttcagtcaaaggtttagtaagtttaggactaacacatattttcgtcgggtttagtttttttaatattttcttttatttattttcctaattttttttcattaaggttagagtctatatatatatatatatatgtgttagtccttttcttctttagttctctgtcttccttgtactttttctcttttacaatcttacctccacggcagacgaattgtgggatgaaattcaagatctggatctaggtcctgaggatccagccctcttcattccccatgaagcttatgtgtatgttgaagagttcaatcgactgagtataattgcaagacctctcaacccaagagtccaaaacttaaacgcggtgattgcagcctaacctcggtaatggggactgacggtgcatgtccatggaagaattcttgatgcaacgtatgttcaatttatgttccaa

SEQ ID NO: 4023 - DNA, 621 bp, Arabidopsis thaliana landsberg
  unsure (1)..(621): unsure at all n locations
aggcggttctgttatttctctgagtctttatatatctttcctgctctccttagttagtctatttcccatccctttagttcctagttttcttctctcttatcactatggcagatgagttgtgggatgagatacaaaatctagaattaggacaagaggatccagcccttttcattccccatgaagcttatgtgatggttgaagcttcaaataacttaagtctgatagcgagacctctgaacccaagagttcaaaatcttaactctgtcgtggtagcacttccaagatcatggggactaacgactcaggtgcatggaagagttcttgatgcaacgtatgtccagttcctttttgcaaatgaaattgatctgatgatggtgcaaagaagggaaccgtggcttttcaacaattggtttgtggcagcaactcgatggcaggtggctccagctcacaaccttgtcactaccattgatctctgggtgcagattagaggtatttccttaccttatgtttctgaagagacggttttggagatagctcaagatctangagagatcattcactagacttcatgaggctacctctcctcagatggttntattagagtaagagtcgtttggaata

SEQ ID NO: 4024 - DNA, 597 bp, Arabidopsis thaliana landsberg
  unsure (1)..(597): unsure at all n locations
gctgtgatnnnnnnnnnnnnnnnnnnnnnnnngcagattctccggagacgttcatactgaaatcttattgttgcagtttccccggagtcaaagacaattcgctgaaagaaccttagcctgtccgtaataccaaagcgcactctcacccgtatgtaagcaatctgaatagatgttgtatcatggtagtctagcataagaacttcccccagatcttgagcaatctccataaccgtctcctcagaaacatatggcagagggattccacgaatctgcacccacagatcaattgtagtaacgaagttatgagccggtgccacctcccatcgagtagctgcaacaaaccaattgttaaaaagccaaggctccttgcgttgaaccatcattagatcaatttcattttgaaaaagaaactgaacataagtagcatcaagtattctgccatgaacttgatttgttaaaccccatgttcttnnnnnnnnnnnnnnnnnnnnnnnnnnnttctggacccttgggttcagaggtctagctatcatactaagtctattggtagctttcaccatcacataagcctcatgagggataaaaagggctggatct

SEQ ID NO: 4025 - DNA, 5837 bp, Arabidopsis thaliana landsberg
  unsure (1)..(5837): unsure at all n locations
acttgattattcatatgataaaacaatttttgtttctgggaatgaaagaaacagaggcaagatgtctcttatggaagaagagctccgcgtgagccaatctgaatttgaagatgataacggcggagaaagctgacggaagtttatatacggcggagaagatgcaacaaagacacgtggaccatggtagagaaccacaacaagtgtgcctattaacgacaatatcgtccccatcactttggctacactgctcctttctttgaaagatactttttccattctttatccacaaattaaaaatttgtgttatattttatggattccaaaataaaaagaaaggcataaatagtcaaagaaagaagaattcatacgcatcttgttgaaatgcaaacaaacagtttttttttttttttttttcaaacaaacagttggatgctgacatttatgatttatttaccaacgtttatatgcaagcctttttgtggagtttatgtgtaacagtaacttacttttttacttttggggtactaaatttcacagtaagattctaatatcctttttttggtgttcattttcaactttacccttattttttagccattttaattttattctctttaaatttttgattaccattttatccatatttaaaaattgttttagattaataaaatgaaatattaatattttttcgcctaaactatttccaaataaatttctcgccaaaagtttccaatcaaaatattttcccgccatttaaagaaacattttcccgcaaaaagagtttttttttgtgggtaatagatttacaagggattttaaaagagttttaaaatattttaaagatttacaagggattttaaaagggttttaaaagatttacattgaattttaaaagggttttaaaacaattttaaaactcttttaaaacaattttaaaactcttttaaaagaattttaaacccctgtcaaaataattttaaacccttttcaaaaaaattgtaaaccctttaaaaatctttaaaaaacctttgtaaatctattaaagtcttttaaaatcccttgtaaatcttttaaaactcttttaaaatcctttgtaaatcttttaaaacacttttaaaatcccttgtaaatattttaaaacccttttaaaatcccttgtatttcttttaaaatcccttgtaaatattttaaaacccttttaaaatcctttgtaaatcttttaaaacccttttaaaatctcttgtaaatctatttcccgccaaaaaaaaaagttttgcgggaaaaatattttcgaaaaaaaaattggtgggaaattttttttttcgaaaatttttggcggaaaatttatttgggaaattttaggcgaaaaatattaatatttcattttgttaacctaaatttttttccaaatagaagtaaaatagtcattaaaaatttaaagagggtagaaaaaaaatgacaaataggaaatggtagaattggaaaaggttagtgtacaaagggcagcaattagtaaatcgattaattagtaaatcaatttattagactaattataccaaaaccaaacccaggatgtgaccataacttttaatcagtcttttccatgaacaagcgcgtgatagataaatatattctggaaaacaaaattcttcattcaagtcaaaatgtaaattaaacaagacggtccaaaactaaaccagctatgtacacaaatacaaattcacttctttcacataaaacgtaaattttgtttcactgcaaaaaaaaaaaaaaaattgtatctcaaagtaaacaagagaaacttaaaaagtaatcaaaaatctgaaaatcaattgaaaaaaatagtgagtcgtgtttcaatcggtttaagacgtctttttattaacttagctctaaaaagataaaaacctatgggtacccataattttactgggtaaacccaagtaagattttatctttcggatacctgtccgttttaaacctatattttttagatgcaaaaagtagatctctgggcttaatattatatgtagtttcgggtacccaatagatttaaacccatctttaacatccctacatttgtgtgtaacatacaatccacaagcacgtctattccttgttctaacaatgatgtatcaacacagttctagatcctcgttgaagaatgttttttttcttgatattggaactgtattgaatatatggaagtatctacatcatctcttgttcttgtcattactctactttatgagacatttaaacaagtatatcagatagtaacattgtacaacaagattcacattttaaacatattttcagtaacttggttcagacataactaggtcattcgtgtttcatgtttgtgaagccattaactgaattcatagtttgtatgatttaggaaatagacataagaaaatagtttaaactaaacgaacgcaaaacattagtttttttttattcatggggcttggttacattgttataattgaaactgtttttttttatttcctttgtattaatatcatcttttgaggaagagctggtggagatggaccacgacatctctttgatttttcacatcctcgatggtacggattcgccggttgatcgggtggacaattgccatgatcacatcctggttggcgatcgccgcgtcccattcctggatagccaatctcatttgcaactgctacgttcatgttgttgcttatgaacacacatgctatgaccattgccacgaccataaacctttttgtttctttnnnnnnnnnnnnnnnnnnnnnngcctttttcttatgtgaaatatgtgttttagatagttcaagagtattgttttatgagtgtaatagaagctaggtttcactttgtgatatttatagagaatgaaaattctgaaagacaatgatccatacatatcaaaacagtgatatttgttgtataatgtggaaggaatctaggggagtttgatttgtcttaatctttagaagcattgtgtcatgaaactatttgttggtaatactaaaaatattatgatgatatcttttcgttttagttttacttaaagagagattagaataggataactgaaattggcagtagaagataaacttattcatttataaactactaaatatatagatgccatagttaatagtaaaattttacttttatattatataaagcttgatttggttttcaaagttgttaatcacgtgctcgtgacacgtatcacatctatcggttagattgcgacacatgttgaatgattttaacatttttttaactacatagaaacattaaaaagaaaaaattacatatgtacaaatactaattatttgcatatgtattctaaacaatttagctctatttcgtaatcaaaaagtatacaagaaaaaattaacatacatactaatttatgtgtgtatagaaaactcttaaaactgttttttcttaacccaacaaaacaaaaactgaaaaaaaattaacatacatttgtgtagagatgttgtggtgggtaaaaaagcccagcccgacctgaacccaaaataaacccgcccaccaaaaacccaactttagaaaattcaaatgggtttttgatttagtgggtaaagcccgaaaaaaacccgattgttctgatactacccgtgagtagccaacttggtttttgtcctttttttagagtttatgtttaattactaatatactattatatgtatgttgtatctatattttgcttataaactaagttgttatgtaaatatatcatgtaaatttttttcatagcaaaataataatactctgtatgtcacattaaacaagaaaaacttaaaaaggtatcaaatatctgaaaatcaatttaaaccaaaaatacaacatcttctcatactccagagctacttgctaccgatgtagtacctttaattccatcatcaaagtattcttcaatgtcacctacaattagaagatataaatcaccaaatgaaaaaaattaagtccaaaaaattagactattctttttttaccttccaactctgcaaaaccacgcaaccagttcctagtacataacaaggcttgaacatttctcggaagaaggcggtttctgaaagggtttaaaacccgacctccaatactgaatgatgactcagctgccactgtagtgattggaatgctaagtatagcagaagctagagaagctaaatcaccatagcgttgcccatcgcctttccaatagctcagaacctccatgtctgtaaaagacctcaaatctagccttggatcatccaaataattttgcaaattggactttgtgttgtcagaaccaggttgtatgctcctctcaagctcaaacacatcctgtatgatatagagtatagacactagttagacaataaagatgatatgatataaacaacgaatggagaaatacttacataatttggatcatcctctagtggtgattctgtaagaaggtcatgtggagtttgggttgttgagaaggtggaagaagtccaaactttttccctgtgctctttgtaaagatctttcaaattttccacaacaacattgaccttttcttctgaactactcgaatccaccttattataagcagatttaagaatctgcaccttcaaccttggatctagaatagctcccatagctagaatgatactgtactgatcccaatacttatcaaactttacttgcatcctactagccatctcttccattctaagatcaccacaaactgcatagtctttcaaaagacgctcaattttccacacttgcagaaaatacacgtcaggagtaggatacttgacacttgaaaagtaagtagtgatagtactaaacggctttagaaggtcacaaatcctctctccacgatcccactcatcctcagaaggcaatgacttgtagtttctgtcacactctttcaagctagcaaatgctttacgaaactttaaggctctagcaagcatgtcataagtcgaattccaacgtgtagggacgtctaaagacaatccagcaccactcctaatccctacactttcaacacatgctgcaaatgcatctttcctagactcagatgctttgacaaacctgacactctctctaatattttccaaaagctcagtagctactgataatccttcttgcacaataagattcaacacatgagcacagcatctaacatgaaaaaacttcccatcacacaacaatccattaccactaatcatctgaaggcgatgcttaagaatactttgcatactatcattattcctagcattatccaaagtcaaagagaagatttttttttctaaaccccattccttcaaacaactaagaatcttattagctaattcttcaccagtatgtggaggtttcatatcacaaaacgctagaatcttattattcaacctccactcatcatcaacataatgggcggtcaaacagatataccctgtgacaatgccacgagctgtccacaaatccgcagtacaacaaactcttcctctgaattgttcaaaaaactttttcagctttcctttttccaattcatacctcttaaacacatcatttccagcagtttgtctacagatgggctgacaattcggattcaagtatttatctctagctctaactttttcatactcaacataccgaaatggcaaatcgtggtacacaataatctcactaaccatctcacgatctactttgtgatcatacacaattttttcactaagcacttgaggtctcttttgcccaatctgtaaatgacgtttcaaaacggatgatacctgactaattacaatgattaacttcttatcacaatgaat

SEQ ID NO: 4026 - DNA, 5059 bp, Arabidopsis thaliana landsberg
gaccaaccttcaaaaaggaatcatcaaagctccttgaagtagtagtagccgtcataatcatctgtctgtaaaacaaaaaccaaaaaaaaaacgccgaaagaagctgctttttaagtccaagctggaaaaatcagcagcagttcacaaaagcacaacttctccgggtcacaacatcaatcaaggtaattgtataaaggaacacaaggaacaaaaaatgtatgtatgaaaaaatgaagagagtttttttttgtaaaagagttgttgaggtttgcagcacaaaagtgtgtcttgcaccttacatccgagaaaaaaagaaaaaacatatatataaacaaaaaaaaacatttctgttttaatttttgtatataaagtaatcttgttttaaccaatttgtgtgttttctgctcgaagatctctttctagggttttcataatgaatattttatgtatggatcaaaatcatgatacatcttctacgttattattagttaatttagtattaaaattagaacaaatgattattctttaagtgtctcgtaaagcatccattaacgtctctaagagttgagattctgctaaaactaaaactgtatgacaacaacagttgcattatttagtaataaagagagttttatgtctattattagcaaatttcattatggtttctctcctacaaaagcgggagaatcagaaaacgtagataagaacaaacatttatagcaccttataaatttggaggaaagagaacagaaaaacagagagaaaaaaacctaaatttgaaaagacaaaaaaaaaaaaaagagaaagaagaagaagcttgggacaggggagtcccagaaagaaaaaaagttttttttttccggtgacagtgtcggttctctgacgctcccatttttgttcaatctttcttccaaatttccctgaatgccttcactcgtattctggtaatttcggtaatttcatatcaactgcgtcgaatagtctaagatttttccagatttgatgccttgttcttcaagcaattgctcttaattcttagggtttactgattgttttgtgtgaatgtttatgacaatattgttttgaatttgcagaaacttgcggctatttacaattgcaggagtgtgaatgattataaggtctcccattcgtgttccataggcttacacacatgttttgatcaacaatttcttgtgttcatgaactagatattgcaggtagtaatggattcaaagaacaccatcttatctccgagtatcatcaatccgctttgcttgctgtcctggaggtgatttgtcttttagatgattgacgaattcatcgaagaagagttgccaccattaatctgatcagccaaaaaaaaggtttggcatgaactgtatggccgtcgctctcgatccactaaccgaccggttttcgcagtttagccgatcttcacagagatgtagactccaatctttaaccaacctcgacttcaactttctcggattcaacactaaacaaaccaatctctctgcttcctcacactccttgaacaaccgaagcgtttctactccatgcttctccatatccggtagtaatctagatggctctgctactccgcacattgagattctcggtggtcaaagagtccccactgtacgttcccttgtagctgaagtaaccatagctatcgtttctggagctcagcctctgcttttaccaagtggtttaggaggtgcatatctcttgcattccgaaaaaggtaacaacattgcggttgcaaaaccagtcgatgaagagcctttagctttcaacaatcctaaaggatctggcggtttaacactcgggcaaccaggcatgaaacggtctatccgcgttggtgaaagcggaatccgtgaattggctgcttaccttttagaccaccaaggcttttccagtgttccaccaaccgcattggtcagaatctctcatgttccgttccatgacagaggtagtgatcacgccgcctataaagttgcctctttgcaacgatttgtgggtcatgattttgatgcaggagagcttggaccaggaagcttcacggttgtatcggtccataggattggtatacttgatgtgagagtcttgaaccttgacagacacgccggaaacatgttggtgaagaagatacatgaccaagatgagactacttgttctaacggagttggagctgcagagcttgtgcctatagatcatggtctttgcctacctgaatgcctcgatgatccttatttcgaatggcttaactggcctcaagcttcggtgccattcaccgacattgagcttcagtatatatcaaacttggaccctttcaaagacgcacagcttttgagaacagaactaggctctatacaggaatcttccctacgggttcttatcgtctgcacgatattcttgaaagaagctgctgctgcagggcttattcttgcagagataggagagaagatgacctcgggcacatatgcacaggggaagagagttctagtgtgttggagattatttgcaacaaagcaaaagcaagcgcgggtagaggaagtgacgactgatgatgattatggtgcggaatggaatgaagtagaagcagagctagagtgtggaatttttcagtttgacgatgaagttgaatgcaaagagcttccagatatgttacaagtgcctatattcacaagagttccatccattgctgccaatctatctgctctcatgcggtgtccaccaaaccagtggattagtacatatgacactaacatagaagaggaaaggagagatcggagtatcgtgaggagcaagagtcacccgatatgtgtgaattatgatgagaaagaaggtgtttattttggggacatgagtggagatgaatgggagatgttcttgcatagtttccagatgcttttgccagaagcacttgaaggctcaacaagcaagggaccaaaaccaagatttggatcttcttgtaaattctaaggaaatttttaaaatactaatacaagacagagagagatgaaatctcgcaaggttaagatacatagaaagaaaatggaaaatgagacgagcaagctaaggccgtccaatccaaattacttgttagcttcttctttctttttttgtttattgtatgatgtatcacttcattgctattcgctaaaacactaagtatcataaatatctacaagaatatgattggtgtaattgatctcatgtgattatcttgttctatgtaagttcttgttgaaagctagtaaaattacagaacaaaccaaaagagattttacatgttatgaagatgactcttacaaaaagctgttgcacaagcctatatagagccaatcaagctctgacctggacactgtatgtcactagcagtaggaacacaagagtgactgtaatgtttatcgccacaatcacttaccggtttctaatctctttgatcacattgcagattctttgaatgtattaattcacacaataaccacaacaacctccaaaagatcaatgaaattgtttttaaactaattttcttgagactaagagagcaataccaaactgaaatgtgaggaagagcacttgattaatactcggagagcgagagaatacagaggaattgatttggttgcaataataacctctacttaaggcattaagctcctcgatttccattacaatgttcacatcagtgttcttgattattgcgacttgaatctttaaaataatcaaaccatctaatactcagcttgtcgagactcatatcaatgcgcagacacaagagcacattgtgttttccgggaaaacttttccccaactttatttcaattattaaaagtgtaagggactaagatcatttgatatagggggaaaaaaattgtataagaaaaatctaccaacataactcgaaagttttaatttggatttattttaaatctccatgcatgaaaaaaaaagaaaaacttaatattcaagatatagttaaaaccggaacacaaagttgcattatatatgtacttttctcgagagagtattgttttcgaacaccttcaaacttgggcaaaaacatttggattacatgattcgttacgattttaagacaagcacgtcccatgtgaaaaacttctagacaacatccatgatgttttagtctcatcggaccatgaatagtacagattgcatccgtgacatacatcgcacaccttgaagataacttagccatacatttgttaaccaagtggtctgattctggagactgagccaaaccggaggctgcagatgccaatgtagccatcgcgataattgtgaataaggctgcaaacatggatttggtgaccatagttgctttgagggccatgatgtatcttcttttgtaatgtgaatttgtttactttcttttttataatccagggagtatatgtatatgaaaattcttgtaacgattttagtatttactgaacaaaagtatgtttgagatattaaggaggagtttacttgcagttatgcaattgttttgcaaaacgcttacgtttatttcgtttttgtaccaagaagtaacacattcaaattttaatgggatagtgcaggcccatagtgtgacctaaagggtttgttttgttcatgcatgatccggattagatatgattctgatttctatcaatgcacacaaaaaagggcttaatttgtcaagactatctacaaatctaagtcaagttgattaattagcggattaaatggtcaaatatttgagcgcgattactaatctaaatggtcaaaggaatttggaacatttatttaataataataattacccttctaatgaagattataaaacaaaacctacaaagaaaataaaaagttggagcaatgatatagaacaaagaaaaagttgctcctctatctaaaattttgttaaaaaaaaaagacttgaaaagatctaattaaggtcgtgaacatctttttccacacacgagaggttacgagaaacccaccgccactttagctgttcctgcggattgcatttcaacgtctacttcctcatcgattcttggcatcc

SEQ ID NO: 4027 - DNA, 3821 bp, Arabidopsis thaliana landsberg
aaccaataaagctttgtggcatatgcgactaggccatccatcttcgaaagttttatcttctgttttcccatctttagaggattttgatagttgtagttctgatttaaagacaatgacgtttgtgtgacgtttgtgttcgagccaaacaaactcgtgcaagtttttctgaaagtttcaataaagtcgaagagtgtttttctttgattcactgtgatgtttggggaccatacaaacatgcttcctcttgcagagctcattactttctaaatattgttgatgatcactctagagcggtttggatacatctcatgcttgctaagagtgaggttgcctctctccttcaacagttcattgcaatggcatcccgacaattcaacaaacaagttaaaacagtaagaagcgacaatggcactgaatttatgagtctcaaatcatattttgctgaacgaggaattgttcatcaaacctcttgtgtctatacacctcagcaaaatggacgtgtcgagcgtaagcatagacacatcttgaatgtagcacgttcactcttatttcaaggagaacttcccattagcttctggggagaaagtgttcttacagccgcctacctcataaatcgaactcctactccaattctagatggcaaaaccccatatgagattctctactcacaaccaccgtcttatgcttcacttcgtgtctttggcagcctctgttttgcaagaaaacacactggtcgtttggataaatttcaagagagaggacgaaaatgcatattcgttggctatccccatggacaaaaaggttggcgtatttatgatattgaatcacaaattttttttgtcttcgcgatgtggtctttcaggaagatattttcccatttgctgacaaaaagaataaagatacattctcttcacctgctgccgtcattccatctccaattttgccctatgatgatgaattcctcgacatataccaaattggtgactttcccgctacgaatcctctcccggctattattgatgtcaacgactcacctccaagctctcctataattactgcaacaccggctgctgcatcacctcctcctcttcgtcgcggtttacgtcaaagacaagaaaatgtgcgcctaaaagactatcaagcttattcggctcaatgtgagtcaactcaaactctgtccgacaacattggtacgtgtatctaccccatggccaactatgtatcgtgtgaaatattctctccaagtcatcaacacttcttagctgccattagtatggttgatcctcctcagacttataatcaagccattcgagagaaagaatggcgtaatgcagtttcttttgaaatcgatgctcttgaagatcaaggaacttgggatattacccaacttccgcaaggagttaaagctattggatcaaagtgggtatttcgtatcaagtataactctgatggtaccgtcgaacgttacaaagcgcgtcttgtggctttaggcaatcatcaaaaggaagatattgatttcaaaaagacatttgctccagttgtcaaaatgcaaacagtgagacttttattggatgttgcggcagcaaaggactggaaacttcatcaaatggacgttcataacgcctttcttcatggtgatttaaaagaagacatcaatatgaaaccacctccgggttttaaaacaacagatccatctcttgtatgcaagctcaagaaatctatctatggtttgaaacaagctcctcgttgctggttcgaaaagttgtctacatctctactcaagtttggttttactcagtctaagaaagattattctcttctcacatcaattcggggatccaaagttcttcatgtcattgtctacgtcgatgatctagtcatttgcggaaatgatgcctcagttatagctaagttcaaagcttatctcaataaatttttcaaaatgaaggatcttggtcatttgaaatattttctaggtattgaggtagctagaagtcctgaaggtatatttttatctcaaagaaaatattgtcttgacgttattgaagaatgtggtctttctggttcaaagcctgcagagacaccattggaacagaatcataaactagcttcatcgacaagtccaaaatttcaggaaccggaaaaatatcgttgtctagttggacgactggtctatctgactcatacaaagccggagatatcttatgcagtaaacatgctagctcagttcatgcaaacaccgctctctgatcattgggatgctgctattcgacttgttcgttacttaaaaggctgtccgggacaaggtatcctcctctcctccaaatctaacttgcagctaacgacatttagtgactctgatcacgcgacatgtccgatcacaagaagatctctgactggttatttggttaaactcagcaactctcccgtctcttggaaaacaaagaaacaagacaaggtttctcggtcttccgctgaagccaaatatcgagccatggctatggcatgtcaagaactcatgtgggtaaaagaagtacttctctcgctgggtatcgctcacgatcaacctatgcatctagtttgtgatagtcaatcggctctccatattgcttccaatcccgtgtttcacgaacgtacgaaacatatcgaaaccgattgtcacttcatacgagacgagttcacttcaggcaatttaacgttctctcacatctctaccactgaacaaccggctgacatttttactaaggctcttggtggtcaacaatttcgatttctacgagacaagttgggcgtttataatctgcacgctccaacttgagggggagtgttaggataaggatacattccttattagatatctgtcaatattcttgtgtatattcgtataggtttacataccgactctcttgtactatatatattctcatattcacatcaataatactcaagtaattctattcactttggcaccaaaagttcaatcaataaaagaagtgaaacatatacttttttttgtggacaattttattagactagtttaaaccatctaatattgaagaatattttaaatagatgatagaatgcagttggatgcgaactgttcgtgccaaattatccgcttttacatttgaatcaagaaatcaaaagtaaagagagaaaattctgaatcgcctctaggtaagaagagaaagctggccattccatccggagaagacaccttcaccagaattaagcaatttgtaaggaaactcacttctcgcttatcttggcaatcatacatctcatagcccaaatgagtgttttaacttctgtttgtagacatgttaaacttcgtcgatggttagatgcgcccattgttggctcatcatcaataggtagtgtactaaaccatcctaaacccggaaaagtatcactctctttccatgaaccatgaaccatcaattaaacatcgataccttatagaatttatatcctctaacccaactatttcaaagagaaccaagttaattactaccttcattcggactagattgcaagtattttcttcctttttcaactattatacgatacaagaaaataataacttaaaagtcaacattttctcctcttcccatcgagagaaatgatgtcatctcacactattaagccatctctgcaatctactacatcttacaaaataatattatagattttaatttttaccagattttagatcaaaaatagtttaaaattattaatttgaaaaaccaattatgtacatcattaaattaaatatttaaatgcacattaattgaagtgaatatgaatcattctatataaac

SEQ ID NO: 4028 - DNA, 1414 bp, Arabidopsis thaliana landsberg
gtaccatgacgcttgagcaaacatgaaatctccagctagcaccgctactcttgtgccgaaaagctcatgaactgtttcctttcctgcaattatacacagagtttaaaccaaaccaaacaattttatgacaaaaatagatgaatctcataactattaacaaaactcacctcttcgcatgtcactctcgtctaacacatcgtcgtgtatcaagcttgcagtgtgtatcatctcgatgatctcagccaaacgccggtgttctgttgttagttccctgcatcaagacatctgaatatgatcattttgtgataaaagatggatacccaactgaatgaaaggaataccaacaaaataaagtaaagtctttagactactcactttaggcctgctaattccgccgtggcatgtgatacaaggaataccaaacccggtctcattcttttaccaccagctccgaaaatctgctcagccgcagatatcaaaaccggattttccgcaccaacaatctataaagaaccactttgttagatccccaagtgaaacttcaaacacaggattaaaaaagacagtgccagaaagagtttataagaaacactaaccgataaaagattgtcattcaaagtctgcagatcaacagctactagctcaaacagagtcaccaacgaaataggctgttttgactcttgtttcaaatcaaaactcactgtttgagattgaccaatacctacaattctcatgaggcaataagcataaactccagtgattcttaaaaatctgtaactattgtagaacaaggttcacgaacacttaaaaactaaatcaaatatctaatcacataaaacaaaaagtttaagactttaagtgagaatcatacataccattgagcaaagagatctcctttgatttcgttggcaccgctttgcaactccccaccagaccgccatagcttctattgctgctactaaacttacaaacagtcttcgctaatgaaggaaactgacgacggccacaaccacatgccatcatcatcgtacctaaatctatattccgacatgacgtcatcattctcacaaaacccagaatccttttgggcaactagggattatgaagctctatagaaagtaactggaactatgtaaagattcaagctttaaagcaaacgaaaaagctgactccttttcttccacgggaaattgggtgtatggaaaaattacaacaaaaaaaaaggtacaaaaatacaaaatcaagtgggtgattaagtatcagccgatcgagttttttttttctatagtttggtgggtggacgagaaaagcccacatgagatcattcgggaggacgaaagtgacgactgtgtttttgttcaatacacaggagaagagggaaacgattgattagtctacgcttatctaatcttga

SEQ ID NO: 4029 - DNA, 1247 bp, Arabidopsis thaliana landsberg
tattgaccatacgcttgtgagctggattggacttacagaagaacgtgacctctcactcagatagtagaagccgggtttctaaaaagaggcacatgagggagaagaataaactaaagatgaaaaagaccagggcttttgatgatgatgatcttggtgatgatgagcttttatgtctgcattcaataagtcgaagctggttgctatatactgatgggttttctgcaacatggaccagtgcgagtttcctgttcttcatgtgtatccggatattatgcatttcttatttgagtcgcgttaatcagagatagtttctttcaggtggatttaccggaatacatcgcaaagcattgtttgtcgacatggatgacgtggttattatctagacactaatgattcacacacaagtcagatgacaaaatagtaaggtattggttacaacctcaacttgtacgttttcttgtactaaacaaaagtgatttcaaagatgatcaacctaatggttcctacttgctcttctttacagatcctaccaaggtacaacgtgcaaaactcgaatatattcaccatagataggtataacatatgttgataaagcagtcatcataagaaggtgttcaaagcaatgaaatagctttaagagaagaggtatgacactgaatcagtcatcatcactctatgtaaactgtaattttttttggctggattagtttcggaaccctttattgcttctgatcttcagaactaatgtacagtagtagcctcttgcattgtatagcttttgatagtgaaaaatatttttgaatagaaagcttatctactgtacaatgcttggtaatttcacagtagctgtaacgtgattaaagcctcgtgaaaccaaaaggtcgacatgcatttaagtttagtctcttcgttttcctctagaaaggttgatggtaacaaatattcatgcctcgttaatctaaaagttggagacagctatcatcatactttcgactcattgtagtcctctctaacggttgtgacttttgcaattccctttcatgtctatataaagacacgtatgttcagaatgttatctaacacttaccctcattatttcagtgatgtcttcttccattgttaaaatcggaatagatagcatcaaaacaacggtaactgaaaaagagcgagatatcaacccgtttgtgaagacattttcgtccaacaaaacaacaggaagaagatcattggccttgataccgaacggg

SEQ ID NO: 4030 - DNA, 1191 bp, Arabidopsis thaliana landsberg
gtgcttgcagctactaatgaagctgtcttgtagtaactctttagcatgtagtcatcaagcttgacatcacaatcgaataaactcgatgcttgctttatctcaccgcttgcaaaatctttgatcacctgcaaaaagataaatcaagattcagaccaaatgttctttgtattgagtagcttcatctaatctcagaaaggaatattacctgacttatgagcttaatgacttcaaggttttcgagatttgataagtaccatgatgcttgagcaaacatgaaatccccagctaatacagctactcttgttcagaatagctcgtgaaccgtttcccttcctaacaaacacagagacaaagcttagtcactttgcagagaaaatgcatactccgatcaaaagaatggaacttttgtcttacctcttcgcatatcactttagtctaacacatcatcgtgtatcaaacttgcggtgtgaatgatctcaatgatctcacctaaacgccgatgttctactgtaagttccctgcaccaagatcagctataaaccatcatttttatttctaaagattatgagcagtttcgcggtcaaagatgtaatgacagttatatatagattactttaagcctgctaattccgcagtggctcgtgatacaaggaataccaaacccggtctcatcctcttgccaccagcgctgaagatttgctcagcagcagatatcaaaaccggattttctgcaccaacaatctataaaagaagagaatttacataagaaacataaccctctatcaagagaccagaaaagaaatggaggcgaggtactaaccgataaaagattgtcgttcaacctctgcaaatcatcagctacgacctcaaacagagtttccaaagatattggctttcgtgactcttgcctcagattgagcatcactgtttgatcttgaccaatacctacacaatcatcaattttcaaaaccctgaagaaaagtcttaaatgtataagcttttgacttctcataaattatctcagcttataagactctttgcctcaaccaaaactaaagatttctatttccatagcaaacattcaaaaaactcgaaactttaattcatgagactctttgtctcatgagctcaaaactgaactgttataagactaaaactatgcaccaaaaaggggaagaccaatcgaacatg

SEQ ID NO: 4031 - DNA, 6552 bp, Arabidopsis thaliana landsberg
cctcctctcgcgtgaaaaataaaaatcatcagaaattacgtggagggaacatgatgactttttaactaggaccggggggctgaccaatcagatgatatcgcgcgttaaaaaagcaacacatggggctgtcctaagtattaagagagccacgtggtggaaccaaaccgagtcgatggctggaaccagatagccacgtagttagtacagctcattggttttcttttctctccgcgttcatgacattggctcgtgcttgggccactcaccaacattacctttttgcatcccaataaatacaaataccaacaaccaccttttcctatttcctttggccgacacaccaaacatttcccttgaatatgaaatgcatatctagttgacaagccagatgtcatacatatgtacattgataacgcctagacaaacagataaatgatcggatactttaagtgtgtaaagtttgtttcttaattagataaagacttcatcatcatgattcatggatacaattgatttccccctacatacgttgctaacactgatgcagaaacttcttttgagaactcatcccaagaatttgttgacaatatgacaaaatctgctagttttcctggagataaagaccccaagtgatgatccaaaaacgctgctcttgccgctgatatcgtctgcctgcgatattcaaacaaagaatatgatgaatgcttgagaaaatgttggagaaagacttagagaagagggttattacgcaatcagcgcatccgtaaaagagatgcgttcagatggaatccaagcgtgatcccacttgggaggtattcttttaaccgcggttctgatactgtgcaacgggttaatgtctgccacctggagggaaaacaaacgaagcaaagtttgactatatgtaaaaacattgtatatgtgtagagattttcgaaaacatacaggccagtctgagccaagtgccaagagtgcattgccatttaagagagattggaatagataagactcctttacggctctctcagaaccgagcttcttagcaacagaatcagcatcatcaagcaaatgatctggctgttcacgagcattaggttagatcaagaaagtgagttttaagccagatgcttaatgctgggaagtaactaacctgaactgaagctacaatgtgaagttgaccgaaccggttggctgatcctggtgccaaatgttgggcatgctctatctgtgaccaggagttcagagatattaagtacagacagaagaagcagacgagctagcaaatagctcagaggaataggtttataatagcaaacttcaccctaaatcttctatcccggtctccattggctgcagcaacggattcatacatgtcaaggatcatgtcatttgctttgtcgcctatagcatggatagcaaccttgatcacagcaaaacaaaattataagctaaactaaataggccgatgagcaagcaatagacaaaagtaaacaaggagacacctgaagccctgatttgtctgctgccatagtgaagttggaaagtttttcaggatccatcacttctaacccataattattaggtgtatcaatatattcctgcagaaaaatgtatactagtgctgcttaaggatgataacatgtacaatgaattgctacatgtatatttcatcaatatgaacaatatatgaaagtacttttagaatatattgcagatgaattagagatagtatagtactcttcacctcgtaaaaaagtgcactgttggaacctagagagccatcaataaatgctttgacgccaccgagatacaaccattcactcagtacagatcccttctgaagcttaagatcctgaaagtatgaagtcaaggaagatgagcacatataaaatttcaagtaaaaaagcagaacaagcataaatgtgcaacggtgaaaagagaatgggtgaatgctgctaataaacatagaaagagaatttgaaaatcaggaaaggaaaaggtttcactgatgatgtatgggaactatatgtaaattgcaaaacataaagttgaagaatgctgtaatatacacttaagtttttcgtgctaaagaagcacaaaactgcttgtaaaaatactcaattctatttatcagaaaacaagagttgcttctgaagaaatcataccaataaacgtgaccacgttgtgatgggaaaaaacaagcaagtccgtatcatcatcttcttcgaggaatcagcatatagatagacatctgtaccataaaaagaagtattcaactcaaaaaaaatttggactaaaacaaattctatcctatgtctatcaggtaagagtcatcaatttctctctagcagtatgcaagtgtgaatatgacaactcatcccactcagggttaacagaaccatttattgcaccttgaaagtctttccaggagagctcatctgtagtgccaggaaagtatcttccaagatcaataacagttgtcacgcctctagtcaaagcatatttgctagctctaaatagtgcttccctacgttcatccactgagatttctttaacccacggagtgacaagctccatagcagcatcgatcaaaagacctgtcggctctgcattgatacaatcataaaagcaagtaccatctgattttagtatacactcacaacacagaaagtttctctgcaatcccaagaattggaagcataatagaccaagtgctaaattacttgaaacaagcattaccgccactaggcatcctcattatcgttccaccaactggatcttccgttaaacttgtaacaccagcaatcttaaccgcaagggaatttgccaatgccatatgaccatccatcctaaccaaccaaacctacatgaagagaaataaatcaggcaatgatgttgattgttgactattgacaaacacaaaatgcagatttcttacaggattatgaggggagatttcatcaatccatgatgcagagggcaattctcctccccagaaatcattgttccagccaccacccaaaatccatgagccttcttttgcatctaatttttttttgttacacatataaaagcagtatagtaatttaaatactctcccactactaagaaccccaacgtaagcaaaaaatgttcactgtacactgtaaatcataactaaaaacagacaccaataaagaagtgtaaccacaatatgattgttcatataataatgaaatattaattactctgcacagcgtccttcaccattttacaaaactcatctttttgactcactccacgaagtccaacttgggccatctatgctcaagcgataagacattaaaagcaaaaggaaaagatataagataaacgagagtatagtatacttgttcatgtctaaacctgatcaaacaatggcatgtaatcatctactctcaggttaacttaacaatatacataattacatatcattgcaagaagcaagaacacagaaataagtttgcactatgccattatcacctgtaatcccccagaaatcaaatgaacatgtgaatcaataagtccaggcactacaatcttcccctccagattcacctacatagttccatctcctataaaagcctgtcttcatcgaaatcacaaattacatgagaccaaaaaagtgtcaaaattttcagcttcattcatgcgagtgaagtagtatgaaagcagcatcaaccacattgaacattgaaagagtggataaaagaagtgaaggaccttgagagtggcaaagcttccaactttaagaatcctgccattacgaatcgccatggaatcggcaaaaggcaaagagctatcgctcgtgaagattgttccattggtcactaacaaatccgccacgataccagccggtggtgtaagagacttgagagttgaccaatctgcgaacatcaatcgtatcgacgactttcagtcaaactatctgatttgagaaaaaagtgtgacaaccctggaaggcgaacttacataagtcgttgagcaaaggaagatacgcgacgcagataaggaggaactcggcagctgaaacgatgacgaagaggttcatagtcagtcgccgcagaaattcttaaatcagaaccagcaacaactacagtatgacgaagtggatgttcgtcccacctgaaacaaaaccgatcatagccggaaactcataccaaccggtcataaccggaagttgatacaatgctgaactttctctcaaataacaaatccaacttacaggttaaattcagttccgttaaattagcctaaagcccattaaacttaaggcccaataactaacaaacggagttttgagttattaagatttcagactagggtagatgttgggtcccactgtaatgcgagagccctccaaaaataggcgtatgccacttagcgtggagagcacacggtattctttagtaaaaggcgaaagaatagttcgctttgtgctcaccacatggctgcgtggtttaaggccatagagagtgaagtctatttatactatcatttcctctatcaatatctcttagctttccgatgtgggatacgtgaaagtcccttgttttttttagggctttataggatgtactcaagcccataattattatcatttacacataatttcaccaacagagtaaggttttgttgatagaggcccatttcaactaaggactgtacaatgttagcctttttagcccattaaataaagccgtttgtttgattttggagtagggaaagatgctgacaaaaccatgtacagtacttacagtaatgatagattagagaaccagaatgtaagccaaaatttgagagatcataataaggtatctattcaaagtgagtatgccatgataatcagtattgctatactatagttacaactttcacagtattactcttagacacgagaagagggccaagaagttgggacagtgcttataattgcaactacagtctgtggaatttaattagaaatacaagcctaaacctagctccttaccatcttcttttaccaaagcaactgctgtctgtcttgctttcacgttcctgcatatcaatgttgttcaccaaatcttagtaagaacatcatgtgtgtgtgtttggtaaaactaaaagcatgtggaccataagactttacagtgaggagaaatcaaccattaatttgataggagttatttgtacaagtatcagaaagagaaaaaccgcatatgcaaagtagttaccaatcagatagaatcaaataatgaggaaagggaacaagttgggatgatgagctaaagtcatatcactcagaaagcatgataaacaagtctttgctcaaaacatatatacaaaatctcaaacaccataatggattcagagaaggcttctttaccggttcattttgaagttggttgttctgttgtatttcctcggttgggcttgggacaacaaccaccgcctgaaatcacacaaaaactagctaagaacatcattgaaactaaatgccagaaaccaaaatcaatatacacaaaacaataaccaatataccacctcaggactaattccgttgttggcatcttcttggatcaaactggaaaaacaagtaatcttagtttataatagtggatttaacagaaacaaatgataggatctgaaaagagctttaccatgtatttgtatcatctgaaaacaactctggatgcaacacccttgccatgttcgagtaaaactcagcataaggcttacaatcaaatgcaacataacatgaaatctgtttctagcaaaaccctatttctagaataaaaaatttaccaaaaatcttacagaaattattcgttgtagagtctcaatctcagatacggtcatctcaatattaaacagagtaaaggaatagaaaaatctcgagagcttgccgttgggaatagcttctttcctttgacgcaataagtctttgatagcttgtatctgaagctctaccgactgaaatgacgcaatgatcgctataagccctgtgatactgacatctccatccactataaacgaaaacaaaacaaaaaattaaaatcagcgaatggagctgagaagtggagaaacaacaacacaaatgttcatgttcgacttagacttactcctcagagtcgatctgagttcaatcaactcgcggatcgaatcgcccagagaagatatcaaagagtttaaggaaggtttagatccatttcctttcatcatcatcatcatcttcttcttcatttctcctctttccctctcttttgcagaatgctaggggttttgattacttttaaaacctttttttttcttatttttacttattttgtttagatttttacctttctctttgaagggaaaacggaaaattaataaatcattagataaattttcaaatggtcaacattgattttctctttagtcaattttttagaaaataggaagaatttttttccagacatttaaatagcaagaatccaataaataagaaagaaaaaaaaacaaattatatgaataggtacagcaaagaatctaaacagatgcatttcttttaattga

SEQ ID NO: 4032 - DNA, 3339 bp, Arabidopsis thaliana landsberg
ggttttggttttagacataataaaatatcagccgataaaaataaactgacggattaacgactaatgtattttgatcactatttagtcaccaaatgaagtcgctcatcccatgttttcttgtagtagtcaaagctattatctcaagatcttctctagtggacgttcatagaatcctttcgattattatttcaagtatttctgtttttaagaattttgtgtgtagtttatcccaagagcagctaattttgaggctgatgcccttgcaaaagcctccttatcttgttttcttgtaaaactgttgaagttatatattgttcaaaaaaaacaaaaaaagagacagagataattaagctatacaacacaaaaataaaaaaataaaaatcttctttacataaaagcaaaatggtatatcgatgctctactttgaagagtcgtctttggaatcgatgcaccacgttaatttcacaaaagcctcataaatagtatttgttgaaattcttcttacacacttatatcaagaaattcaccttctttgggtttctcaccaataattgccttctctctaagtcaatatctatcttaaactactaaggaaatatgtttttttttaagggtgtgttggcaaaatagtcactttttcaaacttaattaggaaagtagtcactttactattcataatttgcaaagtagtcacttttcacggtttgattcgtacacttggattgtacatcacttttagtgtacaaatgtaaagtgtccgctgtgtattttttatatacatctgtacactaaaaatagtgtacaaactaagtgtacgaatcaaacagtgaacagtgactattttacaaattatgaatagtaaagtgactacttttccaattaagttttaaaaagtgactagtatgcaacttaacttttttatagtaatacgaaatatagtgtattttataatggctacatcttggctttcggttaagtcaaacaaaaataacagctaattgttcatattataaagaaaatataacacaaaacacacagtactatatatagtaccaattagcaagactatgaaaaaacaaacaaaattgaaaggatcaaaacaaaacacataggattcttctccaacaaagaaacatgaagatgggaatggtgtttgtgtttgtgttgcttacagttttcatggctgtgatgtcttctacaagggtctctgctcagtcaaactgcaaaaacgagttgaagaaatcactgaagccgtgtttcagctacctgacttcttcctatccttccttgcctgatgattcggattgttgtccttcgttgctggacatatccaagacttctgttgactgtttttgtcaatacttgaacagtggaggctctattctcgatatcaatgctaacttcatacaagctcgtcgactgccagagatctgtggcgttgacccttatcttgctagtgtgtgtaacgaaggtaagaatttcttaacatcaatttatgaagaaacaccaatcctatagtatgtagtctttatgtatatagtgaatttatgttacaggagatggattgaaaaatataatagtaaggtgatggagttgcatgagatggagaactggttaggaggacatcaaacctagcatgtgtcacaaaccgaaagtatttgaactgatgtaatcgttgtttgtgtttattgtgttgaacgagtctttgtttcagttgtgtcaataatgtgtgtcttcattgggttaaggagccagctttgccactttcccattcctggtttgtaggagttacaactccatctctttgtacattctatttaagattattaaaaagccacaaaaaggcaatcttaattgtctaaagaaaagccacaaatccaaatctgagacatgggaaggagatggtaaactaaatgtttcgggttcaaactcaagagccatagatatagtatgcacaaaacagatatccaaaaggaaacaaataacttatgtcaactttataacatcctatattataaaaagaattttatcattttatgggacaaagcaataatctatcgttatgaaacattgagacctaatgtgagataagctcttgaagttagtagatataagaagcacaaaatttcaacgaatgcatgcaatgaaaagtaatgtgttgtgtttttaatgatttacctccttgttttcatttaacttgatgcattaacataccatttagacttgtcttaagattgtaagcactaaaaagattatttatcctctacaatggttctttatggttcttactccaaaaataaataatctgtccatgagacaatggaaatggcaaaaagaggcattcttacattgcccaagaaaagtgttataatttggatttaagttctaaatctgagacccattattaaccgataagaagtcattaatgggcctgtcactccaaatagaatcatctctatgtctgttgcatttttgtgtatattattagattatagtactataagatttataaagataacaaaattttacatgatcatggaatcaccaagaatcttcctccgaccgttcaatatctccgatgcagaagacgtctttaaatgggcccgtgacgatgacgtcacacgttacctccgttgggactccgttaaatccttagaagaagccaaacaacatatcttaaacaaggctataccacacccatggcgtcgttccatctctctcctccaagaaggtggttcaatcggttacgtatccgtcaagccagactccaggtgatggtcggtgccgagccaacctcgcatacgctgtcgctaaagagttttgggggcgggggatagccacagcggcggtgaggatggcggttgaacaagctttggaggattttccggaggtggtgaggctacaagcggtggtggaggtggagaacaaagcgtcccaaagggttttggagaaagctggatttcgaaaagagggtttgcttgagaagtatggttttagcaaaggagtgatcagagacatgtttctctatagttacgttaaagatgattgttttgtgtgatagttaacggtaaaaataatggagaaattaactaaataatatccggtttttaccgtaatctgaaatgttacaatatcaaacgtacgttaggtttgaagagataaagatgattacggcaacaaatgatggttgtctacatgttcttgtcatgtcataattaagtttaagtcgtgtcgtgtgtctagggtgactcaaccacatatctttacctctgcccattgtgtcttgttcgtgtaaataaaaactaaaatagtaatgttaacgtcatgaatttggataat

SEQ ID NO: 4033 - DNA, 1631 bp, Arabidopsis thaliana landsberg
gcgttgaagcatttttattaactttgtccctccaacgaaagaaaagtcaggattttgtgtaaattacttatttttccttcttctgtcacaatcttactttgaatttttgacatgagaaaataaatactctacataaagctcatttcgagagatatggttttgttatttctctactgtaaaaaaggcaaatcaagaaatgtcttcacaaaagagttcgcatcataaggcagactccaaaatggaacaagatgtgagtttctgttctttgctattgaagataatttgcaacatctttttaaatgaaatcaccaaactttgattaaaaatgttttatcttgcttttgtattttccttgttaaattctgcagaacaatagaaaagcatggatttcacaaccgagtggtcttaactttgtttggggaggtgactcgagatattgggttatccctaaagaaccaaggtatcatccgattcattccgacttaaccgataaacccaactttggtttactgataccaaaaatcttaaactgattcatttgattgttggttttaggatgcctgctgagctgaagatggtgagttggttagaagtaaccggttcattcgacaagattgaacccgggaaaacatatcgaatcggttttaaaatctcgtttaaaccggatgcgaccggttgggacaaagcccctgttttcatgtctgctaaaatcgggaagaaaggcaagacagtgtggaaaagaatcaaatccgttagccagaactttggtatactgaaaggtggatcagaacccgtcaatatacctgacgagtccgatggcctgtttgaaatcttggttagtcccacagcgcttaaccaagttactaagcttcagtttggtctgtatgaggtgtggactggacgatggaagacaggtctgttgatccacgaagcctttgttcaagaagtgtaagggggaatatgatcattattgattttcataatccgaacgcaaatcttatacctcgtttcagttcaaatataagagctttagatcataacaatgtaatcttatatacctttcttgaccaagtcttaaagctctgtatgataatcttccggtttgaaccataacgagaaatcgattcctttcgacttcaaattctcagttgcgggtgcaattctctccagaagctacaccgattaaacaaaaaatatgtgagacctgatctctaagcacaacagattaaaagcattgacaaaagtatgaacagttcatgaaaccttggggtgaagaacgccgttggagaccaaaacagacctatcaaacacagaaaacttccctccgtccatccgagtcacagctcctccagcttcctcaactatctgtgtccattttcagacatggattaagctctacaacttaagtactttagtaagaaaaaaaaaacaagaaggatgaagaagactacaagaacaccagcagccatgtcccatggctttaaacggtactcccaatatgattccgcaatcccaagtgcaacatgacacatgtcaactgcagcagcaccgagtcttcgcactccccgactcacatcagtaaactctttgaacagttccatgttagtgctccatgcatcatcatgttcata

SEQ ID NO: 4034 - DNA, 2252 bp, Arabidopsis thaliana landsberg
ggcaaacccattggccaccattctcagcgcggcgatgcttctgaagtatggacttggagaagaaaaggctgcatagaggattgaagacgctgtcgtggatgctctgaacaaagggttcagaaccggagacatctactcccctggaaatgtatgtgcatgatgattcttatcatttgttttgtacaagttcgtaacaaaatacttaaaaaagtcttttgtgttttgaaaatgcagaaactggtgggatgcaaggaaatgggtgaggaggttctcaaatcagtggaatccaaagttccagctactgtttaagtttattgatgatttgaagcacttgaaaaagtttgtgtagcacttggttttacggtcacttatatgctaatccatgcaacattgtaccttttataataaataaattatttgggatcgattctgcaattcaaagacaagattctccaaaaacatttgacaggtctcctgcctttacttaccttgttcttgaagattgagaatttctcttcaactacaagactcaatatcttcttcaatcaatatttgtttaacgaaataagtttcaagagaagacaagctactatgatttttagtctcaagagtcttacatttttatactgaaaaccaaacttatagagctttacatttagaaaaccgaaaaaactatcaatcattaggttagcctttggattcacgacgacgtatcagatttgcgttcagcgtctgcggcagactgcatttgagctgcgtattgtaagttccagagaacatcttcaaaggaaggtcttgcggaaggttcaagcaaaacacatttattggcgattgagatcgcaatcgataaagactcctgcgagcttgttgttaggactgttggacttactattttctgccgaccgtcttggctcccaaatgatgtctgcaaacacaacattgcagcaacagctattaaccaaatttgtttcaatcaaataacaatgatgatgctttttttttttgctttttctctttgttaccatttcgttgagaagaaaagcctctccttttgtagtgggcactggtcctatcagagattccagaagtatgaatccgaagttgtacacatcgtcctctcttttagcctttttcctgcataatctcaaagtttggattagattctcataaatgccatggagttttgctatacaaggacaaaagatgcatactttgacttgtgggtttctgactttgtctgcaaaatgtagaagcaggagtaaagtagagtcctgagttagtgtcaaagaagatcatacaaaatgaagataaacacagtgaaagagagtaaatagagcaaacctcaagcttttcgttctcttcaatgatggcagagactccatagtcactgagctttgcaatcttgtgttcgtcaagcaaaatattgttagtcttaagctgattgttgaatgaaccaggcattacaccggtgtgaagaaaatgaactgcctttgctatctcaatcagaattgctagccgatctggccatgtcaggatcttctccgagaaagattctacaaataaacaatattctaacaacaacgattttccaagtacagagagattcagtataacatttagtttactacaaatgccaaacgactgacctgatagatgtgtgcgatagctcccgttgggcatatactcgtatacaaggtagagtatggttgcaacaggatcgtgttctccgctggtttgcgtacaatggcccaagaagccaaggagatgaggatggttgagctttgccatccagtctaagtgacctctgatactctggctggagaatttccttgataaaaccagacatctgatagctatggaacttccattttccagtgacacctctgtatacctgcaaaggatcaaaacaagcagagtaaagcaaatgactgataggcagatcacaagaattaatcttgcagaagacaaaccatacctttccaagggagccttcacctaagaaacgtgatgaatcaaaatcgcctgtggcttcctttaaatcttcaaaagaaaaggaccggcatgagggcacaccctgtgcacctagctttgctgtttgagagattaaccctgcaagacgaaatcatacacggatattaaatccctgaaagacaattcctagcaggaatagtctacattatgagtcaaaagtgactcacttgcactaaccagaacttcagaggagagactggcgtgtgagttatctgacacaa

SEQ ID NO: 4035 - DNA, 10218 bp, Arabidopsis thaliana landsberg
  unsure (1)..(10218): unsure at all n locations
catgtaaattttgactataacgaaattgttaatctctttgtttcttgtgcaaactatgttagttctaattcattattgttaattcacttgtttggagttgtgtaaattgtattggagcaggcatactcgtggttttgactaatatgctttattgttctcttttaggctttagcagtcttgattgaagctttgcattcagctaaggatatggagccggcagttgaaaatagtggtatcgttgctgctttatccctaaatttactaccttggcatagtctcttggttatcttctttcaaaacctcttacttgcttaacattctcattgtcaggaatttcaccgcttaatctagcaatatgtcactcagctgctgagatttttgaggtcatagtctctgactcaactgcatcatgcttgcatgcttggattgaacatgccccagtccttcataaggccttgcatactttgtcaccgggtggttctaatcgaaaagatgctccttcacgattacttaaatggattgatgcgggtgtggtttatcacaaacatggcgtaggtggccttttacgttatgctgctgtcttggcttctggaggggacgcccaattatcatcatcaagcatccttgcactcgatttaacaccggctgagaatggtgctggagaatcaacaaatgtctctgagatgaacgtcctagataatcttggaaaagttatctttgagaaatcttttgaaggtgttaacctttctgattcatcaatttcacagttgacaacagcacttcgaattttagcgctgatttcagataattcagtatgttatctttccccataatttttcagaaattacttttttttcctttagatgctatagtcttcttatttaagtgttctgaaatgttgttctttgtacagactgttgctgctgctttatatgacgagggtgcggttacagttgtgtatgctatcttggtcaactgcagctttatgtttgagaggtcgtcaaatatttatggtaaactactgtctattctgtgatttgattcaactcctctattgctgctaccatttgaatcttaactttagacgtgatgataagagatacttggaagagtttaaataacccagttgctggataaccgttttttatatttacccttttaataacctttttcttataggttcacgatgttttcagctacttttcctcaatcgtttgatgattataggtgacactcaactaattcttttgttttggacttagcagattatctggtggatgacgatcatggatgcagttctatttctgactttttgtctgaacgtaatcgtgagcaaagcttggtggacctgttaattccttcccttgtcctcttgatatcagtcctacaaagactacaggtctggtgctttatacattattagtttcttcatcatgtatcagcaacaaatgaaatgattatataaatttgattaaaatcttctctcaaaagccatagcttctgaaattctacctttatttactttgttgagactctataattgcggtcttatgcgtcttcattatcccctctggtcattgacattttctttgctgtctaaagggaactaaagagcagtacataaacaccaaattgatgaaggcactcctaaggctacatcgggaagtcaggtgagttactttcgttttgttcttagtagtatcaatgacatgtatgttaaatgaaaagttaagctctgagccatgatggcttgttttctttccagcccgaagctagctgcttgtgcagctgacttgtcctcccattatccagactctgctcttggctttggagcagtgtgccacctcattgtgtccgcccttgtctgctggccagtttatggatggattcctgggctattccacactcttctttcgggtgtccagacgtcctctgttcctgccttgggtccaaaggagacctgtagcttcctctgcattctagtatggaaatcttacacttccgctaattattttttacttggtgtttgtgatggcatgcactctttatatcattgtgagaaatttaacatatatttccagccgaatagatatgtctcatctgaacatttgtgatggaattttgttcatgtgtattgtagtcagttaatgtaaatggtatcaacgggaagatctccatttattgtcttaatactttattcttcatgtatttctcattgcaagagcgatattctccccgaagaaggagtctggttttggaagagtggcatgcccttattaagtggtctaagaaagttggcggttgggacattgatgggtccacagaaggagaaacagatcaactggtatctggagcctggtccacttgaaaagctgataaaccatttgacacctaatcttgacaagattgcaaagattatccaacatcatgcagtatctgtatgttcttctatatcttgttaaatccagtgtttctctgccgcttttgcttttgttatcatttattcagcatgatttggactttgtcttattttcaaacaggcattggtggtcattcaggatatgcttcgggttttcattgttcgtattgcatgtcaaagggttgaacatgcttctatccttctgaggcccatattttcatctatcagagatggaattttggatcagtcatcaacaagagacactgaagcttatatggtatttgttacgcctctctaagtcgctgtctatgttactgctgctcctaaccagtctcattactctctttcaggtctaccgatatcttaattttctggctagtttattagagcatccgcatgctaaggtcacactctttgcctagttttccttcactttttttttttttttttttttcaccttaaacgtattcacttcagggattactgttagaggagggtattgttcaactgcttgtggaagttctggaaagatgttatgatgccacttatccaagtgaaaacagggttctagagtatggaattgtgtccgcgtctagtgtgattcagtggtgtattccagctttcagatcgatctcactgctatgcgattcacaagtgcctctcttgtgctttcagaaaaaaaagctgtaagtgttttttctgcaggagtgctcaacgttaccttatctagatcacatttatatctaatcgttttttatttatttatattaacttgtacagattggccagtctgagtgcaaaagattgtgcattgatatttccctttgtgctgaagttctgccaggtattttgtcaacattgtagtaatctatgtttatcaattgttttccatatgttattatgtttgtgttctttttataaattgctgcactacggattataaattgtgattgtttatggcaatagattctgagatctcgatgagctcttctaagagatagatagatatctttgtaatatttccttacaaaaaatatgattacgaagaaattttttattttcttacaggtgttgcctgttggcaatgagctattatcttgtcttggcgctttcaaagacctgagctcatgtggtgaaggtcaagatggtctggtttcacttttgtttcatctgttttctggtaccgaagaatctgtatctgaaaggtggtgtgacactaatagtctcagtctcgatcaactagatatgaagaaaaatcccccttttctgtcttgctggatcaagttattgaactcaattaattcaaaagatggtttgtctagtcttgcaatgaaggcagtaaacgttctgagcgtgggctccatcagattatgccttgatggtaaaaggtaactcccagactcttcataatctacagttcttgcgctcccagtttaacacgagtttgataggatttttactctgataggcgacgttgtatgtccacttatattcactgtgtatgtggatagaaaaataatgttcgcgatgccacttagtttaagttggtgtatgcatacagtttagttgatattgttttgttcaggtgatataagcctaaaaattatcaagcagaagatgtgcttagttgcatctgatgctgttcacgtttaaatacttccaactagtatttcaaaccattcgtctaacatatatatatatttaacacatctgtagtctaaattttcttcatttttccagtttggactcgaagaaggttgcagcactaaaatctctttttggccttccaagtgagtttagtggtacagacacttttagagaggaaaacattggtttgattgaacagatggtgacactgttgagttcaatgacttcggggtctgatagttccgcaacagctgagatgaaaccctatttgcatgaggtacggactacctcatacctgctttttcttgcatcatcctcttcttttgttgttttcctcttaacactgactttcatattctttttgtggatttgaaggcatctcagtcgttgctgtcgttgctaaaagacgggaatattgatgatattatctcctgcaaaggtgtttttgtttctcctgggaatcttgatatggatgatttggtttctagaaacattgaagatgatctctatcaaagaggacttgaagacaagttctggtgggaatgtccagaaacattacctgagcgtctgccccagtcatctctccctgcgaaaaggaaactaccaactttggagagctctagcaggcgtgctaaaggcgaaaactcttctgttgacatacctacccaaaattcaattcaacggggaatgggttctgtatcccttcctcctgctcctacacgtagagatgcctttaggcagcgcaagccgaataccagcaggcctccctctatgcatgtagatgattatgttgctagggaaagaagtgttgatacagctggtaattctaatgcaataaccatttcacgagcaggatctagcagtggtagacctccatctattcatgttgatgagtttatggccagacagagagaacgaggccaaaatccctccaccattgtggttggagaggctgttgtgcaagtgaaaaatcctactcctgctagagatactgaaaaagttgcaggtaaacctaaacaattcaaagccgatcctgatgatgatctacaaggaatagatatagtttttgatggtgaggaatgtgaaggacctgatgacaagttgccctttcttcagcccgatgagaaccttatgcagcctgctcctgtcatggttgaacaaaactctcctcactctattgttgaagaaactgagagtgatgcaaatggaagtagtcaattctctcacatgggcacaccagtggcatctaatgttgacgaaaacgctcagagtgaattttcatcaaggatttcagtttcacgccctgagatgtcgttgattcgggaaccaagcatttcttcagacagaaaatttgttgagcaagcagacgaagcaaagaaaatggcccctctaaagagtgccggcatatctgaatctgggtttatacctgcttatcacatgccaggatcttcaggacaaaattcaattgatcctagagtgggtcctcagggtttctattcaaagagtggtcagcaacatacgggccatattcatggtggattcagtggtcggggggtttatgaacagaaagtgatgccaaaccaacctcctttacccttagtgccacctccatcagtctcacctgtgataccacattcttctgattctctttctaatcaatcctccccgtttattagtcatggaacacaatcttcaggaggacccacccggcttatgccaccgctcccttcagcaattcctcagtactcatctaacccatatgcatctttaccaccaaggacatctacagttcaatcttttggatacaaccacgcaggcgtaggtaccactgaacaacaacagagtggcccaaccattgatcatcagtctggcaatctatctgttaccggaatgacgtcttaccctcccccaaatttaatgccatcccataattttagcaggccatcatctctccctgtgccattctatggaaatccttcgcatcaaggaggtgataagccgcaaactatgttgttggttccttccattcctcaatcactcaatacacagtccatccctcagctgccatcgatgcagctttcacaattacaacgccctatgcagcctcctcagcacgttagaccacccatacagatatctcaaccatcagagcaaggagtatcaatgcaaaacccatttcagattccaatgcatcagatgcagctgatgcaacagacgcaagtccagccttactatcaccctcctcaacaacaagagatctcccaggtgcagcaacagcaacagcatcatgctgttcaaggtcagcaaggagctgggacttcccagcaacaagaatctggaatgtcattacatgattacttcaagtcccctgaagccattcaggtttgtaatccacatccttggtaatgaatgatacgctgatttgttttgtttagtagtattacgtgccacagctgaccataattcttaaaactcctcttcaggctctattaagtgaccgtgacaagctgtgtcagctactggaacaacatccaaagttaatgcagatgcttcaggttcgatttgtttacttgtttttatgtgctttttgaaagcatcatcaacctttgtgtgttaattgtagagttactgaaataggttttgttcttgttggttgtgacaggaaaaacttgggcagctattagaagagagagacttgtcagcaaatacatccctttggcttactagttgcttttcaatttctgtaatgtctaataacatgtacattgtttcagttaatatgtagacaaaagcggtaatcggtatcgctttctgttgttgtttagtcatattcatgtacattagctagaaaagaaactcaaccttcaagttctcaagtcctggtttttttttgtcaaagcaacaagccacgagcataagcttacatttataaccctgtaagtaacaaaacaataatataaggaattacagtgattaaaatcattaaactttgaagaggccttaaagccccaaaaggaacatttgaaatcgaccccactaagtgacccaacaagttgttaggcgaatgtgaattggaaaaaaacacaaaaagaagaatgattgttctcaagcccagcaaatttctgacacagttcatcaactaggcgttgaaaagatcttgtaccaacgagaatactgtagagaagagagagagagcgaaggagatcgggtggagtttggatgatatcagagttgtccgtagatgcaataggattaaagattcaacgtttagtccacttggaaggagtacaccactgagaatcttaaagattcaacatttagggtactcttctctcagataaatttagcaaaataagaaagatgatgtctttctatttctagggctgagttcgttgtatactaaccaattcgtcgtaattgaaagttgcttgctttatgtactcgttgtttagtgaacttgcatttctctactcaatcgtattcatctctgcactcacttctacttctggttttgctgagtttttgtttggttttcttggtttaggctacaaaatttatgtaaatggatctcatttcttgctctctattcaggtgctgaaagacaaaaaacctcagcttttgctctatggagcctcgagtaagtatatactaaacaagcgacaattactgatttatagttttgtgttaatggaggatttttaattgctgaaatatttctttcttttctcggttttgtttttcgacaggataatcaagccgaggcttcatatacatttggtgatcgatcaagcagtgacatagttgttagactaagaaatgaagaaggtcgtgatgattggatctattgccattccaagatccttagtgagaaaagccagtattttgctgaccgtctctctgataaatggcccacttgcaagattcttgattcacgttactgtgttgaggtcatctgtcaagaatcagactatgatcatcatatcaatctcttaagacttctctatgttgtctctgatgatgtccatgaggataacttgtgtcataatgtgaaaagtgcgttggggattctctctgtcgctaaagaacttagttgccctcagattgtcactgcttgtgtcaactacttggaagctgttccatgggaagaaggcgaagaggaagagattctgcggattgtaccgaggattggatcagaagcagagccgattcttgcccgtctccaaccagttgatcagtccgctgttcttgaaatctttgtatcggcttttaggtttgctacttcgtccccgcctttgctcttgggtgacataaaatcctctgctcaagaacagattgagtatatgataaccgaagatgacgatgcaccgttgttgattgctgatgaagaagtcaagcttgaagtaaaacaatgtgtaaagagcctgtttgttagattcttccagtgcctagaagaaatcactttgaaacccgtcgagtctgaggtaatcaacaaaaaggggtcttttaggatggtcctttcagatatgtgttgggtttttcagatattaacgaagatggaagttgttagagattttgttataacatgggctgacatatctgagaagttagttaaggtagttgagcagttggaaacaacagttgtagaggctgttgagataagagtcaaggtcatcgaggtgactgcaaaagtcatagaagcgattggttatggaacagtgatattaccaacagcgaaacggcttcagatggtaaaactatggcttccttttgtaagaaacacaaagcctcttgttgactcaccggttagagaagatgaggagaatgatactgtgagatataaaatcgacggagagatatggcaagctttagaatcttcctttgtatcgataattctggcattgccatctgcagaccaagctgagatattgactgaatggttaagcaagaatgggttgtatccggatttaacagaagctttcgaggtttggtgttacagatcgaaagtcgcgaagagaagattgggtttagtcgggggtgaagaggagaacggcatgtcttaactcatttgttgagctctgaaaccagagagaagaaccattctgctttttgttttgcttgagtgtgtaggtgtcttttaaccctttttgtgtggactctgccaaatccttcatattatctattggccgattccacaaatatgtaaacactggtgacaaagatcttgaccttcttaaatcactaagagatatatcctactaaaagtagatctgtagaatgctgatcacttgtggnnnnnnnnnnnnnnnnnnnnnnnnctcaggtccaatagatcttcaatgaataacgctcttgatgataggctaaatatgtttgttgtccatgccattgtaagtgatatccaacaagaaacaagaatttgctcaaaaattgacttgcatctatctctcttgattgataatatacttgtattgcaaaattctgtacctgcgcttatattattcatttctttatttagtccttacacactgtctaacgagttagaattttagactgaaaataaatggtaggggctgcgcgaacgcaaacccccgctgccacaaataatgacgtaggctcttcctctagggaagaccttaagcatagcaccctcccggtatgtgcaatgagagtcactagcctaggccactcgtcttattgatcacaagttgaccccgtccaggtaagtaattttctcagactgtccacatcttcacttatactctgcttcctcaatcattctttcaggtcttagcgatgtgggactctgcaaattaacacatctcacacacctattggtctctttttaacgagatgagttttatgttatacacatgagccatagcccatatgtcctctaggcccattgaagtgcatactataaattgtttttttttttattggattatcagactgttttaaacacgttcgcttgcttgatacacgatttcttaaatattgttacggaagctgttaatatatttttttcctttttcacaagctgttagtgttactgtagatttacgcaaggtttagcttaactctaaaatggttcagcatcacctactttagtactacgactacaaaactgatcagcttctccttctctcttccat

SEQ ID NO: 4036 - DNA, 515 bp, Arabidopsis thaliana landsberg
aaacaaaaaaaaaataattgtataacgaaaaacacacaagagtggagtggaaaaacaattcaaaacatacatccaagacattggctttgtcaacagaacacagcttgccacgccttttcctagcagtctcgaatgcaacacgagcaattctgtcaatctgaagaagataaagcaatgcattaatacacatacattgtcacagagcagcagattgtgaagagtaagtagtacctcgtgagcagcgtagatctctgtattaaaaccgacttcttcgccattttcgttgatcgtaatgcctcttggctctccaaagtaaatacctccagtgagctcccttacaatcatcatatcaacaccttgtgctacttctttcttcagtgtggaagcatcaactagctgaacaagcaaaaacagaaaaatttgagtatatttacaactagaaagcaaagtgataagcaaatcaatacctgtggtaaaactgtagcaggtctcaaattagcaaagacattgagatc

SEQ ID NO: 4037 - DNA, 5993 bp, Arabidopsis thaliana landsberg
  unsure (1)..(5993): unsure at all n locations
ggtttgaaaaattgggcgacatgcttgcagcttcatttatgcaatttgcaaaacaacaactgataaaaaaagtctttggagattgggatcaaagtttcagagtattacccaaactaatggctgcgtttcactcatattatgggctagttgtggactggcagtacaagctttttcaaatactgaatttgcttcctttcgtagtgtgttttgggcgtttccacagtccattgaagggtttcaacactgtagacctctgatcgtagtggacaccaaagacttgaagggtaagtaccctatgaaattgatgattgcctcaggagtcgaagctgacgattgctatttcccacttgcatttgcgtttaccacagaagtatcctcagatacctggcgttggtttctcacttgaatcagggagaaggtaacacaaaggaaagacatttgcctcatctccagaccccaacctgaaatacttaatgttattaacgaaccagggtctcagtggcaagaaccctgggcttatcacatgttctgtctggatgatatatgcacccaatttcactatgtttttcaagacaactacctgaagaaccttgtgtatgaggctggatccacgagtgagaaggaagaatttgattcctatatgaatgagatcgaaaagaagaacttagaagcgcggaaatggttagaccaatttcctcaatatcagtgggctcaagctcatgacagtggtcggagatacagagttatgacgatcgatgcagaaaatttgtttgcattttgtgaaagttttcagtctcttggtttgccagtgacagctaccgcactgcttctgtttgatgagataagattttttttttactcgggtctttgtgatagcagtggtagggttaaccgcggagatatgtacaccaaacccgtcatggaccagctcgaaaagctaatgacagattccatccctcacgttgtaatgccattagagaaaggtctgtttcaagtcacagaaccattacaggaggatgaatggatcgttcagctgagtgaatggtcctgtacgtgtggggagtttcagttgaagaagtttccatgtctgcacgctctagcagtctgcgagaagctgaaaatcaaccctttgcagtatgtagacgactgttactctcttgaccgattatacaaaacttatgctgccactttttctcctgtcccggaagtagcagcttggccagaagcttctggagttccgacattgtttccaccggtcattctgccgccacctaacgtatcaggtaagtcccaatgcaaaactactcctcgcactagcaagacgaaaagctgaacctgttagatggatttggtacgaaactgagtcaattctaaagaggtttttgtatggattgtgctaactgattggtgattatgtagtaacttttgactttcggcaagtatgattaaaccggttcgggtaatatatcgtagtgtcgtgacaaaaacatgtattgctgcttttgtttgtgaaaatcaacgtgagttttgcattttgctgtgccctgaactaacagtcgattaatcctgaatttgctttgacttggttaatagtcttaataaaccaagaatcatgactgaaaactgaactaaaatcggtatagacattactagttgcattgcattatgtttctactttcaagattaacttagtatttactatggcatggatacaattcaatacgaaagatagctttagtcaagactaggattcagaacaatctgaatacttaataaacgatggttccttagattcataaacatgaagaattatagtgtcatcatcaattttgatatatctttcttcatctttttatgtttctgacgccatgtgtttatctgtctttgtttgatctagtaaatgacaaagccaaggtgcctcctagtgatgaagagttgagaaatgcaattgttgatatcttgaaagttgtggactcgaaaacggttaggattcaaacctcaaaatttttatgtgcgtttagaagataaattgatctataagtctctaataatagctttgttatttcctgacagaccgcgattgctgacgtcctcaagcgacttggtatgagttaagatcagatcgttttatttcttcaccgatgatgtcgtctttgtaacttgctttgttttaaactggttttacagctgagaagttcgaaatcgacctcaccccaagaaagtcatctataaagacgatgatccaaaatgagctcagttcataagaagacaagaacgaggataagttagtaagtaagaagaaacttaggatttaacatgaagcagctccttaggatttattcatgcccactttaagaagacctgaaagttagagaactagacttaggaaacaaacaggttcaggtttatttgtatgtgaaaatttagtctggttaaaaccaagctaaacgggttacccattactgatgaacgggttaacgggtttattattgatgaacatatagttgggccttgttattttggcccaactgttttttatttttaagtcgttttgtcttcctcatacagccggagaaaccctaacgtcagagaaaagggtttgcatccccaaagtttacatttttacttttgaactccgtgcaggtttgttgtgctcatgtctgaagtaaatgttccggtgttctgttgctggaacggttgcatcaaggatggcactaatggcatatactatgaagggtccaattacagaatgaccactgtgaagggaaagactaagtttaacgaattgctggatcatctgtaccaagttactgggttagataggaagagatcaaagtttggtataatcggtagatatcctacagatattcaagcgtttagggttaagtataaacctcttcccgtggtggacgacactagtttggagactatgcttgagattacaaccaaacatccttatattaaagacattgacctgtatttggaagtggaatcgacatccgttggagttattgatcctgctacttgttcatcgccttcagacattcttggtggttcttcgaaaagacagaagaccgatatacatgttaagttagagagggagacggatagaaactcagaatcagatggcgtggtgcacttggttgatagcagcactttgaataaagattccatttctggtcatgtttcaaaaccgtgtatgtctagtttgtggcttgacgatcatgacttgcgagtaggattgtgctttaaagatggcgatgagctgaagaaggcagtggactggtgttcccttaaagctcagcaaaagtgtgtagtacgagagactgcaaaggacgagtatatctttgagtgcatcagatggaaatgcaagtggtcacttggagccgctagaatgaaaaagcacggacttgtcgagataatcaagtatactggtccacatacttgtcatcccattgttccagaagatttcaaatcagagtttgaaacagatgagattgaacgtgcggtcaggtataagcccacataaacaattgcagagttgaagaagtggtggaaaaaaaaaattggctatgagcttgaaacttctaaagagaaagctatcaaaagagtttttggagattgggatcaaagttttgaagatttgcccaagttaatgtctgccctttgttcatctaatggactccttgtggattggaagtttgatctttttcctaatcctaattttgcatccttctgtggtgtgttttgggcgttcccacagtctatagaagggtttccacactgtagacctctgatcgtagtggacaccaaaaacttgaactgtgagtaccaattgnnnnnnnnnnnnnnnnnnnnagtagatgcagccaacaaatattttccacttgcctttgcggttactaaagaagtttctactgatatttggcgttggtttctcactggaatcagagagaaggttacacaaaggaaaggcctttgcctcatttccagtccccaccccgacataattgctgttgtcaacgaatctgggtctcagtggcaagaaccttgggcttatcacaggttctgtctgaatcatttttactcccaattctctcgtgtttttccaagcttctgcatgggggctcgcattaggcgggctgggtccacgagtcagaaggatgagtttgtttcctacatgaatgacatcaaagagaaatggttagaccaattccctccaaatcagtgggctctggctcatgacaatggtcggagatatggaatcatggagataaatacaaaagctttgtttgcggtttgtaacgcatttgagctggctggccatgtagtgacaggttccgtgcttcttctatttgatgaactgagatccaagtttgacaagtcttttagttgtagccgaagttctcttaactgcggcgatgtgtacaccgagcctgtcatggacaagcttgaagaattcaggacaactttcgttacttacagttacattgtaacgcccttagacaataacgcctttcaggttgcaacagcgttagataagggtgaatgtattgttcagctgagcgactgcagctgcacatgcggggattttcagcgttacaaattcccatgtctaaacgctctagccgtctgcaagaagttaaaattcaaccctttgcagtatgtagacgactgttacactcttgaacggttaaaaagaacgtacgccgccattttctctcatgttccggaaatgtcagcttggtcggaagcttctggagttccgagattgcttcctcctgtcattccaccatcaccacctccatcacctccaacttacgtatcaggtaccaaatgcagaactactcctctcgctactgagaagaagagctgaaagatggatttgagtttgcaccgagccgggcatcttatgactttagggaagtaggattaatctggtttcagttgtaaaacaagctacaaatattcacgggctttcttccgtcggcccaattgatttttattttatttttttcgaaaagctattttctcatttctctgtagactgtagtagttgtcttcatcagtgacctgacctgtaacagtaacatcaccggagaaatcgttagcgaaggtgaaattatttccatttctgaaagatctaagcttttctctgcgacacccatttccaaattccctgtttttcttctttccagtcacatagaactttacaagtcttagttttgagtatcactgtttagggtttatgtttttgaatgggtttatctgcttctatagctagaaagctttctccttttagagctgtacattaccgttgatattgagctttatagggtttttcattttaggaatctatgcctaaattttttacattttttctttgaattcactgcagatttgttgtgctcatggcgattgaaacagtcagagaaaaggttatggtgttgtgtcacttgaatggttatattaagtatggtgctgatggcgtatactatgaaggatccattcttaaaaagatcacaattatgcgaaagactgccttaagcagattgttggataggctttatcaattgtttggattagataagcagaaatcagagttcaaaatcttcggtaagtaccctgtagatgtttcaccggatctctttacgtatgtacattttcccgtgttgaacgactctagtttggagactatgcttgaggttccaaggaatcatccttctgtaaacaatttggaattctatttggaagctaaaccaacttctgatgctgtcgttgttcctgttacttgttcatcgccactggaaagtcctgatagttcctcaaaaagacagaggatcacacaacaagaaatagtggataataattcaggctcagctggcatcttggttaaagttgtcaattctggtgcttataaaaccctgacttctgcctagactgtggattgatgacgatcatgacatgcatttaggactgtgtttaaagataag

SEQ ID NO: 4038 - DNA, 1526 bp, Arabidopsis thaliana landsberg
cccagaaagattttcaaaatccggaatttttgaaccagattaagatttgaacgggggggttcaagggattaatccccacggttttccaaattgcaagagttgaaagaagttggtgaaaaaaaaaaaatttagctaatgaagcttgaaaactgaaaatatgaaaggcagcaaaaattgaagttatccagagagtctttggagattgggatcaagtttttgaagattggcccaaattaatggctgcctttcattcatctaatggactctttgtggactgaaagtttgatctttttcctattcctaagtttgcatccttttgcggcgtgttttgggcattttcacagtctattgaagggtttaaacactgtagacctttaatcatagtggacacccaagacttgaaaggtaagtaccctatgaagttgctgattgcctccggggtagatgcagccaacaaatattttccgcttgcctttgcggttactaaagatgtttctactgatatatggcgttggtttctcactggaatcagagagaaggttacacaaaggaagacctttgcctcatctccagtccccacccggacatcgtcgctgttgttaatgaaccgaggtctcaatggcaagaaccctgggcttatcacaggttctgtctgaatcgtttttgcgctcgatttggtgccgttttctcagactacaccctgaaggatcttgtgagccaggctggatccacgagtcagaaggaaaaatttgattcctacatgaaggatattgaaaagaagaatataaaagctcggaaatggttagaccaattccctcaaagtaagtggactctggctcatgacagtggtcggagatatggaattatgaagatagacgccacattgtgttacacaaagtctctgtttgcagtttttagagtctatcaattggctgatcatgtattaacaggctacgtgctgcttatgtttgatgagctgagacactcttttgaagagttgtttgatgaaagccgtgcttctcttaactgcggcgatgtgtacacgaaacctgtcatggacacgcttgaagagttcgagacatcttatgttacttacgttgtaatgcctatagacaacaatgcgtttaaagtcacaacaccgtcaactaataatgaatggatcgttcagctgagtgactgcacatgcacatgtggggagtttcaaagatgcaagttcccatgtttacacgctctagccgtctacaagaagctgaaaatcaaccctttgcagtatgtagatgactgttacactcttgaacggcattgcaaaacttatgccgccacattttctcctgttccagagctatcagcttggccgaaagcttctggagttccgacattgttccctcccatcattccgccacctccacctaccgtagcaggtaaatcccaaaggaaaaccactcctaaaactactaacccgaagagttaaaagttttagatgaatttgaatcgaacagaacccgagcattttggtggattatgcc

SEQ ID NO: 4039 - DNA, 1591 bp, Arabidopsis thaliana landsberg
acaaaaagttatgcatcggcagctttagtagtccattattgccaaagaaatacaaaaaccatgacattctcttttttactatattgtcaagatgttataaatggtgtgatccgtgcctcctctaataggagagagggcaaatgcccaaagtcacatttaaaaacaaaagaactagaggccacaatataaaattatatatgcttatctattttaattagtttgatataattattttttctagtcaaattttgctagattatatgaatggaattgattttttttataatttgaaacatgcatcttgatagtatatattattatagtatatagtaaggtaaaaataaaatattaaaaacaaagaattactaaaccaagagacttgattacatgcactaaataaactttttttttttaattcccctaaaacctctataaaccctggcatgacactacgttaacgttttaagtaacaaatagattgtgttttacttttcattatcataattttgtttcgagacaatagtatgattacttttttccaaacaaattacaagagccccgtacatggcggcagtggggaatactaagacgtaagcaaaggaagttcataccgttgaaggaacaaaatgagttgcaagaccacacgcaagcaattcagcgccatctaacctagctcctgtaaggccaacatactctcctgggatgaagaagaagacatgaaggatgagataccgagattggctcgaacttttgtggacatgcaaaaacaaatgacttaatgttgttaccaaaaaatccagggagccgtgacaggaaataggaggcgcctacatctggaaagagccccagagatgtctccggcatggcaaaaaccttggagaaactcaagatatggaagtgacatgagcatacttcagagagatctttatattagtcatccatacatggacatgttttaaaaaaagaatacgtaccgtgttctcagttgcaatgcgaaatcgaccatggatggagacaccagcaccggctcccatgacaataccattcaaaattgaaacctataatttgaaaaaaaaacattataagcttatacactttaagtatattctaaaagcacagtatgtgttctgagacctgaggtttgctatacgtggccataacataattgagcgtgtattgatctctgaagaaatcggcaccaagtctccatttacctagtccacataaaatagataaagagtgtgtaaaagcagaaaataagcaaaaaggaaaaaaaaaagatggtcatggaagggtgatatattgatataccttgtaccatgttttgaacaacaggtggaacgtcgccaccggcacaaaaggctcttccttgaccctttaggatgacaagtttaacactagggtcttcctcatatgcacggaatagttgcagcaaccgagagatctagagaagattgattcaagccattatataactagtgcaccaaaggccggaagaaattgacaacaaaggaaagattcaataccatgttgaagcacagagcattaagctgcttgggtcggtttaatgtcaaaattctaacacttgatt

SEQ ID NO: 4040 - DNA, 696 bp, Arabidopsis thaliana landsberg
cattcatgttatatgtatcttcctaattcttcctttaaccttttgtaactcgaattacacagcaagttagtttcaggtctagagataagagaacactgagtgggcgtgtaaggtgcattctcctagtcagctccattgcatccaacatttgtgaatgacacatgttaacaatcctttgcaccatttctgggtgcatacatggaaacttcttcgattgaaacttcccacatgtgcaggtgcgttcgctgtcactgatagaccaagagactgaaagctttcacaaattgccctcaaatcttctgtttctatcgtcatgactccatatctccgaccactggtcatgagccagagcccactgattttgagggaattgggctaaccatttccgagcttctgagtccttctttttgatgtcctttatgtaagaatcaaattcttccttctgacttgtggatccagcctgcttcacaaggctcaccaagttgtagtctccaaaaatatcatggaattgtaagcaaaaacaatccatacagaacctgtgatagacccaaagttcttgccacagcgatccgggttcgcttataacagcaactatgtacggttgaggactggagaccaggcaaacgactttccttcgagttaccttctctctgatattagtgagaaaccaacgccaactatcagtggacacttctt

SEQ ID NO: 4041 - DNA, 3793 bp, Arabidopsis thaliana landsberg
ttgaaaggtcactaaggcgttatggaactttaacctataaactcttcggatacggaaaccaacacatgtaaaattagtcttctccttcacttttaaattttgtactgtacttccaagttcttttaatcaaaccatggaaacaaaacataaaattccaccaaaattatctattgggctatgaaaaatataatatttgggcttttaactaataagcccatattttaagccagccctactgttgggctttggaaacggcggcaaaattattgttttcgtattttattttttttacttgtattaaataaaaaatttaatcatttaaaattttcaaaatacattgggggtttagggttttatcttttacacagtgaaggtgaaaaaaaaatagcaaaggaggaaaaaaacaaaatttgaagaagaagaaaaacctctgagcttccaatttcatggcgcttcttcagagagcttcttatctgcgtctctattatttacggctcatgggttctcgacctcgtctcttctctagctctctctctcctgctcttcaccgtcacagctcgacgctctcctcgcctccattttcctctccaagtcccaggttctcgcttccgctccttctcctttttcgttttcctttctgggttcctggatattcggcgaaatataagaaagtagcttcgtattcttggttcagtactttggcttgagttattgaaattgccaagctctctaatttcgtgttaagtttccgataaaatggcctagaaattggaaatttatacttggagtctcttgattctagccttttcataaagtatctgtgtttggagacttatgggtttaggttattttagagaaattgctgtgaaattttgcgttttgagtgttatcttaatcagtggttttcatgcggttctgaattcttttggtttaaagtgaatattctgtttgcattcctcaattggttgtttaattgagttatctttcagtttcaggttaaagtttcagttaaccagtgttttgagtcaaagactgatacaacgaaatgctatttcatcgaggttcttgtctactgaggcttcccaagagactaccacatctaagggttacagttctgaacagattcaagtaatcttttttattatcctcttttctactatatattgtgtgaagtcatgattttaatttcaatctttatatgttcttatgatccattaggtgctggaaggcttagaccctgtaagaaaacgtccaggaatgtatatcggaagcactggatctcgtggtttgcatcatttggtaaatgctttatccgttgaaacccctcgtttgaactggctcttgacatctttttatgtttttctaatgtaatctcttttcttaggtttatgagatacttgacaacgcaattgatgaggctcaagctggttatgcctcaaaggttgatgtcgtcctacatgcagatggctcagttagtgttgtggacaatgggcgtggggtatgtgatatgtcccatcttctctttaatcatgcagattttgtgctagttttggtatcgctagcttttcgtttcttacatctacccacatatggagagcaaacacatatgttaaccataatctattctagtttttccagtgtcgttgatatataaatctttctttcagatacccacggatttgcatcctgcgacaaaaaagtcttccctggagactgtgcttacggtattgctacaaacttttatattttttcacaatagtaatatggagattctgcagtttatttgtcgaggttctgcagtttatgttggagcttcatgaccatactattattattatgcgatttacctgccatcttttttaattctgcaggttttacatgcgggtggcaagtttggtggcacgagtagtggctacagtgtgtctggtggattacatggtgtcggtttatcagtagtaaatgctttgtctgaggtgtgtcctaatctttactcacattgattcttcttttatcattttctctatatctccttcagtgatttgtgaaaccctaggctactatgggatttttacgagtaaaaagctggaatgtttccttattgaattctagggcatgttgttgtcaaatactcttccttcacaagaactgcaggacatttgtttggaatgacttgaagtttaacctagctgatgactataattatcagtatagctaacttagaagattctttgatctattggtttacaggctctggaggtctcggtttggagagatgggatggagcataagcaaaattattctcgtggaaagcccataactacacttacatgtcgcgtcctccccctagagtcaaaggggactaaagggacaagcatcaggttttggcctgacaaagaaggttttgcctgttttccactcttgactaccttgcctaagccaaaacttgatttaatgattaattttcctctatggaatgaactattttcagttttcacaactgcaatcgagttcgaccataacaccattgctggacgaattagggagcttgcatttttgaatccaaaggtgaaattactttacttaaagcatggtaaaccatgacaatttttcatcaagacatgagaattcattgtagtttacttcataaagcatcttcacttttggcagaggctgctgttgaatgattcttttgtcataaaatattactctatttttatgtttgcaggttaccatctctttaaaaaaggaggatgatgatcctgaaaagacccaatatagtgaatactcttttgctggaggattaactgaatatgttagttggctaaatactgataaggtgagaatctacacattggcacttttggtgtatatgaggcctatcatattctttatgtaagtaggctaagatgattagaattttgaaaaggttctgtgaaacgatatgcaaggcagtggtatcaatgaatgtctttttctactaactgaagtgagcaagatatgttgagcactacttttgataagttgatggctatcaatggatctactctactccagcatatctatggactattatgactcaatttatacagaagtgaactcttagcattattatcttcattatcataaattattttactactttcttattcctacgttaaaagttaactgacaattcttttctgtagaatccaattcatgacgtgctgggtttcaggagagagataaatggtgccaccgtggacgttgcccttcaatggtatgttattctacataattacattgtccaactagtattctgttacgaggtaatatgcctaggtttaccagacccacacaattgaacagttcggctgcatgattttgtggttttactcttacctgtaaattgtgtcaataaaagtggtaaacctttgttcatgttattctcgacatgctgtcgtttgttttacacacaaatacacataatataggactattctaaatggatctgatgttattggctttgcacatttttgtaccaggtgctcagatgcatattcagacacaatgctgggatatgccaatagcattcgcactattgatggtggaacacacatcgaaggtgtgaaagcttcattaacaaggactcttaatacccttgcaaaaaagtcaaagactgttaaggtatgacatcagtaaccagctttgcttatgtagcaattttattttcattttcagaagtttcgacccttggtccattatttgttctaccttaatttgtgaaacatacatcgtctttaccaagtacctggtt

SEQ ID NO: 4042 - DNA, 2524 bp, Arabidopsis thaliana landsberg
tcatttggttgaagttagtaactagacatactgtaggagacacatactcaatcaaagaatacgctaatcacagatatcagaaaatgcttctcaagggataaaacacatgtttgagtgtttgagtgcatgtgtgtgtaggtgaagatgtgacagtatgagcaggtatttcaatgtcgcaccttgtacgcattcaaggatttggaaataatgctttcaagtacatccggatgcaattccaagtactccgtgaggtactcctggactgattggtcaacaatttttctcacctctggatttcctagtcttgtctttgggacacaaaaaaattaaaatgatcaacagaatccaagaaaacttatggcctgctgaccagagattgttgacaaaaatgagggtcaacatatcattatgctccctagtacctttgtttgaccttcaaactcagggttcggaaccttgactgagacaatgcaggtcaatccttccctaacatgttccccacttaagctaatatccttttcctgaaaacataaccaacaacaataagttacactatgagttagcaaccttttcagaacaggtcaagataaatgcttaaatgtaagcaaaaaacaacctctataactggcatgtttcacagttcaatcatggtagtacattattaattgtccgtaaagcatgtcttttaagtgcagatgagtatttaaatttagtctcaatccatggagaggaatagataatataacccttgacctacattatctcagaagactctttcaaccacaataatgaccaactaaccgcaattaggcatttgcagtttccatgaaaaaggaggaaaagagaaggggaaaaaggctctaagcctctaagagtggaaatataaagtggaaaaaacgcagttggtaagttgtatcccaccttgataacctttaacttttttgcaagggaatttagagttcttgttaatgaagccttcacaccttctatatgtgtcccaccatctatggtccgaatactattcgcgtatcccagcatcgtgtctgaataggcatctgagcacctggtacaataacgagattatatacttagatccatataaattttggatagctaccatgatatacacatattcgtctagaagaactgtatatacagtcatcaactccgcatacggtacaacatatttccatccagtttagataaagtaaaccataaaatcagtcagccaaaatgttcaagtatgtggttttacgctaaatgcaacccagattataatctgttcatcacatgagcagatattagacgacgtatgtagaaggaagagtaaaataccactgaagtgaaacgtcaccggtggagccatttatctctttccggaaacccagcacatcatgaagcggtttctgaacaaaacgaattgtaaattcatattttcggaagggaaaagtaataaggatgacctataacaccagagacctaaatgcataagagctaacataatagagattaagtttacaaaggttccatgctcatgctaaatagagccctaaagaataatgaacagacaacacatcttaccatcaagtaagctgagaaggaaaagtattagtaccatccccattgcattttgtttcacaaaacccattccaatttaattgccactattttaagtctagcatcaccgattggcaaatattgagattttatacaactataacaagggacccacagtacatgcctcaccttatcagtatttagccagctaacatattcagttaaccctccagcataaaaatattcactatacacgtccctttctggatcatcatcctccttttttagagagattgtaacctgcattcaatatgaacctcttgattatgacaaaggaaacagtcgaacactagcttctgctaaataagaactcactaaaacgagcaggttaagaatgctccgtgaagcacacaaatcaaatatcacggctgcctatacctttggattgagaaaagcaagctccctgatccgtccagcaatagtgttatggtcgaattgaattgcagttgtgaatactgattaccagtttgtttcagaaaagataagttagtcatcaaatcctatctttgggagggtacaatagataagtacggaaaacaggcaaaaccttctttgtcaggccagaaccggatgcatgtcccttgagtcccccttgactctggtggtaggacatgacatgtaagtgttgttacgggctttccacgagaatacttctgctgaaactccattccatctctgcgaactataacctccaatgcctgtgaataatgggagctccataattagttgtatgcatattatcctaatagactcctgatgtcttgccaaatataacagtttcttatagttgaaagtatctgaaattgatagccccagcactcagtacagaaccattccaggatctttctcatatgacatcaggtttggacattatattaactttcacacaaaaaaaagaatttgcaat

SEQ ID NO: 4043 - DNA, 576 bp, Arabidopsis thaliana landsberg
cttatttcctataaatatttgaagttgttgttctcatagttttgattcttttcctgtgtggggggcttaattgaactctatactagttagttgttacttgttagtaatttgcatttatgtgtacgtattctttaagtttggaccacacttatgccccaattagaaatttgaagcgactaagattttctaaatacctaattttattttattttattttacagctcctaaataccttaattagttatacttttgctttaagtttggaccactaatgactgaattcgtcatttgaaacgactcatcccatatcaaatatcttgccaaaatgtgtaccaactaaagtaaaactatttagtaaaaaaattcatagatgcatgccctgtagagtgtagtatttataaaatgaattatggtattgggttttaagatttaacattagtctacgtgtaaaattctaaaacctctactaattatgagatttatagatatcgtaaattttccaaatatgtttatagcctgattaccaattaataaaagtcagactaagacacataatttgaaatcttaattggttca

SEQ ID NO: 4044 - DNA, 1436 bp, Arabidopsis thaliana landsberg
tatctgttattttgaaaaatacaaactgactgctctctcttcttaaaccgcttcacgatgtgctgggatttagaaaagagataaatggtaccaccataaacattgcgcttcaatggtatggccctttttgtactattgtatgtttatgtatgtggatgttgtagttactctgaacaaaattctattgatctgatcccagttttgttgtcttgttgttgtaccaggtgcgtagatggatattcaaacaaaattctgggatacgccaatggcatccgcaccatggatggtggaacatacatagatggtgtgaaagcgtcaataacaagaactctgaacagccttgtggagaagtcgaagcttgttgaggtataagaccagtcgacatcactgaccaagttttgtctatgaaacgctttttatttcgctatatatgaggtttcgaacattttttgccatgcatcatattttcacgaaaagctgcattcaatttgccaatatacccccctcttcacagactgaaccgaatttgaatagtttcatatctgcagcatagtagactttgctgtaaaaaatttcagcacctaacaatagaagagtttacagctttctttcccgtttgggcatttaatgttatcagtgtcagggaggcgtttccagtgttttgtataactgatggtgaaatttattgttgttgattctgtccaggacaaggatattatctttactgaggagcatgttatggaaggactgacttgcattgtctcagtcattgttccaaaacctgagtttgaaggtcaaacacaggtacacaagatcatagtgattgttaatcctcctctttggcattcttatctgtttgcaagcagtgatattttcccactttcttcgattatttgcactgatattttctctcttaatatctgcaagaagagattaggaaatccaaatgtcagggaaattgttgaccaatcagtccaggagtgcttaatggagtcttttgaattgcatccagatgtattcgagagcattatgtccaaatcctataacgcttacaaggtatgctgtttctatacctattgatactgctgtatcttcatttacactgttgtgttctacatgttgctttcttactttcaatttaatgaccacgaaaatatacatggcgactctttctctttttagactgatttggctgtcaagagggcaagggatgtgtatagttcagaaagtgtagcaatggtgtgtgccattgagtccattcctatgaaactgaccaactcttcttctgaaacatctggtatgtcttttgaacttaagtcagaaaaggaggtctatttgattaaatattggtacatataacatgataaaaaaaactgcatgtgttagtcgtgtggtaggagaaaccggcggctatgctgtaaattcaaatagtccgc

SEQ ID NO: 4045 - DNA, 1454 bp, Arabidopsis thaliana landsberg
agcactgattaattgcaggaccaaatgttaggataacaaaaacaaaaatacgtgtgaatcaacattgagacaaacatagatagctttctacacaatatataagtataaggtgtactaatagatgtttgtcaagtggcagtaccgtaaggacagtttccaaagacgattttcccgttgcaggatgcaaatctgtgggtatctgcagacagaaagctatgtatgaataaaagtgaccaaatgcattttgatattagcaacaaattttacttctgggatgaaagaaagctatatacaaaataaaaaaaaaacgtaaatgaataagatagagcatgattgacatatattgtttactcttggtgcacattagatataaaaccggaagctttgagaaaaatcagctaggaataccaaaattggctcctacacataactacagagtacagaatgccattgggtgccacttaacctttctcttgcatctcggcataagaaagcaatatccatgttttcagttacaaatacacgcgaagatgagtaagtggaacaaatcacataccccacgtccattgtctgaaatgctgactgaatcatctgaatgtaaaacaacgtcgatctttgaagcaaaaccagcttgggcctcgtcaattgcgttgtcaaggatctcataaacctaagaaacaacatgtattgggaaggatataaccagttgataggagccagtcacgaccaagaacgtcaaaagaaaaaggcatttaccagatggtgcaaaccacgagatccagtgctaccaatatacatcccaggtcttttcctgacagggtctaagccttccaacacctaatacaccatagagaatttaagatacaataacccaaaaaagtgaaactaagagattcatagtaggaattttcaataactatagaagaaaacatcgttccaatgatcgagtacacaaacataaaaacagcaaatcatctaaaaaagcaagaaaacgaaaaagatctttagaggaattacttggatgtgctcggaactataatccttagaggtagagctctcttggagagactccatggtcgatgacataaaacttttaggtgagaccgcatttctttgtacaagtctttgactaaaaacattggctaactgaaactttatcctgaaaccaaatgtgaataatggttatactaccaacttttgcttcagactatggaagcgaatcacatagctaaatgttcatagtaaactaaagccctgaaagtgaccaaatacgaaaaacatttttgaaggagctgaagaaagcaattgactttcacttgaaaagtagtataacttaaaattcccaattccgagaaaacttggaaactatcagcaatcgcgtaaaggagtgatttttatcatcggaggcaaattgggattggttcttctattcaatcttcatttcactgcgtaat

SEQ ID NO: 4046 - DNA, 1784 bp, Arabidopsis thaliana landsberg
aacaaggctctctgtagaagaaatggtatgtgatgtttacaactagattaactctgccaaatatttaggggatatttttgtttaatccttaactaatacctgatatctgaagaaaaaggtcaacagaagtgtccggatatgtgcaccatcaacatctgcatctgttaagatgattatcttatggtaccgcaaattttctttcttaaaatcttctccctgaaacaagttatttattgcattgagttttccatatacacccaaaaaaaaaaaaagagaaaaggaaaaacaagagatggaaaatggatacatcaccttcacaccgaggccaaggccaagaattagattttgaatttcttcattcttatacatggctgcttcatcctttctttcaatgttcagaattttacctctcaaaggaagaattgcctacaaaaaccaaaaacctgttgaattctttcaaaggaagaattgcctttcaagctgtacaggtttcctaatttcatagaaaatacaacatatttggctggtcaagagaagactccttgtattgatcagtctaatcctaaccttattgatcggaaagcaaacataggttctttaaaggatggatcaacaatggaaagaaaaaaaacctaaccatcgcccttcttagatagttacacaatgaaatagaggtagaagtgtgattacctgaaatcgtctatcacggccctgtttcgcactgccaccagcagaatctccttcaactataaaaatttctgcagagattgcaaagggatgtcactacttgaccgaattagcatggctaatggcttaccggttgtaatcgttgtagccacataattaaagcctagatttccctttttaacttctcacttggaatatacaataagaagatcagatacttctgtcatgtttagctttaatcaattaaacaaacgacattttcatgatggccaatacataccagatacttcaggatctgttgatgagcaatcagccagtttcccaggaagtgatgatgacttcaaaacgcttttcgacctgaccaactcccttgccctcttggcagccaaagcagcctagagagagaaagcgtggtgaggcagatgaaagttagcaactgacacattaataataagcagagcagggggtagataacatgaaggacgttgaaggccaaacgctaaatcacatgaatagccaattacaaactgctgtacccgttcttgtgggttgaaacatacacttggtgcatgcttgtagatgaagatgcagaaatattgatatgtgcattgaaaagcataccttgtaagcgttaagggatttggaaataatgctctcaagaatatctggatgcaattccaaaaactctgtgagatattcctgaactgattggtcaacaatttttctcacctctggatttcctaatcttgtctgcaaggtggaagtgggattagtagacgaattatattagttggggtaaatttccacaaatatgacagaagaaattgcttcatgttgaccatacatagatcaacactaaagacgcaatcatcatcacgtacctttgtttgaccttcaaactcaggattaggaaccttgactgagacgatacaggtcaatccctctctaacatgttccccacttaagctaatatctttctcctgaaaacacagccaacaaaaatataaaataattataaatacaaaaaagaaatgaaggaagtatattatttattgaggtatgaatcaagaacgttttactgtagagcctactatact

SEQ ID NO: 4047 - DNA, 1174 bp, Arabidopsis thaliana landsberg
caaacttttgaatattgagagaaaggatgaagcagcaatgtataagaacgaagaaattcaaaatcttattcttggccttggtcttggagttaaggtaatatatcctttttcatatcctgctgtttgttggtatgttcggaaaactcagtttgacataaaacttatttcagggagaagattttaacaaggagaatctgcgttaccataaaattatcatcttaacagatgcagatgttgatggtgcacatatccggacacttctgttgacctttttcttcagatatcaggtactagtttagtttgataaaacattagttgaagtagccttgattgctgattgagttatgtgaaatttaatgaaatttactttctacagagagccttgtttgacgcgggttgcatatacgttggtgttccacctcttttcaaggtaagctcttagcatctataatcttatgcttcagattgaacggaatttttttctaaagctagtctctctgtgaaaacgatcaggttgagagggggaaacaggcgcactactgctacgatgatgcagctcttaaaaaaatcactgcttcgttccctggaaacgcatcctacaacattcagaggttcaaaggtaaaacatcctacttctcacatcatgaatgtgttcttttggaaaggataaataactatgaaaagtaatgtatagtagttgttatgtgttagctattaagatactcttgagtgtgtgcataacgaaatatagattagtctcaactattggatatgtaatgtttcttgcttttgcatctgcaggtttgggtgagatgatgcctgcgcagctatgggaaacaacgatgaatccagatacaaggatattgaagcaactagttgttgacgacgcagcagaaacgaatatggtcttctcatctctgatgggtgctcgggtaagccaatgaattgccagactcggactcatgataatagtcaataaactggcataactcatcgtgacaatgttatgttctgtgtatgtttcaggtcgatgtcaggaaggaactcatcaaaagtgctgcgactaggatgaatctggagaatctcgacatataacacagcttatagttattgcttcagctatatacaaacaacaaagaaacgactctggtgaaatgcaaagggagacatcatc

SEQ ID NO: 4048 - DNA, 686 bp, Arabidopsis thaliana landsberg
cgaaatttcaccctgaacaatcgccggagagttgcgcaaaattggtcaatgcttgcctccatttaagaactttctcaggatcttctctactcgcatgtttcttaaactgttcagcgagtagtccggtctgccacctcacatgattcggttccacgccgtagaagatgggcatcacggtgatggaaccctttttttcgaaatccatgatcgttacgagctcatcgagacaccaagaagacgcagcatagttctctgagacaacaacgacggcgaatcttgacacctcgatggggcttttgagctccggcgaaaacctctggccattctccagctctttgtcgtctttgaaggttcgaatgctccttcgaaccagttctttgtagagaaaactgatgaagttgtggcgagtgtcatgccctctgaaacttaggaaaacatcatacttagttgcagtatgagaagacattttgatttttgattctcaatgagtgatagaaataaaaaactcaaggatatttataggcactaccactacagaagttgacctataagagtcttcctactgctaactgtgtgtttcctggcattttctattttttcttgtcagcttctgtttcactaaactactcagaaagagggaagagaatagatgggccgccaaaataagataatgagtatggataaca

SEQ ID NO: 4049 - DNA, 1167 bp, Arabidopsis thaliana landsberg
aaaccaagtcctttgaattcagttgcaataagagtggagtcttccacggttccaatttccattattcccaactttgtaggagtggtactggacgtttgtttcagttgtaattccacttgcaaggaggtgtactccaagtatttatatcaatgaaaaaccaaagaggtagtcattactacccaaaatcaatttttttgaagttctacacttctctagctttgaagagggaccattaacattttacaaggatggttatcgaagactaatgatctaacatagagaaggagaaaccaaaagagatttatatcaaacatacatcacatgtgattagcttggtctacattatacaaggatggttatcgaagactaatgatctaacatagagaaggagaaaccaaaagagatacatatgtatcaaacatggctcattcaagtcatgtaaaatcacactaaagagcataagtcaagtaataaaaacgtaaacaacctatacattgagtaagagagaagagacaccaagtcataaggcttaaacggatggtatatttgagaaagagaaacctttgtatcctttgtaagcgtaatatgcaatccgtgtatagtaaaaccccgggataaacagtagacatcccagtacaatgaagaaaatccctgtttcaccaccaacaatcaaacaagcaatgagtgagttctcaatcattagtttgatttcgactaaaatctgacgacaagcaccattgaagctaaccaaccagtggggaattatcagagagagcaaaccaaatctctcatgcctctggagatttgtttgagaaagagtgttcaacatgattcacttaacatctcctaatcgatcccaagaaagcttacaaacaaatacctaaaccaagtccaacactaggcagtttactcaaatcctcaagatattccctaaatctcccaaactaggtttcttcaggaaactaacaagtctaaacattaatcatagacctaccaataagaaatcacccagattgtcactaattttcctcaatctaagctaatcacgaagacacaagggcaaaattagtaacaattttgattaataaggaatcgtaattcgtaccggggacctcgatcaccaccaacacggttatacgccatgaagaaacctaaaacaattctagg

SEQ ID NO: 4050 - DNA, 489 bp, Arabidopsis thaliana landsberg
agacggaacaccccaaattcatttaaacttgtaattgttttataaattacctatatcattctcgtccgtcagttgacttagttgtggccaccggaaaagtaagatgataatttatgtttatccatgttcattttcttattttggcggctcatcttctctttctgagtagttcagtgaaacagaagctgacaaacaaaaaatgaaaatgccaggaaatacacacttcagcaggaagactcctagttcaacttctcttgtgttagcgtgcctataaatatcctttgaaatattcatagagtatcagaaataaaaaaaaatgtcttctgctactgcgacttataactacgatgtttttctgagtttcagaggacccgacactcgccgcaagttcatcagctttctctacaaagaacttgttggaagggacattcgaaccttcaaagacgacaaagagctagagaatggccagatgatttctccggagctcaa

SEQ ID NO: 4051 - DNA, 665 bp, Arabidopsis thaliana landsberg
gactcctcgatggcgcgtatgagctccggagaaatcctccggccattctcgagctccttgtcgtctttgaaagttcgaatttttcttcgaacgagttctttgtagagaaaactgatgaagttgcgacgagtgtcgagtcctctgaaactcagaaagacgtcgtacttagtcgcagtaggagaagacattttgatttttgattctctctattgagaactatgatgagtaatagaaataaagaactcaaggatatttatagaccactagagagtagttgacctaaataaaacatgtgcattggttagagactcccatagtcttcctgctaagtgtgtgtttcctggcattttctatttttttctgtcaggttctgttttactaaactactcagaaagaggggaagagaaaagatgggccgccaaagtaagaaaatgatgagcatgataataataaaatactactaacggacaaaaattatcatcttaccttttctggtgtgcattattggcatttgctggttttgattatccgatcaaacgaacggttaaaactgacggacgaaaacatatatgagattcagattttgtcggcttgtttttttgctgatcaacccaaattctttcatatctatgcgattgcatcaagttcattcagcttgactcaca

SEQ ID NO: 4052 - DNA, 3693 bp, Arabidopsis thaliana landsberg
cagaccctctctacagctcattttcttcttgataagtgtgaggagtcaagctagagacttaaaacaagctcacttgggaggaaatcccatgactatccttgtaaataatttttacttccgtgtgatttgttatttgttttggttgtgtttgtggttctcaggaaggaaggagtaacgtgtaggtaaagtaaaaattcaaaactttgactctactgatggcctagagatcgagtatgagtgatgtttaaagacctaaaaaatttttaaatcatcattttactcgaccaacagaagctacagaatgtgaaaaagagttcatcaagtttatagaagattgtgggatttcctagggattttacagtgaatagagagcacaaaagaaagacaagaagacatggagggacccgccgctgacgcccatgtcttccatgcaagagaccaagagacatggaatctcttcactcccacttgatctccacgcaaccccatcttcactcgatttctcctccatcactcgaccttgttttctcctccataacccaataaactcgaccccatccttcttaaatcaacgttcccttttcttctttactcgacctcgtcatctccccctcaccacctctcactcatttcgttcactcgacttcgtcattccccaacatcaacaacgtcactcgactccttatcatcatcttcttcatcgcctcatcactctgccacagctctcttcacctctccatcatcaccgcttgccccctctctccaaaataacaactcgacctcgccattccgttcactcgacctccgtcaccaagccgccttcaccacttctacgacatcactcgaccaaggtgccatcgttctcccatctctcaaatccagccatcactcgacaacaccaccgtttcttctcttccgcgagctcaagttcactcgaccgctcctctcaaagtcactcgatttcgccgcttctcaacgcctccccatcgtttccatcgccgctgctctcaaccccacgaaagctcgtcatcgccggttcactcgattaagcaaccaaactcgacgtctttcaaaccgcttcaccatctctcgcctctcaaggtcacttgatcgccaagcacaaccaagggatcactcgaccgcgagttcaccaaaccgaaaaaaaaaagaagaaaaaaaaaatttaagaatttttggtacactcgactggtttactctgttggtttgtgtttttggttttgttggaactaacgtattaacgtttatttttgagttacatttgttttcatgtttcatcatgactaactacagtggagaatcctctatggaccctgattacaacgtggatgaagctgagtcctggtccgctagaccgagagagcaacatatttaccagagtttcagggatgagctcgaacgctctacagcccgacataatcagagaagagctgaaatcgccagaggaaagagggcgatgtcaagtagatatgagctgattgatgaggatatcgagactgagtatgagccagagtcatggcgcagggagacgaagctgctgaacaaacccgacgaggttacagtggaggagtatatcagattcttcgagatgaatgacttcttgggaacaaggtatctgtgttatgagacgttagcccagctggggttactggaggacgtgcaacatttgttcgagaagtgtcatctggagacactcatgtcttacccttaccctgcctataaggaggagacaatcgagtttctttccacgctgcaagtggagatgtatgaagcactcacagactttgagctggataccatgggattaggcttcttgacgttctcagtgaatgaacagcggtatcagctttcgatcaagaagttagaaggactgtttggtttccctagtggaaagggaaccaaacccagatttgacagagaggagcttaaggatttatgggccactatagggaacaatctaccgctaaactcggcgtggtccaagagcaaccaaatccgaagtcctgtgatccgctacttccagcgatcggtcgccaacgttttttactccagggagtctacaggcaccgtgtctaacacggacatggagatgatagattatgcgcttacagggattctccgccggacaaaggggaagaatgtcttgagaggtgatctcaacaacgcactaccagtaatgcctctgttgatgcatctgtgtggatacaggaagtgggcgttgacaaacgggaagaagaaggtgagaggagcactatgcgtgggtggcgttgtgacgccaattctggaagcttgtggagtcccgctcaaggaaccaggtttagcaccgaggatgatggacttggatcatttgcgcagatgtgagttcttggagtttgacatggctggcgactttcaccgctacaggttcgagcattcatcgattagaatcgccaacattcttctcccctgcattgacgctactaggattcttgagggcaggaacattgacttcaagcctgcgcttgaagatctttatttcgagggcagtccgccaaccgaggagtttagtcacaccgaaggagctacaacagaagatgttgatgagatggatgatatagatgaggcggagtttgacacgagcatgtatcatttcagtgagcatatacctcctacgagggaaagcaaaagtttgagcgaagctcacaggaacaacagcaagctacagaagtggtgcaagaaacaggacaagttactcgccaagtgcttaagggctatcaagtttctgaaggacaagctcagctgctcctcttccactacagctattccgcagggacatctccctcaggacatgccttcgaggagatatgacgcgcccgagccaagtcggcgcaggcctgagcctagagagtaggagattccgcatgtccctgcgaggcattcatcattcgagcctcgtgaaactgggaggaagaggaggaccacactcactcgatctagcagtaggagcggacgacttctgcagtctcgtagtttacgcgaccgcggtgctggccgtagcagaaggagagaggtcgagtttcctcagagcggtgctggccgccacagagctgatgaggtcgagtacccacctgctggagctgatacggaacaaggaggttcgtctatggcctgggagcaatcgcaggcagccattgacgagcaactatgttcattcttcgactgaggtaagcgcctcacttcaccattgtattataccgtatgttatgatttgtttcttcattttttgtttctgtgactggatttgtcctgagtactctcttccaagtttattcacacagtggactgtgtgatttaagtttgggggagggctcaggaagtgtgtgttgcattgtgtataattttgagtctgcattcatctaaggcatagaaaaaaccaaaaaaatttgaaaaatttcagaaaataatttcataaaaaaaaaaagagtgttcatgtagttgcatcacatttaggatcgagtctagagtgtttcatttaggattgttgcatatgcataggggatgatgatgagatagccttgtaagcattttgattcaccggataaactcagtgccctcgatgctagttgtctgttgcatagtcaatgaatttgaaaaaaaaaaaaaccgaaccatgcctagattgctctactcgacgct

SEQ ID NO: 4053 - DNA, 1079 bp, Arabidopsis thaliana landsberg
tgacattgtcattggtttcgtcgtctgtctagtgtctataaaagatggaagaatgtccgcatatattatagacaattaaagtactagacaaggctttcaacacaaaacaataacaaacaaaaaataaggacaaaaaaaaaattaacaacctaaaacaatggaagagccatttcttccgcaagatgagcagatagtcccctgtaaagccacatggaaaagtggtcagctcaatgtcgagctgaagaaagtgagccgcttggctgttcctatggccaccgtgaccattgcacagtacttattgccagtcatctcagtcatggtcgctggccacaacggcgagctccagctctccggtgtcgctcttgctacctccttcacaaatgtctccggtttcagcattatggtaattatgttatgactactctctcctcttatgttcaaaatcaagttgactctgaaatcttgataaatacttcaattctttgtgcagtttgggttagtgggttcactagaaactctttgtggccaagcttatggagccaaacaatacgaaaaaatgggaacctatacatactccgcaatttcctctaacatccctatatgtgtcctcatatcaattctctggatatacatggaaaaactcttgatctctctcggacaagaccctgacatctccagagtctctggctcctacgccttgcggctcataccgactttgtttgcccatgcgattgtcttaccactgacccggtttctgctagcacaagggttggttcttccactgctttactttgccctgaccacccttttgttccacattgtggtttgctggactttggtttccgcacttggtttgggaagcaatggagctgccttggctattagtgtgtctttctggtttttcgctatgacactctcatgttatgttagattctccagctcttgcgagaagactcgccgatttgtatcccaagatttcttgtcttctgtcaagcagttcttccgttatggagtcccatcagcggcaatgctttggtaagtctattaaaagtttcttgttggtcaagttacatacacca

SEQ ID NO: 4054 - DNA, 5575 bp, Arabidopsis thaliana landsberg
aaaattgtaacatttatttataaaaaaaatggcattaaatgtaaaaagacaccttttgaagacaaatttttaattttaaaccgaattttaatttaaaagaagatagtgtcattttcttttaatttgaataaaaatctttaatagaattggatttattgtttgtcatcagctttatttggcatataataaaaacaaagtatgatcggtcatggcttacgtgacacattaccaatcaacttctattgtttcttttggcttcatgtatatgtagttactaggtaagtatcccatgcgcggggatattactttctccccctaaaaaaaagaaaatttgtattgcaatttatattttaagttgtttttttcacaattgttcaaattcttttatagatatatgtttaataggacatttttgtgcaaaatgtcaatgacaaaacatggtcctgtgagagaaattatgtccaatggttgtccatgtccagaagttgaaaccatgttggcatgttgcactcatttgacttttttttttctcccaaattttgctgcaaatttgaattccaattgtgttatcatcacatcctctgtaatcaaactctctttttcccaaaagaagcatagcctatatagttacaccacgattaatgggcattttgttacgtgtatcccaagcaatacaaataaaagttccatcaaaatgggagttttaggtctattagtgtaagcctttcatcgtttacatctcgacattgtcccagtcaaacgatttcccttctaaattgtaatccgggtgttgcattctgttcctcgccaatctgctcatcacggcaagccctgagagtatatacacaaattattagatcaagaaacttcaacaattctttatgtcgtatactcgtatcagaaatcttaagaataacgttaccttcgaccattttgtaaagagatggccaccaacgctctctagagatgtcactttggtttagagagtcttcaatctctttatcatgtttcccttcaaggacactgcgtagagtgacgacggcgtcctttgttttcttcaaaatactgttatcatcttcgatttcaaggctttggaggtcgttgtgagatgaagtgaggctcacagccaatgcaaattgagcagctgcagcccaacgagaagaagcttgccatttcctttgaccttctaaaggttgtgaatcatcaccgttagcttctctggtacgtttgttctctagtgttatactacgtaagtactccgcgtttgcagttcctgtactttgaaccatcttcgagaaagaactttctccatttgaaagaagattctccggtgaactgaattcctgaacctgaggtgttgggaatctcaatatatgttagctcaaaagtgattaaattgatgcaagtagtggtcgaatattttgtatacgtacttttccagaatcaaggacaagaactttgtcacagtcgatgatagtattgagacgatgagcgatgattagcattgtgcatgacttgaattcttctcggatggtcttttggatgagaacatcagttcttacgtcaactgcagcagttgcttcatcaagaacaagtatcttagatcttcgtaacaatgcacgtgcaagactcaacaactgtctctgtccaacactgaaattctctcctgcctcagttacctgaccaaaaagactgagttattattactgaatacatgagactttcccaaatggaaatatttaattaagtacctcagcatcaagaccaagaggatttctgcggatagtatctttcaagtgtgccctctcaagagattcccagagatcggcgtcgttgtgttcactaaatgggtcaagattgaatctcacggtaccttaatataagttattggcatagtatacattattttgactttaagaaagataaataccagaagcaggaaaataaatataagcaccagaagaaatgcaagacatacctgagaaaagaactggcgcttgcggtataattccgagcactttacgtaggtccatcagtccaaatcttccaatgtcgcattcatcaattaaaatccttcctttttccagctccacaatcctgaataaggcatttaagaggcttgatttcccagcgcctgtcctcccaacaattcccaccttatccattggagaaatcaagaacgaaactccatgaagaacaggaggtaactcagggcggtaacgaagaacaacatcctcaaattttatggatccagatgatggccatccgggaggtggacggttgttttcaatgaccaatggagcctctgatggtatctcgatataatttccaacacgctcaaccgagtttaaactattctcagctagactcgcgagtctcagtacagctgttaaagagctggtaatgcttaacgcataactgagaagcaaacccatcgtagatgcatatgcttgttggttcgctgcctttccgttctgcatgacggctaatgacgcagtcaaccaaaccatgagacctcccaaaacttccaaacggattcccagccaccgatttgcagccatgtttacaagtgtgaatctgatgttattgtccattgaccttccattaatttcagccatcctgtcatatgctttataagcacggatactagatagtccattcaatgcctcaccaaattgagcataaactggcgatcttgtagtggaatccatacgtttaatttcccgagatgtgttctacaataaggaaaaatcaggttatgacacaacagatatgacacaatcagtgttccttttggtctcagttttccatgtctcgatctgtagtcatgaatgtagatagcattgcgtttaaaaagtatgtaggttacctggtaatacagataagctccatagaacacgaccaacaggggcatgatggcccacagggacagagtgctgacaatgccaatcaagataacagttgaaagaagctgtgcgattgaacccataaacatgtttacaaagactgccacagttcgatcaatatctcccatatcttttgcaaatcgattgattatccgtcctaatggattggtttgaaagaacaccattggagcccttagtatggaaccaagcatagcatcatgcatctttttagctgcatatagactggacataatcaaccaatatgaattgatcaatgtcacagagacctgaaaaaccaagaagaaatacgtcttagcataaacgttttgctctctgtatccttttattttccattttgtttgctcgatactttggcgcagaagaaacatggtgtatattcttaactgatcagcctttaatgttcagttatatattgttatccgatcatgaagataccgactcaaacatttgccaaatgcaactcatacctgtccaaacgaaagaagcgcatagacaatattatagaataggggtccatgagtctttggggttcgtgaatcagtccactcactcaaccaagtgctgcttgaaacccgaaatacttgagtcaagacgtagcatataacgagcatcatcactacccatgcacctccaagtgcattctggtacctggaacatggtgacacctcacaagttattacaatggctttacaatacgaaccttaatacggaaaatatatatacattttgtatgaatatgaatagagcgagtcaaacaatatatatccattttgtagtaaagaaacaccacagataaattgacatattgctctaaaccaaagaatatgtcttatttacggatatttccactgtcgatagaaaggaatactgcaacaacacaacaagaaagagcaaaaatccgaatgccaacttacctctccaggactttccaactcacaactccagtttcacgttcttctcgcttgacaagaacagagtttccttctttggaattctttgtctcgattccatccttctgcagattattagcgttcccattttcaactggttttacagatgtttgatctacttcagcttctccattttcttctgaataatcttcaaccttccctgcattttccattaacctctggaacaacgggccactatggcataattcttcatatgttccttcctcttttactgttccctcatggacaagtaggattttatccacttgtgataggaagtggagctgatttgtaacaagtactctcgttgtctgccctagttccctttttatgcatttttcaaaaacctatatataacagccagtttcgaacatcagataacaatgtttgcttaaaagtagtatatggcagagatccgtggcaaacaagaagtagaatatccatgcagattgaaaaacaaaacgttatagagttcacgatttgcaaaattgaaagaaaaacaaagtattgttctatccaaaagagcctatggctagtttacctgctgaccaacatgcgcatcaagggcactcaatgggtcatctaagatgcacacgtctgaatttgagtaaacggccctagccatagaaaccctctgcttttgtcccccactgatgttaacacccctttctccgatctccgtgaggtcacctccctatcaatcaagagaaagaagaggaaacaagcttagatacctgagcactagaaaatagaagtacatgctatcaacagaactgatgcaattcagttttttcgatttacatcgcaccaacagatttcaaggttcgtttcacctcaggaaattttcaatgcacatggctaagtaactctccacaaaacttacaggcagtaactcaaggtcatgctggagtgctgtcacatcaatcaccctttcatatttttcttggtcaaaaggagccccaaacaatatattgtcacgtacctacgcgatgttaattacaaccatcagcatgtggacgtatctaaaagcacacatcatcatatacaaaacataaaatacatacaaaataagtaacaatccaagaggagaatttgacattttcgcattgagaaccatactataaactgagtagcatatataaacttactgttgcgttaaagatccatgaaacttgtggaacataagcgactgatcctctaagagtaacagtcgcatcagatcttgcaggaagttccccaagcatagcagatatcagggaggtttttccttctcctgtgctgccaactaccgcaactaggctgccaagaggtatgtccaggttgatgtttgacaatgttggcctatccgcctgcatatgtatacttgtagctcactttttgtacttcattgacaatatgtaatgatagaaactaatagaagtaagaacatgtgataaaatagacaaagaagacctttgaatcccaggagaagtatccattccttattgagatagctggctgtccaggttcaatgggaggattcggtaagagaactctctcttcggttgacagtacctcctccaaacggtttaaggatacattagcatttaccatctacaaaagtaaagcctggtcagcatctgcaaaaacattatgacaacgactggtctagaaaaagaggtagagatggaaaattaaaagagcaatcagaagccatca

SEQ ID NO: 4055 - DNA, 2160 bp, Arabidopsis thaliana landsberg
gcctcttctactgaatgagctcttaaaggtttgttcctttacttctttttacgccgtgcacattgtgcttgaacctatttaacacaatgctttgtaatttttccattcacatggatctttgagatggattcatattcctactggctcgaataagtgtttaaacgttcttgatagattcaaaatcctatcatcctttgaatattatgttctgacgatatctcacaatgtctcctttaactttccgcagtcaatgcaacttaatgaaccagcgtggataggttacatctatgcaatctcaatctttgttggagtggtatgcaacaaattctctttttcttcgctgcctttattattctcttgcatggactgcaaaggatatgaaacaaaaactctactttccttggattcttttctttcttgctaggacttcatggtatttttggtctagagtagatgctacgaattgtaggaccagtttaattttcttaagctgaaagtaatctctgtgcgattcgattgtattagaaatagcctgattctactcttagagttagttttttttgtttgttaatacatttgcatgttgaaaaggttttgtttaatgtaggtcaaggtgacacttgaccaatggactccttgatcgcttgatgttgatgttgacattttcaggtattgggggttttatgtgaagctcagtatttccaaaatgtgatgcgtgttggttaccggcttaggtctgcactggtaagaaaaagtttcacatgaattatcttttgctacttagtttttctttttgctctgcttctcatgttttgatgcaatacctgtactgttatgtctgttgaaagctatagcagatgcttatagattgcttcattctgctgatgaattctcccttaatagattgctgctgtgttccgaaaatctttgaggctaactaatgaggggcggaagaagtttcaaacaggaaaaataacaaacttaatgactactgatgctgagtcgctgcaggtgtatctttgttacctttactctctttagccttgtctgtttcttgatataaatttacactgcatagttgtatatctacctcaaaatatgagtcttagatgcaatttaccaagatagtctttttcctgcaactgacgactgaatctgaagcttattctaagattctagaaatctaagagttgtgattacattttcaacacccttgttcttttgttgccgttgtaggatttgattttcctttattagccaataaacctttaattcgcttgatttgtagaaaaaagttacctttgaacagtgcttttatctaagctcatgcttgaaatcaaagtgtttatctagctgatagctgttctttttcctaacatttctcatgtgtgtgacagcaaatctgccaatcacttcataccatgtggtcggcgccatttcgtataattgtagcactggttctcctctatcaacaattgggtgttgcctcgatcattggtgcattgtttcttgtccttatgttccccatacaggttcgtatatcttaataattccccattctctttgcgctgtcggttttttttttcttttgagtgcttatttctcatttgcttttcacaccaatgaaaatgattcattttcttcgtttattttgttgaaacagactgttattataagcaaaacgcagaagttaacaaaagaagggttgcagcgtactgacaagagaattggcctaatgaatgaggttttagcggcaatggatacagtgaagtacgatactttggaagactgaaacctaatatttattttcttgcatagttggaagtttgtggcagtgtttaactatctcactaaaccaaaatactgtaggtgttacgcttgggaaaacagttttcagtccaaggttcaaactgtacgtgatgatgaattatcttggttccggaaagcacaactcctgtcagcggtatggcttgagtgcagtgactgttatattaattgattttatagaccgtatgcatgatgtgcatagttgtcttggtcatttacttgtcgctctcctaacggtatgattgtatacaaggacaaatccaagttgctcgtctttttaaatgcctttgaccattttgagaatggtatccatcaatatgtgtttaggcattt

SEQ ID NO: 4056 - DNA, 1820 bp, Arabidopsis thaliana landsberg
agtgagtggactgatgcaggcactcaaaagagtcatgacgcccttttctacaatctcatatatgcacttctctcgtttggacaggtatgagttatgtttgcttgatgaatgagtgaagatttgatataatcttgacctcatgatataacatatatagctgaaacctgaccagcttagaaagatcttatataattctacttttgtgactttactttgagaatccaaaggtggaggtagaaaaggttagtaaagaattgatttttttgctgagactctttcttcttgcttacaggttttggtgacattgaccaattcatattggttgattatgtccagtctttatgcagctaagaagttacacgacaatatgcttcattccatactgagggccccgatgtccttcttccataccaatccgctaggacggataatcaatcgattcgcaaaagatctgggtgatattgatcgaactgtggccgtctttgtaaacatgtttatgggtcaagtctcacagcttctttcaactgtagtgttgattggcattgtaagcactttgtccttgtgggccatcatgcccctcctggtcttgttttatggagcttatctttattatcaggtaatgtaccttctaaccgcagcatttaaataactgagattaagtaacagaaagagaaaaggacacagatgattgatgttacacatacttttttagcctcatttgtcatgtctgagttcgtttggtgcttaagatatctacactcatcggtcaccaaaaatcatgctgtttatgttgtgtgttaactatttttcttattgcagaacacagcccgtgaggttaagcgtatggattcaatttcaagatcgcctgtttatgcacagtttggagaggcattgaatggcttatcaactatccgtgcttacaaagcatatgatcgtatggctgatatcaacggaagatcaatggataataacatcagattcactcttgtcaacatgggtgccaatcggtggcttggaatccgtttagaaactctgggtggtcttatgatatggctgacagcatcgtttgctgtcatgcagaatggaagagcggagaaccaacaggcatttgcatctacaatgggtttgcttctcagttatgccttaaatattactagcttgttaacaggtgttctgagacttgcgagtttggctgagaatagtctaaacgcggtcgagcgtgttggcaattatatagagattccgccagaggctccgcctgtcattgagaacaaccgtccacctcctggatggccatcatctggatccataaagtttgaggatgttgttctctgttaccgccctcagttaccgcctgtgcttcatggggtttctttcttcattcatccaacagataaggtggggattgttggaaggactggtgctggaaagtcaagcctgttgaatgcattgtttagaattgtggaggtggaaaaaggaaggatcttaatcgatgattgtgacgttggaaagtttggactgatggacctacgtaaagtgctcggaatcattccacagtcaccggttcttttctcaggaactgtgaggttcaatcttgatccatttggtgaacacaatgatgctgatctttgggaatctctagagagggcacacttgaaggatacgatcgcagaaatcctcttggtcttgatgctgaggtattcagttgctgcatatattgatatgaagtctcatttttaagtggtaataactgattttcaatctttgttcaggtctctgaggcaggagagaattcagcgtggggcagaggcaaatgttga

SEQ ID NO: 4057 - DNA, 1675 bp, Arabidopsis thaliana landsberg
taaaactgcatttaatttgcaaacataacatatgtgttgtgagaactgagaagtgaccttggtttagtagcagcgttcacaagtccatcaaaaactgaatggggttttaagttccttctcatacataagagttaattgggtttaatggaccggcccgttgtgacccaatgcagtgtattaccagcctcttactggtgaatctttgtgctacaaatataaaatttccatatgttcataaattttaactgcaaagatattggaccatttcccttgttcttattactattgtcatcagcccaggcgtaaagagctaatgggccgatcaatacacttagggaaattaaatttctcaatgtgagaccaatgagttggcccattatcgaaaaccagatagttatttagcaatccgaggacgccaatcgacttctactcgatctacatagcgtctgaaagacactcgctcgtgttcttccacctgtcattctcattgagcgcgtagtcttcactgcccttgcccgggtggatttcagaaacgaaagtcttaatcctttgataaacttgacagataagcctctttagactttccatattagtttttgacgaacaattctatccgttgatctaagctgaataatcttatcaccgtcgagctttggataaacaatggatccgattttcaatacacttacccgcagagaataaaaatatcagctactaccaaaattagcaaatgcaggatacaaaagccaagtcacttaccgcaagattgtttcttcttcttcttcttcgcttccttcctttgaaattgaattcagatattttttttaaaattttttgagaggaagaaatggagatttcgcagagagtgaaagctagattagccgttctcaccgcgcatttggcggtgtctgataccgtcggattggaacaggtgttgccggcgatcgcgccatggtgtacatcggctcacattaccgctgcacctcatggatcactcaaaggaaacttgacgatcgtcgatgagcgtacggggaagaaatatcaggtccctgtctcagagcatggtaccgttaaagccgttgatctcaagaaggtatgtaacggatttgtaatcctgaacagaattgtggaatcgagttagttttatctgaattttgattcgtctcacctaattttccctgaatatgataaggaatttgatggatttgcatgtttggtgtgcagataacgacggggaaggatgataaggggctgaagttgtacgatcctggttacttgaacacggctccggttcgatcttcgatttgttacatcgacggagatgaaggaatcttacgttatcggggatacccaattgaagagttggctgagagcagtacttttattgaggttgcttatctcctcagtaagtctttatcaatctcgttgcttattcttgttgttgttgttgcttattttacttttgtggcgtctacttgtggaaaagaaaatgtcttgaaaattgtgtctctcttagtgtcgtgttaaaattcccctttttttgtctgcagtgtatggaaatctgccttctcaaagtcagctagctgattgggagttcacttgttctcagcattcaactgtgccacaaggagtattggtgaaatttctactctttcgttatttggattttcatact

SEQ ID NO: 4058 - DNA, 1691 bp, Arabidopsis thaliana landsberg
  unsure (1)..(1691): unsure at all n locations
catacataaatacaacttataagattaatagcctcgtacactaacattaaagagtaaataaccgtttgtattgtccatctttggattaatgataactataattcatgaagaacatccataaactcatgagttttattttgaacgcaacatccatatatagctatacattcatttttttaataagatttcagtcatagttcgaaaaatgaatgttgggttggttccgatggtaaagcgagccgtatcaacaaaaaaggcccaaataaaaagtggtatactgttgggcctaaagatgaatatacagaagcccatattaagacaattcggcccattcagcattgcgtagcaatcgaattgatatttagcaaatcgaggaaagcaattgactaactagataatactgataagtgggtcccacataattctgacagcttagagatggagaagatcatcaccgttagtccaagttgggtcaataaggcttacgccgttggatatcaagatatccgttagatcgcatacacgtggatactgttcaatactcctgaccgcaggggataagacacgtgttatattaacgaagagtaagaatggtttctaataatttcttcgctccctttcttcttcttctctccttctttgaattttgattttggttgaatggagatatcagagagagttcgagctcgattagctgttctctnnnnnnnnnnnnnnnnnngaaaacaggattctccagcgatcgagcgatggtgcacgtcggcggatacgagtgtcgcaccgcttggatctttgaagggaacactgacgatcgtcgacgaacgcaccggaaaaaattataaagttccggtctcagatgatggtaccgttaaagccgttgatttcaaaaaggtttaaccctttttctaaatgaccattttcctatcactgtgggattttgagctgagaatttgctttgttgcgtgttgtttggcttgcagatagtgacggggaaggaagacaaggggcttaagttatacgatccaggttacttgaacacggctcctgttcgatcttcgatttcttacatcgatggagatgaagggatccttcgttaccgtggctacccaattgaggaaatggctgagaacagtacttttctggaggtggcttatcttctcagtaagtgttttaccttttaaccttactacacaatttcaagtgttatgtgtatcgaattggacattgatgaaaagttttctcctttactatattttctggcagtgtatgggaatctgccctctgaaagtcagctatctgattgggagtttgcagtttctcagcattcagctgtgccacaaggtgtattagtgagtctctaatccttggttgatggatttcaatttcgatttgtaaaatggagttagcctgttctttactagtagcctattttcttgtctggtcgaacaataatttgtcaagactgttctatacatgttgttctgaggattgtgtgctgtactcaaagctatatatttctcatatctaactccacttacttgataacttttgtgcaggatattatacagtctatgcctcatgatgcacacccaatgggagttcttgtgagtgcaatgagtgcgctttccatctttcatcctgatgctaatcctgctcttagggtaggtttaaccttatattacttctctaac

SEQ ID NO: 4059 - DNA, 1282 bp, Arabidopsis thaliana landsberg
attcaaaaactgcatatatccattaaaaattgtattactcatgagccaaaaaaagaagaaggttcaagtcattaatatatccaagagtgtatgtatctatgcataatgtataatctcatgagcaaaaaagaaaacttaattactcattgatctatcaaaaagtgtctttattagccatgagccaatgttatctaaacaaagtcacttatatattaaagagtgtattttacctgttggggtctcatgatctttgtgtcaggatcatctaaagactcacgccagtgtgacaagtatccagcgatacgtgatactgcggtgaatgatgatgggattcccattgccctgtgttttggcccatttcagttaccaacaaaaaagattcaaataaagaaagaactcaatggttacaacaactcattagtcagaatttgttagatgactaatcaatgtcttacctattgattaatccagagtagaaatcaacatttgggtacagctttctcttaacaaaatattcatcagaaagtgccgccttctctagagcatctcctacctgaaaacattatttatacaccaaatattttcttaaaccaaattcatcatacatatgaaggattcaacaaggaaacgtgagcaacaagaatacagagtacctcaaccagaggatcccttccaagaatggagaacacttcatccgccagtttcttaacgacttttcctctgggatcgtagtttttgtaaatgcggtgtccaaaacccgacaacctcctcttcctggaataaaaagagttaacattaatggaatattgaccatcacattctaggtatactctctaagaattgagttacttattcttcacgctttcaatgaactctggaatattttcaacagtcccaatctctgataacatgttaatcgtagcctcaactgcaccaccatgaaggggaccataaatggctccaacacctcccgaaacagcagtatacacatcaccaccactacataaacagaggatttatgtgctgattaaaaagtatctcatagcagactcaaatgaatctctaaccaatgataagtagtacctagaggaaaggtgcctagcagcagcagtagagcagttcatttcatgttcagcttgcagtatgaagaggatgtccagcactcgagccaaacgaggattaggcttgtaagacctatctcccctgtaatcaatggaagatgagactaaacaagtgcacagttttatggctaccatctccaaatcaaacaaagagggacaat

SEQ ID NO: 4060 - DNA, 4801 bp, Arabidopsis thaliana landsberg
ccaattatgacaaaagttaggattttgtacgcggaaaatactcttttgctggtcaacgttcagagagaaggacacgtgggtttgtcaaacctacgactttgtcttctctcatactattataatgcaaaatatctttttcttactataaccagctgcaaatgacctttctaaatgatttaaacaatatatatatcgaaacaatgatcagaaattatggtttagcgagggtatatgtacattactaactgtaaataatattttattggtataagtcatgactaaaaataagcccttgtcgataagtcataaatcctactctccgcgcgatatgtttaattttggtaattacctatccatttactgtagttctttttttgttcaatgttccttctccaactcctctttaagttccttatataagttaatgttaatttagttgtcggcacatataccttttaaattatcgaatataaagccattgataaatcttgattctgatgttgaatgagaaaaaactggtcacattatattggacccaccaatcttaaagtgactagccctacaaaaattaaatctatcaaaaacacaaatgtctctctatatatagttacacaacttctttggacttcttcacattcactcatatcactacactttccattaattaccaatatatttttactacttaaaaaagatattggtcttgaaatggagagttacttaacgaaatggtgtgtagtgcttgtgttgttgtgtttcgggtttagtgtagtaaaagcacaagcacaagctcaagttccatgtttctttgtttttggtgactctttggttgacaatggaaacaacaacggtcttatttctattgcaagatccaattacttcccttacggtatcgatttcggcggccctaccggccgtttctccaacggcaagactactgttgatgtgatcggtatgcaatcttattaattagatagagttgttgctaattagatagtttatgcgattagaaagttaatggtcttaatctaacatgttttgacctttttttttgatgtaatgaagctgagctacttggatttaatggctacattcctgcgtacaatactgtgagtggtcggcaaatactctccggagttaactacgcttccgcagctgctggaatccgagaagaaaccggtcgacaattggtaactgaaacattaaaaccttttttcttaactctctttattcaaaaaaatattattgaagttccaacgttaatttttttttttttttttttttccggaaaatgaagggacaaaggataagctttagtggacaagttaggaactaccagaccacagtatcgcaagtcgtgcagcttctaggagacgagactcgtgcagctgattacctcaagagatgtatttactctgttggtttaggaagcaacgactatctcaacaactacttcatgcctacgttttactcttctagcagacaattcacacccgaacaatacgctaacgatctcatcagtcgctacagcacccagctcaatgtacgtttttttcttttcttgtgactagtttatctctgttttcatgttattaaatgatacaaaaggtttggctctctcgagtttacccatttagcagtgatagtaaggtttttagacgtgggtttggtctatcttttaactttcgtattatgactcttttcatttaaatacgatttggtttctaatatgaaaatacgactttttgaggcagagaattacaaaaatagcaatttatagctttatagtacaagactacaagttaaggtctcacaccagttaatttaaacccaattttggtcttcacttgtagtacacaatataaagtttctagcttaagctttttctgagtgacctatcttgtgagaaatgtttttatttttggaaaataatataaaggatgaataataaaatttatgcaattttgtaaaattttcatcggagttttacttccatttttcggggtttgtgcaggcattatacaactatggggctcgaaagtttgcattgagtggaattggagcagttggttgtagtcctaacgcgctcgcaggcagtcccgacggtaggacttgcgtagaccgcatcaactcagcaaaccagatcttcaacaacaagctaagatctcttgttgatcagctcaacaacaatcaccctgatgcaaagttcatctacatcaatgcttatggcattttccaggacatgatcacaaatcctgccagatttggtatatatacacacaaacacaagtgtggttttcttttaagtatgaacgaaaccgaaattgttatctgatttgtcggaaacgttttttgttttcagggtttagagtgacgaacgcgggatgttgcggtattgggaggaatgctggacagatcacatgtttaccgggacagagaccgtgtagagaccgcaatgcgtacgtgttctgggacgcatttcaccctactgaagccgcaaatgtgatcatcgcaaggagatcgtacaatgcacaatcggcttcagacgcttaccctatggatatttcaaggctggcacagctttgaagaaacatagtaaaataagaattaaagaagttccacaaaccaatgtgtgatcttgttgtgtaccgtaccgctatttaagattttcttgacgtaattgaaatcgagtaaaacattattctatatacattcgatttctatatcaacttcatcactcatacaagtgagccatgagaggacattgttcacgggaattgcgcgtgacggttcatttcgacagtcgcaatatcgagtacaaaacacttaccatgttgctttcagtagtcagccatcggattgatccactccggttcagcaatctccgctctcgtgtgtttcaaatcatctgtcgaaatgttgtacttctcatctcttctcttcaccaactctggccttagtaccccttgccccaccccctgaggtgacatcattagtttgggtgcacccattggtaacttgtcacctacagaaacacacataaataaccaatgattggtcggatcaaactaaaccggacaaaatcgaacccacttctagaatttctatgattctgattaatgtttgaattagttaacctctgagtccggataactaattgtttaaccatacgattaatcggtatactaactgatagaagcggtttacataaaatctgtccggatccggtttcggaccagtatttagatgaggagacatacctcggtctatctgccaggtgcaccaaaactttccgtacgttttggctatgttcttgagctccggagcagccacaacctcaggcaatcgtggataagcccacgagcctgacttaacctcatatgcatgagagtgccaaagcttttgctcatcctcagacaaagtttcatataatcggtcggatattacatattcaattcctgttaacacaactttgctataagttttcataattggcattcgatgtgattaacaagaaaaaacggtatgaaaaaaagagtaccgattagaggtgcatcggagcggtcagaggcgtaaacagcacactgaaggaactcgtcgttgacgcggtggacatagtggtgagtccctattagccgggacatgtcaccaccatatatcgcaaaagtagagacatgagtgttcatctgcttcaccggtaatcgccgctgcatgatcgtcgatccggcatcaatcagacgtgttgaaactgtcataggacctccaggaggtacctgatcatcgccgccgctcaaagccatccttaattttattttcttggttacaattttgaattttctagtttatggtttcgtggttatattgcatgtaatcttttttgaatgaattatatgatacatggcatgcatatttcatagaaacggtgtacgaaacgggcatacatcgaccatgtgttgaatatcccactacaagtgtacagctctgatttaataaaatcgtctacaaagccaaaccggaccaaaattaaaaatcaaccaaaccaaactcgtgtcaaaccgaacagaaccaaactgttcccataagcaaccgaaacatgtacaagaatgattcgctgtgcaaagaatgctgacggaaaactttcccggccgccggaaaaacaagaactcatctaaaatctctcaataatttagcaacgaatacttcacacgcaatacaatcttacccttttcaacgcctagctttgctccagtgacaagccaatgtccaggtaaatcctgtggtccttttaacatctctgacgaatccacaatcttggccagttttcctgattgccctgacacttcctcggtcgaacttgatgtagatggacctcccggttccagtctccctgaggaagcaacgggagtgtggtcccagacggaccttcttattgtacaaccggggactttagagaagagtagtttcaaatgcaaaacgttttttgatccgaaatcccaaaccccgagctgagctccagtgacaatgtgaacgccggagagatcgccgatgtgggtctctgtgtgttcgataggtgaggtgcttacgtgagagaagttcttccatttgattggctcgaaccagcggctatcttgctcctctggtccttgccatttcggtgcacctattggcacgtgagagtcccaatgtggctgcaggattttagggagcgagactaagtgttgtaaatggatagagagacggttttgtttgcttccttctaagctcagtctgagacctgtgaccggcttacgcccaacagtgc

SEQ ID NO: 4061 - DNA, 3598 bp, Arabidopsis thaliana landsberg
  unsure (1)..(3598): unsure at all n locations
gcaattactcactccttgttttcttaatcttataactgggcatatgcattagtcttgagtacttattttgagtaccttatttgagatactcaggttcagtaacaatatcctactagttgtgtatactaacaatagacacccttcaattttacagtgaaaccacgaagtattgttggggaaacatttctaagattcctttcgggtaattttcagacaattctgatattatgacttcttcttgtgtcacgaattagattactaagcctgtgtcctacgacttgtgttgtcatcagtgaacgagtctgcgtttgaccttctttattgcattgccttcaagctaatggatcagcaatggctatccatgcgtgcttcatacatggagtttaacgtaagtatattctgtagcctatactaatgtcgcaacaagttatagattcgaagaaacttgggtattaatagatttgactcttggtgttttatcttgggctatacataagttgatcaaatgaattgtggctaaagtggtagttgtgtggaataacagactgtgatgaaatcaacaaggcggcaactggagagagagattatgattgaagacattacaagtctcgaagatttgccatcatacagtcttctcagtcaatagcaaatagcttaccaaaaactactttgtaagtagaaagatctaacacctcagaaaccctatatcaaagctaaaacaacagcagagcaagtaagcaagcaaaaaagaagacaaggtttctctctctctcgctcttcactccatcttcctcgatattagtgttggttccatgaaatttgggttgttatttctatgaaaccagggtcagattttgtttcttatggggtcagattttctaacttgtggtgcttgtaaaacgttgttggttagttggtgttttgggctaataaatcatttggttacatttccactactcagaagacccaaaaaaggactctctcaacatttaatggcgcgatcttgtgtagcacatttcaaatttacaaataaaagactcgtgatgagatttgtctatactacacaaaaattttgaagtacgcttctccaccaaatttgtctatactaatcaatatgattttgcttttctctctcggtccaatattgacaaccttttttgtgaatgatcggttctccttcacaaagctgaagctgataatggtgtcttctccttaaccatgtcagttttataccatcaatatcataaaccgtactagctatgacggtcaaacaatggactggtctattgccacatagttcaatttttaccagtccatataataaccgggtccgccaagatgtgtatttcacactagtcaaatgtaatgttgctgttggaaataaacttgttattcaaaaaatacaagttgagatgactatatatatatatatcttacaatttacaaacgggttaatttaatacaacgtctctttctttatacgatttggttttctaatctctctaagccgtcctttgacgctctaatttggcttagatataagacaacttgtatttccttatgtcccaaaattcgaacggtaaatattgttccaagaggaaggaaccggaatctaagattaatttgtactgtactcaataagcatgtagaacatgataacgataacgctgtgctacgaccatgagtaatagaacaaaagagatcgagtaaagataacaataagcaaaaaagtattgatgaagaaaataatttattacacacaagaagagcacttcatgatggactagttcgaaagaccaagaccaaaaatagatcgaggcaattgttgcgggaatatctaattaagcacaccgtacatcaacaccatcgtcaccacaatctttccatagctcatgattcccttagacgccgcatttttcaagttttctgcgtttcccggcgatggagacggcgatggagctgatggagacggtgatggagctgatggagacggcgatggagctgatggagacggtggaggctctaatgaaacggcagcaagtacttgtacggcgagtttcatgccaaggctgcagtgaccaggagtaaggcaaaggaagtgtatagcacctacttttgtaagatcgatcttagtgtctccgtcagaaaaactctgcgtcggtctgctagtttcgcagccatcatagtcggctttattcaccacggccaccgagtgcgaaggaccatatttgaactctgattggtcaatacaaaagaaaccaacaaatccttatgattgttagaaggtaaaaaaggagtttcttgtgaaacaagtaatcagtatgaacaaattttaacctaaatggttattagtttgttatggggaaaacaagtgaagcaagtaatgaaagaaacaatttatttacctagagtgtcaccgactctgaaagtcttttcactaacccaactcgtgtactcgacaccaatggtccaaccatcattatctcccacctggaaagtcacggcaaagacggcagggactgccactaggaggaggaggaggaggagagcggtggcgnnnnnnnnnnnnnnnnngatattctatatatatcatgaggaagaggctaaaatatgaggtgagttatatagaaaaaggccgtgacgtgagatgtttgaatatatcatggtttgatcaattgccaattcaatatatcaagttcgtcagctgtgtttaccacaaaaaaaaaaaaaaaaaaatcgtcagctgttttctattttataagaattgtttaaatctctttgttattatctttaccaattctctattcttttcaaaatttctctttgtaaatgaccaactagccatatgcaaacttttatccttcatttttttaaatcatgacatgatgtattgaacaatgtaaaatcgatatataaatttcgaatctgaaaatatgatagtatcgaagattaacagagtgagaagaagattgtggttttttttcttcttctaatactactcaaatgcttcataaatatatgaaagtttccgactaaaacaaaatctttctgaaagaaagaaaaatcgttcttttaattttattttattgttataataattggaatgagttttggctgaacaagattttaacgatacatacggtatggtttgttagcaatgttttatatatgctctacagatttcgtaagcttacatcaatgtttggggttttgtttaaatgcaattacaagatttgacaattgaattggttgaccatatgtaacataattagttcaaccagttgaagatataccgttttccattgtctaacagtttttggagagattacagttttttattttatattgaaaaagtgtgacaaatacagatcaatcgtttgtccgaatgtgtataacaaaaaagaaataagagttatagtaaacaatcgaaatgaaatctaaagaatattttagaaatatggtaagaataagataaaatagcttggagatggctataacgtttatcaacccctacaagtaattaacaaaagaaggaagaaggaaaaattgtcaatggcaaaaaaattccgttacacacaaaagagcacgtagtggtgta

SEQ ID NO: 4062 - DNA, 3815 bp, Arabidopsis thaliana landsberg
aacaaacatgacaaccaacaagattacgatttttggaattagagtacatatatatgttggaacttggaagatgcattggtcaacggagctagacctgacaaaggtcttcggataataataatatcgtaaacattaaggaaactttttaattttaaaaaatcggacatgaagagcacgaattgaactctatacaaaatctagagttgaatcgtgtttcagaaactgaaggtacacgagcttgtggtggcgtggtgcacgactctgcataaaactcattatattatctattcaaaatctaagcatttgtttcagacaacacaagtttcatttttaaaagatctcgacttacgacaaaaaaaaaaaaaaaagatctcgactttttttgttagttaaatactacaatagtttgagaaatattttgtatttattttattttttttagtttgagaaatattttgtatttcttcgtttgtgttcaagtaaagtttgtgatccacgtttatatacaaaattgatagataaaaattggactggcatatcatgtaatatacacacccaaacataatttttgggatctagaaacatttgcttgcagaacggagcctttgtcggagaaagtagtcatgcctcgttacaacgacttttgacaatttcccaaaagttttatagaagttgtaaatttaatactagtagttgtatattgaaattttatttttgcattaaacggtaaggatctactaataattgacatgttactaagtgaatgtctaatcacacgaacaaaaagaaaaggcagtttacacgcgggtcggctatatttgaaccataccggtgatagtattggcccacgccttaatgaaattgtcgcacccatgataccgtgatctcacttatgtggttagctttgtaagacaacattattacgtctacatgctatattatcttactcggattcgatgttttgttttattaagaaagtaaacaaaaactagattgaaagctaacctttagatagattttattaaataaagtttaatttcgataatgcatttccaaactcgaagcgtcactagttgcaaacggaagtgtggcactaagactttactaatcatataattctgtgagattagatttcaatattttgatcaggtaattcaaaattttgttgttgcctaaccattccttaaccgctcagctattttgaatgtgttaacaaccaagtagatctttgattttaaagtataactttctaatggttggttagtatatagaaaaaatgaaaacaaataaccataagttaattatgtaattcatttcgaattactattgtgttacagcaatattcacgatgttcacaacagtagaaaacagaatcttaaaaagatgcttaaaaatagagaagattgaaagataataataaaaaaaatgaattagaagattgtcgttgacgtcgtccgacttaaataccgatgaccgcacgagtcattattttccgttactaagcttttgatagcgactgaacaacacgcgccagatcctttagttgtaaatccccatttttattttcttaaacccaaagaaagaaaaaaaagaagagaaacggccgaatcttcataaattccgccatctgttaagctcaatcgccgcctaaactccggcgactctctcggtagatctctcaatcctaactgttttcgtctatctctctgttgtatctaaaagcagcgacgccgatttgttcgttttccggcgggtacatatagtatgattatctctgtttaggtgtttttgatcagtttctcatgatatggattcgcattgcgtctctgtttgattcagattccgaaagttccgattgattcgataacttgtatttgttgtttgtttctgcatttgatagaagatatttggtgattgaggtgactcggaagagagtgagagagagagatggatgatagaggaggatcgttcgtagcagtgagaaggatttcacaaggtctagaacgaggaagtgtttatcattcttcttctggtaaatttcatcttcactttgtacgatgattctttctattttttttgcttcttctggaacaaacgcgttttctcatcattatacatctctatctctatttctctctctctctctctcccactttttccacgttttctctttctctctgtgtattcgctggcgattgcctttttatctgagatttagtgtcgcagatctacctttcgccatttgctttttcgttgctctttctcataaattcgtggagtttttgttatgtgtgttgatcttctttgtaagtcctatttttagtatttcccatacgaaattgtttgcgttgatttttctagttgagattagtcttcttccctgcagattccatttctctttttgactatattgctagtttgtttttccatggaagcatgttttgctaaaatcttttgttacttgcttcgattttgattgtcaataagttgaagctaatggatgatgtgttctggaatctttgatttttctttcatcgttctgtattttgacaagtctgatgcttaaatgacattgtatgcttctcacgtattagttatcgtatttgtaatataaaagtcagctaaaagatgtttgactagtcaccctcttgcattaagaaatcatttctttatcaaaaaacatcacaattctgattttaattttattgcagctgaggttgtagctggatcggcagcgtggttaggccgtggcctttcctgtgtttgtgttcagggtagagacggtgaccctcgtccttcatttgatctaacgcctgctcaggtaccattttcctcttttttaattggtttactttataatgattgcttgtttctcctctcatattagctgacttctggttagtatttttcaagtagtatatataacttgtatgatccttattgtcaatgcttgcagcaggaatgcctgcagaggttgcaaagccgcattcatgttgcttatgacagctcaatacctcagcatcaggtatgctttcctttatgggctgtgtttgtaaggactgctcacaactaacttgttccataaattagatggtcgctgtttcaagtttaccagctcttcagttttactgtatgctagcttcattggtcaaaactctacctgcgtttacataaatatattgtttgctatttcatatgtgtgtaggaagctctaaaggatctttggaaacttgcatttcctgaagaagagctacacggaattgtatctgatcagtggaaggaaatgggttggcagggaaaagatccatcgacagattttaggtaacgtctcatctcattgtcattatccttggattttcccacttcaattgactcacagtagagcatctggcaggggtggtggttttatttctctcgaaaacttgttgtacttcgctaggaaattcccggtacgcctttataataaccagttgcaaatgcttctcaaaactgtattttcgttaaaacattcaattccagtggcaccgtacttgtatccatcacatagtatttcgatcagttaataccatttcaatccagtctctcaattcctgatgccacttatttgtttcctgcagaaatctttccacggccttctgcgcaacaggttggcgatcgttctgtgtgggaatacccctttgctgttgctggcatcaatataacattcatgctcatccagatgcttgaccttgaagcaggtactaccacatttattatttccatgattacatagatattcctttgtgaactgttgttacatgcattaggcagcaatc

SEQ ID NO: 4063 - DNA, 1626 bp, Arabidopsis thaliana landsberg
aaattgagacttatcccaacctctctccgtctctctctcactctttttcttgttttaatataacaagtaacaactcggtgttggagttgtttcttagaaccaccaaacacaagaaaaggtcaacgaagaggtagaaccgaaagcgttgaagatgaaaagtgaagagagagagagagtagagcaaccttgtgttatcctgaggttagaaactcttcttactatttaatatcatcataagggctattgattgagaagagcgtaggagggtaagtcctcaagatgcattatgtcttccagcatcagctctctctccagctgtctccttgttgatttcataaccgtctatgtcatccaatatattccaaggcaaagcatcaacatcgcatgtatgtatatgaccaaactaatgtcaatgctttgtaacgactattacttacgttaaactccatgtatgaggcacgcattgaaagccattgctgatccattagcttgaatgcaatgcaataaagaaggtcaaatgcagattcgttctctgcttacacaaatacccaatacatttatctaaatcagtgtccacgtttaattaaagcaccatgtgtggaaacaggcttttcattatattaagacaacagcattgtgtgagagattaccagaaagaaatttcagaaaagttgccccaacaattgttcgcggtttcactgtacattttaaaagtatatacatcagaatgacagactatgaacaatatgagacatctgcctaatgcatgcaagaagattctgtagtagttatgtgcttcccaatcctatgactccagatgtcaatagcaactatcacaatcatgaatcatggtaggtaagtaaattcatgtggctgtatacctgcttcaaggtcaagcatttggatgagcatgaatgttaagttgataccagcgacagcaaaggggtattcccacacagaccgatccccaacctgtttcctcagaaggtcctggaaggatttctgcagcatatagacatgtgccgtttaaactaagtgacataagtggatcagcaagatctataagaggtgaattcatgaataactgattgatcgataatttatgatgcatggaaagtgaaatttattaaggaaaatcagctcattcttttcatgaaatgtttgtatatgtagtgtataggtatacctgaaagttcctggcaaagtacagcaagttttcaagagatatgaaaccaccacccctgccagatgatgcactgtaagtcagagaacatatgcaagaaatacctgtaacataaatgataaggaaagtccgtgttatacctaaaatctgttgacggatctttgccctgccaacccatctctttccactgctcagatattaatccatgaagctcttcttcaggaaaggaaagtttccacagctcccttagagcttcctaagagcatatgacgaagtaacaaagtaatcatcaaagctggtacatttgaatttatgatgctagcttacagtaaaaaggccacgggacgaaaagatacaatattctaccatcttcaaaagatggttcaagtccaattttgtttatgagaaattctgaaagcttaaaacccctcaagaaaagtgta

SEQ ID NO: 4064 - DNA, 4979 bp, Arabidopsis thaliana landsberg
ccttgaccgctgcaaatatatgctgctttgtgatcgtggccatgagatacacttacaagactgtgcagccgagtctggctgttgttgctgactgcggtgatgacgttgagacagccacggggacgaataacacgtccaagcttacgtaacttagctattggtttggtcatatgatgaccattttatgttctgtgtttattgtgtacttttgaaaagtgattttgtagtcattttaacattcgtgtggcgttagcctttagaaacgtatgtaatacatcttacagaactgaattccaagtccaaatttatatacaaaatagtttttaaattatgatatacgtattttcaaaacagaggtaattaatcataatggtacattacctctgttttaccattatgatttgggactttgagcaacccaacgaaccagcttagtacgatgatgtttatacatcttacaggaaacacagaagtacgaattatcacacatccatgagtgcaagagctacaaccagatgagattctccagttctcatcttttaatggctagttcagtctgtttagggtcgagccttctagtgtctagttgttaatgtgacaaatgtgatcttctctcagctttgaaatagaattatcatcacatcgattccattaaattttggaactaaaccataagtttttccaaacatattccctcttttcaatcagcatcagatctcttaattattagcttattcttcatagtttcgctttgttcagttggtatcaaaaccatgttgataatgaaatgtttatttagaagctaaacgagctgtttgtgggtctcaccttctaatagaagaaaaggcatagccacatggttactcgatcccaagaggtaaagaactcgagcaaccacctaaaacaattgtaatggtgaacaaacattcatacattttggtgacattttgtttgtttgtttgtttgtaacaaatcgcagggaaagcttttgcaacaatgggagcataaactcagttagcattttcacaaccaagctccatgggaagatcttttggacctaaatattttggaacttgttcattcttactttacaaagctcagctaattgatactcacttttcttaaacggcatacatttcatcacatcacaaccatcatcttcactgttactctatttgtctgtcttttacatattagcaagttgatgaaatattgattggctgatcccataacaaacaaaaagagcaacacaaattcttttatttttattgacctatctttctctgctttcaatcttccattatcccttttatcttcctttcatcctaactaattgaaccatttatttttatttttaaaaagtctgtccatacaaattacactaatccacacaacgtctaactctcttacaagcttcgtagcaatatcaaaaagacaagagagcaataacagtttgtgaggcatttggaacctatgaagagaccacaaaaatgataagagagaacaataataatcttgtcttggccaaaagtccactgagtgcatgtatttgagttagatgtaccttgtatgtgcttgtttctgacacaaaaaccgaactaaggggaatgttaaaggccgttgcagcaacctttgtatgcaaatccttgacccatttcaaaacctccatgtgtcaccaaaacaatcccattggtgcaaacatgaacaagagcaccggaagtatcttaaaatccagattctagatttgcaagcaacggtagtgcaatgctgagatttccaaagaagctttatcttattcttttaactttaaagtgaatcctttttctagcaaaatgaggacaaacttttaccagttttcacatttttagaaaaatattcaactcactttgatttcttcaggggctcagctgaatctagttttcaatgtttgtagaacaaaatgaaaatgaaatttttagtatctcaaaatccattctattttttttttggtgacattaatcaatgatttcaaaataaccaaaaacctcagaataaaactcaattgcatcttaaaaccacccaactttcagaactgaagaatgacgaagaattaataatagaggaggagaggaggagctacatcaacactatttctattttttcagccaatcagcgcactccggacttcgcccactcgcacctacttcacgtcacacgctcaattctatacccattctcaccaacttcgcgttgagcgcgtgtcatcaatttctgtagggataaacccacaaaatcatgcctatttctattctactcgctttgattccaaaagaggctcgcgtgatcccaaaacctttttttcttttgttttttctgaaaaccatattaattctaatgcaaaccaaacccaaatcaatttcaatttcaaaaccatgtaaaccgaaccgaaatcataacaccaaaaagacaacctagcaatatactcatatatcgtcaatttcactattaatccaacgagccagtttattgcgatgacgtttctaatgcttcctaatgacatgcttttaactatttagcccgcgtcttgattgtagtatcctactctttccttagtttccaagagattccgcgctatccttgcttctcttgagctttacgaaacccgaactctcttaggctgccccgagagtcgtctttatgtatatttgagtttccttcatgactctaattaccgatcatgtctgttcactctctgccggagaccgaatcgactcactgttggtaagttggtaaccctaaccctagatggttcacgtcatgctttagaccatgtaaaactcctacaaagataaagtcagatgagaacaatgtttggggttcagacccaactcgtaattttccttatatgagttggtcggatccggatctaaccacacttcgttacatacttacacccccaagttaggattaatggatgcacttgacttgggggaattttttctactttcaatgaaagcaagtgtcaacgtgttggaatgttgttatgttaaaagtaataaccattgagcatgtgtcaagtgttttgattctgtatccctggaacaagcacgctcttgttgggcttgataatatttttcaactagaaaatttattgataaaccaaacaacgactcttgggatgatgttgttggttacgtagcacgtttgaattcaggatgctttgtcacgactgaggtaagaggagaaggtgccacatggtacatagtacttaccacgtatccttttgcactgcccagtgtctatatatatctgaatgtggcagagggactttaagattgaaaacgaaaatggcagatacaggcaaaggaagctctgtcgctggctgcaacgatagctgtggctgcccttctccctgtcccggtgggaattcctgcaggttggtcctttattatatgctctagggtttgatgtgttgggattctaaaacgtggtttccaatccatgtaggtgcaggatgagagaagcatctgctggggatcaagggcacatggtgtgcccgtgtggggagcactgcggatgcaacccctgcaactgccccaagacccaaacccaaacctccgccaagggctgcacctgtggtgagggttgcacatgcgcctcttgcgccacttagacatccttatctctgtctgtaccacactttgtataatggtactagctagtcagatctgaaaaataaatctgtttattaggtccaggtacaagaaaacatatgtttcgtatgctctgctctcgtcttatgactcatcaagaatctgaaaatcctgaaggtcttggactaatacaatccactaactgagtctcctaaaactgatagccagtgaacacaaggagataaatctttgaatactgaatgagtaacaacatcgagatggtctgtacaatctggcatgttttagggaacacctccaacgctttaccagcttaacaccaaaagggaacaatgaatgtgttcatcaaagaaatttcatcgtcttttcactttaccggactttaaaagaaacgttcaacaattgcataaaatgaaaacagaagaaagtcattcatggtttcaaaaattgtatataatgcaatggggactacaaattgcttgctgtgtaacagagaactcacctcctattctaagttgggtagtatggttttccatctgcaaaggctccaactatagactggtaggacaagccattatgtctttctgtaactaatagactggtacagagttctaaattactattacagtaaggcctgagactttcttgatggattggcctttctgaaactctatgcatagcgtctgaatagattatatttggtttaagggactttgtttttctagtaatattttggctcttgaaggctaataaagcggtgtcatctatatatgtgatcacttatttgactgtggcatgtagaaatgttgatgttgtacttgatggattaaaatatttgatggcaaaagatacaagaacacacatccacacacgtgtaatcagtgttaaggaatacaggagcggagaagagagatggattttgggagatggttggcgtcgagagtgaatgagcagatgatccttgtatagaacttggaggtgacgagtcttcccaaaatgtaagcttttgaatggaggacgatagtgagattaagcggcagggagagtgtatcaagatggaaagaaacaccaccgtagaggggaatctgatggccttgcaccaccgtcactacgttcgtttcgccatttctaccaaccgtgaacttgttcatctcaccggaggatagtaggaggttggagtagtgaaggagaagaggagaagcagtgacgtggacggcaaagaaagttgatgggttccggtaatatatcctgaacgtcgaaataagagacaacatgtccgtaggcactccgctaagatcgttccctgcctgcaagttcaagacgctttcc

SEQ ID NO: 4065 - DNA, 1439 bp, Arabidopsis thaliana landsberg
cgctcgttcttcgtgtgatgctgcatcattacattaaacaaaactcgctagtttcacacatttcttcacaactaaaaaaaaaacagactcgtaattgtgatgatcatacctttaaagcacaatgctcacagaagtaatgcttgcatttggtgacaactggatcaacaaaaggctccctgcaaatgaagcaagcaaagggcaatgcattttcgtcttcgtcgctatccttgtcagcctcatcatcttcatcctcaactcccatagctttatttctcttcctaactttctctgcttcttcccactctttctctatctgccatcctggtttgtaatccccacggtcatgcaagaacttacacgaatctccatatccacagtatccggtttctttgtaatccttgcaaatgtctggctggtaatcgaatctagccgacactcttatgtgagcagaagctcttaatggcccgtgtgagcctccagctttctcgctcgagattgtttgttctcttctaaacccagctttgtgatctgtatatccatgaattcctttgtacagcttctcatcagaagcctttttcttattccctttcaatgcttggtctgcttttttaagaactctctcacggatagctcgtgcgtcttgattaaagtcggtttcagtttcaagggttgctgttgctccactgtcgttctgaacctggatttccttggatgaatcgtagtgaaaaacgggtctctcaggagctccactcgttctagtagatggtccagaagaaaagtacaagttgctatcggtttttgcaactttctttagattttgtaaaatagagctttcgcttttcgaatctccgtcttcttcatcagcgtcaatggttcttttccttatgtttttacttttcgttggcttcttgaagaaagtgcaaactgaaacagaagaatgatttgattagtgtaaatgaaaatttctagctaacaagtaacaacgaagaagaagaaaaaatctcaatgaggcaacaactagaattgagatacaaggaagtagtatatgtaaccttgttgagactcctgattgttggagttgtcgttaccaaactccgccatgttcatcaccgtatcgttaccaccgatgctactggagttagaagcgttaatcgcagaaccatcagctgactcagtgtgatcgatccgtcgcttcttcatcggcgaagaagcagatgcgacgatgttctccttaacaacgaatggttccatatagagtaactggaagagagaatatgtatcaaataaacagaagaagcttcgaataacaaacaaagacaagaaattatttccgatgacaaggttcctaaaccctaatcgatgaaggaatctgaagaagaaacgagaatcggaggaaatggaaacgaaaccgtacccagtgacccggttgacccggtaac

SEQ ID NO: 4066 - DNA, 3344 bp, Arabidopsis thaliana landsberg
ccaatacaaaatgaaaaggattattctgccacaagtttagggcttaaaaaggaatcaaaatctcaacaggtgaatctgtgagaaagcaatctctaatagctcaatctaaacttaaaaggcttcgaattcattgacacacatagcacaacatatttgtccacgaaaaagaaaactacctatatggatcttcgaaagctgttgtacttgtacgaacgtgaggagatcatatacttgtggcgaaaatcacccggcgccgtgaaattttaggtgattctccggtcacaggtgaaagtgagatcaaaacaggtgtccagatagagcacgatctcgccatctcttttctccggcgtcagtagcaaccgctaatctatcagaaatgtcaataaaatgaagaaattaaattaaatataataataaaaaatgatgagtaatgggcttaaaaacagtataggcctcatatttaatgggcctagattaaacatgtacatgttgactttcacctgcaaccagattacaacagatttgtagcaaagagaagatcacatattttgtcttcaacatgaacattttctcggaaacgtgcagaagcaacaagactcttcttctccttcctcaacaacgccacttccttctggaaatcactagttttctcaaggccagacaatagaacatcgtatgtccccaaagaaggcattatctctcgctctctcatctctcgtaatatcttcattgctttctctggactccctgctgagatataaacatccatcagcgcagtgtaagcagctacacccttttgatcatccggaagtaagtcgaaaacgtctgcggctaaacgaggtcttctcccaaacccgagcctgtggatcaacatagctccttggtaacaaccaagcgagtgttgggctttcaccatctccttgaccacttcaatcactttaggaagctcgtttgatctcagaaatttaccaattaacgcgagatacgctgacttcttgagatgaattcccatttccaagctgtaatcaaaagccaacgaagccccctctgttctacaacggtcacagtttgtttctatgattgctgaaacaacaaaagaatccagctttatgttcctatctctcatctggttaagtaaaatgtcaactgcaaccagattctgcttcatcaagagaacggagctgataactctactatcatctgaattcttagtgtcatcaacttccgctgttggagtctcatcaatgtcactggagcacaacgattcaacggaaatatgcgagttgacttcccttaacagatcatcactttcgcctgcagctctcagtgtctctaaagcttcaacaaagataggatagcgtaggacaactccattttctttcatgtacacaagaactcgagtcatgaaagatgtttccccaaatttcaaggctttcgctatcagaatattgcaagctgctttatctggctgcacaccaatttcttgcattttaaagaatatgtccaaggcttcctcacattttcctgcaaaatcaaacgaagaaactaacacatcatcatcaacaaggctacaaaacattcagataccagaatcatctacataaagcaaaagttttggattttcagctaagcattttaacaaacacttagtgtgcaagagaatgaagttgacctgtggcgacaagatactccatcaatacagtataagtgtgacaattcggagaaacccgcgaccgtaacatctccttatacacctccgtggcttcttccaccctcccatcagcgaaaagcatcttcatgtaagcagtgtacgacacaacggtaggttcgcaccaattatctctcatctcctcccacaacctcattgctccatccacatcaccggagcttgaaacccagtgaatcagcgatgtataagtcaccgtatcgatcaacacacccttctccttcataaggtgaaaaacagagtacatggattgaatccgaccggcttctccgaagatatcgagcatggtggtataagtgaagtggtcgtgtttgaaacccttgatttgagcagcccagttgaaaaagagccaagctttctgcatcggaggatgtgctttcaagacacggttgataatgtgagaatcccatctgacgccgagatgtggaagctgttcttgagcagagtcccaagtggagtacttgaggatgttatagatgttggatacaatgtctcttgtgtaaacactgggatctggtagggtctgtgttttcacaagtttgggtttttgggagaatcgcttggagttggtgggttttagacgaggaagagagtgaagtagcttgacggagctccggcgattggagaattggattggggtattgcggaagatgctagagaagcgcatgaagctttgcccagagagataaccaattctaaactccaaccttgcagtgtattagaaagctttgtttgaataagacgccgttttttattcaagtaaaatttcaaaaatctagattcaaagaaaaaaattcaaaaatctatgcaagtctttaaccacaattataaagttagggtttataatttgacttaggacctgggcgttcgggtattcgcttcggttttagttggattccgattccttcggtttttgagtgtagaatccatatatgaaccgaaacagtttcagtttggtacgggtttggttctagttctttcggttatgaagtttgggatctattcggatattttatttcagatatttcggatattttcgagtatttttttggatattgcggtgttatatatatatattttaagtatattttggtattttaggtaactaatatttttggataatataatcatatttcggatacctaaaatatttctgggttcggttcctattattttggttctagaatttaggatctatttaagtattttaccatttcggttcggattcgcgttcggttctttttgcttcggttccggttcggttctttcggttcggttattatgcccacgcctaattcgacttgtgttttactcgcttatctgtccacttttatcttcttgtgaaattttcaagttacaaaaacaaatacttggcaccaaaattgtgtgaattagttagttaatgatcaaatggttaaataacacaaagagttgtataatttatgtccaaaaggtattacaatttcgactctttcgaatttggaggagtcgaatcgtggatacatatatgtatgagaagagagacaataaataaaagaatgtggttgatcaagcttcaagggcaagtaacataagtgtgggaagaataaacttgtgaatgagaaaagggtttagtttg

SEQ ID NO: 4067 - DNA, 771 bp, Arabidopsis thaliana landsberg
cggagtatacgcatgagagtaaagcggctagggtgaatgaagtaaggaataaagctatgatggggattcgtttgccaaattacaaacatacccctatcccgccgactattctctttttctttgggccttgaagagtcggtcgcgtctcataaaagatacgggaagatttggaacggaggttcatcgtcgccgtcgcctgaggagagtgacaagataaagagccgaacgacgtcgtttagttatagatttttttttttcgctctgcggttgtttagatccggtatactttccggtttgtgtctaaaaaccgcaggaaaaaacattgaaaacccggtccaaaaaacaatttaaaaaagccgcctctacttttctttattcaccgtacaatgctacatttgtgtatgctaactaaccctgagtaaagttctagagagggccttaaagcgaagtagtcaaaatcttagtaatgatcaacatgtccaaagaggatcccaccacaacattgatgagttggtgttggacttgtcttcaagaaatcccaaatcattgctctcaaaggacatattatcttgttcttgtttctgttgttggtccatgttataaatcagctctagtaaatttgatctttgaaattgcatattcaccatctccacttgagcttttgcaagttgtgcttggagttcactcacttgtctttgtaaatggtatatggcacctgcacatccatacactggatctcttattctagcttcggcttcatacaccatagtt

SEQ ID NO: 4068 - DNA, 4577 bp, Arabidopsis thaliana landsberg
  unsure (1)..(4577): unsure at all n locations
ttctctttctgttcctatttctaaaactaattttgtgaaatgttgtacgtgtttgactaatacatctctatgttgtctgtttatgatcccatgtgacatgtttaagatctgttgctgaattggagatctggatctgacttctttttcatatgatccgcttctgaattttccatttgatgttttttttttgcagatttcaaggatggatgatactacgtataagccaaagaacattctcattactggagctgctggatttattgcttctcatgttgccaacagattaatccgtaactatcctgattacaagatcgttgttcttgacaagcttgattactgttcagatctgaagaatcttgatccttctttttcttcaccaaatttcaagtttgtcaaaggagatatcgcgagtgatgatctcgttaactaccttctcatcactgaaaacattgatacgataatgcattttgctgctcaaactcatgttgataactcttttggtaatagctttgagtttaccaagaacaatatttatggtactcatgttcttttggaagcctgtaaagttacaggacagatcaggaggtttatccatgtgagtaccgatgaagtctatggagaaaccgatgaggatgctgctgtaggaaaccatgaagcttctcagctgttaccgacgaatccttactctgcaactaaggctggtgctgagatgcttgtgatggcttatggtagatcatatggattgcctgttattacgactcgcgggaacaatgtttatgggcctaaccagtttcctgaaaaaatgattcctaagttcatcttgttggctatgagtgggaagccgcttcccatccatggagatggatctaatgtccggagttacttgtactgcgaagacgttgctgaggcttttgaggttgttcttcacaaaggagaaatcggtcatgtctacaatgtcggcacaaaaagagaaaggagagtgatcgatgtggctagagacatctgcaaacttttcgggaaagaccctgagtcaagcattcagtttgtggagaaccggccctttaatgatcaaaggtacttccttgatgatcagaagctgaagaaattggggtggcaagagcgaacaaattgggaagatggattgaagaagacaatggactggtacactcagaatcctgagtggtggggtgatgtttctggagctttgcttcctcatccgagaatgcttatgatgcccggtggaagactttctgatggatctagtgagaagaaagacgtttcaagcaacacggtccagacatttacggttgtaacacctaagaatggtgattctggtgacaaagcttcgttgaagtttttgatctatggtaagactggttggcttggtggtcttctagggaaactatgtgagaagcaagggattacatatgagtatgggaaaggacgtctggaggatagagcttctcttgtggcggatattcgtagcatcaaacctactcatgtgtttaatgctgctggtttaactggcagacccaacgttgactggtgtgaatctcacaaaccagagaccattcgtgtaaatgtcgcaggtactttgactctagctgatgtttgcagagagaatgatctcttgatgatgaacttcgccaccggttgcatctttgagtatgacgctacacatcctgagggttcgggtataggtttcaaggaagaagacaagccaaatttcactggttctttctactcaaaaacaaaggcaatggtaataatagagtaaccaaatcaacattctcaaaaaccatatgtgtctttgttcataattgctctgtttttccaccaggttgaggagctcttgagagaatttgacaatgtatgtaccttgagagtccggatgccaatctcctcagacctaaacaacccgagaaacttcatcacgaagatctcgcgctacaacaaagtggtggacatcccgaacagcatgaccgtactagacgagcttctcccaatctctatcgagatggcgaagagaaacctaaggggaatatggaatttcaccaacccaggggtggtgagccacaacgagatattggagatgtacaagaattacatcgagccaggttttaaatggtccaacttcacagtggaagaacaagcaaaggtcattgttgctgctcgaagcaacaacgaaatggatggatctaaactaagcaaggagttcccagagatgctctccatcaaagagtcactgctcaaatacgtctttgaaccaaacaagagaacctaagccttcaatgaacatcacactcttccacaagtgcttactttaaactgttttgttttgttttttttttctttttgccttttcttccaacagatatatcttttttatatttactcatcgtcttatgatccttgtaggtagtttcactatattgattctactaaaatatgatttacgattattaatatttatatagacgagagtttttcttttcctcaaatactacattttccctcagatttttacttactaagtcagacagcttataaaaaagaagagtcacttactggttgtgaccattaggacttccacctaggcagtttcagaacacttgaacttgatccttaagctatagcctgagaatagaagcaacaaaatattttagaacaaacccaagtacatgatgtgagtttggtctattttaaggttatagttttctacttttcttacgtgaacagctgagggcgggaacgagagagctgagaacgtttaataggggagagaataaggtttcgtagagttgactggggattagcagtgccaccaccaccgtatacaggatgtcctccgccagctcttctgtttccaagatcggatggaatcgcaggtgagtcggtggagatgtcgaatggacccgagtttgaactgttctgtcttgctggccatatctcatctttaggtcctggtgttgcaggagagaaaaacgaccggtctgcaccaaataagtcaacttgatttggagatatttaaccaaaatagactcaggatcatatgaagcactaagcttaagacacagaaatagtgtagttaaatcaacctttgcgaatggtctctctgttctccatcatattaactgctgggtttgagaaaaagtcgggttcttggtgtcgcgggtagaagttgtttgctggttggatggctgtacgtttaactgactcatactcacttcttagctggtcatacatctcatcaagcttcctcttctgtctggtaatttaaaaacaattaaggtacattgttattgtagttgagattaatatagggaacagaaccaggaaaacatatcttaagtgactgaccttgatttctcagagaacttctcttggagctcttgcttatccttggtcaagttttctacctcttgctccatcatctgacacctcttgcccatcttctgatatgctgtatggacctgctccattttctcgctaaactttgcttgcataccctcacatttctgacgacactgtgcaacaactctattcatcttgtactgcatctctaagtctctttgggcaatgtaaaacattacacttcggtatgcactcttcatcactagattcagttaagaaaaacaggaggtttttgaaccttaaactgttgttttaccaactcttacaaaggcaaaagagataaagttataccacttgagtttagatttgagatacagcgggacaattttcaattgaaaaaccatagttacaacttgaaaattctaccaagagcacatctatgaaaaggatacgtatttgtggannnnnnnnnnnnnnnnnnnnnnnnnnnnnnnnnnnnncaacgaggagatgtaagatgggaatattgaaaactggaaaagaagaaaagctatagtatccttgcgtatttcagcttaaccacttacatttatccattcttcatttggattgatatccacaggtttcattaaactaagatggaaagataaagactaactgtcaaatggagaataaggcgactagagctaaactgaagctaggctaggaaagttttacctcttggagagtacttgatcacaaatgggacatgccccatcattactgagaatcttgctggcatcttcagtaccttttcatggtgttaaggtcatcttattcaagctcacaagtgttgctacgcaaaagaaaagtagaaagtgtaaataggatacataataagtgaccgcatgtggtggaaatggccctgccctccaggtccctccaacacgcgttgcatctcatgtcaacctctaatataagtatctcaagctgctacgcacctgcaaattaacttcatatcaaacaagatgaagaaccatgctctaaatgaaacttccattctccactgaactaactcattgagatcaccaattaactagtattcacaatacaagttttaattaacctatattcattctaactactgaaaattgttaaacttgcaacacgaatgggtacaaagtaagcattaagacctgtcaacttcagtagtagcagttatagtcatcgagagtacaaactac

SEQ ID NO: 4069 - DNA, 3608 bp, Arabidopsis thaliana landsberg
gtttattgttgttgtgaattggttcggtcttcagagaagagttagaagtggttgaagcttttgggttttttttttcggtcagtgattggatctgctgcaaattccaaatgttgaaccgaccgttagctccagttcttgttttcatgttcaagagagaaaactgaaaagtgatttattttgatccaccagaagctttgtctgcatctgccgaaccattcactattgtatatccaatctatattacctttgttgatgacagttttcaaaatctgtttatacgcggaggagaagaggtttatgaaaaaagtaaattgataacataaataaaaaacgaccacggtgggactcgaacccacaatctcccgctccggaggcgagcgccttatccattaggccacgcggtccttttgatagtcaactacaattacatcaatatatctatttatcttaatcacaatccatgtaatctagtaaatgatatgcaacacagaattgtcaattgtgtaacaaacaacaagaacattaagacttttaatcaatctccacaaagatgagaccaaactcaagaatcctgaatactgatgtataatactaatacaaccctcccagcaatttgttaaagtttaacacagaaatggattgaaccaagctaagcttataaatatatatccactggcttgtgatcttgtagctttttcttggactttcttatgaagaagaacccactatgggcaagtttggtgcagttgcccattcagtccaagacccatcatagattgccacattagtttttcccagacgataaagtccctgaccagtaaaataaagaggaatcagtctttagtttttatcatatgatcacagtaaatgaatgaattctagatcatcatttagttaccaatgccaaaatacaagctgttacaccggttccacatgaggccgcaatcggactgtccagagatatgtctgcagataaacggataagtaattgcataaaacaactacttgagacttcattttgttttaccttcctgttcaaactgcttcttcagctcctctgctggtaacagtgtttgagaggaatcaaacatctacataagaatatgttatcatatatctggtttcaaagagcagatataacggtaagcccttcaagttagacggtggcttactaggggaaaagggacacacttgctaccgggtatatgaccactcggtaaacccttccaaggttctggagcaataccgtcaaatctgtgaaacagagtaaattctatatcagatcctatgagcggaatcaacttaaaaccattagcatattatagtgaaattacaatccagaacaagcaataattttggcatgatacctagcctttgaacgcgcatcgatgtgctgataagtcttatcctcgatgtttccttcacctgtcaattatccagttagctcccctagtttactagcaactatgtataaacttcatttaagaaacggtaacctgatcaagtgccaatacaagatgtggccggaacttcgtctgaaaagttattgggctaatctgtgcaaatggcaaagatgtgaataaaccatatgtagcaggtaaaccaactaaatatgcaattttcagatacatcagattggcaaaaacttttcgatgaatgaatcaacttactgtttgtccttgatagatcttctctatagcctcagttgctgcactggctttcaaaatggcatcatttgaaacactggattcaacgtcatagcctgaagcacgccatttcggcaagcctccatcaagtacccatactttgtcatgtccaaagactctaaacatcctgttttaacaaaaggaggactcatcgatttgataataccagagaaaacatattgaggaatgataaaaaggctaatggacatgagattcataactcaccaccatacacgagctgcactaaagagccccattccatcatacacaaccactccatcgttgttctcgattccaagagcagaacaaccagcagcaaaagcttcctcagatggtagcatgtgtcgtaactgcacatgtaattcaaataatatacaatactttttggttgttgcgcatacagacacatagaagctcacagccagaaggcttgccaaagctattaatgggaatctctgaacagaaaagagtccagatttttgcgtcaaagaaacaacaatatgttcaaatgactgcaatgaagaatagttactgataatatttcatttatacatataagcgatggcagtgtaaactgtaaagtcaataagttagaaataaacaacacaataacatcttctcaagaaaaaagacagtgattctcacatttgtttttcgatctgctattccattcaaatcaaagaagagagcacctggaatatgagcaacctgtagacgaggacaacatacaagtcaatcaacattcagtcgtgtagtgaccctgatgaaaagtttcatagcgctcattcagaacaaaggcttatagcttatttacgtagttatttacaaaagtgtaaatcttctcacttgatactcttggattggatttctttgctcatgtgccatgtaccatgaggcatccaaaacctgaccatgaaacaaacaagttacataagaatcatggcagaaaaaggctacaatctcaacaagtgcaaactataagcattctgagacgaaaataaacacagcaagaacgtcaggttacctttatatcagcatctccaagattagagtggagccaatcaacagacacaacaggttcattggtagatatgggtgcgtaattagcttttgcctcagatccagaagaagccatgactcgaccaaagtgagtagatttagaagctggataggcagagcgtaactgtgagctgaatgctctcttctgcaagtaatcatttacaatctcggaattacaaaacagaagatataaaaaaatcgaaactttgaacacaattcagtagagtgaattatacaagagaaagttaaactcagatttgaatcatgtgactcagatattatcggatatctacacacagctaactataactcccaatgtgaaacctttctaaactcgaaagcccactactagtagtacccaaattatacaaacaatttaaacagtaactagaagtgaatatctaagctcagagaaggtcgaaatcgaattaagaaacaacttaaattcaaaaaggttgcgcaattacgagtcttgtgatgaggaacagcagatagagagggattaatctggcagtgaccagaaaccaataaagttgttgagaaaagtgtcgaagccaaatcacctcaaaataccatgtacagaacaaattgctgagttaaagccgccaaattttgctacttccagattctctgagctcgcaactttttcaagcttcttcgttctcaacgatgctgcttctgccacctagatgattaatagattatcactgatcactagtgatcaggataagtgacgcgactaacgcatgtttaattatataaaattcacgtttgccttctctttgatataattcgcgttcgcgttctctttattaaaaatcgcgtttctgataagacgcagtc

SEQ ID NO: 4070 - DNA, 1594 bp, Arabidopsis thaliana landsberg
atcaaaatgacattgaacatagaaatatcctggtggaaacaaatagtaagggattggaaagaataagtgttctttatcttagatatcttcccttgcaatatcctcttttatttccataaagacaatattgttataatattgatctacatcttaagaagacgacaacattgtcgcaaaacccacgattatgagggagtttctgtatataaaataattgagtgttatggtcaatttaatcctcttccacatttcgggaagctgtttcagcaatttttggttgatggttatacaatgatcgaagtagaaagaataggatatcgtgggaggacagataagtacatgatgctgctaagtgtgggaagcgaatagtcttaccatcttcttttgttggaggtgcacgttacatgcagcagaaatatatggatgcaatggctctatgtcaacattatggttatccacatttattcattaccttcacatgtaatcctaaatggcccgaaataacaaaacacctacaagaaaggaaactaacggaagaagatagggctgacattctatcccgaatgttcaagatgaaattagagaatctcatttttggcattcataaaaacaaactttttggtcattcagctgcaggtaagctacatttaatgttattataactatttatctttatagattgcttttacatgatccaactcctaatctatcttcatcatatatacattcgagtttcagaaaaagaggtctaccacatgctcatattttgttatggctaaagcgtggctcaaaattgccaaccacaatggacatcgaccaagtcatatgtgctgaaatccctgatcaagccactaacccagtccttaatgaaattgtcaaggaactcctgatttatggtccatgtggcttagcaaccaacgttcatcatgcatggcaaaaggtaattacactaaacatttttcaaggagtactgcaatgatacgagtatcaacatagatggttacatagtctaccaaagaagaaaaaatgggtgatatgttgaaaaaaatggaactcccatagacaatcgttttgtaattccttacaatcctcatctacttctcaagtattatgcgcatattaatgttgaatggtgtaaccagagcagagatcaactatttattcaaatatgtgaacaaagataacaatgacaggatcaccgcaacattcgttccgacagtcatgtcgacaaatgaagaaggtacattaagggttataaacgaaatcaaacaatactatgatgccaggtaattttaataacattaaaattgattacctacctcattttgtttaccccaaaatactaacattacttttttttagaggtatatgtcatctagtgaacaacattgacaatgtggggttttgaccttcatcacagcagcacaactgtgtaacgattgtcatttcatttagaaggagagcaaaatataactatggaggatgatgatgacgttaatgaggttttgtcaaaagaaggaaatcaaacttcatagcttttagagtagataaaaataaaccaacgtaacgtggaagcacaagaattgactgatgc

SEQ ID NO: 4071 - DNA, 2763 bp, Arabidopsis thaliana landsberg
gggaggaagtccctgattatccttgaaataatttttactttcttgtcatttttgatttgttttagttgtgtttgtggttctcaggaaaaaagagaaacgtgaaggcagagtaaaaattcaaaacttttactctactgatggcctatagatcgagtacattggtcgagtatgagtgatgttttaaaacctggatttttttttttaaatcatcattttactcgaccaacagaagctgcagagtcttacaaagagtttatcaagtttacagaagattgcgggatttcctgggttttttttacagtaaacagagagcacagaagaaagacaagaaaacacagcggaacccaccactgacgcccatgtcgtccatgaagcagaccaagagacatggaatctcttcacacccactcgatctccacgcaaccccatcttcactcgatttctcctccatcactcgaccttgttttctcctccataacccaataaacttaaccccatccttcttaaatcaacgcgcccgggttcttatttactcgacctcgacatctcctcctcaccacctctcattcatttcgttcactcgacttcgacatttcccaacatcaacaacgtcactcgactccttatcatcatcttcttcatcgcctcatcacactcggccacatctctcttcacctttccatcatcaccgcttgccccctctctgcaaaataacaactcgacctcgccattccgttcacttgacctccgtcaccaagccgccttcaccacttctacctcaccactcgaccaaggtgccatcgttctcccctctctcaagttcatcggccactcgacttccccaagttcactcgattcaaagccaatcctcgtcgttttcaccactcaagctccacggcttcactcggctgtcaataaccactcgaccacaagcccgttttcatttcacagttcactcgactcctcctcttcaagctcaccactcgaccaagcaaaatcactcgatcaaccgaaaaaaaatctatttcaaaacagacggtttactctattaaatcactcgaccggttcacttgattggtttgtgtttttggtttgctattactaacgtattaacgtttatttttgagttttgtccgttttcaggtttcatcatgagtaactacagcggagaatcctctatggaccctgattacaatgtagatgaagctgagtcctgatccgctagactgagagagcaacatgtttaccagagcttcagggatgaattcgaacgctctgcagcccgacgtaatcagaaaagagctgaaatcaccagaggaaagagggcgatgtcaagtagatatgagctgattgatgaggatatcgaacctgagtatgagccagagtcatggcgcaaggagacgaagctgctgaaaaaacccgacgaggttacagtggaggagtatatcagattcttcgagatgaatgacttcagaggaacgcggtatccgtgttatgagactttagcccagctggggttactagaggacgtgcagcatctgttcgagaagtgtcatctggagacactcatgtcttacccttaccctgcctataaggaggagacgatcgagtttctttccacgctgcaagtggagatctatgaggcactcacggactttgagctggataccatggggttaggcttcttgacgttctcagtgaatgaacagcggtatcagctttcgatcaagaagttggaagaactgtttagtttccctagtggaaagggaaccaaacctagatttgacagagaagagcttaaggatttgtgggccactatagggaacaatctatcgctaaactcggcgcggtccaagagcaaccaaatccggagtcctgtgatccgctactttcagagatcggtcgccaacgtcttttactccagggagtctacaggcaccgtgtctaacacggacatggagatgatagattatgcgcttacagggattcttcgccggacgaaggggaagaatgtcttgagaggcgatctcaacaacgcaccaccagtaatgcctctgttgatccatctgtgtggatgcaggaagtgcgcgttgacgaacgggaagaagaaggtgagaggagcactatgcgtgggtggcgttgtgacgccaattctggaagcttgtggagtaccgctcaaggaaccaggtttagcaccgaggatgatggacttggatcatttgcgcagatgtgagttcttggagtttgacatggctggcgactttcaccgctacaggttcgagcattcatcgattaaaatcgccaacattcttctctcctgcattgacgctactaggattcttgagggcaggaacattgacttcaagcctacgcttgaagaactttatttcgagggtagtccgctaactgaggagatcagtcataccgaaggagctacaacagaagatattgatgagacggatgatatagatgatgcggagtttgacacgagcatgtatcatttcagtgagcatatacctcttgcgagggaaagcaggagtttgagcaaagctcacaggaacaacagcaagctgcagaagtggtgcatgaaacaggacaagttactcgccaagtgctcagggctatcaagtttatgaagaacaagctcagctgctcgtcttccactacagctattccgcatggacatctccctcaggacatgcgttcgaggagatatgacacctccccgccaccctcgagcaggcctgagcctagagagcaaga

SEQ ID NO: 4072 - DNA, 2417 bp, Arabidopsis thaliana landsberg
  unsure (1)..(2417): unsure at all n locations
actatcccttgtctttggtgatgattccttggggcatcacctgcgccaatgtttcttggttgatcaacattaggtgggtcttgaacatcaactggtttgttctattgatccatagcagctggtctttgctgatcacaggctgcctttgctttggtttcttgtaactcacgaggtattctatcgattctgtctgtgaatggtagtaggtgtgcagaacctttggaatcgagtttgcatgcacaaagattagtacctataccacaaaaacaagcagacaaaaatatgagttagtaactttataattgtaaaagaacttgattttaactttttctgatatcttgaatgaaacaatgcaacaatgaattcgcaatcgcgccaaattgataagtaggttttttaggcctacttatgtgctgaatgtgtgaggttgagttcaattctcctaaaacacaaaaatgccgatgcagctatagggggtgtcaatccagtccacagttattgctagcaatcaagatgtgtacagtagcaactaagtcaagccagattataatggtggtgggtttccagtaacaatcctaggtcaggattcaaacaagtaaaaatgagagcttaagagccctactcaatcattgggtcgagtagaaccaacatgtaacgaatttaagtaactaaaatgcaatcaacaggggatacaaataacaggtaaataaaagtgcaatcaataggggatagaaataaatctaatagaagttctgaggatggattcattgataagggcaactcaacaggtggctaacaggtgaaaggtagatacccttgacgatagattcaaaaaccgggtcaatccactgtcgtgacagagacctccataactctaccacttcctaatctcaactatgggtgatgaaacatagcagagcagagtttaagaaacaatctaccaaagccaataagcagacaagccaatgtcttggtcgagtttacaaatctctggaattcgtagatcagacatccatttgaacgtcttttggacgctggatgtctatcatcgaatctccacattagccaacgaaaactgcataggggccaagcgaatctagaagggttctaacctaatcttaaccacctaactaacctagagattaccctaatctaatccatcctcaagaaccctaatcactactcaagcaacattctcaagaacacaaacccagaaattactgaaatcataccaaaatgtagatctaaacaaagctaaacaactttacttaaacaactaaatgcaaaaacgaaatagattaagagtaattaagtattgaagattcataaacacaaagaaaaactaaaggataaaagatggatcctttggacaaatcccaaagtgatctatttctagtaaaatgttgaaaccctagattcactagaagacaagagaattgaggnnnnnnnnnnnnnnnnnnnnnnttagggatcgagtaaagagggtgctgcaaagtctgcgcctttgtgtctatgctccgagtgatcaattggtcgagtagatgcttcttcctctcctatctgtatgctcaaatgtctggttgagtggggaatgaggaggatccgaagacgctttgatagctcaacaagtcttgtagagttggtcacccttggtcgagtaaatgggtcgagtataggatcgagtaggaggggcgagtagatcgatatgttgctgcttctaaggctgccttgatccagtaagttggtcgagtgaattgctgcctcctttgtggctgcctgatcgactgaactggtcgagtagaattctctactgcttccttgttggttggataaagtagagtgtcgagtagaatccttgtaagctccttctacacctgaaaacactaaaacatgcaatatgtatgcaagatgatcctacatgcttaagtgtgtaaaataagctaaatgtgatgcaaaatgatatgaaacaatgagtgatcactaagctaaatgatgataaatacatgcctacaatgagtaaaatacagtgttatcacttgccctcaaagaaaacataaaagccgaacccgtggaagaggttttgaaaaacaaaggaactcccaacattctttagtcttttgccatgattattgtaaccaaatccatatgcctagcaagtctaatcagattctaaccaacatgtacttctccgcaagcttacacaatattctagattccatacctaagtttctcaactatatccaccagatcgcccatcccacttcttaaatcaaagataaagaatacttccgttttgaagagaagaatctcacaaagaatggaatgaatgaagattcaaacctcagacaattagaagtttagcgtatcaatgaaccgtctaagtattgtataaaaggactctagaaataacaagaagg

SEQ ID NO: 4073 - DNA, 1064 bp, Arabidopsis thaliana landsberg
gtaactgtcgttttgcttaataaatgatataattgcattttttgtcgaccaaaataaataattttttgtagtatcgtttgttttgcaagtcattcttttgaatattattgtatgcttatgatgagtagtcaattaaatatttatgattttctctttggattatagtgtaaaactgagctttctaatttttgcccatgggagcaatttgtttgtttacctaatattaggactttctactgttttctcttactttatactagaatttgtaaagatcttctacgttagatttgttttcttttgtgtgcaacacgttctattgtttaatatgaataatctacaatatgtacttttttcttggatcatcatatcgttctttgttttattgttcatttaagaaaggaaaaaagatataaaaaaatagatacccattttcaataaaactttttcttttttaattatgtgtacaatctctatttataacacactaaagagcttcattttgattatctcaaaaaaaaccacacagatccttaaatctccaaatttcctcctcagtcttatcattatagacaaaacccttttctttgtaaattttttcccaatctatggaagtgcctagtgaaaccacgaatttagccgatctccggcgaccattggtggttccggttgtctcggagcgtaaacctccggcagacgtcggactcggactagagagtgttttaacggagcgtagccttccgtaccggaggcgcgtgtacttaggggcatgcatagagatgaagctacttttccggttggcacttccggcgatacttgtctatttagtcaacagcggaatgggtatttccgctcggatcttcgccggacatctcggtaaaaatgagctcgccgccgcgtccatcggaaacagctgcttcagtctcgtctatggcctcatggtacgttttaatgtcaacgagttatcagacgcggtgatattattaaatattaatttctgatttttgcattcagtatttaatgggaaaggttcgtagcacgataactagtggagtcaaaaaaaaaaa

SEQ ID NO: 4074 - DNA, 379 bp, Arabidopsis thaliana landsberg
gaccactgagaatcacccaagctttcctttgctacagtctacgtagtgggacagggtggacttaacccaaatacagacacatctcttaacctacacccaccacaaaacacatcgacacctcggggatgggtagccataatcgtgccaataatcagacgggctgatgcctgcacattgctacatattttggggtagcaatggcttcttagtgagaacgaaagacttgcgttgacagctccaccattggactaccccaatgttagactgttattcacacatatacactgatatctaattgttccaaaaatgtcattcatttcatacaaagataacgttcagatttaagccaaagtttttaattgctgcaaaaaagcaactt

SEQ ID NO: 4075 - DNA, 5150 bp, Arabidopsis thaliana landsberg
cagaacagactccagggaacatgccagcacaaatgattgcgcgtacaagatgttcatcatgactcagcttactgcaaccttcaatgttatcaatcagagaagcctccttgaggagattgaagaattgtttccgcatagagtccatggccttaagagtttgagaagagagaaagttcttccagcaatagtcgtaaccagaatgtgttctttcagcatctttccaaccattgtatgctcgaaccaatgtcaaatgatcactgtaatcacggccagagaacttggaccttgctgtttctgctagctgcaataataggaatcaagtaaataactagaggcacttcttggctttctgctgacctccagtcaactgagaggagcatttcgccaaaagcaatatgaatgaatcacatgaatcattcactaataacttacatcttttttgtcaaatggcataaggaatgggtctctgacactaagaccagcaacaactgtcattactggatctagacagttgaagatagcccctaaaataagcatttttccaagtttaggctccacaggaagcattgacagatttttccctgcatagagcatattatgagttcctgccagaacttgagaaaacagatatttaagataacagaaaaatctcccatagaaacacacctaaaggtgttaaattttcatcgtcatcaagagccccaatgatttttagatactcaacagcattttggacctgaaaaccaacatgaccatcaagactaaatgttaaacccaaaggataacccaacgaggagagaacaaaaaaaatgtagcagaaatataccgataatgcttcaggaggttgcaatgccctggagaggaactccgaaatgcttccaagtcctaggcttttaatttgtaaacacagagactgcatcggggtccttagaagttccggctgattgtagtcagcaaaagcttcgtagacacatctaggatagaggtgataacattctccaggcataacacgaccagctcttcctcttctctgtaatagaggaaaagaaaaggcacaattatatacaactacacacgaatataaatcaaaatttactttgagcagtagtcattatgtctatctcttacttggcgagcagctgcctttgaaatccaagatggaagcagacaaggggtattgttaagcgcatcataagatgtttcttttgctttcccacaatcaatcacatatacaacatcattgatggtgatacttgtctcagccatattggtggccagtactattttcctaattccttctggaggtctatcaaaaatcagcctctgtagaaaataaaatgaaaacatcatcataaaaaatgacagcaagagcagaataagataaattttaaaattataacatgtgttgtacttgtatgcatagataggcaaataatggacactagatttacctgctcagagctggccatggatccatgacaggcaagtaacaaaactttgttcgggtctcctagaagagaatgagcttcaagctgattcttcaaggagtttatatcgtcccaaccggtcatgaataccaaaacagcaccaggtctctctcctttaacgatgtgacagagtacattttcaatgaggttaaagcctattgaatcaggactccagcatgacaaagaatctctagtacgaaagttgtatcctttgaagtctgcagcttcaagagcatcctgctcacacattcagaagaagaatacttttacgcaaataatctgagaagatacaatgtatgtagtgtaatataacataacttcttctgtacctctactgcagaggatattagggattttctttttttgaactgagcttgtttttgcatcttccatgtcttttcctcaccataatcatcaatttgattatatgttgtcagcctgtacccactcgtctcaagataatcctccaagaaatgggctcggacagggtatgtaaaaccctgtacatgaattttcactttagttcaaacactcttctaaatgagttacatttcaccggatatggagaaagaaaaatgttaagcaaaagaatctgcgtaagcataaacttactgggatatgcatggctggtgcaccaccaaaataagaagaaaagagctcagcgttcaaagtagcactcattaaaatcaactttaggtcaggtcgacgaggaagaagatctttcaggacaataagcaggaaatctgacagaaaagagaaagagtgtgttaatatgatactggcagttactgatggcatttattccctttagtaaattaccaaaatttaccttcattcattccacgttcatgaatctcatcaactacgacatgagtcacacctttcaggctacgatccacaagtaaccttctaagtaaaacaccagttgtacaaaaaagaagacgtgtatctctccctctcattccttcaagccgcactttgtagccaaccttccaagagaagagagtgcgaatcaacctcaataagttttgtcacattacagaacttccacttatgtcatagtgttgaaatcagatttgttcattccaataaatcaatataggtagattaaatattccagtgtcaaaaaaattcacaaaaactggtcacagagcgtaaaacttacagattctccaatttgttctccacgttctgcagcaactcgttcagaaacagaaatagccgatattcttctaggctgggtacatatgatgctgcatgtagctccacgggcagcctcgatctcagattctaatatgtactgaggaagctgtgttgttttaccacatccagtttctccagaaaccactacgacctgcaggaggcacacgaaggcacgcagggtgtcaaacagttagaaattagttgatataagtacatgaagtaaatggaagaattgcggttcacctggtttgctgcaatggctttcagtagtgcatctttctctttgtaagcaggaagggttttgcgaaaccctaccattttctggccttctggagaatcctgccaaagaagacagagatatatttaactaaatatgaagaaggaaaatgattgacagcataaatcataacaaggctacagcttctgagaaaccaaccacccattgctgttgcttgctcttcagttgtaagcttcttgggcggagtattctttccctagcaagactattttgcatcacggtctctggtgtctcatagtttccataaccgtttgctaaactttcactactattttgcctgggcatctccggaatcaatgtttttttctgatcgaggaaagaatgtagatgggcatctacttcgctttgtagaccaaaaggcaaaaccaccttttatattcaagacgccatgaaaatgaacaaagcataaaaacatgtaagaaccctaactatttaggaaacttaattagccagcttagcatcactaggtatctcttataagctccctatcccggtaaacaaaaggtagactcaaaagcatataaagaacactaagaatcactcaaatacctctctttgtgggcgtttatcatcaagatcaggtctataatttggcaaaggagctttactaatgacaacaatcttcgaatactgacggctgcaaacaacagaacatatctctataatcttccaaagagttaaatcaacctcaaggaaatactacacttggtaatataacaaaaatctacctgtgtaatcccatcctagttgccaaagcagagatatgatcaaaatcacgccgatcttttctctcccttgaaacaacttcttggtcttctttgttccggagaagcatagttagtttaaatctccattgatcaatgttatcaagagtcgaacccgcctaaaacacaattaacaaacgtcaaagacctcaactttgacaagtgttggagaaaccacaaaaacaccctttaagccaacttaccatttgctgagactgagaggacccaacatctctatccgactcatcacttgattcatagtcattgtaagcaatacgtccatagccagagttttgcctctgaaaatatggtaaattagctgctctccactctattccaagagtcgaagaagaagcatcaccacgagctgctttcacacacaagacccttgacctctgagaatgcgtaaccaatccacctgacctccggcaatgaagagaccttactacagaggaaggtctcaacaacaatttagggctccgatgaagctgaatggaattatgttgaataaacatggaggcagcaccgacgacggcgttaggtctgatatgtcctcggaaaattgcagagtaaagttgcatttttttcgagattagaacatctgaagatgctaaaagagtcgaactttccgaccaaagacccgttctttcttttgtctctgttcttctgtgaagtagaacagaaacaatgttatggtggaaaggtgaggtttttgtgaggctgcgtaggtgccacaaccctttcaaatgacggccacgacggggaagaagacgctgagagtttttcattgggcttctttcttgggccgaatagtattattgggctaactttttaatttggtttagtacacaaatttcatctgaaagtttgtcagtttcatgtccattagtctatttatagattctatctacagaagtagaatcggaattaagttaatcatttggataacattttgatacagtaaaattgcatgttcttagattagatatagcattaggaaacaaaacaaaaataaaactaccaagatcctttctttgacctgtagaaaaataaactttttatagcatattataaatcacaagggacaatattgatcatattacataacgaaagaacttcaattgtgaaaatttagagacaaagccatttctatcatcaagtacaaagatttgcaagatttgataagaaaatggactaattgtggtgctagttgtgaaaatgtttataaataacattacttacacgcgtttccgttattataacatgcaaccatatataggcatacaaacaacataagtgctttgtttcatgttgttttccaagacttttaaaagaaattatgatacaaagaactatctgttaagaggaggagatttttggctgtagaatcgagcaata

SEQ ID NO: 4076 - DNA, 1719 bp, Arabidopsis thaliana landsberg
acgtcactaccagcgactagttctacgctgttgctgctacttccgttaccgttaccgttgttgccaccgtcatagtgacaccgtttgtgtccacctaaggcttgaccagacgcaaacgacttgaaacagattgagcaagtgtgaatctttccgctttgactaacaccgttaccagtgttcacggtaacgttaataacaacggaaccgctgttactgtgactgttattagacagttcttggttaccggaagtgatactagtgttcgtcggtttccggtgactcgtcttgtgtccacctaaggcttggtatgacgaaaaggacttcccacagaccgtacacttgtaatctcggtgatcggacggtgacgcacgtgacggtagaggaggaagaggaggagattgtacggcggagccacgagcgagcatgaggagacaaagagcgagatactcttcttcagaaggaaggttcttgttcgtttcttgattctgatgaccgtgatcaaaacgttgacgttttgttcgttttcttttagcccattgctcgagattctcaggctccatttcttcacgataccggagaagaggccgagcggtggtggtagctgttggcaaccctatataacgtattgagaggaaactcttgacttgatataaattcgagataggacgttgaacaatatccataaagaacatgtgaaatgtagtaatgttcaatgtttagtagtccattgaccaaaaccgttggaagtaatcatatagtatcagctttctcctaaccgaccaaactcttaattaaggataccttatctttctccataatcatgtgaccctcattttgatgtgctctccttttgatttaatctaattattatgtttaccttttttcaattttatttcttcatttcaatactaaagttttacatttagataatttctcccagagatagcaagccgatactctaaagtctaaattaacaatttatcgtgcatagtgacttgcgaaaacaaaaattaacaaattttaagacctagctcgtattaaatcctattttctttcattttttggttaaatatttgacctttttctttaatcacacattacacagctttaatctgattacgtagccttgcaaattagggtgatggcgaattttaaatggtttcatatttaaatgtcttataaaatgtatgaattgcacattcatgcggatgagcccgagggtgacgtggcccaaagttatgttgaaaatactagtataaataagatatagtaaaacatatagtttaaaattgacattggatccttttgggtttcagtgttggggtctgtagaaagaattaaaggcagaagaaagtataaacaaatttgataggagtagttttgagttttttacagaattgcttggtattttttataaagtagatataatttgccaatacataaataaatttattagctaaaaaagaaaataaataaatattaaaataataataatttataaaaaagaagaatgttgcgtgcggtcccctttcgttccactagggcaaacgacgggttcacttgtttgatcggtctatcatttttccaaaatactctaccaattcaaatagtttctttcttttttggtaggtacaaacatttactgtattattattatcccatggcgataaatttgtagcaaggaaaacattgctaataacaagacttatcaaagaagga

SEQ ID NO: 4077 - DNA, 5394 bp, Arabidopsis thaliana landsberg
  unsure (1)..(5394): unsure at all n locations
ttgtgctcaccgtaagtctctctgctgattaaacattgtccatttgttttgtttctttgtgtgtaatctaagcaactaaggacagccaataagtggatcgatcaattatcaattagctcacttaactaaagtttcgaaagtgatgtttatagttcctactaagaacgatggtttttagatgtatctgttgcaacttttgttctctgaaacaacttcatagattcttgttttctgaaagatttcataattgtgttgctgatatactttttgatatgattgggaaaagggagggcttcccggtggcgagactcttaaaaactgtaaatctttagagaacatggtcaagaaacaagactctgatggccgacttaacgcagctatatgttgtgctcctgccttggctcttggtacttggggtctactagaaggcaagaaagtaagtcagaagtgatcagtatatttccaagggcgtttatttatctttttttcaggccttgtaatgtcttgttattacatggggtttcttgcaggcaacgggttaccctgtttttatggagaaacttgcggctacttgtgcaactgctgttgagtcaagagtgcaaattgatggaagaatagtgaccagtcgtggaccaggaaccaccattgaattctccatcacgcttatagagcagttgtttgggaaagaaaaagctgatgaagtctccagtatcttggtatgttttgtctctgcctcttttatcaaccgctgtggtacgtgttcatgtcacctcctcgtagacttacttgttatccttttgaaatcagctgcttcgtcctaaccctggtgaggagtttacttttactgagcttaaccaaacaaactggtcatttgaagatacaccacaggtaaatgttcagttgcctctccacttggcccttttaacatttttccaagacaggctttgtttgatccgttatacagattcctaggaacatgctgtgttgtaaagcttttgtctttcttgatcaatagtcttttatgagtcagagagataatgttttcccttttcagattctcgtacccattgcagaggagtcagaggaaattgaagctatagcgcttgtagatatcctgaggcgggcaaaagcaaatgtagtgattgctgcagttggtaacagtttggaagttgaaggatctcgcaaagctaagctagtagcagaagttcttcttgatgaggttgcagagaagtcgtttgatctgattgtgttacctgtgagtattgcttaacttccaaaatatgaatatactatttagtcttaaattaaattttaatattctatgatgacaaataaccaaaaacataatccaacttctttgatgaactacagggcggtcttaacggtgctcaaagattcgcaagctgcgagaagctagttaatatgttaaggaaacaggcagaagcaaacaaaccatatggaggaatctgcgcatcgcctgcttacgtcttcgagcctaatggtttactcaaggtgcataaatcaaacagtactagaattgtagtttcttgttctatcttttaagtcattaaactgagatataagagacatgttttgtatagggtaagaaggctactactcacccagtggtgagcgacaaactttcggacaagagtcacattgagcacagagtcgtggtagatggaaatgtcataacaagcagagctccagggactgcaatggagttttcacttgccattgtcgaaaagttttacgggcgagagaaagctcttcagctcggaaaggcaacacttgtgtgatttcaaacaatgaaagtatgagagtggcttgaataaaaagaaggctttgccttttagttatctctctccattagtaattacttactttatgatatatgacatatgagcttggcttagtgattggtgtgtaactttatgcctttataaatgaataaacgagatttttctatgtatgttgccgatattttctttaaacctctgcaagagctagagggtgtgctggagaaaaaaattattttatggagaaagatattttagtcacacattttcaccaaattgaccttacaataactctaaaatacgaatttgcccctatgtttagctttggaatatttcatatttgtaaaccatttaataatatgattattaccaatttagtgaaaataaaatcttcagtcttctcttcttgtataaaaatagcttttttatcatttgaaaacagagtaatgtcactaatttcttggcgaaaatgtgtttatttgtaacttaaggtaaaataggggcaattttgttgaatctgataagatcagggggtattaccgtagatttcgctgtccagttcagttatgaaatacctaaaatgccctcgactcataatctactattaaaccctcataaaacccttgatttcatttctagctcatctgttttcacactctctcctagggttttatctgcgaagcccaatctagagcttccatggcgacgcataccatttctcgatccattctttgccgaccggcgaaatctctttcgtttctgttcacgcgatcctttgcttcatctgctcctctcgccaaatctccggcgtcttctctgctcagccggtcccgtcctctggtcgccgctttttcctccgttttccgtggcggccttgtgtctgtcaaaggtctctcgacgcaggctacatcgtcttctctgaacgacccgaatcccaactggtcgaacaggccacctaaggagacgatcctgctcgatggttgcgatttcgagcactggcttgtcgtcgtggagccacctcagggtgagcctactagagatgaaatcattgatagctacatcaaaaccctagctcagattgttggcaggtaaatccccaattcaaaactctctctctctctctgtgtatgttcttctagggattttaggttaaataagtgagaaatccactactgtgtatgacggatctgtgtgtttacttggatcatttttggagctgtaacatgatatatctcgttttggacatttcagtgaagacgaagctaggatgaagatctactcggtttcaactaggtgctactatgcttttggagcacttgtgtcagaagatctttctcacaagttaaaaggttaactcttgcctttgttgggttttagttttcctcatttctgtgttataatctgccttctaactttcttctgtaactctccagagttgtcaaatgtgcgctgggttcttcctgactcttacctggatgtgaggaacaaagactatggaggtaggcttaagtgtattatctgtatcataacctgggtttgaaattggggtagttgctttgctcgtccattatacttttgctgggtttgaaattttcaagggaaactacctgttgctagtcttcgctctgtggactcgttacttgctccatgcttttgtgttagattgacacatggggcgacttctatttatagttaattaacattgtgggtgcatctgttagatttgatttagtgatatctattgtgagactggtgttgtagaagtcgcagtgatgttgctttggtgagagtttaaatctntctggtgatcctattagagagttagtntgatgcgtttttgtatatattgactttcaggggaacctttcatcgatgggaaggctgttccttatgatcctaagtaccacgaggagtggataaggaacaatgctagagcaaatgaaaggaacagacgcaatgaccgtcctcgcaacaatgatagaagcagaaactttgagaggagaagagagaacatggcaggaggccctcctcctcaacgtcctcccatgggaggccctcctcctcctccgcacatcggtggctctgcacctcctccgcctcatatgggtggctctgcacctcctccacctcacatggggcagaactatggatcaccaccaccaaacaacatgggaggaccaaggcatccaccaccttatggagcaccaccgcaaaacaacatgggaggaccgaggccacctcagaactatggaggaacaccacctcccaactatggaggagcaccaccagcaaacaacatgggaggagcaccaccaccaaactatggaggaggaccaccacctcaatatggagcagtaccaccacctcaatacggaggagcacccccacagaacaacaactaccagcagcagggtagtggaatgcagcagccacagtaccagaacaactacccacctaaccgggatggcagtgacaacccctaccagggttaaagcagttgaagcagtcgtgggtttcctttttaatcatgcattctgggctgtgtatagataatttgaggaagagagagtgcagtagcaagactttaaaactccttttatctcgagtgtttatcagtctgggattatgtgagagagaatagcctaagttactgtggcatggttagaacttttcactcttgcgtttctttttagtagtttatatcctaaatcgatctcaagttcttccttgtgatgcttgctactcttatgtccactcctggttctgcattaaacgggatttagtaacatgtctcccacaggctattgttttgtgtctttctttggcttcttcctagtcttaatttctgattccccaatcatgtttacatgggaatgggatactcaaatattataacaggaagaatgacaaatgtcatcaatatcatatttctttcgacaaacttgacagaacacacaatttgatgatgagagagagaagcgggtgtgaagtaacaagatgggctttgtgttctttatcccggcccatcattctaaatttcagcccaaaatggaaaatctcgtaaccgtataaagccctcgcttccctcatatgtttttccgccgtcacatattttcccctcttttttttcgtgtcagattcgctttctctacggctggactagaaggattagggatttaccggtgaaagaataactccagagataaatctgtaaccatggatatgatgaagaagcgtaagctcgatgagaacggtaacggactcaataccaacggtggcggaaccattggtccaactcgattgtcgccgcaagacgcgaggaagattatcgagcgattcaccactgatcagctgctcgacttattgccaaaggctatcgtacgccatcccgacgtgcttggatctgtcccgattaaccgcccgactctgatatctcgcagcggaagctattcatccgtggtctcgcggcggatactactcggaagggtccggttgccttttttccagttcgggagatctgaagtagatattgtgatccttgacaaggtcactgggaaatcgaaagggtatggtttcgtcacttttatgcacgttg

SEQ ID NO: 4078 - DNA, 4005 bp, Arabidopsis thaliana landsberg
agagaagatggtgaagaagcaagacactgatggacgacttatttctgctttctgttgtgcgccggcgttggcgtggggtacttggggactactagagggtaaaaaagtatgtgtgtagtgagtgatcagtatccaagaagttttcttttcttttgagtttgtattttggtgtataaatcacatacgttgcttgcaggctacatgttacccggtttttatggagaaactagcggcttgtgcgacagctgttgagtcaagagtggaaattgatgggaaaatagtgaccagtagagggcctggaactaccatggaattctctgtcacgcttgtggagcaacttcttgggaaagagaaagctgttgaagtctctggccccttggtatgtcttatccctgactcttctatcaaccttaatttggtctccaaataatcgacagatcttagaggccagtttctgttgagaagatggctctccgcaaagaaggatatatttagtagctgattcgaggggagcacttatttgatttaacactctttaaagcaccctagtattgttagttcatgtaaaaaaatacaaatacgttttttcgacctcactaatactgtgatttccttgaagcctaggcctgtggctgaatttttcagcattatttcccctgtccactgatcagtgactgttcttgtgagattacagacagttgaaagctatataggacactgaaaaatttaggtttccacaaagaaacaaccattccttggtagcataggctttattccatggtaacctcttagtctctattcttcccctttgcatatcaggtgatgcgtcccaaccctggtgatgagtatactattactgagcttaaccaagtcagctggtcattcgagggtaccccacaggtagctttcaattgcctgtctggcaaaatgaaaagaaaaaaaagactggcaaaacttttcacacttgctttactgagctcatgcgtctttcttaatcaatcttccgtacactgagagatcatgtttttccttttcagattcttgtacccattgcagatggctcggaggaaatggaagctgttgctatcattgatgtcctgaggcgggcaaaagcaaatgttgtcgtagctgcgcttggtaacagtttggaagtggtagcatctcggaaagtcaagctggtggcagatgtgcttctcgacgaggctgaaaagaattcgtacgatctgattgtgttgcctgtgagtgctaacttcttcaaattactaaagtttatagtgtcaagcaagttgaggccaacatgatgaacttctctttttatttacagggtggtctcggcggtgctgaagcatttgcaagttcggagaagctagtgaatatgttaaagaagcaggcggaatcaaacaaaccatatggagcaatttgtgcctctcctgctctggtgtttgagccacatggtttactcaaggtacgagagtaatcacaatagcacacacatttgcttagatgtgtaggatcattactatatatccgatggcatggagtattctgttatcaaaccgttatttttgcacttaaaactaagggaagggtcacaatttttaatggatttttttacagggtaagaaggcaacagcgtttccagcaatgtgcagcaaactgacggaccagagtcacatcgagcatcgagtcttggtggacggcaatctcataacgagcaggggtccaggaacctcattggagtttgcacttgcaattgtagagaagttttacgggcgcgagaaaggacttcagctctcaaaggcaacacttgtgtaaactcatgagtatcttaggtaagagtgactttaataagaaaaaggctttagtatcaaacgatcaatgagtgtaccgttgttgtggtgagctttgtactaagtgtgatgcttaaaactgtcttataaataaacgagtttactctgtttttatcagaaagtttttttgttactttacattgcgaattttagaatataagaaagtgctgaacaaaaagaaagaatatgagaaagtaaaattttttattatattacaaaacaaattgaattatatctgcagatcattgttattaacctagcttcttgttctgtaacatctgtaccataagatgaagaatccaaggactctgtacccgacgatgaaacttgccatgataccaagattgctccatttctgagactctttgaggtcttgttgttttaagaacacgtctcctcgatactcgttgatcatcaggcattcgaatggatacttgaagaggctgagataatgcatgaactcccagtaaacggggatcctgtcctttgcaatgaaatacccggagaagaggaagaaagatcccatgagacctgagattactgatgtccccattatgaagtttgggacaagagcactgaaacatgcgacaaaagagtttgacatcagaagaacaatccatatcaccaatgagaagtagaggaagccgtctagctctcttctgagaccgaccagccaataaaccggcgtagcaaagagcatgcttatgatcaacaagaagggaatgaatatgagagtatctgctaaaacgtaagacaaaactctgtaagcccttctcgatgtctctctcattaggattctcctgtcttgcaagaaaattggaagtccctctgttgtggaagatagcaggaaagtgaggataaaggcgaagaacccggttcgcaagactttcgcttctttcttttgatttcctacgttcaagtaaatcgaccccagtataagaccggcaatggaagcttgtaaggctctggttgtgaacaattgcttggttctgaagatgttcttgcaagatctttgcccgagtatctgcacttcctctaacactgagttgctgtgagaatcagattgatgaagctctcctcctgcactaatatagcaactcttccatgttttgctatgaccataacatgagatttctctgcaactctgggttctgatcggttcaagactccctgcaatatcaattgcatactccaagacatttacccgcctaggaatctggtgaccggagaacttaatcttctgatgaaggctataaactgatccgttttgaacaaccatcccgttagagagcaacactatccggtctatctgctcgagtatgcgaaaaccaggctggtgaatcgtcagaacaatggttttaccttgtttaatcgtcatatctttgagaagcgtcacaacttgaagagcggacgcagaatccaaaccagaggttggctcatcgatcaatataacatttggatcatgaacaagttcaactccaatagaaacccttcttctctctcctccagagattccagatcttgatccttgaccgatccttgaatccgcaacatgttctagaccaagctcttgaatcagcctcttcacctttgcagccgcgtctttcctctttgtcttcagcctcaagagtgcgctgtacgtcagtgtttcttgcaccgtaagaaacggaaacagagcatcttcttgtggcacaaaccctgaaaccctcctgtactcaggaccatccataggcctaccgttgacaagcacttgccctgaaactttcccatgagaaacttttccggctagaatctccagcaacgtggttttccctgctccgcttggacccgcgatcgcagtaatctccgcggatcttgcatcacaagaaacatcctttaagataaccttttcctccttctcactcaacaaaccacataaattagaaaactttggagtgtttccgcctattctatacgacagattcttggtttctaatctatatgagatttcccggccaccgggaataggagcttttaccggcaattccatctaagaaagaaagaaggaaaaagaaagcatcaaactttgagagatagagaaatcaacaaattgagcaaagagtgtgagattaagtgaagaataaatggtagagaagatgaactaacacagggaggt

SEQ ID NO: 4079 - DNA, 5402 bp, Arabidopsis thaliana landsberg
  unsure (1)..(5402): unsure at all n locations
cctatattttttaatttctgtatgctaattccaccaaagtacacatttttacaagatacactcttctataaaacatttatttattttatagtagtacgacaatttttgatacattttatttctaagaattctttaaaaacggttcattgcatttttttgcgttaattgtatggacatatctacatatataagctatttttagtgtttttgtgtgcaagcatataattattctcaaccattttttttaatttaatcctattacatttcccaaacacatttttgcttattcttattctctttaaaacacatatatttccaaatattacctctaacctatttcgattattgtaattcctattgcaaaacacatttgaaaattcttaaagttggccaaaacaattattaaaaattataatatttaaatttaccattaaatctggataaaatgtatatattctttttatataagaaaagcttacaatagtatttatctcgtgcattagcatgggatggatgtataaaacattagtttttttcttcagaaaggctatcctcaaaaatagatctcaaaaagggttaagaatcttattttgcacaattaactcttaattatttcaattatgatattataatatgtcaattacaatactaaaagtaaaaaaaagaaagaattgcgatccttatattttataaaatagacgatttggttaattaataagttatgggtgttttgtagtttgcttttcaaagagaattcatctgcaaaagcctcatttgactctttcaaaccagttttattaatttctagtcaacacactttttaaaaaaaaaaaatcgatatgtctctttcgttgagaaaccaatttttggcatagtatttcaaagtctttcattgattttaagtatctttcaaaccgatccttccactgtatatatataacaggaaaaaagtaagttaaagaatcacataaagtctcctcagttttggggcgattatgatgatgaaaactaataacacctttttgagttactttgtttgcggttttttgttgatgggggttggtttaggacaaaaccaaacaagtgaaatcaaagtaggagtagttcttgatctcaatacaacattttccaagatctgcctcacttctataaagatggccgtgtccgatttctacgcggatcatccaaattacctcacaagacttacgcttcacgttagagattccatggaagatactgttcaggcttcagctgcaggttcgttacttctctatgtcttgcttcagcttcccgtcattttgatttattacttattagttgcggttgaatcaaacatattacgtatagacatggtttagctaattactattttattgaatgtgaccaatattttagatcagtattaaaaatcaaagtatcatatggggggtatatgctaagagtcttggaaacgatttatcttttagactatacttcaaaaaccaagtgtattcttatgtggtctaatgtctatggtaagagcaatctcttgatagagaagtccaatttttttctcttctagaaattcatggtgacggttgtatggtcgcagaaatcctgattactattagtctcgttaattatatttaactcatgagtcttaatatattagatgaatagtcgaaaactattggtgacatgtcttatgatacctgtacaattttaactatttatgtaaattaatattgtcttattactttgcaactagagctcttttggactcgacaaacatggcttagccttataagttgtaactcttccattgaaaatggaagatattatatccaaaaacagaggatatttaacctttcttcttttctttatgttgcttgtggtgcaagcagccttggacctaatcaaaaccgagcaagtgagcgccatcatcggaccaataaactctatgcaagcagattttatgatcaaactggccaacaaaactcaagtaccgaccatcacattctctgcaacaagccctcttttgacatccatcaaaagcccttacttcgtcagagccactatcgacgactcatcccaggtcagggccattgcgtccattttcaaattctttaggtggagaagggtcgtcgcaatttatgtggacaacgagtttggtgaaggattcatgcctttcttgtttgacgctttacaagacgtggaagtcaagagaagtgtgatccctccggaggctatcgatgatgagattcagaaagaacttcgtaagctcatggagaggcaagcgagagtatttgttgtccacatggaatcaagtctcgctttacgggtttttcagatagctagggatatcgggatgatggaggaagggtatgtatggttaatgaccaatggaatgacgcatatgatgagacatataaacaatggtcgtagcttaaatactatagagggcgtgttaggtgtgaggagccatgtccccaaatcgaaagagctcggagatttccgtttgagatggaaaagaacatttgagaaggagaatccatcgatgagagatgatctaaacgtttttgcattatgggcatatgattcaattactgcattggctaaggctgtggagaaagccaacacaaagagcttatggtatgataatgggagcaccttgtcaaaaaataggacagatttggggaacgtaggggtctctctctatggtccaagtcttcaaaaggctttctcggaggtaagattcaatggtttggcaggagagtttaaactcatagacgggcagctccagtcaccaaagtttgagatcataaattttgtcggaaatgaagagaggattattggattttggacaccaagagatggactcatggatgcaacaagttcaaacaaaaaaacgttggggccagtgatatggccagggaagtcaaaaattgttccaaaaggatgggagattccagggaagaagcttagagtgggcgttccaatgaagaaaggcttctttgattttgttaaggtaaccataaatccgatcactaacaaaaagaccccaaccggttatgccatagaaatctttgaagctgctcttaaggaattgccatatttagtcattcctgagtacgtcagttttgagtctccaaataactacaacaatttggtctaccaagtatatgacaaggttagtttctttttttctacttacaaacaaaaaattctaaacattcacaaaatcatattgtaaaccatttccctaattttatgtcttttagatgttagatttataacacattatactaatatatgaagcagacatgggatgcagttgttggagatataaccatcacagcgaacagatctttgtacgctgacttcacgttaccgttcacagagtcaggagtgtctatgatggtgccggtgagagataatgagaataaggacacatgggtgttcctcgaaccttggagcttagagctatgggtcaccaccggttgtttgttcgtcttcattggttttgttgtgtnnnnnnnnnnnnnnnnnnnnnnnnnnnnnnnnnnnnnnnngccttagtaccagatcggcactagtttatggttcttcttctccaccatggatttttgcccaccgtaagttcttacaccaatcaagaatctaataatgataaatatttacgttttgtagcttttatctccaaacataattacattgtcaatattttttagatatctcaacttattttatgattgtaatgatacagtcacaacttgtgcatgtgcatataggtcagaatgtagtgagcaattcagcaaggtctgtggtggttgtctggtgttctgtagtgcttgttctcactcagagctacacagcgagtctcacctctttcctcacggtacacagtttgcaacccacggtcacaaatgtcaacgatctcatcaaaaataggcattgtgtagggtaccaaggtggtgctttcgttacagatattctattagggctaggatttcatgaagatcagctaaagccttttgattctgccaaagatgccgacgaccttttgtccaagggcaaatcaaaaggtatcgcagcagctttcgacgaagttgcttaccttaaggctatcctttctcaatcctgctctaaatatgtcatggttgaacctacatttaagactggtggttttggctttgtaagtaccttctgtttcctttctatgtatttttacaaaataaggggacaaataacacatgttttgtttccatgatcaatgtgtaggcattcccgaagaattcacctttgacgggagaattctcaagggctatcttgaatctgacacaaaacaatgtaacgcaacaaatcgaggacagatggttcccgaaaaagaatgattgtcctgatccaatgaccgctctttcgtccaaccgtctcaacctcagtagcttcttgggtctatttctaatagcaggcactgctatatctttttcattactcgtcttcgtggctcttttcttgtacgaacataggcacactctaggtgatgattccgaggattccttgtggagaaagctaaagttcttgttcaaaatcttcgatgagaaagacatgaattcgcatactttcaagaacagtgccattcataatataagttcacctatgactcacaagactccgagcccttcaactgtgcaaatcacaccatggccacaaagcccatcacaaaacagagagtttgagctaagaagagtgtcatttagcccgagcgaagaacgcttcactacgcaaccgataatacatcatgaagatggagaatctgatattgaatgtcgagttgaacaatagagatagatgttttacaaaactacattaagaagttatagatgattatttaccaaaaaaaagttatagattcttccatgaaaattaatacgattttatttattaaattgttattatagatttatatagaattcatctttcagtgcttgcctactcaatatttgaaagaagatacatcaaacgcacttttattaattaaagtttgtgaagcaagtaacatcagaacagagatgtctacaaataaaagtaagaacatttatattcttataacaatatacataagacttaatatcaaacccaaaaagaaacagaaaaagaaaaaagactgacgacgataacttgagaaaatttcatcattatgcgatcaccgaccaaagatgaatagatgattatacgaataatattaagacttttaaaaaacgaagggaagtttcttaaggaagaggaaacgttgaagtgtgaatagctgaggagttccagcgaagcggctactgcattttgcagtgatctgaagttcgtatatgcgtacgtggatttctagggatgtcacggactaagttatttttattttaatcttcaaa

SEQ ID NO: 4080 - DNA, 561 bp, Arabidopsis thaliana landsberg
ataaacattggagaaaaaaaaacaactattgtttgtttcgtatataacaagagacaatctacggtcctcggaacatagccggaggcggtggagaattattatccttctgcgtcacctggagtacggaagcaaccgtcccaatcaaagtcaacacgaggataacggcggcggcaatggtggcagttccggtccaaagatctttaaagtaaactcgccggagtgtggctatggatctattgcgacggctttcgtagtgtttgttgagtctatcggctataccgtaatagtgagatccaaaatccacaagccctaaacacagcttgtttaccatttccgccaccgatgcttgatgtcctaaccagttctttataactccttgtaacggaaaatgtgaagatatgttaattaggaatctcataaatttgtctgactaataacttaatctttaaaaccaagatatatattttgtatagagtttttacctttcttgacgagcaagtcaacgtcttggtcggtgtcgataagaaatccaagaaagctatgtagttcaagggaccgagc

SEQ ID NO: 4081 - DNA, 1636 bp, Arabidopsis thaliana landsberg
  unsure (1)..(1636): unsure at all n locations
tgctcagcatatcccacaaaaccaccttctgtattggccacgagcccatctatcttttgacgaatttcggcaccagtcatcgttgcaggtgggtggtctgtcactacgacaccttttgtaaagttcttgatgtctaggcggaatggatggtcaggagggagaaattgtcgatgtttatcgaaggatgaatatttgccacccttcttcaaccaaatgaacctgagagcttccttgcaaactgggcatgagaacttaccgtgaacacaccaggcgcagaatagcccatacgccggtaagtcatgcatggagtactggtaccaaacatgcattctgaagtttgtcttcatagcttggtcatacgtccataccccttcctcccaggcacgtaccaattcatcaatcaaaggctccatgtacacgcccattttattccccgagtgtccgggaattatcaacgacacgaatatattctgcctttgaaagcacatgtcgggggggagattgattgggataacaaacacgggccaacatgtgtacgagcaacgctcattccataggaattgaatccatctttggccagcgcaacacgtacattgcgagcctcttcggctttctcacggtgaatgacatcaaagtgtttccatgcctcacaatcagatgtgtgtaccatcttatcaggattgtatcgttttctatttttgtgccatgtcatctgtttcgcggattcctcggtcatctatagacgctagatcctcggtatgaacggaaggtggtgtaggattgtcaaggggatgtcgagctgcctcttctgtccatcaccagagtctacctccatgaacctaaacgatttacacttcggacaatactttgcctccgcgtattatttcctaaataggacgcagccttcggacaagcatgtatctgctcatacgtcatcttgagtgcacgaaggagtttctttgcctcgtacatgctctttggcagaacgtgatctccggaagcagactgccaataactgtcaacaaaccaacgaaggcgtctcgactcatgctatactgcgacttgaacgccattatacgcccaatggcatccagttgagaaacctttgtctggccgtgaaggagcttctgtgccgcgtcgaacatgtcgtagaacgcctttgcagtcggctctgactcgtcatcaatacatcctcccgtgtactgtacctcctgatagtcgttcaacatatctgctaccccacatccgcgtcatagtcctcgacacgttgtctcaacacctcctctctcgtacgatgcgcttcaccatgaaatatccaccgagatatannnnnnnnnnnnnnnnnnnnnccaaatatgttctaccatgaccttcattggttatcttatccgattgtcacatttgccgcacgggcatgggactagcttcgcccctttagcagcttcgctatatgctcgttccacgagatcatcggtctgtctaatccattcagtggtagcatcgatccttcctctacggcccgtgtacatccactcacggtcctccatcctctaacagaagcctagcaacaggcaatttcgacagcacctcactgcacggagaggtcttcaaagtcctagaaataaaactctcagcc

SEQ ID NO: 4082 - DNA, 5677 bp, Arabidopsis thaliana landsberg
tccgtaaagccaatacacctttcaactgcagcttcaagaagaacaacaacttggggaatagactcttccatcctacgcactgtttcactgagttcaattccttgagccccaacaccacgagtaacagcccctctcagatccaccactgcaatctcagaggataaaatagcacgttccatcttcccatacctaaagcatgatcaaaccttatgtcacaaacagccttgaagaaccacgacccaaaaaagtttcatcaaaaaaatgggacaatccataaatactagaaatggatacaagacatgggggaagagaagtacacaacatgaaaacttacttttgcttaaacgattcaaagggtgagtacacggccttcagcgtatctattaagatcctaagttcagattccgcaaacaggtgctgaatatttcttgcaaaggaaccagttacgttgtgcagttcaatcagagcctcaagatgcttggtctgaatattaatacccttgggcaagtctccagataatagatccatcacacctgttcaaggaaaacatcagaattgtcagtattctcctaaatacacaaaatacagatataagtcaattgaagataatcgtgcattgtctggaaaatttccagtcactaaatgaaaaatgtaacaaataagttgttgttcaaacttcctgcaagtctctcttgcatattgacagattcatgacatcggccactatgcacaaaaattacaaacttaacaagaacagccaaaaactttagctcatgtaaaggcagaaaaaagtgatactcttcttacatctatctacccaaacatgaggatggtagagtagaaccactaaagaagcaacgcaatcccaattcagctgggtaaaaagactagactaagaaggaaacctaataatcaaactgtactgacatcatatctaacctttggcgagtgcttttgtttcaggaacagcatctccagttgcaaggttaagacgagaaacaaaactagcccccagtactcccatggtctcaaccaacagctttgggacgagagtcatgtagtcatcagggaaggcaaccatacacctaaacaatcatgaaagcaaaaacgtacaacagtgattgatacttaaagctgcaatcacctaaagatctgacatactgtcactggaagggcccggaaaatatatacagtttactgtaaataaaagtaaaacatttaccatttccactcttgctcaagatagagtagcaactcgtcgtaaaagcttgtcagccaactggcaaatgatgtctgagatgatgtcgactgaaactcatcgccgctagacaacctttgactttcacttctctcattggcaagcttgtttgccctttgctttgtgtcaaaatcttcccagagttgtttaatcggctttagacggacttttgaatattgcaactccagagacttgaatctcccaatccggatgagaattactcgcaaatcttgggcgacatcaacctgccaaatttggggaaaggcttttcagtccaataatggcaacagagacattacaacctaaagtagttgggttctctagatatacaggttccaaccttgtgatatgttaatgcatcagtaagacgtggctgcaccatcgcctccagcctatcttccaatacctctagttgctttcttacattagcaaattctgcaacctgttgacaaaaattggactttaagtggtgacggaaaaagacttaaatcctcagagtactgaagctgacattaaactacctctccaacagcagacaggcaatttcgcatgctagcaagagtttctgcagcacgaggaagatcgccactagcaaatacatcctcaaccgtcgagcttaactgagttaaccctgcagcatcctgtacatataccaaaaagaagagaatcaattgcagatctacccccaagtgtccacataatggatcacaaaatcactatgaatactaacctgtagtgttttgtaggcagcctccattctctgtttgacattgtccactctagcaagcgcagctatacaatctggtgaagaaccctctgcctgcagagtaccgaattcgataagagcacaagtttcaggaatttgatataatctaattttcgagaagagatccaaacaaaatctcaggaatcagcacaaatgcgtaccttcttgagcttctggaggattccagcaacagaaccacgcagagacacagcatcatcacggagacgtaacacgtctcgtgtggcacgaggaacacggaggagagcaccaccgctctgctcttcaagagaagctccgatctcctcggaggcaatctgaagcttcatttccagatccacaagatgtttctcgagtgaatcctgtgggtgacgcgcctggcacgacgagttaacccatcgcttcgcatcgaacttctcatctgagaatggacctagatccagcatcatccttgatccgatcacccgatttaccttagattctcttcagcttcgacgatgatgatgttgaagagaagaagatcctctgatttcgcagatacactgaagaagaaactaaaccaaatcgatctaaaccgactttcaaattcgactttaaaaccaaaccaaagtaaacggaagataaatttacaaatctgggccccaaagtgatgggccgtcacggaaaaagttttcttctttctttttctttatttttctttattttacttggagaccacgcagttctagaaccatccttaagcgactctctagcctctagcagcttcttctactctctgttctatataaacctttctctaacagcttttttttcgttcaaagagtataaaaaatatctcatcgagcttgaaaataattaatcacttgctaattctaagcttcttctctttccaaaaatggcgtcatcatcggctttagctctcaggagacttctctcttcttccaccgtcgccgtccctcgcgccttaagagccgttcgtccggtgtctgcttcttctcgcctcttcaataccaacgccgccggaaactatgaagacggtgtcgataggaaccatcactcaaaccgacatgtttctcgccacggcggcgatttcttctcaggtaaatccatggttcctccgtccaatttcgctatagattttcccaatctgatacatgtttgtgatttatgtatagagtacatctaactttgttttggagatctgttgaatctgaaaatttggttgttttttcaaacagatatactcgatccgtttactccaacgagaagcttgagccagatgctgaatttcatggaccaggtaagcgaaatccctttggtatcagctactcgtggaatgggagcttctggagttagacgtggttggaacgtgaaagagaaagacgacgcgttgcatctaaggatagatatgccgggactaagcagagaggatgtgaaattggctttggaacagaacacattggtgattagaggagaagggcaaacagaggagggagaagatgtttctggagatggacggaggtttacgagtaggattgaattaccggagaaagtatacaagactgatgagattaaggcggaaatgaagaatggtgtattgaaagtggtgattccaaagattaaagaggatgagcgtaacaatattcgtcacataaacgttgactagagtgttttattttggattgtttgagatggaatggaagtaagtgagtgaatttgtgaactttaaggtgtcctttggtgaatcaaggagaatgacatttcccacggtcctatgtgttcgggattttgacttttttcgttacatcaatgatctatgtacgtttgactactttcatatcataggttcggattttgtttcccaaattcttgatatcggattctggatatgaatatcgtagcaactatgatctaggtgaagttatttggatattatttatggagaaaaagagtctgctaggacgattttctatcattatacctatggactatggtggtgttatcaaacatgctggacagagttatgatcaacgatacattcgatgctcattctcgatgttcaaactcggttttataaggggatgatacatcaaattgataccaagtaactgattttgaatgtgctggaaatgttgatataggtctcagcaaccagaagaaggttgtgggacaagactattagagaattttgctaccgtttttttttcacctctgtttggcaaagcgcgctctttatagctttacttctttggaaccacttcggtgaccatagaactcgttcgtgtcggcatcgtcaaatttaagtaactttttatttaccgcatggtttattattttgagtttttttcttccgcattttatattcttcatttttccttgtccatcgagaaagagagacaaaaagaggacgcaattgccggtgctgaggagaattttccaatcgcgaactcaggttttgatccatttcgctctctgcagaatccaccattatcttcatattttcttctattgacctcaatctttcagctcatctctctcctttggttaattgaatttcccagtttcttcaatttttcttatttaatacatatctctctcaattgcagtatcctatgaacttcgtgatcatggttttgaattttacttgcttcgattggcctacgttataaaaaaattgaaactttttaactcaattctctaacttacataagcttttggtttgcttagcttatgcaaaatcatgttgatgcaggggacgtcatgctaaatgagaatctgtgggttaattcggagtgagaaggctataatagtttctaatggggataacatatttgcacatttccgtggcaacaacagctttgagctttgtgggtttacaagtctggacggagttgtctcttgatagacttagagctgatgggataatcaccaagaacatttctttagggaattctgagaatacccttgagcttcttctgagttctcacactacaattgcattgctggcaagttttgttctcaatatctacattcttcttgttctttctctcaaggtaagagtggtcttttacttccgaggttaagtttaagcaatattcgtcggctagctttattcttacgtagaatagatatacatcttttgaatggttctttcctttagatggaattcaatgtaaagctcgtagtttggctattagaaaatacatgaattataagtttgcacctgcgggttaagagttgtggtgtaagaaccaagtatttctgacctgaaggatttaaaaactcttggttttagatagttataaggcttccgtgaatgcaaataccatgctatttgttgccttaagggtctgcacatacttgtagggtaataatagactagctgttttgggaaatgtctttcaatcattgtgtgaggatgtgataactcttaatattccctgcagactctgttttttggagatctatatgccattgaaactagaaaactggtggaaaggcttgccaattacatcatttacaaggtagttttttgtactttgatgaaagacagtagggtgcaacggaaaccaacccacactttctgtcacttatatagttttatgatatctgggatattctattatctcctttactgaatatattgcaaaaaagga

SEQ ID NO: 4083 - DNA, 2401 bp, Arabidopsis thaliana landsberg
  unsure (1)..(2401): unsure at all n locations
ttagtaaagtttaaaactaacatttaagttgagggagacgggtgtgacaaagctcattttattctgatgcatacaacttttttgttattattctgatgtatacatacgtacacaaacacatataagatatattcatttgtatagttttctgattatattctcccatacaaggtgaggtaatcatctagtattcatgttctttggcaatcattcattgcaatgacaaaattttttgtaagagtattgatcaggtcatacgaaaaagctccttttattctgatgcagacaacttttttttcgtattctgatgcatacatacgtacacaaacacatacaaacatgatcagtgatgaaacatagataaagttttttatgataaaaatgaagatggccaattgctacattcataataacaggtgcacgtacggaatccatatagtcccacgcaacgaccataatcatcaggcccgacgtatgacttcctacagtacgctttgcaattatcacatggtacacccccgttctcgtgttggcacatataagaaccttatataaacccacggaagaaaagaacaaaaatgtaaatgtgaatttgttgttagacattttacaatatatgagatcttgtgtgcacacacattgtcaagctctaattacctctaaatgtgcttttaagttaacaagtttaatagcgtacctattgttggagagaaaacactgaaaacaattgcaaaaatgaaagcaagcgtcaccatttccttggccatatcttagtttatttcttgcttgatcttgttgataccaatcaactctcggagggaatttataaggttaacttgtgaaagaaaaatgtggacacatatagaaagaaaaaaaatagaagataagagagaatcacagaggctacaagtgtatggtgtagcttccgtagagtatctcttattgctcttaattcttacatcacaaaagagttggttactttagttaggtacttgaaaatctgcacgttgtgtctgtaataaaattataatgaaatttattcacttcatagaatcattacctgattttagcgagtagctcttgtttttgtgacatacttcacaaagttggagaatacttcatccgtataaacttttgtgtcatcaactactaacacaagcatagagaattacatttttagtttcataccaattaaaatatggcaacaccctcatttattatcaaaagagccttttcttttagacacatataaaaggcctgcggtttttgtccaacacaaggccacaagtgtatagtgtagtattctttctgcatcacacaaaagttagttacttggcactatccacaccttttgtttgtgtcatcaatcaattactttaaacacaagcatatgaaattacagttatagttgtataccaattagaacacgacaacagtcacgtgtacattacaaagattatttatgtatcttgtagacaaacttaaaaccaaaaagaacataaattggccaaaaccatcaaagttctcattcaatagttcaaagtatgtaaatgaagtataaaatcctaaatcgctctagaaccatgtggaactagaggattccacacatgtttatggcaagttatcacccacaaaagggtaatatgagtccatacattgatggtcattcatctgattcaatcataaattttacacaatcaatttgtcggtagtctccttttggtcatatcctnnnnnnnnnnnnnnnnnnnnnnnnnnnnnnnnnnnnnnnnnnnnnnnnnnnnnatcatagcctgtgaggtcaaagtcagaagccacaaaagaatcgatttgtttcttctccgggtttatcttcaatacctgcagtagtgagcccatgacgacaaacaaaaacacggtaaggataggtgaatatgcattcctcgatgatcattgtcggcgatatacttacaggaaagggttttggaggattcagaagttgctcttgaagaggcctcacgtgagttttgtacacatgagcatccccaagaacatggataaaatcaccaggaacaagatcacacacatgagccagcatgcaagtaagaagagagtaagaagcaatgttaaacggcacaccaaatgtatagtgaatttatagcaatacatatattgaaaaaatatcgtgtttcttatagtcatggcacatattgtaaatctatctctaatgtgtagatatgtttatcccgttaatactatgtatataaaaattaatcaataagaatatgtagactaaaataaaatgtgcttttaagtaatagtttatagcgacgatattgtggagagaaaacataaaacaatgccaaatgccagcaggtcacctttcttgaaaatataaaaaatttgtaccatgttatacgat

SEQ ID NO: 4084 - DNA, 3452 bp, Arabidopsis thaliana landsberg
gaatagattttatgggtttttttatgccaactacatcatatattttagttattagaaacagattaaatttacttaacgtgcataaaaatttatcgaaccaagtagagctatctagaagcgtattaaaataagtttaagtggttctcttctgctattgctaatttacacacggcatggacaaaatcaaagttgcttccttcgaaagaaacaatctcttcacaatctttttcggcttgaagttgcgttaaaagtaccaacatgatacttttctattgattatatctactcgaaatggttatgacaaattatattttatatgttaatttgtctcttcactgcttatccgttcgtcaaaacgggtatagagttaatgtaggaagataattcttcagaagaaaaaaaaattgagttcacacatttgatgatactacattacaggctattggatcaataacagtagactctttcatttacttcttttttctttattgtaaattacacattcttatacaggagaggtggcagcagccaaaagagcagctgcaaagagtggttactctccctcgagattggagccaaggtcagactgcaacaagatatctccagaccaccagggcatcatcaccttatgtaaatatccgaacttattttcgcaagagagcaatgaacagaagctatacactagagcctcttcttctctatagcaaaaagtgatacacagtgccttatatctacagcgggtgaagcttggaatgttgggtggtgtgtaaaacttacggataaggatatgtccccaatcattaatctatacctaaggttgaaatggaagtgcttagtatattttacacaaactatcatcacatctggagaagattgttcacggtaacagcaacagagtttgttctctgcaggtcctgcaagaaattgaaacataacaggttcaagtatcaagtcacgtgaatcttaaaactgaactatccatagcttaaggaccagtctagtgaatatagagaccagttcaggcaaattgaccacatacataaactgataaaattcggcttcaggtatgaatatatgcaaaaaatagttccttccagtcaatgcagaagacaatctaaatgagccaccaactcaactcaaccatgtatgcacatcccatcaaagcttacagataatccaatatgcacttaaaatttacctggaaaataatttcatcgggcacgtgtggcatgacttccctcactgtctcggccatagctagtatatttgctaagctttcatttgtcgtgtttgatacagttctcagatgcagaccacctgtccttccaccattaccaggaggtacagttgtagaagaagtggatgcttgtgaagggttcatcggccatagactccaagcagcatcgtcaagtgcagtttgagcatagctttcgccaacagatgcaagatgcctcatcatcatctgaacccgcccaagtccaactgtcctggaagtggtagaaggaccagcgacatcagaaccctgacttgaccatgtctgcagccaacttggatccaatcctaaattcctattttgtgaaagaaagggatgagaacttatacaatccagtaaaataaatccaagaaatatgcacaaatagtggtcgtcagaaaccaaatataacttgctattcaaaacattttaaaataacgttactttaaggcagtgcaaatttagtatctcagtaccaagatcaagggagtcgcaggaaaagaatcatgaagttctaaataaattgttactttggtgtagttaataagaaaatcaagaacgaagaatgaactgaacctcgaagtatcattttcgacagaatctggcacctcagcaggaaataatccagtggctagtgcatgtacaggattgttttgtctttcaagctgacgggctaactgctcatcacttgagacttccactgtgcgagggttcacctcattttcagttctaccaacgaaaagaggcttacgacatgtaggacaagaataaacctcatttagaccttgatccaacctgcaggaatcaaaacatcatcaggatcaccagtgtgagtcataaagacacgaggctgtcgatatttagctaagcgcaccaggatcgcaggcatccaagatggaaaaggtggttgcagtgaagccttttagccttagccataggttcctgccaattataattgtattttaagagtttgagattgaaagcttataagaaaatgactatagcagaagcgtacccgacatatagcacattcatcatcatatgcccttaactcttcagaagttgcatcagggagggctgcatggagagcacccagagctattcttagtttaatgtatccttttattcgtttcaaaattgcacttagcaatgcctgccaaaccaaacagaaaaccaggtaaaaatacaacaattcaatgctgtgcctagtatcaagtaaccgggagagtgacactgttttaaagaaagccaattaacagacatacacgtatgttgagaaacaaaactgcatccaccagatgaaaggcaatgccatgcagccaccaaatgtgcaaataatgacctagtgccattaccaaagtagccatgtccaggaagaaaccaaggttacggttgaggaggcctttccattccaacagtgagcctatccaaagataagagtttaacttgagatttggagttccaataaaccaaaaatgtccacaagaatgcattttcgggctctaatagaaaaacaaagcataacaccagaaaagaaacgacctgctgtcatagaatcaataaacttagatctttggcagtctgagttcttaactgctaagtggttaatccacatatctagcagctgaaacccatgaattaacagcgcctgcaaaaagttccgatgagctctatattttgctgactatggctacgaaagaaagacaacgagtaggacgaagaagaaaactgttatcaattaagtacctgcaaggtctcaaaagctatactgcatggctcaaaaagtaacaacagatacacagcggaaccaattgtattgtatgtcataagggaaagttttatcctgcaagattggagaaaagtaaatcctgttactcagcatatcatctagacatgcgtgaaactggttactaaaacgttactacacaaagagatcaaacgagttttctaactggaattcagtccacaaaacataatgaactcagacacaaaaccttcctcgctctacggcatccacattttcactcagaagtttttggctttactttcgccttgacaatgcatagatgaatttcaggataacaactctcacagtaaagcataaacataaaaagcaagctatgcactctctctatgttgttgaagaactaaaagttgttcttaacggactggggtaaatcagagaacatcgctctttcct

SEQ ID NO: 4085 - DNA, 1885 bp, Arabidopsis thaliana landsberg
  unsure (1)..(1885): unsure at all n locations
tgtttgaagtaaaagaaccctaaatactttgacaagataaagaacacaacttcaataaacatattttattagaacaactttcaaactgatcaatcacagataagtttggacagtattatgcaacatcaacaacctgatttgctactgtcagaacctaaaaactacccagctcacaaacacagcaacagccgtgtgctctctttgttcactcaccaatgaaacccacaagaacaagttctacttaacttttcttctcttccacttttctcaagtaaagtggctaaccctaataagagatcaaaacttctcttatgtagtttctcggaaaagacaggatgctctactttatcnnnnnnnnnnnnnnnnnnnnnnnnnnnnnnatcttgacactaggcacacgtcctatgtctgacgcatttgtctcctttgtctaaagtgatacgcctttccttcactccaatcaacatgccacgctcgcaaaagcaactgctactttcccgcttcctctgttcctctgttctgctctgcgttgtttcagacacgcttgtagaacttcagacactctgtttcttcaatcaccccctttttctctgagtgtgacacctcaagtaatctgcaaaagagtagagaccacacatacaagccaagcaatattccataccaaacatagaaaccaaaggctcaagtttaagcaactactgccaaaagacataaccatttaaacatgaaacataaataagttcttggttccatacataagaccaatcattaaacacacagaagatccgataagaagccgataagaaacaagatcaaggagttttcacaaacacacaaaaacgaccaggactaagcaattaagtgctgtcatctaactcatcatcatcgtcctcttcctccacattctcatctcccacatcatccggaacagagtacgacacatcagaatactctccccctgcttgagtgcacactcatataaaaaaccattctcaaaagataacagagtgtaagttgaatgagagaggcttacctgccagacgaacacgcatcattgtgagagatgcaatgagggtctccagagctgcatccaaggttggactgtcagactgtagcacaggaacaggtttcgcttacatggtgaacttcaatggtgcagacgaagtggtatctccttcatcagagcggacaatgcgctgaaagcgcagcatttgatcaatcaggttcggaagcacaagacgaagagtagaggaggggttcgcatctacattcgaacacgcccaaattttcatcaaagatgagattgccgaagttgaacggtagagctttggccaccatgtaaagcagagtcatcctctccggcttcagaacagaacggttcacagtgggactccaattgtgacagcagatcttgttgagcagagctagctcaggagataacagccgagaagtgagcatcttccaggagttggctttgccgtttgacagagcaatcgcaacttcatccatggactcaggaacttgaatctcagacacaccacccagcggataggaaggattagggagctgaaacattcggttgatgatagccagggagaattcatacatgtttcgtctgacgaaaactgagtaggcaagattatcaccttcttcaccatcgggaaggtttgcatagaactccatgacaacctcatgcacataagagttgatctctgtaacagtagggagcagaccaacagtggagaggagttgtagagtactcgcaatgttgtttccatcaagaggaagaaaacgcatgtcgttgaatcatcgacccccgatgaccttgtagcgcccaagtccttctccagtaagaaagcagttactgtaaggagtctctgaccca

SEQ ID NO: 4086 - DNA, 1045 bp, Arabidopsis thaliana landsberg
  unsure (1)..(1045): unsure at all n locations
agaggtttcggccagcttattaacccgcacattgattagtcagcccatttattaatatgtggcaaatttttaaatcgaaagcccacaaaacacggattcatttaagtatcaatcgaactaggcccacatcggcccgttcttattcccgcaatggccctttaaatcaattatagagacttagctaatataatatcaattatgaaatcttgcaaattaggagtagtaaatcactacaagttgttttttatattcggtggcttttaaatagaacaacactaaggcaataaaatacctaaacatttaaattcaaccattagtgatattagccaaacaaaaagaatatttatgaatcagttatattgaaaaagaacagaaaataaaaaccatttttttttttgtcaacaaccctttctttctaaagaaagatagacaaatgaaataaatggaaggtatgtattgagtaattaccaaaccactaccaaaaccataaacctcccaacttccccacacaacacataataacctttcttcttcttcttctcttgtttttggttttactatttttcttctttcttcaacgataacacacataaaacataaccacagaaaaaaaaggagcaaccaaaaaaagaaaaagaatcaatggatggtttgattccaatggcgtttaaggctatgagaaaaaaccggacccgacggcgttacgagtgtctctcttcctccgccggaacgactaaagattcctacgacgactccgacttcttccccttcgccgctaaatccgatcactccgttgtatctcgaccttcgtcgtcttttgatcatatagagatgaatannnnnnnnnnnnnnnnnnnnnnccgccgtggatggtcggtgggagatttctcatccatgtcttctcttgaaggaagaagatctggtgccgagggcgaagatgtcggtttttctccttcacggcgaggacaacttgtgaggaatataagccatagattgttctcttgtgtctcgggtgaatgatttgtccatataatatatccaacaa

SEQ ID NO: 4087 - DNA, 1078 bp, Arabidopsis thaliana landsberg
tattgatctgcggaggtaattcaccaatcatattcgtgctattatcttctggttcattatcaatgtttgcttcttgaagctgcagagcgtattcaagattccacaacacatctcccatagatggcctatcaactccataatccgctaaacattttgtaacctgtttccgcaaatttccttaacgaatcgggtctgatatttccgcgaagcgactggtcgatgatctgatccagttgccctttcttctgccatttcatagcccattctgcaagattcaccatctctcttggaagtgttgggtctataacaggtctagcacataaaacctcgaagagaacaactccgaaggaataaacatcggatttatctgtgagctgttgccttctgaagtactcggggtcaagataaccaaaacttcctttgacagcagtacttacatgagtctgatcaagctcgggtccagtcttggacagtccaaagtctgcaactttagccatgaagttctcgtcaagcaatatgtttgcagatttcacgtctctgtgaatgaccggtttcgagtcacccgtgtgaaggtaatgcaagcctctagctgcaccaatgcagatctcaagccgttgtttccaagtcaagctaggtagacctgagccataaagatgactctttaccgttccattctccatatactcgtaaattagtatcatctcattgttctcgtcacaataaccgatcagagaaaccaaatggcggtgacgaaactgagataacatctcgatttctgtcctgaattccgcaagcccttgctgagattttgggttccctcttttcacagctacctttgtaccgtcattaagctctcctttgtagactttaccaaaaccgcctacaccgatgttgcggctctcgttaaagttatttgtagcgtctttaaccgctgcaaagggaaatacggtaattggcattggtagttatacttgtaagcgtatttccattagagtatttgcttcccatagaagttccattcatcgaaaaccgcatccaagtcattgaatgaccgtcttggccacgtttccgcttctta

SEQ ID NO: 4088 - DNA, 820 bp, Arabidopsis thaliana landsberg
aaagcaaaaggctttcgtggatcctacatgtattaaaaaaaaaatccaaacgaagtttcacatcggaaaccgtcatcgtcacggtattgaatgcgacggagattgcatttcctcgccgggaataaggtccatttcaatattcattgtagtcttatcctccgataaatcaacttgagccgatgcttcttgaagctgcaaagcatattcaagattccacaacacatctcccattcctggccgatcaacaccgtactcggccaaacatttctctgcagcctccacgaatgtccttaacgatcctttactaatcgttcccacgattttcggatcgatgattttctccaacataccttttctatgcaaattcatagcatattctgctaagttaacttgttctctaggtaactgtgggtttatcactggcctcgcgcaaagaacctcgaataacaccacaccgaatgagtaaacatcggatttatcagtgagttgttgtctgcggaagtattcggggtctaaatacccgaaactacccttcaccgcggtacttacatgcccttcatccataggcgcatcttttgaaagtccaaaatcagaaactttagcgactaggttctcatccaagagaatgttggtggtcttgacgtcgcggtggatgatcccctgcgctgcacctgtgtggagatagtggagtccacgcgctgatccaatgcagatctctagacgttgcttccaggacaaggtaggaatagggttagggtcattttctttggagccgtagagatggtcacgcagaggaccgtttcccatgtcttcgtaaacg

SEQ ID NO: 4089 - DNA, 753 bp, Arabidopsis thaliana landsberg
acgacactcgcctctggcttatcatccaccattgctgctttctcatcttttgcttgcacctgaagcatgaactctaggttccacaacaaatctcccattgctggcctctcaattccgttttgggacaaacacttctctgttatctcacagtactttttcacctcttcaagctttacttttcctacaagaaatgggtctatgatatcttccaatttccctttcttcaccaacttcatcgcccattcgatcaaattcactttctctctcggtagtgatggatcaatgactggtctaccacatactacttcaagcatcaccacaccaaaagagtaaacatcagatttctcagttaattgttgtcttgttagatactctggatcaagatatccaaagcttcctttgaccgcggtactcacatgtgtttgatcaagatcaggacctgtcttagacaatccaaaatctgcaactttagccataaaattatcatccaatagaatgttagcagatttcacatcgcggtgtatgattgctcttgtggaacctgtgtggagataatgaagccctctagctgcaccaacgcatatctcaagcctctgtctccaactcaacctcggcttatcatccaagtcatacaaatggtccttaagcgttcccttctccatatattcatagacaatgatcatttcactgttttcatcgcaatatccgattaaagataccaaatgtctgtgtctgaactgagtaagcatttca

SEQ ID NO: 4090 - DNA, 5443 bp, Arabidopsis thaliana landsberg
ttggttattaaaatggtggccaccgtttaagaaggctaacttgggaaaatggttcaacaatataatgattcattcacccctaattaaagatatagctcttgcccattggaactgaaagtctaactgtctttgttttggccagcttcttttctctgttttcagtcatgctcttatgagacctatgagcaacagtgcgttgtcttttcctacggaaattgtgttgtcataaaatccctgtgtatttgtttcttttctaggctctattaaaggctcttggtgagcgtaaagggattaaccggtttggtgacttcacagctcctctagatgaagcgcttatacatgtttccttggtataaaattgtgaaacttttgcttgcatctgtgtttattctctcattactggatatttctctagactttcttgctgcttatagtgaacaaaaacctcttgcaggacttgtctggtcgaccatatcttggttacaacttggagataccaactcagagagttggaacatatgatactcaggttctctctttgctcctggaattgtcttcttttgggtttatctgtgttattcgttgtttagtaatcattgaaagtgttgccaaaaattgtttaacctttcgatttgtagttggtggagcactttttccagtcgttggtgaatacttctggtatgactcttcacatccggcaggtactttgtgattcaaatcttccaaaagctaacaaaatcatgcagtttcatgagtttcttctatcctctgtctgtggaccatttcataacagttttaatatttgtttgttacaacagctcgctggtgaaaactctcatcacataatagaggcgacgtttaaggcgtttgccagagctctacgacaagcaacagagactgatccacgccgtggtgggacaataccaaggtttgactgatcctcttatcctccactacattctacatacactaagtaaagataaatatcagatataacgcaagattcattacatcaaagaaatagataatcttttatgtcaaaacaagccaaattatcttgatgaatgtatatcattggaaaacgtgtttgatgtgtgatggttcatggcatttgcagttcaaaaggagtcttatcacggtcttgaaagctaatcaaacacacaagacagttcccagattcacacttcatcgtcgagttcatgagccatcgtcaattctcttatggtaccaaatgccaagcctgttggatcttgctgttccattccattacagaagcacaaagagcaaaatgtgaaaatagattagagatcacacagttcagaagatcataggctcatctttatattaatctgttgttgcagagtgtattaaacctcttaccattgctgtatcatcatcaactgagaacttactgtgagttgaagtgactgtaatttgctttaaatagtcaacactccaatcttggcaacgactgcgtttgactaaaaataaataaacgtctgcgtattgatctctaaacgacacacaacgacgccgtttaagagattccaaagaatgtttccctcttccttcgagttcaatgatttgattgatccaatccctaatctctctctatatactcttcctctttgaaaaaccttccctttacgatttctccatagcagacacagattcatactctgcgaattgctcaaggtagaagaagcagattcacgatcccaattcccctattaacggccattgaagatggtcgggagcaacaacaacgccaagtcatcgacgaacaagcctccagcaacttccatccccaccgctgcagcttcatcttcacagaaccataaacctcgtgtgaattcaactaacaacgatggtggaatcagtaacaacaacaacaacaacaagaaagaaagcaagccgatgatgataggtgtccagaaaaccgccgataagaaaccactgaagcctaatccatctcctaagctagctccgatcccgaaacaatctaatccgaatcatcaaaatcaaacgggtccatcatcttcacgaccaatggctccgtttcctttccctgattcatctcccgcgctaggtcctcctcctcaaccgacttatggattccatatgttagagcgtcgcacaattgttctcgctgatggtagtgtccgttcctacttcgctcttcctcctaattacatggattttcctcctcagagtcgattagctggaccggtatttgggagattccctcctttttacccggaagagtttcgagatcagcggatgaaacggaagtatccaggtgaagaagagattgataggagagatgagagagctgagatgatgagacagagacagcagtttatgcagtatgcgaatcctaatgatcactcatttatggctggtacgagtagggatgttggagaggatgttagagctgctaagcatatgagggtaggatcaagtaggcatgacaatggaggtttccaggttgaccaggttgctctaaagaaatcgtttttgggttttgttaagcgagttttcgaggatccgatggagaagaagaactacttggagaacgggagaaaagggcggcttcagtgtctcgtttgtggcaggtttgatggctttcaatctgacttttgtgtttgttttttggttcagtttagtttgcttgtgttggagacgctagttgccttgtttttgattgttgttttaattagtcttatatgtcttagaacgctaaatgaacatgaagaaggtaagagagaacactaatatacgttggaataattattgtacatttgtatgattagtatgttaattgttcacagtattgaatttatcttgatagtggttgttgttttagcaatatgttcaatttgttatgagctgctgaatggtgtttgctttccattgattgtgttcctcttttacgatgtatttatcattactggaattctttctttagtaatgtgctaacttccatatacttttatagattaggcatgtgtgatgactgcctgtcgataagcctagattattgaagttgtttacttagatattaggtatcattcaacttagttgagttagttctcattttctttctacctactgcttctgtgctactcttttgcagttacttttttggctggccttagaacagcaaaggttgtaggtttttatactgcagcctgcaggcattacgcttagattctattctgatccataatagtttttttttttttggaactaatcttgcatctcaatagttttaaactttttttaatctttggtccacagcttattaaatctttctcggtatctctcgactcaaactattagcccttgccttatgcatgcatattcttttctttctgaatttaatataatggtagtttttcgcaactgtttagatttagcttgctgatatttctttgttaattggtttttgatggtcatatatcttgcttactgtttattcgtcttaggattactcttatttgaattgattatcagataggtagttgcatttcagtttttcgaatcatcgttctgttctttggtatttgtgggtgaccttcaaatcagctctcaattatcagtagtaacccaacgagttggcattttttcccccgttttaatctacttgcttatggtcagatcatgaagtctgcaccatgcatttggtattgggcgtgtgcttagcattctttgcttgtcctcagtgctcgtgcttgtgatttgtggaactttcttcttgaatacagcatgttaagttgatcgacttcatattcataactctatagggaattgagatatctaactctatctttctttgttctaacttgctgattagatggaggttgacaattaatttggcatgatgagtaaatggtcaatttgatgaccatttcaatcagtgttaagggctaagttagtaggctttagtagcaactaatctttttttgaatgctcttttatgtcacggaataggcttgttttggatgtagaaagcttacgatgaagttctctaattcctttgctatcatctttattctttaacattattcaactcttctgctatgttatgatggtactcctcataattgcgcagaggtttatgtgtgtttttctttatgtttatatgttatccgtgcatcacttattacccctagtcttagcttaattttagaatttggttattccatctacatttgattcttgttggttgccaagctgatatgtggatgtgtctttcatattcaatcattttagtgtgtatattcattagtcttggtgtccacattgaagagtctttacttcatgattctgatttgcttgagtttaaataccttagagtattttatacggtatttgtgtggtaaatctgaatgagtgtttccaattcgacttgtgctaaaacacaggtcttctaaagatgtccaggatacacatagtttggtaatgcacacatactgttctgatgattctagctcacgcgtgcatcatttaggcctacacaaagctctctgtgtattgatgggatggaatttctcaaaggctcctgataattcaaaggcataccagaatctacctgctgatgaggcagcaatcaaccaagcccagctaattatttggccacctcatgttattgttcagaataccagtacagggaagggaaaagaagggcgcatggaaggctttggaaacaaaacaatggataacagaattagaggtataacatgcggcctttcactccttattcttgcgtttacatacctgggcagaaccatctggaacagttcatgaatcttgcattggttaatccgcacattaggattctcttctctcttttccttttttcttccctccatattagagatgtgcttggaaagtactaaagcaggttatcttaatcaattggatatagacccagagccttagagatgattcccgtatacaatggccataatgatgtcgcatgtctttgttatccctgactttgtgccacaataatcatctccttatcttttagaagaaaggtcacggtccaaatccctctctttgttttgctatcactagaaggatggcccaacaggtgttttaaagtaagactctggaaactaacatgattcaattatcatctgacatagcttctcaggaaaaaccttcactatacttagacccctgcccgtttctctcccatgtttctctgtgattttgtaaatttaaaattgctatgacttagcatagaataatttataactctggtttgagctctgatttcaataccttacaatatcagaatctaggcaacagtggtggtctaagaagtatataagcttctttaacataactttgttgggccaccatcttctctggtcttttctctaggaatctcagcttctattttagaacttgtcgttaggctaatgatgggtgt

SEQ ID NO: 4091 - DNA, 1691 bp, Arabidopsis thaliana landsberg
ctcgtatcaacttgaagactctagtcactaaccaaattcatttaaagttaaagaagtcttgcctgtatgaagggaaactatcttggcatcaaatggctcatctttattcttttcccattctcttggaagcattggctctgtttttggcattaataaccgctctctcctatttacgtccacacgattggacatatgaagggctaggtctctcaaaacatcgtgttgcgtcacaaatacatcatagtagccaatgtgcacatcgccaaacctgcaaatttatgatatgattaatcccactgaagtgttggtacaagagacaaagtcataaaagagcgaatacctcggattgttcactatagtaaggagattcttgtcagctaaacgaagaacaaaggaaaacgcagtttcctcgtcaacatcatgcctctcaacccacacgctcgtgagaagatcaagagggatcttcttgtcttcagggaaagcacccatatccaagaaacagtctcggattttcgggtcgaggttttctagactttcttccatatgagcaaacactctgctctcatgagtttcatcagcagcttctcctcttaataacctcttcactacgccttcccaatatctttcaggtttgttttttaacgaagcaccaagaactttcaaagataaaggtaaacctttacactcatcaacaacctaccaaacagagtaacaattttagtatttggaagcaaagtgtgtttttagttacagattcaaatatttataaaaaggcattagtacctgcttcaccaaatatttgttgaatggagaaggcggggacttttgttcgaaagcacagagacacaaaagagacattgcttcatctttctttaataattccacattgtaggtggttctaggatctgcaagcttggaccgtgacactactaaagtagtgcttccacgaattttagacatcagcctgtccaaggactcccttgtccaaacatcatcaagaatcactagcttccgttgatgaactccatcataaagaaattctcgtatacaagactccaaattctcaaaattcggagaccgtgacacagtcaaaaacaaaaccttattcttaaagagtcctgcacaaaaatcttgattagaactcatgaccatcaacacaaaacaaaattcaataaaacttcacaaacctcgaacatcatcgtcctttgaaagctctattgcaagagtggttttccctgaaccgctcattccagagatcccaaacaaatgtgtatccgtaaacttaaacatcatctccttcacctttttcttccccaattccaataccgtctgaatctccggatcgcttaccgtctcaatctccatcatagtctccggaaacgacaaagaatcattccgctcagtcaacagtctatccatattcctctcaatcctgtcaccattgacccgtagatgacatacctcagcaagaacaaagagcaaaatctggctgttgaggaaacgagatatttttttctcgagatccttcatcttattcgcgtggtacacatgtttaaggttccacctattgcatcttaaaaccttttcacatagctttcttgctttctccaagatctcatagaatactcccagttgagtttggtgatggttactcagctccgcgccactgtattggatctccctgatcgttg

SEQ ID NO: 4092 - DNA, 823 bp, Arabidopsis thaliana landsberg
gcatcgcaaatgacatggcgtagagacacaagtgcagctacagaacttggtaaacccaataaactgcattctctcatgtcaattttctcaagactccctagctttccaaacttttcaggaagagaaaccaggctgacacactgtgaaatgtcaacgtactttagacatggcagctcacaaacttcgaccgggagggatatcagctcggggcaggcatataaccttagacgttcaagggactgtacgttactcaaattcttgggcaattcaagaatccgtggacagttggttatgctgagagagttgagagaggttattccaaatatggattttagttccaaaagatcatcacagtgatcaatagtgagatcagacaagcttgggaatattttcgagatgtcgaatgacgtctgaacaaagctgttcttgaccttacaaaagattagatgcatcttgtgcaggtttttcagtggaatggtgcagctggtgagttcagggacatgtaccctcttgagccagagactcctcagtttggccaaattggcaaagatggagaagccatgtagacgcgcaggagacatgccattgttgataatcacgagcaccctgagtctactcatcttaccaataaatggtggcaagacgtagttgtccgaagagaagttcagtattaaaacttctgccttagggaggtccatgtcaaaccaattcatttcatccatttcccctaaagacacaaaaaaatctatcaaacctgatacgtgataagagttttaggtgttttggttttattttagtggctttttttatttatcacgttaag

SEQ ID NO: 4093 - DNA, 2880 bp, Arabidopsis thaliana landsberg
ttgagtaaaacatttagtggttgaagaaactatgcaaaagtgtaaatgaagagacatatagttggacataaacaaaataagaatataattggcttaatgtgttcatatatacattttgtaggtgttcatagaacatatttcagtagtaaaatatgattggattgaaactgataggcttaatgtactcatagatacgttttttagttgtaacgtagatagtagatttgtaaatagattaaaataacctgactggtggtctacaggtaaaacattttctcaagaagtggttgattcatattttaggcgagactgcgaaactacttttttgagattaggcaataaattaatgatgaatatatatggcaaaaagttttaaagattagtaatttaaatgtactagtttcactacaagaaaacagtcaatttgcgaggaaggtttgcgagggaaggcattcctcgcaattattgcgaggatattgcgagaaacttgctacgtaccgcacgcgagtagcaattccgtcgcaaaacttgcgagggaagacttcctcgcaaatttgcgatggaagtacgatggtttcgcaagaaagatattatccgtcgcaaatcccaagcagatacgtcgcaaatctttaccctaaaccctaaaatacataaaagtgtattgcaatcttcgattctcatttatagatatgaatctaagtgaccatataatcattcaagttgattatatggtttgaacaaaaaaatattgtattggtttcaatattaacatttcattttgaaaatgttaaacattcatgattcatacttaatgaaaaccataagatcatcattgatgtatttggggaaaaaacacattcgaattatatgatgataaaataggttcaaatgtagataattaacgttctaatgattaaaaaaaatgaatccaaatgattttgaatagtgattgttgtatttttcaaaattgattatacattgcgaggaaattgcgaggtgtttgctagtacgcgtagcagttccctcgcaatatttacactaaaccctaaaatatttagaatttttagtcatgttcttattttgctgagggtcttactagaaataggagagactgaatcaaatataattattgaattttgattggtttaaaatacgattcctcgtaatttcctggcaaggtctgcgagggatttgctaggcgttctcgcagttccctcgcaatgtaagctgcattttgattggtttaaaagacggttcctcgcaatttcctagcaaggtttgcgagggatttgcgaggatatatattcttatatatactcgataacctagtttgagcggagctcaaacctgccgcatcaaaccctaaacctaattttttttcttcgattctcttcttctccgatctgttttcctcgtcgccggcttctcttcttctccgatctattttcttcgccgccgcctctcttcttcttcgatctgattacgtcgccgcctctcttcttcttctctgccgcgtctcttattctccagcagccgccgcaactcttcttctccagcttcagccgcgagtcgatctgtttcttctccaaggtaacgtcttcttctccgatataacttcttctttccattccaacttccaccgtccgatgtaacttcttcttcttctccgtcgcgtctcgtcttctccatcagtcgtcgcgactcttcttctccagcagccgtcgcgactcttcttctccagcagcagccgcgactcgatctctttttcctccaaggtaacgttttcttctccgatctaacttcttcttcatctccgatctgacattgttttccagatctaatatgttctagtttacggatctaaactctgggttttgttttttttgcaagatgccatcgtcggagaatacttatgcacgatataggtcacagcagcgagacccgttgcatgtcaattctcctgtcagtgctgagaatatttcaggggttcaaggttcacgccatccaccatcgcctctaacgccaaccactcagccttctgtcaatcattttgattctcaagctgagcgtctcaacaatctcacactggaggagcttcttgatagtcctggtcgtgctggcttgacaaggctagacccaaagcgtcctccgggaactctctggtaaggttaaattcattgtccatagaacagcttaggttgtggtgccttagaactttgtagtgccttagagcgtaatggaattaggttgtagtgccttagaagtttcaacaagtagaacaacttggttgtacttagcattgtagtgtcttagaagtttaaagacatagaaatccttatgtgtgggctggttgctcttcttgtaggtttgacgatgactctacagatgcagcaacagtccgcatcatctttgaaagagatatcaaagaacctcatgccaattggtcacagacatcaaaggctacaatcgatcaatgctatgaaacgtttgcggtaagttctgtgctcttttgatgtttatgcttgttttgtgtatggtttcatttctgatgttagcttctcttttgtagcaagtaaataactgggaccgttcaattaacaaaagagtaagggttgagtttgaagcaaagctaaagtctaggatgactgatcaagtgtcacagtggaagggaaattggaaggagaagggtgatgaagccaagccaaaatggattgatcctgatgtgtggaaaggtctagtactgttttggcaagatccaaagtcagaaaaaagagtaacaacaacagaaatgctaggtatcatgatccggatggcaaatgcatctataaacactgttcaggccagacctcatacaaagctcgtgtaagaaaacgggtaaga

SEQ ID NO: 4094 - DNA, 1460 bp, Arabidopsis thaliana landsberg
  unsure (1)..(1460): unsure at all n locations
caagtcaacaaaaaaacaatccattatcagctttttttctaacagtagtttttatgtccaggttctactgctacagattggactcaggataatgagttcacaagctggttggatcagcacacagttgaagaacaagttcaggaagctagttggtcttcacagccacaatcatctcctaattcaaattctctgtataggacatcctcatatcctcagcagcaaacacagctacaacattacagtagcgaaccgattatcgtaccagaatcgacgtttacatcttttccttcgcctggaaaaagatctcaacagtcttccccgagccatattcatcgtgctccttctcttcctggtggtagtcagtcgaacttttcagctccaaacgcctctccgttgtcgaattctactttccatctctcgggattgtcacatggaccgtcgcattatggtaataatttggctagatatgcctcatgtggtcctactcttggtaacatggtgcaacaacctcctcattgggttaccgaccccggccttctccacggtgatcattccgcgttgttacacagtctaatgcaacagcaacatctccaacaactgcctcctcggaatggttttacttcacaacagttgatatctcttcagcagagacaatctttagctcatcttgctgcattacaatctcagctatatagttcttatccttctccatcacataaagctcttttcggggttggtgaagtaagggaacacaaacataagtcgtctcatcgaagtcgaaagaacagaggtggtatctctcaacagacatcagatttagctagccagaaaagcgaaagcggattgcagtttagatcaaagtacatgacttcagaagagatagagagtattctcaagatgcagcattctaattcacacagtagtgacccttatgtcaatgattattaccaccaagctcggcttgcgaaaaagtcatccggatcaagaacaaagcctcagttgtatccttctcatttgaaggatcaccaatctcggtcgcggaatagttctgatcagcaaccacaagttcatgttgatgctcttggaaagattacacttccttctatttgcagaccacgagctctactcgaggttgactctcctcctagctctggtcataagcatcttgaagatgagcctcttgttgcagctagagtcacaattgaagatgctttcggagttcttatcgatatagttgacattgataggactcttcaattcaaccggccacaagacggtggtgcacagctcaggagaaaacggcagatccttcttgaaggattagcaacttcacttcaacttgttgatccttttagcanaactggtcagaaaaccggattgaccacaaaggatgatatcgtgtttctccgcataacgactcttcctaagggtcggacattgctgacaagtatctacagctt

SEQ ID NO: 4095 - DNA, 654 bp, Arabidopsis thaliana landsberg
gcttcaaaccctgagaatttgtaaatctgatcaacgaatctggcaaagcttaaactatatgggttaatcacaatttctcagattccagatttaatttacaccaatccaatcctcaatagcaggcgaaaacgcctaatttctcagatacggtcacgatcaatcgttaaacccctaaagattaagagaaagagatggatggattacacattaaaggtaccggaaacagtgtcgttggcagatctaacggcggattcgatatcgaagcctaaagttccggtgtcttcttcaaaatctctcgatgctgcgtaagaattccaatcagctagcagagacgttcctcctgtttgcagcggttgctgctgctgatctccgctgctactagtgccgctcatcgaaaaccatcctttggccattttctccatttcgttgggaatttttggagctgagaaatcaaaatatagctgaataccgacgatcagtggtttacgtcggagctaaggaaatcggcagacgtcaaatcgagcgttgatgaagattctgtcaagggaccgtcgtcttaaacggcagtgttattttgcgttcactactcatattctaatcgtaaaagttatttaaaaaaataataataacctttaaaactgaccaaaaaattgt

SEQ ID NO: 4096 - DNA, 6077 bp, Arabidopsis thaliana landsberg
tgagttcactagcgatgcatgtcttgattcatgttcctgaacgtaatgaatgttaaagggattggttgatcttgacatattgtgcaactgagtgtgaatttggatcataacagagcatgactaaagtttttaagtagaagtcgatcaccttgcattttagaactgttagcttatacattgatcttaattgtcatatctcatgctttggttctgagtccccgctatcaaacctcatctccagcttgttcttaattgtttgcttgagggcaagcaaatactaagtttgggggagttgataagtgtgcattttacacgttttgagcatccatttgtcatcagtttagcatcatatcaccactgttttataccatttctcatcatttgtcatcactttgcatgtctaggatagttttgcatgcatattgcatatttgtgttgttttcaggtgatttggagttgctggtgagttaattggaagaagtgcacctgatcaaatcaacatacttgaccacgagctcaagtatagtcatcatggagttcttgaattactcggccacaacctctacagcgaatcactctaccaacaggtcgagtatcaccatcattattcactcgacctatcaccccaccaacatggccgagtatcaccatcatcattcactcgaccaatcactctaccaacatggccgagtatcaccatcatcattcactcgaccaatcactctaccaacatgggcgagtctcaccatcatcatccactcgataaatcactctaccaacatggccgagtatcaccatcatcattcactcgaccaatcactctaccaacgaggtcgagtatcatcatcacttcacattaccactcgaccccctagtcgagtaccaccaagataatcactcgatcacatcactcgaccccctggtcgagtatcatcacgtccaccacatcaccttcactcgatcacactactcgaccacgtggtcgagtaccttcatcaccttcactcgatcactctaccaccaagccaagtaccatttctatcactcgactacatactcgactgccagcttcagagtcttctccattccgcactcaaccagacactcgagcacaaggaagaaaagaagactccagcttatcactcgacccctcactcgaccacatgggtcgagtacagttcttaatccgtcccaatactgcgtcgttttgagtattagggttttagaatattttgctataagtagcatgtactttacatatttcgtaaatctaagttttattccgcagacactgtgttcttgaccttttgtaatccagatttttctcttaatctattcagtattttgttcttgatttcgtttgttgttgttcatcctgttatcaccttgctattactcttttgttatcatgtttttattctattcaacgtttatgctttatgcaatgatgtctgagtagtgaataagtttctgaggatgggttagagttgtttagaattctcagtatgcaaggtggttgagtttgatttatagatcccttctggattagttgttcttaatgcctattgctttctgatcaactggaatttgagcccaaacatttttgggtccaaaaagtgttcgatgaaatgtctgaaccactaattccagagattcgtgaccctgtaccaaggtattggttgcagggagcgttttggcttttacttgttgattcgtaatgcctgttaggttggctctcgtcaatggtgattgagtctgggactaggttagcttgagagtctctgttgcggtggcacttagatttggttaatgaacttgttgtctagggttaatttattgagcatgtcaatcacctgtaaactgaggaaacgaaactactcaattatcccatctttaggaattctttatctgattgattttattgtttactctactgttgtgtagtgcatcccgtcatccgttgcttagtttctgcaattctttacttttactcgacctgatactcgaccacccagttttctggcaacagactgtgcagtcgagtatccctgtttcattttctgtctgttactcgacctgtcactcgacctcacccagtgctatgcaaagagctgtgttggtcgagtgttttactgtttctgtttgattttctgttttctgcatgttcacttaggattgctagaacacatcgaaatctgttatgcttggcttgacttagtgacttctgatcacatcttgattgttagcatcacacccatttggattgacaacctaaaatactacaacgacatgattggtgttttaggataattgactaaaaacctattatcaattttgcgctatcccaagggattggccgtttagagcggttattggctttaacagtcagttcttattgccttcttagttagagatcgctaatgggaattaggtctgtgtctagctatgcttgaggatttctatcacgggagtgaattattctatagttgaacctgttgtctagggatagcttaattgagatttgttaaccaactgaattgatcagggagaccacactattcgattaccccaaccttaggaatttctcatctaattgatctctctgtttacttacctgcttcattcaattgctattgtattttagtatttttctgttttcaaccgttctactcgatcacacctgtctactaacagtgggactgcgtgatagagtaaactggtctatttctgcattttcactctctgtcatcttgttgtactcgatcacagggtcccttctggcagtcgaccctacgatcgagtatatcagtcatttctgtcattttttactgttttttgcatcaacactaggactattagaaaaccaaccaaattctgcttggcttgatttagcaacttctgatcatatctcatctgtctacatcacacccttttggattgacacctaaaatactacaacgataggatagtattttaggattaattgaccgtaaaaacctactatcatatagaagaaatcacagagaactcacatgaacctggtatgtggctagttttataccaaccaagtgatgaagttgaaatatttttatcatcagtattcgaggcattttatttttaccagtaacacaaacgtgaatttgtcttggagttgacatctagttaactactgtggtctgtacaatgttttaacacatgctgccttttaagtatagatcaaaatgctcgtggttcaaatgaagttggacatgtaaacgcagagaaatgtgatggccctaactatatgttttgacaattttctttccatagatgtcaaggtgacaattctcttggcatatatttgactccctttttcatatatgcctgcgggccggcttgtctaaccgctgggctttgcggggcgggttagggctcgtttttcaagaccgcggtcgtcggccggcaggtccgtcgcgaatcagaagaggaatcaggcacattgcggatggcccgtttgggcgcaggccggcccgtctgacatctggtggagaagcaaaagagatggatttcttatcttttggtgggatgcatggggaacattaagtattggtggtgaaccccacgtctgttttcttgtctttaaacacggttccctgttgactagaaaagtctcagaacattccgcaatcccctgtaaacttgattaagcctctgtaagtctctatagattttgttggtcgagtataatgttgaatttttggatcaaaacaacatcatactcaaattcatcctctagtcaccatatagcttctgttggtcaagtatagtgatgatttttaaaaacattaggtccaaaatcatcacatatactcgaccacatttcctcattagcatgtggcttcgggtgataaagtgacatgttgaaacttcaaaatcttgagagtgaaacccactttatactcgattacatagatacacttgctccttgcaagatgtggtcgagtgttctgttgcacactcagaggtaaaacccacttcactcagctctttatacttatctcctgaagacactaacaaaatgcatcaaaaacaacaaggaaaaataaagatatgtacatagatagacatgggaattcctcccaagtgagcttgttttaagtctctaagcttgacttctcatactcattaggcttagggtgggttgaagagaggaaatgaggtctcctctccttcttgagtagagtgatcatcatactcattaaggtttcttgataggtctacaattgggtactcagtggccatgtcctcacagtaagcttcttttttatcaagataaccttctcctctagaccatttcgatgtgaattcacatccttctttgctgacaagaatagtagctccatcgtcaggggcgtccttgatgttaagtggtacttggttggcttttccattgagctccttgatttgatccttcagctctttcacaatatgtgttagctcttgtatggctttgtcctgccatttagatctctccttgagttctaaccaatcatctgacgtctgagtgtttgccttgagttgtttggtcgagcatgagctttcaaggcaagttggaggcttcttcgagttgttggtggaatcagttggtcgagcatgtgttgaacttacttcattagctttcataacctttgtgtcagaccccagcaagcccttgtaaacctttgagccaactactgacttgtgtgagtctaatgacttctcagaactcaaagtttcactagggagatacccagctttaccactcttggtcaaaatagtttttgagttatttgcttcttcaagttccacgagcagttaatcaactagccgatccatttcctcaactaagaaggtctgtccttctattgtcagcttcttcatagcatcattgatgtcaaacttcattttaaattccttccccatattaagatcaatctttccttgcttaacatctatgattgctccagctgtagccaaaaagggccttcctaagatcaagggatcttttcgttcttcatccatgttcaacactatgaagtctataggcacctccacatttccaatcttgatagggaaatcttctaataacccatgaggttgtctaacagacccatcagccaagatcaaggagatattgcaatatttatacttgttgaaacctaacctcttagctactgagagtggcatgagatttactgatgctcctaggttacaaaggcatttactgaaagtcaatgaacctagggagcatggtagagtgaatgaaccagggtctcctagattttctgggacatcgttctcctgtatgatggcatggcttagaactgttgttttttgaacctcttgcattctcttcatgataaagtctttgaggaacttttgggaatccgggatacgcgttagagcatcagcaagaggtatccttaattcgacttccttgatgttcttggcaaacatagctctgtacttatcttctaactctttcttatgtcgaccaggaaatggaagtgggggcttgtaaggatgaggaatgaagactttttctttgtttttgacagcaacatgtttcggagcagttggtgatgtctctgggaaggtcggtcgagtgaagtggtcgagtggaagctcgagtgacaggtcgagtgaagtggtcgagtggcagctcgagtgacaggtcgagtgactggtcgagtggctggtcgagtggcagctcgagttgtttgtcagcttgatctttattgagactgaaatcctccccatcttggtatgcactatcctcagtgactgacttgggtctctctctagtggataactcacttccactccttatgttgatagcatgaacattagcatactccttgggattttgaattgacttccctggaagtcccgtaactttgggagcagagatagatgcagattgtccttctaagtatctgactttggaattcaacgcctccacttttgcattcaagtcattgaagttgcagtccagcttgtggtgcaattcggataacttcttagcaatttccatggagctagatgctgagctgcaaacc

SEQ ID NO: 4097 - DNA, 1445 bp, Arabidopsis thaliana landsberg
aacatatccttttaattagcaataagcaactcagccagcttctaactttctacgcaaagaattttcaaactacaatgccataaatatctagggataaagaacatgttcctccaattaacaattacggtctcatgcttatcatttagacatttacgagtctttgactgtaatagcataatgaaaagaagcaaaagacgagaggaaaaactttaaaaccattacaaaaaggagaacattgtctaaaggcaaaagatgtgacagatgaaactaacacggaaatcaagtcaaaacaatttgtgatagtcgcaatactgacctccaacactttcaacatgtagttgttaaagcttcgaacattatctttctgagcctcctgtatagccgataccattgccatttcatgaacctaaagacaaagaagatgcatatagaacaatctgtagtgtaatctaagaaaagggaattctcgaagagcatttagatatagaaaacctgttgcaggtattcttcaacacttgttgtctccgcagggaatacatcttcaaaagtcgtctattaacaatccaaaagaaaaacttaggcaaaggtaattcagtacacagataaaatgtcaaattatccaaagaacagaagagcaacataagctagtagatatagataggaaatagagaaaattctcaccttcaactcaaatgacttaagatcacgagataattgatctgcattgattccctcccgtgcaagtagtctgcgtatccaagtaaaaatgaagacaccagaatcaaactatcgaccagaggattctacgatgttaagctcgtcggacctaacttcaatctcgcactccaatactcttgagtggctaaattgagtgaccaatattgaattctcggggactcactaaaacgcaagacctaggggaagaaagagaaaatcgaagttgtagtacctagtggcagcaatagactgtgaaggagcttcgtttcttagggttttagctttgagtttcctcgacaatgcttccaattgatccaaattcctctataaaccacggatatatcattacgaatcaagctcatcgtgataatagaagccaacagacaaacggaggttcgaaatcgaaaagagtggtggttagtagaagcacctgaataggaggaaactgagaagaaggagccgcttgctccagaagcttagtcgaagaatggagaagatcagtccatccactcatctcctggtcgttcgccatacttattgagagtttgagcttcaggagaactcagcagaagaatgtcaagggtttaggattcgaacattttaaaatcagtttttttctccatttactcaaaccggtttaattggttcgggtcttgattccttatttgtcgattcggtacaataaaaatcaaaaccaaaggaaaagagaaagaagacacacgacgcgg

SEQ ID NO: 4098 - DNA, 1848 bp, Arabidopsis thaliana landsberg
cctcctccgttgtatgttccgtgtcccaacgagcatgaccctatctccttgaactacacgtcaggtaccacggcagacccaaaaggtgtggtgattagccaccgaggagcctacttgagcgctttgagctccattattggctgggaaatggggattttccctgtctacctctggacactacctatgtttcattgcaatggatggacgcacacgtggtccgtcgctgctcgtggtggtactaatgtatgcatcagacatgtcactgctccagagatctataagaacatagaattgcatggcgtgactcacatgtcatgtgttcctacggtctttaggtttctccttgaaggaagtcgaaccgaccagtcacccaagtcctcgccggttcaggtgttgactggaggttcttctcctccggctgtccttataaagaaagttgagcagctggggtttcacgtgatgcatggctatgggcttacagaggccaccggcccggttctcttttgtgaatggcaagacgagtggaacaagtaatatatataaccattatgattttacataatatactacaatcttttatatataatcatgttgaagataacaatttttattataaaaatccaaaatagactaccagagcatcaacagatggagctacaacaaaggcaaggtgtaaggaacctaaccctagccgacgttgacgtgaagaacacgaaaactctagagagtgtcccacgcgacgggaagacaatgggagaaattgttattaaaggaagcagtctaatgaaagggtatctaaagaaccctaaagcaacatctgaagcatttaaacacggatggcttaacacgggagacataggtgtgattcatcctgatggatatgtagagatcaaagatcgatccaaagacatcatcatctcgggaggtgagaacataagtagtattgaggtcgagaaagttctttacatatatcagcaagtgctcgaggccgcggttgtggccatgcctcatcctctatggggtgaaaccccgtgtgcgtttgttgttctaaagaagggtgatgaggaatcggtgactagtgaaggagatctcattaagtattgccgtgagaatatgccgcattttatgtgtccgaaaaaggtggtgttctttcaagagctgccaaagaatagtaacggaaagatcctaaagtctaagttgagagacatcgctaaggcattggtggtcagggaggacgatgctggctccaagaaagttcatcaacgcagtatcgaacacgttagttcgaggctttagcgttacatattcatcgatgtgttttatgtatatgcgtatgtttggattgatatgtttcttagtttgcatgtatggattgttaaatttacgctaataattaaaatgaagttattcaacaaatattgcatcttttatttgtctaaaaaaatggtaagacaaaaaagagaaaaaattccacgtggattcaacaaaataaaattgaagaagataatctcaaaattcttaaggctcaggactcgccacttggataacattcatatctcttcactttcactagaacacagctcctgaagctgaagaagtaaaaaaaaaaacattgcgacaacataacaaaaacgaaagaacacaacatgagtgacactaaaacggtgcgttttggtcttcttggatgcatcagattcgcatcaaagttcgtcagaacagtaacagaatcctcagacgccgtcattatcgccatcagcgatccatcactcgaaaccgcaaaaacaatcgccacagggaacaatttatcgccggagaccgtcacgatatacggaagctacgaggagattt

SEQ ID NO: 4099 - DNA, 536 bp, Arabidopsis thaliana landsberg
gaaacccccgacaaatggaactgaagcatcctaatgtagtagataagtaatttcttaagacggtcaaaacagcatctgaccaggggtgatgataatgatgatgtgaaatcgtcacttgagtttttcagtagctgcctacatgttgccttggcatacctcctcctgcatttgtgccacccatgtattgtccttgtggctcactcataagggttgggcagtttgcagaaacatggctgttgctgcgacacaagttgcagctagtaaaaccgccaagagaccttgcatcactactgtactgatttccatattgacccacttggtttgctgcaggtaatccaaattctctgcgtgcatccactgatgcggtgtctctagttcctgaggttccaacaccggaattaaatgcatcagacctgtagttggaactctctgcctttatagggagagaatttgcatctcctatcttgagtttatctattgcctctagcatgaacctggtatttgaagaataattcagcttttcagctttcacaact

SEQ ID NO: 4100 - DNA, 646 bp, Arabidopsis thaliana landsberg
actcatactatgtgcaacggtattagagagacccggaaggagaaacaaccaaagagtaggaaatttctcttcgtagaagatgaaggtataagttctatttttcagacttccttgtggggttattatggtctaacatctgcttcctattttctaatctcttctgtagtttataaaagatatctgattgctgcgtctaaaatgttctaactgctggcattatgtagctgtaagttcatcagatgtttgcaaaaccataaggggcattgttttcataaaatttggattttgaactaaagaaggtatccgtgaaaaagtacttgtttccaattgttataggtatccagcatccacagttagaacgtgttgggctataacatcctcattcatgtcgctaataaacattggtttttcagtattggttcttcataaaatctattgtcggtaatcatatcctgaattccattgtcaggtcagcaaatggtgcaacaacatctgacattgatgagtaagaaggtgggctctaagatatttaaataaggtctctctcaacaacctcactattataaggcactctgaaaattctggggctatagcaatcaacgaggacaagactgagattaatcaacttcgagattctgcaaacgag

SEQ ID NO: 4101 - DNA, 3787 bp, Arabidopsis thaliana landsberg
acaaattatccccatcattacctttatcctgcatatataataatactgatatctcaataatcaataacatacgtttttcataaaacaaactagtaattaaaaagaatccaaaggagaagtactaaagaacttgtataacataaaaactagtgtgaagaccattcttggtcttaattttggaagaaacgtggcatgctacaaggcttggggggtccaaattttttgcttctgaatgacgtgtcgttttcacataaaaagtcattagggataaggattgtggagggcatacacccacgcgccacggcggatttcagattaaacaataattagatgtcactaattacgcatgttcttatctaatggtgtcattattattccctaattgggtgattaaatctttgtttactacatttgtccaaaaaactccacacgctcaattcagactggacacaagtttcttgaaaaagggttttgtgagattactagaagatgcgaaggaacgttccagcataaagtgggaaagaggagaaaaataagttcatgattagctgtttattcttgttaatttcatgattttgtttcgctattgccacaaataattgttcattaaaccgttataattaagtggcgcatgaatatcttttaaaatttttcaagaaactaccttgttaatggacaatctaaaaatgctattctaacaaattaaaagaccccaaaagctattttacacaagtgtacatgtattatactatatttcaaatggcacatgattcatcatatgttcatatacatcaccaagccaattttatatacttactatatagggcatgggacaaaaaggataggattaaaagatatgaggattaggatgagatgacgcaaacaaaagctctagcatctttgtttagataaatttagttaaggaaaccaattaaatatgagtgacgatgattaatcaaatcgtcatcttaatctctagcaatctagcatctttgtttagggagaaacgatttgtttatatttgatcgactccaattccaaacacatgctttactaaattcgtttctaccaacttgaaataaaaaagtaactcctagtcttagatacatcacacatataggctaaaagttaacagtctgatttgctaactgatagcagcactgtcactaaaataaggatttttttgaggttagaaaaaagatagataaagagtataaacgataaaagatggaatctaattgctaaattttggttaatcaaaacgtaacaatgaagctgaggcagattagattctaaggtatgttctcatggaggcacaaactttagattatttacgatccttccacaatacgtttatgatcatgattttataaaccggaccggacgttgaactgtacatatataaaagctggaccagagttcgcggttcaaccggtctgaccagccggtccgtgtcaggtttttatttttattttagttattgccggttacgatgaaacgacaccgtcttgttaagcgtaactgtgcaacagtgcaagtatcatcctccgcaaagccaccggagaatttgaaccaatggcgttgagactgacgacgctaaaacgcgccgctgctgatttccggcgtatattagaatcccgatgcttcagttacgtcgctgcgatttctcctcccttagacagcgccattgatcgctctaccgcttcgccgccgcttgttttaccggagttttataattatcaggatcaatcggattctatcattgatgaaaataacttcagattcggtttcctgagtttctctttcggtggatccatggagctaatggctgtgcccaagaagaaggtaataattatatttcagcttttccattataccactgcaaatatgaaatttgagagttttagggtttgaaagtgttgctgcgtttggaatttgctcttttagctgattttttttaccctctagggttttagggaggtttactattttgtggtaaagattcgatcttgagatcatgagtggaagatcttgacttcaatagacaagaatcaaagatctgtttaaatgtaatctgttttgctttgcttaggctcgaatgatttggttaacagtagcttttatttcgtgaatcatacagatttctaaacacaagagagggataagaaatggaccaaaggcccttaaacctactcctgtgatcatccgttgcaggtatttacaaatcaccttctgttacgttttgatggttcttaattatttttcattggttaagttttgcattcaatctggctttgagagtcaaacaagtctttccaattcaatgttctgtttctttctaccattatcggtggaaactgtgagttaccaacatgaacagactttaatggaagagcttttgtgtttgttgctctgtcaaaaactgagactgcttcttgaaagttgaaacaacttgatatcatcattttttccatttttggtaccaccagcattatgatcatgataatgttgtgtgtttgcaggagttgtgggcgagtaaagctgccacatttctactgctgcagcggtgagcgggcaatacctgatgaacaaagcaattcaaacaactgatcaagacttactacatgaataggccttgctgaatttggatccgaaaagggtggaaaatcaaaatagagtaggtgtagacttagattcactctgttttggcacatcatttggttttctcctgcagaatcaaaatactgcttgctttattagtacacatacttaagaggtgataaacaactacgtttgttctacatcttctaccattttaaaaggttttgcagaagaagtaatttggaaatgtatgcattttaaaatgcagatttgatctcaagcaatagaactacagacaaaaaaatgagatggccccaaatttgtggtttttgattggtttaagcgtaaaagtccccataccgccaaattacacggtttcactgccacacagacactgaagcttacgaagaaggaacacgtgtcaatctctagtcggccaaaaaatagtcacctggaatctatgatttgcttccttccatcaatttcggcaacagcagaacaacacgccattccatctatcggacgccatgtggcagtcacagaagaatccaacggctgtggaaacagatgaacaagttcttaagcatgatctcagccgcagagcagtaaccaactaatacaagcaaagcaaatactgtagtgacactcggcgagagtagagagcgaggcgcttcaaattccgacgtcttctttgacgttaattaagcgattctgtcatcgagcttagtctaacgtttcttcctgatcaaggtatctatctatctactcatgaagctttcgtgccctgtatgatcaaacaccataaatgtacacaattagaaacttatttcgaatcttacgcttatttggttgttctaatggatcccgaacctgttgtttttctacagatttctctgtagtcgtatcatagatttgccgatttttgatctcttcttatacattattgttgtatttgatgatctcatgttgttcttgttctctttatgaagtttgtgatatagcattgatttggttgaattgagctgcaaaaaagatgaagttcgggaaaatatttaagaagcaaatggtgccagagtgggtagaagcttatgtggattacaattgcttgaagagggttttaaaagaaatacgcagccacaagcacagtaagctgactagagcagcgtctagagtgtcacagcaggca

SEQ ID NO: 4102 - DNA, 1395 bp, Arabidopsis thaliana landsberg
  unsure (1)..(1395): unsure at all n locations
cctcttacacgctttctagttgagtttcttcctctaatagcttttctttttgtcttcttcgtaatttgctcaaaatctgttctttactctgcagccaacttttcactgaggctgggagagacagagattgatctcaactaaaagaggcttttcattacatctggattcttgagttttacaaagaagtccagagaaaccaaatatgaagtttgggaaagattttgttaggcagatgattccagaatggcaacaagcttacatggattatgctggtctcaaatctattcttcaagaaatccaaacttcacggaaaagatcagagagaccaggtatcttgaaacgcaagctatctggtagccgcaacttcagcggcctgacaaagcggtatagccgcaccgcctcgactcgggaaccagaaattcaggacattctggtgcacgcaactactggggatgatgggtttgagagatacgagacaaccatcttggaagttgcagaggcgttgagtttgtcagagcttgcgttctttaaaaccctagatcttgaattcgataaagttaaccatttttaccggtctaaagtggaggaaatggtgaaggaggcagtggttttgaacaaacaaatggatgctctcattgctttcagaatcaaagttgagcgaccttcttcttcgtggagctgctctgaaacagtttcagtggatatgaatgccttagattctaatgaccagagtaagttgtcagatattttttgttactaagtttagctgaaatgacacaaagtttaaaatcttttgtgtttatttttgaagggaatacattagctgaggagatgggaatcagagtagagggaaatggatccaacggtggagattcaacgaaagagagtgtaccacaagtgttaagtgttcttgaacgtatcagattaaacaaaactcaggaaactcctctctccacaattaaaaacgtcctcaagctctctaaccaagaagagctcaaattcactagagagaatctcaagaaaatagaagaacggcttaagaatgtcttcatcgagttttatcgcaagcttcnnnnnnnnnnnnnnnnnnnnnnnnnnnnnnnnttaagaatatatgaaaaagttaaaaaaaaaaaagattgtttgattaaatccatgctttgttcttgatttattcagcttcttgaacactttggctatttccaagatcatgaaaaagtatgataaggtaactcttgatttaatcagatatatacaatattattttctttagacttaataatatgtttttgctgaatattttctatgatcagattgcttcaagaagtgcagcaaaaccatacatggagatggttgataagtcctacctcactagctctgatgaggttactacac

SEQ ID NO: 4103 - DNA, 1734 bp, Arabidopsis thaliana landsberg
ctaatgtcttcccttctaagtcaaagacacaacaaagattcaagatttgtgccctttcagactaaaccagtaacaaaaaacaatctctgaaaactcactctgttccttagaatccaaggcattgatatcgactgatacagtttcagaacagctccaagaagtagaaggttgatctagtttgattctgtaagcaatcaaagcatccatttgcctattcaaaaccactgcctccttcaccaattcctcaacgttagaccggtaaaatcggtttactttatcaaactcgagatctagggttttaaagaacacaagctctgactctctccctacttctgaaactttcaagatggtcgtctcgtatttctcaaatccatcatccccagtcgttgcgtgaaccataatatcgtggttttcgaggtcccgagacgagaaggtgcggctgtaccgctttgtcaggccgctgaagttgcggcgaccagatagcttgcgtttcaagacaccttggctttctgatcttttctgtgaagttttgatttctcgaagaatggttttgagacaagtgtaatccatgtaagcttgttgccattctggaatcatctgagcaacatactcttttccaaacttcatctttgtttcccttcttgaatttctctgtaaaatttcaagaatccagatccaatttaaagcctatttttaatgtatatagaaacagcatatatatttgcaagttgattgaatttgacgtgagaaaattccaaagagttgaaataaaattgaaaaagacgtttggtgcatgtggtgtgggctcttggctggacaattttttgtttttggttttgttgtataaactggctgcatagattattttactgaagaggatatatattacgagggatgacgaaattaaataattgcttaataacgcatgcacaaaagtattcctctaaattaattgtagagtggttggtctagtaatattatactatgaaaatacagtttatcaaaaaaaaaaaaaaaaaaatattctttgggaaagcgtatttgaacaagtggttaaatcattttttttatagctaagattaaatctccaaatctataaaaaggcctaaaccaataagaaaactattctttcaccaaaggagaaccactatctcaccccacatgtggttgataattttaattttagaaaaattctcacagataggattatttcaagttttttttttacaaaaataacattcaaaagtttttgaacaaaaatagtattcaatattttttttaattattaaaatttacaattaaaacaattttaaaaaatacacaaattcatcaccaaaatttttcgataatattttttcgccaaaaaatattcatacaaaattttctcgccaaattttttacgttataatattttccgacaaaaaaaagttttttaaaagtttctcaaaaaaaataacaccaaaaaaattgaaagtttgcatagccttaatactgttttaacttttaactttttgcacctttctatttttagaagtttgcttttccaatcccttattcacactccatgtcggactttcaaactactccgtcaaaaaatgttttgatttgctagatgaacaaagatgtacctttatcgccactaagcttgaccattgttatgaggatttggtcacacatatagttggaaactacgtcgtgaagcacttgactatgatatagttattttatgaaaat

SEQ ID NO: 4104 - DNA, 930 bp, Arabidopsis thaliana landsberg
tgtccatgttaactagaacagcgcagagagcaagcgtgccaaggccaaagcttagaagcagaacatgtccataaccaagttctgttccttctttgaatccgaatataaacgggtaattcactcgataccgcttccaaaagtatatgtttgaagcatacatgatcatgtgcagaaccacaaatgcaaataaactgaaaaatatgcgtttaagaaacattattgtcagcaagaaaatagtgactcatgtagagagtgtatctactacatatgttttgttttgaacctgtatagaggaaacattgtctccatgtagagtttatgtccgactgcgcccattatattacgagcatggatgaacaaaccaagagcaatcactagagagactgtgcaaccgacgaaaaagcctgagaaaaaagaacttagtgtagggatttttacttattaactatcatgaactaagtttaaaaagtcagatcaaacttgggagtttaatgataattcgaaagttcatgctttttttcggtcccaactttgaaagttcgcaattttttttacattttctcaaagaaaaattgttctcgattaaggaatatttttagttaccagtggaaaacgttattcgatgtttttcttttgtcacttttggtcttaagagattcattcctttgcttcgattcgagccggcgaaatgctcaacaaaaatagactcaactctcagcataagcttgttgatctgttaaaaggtaatcaaaggttaagttttaagtttctagttttaatgaaacaaaataataagttttgtgtagagatatattgtgttaacctcatcagagctagtgaggtatgacttatctaccatctccatgtataattttgctgcatttcttagagcaatctgattgggaatatatagcaaaaacatattaatgt

SEQ ID NO: 4105 - DNA, 871 bp, Arabidopsis thaliana landsberg
tcttatatgtttcttggcatgtaagttattgataatactggaaatgacgggtttataaactaaccagttacaaaattacttcgacttcgaatggtaatattttagatactaattcgaagttctcaacatgatcatgtatgcttcaaacatatacttttggaagcgatatcgagtgaattacccgtttatattcggattcaaagaaggaatagagcttggttacggaaatgttctgcttctaagttttggccttggcacgcttggtctctgcgctgttctagttttcatcaaatcattctattagtaatgtagtaacacaatgtattacagctaatgatatctatttctgtttatgtatgtccctgcaacatattttatcggacaagccgcttcttctttctcatggttctattccgttgcattgctgctccgctctacaatgtattttacttgctaacatccggctgtcatccggctgggtctccaatggatcgaaatcatcgcttaagtctctccactactctgttttttcccgagcctgaacgttaccgtcgcttagttggtcgtctaatttatcttgctgccactcgacctgatcttacatatatgcagtacacatttttctcaatatatgaattcacctcgtgaagatcattggactgctgctcgcaaagtagttcgatatttgaaaggaactcttggtcaaggaatactcctcgatgcgacatctcttcttcatatcactggttggtgtgattctgactatgcgtcttgtcctttaacaagacggtctcttaccggtcggatggttcagcttggcacctttcatggaaaacaaacatgcaggacacggtctctcgatattctgctg

SEQ ID NO: 4106 - DNA, 535 bp, Arabidopsis thaliana landsberg
ttaggtccaagcactgaggagtctggagttttacatctgttactatggttggggagacttcaagcagaggcaaagcacttgcaaatcaagtgatgtatatagcacattctactttatcgtcgctgtgattccttactggtcacgtttccttcagtgtgttcgaagattaatcgaagagaaagatgtaagccaaggcttcaatgctctcaagtatttattgaccattgttgctgtgtgcttgagaacagcttttagcatcaacagaggaaatgattggaaaatagcggcttgggttttctcggggttggcaacattttacggcacatattgggacattgtttatgactgggggttgcttcatagaccatctaaatcttggttgagagagaagcttcttgttcctcacaaatcagtctactacgttgcaatggtgagaagtgcgatatattgatagagcagtataaaccctaatttaggatttcagtatacttttggttatctctttgtaggtcgtaaacgttgtgttgagattggc

SEQ ID NO: 4107 - DNA, 7830 bp, Arabidopsis thaliana landsberg
tagcgccggcccaagaatgtcgtccaataaacgaaaagcaaagtgacggcaatccaagcctactgtgatcttgtccgcacccgataactatctttaattactaaaactagtcaaagtactcgactaatcacaaaactagacaagtgtttcaagtaaattaatttttgatcttttcattttatctctctctctttttcttctatccaaaacaccatttttgaggtatttttctctctccttcgaatcgaattttcaggtttctctttccgtttgtttgaagaagcttttaagtagaattcataaaatcttgcttagcttctgggtttgatttgtttgtggtaaagttttgattttttttttagtttgagagctggatttgtgattctttctctgggttggtgaagttttttacttgcttcgatcttatagatcagagcttctagcagcgtaaaaaatgcagacgaggtatatggagaggactaatagtatgagagagaagagaaaattggaggaagatgataatcagcagcagcagcaacagcctgagcgtaaaaggccagctcttgcaaggtaatttgtgttgatgcttgtaatttttctgattattgattatggcgttgttgaatctgtaattgatttgtagttgtatgaatgaaaaaagggttgttatgtatattgattgtctgtggatttgagaaagttgtgtatgtgttattgcagtgtaattgtggaagccttgaagatggatagtttacagaggctttgttcttctttggaaccgattcttcgccgagtggttagcttaataagaattgtttacatgtcttttggtgctttgtgttgtttctttggcttactgatttgttttgtgagcattgtcaaacaggtaagtgaagaggtggagcgggcattggcaaagcttggccctgcaagacttagtgaaaggtaacatatgactgttttaaaaagagataaaattaatggttggagtatttgtggttttcttctaatgcttgagttcacaggtcgtctccaaaacgaattgaaggtatcggtggaaggaatttgcagctacaattcaggtctagattgtctgttcctttgtttactggagggaagatagaaggggagcaaggtgctgcaatccatgttgtactgttggatatgacaactggacatgttttgacagtaggacctgaagcttctgcaaagcttgatgttgttgtgcttgatggtgattttaacactgaagatgatgatggttggagtggagaagagtttgagggtcatttggtgaaagaacgtcaagggaagaggcctctcttgactggtgatgtgcaggtcacgttgaaagaaggtgtgggaacattaggggaacttatctttacggacaactcaagttggattagatgcagaaaattcaggctgggtttaagggtctcttcgggttactgtgagggaatgcgtgtacgcgaggcaaaaacagaagcttttaccgtgaaggaccatcgtggagagtgtaagttcttgctttcctttgatattagtcattgatgtatctgaatctttgtttttcttttgcctaatgtttttttttcctacagtgtacaagaaacattacccacctgctttggatgatgaggtctggaggttggaaaagattggaaaggacggggctttccataagaaactcaataaagcaggaatctacaatgttaaagaattcctgcgtcttatggtcaaagactctcagaaactaaggactgtgagtgcacgatttaactatccagtatcttaccaagatgttcaaatattattattcatcatgatgactcttactctgattttcagattcttggaagtggcatgtcaaacaggatgtgggagacacttgcagagcattccaagacatgtgtattgagtgaaatgctttacgtctactatcccgaggactcagttggtgttgttttcaacaatatatacgagtttagtggtcttatatcaggaaagcagtattatcctgctgattctctttctgacaatcaaaaggtatgtttgttgggtcttcttgcttcttatagatacagatttgattcttctatcatatactcggaaaatagtaaaaggttatatatatgatgcagggttacgtcgatggactggtgaggaaagcctatgaaaactgggaacaggttattgagtatgacagcaagtcacttatgaacttcaatcaagttagcaaaacagatgatattgattactctatgccagtttcagttccaagccaaccatctacatcttattcagacgtaactgttgaaggtagaggttcagtccacaaatgtcgaatctttttaagttttggtgtgaaccgaatttaacagtcattcattgggtttttcagcatacaaccagagtccggcttcaagtttcccgggtcaatctcagctagctgatactacatacatgcactttggaaactcttcatttgcaccgcaagaccagctagttaacaacactcatgaatcacaaagcatgatcaatagcaacggtggtgtgagattggcactgggtccagcaacaggatctcaaaaccaagaacaacttgttcatcctcctcctgagattaactcttacaatgattggtcaaatacatgcaacagaggagttgatgggtttttatcagaggaagagattagggctagaagtaacgaaatgctcgagaacgacgatatgcagcaactgttgagactgtttagcatgaatggtggtgaccagcaaactccattgaacatgggagaagatagttttgggttccattcttttggtcagacgtcaatggctgattacgaagaagaccgttcaaactcgggcaaggctgttgtaggatggctaaagatcaaagcagccatgagatggggcttcttcatcagaaggaaagctgctcagagacgggctcagattgttcaacttgatgaagatgacgaataggttgaagaagaaggaagaaacagagaatctgagggttttcattgtgatgatgggtttttaacagtttcccagaaaaagaagtcttttgttttggtttcttcttctcgtggagctttgtatttcttgtacagggagctttcttcttctcttcttgtttgtttgtgcgtattatatgtaatcgctctacttgactagttttcatgaacccagaaacctgatgtagtttctattgcataatgtcttttatgttgtgttcctttgggttttgttattttttgggtatgtttgataatacacttgtttagaaatatttagtatttaattaataaattggtaaaatagaaatacactatttcttttaattttaaaaagcgtatatataaattaaaagaacctatttctctaatcttccacaacaattctttcatctttgacgaaaccagtttcgcccatcgccgagcagtgagttttaaaatttctgacctaaaaattctcatggggttttatgattcctagtcgattttatctggaattcgtaagcatcttgagattttctccgtcaatcaagagaaaacaatgtttgaaataggaaaaattgaacttatttcgcgaatttattttgagaattctaggaatatacaagtccttacgattgcatacaatctgttcgacgaaattcttaaaagagatgtatcgtttgttgtttgaaggagaaggaagattttgaagattctggcggagctgtggaattgaaattattcaacaaacaccaccgactcagcttgattcaatggaggaagacgaggatcagtttttgttgagtagcttaggtgtgacatcggccaatcctgaagatctagaacagaagatactcgatgaggtaaatatttgctcattcgtttggtattagtgctgcattgttgattctatgaaagggttagtaatttatgaaaactagcttgaactctaaatgtgtttatctctttgtcaggcgacgaagaaaccatacaacgatgagggtgggagcgaggaggagaagtctacacagcttgaaggaaccaatctgctttcatctagccaaaacgagcttttgaataaattgagggctgtaaagtttgaaatagatgctgttgcatcaactgttgagaacgtcgacgagattgcagcagaaaagggcttaaagaaagatgatgaatcagatttacaagggttgcatagtggttctgctcttcagcatgcccttgccacagaccggctaagaagtcttaagaagagaaaaattcaacttgaaaaggaacttactggtcttcatggtcagagtgcgtctagtagtgctgatcacggtaatctactgcgagatttggtgaaggagaagcctagtcttaagagaaaattgaaagagattcggaaaccaagcagaagagatgggaagaaggtgaaagtagtctcctttcgtgaggacacagattttgatgctgtttttgatggagcttcagctggttttgttgaaacggtacgtccagttatcttctaaaggttttatatatttgacctgattcctgtgggattatgctctttatctgtgggtatgtaaaatgcatatatgaaagacagtgactaatttcaagggtgttcttgtctaggaaagagatgaactggtgagaaaaggaattttaactccctttcacaagctcgatggttctgaacgccgacttcaacaacctggaccgtaaaactcacgcaccctaccttgaggagacgacgaaaatgaggactccagcattattgatagagctgtccaatctatgtcgctggctgcaaaggctcgtcccacaaccaagctacttgatgcagaagacttgccaaagcttgaaccgcccactgctccttttagaaggctgagaaagctttacaagactcctaattctccggataatgaagcaaagaaacgtaaagctgggaagaagagcaaaaagacgcggcctttgcctgaaaagaaatggagaaagcgaatctctcgtgaagactctagtcttcaaggaagtggtatgactgatgctattgacaattatttgtatttacagattgctgtttgggccctttgattgaatttcatggctattaattggagcgaatgcttttgaaaagataaggctgtgatattggatcttcccgatgttgagatatcacatgttatcaatgcaatgcttttaagtgataagtctcaacagtttctaccaatgttaagcaaattcttttttttccctcacttgagtttatgtaaaccaacaagttatgatgttgattcttgttgcaatgtttcaggagatggaaggagaatcttgaccacttccagttgcgaggaagaagagctagatgattttgatgatgcagatgacaacgaaagatcttctgtacagcttgaaggtggattaaacattcctgaatgcatctttcgtaaactttttgactaccaaagagttggggtgcaatggctttgggaacttcattgccaaagggctggtggcattatcggggacgagatgggtcttggtaaaactatacaggtcttatcttttctcggatccttgcatttcagtaagatgtacaaaccgagtattatcatatgtcctgttacactcttgcgtcaatggagaagagaagcacagaaatggtacccagattttcacgtggaaatactccatgactcagcacaagattctgggcacggcaaaggtcaaggcaaggcctctgaaagtgattacgacagtgagagttccgttgatagtgatcatgagccaaagtctaagaacaccaagaagtgggattctttgttaaaccgggttctaaattctgagtcagggctcctcatcaccacatatgagcaattgaggttgcagggtgagaagctgctcaatattgagtggggttatgcagtactggacgaaggccatcggatccggaacccaaattctgacattactttggtgtgcaaacagttacagaccgtccatcgaattattatgactggggcaccaatccagaataaactaacagaactctggtccttgttcgattttgttttcccgggaaaactgggggtcctgcctgtgtttgaggcagaattttctgttcccataactgtgggtggttatgccaatgcttctcctttacaagtgtcgactgcctataggtaaattacctggtctttcttttgaatcacttagttaactcatcacagtttgtgctctaaagaattcttgacaatgtgcaggtgtgctgttgttctccgtgatttgattatgccgtacctcctccgccgtatgaaggccgatgtaaacgcacatcttacaaaaaagactgaacacgttctcttttgcagtctcactgtggagcagcgatctacctacagggcattccttgcaagctccgaagtagaacagatttttgatggcaacaggaattcgctttatgggattgatgtgatgcgtaagatatgcaaccaccctgatctacttgagagagaacattctcaccagaacccagattatggaaacccagaacgcagtgggaagatgaaggttgttgcagaagtgctcaaggtctggaaacagcaaggacaccgtgtacttctgttttcacagactcagcaaatgcttgacatcctcgagagcttcttggttgcaaatgagtatagttaccggaggatggatggtcttactccagtgaaacagagaatggctttaattgatgagtttaataattcagaagacatgtttgttttcgttctgacgacgaaggttggtggtttgggaacaaatttgactggtgcgaacagggtcattatctttgacccggattggaacccctcaaatgatatgcaggtacgttttactttgaatgtcacagattcagtgtgcaaaaaacccgtcgtggccataaataacaatcaattttctgcttttttgggcaggcaagggaacgtgcatggcgtattgggcagaagaaggatgttaccgtttacagattgatcactcgtggcacaattgaggagaaggtatatcatagacagatttataaacattttctcaccaataagatcttgaagaatccacaacagagaagattcttcaaagctcgggatatgaaagatcttttcatcctgaaagatgatggcgatagcaacgcctccacggaaacctctaacatcttcagtcagctggcggaagagataaacatcgtaggagttcaatcagataaaaaacctgaatccgatacacaacttgctcttcacaaaactgcagagggatcctcagagcaaacagatgtggaaatgactgataaaactggtgaagccatggatgaagagacaaatatcttaaagagtctctttgatgcgcatggaatacatgtaagtacattaataagtgctcattgaaggttcttctccgacttactttcccataatttccaattcccttcactctcttacaatttttaacacagagtgctgtgaatcacgacgccataatgaatgcaaacgacgaggaagagaagatgagacttgaacaccaagcatctcaagtggcacaaagagctgcggaagcattgcgccaatcacgaatgctgcgtagccgcgaaagcatctcagtgcctacatggacgggaagatctggttgtgcaggtgcaccatcatctgtacggaggagatttggatcaactgtcaattcccggttaacccagactggagacaaaccatcagcgattaagaatggaatcagtgcgggtctatcttcaggcaaagcaccatcttccgcagagcttctcaacagaatccgc

SEQ ID NO: 4108 - DNA, 1194 bp, Arabidopsis thaliana landsberg
tccttaccgcagatcgcgtctacctaatgtccatgcgagtgaatccatctctgtgacccacaattgcggcgagttgcgatgcgcgatttcttggtttttggttaagttgatcaagttcatgatcattgcgtggagctcggccaattcgctggcaggtcgcggagggacctgattagatgggttggccgggttatctccgtttggaggctgtatcgtgacgtttcgttctccgccccttgtttgcggagggggagtgatttggtcagatccagaagaattcgagttttgggagatgttctccgtgtcagtgttatggatagcagcaacctgggctccgggagggagatccgttgggaggtacccatccgtaacgtcatcgtttgggatatgaactggtaagccagatctcgatgaattggatgaattgggatccaagatcgttggtcacaagtgatgtgttagtgttggtgttggaatgatctatttccgtgacggcgccaaatgtgggttttgaaatccacactagagatttgtatttaagattatgagaaaggagggctagatcttcactgaaatcttgagagttatattgctaagaacgaatggacttttgtattaattatgacaaagcttttacaatgtgaaaagagattacaagtgtaaaagtgtgtgtgtgcgaatgtgaactggattgaatgtctcttccaagtcgtccttgctcccttatataggtctacgcacgtggtagctccgtccgggatctgcggagatcctcctggatattcggcaggtcagttccgagatatcaggtcctcttcgcgaatatctcctcgtcagttcctaggtcattattcgcttatctcccttcatcagctgactgggcttatctggcccaaatacccattcgcgtatgtgggctcgttagctacgtaggtcctctacttagtgggcttggtgggcttttgttggctggcttggtattttcgcaggtggattcctggaggggaatccagctccaacaactatcctgtcgttgtagtattttaggtgtcaatccaatctggtgtgatgcaaacatatgagatatgattagaaagctctaagtcaagccaagcagagagttggttggtcctaacagtcctagtattcaataacagaaatgaaatgaaactaaaagcagaaatagcaataaca

SEQ ID NO: 4109 - DNA, 7421 bp, Arabidopsis thaliana landsberg
tatttgtggggcacgcccccgcacttatcctactgcgtataaacactaagtcgtcttcttcttcttctaccataaaaaaggaacattgcgtcctcatgcttgttgttagcttgggaaatcatgcgacagtttttgtttttaatctattttcaaagtcaatatatgaacagtaaggtttataacaaaaataattgcatccccgacaagaaagacgttgaatgatcgatcttttgaagccatttcttacttactgtacagtgggttctaatgtgcatatcattcaaaagtttgacatttgttatctctgcaagagagtgtgttgtagaaagtcagttgtcgaatttacccccctttttcaaaagtcacattcaggtcactgcttggaaaagaaacactttttttctttctgactcgggtatctgattctcttttcttctgttgttactaaacaagagttaatttgcttgacagtagtcttataatctttgggaaaaaggttagttaaattgtattttatctggtgtctttgtgcaacattatagaagacactaacttaagcatcctcctttatgcataatttgatttgaccccttacttgttagtggttgaaagctataacgaatatcaaattagagtttaattaatcttattttcacacgtgtttttgacattgtggctaccaacaacatctctgtccataccaagtgcttgtttaacgtttacatgagacttcagtttgtttgttttttggctagttaggggtaaaaattccattcttcttttttattggtctgtaaaaaaaattccatttcaagtaagaagaaagggagatgtttctacgttgtattccccatagtcaaatctaacgtcagcttcggccgagtgagaggggtcaatttcattcagcttaaatccaacttttttttctatgtctcataaataaatttctctttggttacaaaaaaaagtaaaaaagtttggtcaggaagagaggagcgaggacccaccgattacgtcatctcgtctaagaagtaatcagaaaaaaaaacctaatttttaaaataaaaacatcttctcgtgattgcgaagtttgtttgtgtgtgctgtgtggtgaagggtgatctctctctccgccccgaatctccgggcgatgcgatttttatcactgttggtttaataatctacttcacggtggtgtgttttaaaataactgaaatagttccggtcgaaatttgtaggttttcgagattttttttttttttggttggaaaaataaaaagtctctgttttcagaccgaatcttttgatgtatcacttgcatggctgtgaaggctctgtgtagcctgtaaagcttacacgaggattttgttgctccccttaatttccctctaatatctctccttctctctctctctacgataataatgtcttctctgcaccgtttcctttcgccttctttctgtccgtttccaagtttctttcgtttcttctttttggctctatttacttgccatctctctcgatgataacgacatgaaacccacctcaaacaaaaccacattcacttattattagcctttgtttttttttgagtggccgtgaaggtgtgtgattctggtgccctttcttcctttttgtttccctgcttaaggtattcctgatttttttccgtttcttgggatttattctgtgccattttttttgtttctgtttccaaattcttggctagttaattacgacctcaggatcatgtggatcctgttctttttgttatcctcttcatcagtgtttgacactatcttgtgttttttccctctttttcaataaccttagatgcttattccttggcctgatgggacacaagtgatatcagtgtatggtgatagacaacgacattttcatattcttccttttttttttttcttctttaatgttatttatgtttttttacttgacacttggtttcttgatatgtcctgatttgctttgacaacaaaaaatgcaggttaccgttgatagagtggtgttttggttctgttttggtgtgagcgtatgcctggaaataagtacaactgcagttcttctcatatcccactctctcgaacagaacgcctcttgagagatagagagcttagagagaagaggaagagcaaccgagctcgtaatcctaatgacgttgctggcagttccgagaactctgagaatgacttgcgtttagaaggtgacagttcaaggcagtatgttgaacagtacttggaaggggctgctgctgcaatggcgcacgatgatgcgtgtgagaggcaagaagttaggccttataataggcaacgactacttgtagtggctaacaggctcccagtttctgccgtgagaagaggtgaagattcatggtctcttgagatcagtgctggtggtctagtcagtgctctcttaggtaagtcataaatctcttatcgttcctgctctcatttttaatcactggttcagtatccaagacagcaatgaacaacatgaaacaaggttttagtaggctgacataaattttaatgaatgaacttatgaaggtgtaaaggaatttgaggccagatggataggatgggctggagttaatgtgcctgatgaggttggacagaaggcacttagcaaagctttggctgagaaggtacatagtaactcttgctcatgtggctgccaatgataatcaccttgtgtatacttgagttttaatttgttgtcctcatgattatagactatgtcatttgatttcttgattatgtgctcttaacttgcagaggtgtattcccgtgttccttgatgaagagattgttcatcagtactataatggttactgcaacaatattctgtggcctctgtttcactaccttggacttccgcaagaagatcggcttgccacaaccagaagctttcagtcccaatttgctgcatacaagaaggcaaaccaaatgttcgctgatgttgtaaatgagcactatgaagagggagatgtcgtctggtgccatgactatcatcttatgttccttcctaaatgccttaaggagtacaacagtaagatgaaagttggatggtttctccatacaccattcccttcgtctgagatacacaggacacttccatcacgatcagagctccttcgctcagttcttgctgctgatttagttgggtaaaaatctctactagcttctatgtattgcaagtgatcttccatggtattagctccatgtgacaggttcaaatctatgtgttactgtttcaaccaatcttaagtggtttgtctggttgagaactagtctaaatatcgaataatttatctccatggtacatatatagaggtgaaatagttaaccatgtgtagcttgatatatctaggatctgattgttggtaatgattcagttcttttaggtggtgtaagaatttactttgactgtgtataatttggatccaatggtaaaaatactacattggttattttagtaatgagctgatggatctttattctgttttcggaaagtaacatgacacattgtttactttacagcttccatacatatgactatgcaaggcactttgtgagtgcgtgcactcgtattcttggacttgaaggaacacctgagggagttgaggatcaaggcaggctcactcgtgtagctgctgtatgaccatttcattactttgaccatttacacttatcatgccgcagtgatagaaaagctaataataccttgtcattgtttgaaagccttgtaacagaattatgtatttgcttcggatttcagtttccaattggcatagattctgatcggtttatacgagcacttgaggtccccgaagtcatgcaacacatgaaggaattgaaagaaagatttgctggcagaaaggtacgaaagagccagttcccatgagaaacccctaactgtgttacaatctgtttgaaatctcttctcaagcaagtcaatgaaagtatcacataaaagtgtttatttgactctctttacttaattttttctgttgacaggtgatgttaggtgttgatcgtcttgacatgatcaaagggattccacaaaagattctggcattcgaaaaatttctcgaggaaaatgcaaactggcgtgataaagtggtcttattgcaaattgcggtgccaacaagaactgacgttcctgagtgtaggttttctttcttggagtctctttataatttagcttcactcgtgaaacaatacgaaacatctgctaaaatgtcccttttagtttatttatagattgttctagtcacccattgctaatggatgctcttcgggatgtatatttccttctcatacagatcaaaaactcacaagccaagttcatgaaattgttggacgcattaatggtcgttttgggacactgactgcagttccaatacatcatctggtctgttttaaactctttatgcttggtcagcgagttggatattatgatttctcacgagctgtagtttctttttttttttctccaatggaaaatgatctgtgataatgttgaatgttagtactctatggcacttagcattttgtgagttgcatccttagggattgaaaatggtcttagcagaccattatttctggtatcattgatagagaaaatatcatctgcatcatgctacatattcggtgttctggatcttatagttttgaaaattcaactctgacgtaatgctgataaaattctcattccctctcaggatcggtctctggactttcatgctttatgtgcactttatgccgtcacaggtaatcgtatggctacctggttacattttgtatggcattctactttacaactctcaaaaatgttactttctgccatctgataactttctttgactttcttgcttcagatgttgcgcttgtaacatctttgagagatgggatgaatcttgtcagttatgagtttgttgcttgccaagaggccaaaaagggcgtcctcattctcagtgaagtaataactcttactttgcagctttttaataaagttataatttaagagattaatatatgagagtacattgcatttgttttacagtttgcaggtgctgcacagtctctgggtgctggagctattcttgtgaatccttggaacatcacagaagttgctgcctccattggacaagccctaaacatgacagctgaagaaagagagaaaagacatcgccataattttcatcatgtcaaaactcacactgctcaagaatgggctgaaacttttgtcaggtatggaaatcaaatcaattgtgtctcattgatttgttcaaatgaaaattatattatctgagaattccttaatgaaatgcaactcttaaaaaatctgcagtgaactaaatgacactgtaattgaggcgcaactacgaattagtaaagtcccaccagagcttccacagcatgatgcaattcaacggtattcaaagtccaacaacaggcttctaatcctggtaagttctatataatccatttatctaccgtatagagttatgttttgggagctgcctttatagctttaatgatcttgtaactgtaaatacattcagggtttcaatgcaacattgactgaaccagtggataatcaagggagaagaggtgatcaaataaaggagatggatcttaatctacaccctgagcttaaagggcccttaaaggcattatgcagtgatccaagtacaaccatagttgttttagcgaagcagcagaagtgttttggacaaagtatatatcatttctctctgtctgtttcatgattttcttttcttgttttaataattttctctgactgacttggttttacttaacgtagaactttggagagtatgacatgtggctggcagcagaaaatgggatgttcctaaggcttacgaatggagagtggatgactacaatgccagaacacttgaacatggaatgggttgatagcgtaaaggtaaaagtatattagcggttcaattaaaccgcatctcaaactcaataacttctttgctgaattctagttactcttcttgcagcatgttttcaagtacttcactgagagaactcccaggtcacactttgaaactcgcgatacttcgcttatttggaactacaaatatgcaggtacttgtctatctttttacctgattgttttcggccttttctgatcacgctgaaacactgaatatatcattcttccctgtagatatcgaattcgggagacttcaagcaagagatttgttacaacacttatggacaggtccaatctctaatgcatcagttgatgttgtccaaggaagccgctctgtggaagtccgtgcagttggtgtcacaaaggttgaaaaataaatcggctctagtcttttctgtctactctatatcaccttagcttctcacattcaggattctttttttccttagggagctgcaattgatcgtattctaggagagatagtgcatagcaagtcgatgactacaccaatcgattacgtcttgtgcattggtcatttcttggggaaggtgatataccacatctaattctttagtctcgagggattttgatacaaaatgtctctgacattgttgttttcaggacgaagatgtttacactttcttcgaaccagaacttccatccgacatgccagccattgcacgatccagaccatcatctgacagtggagccaagtcatcatcaggagaccgaagaccaccttcaaagtcgacacataacaacaacaaaagtggatcaaaatcctcatcatcctctaactctaacaacaacaacaagtcctcacagagatctcttcagtcagagagaaaaagtggatccaaccatagcttaggaaactcaagacgtccttcaccagagaagatctcatggaatgtgcttgacctcaaaggagagaactacttctcttgcgctgtgggtcgtactcgcaccaatgctagatatctccttggctcacctgacgacgtcgtttgcttccttgagaagctcgctgacaccacttcctcaccttaatatcccgagacagtgtcaagtgagttcatgtaacccaataaaaactattgttttgtaacaaaaagcagccattaccagactctttagtggtttgattctaatataataagagtagagcaacttatgacacaaatgagaacaagctcttattacatataatattcgaactacaaatacaccccttaagcaaatctaatgaaagaaggggtaattaaacaataacaaaacaaaatacacgaaactgatattaaaggtgattatctaatgacgaatcacaatcattctcttcaggttttcttgtttggcccgtatgcatacttaatcagagactccttgatagagagtagctcaaggaactctttcttgagcttggaagcatacat

SEQ ID NO: 4110 - DNA, 543 bp, Arabidopsis thaliana landsberg
aagctgctcatgtgatcaatatcatctgttgcaggtattattttagcttctcttgttactttatccgttggatggctcttattaatccataggtgatacgtctagtttggtatgagttaagattttagaataacttgttttctttttcaattgtcatgaaacactagttctattaagagtaagttgttgtttatttcactttctgcgattttctagactcggtattgttttgcgcaaggctgcaaatgaaactcttgaaaaagagtgagaagagagacttgttgttgatatgtataaactcttgcaatagtataactcgagcttgtaatcttaaggtgatgaagctcatgaaaatataaaggcatgagagaatgaacggacggacattgtttctgtgtttattcgatttgttctttagattagggttatgattttagacaatagatttttttgtcttagattaattttagacattcaaattatttggttttttaataatttgattatatatatgatttacattaataataatgatttttaact

SEQ ID NO: 4111 - DNA, 658 bp, Arabidopsis thaliana landsberg
actagatatgtattaattatcatattaaattatttttttggttaaatgctaagattggggaactttttggggttataatatgatgatttcattcttggttttggttttgtagggatgtatcccagtgtttttggaagaagtgtgtgatcaatactataatggctactgcaacaatattctgtggccgatttttcactacttgggaacgccaccagaatatcgtaacgatgcaaccataacataccagtcacagtatgaagcatacaagaaagcaaatcaaattttctttgatgttgtcaaagagcactatgaagaaggagatgtggtttggtgccatgattatcatgttatgcttcttcctcaatatcttaaggaatacaacagtaagatgaaagttggatggtttctccatacaccatttccttcttccgagatgtacaaaacattgccctcacgatccgatctgcttcgttctgttcttactgctgatttagttgggtatgtaaatatcttttactttttaacagtgtagtaatcaacccatgatctcatatatactcccaaatctctatattttttttttgttgttgtttgtatagtttccatacctatgacttcgcaaaacattttttgaatgcattcctatcgacaaacaaaa

SEQ ID NO: 4112 - DNA, 1050 bp, Arabidopsis thaliana landsberg
gccccctaagaaacaatgaaagaatatacaaggcttgaaataacaatttcagtaaatatatatatcgagttttgcatatataagaagaaaataagaaatgatcagaagcatttaatttaccttaatctcaccaatggcatggacttcaacagaatggtttcctcgaacaacatcaactgatgcattagagattggtcctgcccataggtattgtaacaagtctcttgcttgtgctctcccaaattcaacatcttacaaaaagagtcaagaaaatggaaattttaacaaaaagataaaagtgtctggaattcaagaaactaatccaaatcacctgcatattcataattccatacgagcgaagtctcgcttgcttcgaagtacgatcttggagttcgatcagtgaaatacttaaaaacattctacgttatacaaaacaatcaaatccataaaagatataaaggaaagattaacaagtttgtctagtttttacagaaattactaacctttacaccatcgacccaatcaaggttcacgttttgaggcatatttgtcacccattctccagttgtctgcttttcgaacattccattttccgcagccagccatatattagactctccaaaattctgaattttaagtaccagcacatgagttacaaaatagatgtataaatcttatataataaagacactgatgataccttgtttaatatgtttttgccacttctactcaatacaactactgttgtttttggatcattgcacaatgctttcagtgttccttttagctctgggtttagtttaaaatccatttccttagttccactattcattggctctgcgagtgttccaaagaaaccctgaaacatatttgaaattgtttattaattaaaatttagtaaacatgcaaaaacataaaagtctagataagattcagaaagtctcccaagctagctagcttaattaccaatattattagtctattgttagattgcgaatattgttgaatcacatcttggtctggaagttggagtgggattttcctcatttg

SEQ ID NO: 4113 - DNA, 909 bp, Arabidopsis thaliana landsberg
tactacaatggttattgcaatggtatcttgtggccaattcttcatcttatgggacttccacaagaagatcagcatgacacaaaccaaactttcgaaacacaatatgatgcatacaagaaagcaaatcgaatgtttcttgatgtcataatagacaactatgaagaaggagatattgtttggtgtcatgactatcatctcatgtttcttcctcaataccttaaagagtacaacaacaaaatcaaagttggatggtttctccattcaccatttccttcttctgaggtctacaaaacattgccctcgcggtcagagcttcttcgtgcgattcttgcagctgatttacttgggtaaaactcaaactcttaacagtttcatatatggttaggaatcatctgatttggatatcaaaaaaggtttaaatttatgtattgttttttccagcttccatacatatgattttgcaagacatttcttgagtacatgcactcgaattcttggagttgaaggaacacatgaaggagttgtgtatcaaggcagagtcactcgagtagctgttgtatgacttcatatccaaatcttatacattatttgtttctttataacctaaggaatcacatcataacaataattcatctctgaggattttcagcttcccatgggaatatatccaaatcggtttataaaaacatgtaagctccctgaagtaattcaacaaatgaatgagcttaaagatagattttctggcaaaaaggtatatgtaattaacacattcttcttataatctttaatttgatgcctaagaaaagatttttacatcatactttttggtgttggcaggtgatattaggtgttgatcgtcttgatataatcaaagggattccacaaaagtatcttggatttgagaaattt

SEQ ID NO: 4114 - DNA, 708 bp, Arabidopsis thaliana landsberg
actgattatctcggtgattaacctaaattggcagattttaatcttatttggctctactaaggatgtttattcacttatcaaatatgtaaccagggtttctatggaacactcactgagccaaggaatattctgagtaaggaaatggatcttaaactaaacccagagctaaaagaaacactgaaagcattatgcaatgatccaaaaacaacagtagttgaattgagttgaagtggcaaaaacatattatacaaagtatcattaatatgtctttcttatttatactttcttgtttggacaaatatttcttatcttcacttattatgacacaattatatatctattttcccactgatttggtacttaaaaatcagaactttggagagtataagatatggttggctgcggaaaatggaatgttcctaaagcatactactgaagaatgggtgacaaatatgcctcaaaacatgaaccttgatagggttgatggtctcaaggttattaataaaaaagacacacttataatctttccactataactttcctgaaatctattatggattcgattattttgtatatttgagaatgttggtaagtactccactgatggaactccaagaacgttcttctcagcaagcaagacttcgcttgtatggaattaccaatctgcaggtgatttatattacttccttggggttgacattacataca

SEQ ID NO: 4115 - DNA, 2037 bp, Arabidopsis thaliana landsberg
ttataaacaaatcctggatataatagttaggaaagtttattggatggattatttctttgattttgaaattattgtttgttgtttgttgtttgttgttcaatcaataattgtaagactttagttaaaatgatgtaatacttctgattagtactagtaggctttcataggggttttcactttccaggttttaaagttttcattattatttctgattatgtcgtcctagtacatgattatctacttttcggtgtgttttgtagtacgagatgacgagatgtcacactctgcaatagaactgtataaacaagacactgaaaaaaatgtaacttttcattatttatgcaacaaaagattacatgaacatatagcaaaagatcatgcaatgagtactatatctcttaggctacactcttacacacgctatgtcacaagcataatataacaacattctagtgttcaagaaccctaactctgaacttaatccactcgtgttggcgagagactatcaacagaaaagccctacataaatcccagtcgcttagaacgtaagaaacaacatctatgaagacgaaggaacccatagagatgaagcatacacgattctacctttccacccttgaagtaaccagttaccgttttgatcaacatcgaagtttttatcgtacccgttttcgattttcaacttcagattctgcatcagttccttctcaagcggaagctgtctaaatccggctcggatcagtctcgcctgccactgcttatatgtctctggtctctccactctctctgttccttcacaagccacaacattcacaatctctctcccataaaactctttctcatacatcagcctcatctcgtcttccctagctagcttcgagtcacacatatcaaacacagccgagtaatgaaacaacgcttctctgaacctcgtgacaaagaatggcgcgttgtaattcccgcttaagatcgctggaatgaagacattcgggtttatttttcttatcagcttcaaaactgcatctctcgggctgtttaccagaacggtctcatctagaaggttcctgaaacggaacaaagagttcacaaccacatactctccttgtcgaagctttaagtcttcgacttggatcgtttcccatttctgagcaattgcgttgtactcaaacggaacattgtgtcgctgacagtatcgagccaagcgatgacctgtctcctgaactccttccgctggtctaaaaccgcgctgaggaagctctataccggtaattcgaagcttaggcgaaccaccaggtctgctgagcgagaggcgatgaatcagagcaggccactgaaaaccgtaagatattccgaaatctattatgtggatcgtgttggcgtttgcagtgaaacgcatcatgctgtggttagcaaatatgatagcagctttcttgaaagggcagaccgacatgtatgtctggtaagccttcaacatgtctgctgcagacgttttcttcgaagataaagcggtgtagatctgtgtaccggtcccagctaagcgtgcttcaagactatttgcaaaataatgagccaaccgctctgaaccattgcctagaggcgaagaatgctctcgtatctgccttagcatttcgttggcggttctacgatcatccactgatacagcttgtgcacataacaccaaaagagtcctcaaatcagcagtttctttcttagaatcgttactatgactagtagaagttgatttcttcccacgaatctttgctccatttgactgtgcggtcacgactttagcggattctgtaggaaagttctggttaagaatgcatacaggtttcccagggccacataccaagatcttatcaaacatttcagaaagctcgctttcctcaacataaacagctgattgcttgttacttctttcttcaacgaaatcttcatcttcgtcgcgccaatggcttttcttaccagttaatctgttgggaggaggagcatagctatgatgatgatgatgctctgtctcatctttcttctccgtct

SEQ ID NO: 4116 - DNA, 2181 bp, Arabidopsis thaliana landsberg
tgtactatgaaaatatcatgcaatggtgaagatgacaaggttgacatagcttgttatgagttaagaaacgaccccccagagcataggaccattcgctattagaggcatggactatccttctatagatatgtgaacttcattctctagttgagtatgtatcagagtgacttctaccttccagcactaatgaatgtggaagctcacacagaataaaagttcttgcgtagagaaatacaaaatcttagtgcttagatgaacatttgaccagtgaggagaagcagaccactatggttgagatcatctactagcaaccagaccatccaaaatctcttttcttctaaccaagagaccaagccagtgtcccatcaaagatgaattttaattattattttgggtaaatatgaaatgctctattaccaatttcgctttgacttctccatccaataagtcttttctatttggaatctcatgtaaatcaaagtgctttacaactttttggcaaacattttatctttaacactagaccaaaaacttcctcattaattaactaaactatatatattattggcaatagagcatcctgctttcgtaggaatccccttaccaaaaaaatcaccgaagatacttttggactatatatttgtcaaatcaataaataaaaataaataaaagattaagaaataaatgctcaaagcctcaaagtaaagacaaaagacaaaaaattggtgaaagcaacatagttggcattggagtgagcgaacgtaaccactcataacgcgtttgaaagagattgttgtcaaagacttgagaaacttcgtaacggttttatgatcactcattgactctctctctccgttacacttatgttctcgacgcgaccttccaaccataaaatactaatttcatttttattttcacttcatcgatatcttgtgacatgtaatatgattggcttatcaaaatctttcatacgaattttcaagtttgttcacatctctctcccaagatatccgtttaggagcctaggaccgtttttttactttattattttcatgtggaggaactgtaatatatatcacaattttgttgttcttgttgattgtgtaaatagtagtactggatactaaagaacaatgagtatgtatctcaaatatttagctcaaccgttttataaaaatactatattattaccttaaaattgtttgttgcttatcagtattaggtaattatgagatgtcactgtttaatctatttaaacgttttatgagttacattaatgaaaaaaatctgaaaagttaaaattatacgaatacatacctgtctgactctacctactgaattttgtaaaacaatttgttatattttataagaaagttgatgttgtagtgtttactgtctcataaaaaacaatctctatttatttgatttgagacttgaaatttttaaagcttgttttaaactatactgtttttcttataaaaaaattgtattaattttttttataaatgaaactgttaaaaaaaaaattgaaaatttagagatcaaaactaaacctttataatcattgaaatatattggtacatctacccacaaaacaggtcaatcgtctaggtttaattataattaagcctaacatgttaatgagattcaaacgaaattaaagtccacaatgccaactcaactcaagtatcaaatctttttcttctttttttactcagcaggatataccaaactcaagtatcaaatcttttaaaatttattttttacttacgtcaatgtgggaatgaccgagttacttaagagttatgattaatattaattcttgtttctaaccaattcatatatcattgtcttggaagcttcttcatatcaatgactcaactcttaatttttttcgaaaatctgttcttacaaggtcacacaattcaatttttttttgtattgtaaatgtttatctcgttatatttacactaacgagatttaaacacctaaaatcaaattgtacgagactagtgttagttattcaatagtatgatgcattgatgcaacaaaaatcgttgcgataatatatgaatccttatcactaccatgatcatttccattaaggttcaaactacttccttttggaagcataataaatactcaccaacattgaaacgcggtcgaaaatttaattggaaa

SEQ ID NO: 4117 - DNA, 841 bp, Arabidopsis thaliana landsberg
ctgggtggtgttgctgagatgaaagttgcagttgaaagaactggtggccttgttgttctgtctgaaagttttggccattctgttttcaaagattccttcaagcgagtatttgaagatggcgatcaggctcttggcctctgctttaagtaagtttctactttgtttatgcatcactctctttgataaatctattacatagtaaagaaaattttggcaatgtgataacctttccttcgaagcatcatacacttcaagcttgtatttaagaatttaaattatgtgcttacatcaaactgaccttgaatcgtttatttctagtgggacgcttgagatctgttgttcacaggacatcaaaattcaaggggctattgggccatgctcatcattagagaaggttaaacatgaagatccacttctctcaaaaatgcattgatagtgatttgtgagatgaacaaagctatctgttcttaatcaaattaaattttattttattttgatcctttcagaaaggtgctagtgttgctgacacggttatcggagaggggaatacttctgcttggaggttgtgtggccttgataaaactacgtgtttgacgatattttttgacatatcttcaagcgggtcaaatactcctggagctgcgaatccacagttttatttgcagtttctcacaaggtactttgggcagtgtttcagtcttgaattttatttgttttttagtttcacctgaactgtgcctttctgcagtacattgtgggcatcatagtccgaagtatcatatttactgttgtttatttgattgcagttatcaaaaccctgaaggtcaaacaatgctccggg

SEQ ID NO: 4118 - DNA, 2222 bp, Arabidopsis thaliana landsberg
tttgagagtcagataacactctctggacttcacatatgactgggagtattaacaacacaatatacgttgatcattgttcatcactaagttatgttgttgacatgatggtttcttttttggtgaataggacgaagcaggagatgagattaaggaggcatcaaagcccgatggtgccgagtaaacccgaagaagaggaagagtcattttataatggtagaaaactttcatgtgataatctgagtgagggatagctcaggattcttataagagacacagttttattgttgtttgtttgttttgaaactacttgcgatttatcattcctcctttagctatctcaatatttcctattctcctttctaatgaaagcaaaacttggttatttctgatatggtagttgtctttattttctatttttttggttattgatttgatcaactaaaaaagtgtgctaactttctcaaattgattaattaatgtacgaaaacacttgctgcaaatggatcacttccatgacattatactttgatataatatattacaagaaataaaaggtaactaaagtagagaaaacaagaaaccatatttataacaaaatatttcatttcaaacaatggtaaaagatctcagataacataggagacagacaagttactactaataaaggagagaaccacaccaaaatcctaatcttgttaattaacacttccaacaagttactgaaactcaaaatcactgaataagctagtgaacaagtgaagagctactctgtgtcaagtgcaaagcagaggactccacggcacctgaaagtccaaaggctgatcttgtcgccgacttttaagctgctacttttgacgacatcattccaaccccaattcaaagtgtaattcaatgttccatgtccagtgtccttctccatcgcccatatcttgaaacgcaaaccccacttttgaaatctttggttcacaagaaccgttcccacaccaatattttcttcgtcttcgttgtcttcgtctttctctatggctctacactcagcaggcgtcaagaagtcgtttctgattaacttctggaaagggattaagagacaggctcaggtttgagttgacatcactcttgaacagagtcctctcaaatatcagcctcgggttttctgcatcagcattcatgtatctcatcacctggaaaacccactccggtgtctctctctcggtgagtggaaaaagtacaacctttgctgtcttgaacccacccttactctttctctgttccacggcacgtctcttggggtttgtgttctctgttaggcatgaagacggagatgaagattggtaattagggaaggctacatgttctgaggtattgaactcattggaagctgaatgtcaaagtctgatcattgcaatgtaacacttattgtcacaagagtaatctttgaaggggattgcacgattttggttggatatgctgcaaggcaacacaatgcgattcgacatcctcaattggatctatgacataagagcttggaaaagaagatttcaagctatggaatttacttggactcccagacaggcgaaccaacctgcagacaaactggccaagacacacaaaatgatcctgaatttatttcttatttctatgttccaatttgtatctcaaacctacttcacttctatgattacgtttgctcttcttattaatggaaagctgagttaaaaaaaaaaaaaaaacaaaaaaacgtaaagttataagtagtagctcacaattcttttgtttagtttaaattgcttgcttgtttcggacatggatttttattagcgatttacacaacgtacaaacaaatcaaattacttgcttatcgtattaatacttgtctgttgtttactttattttcctatgaaaacgattttgatgtttactataggaaccacaataataataataataaatagcatcagctggcaatattatcacaacttttttttttttccactgtaacgctttttatcaccggtcagtaacacatttgtcgcattatgaatcatttgatgatcaataaaaaaaaaacacatatctgatctccagatgtaataaaatttgaatgagtttaagaagatgttgataaaaaagtaacttaaaattaaaaaagagacttgaaaataagcacatgtattattagtttgaagtttgaacaaaccatttttttctgctttacatcctcc

SEQ ID NO: 4119 - DNA, 358 bp, Arabidopsis thaliana landsberg
ctacctttgccttctgcaaatggggtcaaaggatctatcagaacctttgcgttcacataaagatcttgataaagatgcggctccgttctataagaaagcggagaaattttatgatgcgctcgcaaaccaactggttaaccaaggacatgtactggacctttttgcatccgcacttgatcaggtatttactttccctgaatgttatcttcatgttaaggagaaaatctggtgtaaaatatttcctctgattaacttccttgctgtgtgctctaactttactcagagcctgggtattctgttgaactctactttaacttggatcataattatgttatctgtgatttgaatgttaggttgg

SEQ ID NO: 4120 - DNA, 5506 bp, Arabidopsis thaliana landsberg
caatttttttttattgtgaataaattttggtattttacattggttcaaaaccaaaatgaataaatccaaaactctaaccaaagtatcaccgaatttataagacttgggggacccaaattgaaaactctgaaactttaggacccatttagcaaaaacgaagaaattatgaagacacccagtcggagaagaaaccagagacaagttgggaaaacgaagaaaacaaaaaaagagagctttttaaaaaatcaaatgctttgatccgattcgttaatggcgactcagatctgaagataatctcttcttcatttctggtgggcaaaatctaaatcttttcgaattcggagctagagaaatccgatggatgatttcacaggattgttagcgagagacttcggattgaaacctcagggcaaatcagctcccatggcttctcaatcgaactcttctgccgctgatttcaacactttcgcttcttcttatagcttcgccaccgctgccggtaaaaagtccgattctttgccaatgtttgacgatcctggtcgagatggtgatgatcttctcttcaaagatgtgtttagtggaccaccaccaccaaagtacggatcttcttctggtgattcacgttctccatctgctcctgcttttgactatgatgctatgttcaaggaacccaaatccaaatcagcgtcgtctatgccggtttatgacaagcctgtgtatgatgatgaggatgtgtttgagtctattcctgagctcaaaatcccttccacttcttctcagtcagctaggtttgagaatgttttctcttctatctcatcttctcctacgaagcacaggaaacagaacagttctcctttcgatgatctcatgggaaacaatttggggaagaaaggggcagatagtgaccgagaggagaagggtagttccatttttgatgatttgattcctgggtttggtcgcactagctctcctccacctaaacggtagtattctttaactagttgctttttctttatctgtggttactagttagggtcactcactgccatttatatttgagaacttgcttgcgtgaaatgactctttgaaatgtagagcttagagaatgaaatgtagcatttggtacttatgtagagcagtttgattcccgggtttcgaaatgttatgtactctttatcttcatctgtggttactggttagggtcattgctcgtcaaattttagagcttgcttgcgtggcatgagtcaaggctcttcaaacgtacataatgattaagttaatattagtgcttatggagctgttctcttcaatttgaaagcttggttgggcacagagcttggatattggttattttatgaatactctctaaaacttgagtgagaaacctgaaaaaaaaactttaaaagcttcagcgttcatgtcattcatatgcacaatttcatttttgatctgtggctagggtcattgcctttctaatttgtttctcctagacctgtggttactagttagggttgctcctatcacctgctctctttaaatttgagagcttgcttgtgtgaaatgactcaagggtacagagcttagagacatcatgctttcataatagtagtgcctttatctctggctttgtagcatgcactctattctgtgtcatatcctgacattgctcttcaaatttgtttctcccagacctgtcttaagagcttgctcaagggtataaagcttagagccatcacgcttacataatcataatgcaatgtagcatgaactacattatattagtgcttctatttgcttgcatactatacaaatttctcttatgtgtagtcttctaacttaatttcattttgatttttgctagtatagggataacttgtttaccaattgattgataccctactattttgtgcaggacaacttcagagacaacaaatcaatccgagaaagctccatatcaaactgccgagacatcttccaatgtggaagaagacccgtttgtagtcttggaagagactgaatcaacccctagagaaccctccacgggagggttcgctgatccattggaggatattggtaaattcaacagcagaaaaactgatcattcatctgtccacggcggagtattttgttgatattgaccctcttgagagtctaggaaaaccagcgccggatatgaatagtagaggcaagagtcatttaagaccaccaggaaacatcagtggctcccagtcaccaccagtagaaagtcctgggagttaccattctaagaaagtttcatttgaagatgttttagagccacataatatgagtactccaccacctaccaattcaaatggaagtttcgagtcgtctgatgatgtgtggcttactgtatccgagatccccctctttacgcaacctacgagtgctccgccacctacgagacctccaccaccaagacctacacgtcctacaaaaaagaaggttaatgagccttctataccgacgtctgcttaccactcacacgttcatagctcaggaagagcttctgtaaatagcccgacagcatctcaaatggatgaactcgacaatttttctattggcagaaatcagaccgctgcgaatggatatcctgatcctccctctggtgacgattccgatgttttttctactgctgctgcatcagctgctgccatgaaggatgccatggataaagcagaagcaaagtttaggcatgctaaggaaaggagagagaaagaaaatttgaaggcaagtagaagtagagaaggagatcacacggaaaattatgattctcgtgaaagggaacttagagaaaagcaagtgagattggatcgtgaaagggcagaaagggaggcagagatggaaaaagcccaggagagggagagagaggagagagaaagagagcagaaaagaattgaaagagaaagggaaagactgttggctagacaggcggtagagagggctacaagggaagcacgcgaaagagcagccactgaagctcatgcgaaagttcaaagagctgctgttgggaaggctactgatgcccgagagcgcgccgaaagagcagcagttcaaagagcccatgctgaagcacgtgaaagggcagctgctggggcaagagaaaaggctgagaaagctgcagcagaagctagagaaagggcgaatgctgaagtgcgggaaaaagaagcaaaggttagggcagaacgagctgctgttgaaagggcagctgctgaggcacgtggaagggcagctgctcaagctaaagctaagcagcagcaagagaataataatgatcttgactccttctttaactcggtttctagaccaagcagtgttccaagacagagaaccaaccctccggtaagatggattatctacttctgttccgctttaagtcctttaccggtgatttgtctacttctataactctgggtttgttacaggatcctttccaggattcatggaacaaaggaggatcttttgaatctagcaggccatcttcgcgagtgccttctggccctacagagaacttgagaaaggcctcttcagcaacaaacattgttgatgatctcagttcaatatttggaggtagtgcaatttctgaggttcatgatgtgaccataatattctgttgctatgcactttatttttatatcttttaacttggtcacctactgaaaccccctgtgttgtaaagcttcagcttcccaatctggtgggtttcaagatgttgatggagaaactgaagagagacgacgtgccagactggaacgccaccagaggacacaggagcgggctgtatgtatcattagagttgttaaatttttttctttgatgggtttttgtatcggacaatgacatgatttgccggtatgttttataacatgaattcttttttcaatcaggcaaaagcacttgctgagaaaaatgaacgtgatcttcaagtacaaagagaacaagttgagaaagatgtaagtttccttaccacgtgattcagcttgaaacttttacatgtggtttctccttttccttcctctgttgtgcacatctcaaaccatgttgctttgttcagagacttaggtctggggccttttgcagccattagaataagagattgcgccatctttcgatacagtctcattgtttttttttcttttgtttatacaccatacttaatcctggagtatagaggatctgtaaactttttgttcaatcattattcttatcctggatttcagagaattggggtgactctggatgttgagataaaacgttggggtgccgggaaggagggaaacttgcgagctctgctttcgacattacaatatgtaagtcgtattgtctgttttctttattatttgcacctctgtgctcatttgtacctgatgttatgagtccacaatatcttctgatgctgttatgtaaatgagcaggttctttggccagaatgtggttggcagcctgtttcattgaccgatttgattacggctgcgtctgtcaagaaagtttacaggaaggccactctatgtatacaccctgataaagttcaacaaaaaggagccaatctccagcagaaatacattgcggagaaagttttcgacatgctcaaggtatgattcaacatctttctggaactaaatccatcactgatactttcagatgccaccaaaggaaccaaaaaaatccacttagactgcgtctcctcatggatgactagaagatccgcacaattgtacaaaatccatattaactggcttgaactcttttctcatgacaataaacaggaagcatggaacaaattcaactcagaggaactcttttgaaaaaacctgagataatgtttttgagagtgtgttgtttgtctctagcgcgaaagatgaagcatgtggcattcattcgaaagccaaaaatggtgcccaagttggaagcagagagttgtcgatagagtatgtattccccagactgattacccatcactgcatcatcatataccacgcagcaactgggcattcttttttttgttgctaatttttccttctcattaccctcttcttcaagagtatgatgtcaaatgtattgatgttgaattctgtatcaaaaaaacacaatacttgagagctgtgtattcttgtttccaaactatttatatatgcatatatgaacattcttttaagtggcgtcctgtaatttctgtggctttttcgattaatcgcacctcggtatcatcaggctagttacattgaacattaggaatatgtttcaccataccaaattggatgttccaagaatcatttaacaaaataaaccatcaattcacagttattattaagaagagtgtttcttttttttgttactagttagcaacatctgcatgcttccaccatgcctaaccagctaaccgacaatgatctcgagtggtatacatgaaaaatgatgtgtatccttctttaagttaagagctttatgcaacaaccttaaacgttttacaagcctcacatgttatgta

SEQ ID NO: 4121 - DNA, 1477 bp, Arabidopsis thaliana landsberg
tggtcggccggagcctgcccgggtcgtccgttagcgggaccgacgccggaattgatctgccgaggcctcgggcgagctgatgtcctcggaggacagctggtcgaggcctcggggtgaccggccgagccgcctgctcgggccggattctcggagaagaccctggcggcgatggtcagggcttggtgatgacgttgtccttcagagtggagatcctcggaccgggtcgccgtccgaggctaggtcggacctcaccgaagtgtcgtcgatgccgagggtgctgctgctcccttcagccgtcaagatccgagcctgcaggatcggattgtcttgtagcgtgtgttttctgcggtcgccgaggcccaaacacaccctcgccgtgttgtaaagatgcgcttcttttcctcttgtttcgagtatctggactttttcgtcggtaacagaattgtctgtgcgagcgagagttgcttttcacggaaggtgatgagtgaggtatccgtatcccggaggcgtaggaatccctcggctcggtcggccttgccgcttacgcgcacccttgcccgtccatagggttctgccaccgacacagtcgaggaggcccgaagaatcacttcggcagaggagctttcgagcgtgaagacttgttcggtccgcggaatcgcttatccaaacgcgagttacttatcgcagaaggtgatgagtgaggtatccgtatcccggaggcgtaggagtccctcggctcggtcagccttggctgcttacgtgtactccgtcgttttcgggatccactttcgaagtagtcgaaaagcacgaaagacattctggcagaaaggatttttttcgaggaaaaaattcgacgcagagggggttcccccttttagcccccgagggagggtcgggctttgccgaggcaaagctgacccttccttgatgactaaactttgcgtgggagcgaggtatatgaataacttgaaagcatcttaagggtagaagcgacgtagctattggatgttccaagcgttgctgtagacctcgccttgactgttggccagctttgtaacaccctgaatttgggggtataaaatttcttttccaatatccaccaaattcaggtgttaccctcccttttctatgcttttcttttcttttgcctaaagagtgaagaattattttgttttatatctacgtgtaagcctagtaaattaaaaccccataagtgctttgattgtcgcatcatgctggagcatactttcactttgtttgatgagtgattttggtggagcatttgtttaataaggaattcgatttgacatcgtggagagaataggaaagaaaaaaagataaagaaaataggaaagaataaaagataaggaaataggaaagtaaaagaaagagacctagcccctcctcccctcagcctaggcgcggcagcccacctggcccagcgccacacgccccctctccctggcccagctcgttc

SEQ ID NO: 4122 - DNA, 548 bp, Arabidopsis thaliana landsberg
atagttttacctgctgggactctatcatcgcttcactgtggactctgacaactatatcaaggtgcaatgtcagcttttcttctagccatttattttatggtttgggcttgcttagaaaattgaaatatcttgttgaacaggcaatgcggctattcgtgggtgaaccggtatggacaccatacaatcgcccacacgaccatcttcctgcaaggtacaatgtcctgatttctccccttttgttttgttctcttatgcaaacaatgggatataatcaagcaagaaattttgttattttacgagaaagaaattctgatatattgcaggaaagaatatgtcgataacttcatggtcaatgcctctgcttagagagcttcctctctctatatctggctttctgaaaccaggatctataaacaaggcctacaataaagaaagctttcctgtcaagtattggatatttatatgtattcctgtgtagaatgatggattttggtatgcttgagttgttataaacttagttacactctctggtatgtctctcttaacca

SEQ ID NO: 4123 - DNA, 772 bp, Arabidopsis thaliana landsberg
ctataacgttactttttcttatagtttggaagcttctctggacacacctcacataagtcctaaaaccaaacatcaaaatcgaatatttaataatcaactaacaaacgaagatttattttttgttaaaaaaaaagaccaaacaaaggaagatattaaaaaaaggcatcaaataaatgtcacaaaccatgtaggagtaaccacgagattcgcggatctttttcaattcctcatcggtttcatagttatcagcatcaagtctccagcaaagtactccaagctctgaacaaaaaaaaacaaaaacattattaacctacgtgaaagaataaaagtatgtgcaacaatgaagatacacacagacctgcaagtttgtccaaagatacaaattccttaggatccttgtggtgaggaagtttctgatcctattgcttattatccaagtaccaagcttgaatcacttcttcagtttgatcctacaaaacatcaatctgatgctaagcaaaaacacttctaaattaaatgggaatagtcctaactcataaggaaggttgtttatattaccttaacggcttcacccatgggtattttacttttgtgttcaaaatgaagaaagaatgaaatcatttatatagataaaaaaggaaaccgctagcatttttctgtgtgcacaaatgtaaagtatgaacacagaaccactctttcatttttcttaggcacctttatcgagaagacaaggacgtcacgaagtgtcaaggagatgacgaaaaagtgatga

SEQ ID NO: 4124 - DNA, 2951 bp, Arabidopsis thaliana landsberg
attgtttgtgaaagcttcgacctttatgtatctattggcagctaaaatcgaaatgctcctcttaagttctttattgttgtgtttttacaggagaaagttcaaggagatgcacatgatattgaattccatggatcaaaagtagctgttgaagatggacttgttagagcctttgaggttgggactaaagggccttggatggaagatagtcatgaacttaaaccttgttggtcaatttctcaatctggtatgttccctgagtttgtttctcagattagttctgtttattattgttagtgtgtgttaatgattctggtgtttcagatgaagcggtatcgtcaaagggttacgttacattctccttaacaaatggtcctgaataccatgtttctcaggtatcctttataccaactctaaagtttcgaatttgcgaactcaatctggctttcctctgattgttatgtggttgaactatcgttttgtttagattactgatgccgtgatggtggcgaagcatcttggagcaactcttgtgcttcctgacattagaggaagcaaacctggtgatgaaatgttagtggtgtttgtatcttcataaacattttggtttcattgaattgtttgtttcccaaaggtttatgaacaaaatttgaaacgcttgaccaggaactttgaagatatctatgatgtggataaactcattaaaaccttggaaagcgtcgtcaaagttgttagaaaattgccgagccatgtatctctaagagatatcgccattgttaaggttcctacccgagttgcagaagcttacatcaaggaacatattgatcccatcttcaaatcaaaagggaacataagagttacaacctatttcccttccgtgaatttgaggaaatcttcgcagggtgctgaaaccgaccctgtctcttgtttggcaatgtttggttccttggagttgcaacctgcagtgaatgaattggttgagtcgatgattcagcggttgaagacacatagcaagaaatccggtggccgtttcatagccatagacttgagggttgagatacttgaaaagaaaaactgccatgaaacaggtgcagtggggtccaaaacatgttacaacgcacaagagattgcattgttcttgaggaagcttggatttgacagcgatacaactatatatctgactcagccaagatgggagagcagcctcaatattcttaaggacattttcccaaaaacatatactaaggtgcgtaaaacccttcattatttagtctctgaagtctccaaccatttgctaatcttgatttcttttctgcaaatggcagtagacgataatgccgtcagataagaaatcgaagtaccttgagttagagaattctgaatatgaaaatgttattgacttctacataagttcaaggagtgatgtatttgtaccagccattcccggtctgttttacgccaacacagttggaaaaaggatagctttaggcaagcctcaagttctcgttccagccgagatctcagggacatccggtcttcccgctaattacatatctccctatatatcaaagaagaaccacttggcgtattcatgcttttgctgaacttcgctggtgtaacttttgagggaaatgttttgctaaagtgatcttgtagccaaaatctgttaaaatggtcttctcagcaaatgtaagccaatagtcaccagtttcttcaggtcgtttattgataagtttagctcgataccaattcgatttttagtcaaaagtattctcattggggttgtcttgtttaggtaaagaaagtaaactgttgaagttacaatttgattctattggctcatataacgtttgcatacatttcataaccatatggtcgacttgagagagacgtcatagtcaaaggaggaacttcgaagatacggcgagacattgttcgctgttcaaacattactgaaaatgaacagctataaagtggaaatgcagcaaccatgcgtgaacaatgcaatgtacgatctgtcttttcttcttttagagagaaaagaggtaagaaaagatacaatgaaaatgttgagataattgaactcatggtcatatgttgttcactgagtctgagttgtctccccagttcttccattacttcgagccatctctaaggctagacacttattgagctctataacaacctggctcatgcttggcctattatgagcacgagctgcacaactgcatgctatatccatagctttcctgactgagtcaggctcaaagtcattttttagcctgagatcaacaatctctagagtatcgccttttgcgacctttaaattgacccactttgaaatgtgaggactctcacgcttgttgtcaactacaggctggttggttatcatctccaacataacaatgccaaagctataaatatcgctcgtttgggttaaccagttcgagttgaagtatctgcattatcgagttcattatgcacagtgagtaacattttcgagtccattaaaagttctgaggtaaacatatatctttacgtactggtcatccagatatggatctcttccaggcttgacataaatcttatttgacgcttgtatgtcagggttggttggagaggatctagacagcccgaaatcagccagtttcgcttcaaagttttcgcctagtaggatatttgtcggcttaacatatcggtgaaggattcgcaactcgctatgcaaatactccagacctgtgaatgcactttacaaatatcagtttctgccatgaatgagaaactctgtttcagtcactgcagcttaagttaccttgtgctactcctatgatgattttcaacctggtttcccagctcaggacattaccaaacttccctgttacatcgaaagaaaatgcggttattgtctggtatattcgtacaacttgaagaacaaaccaaaactagaatgtaat

SEQ ID NO: 4125 - DNA, 755 bp, Arabidopsis thaliana landsberg
tattatctagggttgaaggaactaaaacgcctgtcctaatgatgtaaggctagccctaacctacatgtatctgaagcgtgcaaatttacgttaatacaattttcaaagcattgtttttcctctccttggagaaagtacatgcaaaatcaaaattaatggctccgacttttcgaatcaccgcaagctactatctcttcgagttctggttataatagtacttgattagatacttcttataaggcttaaaagccaacttaaatgctattgcagtaaagatttcattccttcttcacttcactttacgaatctaaaggatatatttagttcttcttcacttcaactaaaaggctaaactcccaaaaaaatatttttatctctctcaaaacttgaaatatggtgaggaagactactcaagctacatctcacaaggtatcgacaatattttatttttattattgcatgaagatttgttttgtcaatgcatgaagatcccaaaacttgaaatatggtgttttatttttatcattacatgaagattcgttttttatcattgcatctcacaaggtatcgacaatgttttattttcatcttagtctttgtttggttttatgtgtgtagcgaaaaccaacgacatcgttaattgactcatacgctgcacaatgttggaagtgtcccaaagtccgatctatagagtcacaagaagattacaaagagaatcgtagtaaaacactggaaaagttttttgaatgcaacag

SEQ ID NO: 4126 - DNA, 619 bp, Arabidopsis thaliana landsberg
  unsure (1)..(619): unsure at all n locations
atatcatatcccctaacatggagagagtannnnnnnnnnnnnnnnnnnnnnnnnnnnnnnnnnnnnnnnnnnnnnnnnnnnnnnnnnnnnnnntgacaatgttctctttcattgtatccccccaaaaccatacaaaaactatgtcaatattactagttttactaattctactacatttttcagtaatactagtaaaacaagtcatactacttatgtcagtaatactagatatcgatccgcggtgtagttgagtattttcgatacggatttatttattgattcaattaaatatcaagtatatttaaacagaaattttagatttttaatttatcaacttagtatttatatctatttacatctctgattatgttagtatattacagattaaagttttaatattgaaactttgatatttttattaaatatttatagattaatctgtagtatctgcatgacgatgttttctaataaaaaattaaaactctactttgtatttgttttgggaatattggttgttttgtttagagtttaagatcgtataattttattattatggccaattttatacagactgataggtttatgatttcaccggtaatatactggttcatattaatat

SEQ ID NO: 4127 - DNA, 266 bp, Arabidopsis thaliana landsberg
tgtgtgtagcgaaaaccaatgacaacgttaattgactcatacactgcacaatgttgaaagtgtttcaaagtgagatatagagagtcacaagaagagtacgaaaagaatcaaagtaaaactccgaaaaaagtcttttgaatgcaagagatgtgaaaaatctacagatgtggttgtgaactttgattcccctattgtgcgttggaaaaaggatggacatggtatacccaaaacccctcaaggtttgaagagggttttgatcgtcagaa

SEQ ID NO: 4128 - DNA, 1647 bp, Arabidopsis thaliana landsberg
ctgctagctgtattgccacattacagattcataaacttcagattatatttacaactaaaaaggtcaaaagacatgtagctttagtctatgcaacttgagttattatcgaatgttcagatatttagatacttgtgcgaggaacatagtgtaccttggctactgatttaggaggatattctccttttaactttggatcaacacattgcttcactttatcttcactgagtctcggtgtagcctgaataatagacagcacacttcaatttgtaagacatgagatagaaacagagcaggatacagatttggacagcgagcagataacaaacatacccaagttacaagactctgttggccgcgtggcattgtatgatctacaggtttccttcctgtcaaaagctctagaagaacaaccccaaagctatacacgtcactcttctgcgttaactgtcctgtcatagcatatctgcaaatggaaagaaacattttagctgccttgctcataatttcatttggacgcaacaaaagttttaagggtttaaggaagattactctggagcgtgatagccaaaggtgcctaaaactctcgtagagtgaagacgagcagcattatcaggagcttgatttgagagattaaaatctgcaacttttgcttgatagtcttcaaaaaggagaacattgctagatcttatgtctctatgtattacaggaggctgaaccttctcatgaaggtattctaaacccctagctgcctcaacagctatcttcaccctcgttaaccagtcaagtgttggacctggctgtgctccttgaactcccttcctacctataatagtaacacattccatcaagaaatcgattctgttttctatatttttcccaagcaaggaagttttctaacaagaatgagcgtggaagctcctcataccatgtagaatgtcgtgcagtgatcccattgttgcaaactcataagcaagaacacggaggttttcatcaacacaataaccaaccagttgaatgagattctcatgttttagtcttgaaaccatggaaacctaagaagaaggaagcaagagattgtaaagaatttcttttctgaagataaaaggaaatgaagggaagggggattgaagcaaaatttataacctgattcaggaactcggtgtttgtttcagcttcaggtgcaacatcgagtttcttcaaagcaactgctttcccatcatttagagttgcataatatacccttccataagaaccctcaccaatcagagacttagatccaaaattgtcagtcttttctttaacctcatccacagacaagggaggaacttcgatgggaagagcttctttctgcacctcaggctttacaacagcttgtggtttttgattcttttgatttgctacatacgtgataacatgcaaatatcatattcttattagaaccattacagatattcatcaaatgttacaagttcactccttcaaaacagtcaaatactaattcttatgtgggaaactatgatactaattataaaaactctgaaagcttaagcctatatttagtacgccaaccatacccaccaaaatcatattcccaatagattatcaaatccgaaccatacatagacaataagtatccttagagaacgg

SEQ ID NO: 4129 - DNA, 991 bp, Arabidopsis thaliana landsberg
attttatattgcatctgaagcatccataaaaaacttcaaagaagggtatagcactcctatggcactcttggcaagtgaacatacgatatttttcatataaaggatgttcgtgccaaaagaggtccagcgtcttagccatgggcaatgttaagaatggttgtggatacgatgaatgaataaggatcaggcacctttaagaaaattgaaaaggtttaacttcaattcctaattgatctctcaatccttatattgttgacccgtatcactacccacgatctccgatataaatcactcaagttgatcatcgttagttgtacgcaactaatagaactggtttagtcttttcttaaggctcaatttggggggtccaagtgtttattatatgtcaaaaaaattatttagttagtccgactaatctttcaccggattattaaaatgcgtactcatcgttgactatagaaatatatattaaaaaattgtctggttgatcacatatatatgttttgttatccgagttgataatattttggaaggtgtgaggatgagcacaagggaaaccgctaggagaacaagaagctgtcagtgaacgccttttcacagttcaatgaagtcttcacttgcatagaaaagaatatacagattcttatatttaagcaaccatttaactctaatatttttgttatgattggaaccgaagttaatcaaacgacactaattaatttctagaaccgaatttaatcaaacagaaattgctagtttttttagatttaaatttaatacgagcaaccgaaaaaacggaaacgcatcaggatacattttgcagctggtctcttaaatggttcataaagagtcaagtataaaaagtaaacacccgagctgtttctgtatctatccacacagatttcaacttctcttatttcatcgtctatcattactgtcttcaccgctatcaccaccgaactgtgtggagtttccgttccaaaaagcgttt

SEQ ID NO: 4130 - DNA, 1147 bp, Arabidopsis thaliana landsberg
tgtttcaatgctcttttcccttcctttgtcttaaggaaacttgtatttacattctcttgcttctttctccttaggtttccatggtttcaagactaaagcatgagaatctcattcaactggtcggttattgtgttgatgaaaaccttcgtgttcttgcttatgagtttgcaacaatgggatcattgcacgatattctgcatggtataatgagtttccccgcccttcttattttaaaacttttttctgttttaaataactaagaggttctcggcctaggattgttttctccatgattgtgtcatgtgatgttattacaggtaggaagggagttcaagatgcactaccaggtccaacacttgactggataacaagggtgaagatagccgttgaggcagctagaggtttagaataccttcatgagaaggttcagcctcaagtaatacatagagacataagatctagcaatatacttctttttgacgactatcaagcaaaaattgctgattttaatctttcaaatcaatctcctgataatgctgctcgtttacaatctacaagagttttgggcagctttggctatcactctccagagtaatcctccatagtttgtaaacttttaaattttgttgcatcgttataaaagtatgtatgagctaactaaatgtgacttgccatttgtagatatgctatgactggagagttgacacataagagtgatgtatatggttttggggttgtacttctagagctcttgacagggaggaaacctgttgaccatacaatgccgcgaggccaacaaagtcttgtaacttgggtatgttttagctactctttttccatctcaatatatatgtatcatactgtgttttaatctcatatcttataatcgtgtattattcaggctacaccgaaacttagtgaagatacagtagaggagtgtgttgatccaaagctaaaaggagaatattctcctaaatcagtagctaaggtacactactttcatcccagagagtatataaatatctaaaaaagggttaggatggtaacttaatagacaagaattacatgtctttggtcgttttaatcgcaaaaaaatgatctaatatttatgtaatttggtaacgcagctagcagcggtggcacttta

SEQ ID NO: 4131 - DNA, 2383 bp, Arabidopsis thaliana landsberg
  unsure (1)..(2383): unsure at all n locations
cactaacctagaaagtattgaagaattgagctttataaaggaactccatttaaggttaaagaaaacaatgttatctcatgtgtatttgattgttatctagtgttcacagtccaaatttagccttattctcatgggaaataaaattctctatgttcagaactgctcatgagcttggagtggaaacaacggttattgaaagtaagtaccttggttctcgttctcctattgtagtttcagaattttgctttgctcattcagttgagtttttcttatctgaatccgtttttctggttaatttatttgtagaacacctagaaggactacaccagcttctcaaaggcatatcaatgatgaaagagctaaccttacgcacaagggactacttggtttcatttggagagtgcatgtccacaaggcttttctctgcgtatctcaataaaattggccacaaagcgcgtcaagtatgttgctttataacactctggtcctagcataaccttggccctgcatataattgctgcattcatcatacagattacagaaacttgagagtgtgtcaatgctcacaagtatgtactctaacatgagtttagttcattacttgatgagttgtttgcttgttgttggcagtatgatgcatttgagatcggatttatcaccacagacgactttactaatgctgatatacttgaagcaacataccctgccgtctcaaaaacacttgttggcgactggagcaaggaaaatgcagtccctgttgttactggctacctcggaaaggtttatatttttctgactttttatgttgttctcgtggatcaagaaatatgtggtgctcaactcgggttctcatctattctataaattggaatgggttctgcacaagagttgttttgcttattgtatcaattttgaaaacaaaacttcattctcgtatgcatgtgtttctgcagggatggaggtcttgtgctatcactacgctgggtaggggtggcagtgatttgacagctacaacgattgggaaagcgctaggactgcgggaaattcaggtatttgatggctttggccaagattgcatcatgtagatgaaattttgttaaacaatgattttttagtataggtttggaaagatgtggatggagttttgacttgtgatcctaacatatatcctggagctcaatctgttccgtacttaacgttcgatgaggcagctgagcttgcttactttggtgcccaggtaatctcgtagattagctatgcactatgctgatgagttcttttctgtcagatggctgagcatattcctcttccattgcaggtgttgcatccactgtctatgaggccagcaagagatggcgacattcctgtgagggttaagaactcgtacaaccccactgctccaggaactgtcatcaccagatcaagagacatgagtaaggttcgtgaaacagatgtgtttttttaactccttatatcaaaatatcaatgaccttttcctcctttaattccttgtaggctgtgctaaccagcattgttctgaaacgtaatgtgaccatgttggacatagcaagcacccgtatgcttggccaatatggtttccttgccaaggtaatataattggataatgatatctttattcgactttgtttaatatctcactggaagcatactcactgtctcgtgtgcaggtgtttaccacatttgaagatttaggtatatcggttgatgttgtggcaacaagtgaagttagtatatcattgacattggatccagcaaagctctggggtagagagttaattcagcgagtaaatgtaatactcctttgactttgatagattgtttcttttgtgagggtcatatgtggtattggttaaagggactgggtgtgaacaggaactggataatttggtggaagagctagagaagattgctgttgtgaaactacttcaacgcagatcaatcatctctctcataggaaatgttcagaaatcctcactcatattagagaaggtgagtgagagtaacatgtcttgtgttctcttttgaattttgaagttttaatttagtgggaatggaatgaatgacaaaacaggtgttccaagtatttagaagcaatggagtgaatgtgcagatgatctcgcagggtgcatctaaggttagatggaatccgctgctacatgatagtgaatgaatatggtttacttatggttatagtgaatggggatatgtgtgtgtgtgtgtgtgtgtgtgtgtttcaggtaaacatctcattgatagtgaatgatgaagaggcagagcaatgtgtgagggaaatccactccgccttctttgagaccgatccttagtgcaacacagagcacccatctctctccttccnctctgc

SEQ ID NO: 4132 - DNA, 854 bp, Arabidopsis thaliana landsberg
gaaggcgcacctaatcatgctggagagaagccgaaattgaaggtaagtaatgggttttacatatggaagttgtgttatgtttttcaattatattattttcagataaacttgttttctatattggatcgaaattgttggtttgctcattcagttcacataactatttaaactatgatgattgtaatttgttcaatttgaaacaaagataattgtttttgaaatcttcttttctcttctatattcgaatattttatcccagagctatgaattccaagcctcttatgttgacgccaatcagctcaatattcgtcattcatcgttccctttcatttcttctcattcagctgatttttctttttacattatgttatcttaaatttagacatagttgtacttttacaatcaatatctagcgttgatcaacataatgaaatcagccacgccgatgatgatcatattggtggttgcccacaattttttttatttgagatcagttagacccataatgatgcttaaaatcaagatatgtttcaatatacaaccaactaactattgttgtgaattgtattggagtaagtttatgtttatacgtttgcatgtcatgtcatgcatatgaaatgatataaaggttaaaccaacgtgttgttggcttagtggtaaatctttcaggtggaatcttttttctaaaggagatgaattttaaggtgtaggtcctgtagttgtagggactttggacttgaacttccaaatatatatttattctttcttaaaagtaaaggttcagcaaaacagttaataatgggaaaaatgtaacccgcccacgtaaattatcctaatatctaaattttttttca

SEQ ID NO: 4133 - DNA, 1786 bp, Arabidopsis thaliana landsberg
tggcagtgccaatattaatcatgtgatggagcttgttcactgctgtctgggtgtcgttgagtgtcaggacaagagctcgtcgctctctgaaagcattgacctaatcaaagtcatcaacggtgtgatatatatacgcagcagaaattaatctgctgaatctttttctaataagaccaatgcagaaaatcaacaatttccagccagttcttcaaagctgatttgctaatccttttgttctccggtgcaccttcgaagagtgccatggtcttcatcgcctcgtcttcccgcaaaaatctcatcaaatcctctaggtaaatgtacctttagccattcagaggagtctattagtgaaacttaaattggattcttttaatgaaagtaattgaaaatgtagactcactttgcgccacgttgctcaacgttcttgaaaatcttccttgcagctgctttagcctctttttcgcttcgtatctggcgggtggattcatcttcgtatgtgctttctagcatctgttcgtccagtgtggtcagagaaacatttctcacaatcttcattagtctcttcatgttccaagcagagatgttcttatgattcatcctgtgaagatgttccatgctaattccattatcagttgttgatttcgggattatcggggagagtttcggattcattactctcccgctttttcccggtggaaacgcagccgcgcaaagatctggtggtaaattagcacctgcgttctgcatcttgaatatctcgtcttgcgcccgctcttcctcttcctcaatcctgctcatttcaatcatgggaggacccgataacgtctcgatcacgtactggttaaagagcgcttcttgaatccgatcaaagtaagtactgacgtggaacgaagaggccagaactttaaccactagtgtcttgatcaaccacaagatagtacttagcaagaaacacaccaagatcttggttacgtaaggaagaaacctgctccttgtctccctctgtactttcttgtcgaacaagaaatgccaagcgagaaggactaggcctagccatagacagttctgaacagctctacgcacaccgtaaacgaagtaaagaacccgcttccgcaaaaggaagtttctctcgatgaagaagacaacgattcggattccccaacccgaaaccaacctcccacatataagaaccaacaagaacacttcccatttccatagatgaagattccaaactctaactttcttccaagactgaatcgacaaactacacgctaatgcagctataatagcgactaagctaagccactggagcaatgtaatggcgtcaagcttccctcttttatactcatctggtacatcttcttccgctaatggatcatcctcttcatcaatatccgcaagtaacccggatttcaactgacccgatctccaacccgagtaaggcgtttcttcctcacgtggcggatcttgaagcctagaccttgtcttcactctagatataagctctgatttcctctgaaacgacatgttcgaagtacatctcacaacctcttcctcctgcagttgcggctgatcctgattcgtccgcattgtcgcggacgaagaagaagacgaatgggaagacgaagaaggaaccgaaccagcgacaaacgcaccacccgctctacgaacgttaaaagagactcgcatttctctagacgcatcaaacgaggttcgagctgttgatgtaggcgtagcgattgtttggtgacttacatcatcattttcttgatcaacatcaagtgtg

SEQ ID NO: 4134 - DNA, 2250 bp, Arabidopsis thaliana landsberg
caaaaactgagtgaatctgagcattgaataaccaggcaattttttaattaatagagatcattattcctaactgggttttgactcagtaaaacgattcaaaaataagaaaataagaggaagaataagactcaaaagaaaaacgtagttagtaactacctttcctagacttaaacgtcactgtccccagtggcatttaaatctgaagttagcggaaaaaacgtaaataaaggaaaaagaaaaagaaaaaaatcataccagtgggttgcctcccactaagcgcttatttatagtcaataacttgactggcgggagttcagaacttggatcgagtgatagaagacttgtgctacttggcggattgcaatcttgccttccaagggggtgtgtaaacagatcggctccgtgcagcatcatttgtcgatcgatactctatctgttatctgcaagatcagcagaagaaacaagctctcgagaatctcgattcttgtttacatgtgaagcacatttcgaagagtctaaagaaataatcaaagtaacagttggataagagatagaggagtacctatcacagggaactaaagcagttgtgggctgtggaagaggtgcagaagcatctgtctgtgaagcgcgatggtatcgatcgacatggggtgtggtgtcgatcgacattgtctctctgtaatgctcatctgtgggctgagctgtagcagcctctatagttggcgttggagttgaaatctgagcagccttagaggtgtgtctttgtttgttgcaatgctactgacaagcaatttatattccgaaccatccatgccaaactccatctccacatcgcatatattgagagatatccttcccttcttcacatcaatcctagcaccagctgtagctaggaatgctctttcaaggataagaggatccttgggttcctactcgtagttcaggaccacaaatgagcatggattaggcagttaccatccttatgaggaacatcctcaagaattacttcagggattcgtttggaaaattccgcgaagaggagagtgattctagtctccctttagttagtcatgcctagtctctcagcaacaaacttaggcatgaggttgatacatgatcccatatcacacaaagtgcggctaaacctgcttgtggagatgtactaagcaatgtccactcgatgtgccttctctttcttgaccttatgcagcatgattgcactaatgtcccttgtaagcagtttaggttcatcagagctaatgccattgtcaacaagtcgtttgacatacctgttgagtggagaagaagatgtctcagaagcatccttaggaagagaagagaggatcttctccatgatggctatccacttagcagcatgaatctcctgcttagaacaacgtttccgcggataagggacatgaggagtgtaaacaaactcaggctgcattgggatttgcacctcacaaggtgcagtccggatccaatgtcgatcgacacttgaggggtatcgatcaacaccttcgtattgagttatctcagagaagagtgtcccatagggtgtcgatcaacagtggaaggtgtcggtcgacaccatctctgcaatagcgagctccaactcgtcttcagtgtctaattcttcctacacatcatctccttctctgatcaagatggcattacagctcttctttgggttagcatcaagattacctgtacatccaacttcttcaagtgagagctcagattgtcgatcttcccattaagaactgtgtagacaacatcaaactttccattaaactccacaacaaattttgtttggttctccagaatctgctcaagcatcgattccattcttatctctgctgacggtggagggggggcttggtaagttgaattaccatagttcctctgaaagctgctttgaggaaaggtcttctggaaagcaggctttgaagtgtagttggaggaaccctggttccctgtaaacatgttgccactaaagttgtcatgtggctgcctaaacttcctgtatccctgaccatctatgtagaagaatccttcttctgactaaggctcatgctcaatagtttcttcttcagctgcaaagtagacatgcttcttctctgtgagcaagttacgaactgaatccagcttagcattcacctctaccatctgatttcataaaatagctccagcaatcttcttcctctcaaaatcagcattcttggtactattgctgcaagcgaggttctc

SEQ ID NO: 4135 - DNA, 881 bp, Arabidopsis thaliana landsberg
aatagcctatcctacttcaacagaagcccaaggaagaggtgttgatttggttcagagtggtatgactatttcctgacttgaattactttttgctatgaatgactattctcaaagacattaaatcatttttcctgcctcgtgctgttctatatgtcaacagggaacaaacatcctttcacctttgacaaagttttcaaccacgaagcttcccaggaggaagtattctttgaaatatctcaacttgtacagagtgcattggatggctataaggtctattctcttcattaacttacgtactctggatatacctgctatgttaaatatttctagttagagtaactcgcttgaagtagtgttggagtatttcgtgtttgttgcacagagtgcttgtgtagatatggctccttttttaagtgtcaaatttgaagccaggttctattgttgatgcctctatcttaaatattttttggatacaggtttgtatctttgcctacggtcagaccggttctggaaagacctacaccatgatgggccggcctgaggcgccagatcagaaaggactgatccctcgatcacttgaacagatattccaagccagtcaatcactcggtgcacaaggctggaagtacaagatgcaggtgtacatttcatccaatattgctgattgatttcattggcatcaccttttttctaactttatttgttggattttcaaatttatctttaaaatgtaggtatcgatgttggagatatataatgagaccatcagagatttgctctctacaaatcgaacaacttttatggacttggtgcgagcagacagtggcacctcaggaaagcaatatacaatcactcatgaccgtaatggacacacccatgtc

SEQ ID NO: 4136 - DNA, 644 bp, Arabidopsis thaliana landsberg
ttttagtttttttgtgtgtgagcagctggaacagataactcagaccaagcaagagacttttcattggcattgaaagatagattttacatacaaccattgtcaccaacagaagctgcagctagagccaaagattctgctaaagagatcatcaacgttaagtcatttatcgacaaaaaagcttggccctatgttcagaacgatctccgtttaagagcatcgtacctccgttacgatctcaacaccgttatctccgctaagcctaaggaagagaagcaaagccttaaagatctcaccgcaaagcttttccaaaccattgacaacgtaagttttttctttctttagggttttgttttctagcggtttcttggtaaagaagttagagtgtgcattgattttttttatgcacaagattcttcctaagtttgggttaatctgagattgttgttttgttgattttcttatgtggaagttggactatgcggcgaggtcaaagagtagcccagatgctgagaagtattactcagaaactgtctcgagtttgaacaatgttcttgccaagctcggttaatgaagaaagacttgcgttgtaatgtgttgatgtcgatgttattataattacaactatccaagtactttgtctttct

SEQ ID NO: 4137 - DNA, 2613 bp, Arabidopsis thaliana landsberg
tcaacatgttcaacacaagagttggatttttgtgcttctactagtttagcatttaagtcatcattaatgctctttaatttagaaattgaatcatggcatgtagacaattcacaagcaagcatttcatttctcttaatttctaatgcaagggatttttgagcctctacaaacttatcatgttcttcgtacaagagatcctcttgcttttctagtagcctatacttatcatttatagcatcaatcagttcattactattgtcaatcttagatctatctaagcctttagataagcgatgaatagtatatttcatcatcactagactcatcctcacttgaagaatcataagtactagtatgagtgcttactttcttgtctcttgccatgaggcaagtgtgacgctcgttggggaagaggaatgacttgttgaaggcggtggcggcgagtccttcattgtcagagtcggaggaggatcaatccgaatcccactccttaccgatatgtgcctcgcccttggcctttcttgtaatgcttctttttctccctcttgtatcccttggtcctgatcactatcattgtcgggacagttagcaataaaatgaccaagcttaccgcatttgaagcatgagcgcttccccttggctttggtcttgcttggctgccccttgcgacctttaagcgccatcttgaagcgcttaatgatgagggccatctcctcattatttagcccggccgcctcaacttgcgccaccttgctcggtagcgcctccttgctcctcgttgccttgagagcaaggggttgcggctcgttgatcggaccattcaaggcgtcgtccacgtatcttgcctccttgatcatcattcgcccgctaacgaatttcccaagtacttcttcgggcgacatcttggtgtacctaggattttcacgaatattgttcaccaaatgaggatcaagaacagtaaaggaccttagcattaggcggacgacgtcgtgatccgtccatcgcgtgcttccgtagctccttattttgttgataagggtcttgagccggttgtatgtttgagttggctcctcgccccttatcattgcgaaccgtccaagctcgccctccaccaactccatcttggtgagtaaggtgacatcgttcccctcatgagagatcttgagggtgtcccagatctgcttggcattgtccaagcggctcaccttattgactcttccctgcacaaagatgctaagagaacagtagtagcttgtgcatttttatgaatttgttcattgataaacatagggctatccgagctatcaaatttcattccattctctacaatctcccatatgcttggatggagagagaataaatgactacgcattttgtgactccaaaatccgtagtcctccccatcaaaatgtggaggtttaccaagaggaatggaaagcaaatgcgaattcgaactatgtggaatacgagaataatcaaatgaaaagttcgaattaaccggtttcctttgtttgtcgtggtcgtcgttcttttgggaagaagaggactcatcgctgtcgtagtagacgatctccttgatgcgtcttgtcttcttcttcttcccatctcttcgcttgtggcccgagcccgagtcattggacttgtcatcccttggctcgttgacgaaggactccttctccttgtcgttgatcacaattcccttccccttaggatccatctcttcgggcggttagtccctttcttgaagagaacggctccgataccaattgagagcacctagacgggggggggtgcataggtgatcctgtaacacttcaaaacttaagccacaaaacttggttaattgttagcacaataattgccaagtggctatagaggaatcctcaacaaaacacaataaccacaagaaaacaatcacagagatggcacggtggttatcccgtggttcggccaagaccaacgcttgcctactccacgttgtggcgtcccaacggacgagggttgcaatcaacccctctcaagtggtccaaagacccacttgaataccacggtgttttgcttgctttttctcaatcccgtttgcgaggaatctccacaacttggagcctctcgcccttacacttgaaattcacaaggaacacggagcaagggagggattagcaacgcacacaagacacaagaatcagagtgtcaacacgcacacaagtcgcaacaagagctcgcaacacaactcaatgagttcacaactccactagagctctatatgctatcacaatgaaacgaatgcgcgaaatcgatgtcttggtgcttaggaatgttgtaggaatgcttgatattttcctccatgcgcctaggggtcccttttatagccccaaggcagctaggagccgttggagactaacaaggaaggctaatattgccttctgttgggtggcgcaccggacagtctggtgcgccaccggacatccactgtagcttgtgtggtgctgatctccttccttttctggcgcagacgaccgttgcacgcgcggtgtcggttggcgcaccggacagtccggtgcccccttccgacagttggtgcgggccacgtgtcgcccgccaatttcgctgccg

SEQ ID NO: 4138 - DNA, 1281 bp, Arabidopsis thaliana landsberg
acggtagacctatgatacgttcatgcagcttaagaggatgcttatgatgagattgtctggtgatctcaatgcagtcttcaggaagagaaaactcgcattgattacaagtcaagactttggtgggttcaagtctctctatggaacacactctgcatttagaggaaatgtttgtagggaacaaaaaatgacgatgaactgccaatttaactgcaccaagaaacccgtcacggattttgtctatctctcccatgttttgattgtattgaatttacataatatgtgtatatatatttttatattattgtgtatgatgtatcttaaggagcaaatgattcctttcgtctagatcattgtaacagaaacctttcttataaagtaaacgaaagagaacacttacaaaaaactattgctttgttttgaattaagttatgtccgaatattatctggggcacgtttctttgctacttttctataaggaatcaaaaaggtgaggaaaatatatgaaattgcttataaacgtgtgtcttatttagagagacaatttaagtgatgtccaaaaaaaaatgatgtttatgtattgtgttaacaataacgtcaaaagtagtgacccagtggtaaaaaattggggatatggtgtcaatccattcctcccttatattcgatttttactgagaattctttcacttctacttggccagtcaaaatagtattatactgtccaagcctttgtggtctagtggcgcaagctttgatgaagggtgaaaccttcatacctaagttccattctcttttgaaacaaaattacatttgtttgaaaagtttgacagttgggtcttaacctaattaatttatctagtatttagaaatgcaggcggcttgactaaccccttgtttaccagatcagccgatagagtatatcaaaaaaaaaaaatagtttaaatcatttgaacgggtatttacaagctactttcatccagtaaaatagtgagaccggttttggctagatttgaactagtctggtatgagaagtgttagtgtagtcaagaatgctgaacatgtacaccagaactatacaactaaacccaacagtcaacacatataccaaaaacagttaatatttatatctaaatcctttaaactcattaaatttatgctccaaaatatttatagtgacatgaaaatcaagcagcaattggtgcagtgacgagttaggtctctcataaaaagtgagatttatggccccttgaattcgaggctttttaagttaaattgccagacata

SEQ ID NO: 4139 - DNA, 6833 bp, Arabidopsis thaliana landsberg
  unsure (1)..(6833): unsure at all n locations
aaaaaagtcggtagtctttttgttgtttgttctccagtttaaaggttgatcaccttctaagtaagctctcttttgttattctaattacaacatccctccctattaataagtaataagtcatctctctttcggtttctttttctttctgtttaagcagtgtgttgaagaaattcttaattctagtgtttaaatacagtgtaatcgacatacgtactatgagcttgctttgttgaactgttcaagtttcctctgtttttaaggaacactactaagagattttttaggcatgtttcttgtttttggtttggtaagttgagatttctgagctttatcatttctttatggttgtgttagttggaaagtaagtactcttttggtctctcctcagatctattctgttcttgatagctttcaacattccttaaaatatgaatgaaatgagctcattgtgcatcattgtgatttgaccagtgagcaatgggagcgattgctggagaagagctgaagaaaatggagaagacacaggtgcatgttgcccgggaagagaagatattggttctggtgagactgagacctctgaacgagaaagagatcttggctaatgaagctgcggactgggaatgcatcaacgacaccaccgtattgtacagaaacacgttgcgtgagggctcaacttttccttctgcatactcatttggtaagaatcgcaataatggtgttttgagttcaaatttcttctatgtgcttaaatcaacttcaattattggtttctttgaactgttctatcctcttctataaatttaaatctacctggccttgtccctgtatatttcacacttgtacaccgcatccatgagttgatttagatacccatttctcttttgacattttggtgacagatagagtgtaccgaggtgaatgcccaaccagacaagtttacgaagatggccccaaggaagttgctctctcggtggtcaaaggaattaactgtaagtttcctttaatgttgtaatgacgtagacatcaatggcgtggatagccaagtgattcaatacttattgtttcccagctagtattttcgcgtatggtcagacgagcagtggaaagacatacaccatgtctggtataactgagtttgctgtggctgacatatttgattatatatttaaggtactgccaaaaattaaggctgattttctcgcatactactttgatatgtattcctcttttcactaattggactggacactgcagcatgaagatagggcatttgttgtgaaattttcggctatagagatctacaatgaggccatccgcgatcttctcagcccagatagtacaccactgaggctacgagatgaccctgaggtgaaagatttttttttctctccttactgcgagttctttttgttaataatgttgtgtgactctcttctcgtgtttttcttcttcttccatttagaaaggggccgtcgttgaaaaagccacagaggaaacgctgagagactggaaccatttgaaggaacttatctcagtttgggaaggtaataatctcaaatagtcaacctattttctgttactacaacgagctgatagttatggagcttgctcaggatttgcaactcaggttattctgtataaaatgttgtcttagaaatatctctcatcatgtttctttacttcttgattttcttattgcagcacagcggaagattggtgaaacttcactaaatgagagaagttcaagatctcatcaaattatcaaactagtaaagctcttttctatcactggatctaaggcacaaagattttcctttctttttttgctcagtgccttatctaaattgttaacattgtgtagacagttgaaagctctgctcgtgagttcttaggcaaggaaaactcaaccactctcatggcgagtgtggtatgtactcatctgctttatcttcttttgggtgttaaggttataagctttgccaatcatcttgtttgtactcattgtttcttatgtacagaattttattgatttggcggggagcgagcgtgcatcgcaggccttatcagctggtgcaagacttaaggagggttgtcatatcaatcgaagcttgctgactctaggaacagtgatacgcaaactcaggtgtggaagtgatactttggctgacactaaaaccatactatttttagcattttgacaaaacaaaattgggactttacaagcatctatatttgtctttctgaaacttaatgtgcattaatataaagactgtcaacatgatgtagcaacggaagacaaggacacatcaactatagagactccaaactcacacgcattcttcagccgtgcttggggggcaatgccagaaccgccatagtctgcacgctgagtccagcgaggagtcatgtggagcagactagaaacactctcttgtttgcttgctgtgccaaggaagtcaccacgaaagcacagatcaatgttgttatgtcagacaaggctttggtgaagcaactacagcgtgagctagccaggctcgagagcgagctgagaaacccagcacctgcaacctcaagctgcgattgtggggtgacactgagaaagaaagatcttcagatacaaaaggtttgtgcttttgggaaaacccagaagttgtttcaacagatcttttggcatgagttggttgatttttgtttagttggatttattctgatcaagctttgatgtcgtgcagatggagaagcagcttgcagaaatgacaaaacagcgggatattgctcaatctcggcttgaagattttatgaagatggtggaacacgatgcgtcttcgaaggtatctcagttcaatgacagtttatccaataatcttttatatttcgatagcagttttagctaaccatttgtttgtttgtttttttccttaaaaggctggaactccgcatttccgtaaccgtaccaacaagtgggaggatggttcagtgtcagagatatcaggcgtggttgatccagacaggaccagtttcatatcagatgggacgtcaacgcctctgtcgactgcaagagctcatgttaggtctcactctgatgatgatctggaggaggaaatgtcgcccaggcattcaggagatcaatcagaagaatactgcaaagaggtacaatgcattgagatggaagaatcgaccagagacattaataacgacagtgaagaaaggacagacgcagaaacacttttgggacacaatgcagaggcaaacggtgaaacaggtagtgctcaacacaggatcccgtcaagtgttagaagtgtcaggaggaggaagagttggagccgtggagataccatgacaggcacaagcactcctcctgatgccctggagacagactaccgtggaagaccggagggtcatggatttgcgtttcctgatttggagtttggttctggtgggaaattgttgaggaacgattcaatgacttctcgtggaagtgattcaactgaggctcacagcattggaacaccgttggtgggagaagagggaggtatcaccagcatacggtcatttgttgaagggctgaaggagatggtaaaaaccgttaaaaacactctcgatatatatatcttttgctacaaaaggtgcaacttcttatgtggagctttgtattcaggtttcggatccggagaattcagggaaaatgaggaaggacattggtgtggatgctatggaggaagaggtgtctgggacaatgacaaactggtcggaggaattcgagagacagagagaacaaattctggggctgtggcagacatgtcatgtctcgttggtgcatagaacgtacttcttcttgctcttcacgggagatcaagcggattcgatatacatcggagtagagctaagaagactctcctttatgaaagaaagtttctctcaaggaaaccatgcctttgaaagaggacagacactcacaatagcttcaaggtaagtacttttagcgtttgcatttgtatccgcagcaaacaactaatgttttgttaactgcttttccggttttgctgtagcctgaaggcgcttcatagggagagacggatgctaagcaagcttgtcgggaagaggtttactggagaggaaaggaagagactttaccagaagtttgggattgctgtgaactcgaaacgtcggcggttgcagctagcgaaccagctctggagtaaacccaatgacataactcatgcggttgaaagcgcagccgttgtagcgaaactggttaggtttgtggagcaaggtagagctatgaaggagatgtttggtctgagcttcacgcctccgctaccgacaacgcggagatcactaaactggaggaaaagcatggccacactgttctaattttaatagtcaaccacgttcatataatggtttcaaggtttgtacgtgtaaatcttctaggcttctagctaatgggtgtttgatgaaaaagattcttagatgttaccgcagccgaagagaaccttttctgtttcttttgcgttgatgggtttttaatattggaaacagacattatctgattctgatgttcgtttttcttaactggcaagtcgtctgggtaatatgatattgatccttgtcctatttaagcgcaacgaaacatctcttgaaatgagtgacactggtccaacaatgttgcttacgggttggaactactgttctcaagcacaaggagcccaaaagaatgatcgtttctaaacactcgtttatctatacacaatttataactatggtatcaattacatacttccaaagcatggcctcagtttcggaattgggtaaaaacaacagaagatggaatccaaagcccgactcaagaaaacagaacaaacctatgaatgatgatcatcattatcagcggctaaaaaggaaaaagtaaaatatctgtcgaatttgttagaatccaatttcagagagcaatctatgatcatcgtcactgattttacttaattcaaacatcttggaactagatattcaaccaagataatagcaaactagataataaaactttctattaatctaagttgcatgtaaaacatccaatgaaatcaaactagttgtaaccattatccaatgtgatatgccaggtgcgttttcaaacatgtcatataaatacacaaaatctgagagtcaatactagtctctcaagccatatcttgcttatcctacattcaaccatcgattcatccaagcgattcagcaaaaacattcataccaaagcatcagattagttcagttctataatcttcctacaaccaactaattagacaaccacctgaaaggtctaaggtcactgaatctctaatcgcagaaagaaggaaaagccaatcaaacaattcacagtgttgctatctatatagcttatgacctcacactctctacatttctgatcccaagtgaagctacttcaccagtaaaagaggaaatattgatgaccaatttcaatttcaaacaagttcaatgattcataacaaaaagtatacatagagaaccgccactaaaggcgacatttttgttgttggcaaaagaggagaaaacccctaacaagagattcatatgagcttgaaaggaagaggccaaggagtagacctgggaagctcaagcttgtctttgattctctcaatcatcttctgtttcttccctctcgaattcccgtacgatcctttgaatcttttccctttcttcgtcttcttatctcctctcccacacaaatccatttccgataccgccggagctgcacacgccggagataacgatgaatacctcgccgaacaattcagagctgcagatgttcgctgcgtcatcataatccgtcgtgtcatcgcgccgcaccactgcatcgccgccatctcctctttctcacacactctcgtcctcctcctctccgtctctcagacttcaatcaaagattaaacacatggaccagaaataagactaaatgggccttaataatgaatatcaacaaagcccaataagggcctttaagttgtctccgtgcaaaatacgacgtatatgtgtctccaccactcactgttaacgatcagtttcagcgaaacgatggagcttctctgctcaccaacgtctctttcctcctccttcgctctctcttctgctcttttagtccctcgttcgttctccgtatgcaaattttgttttttttatgttaacattcatttaatttgttgcgtgattgattactcatgaatgatcaaattttggatttttacttggtttttagatgccagggacaaggagattcatggttctgtgtagttcccagaaggtatttcatttcaatctcttcacccggaagacttgtattgtagtatctttttaagctacaagtatgaaaatagttaagagtttgagaattaaaatgtttagttgatagagaatgttcaaagtttggttttcttttttcaattcaggaaagtcagatgacagtgtcagtaactggagcaactggattcatagggagacgattggttcagagacttcgtgctggtataaagactcacttttttttcttaacacttatgagttctactggtattcaagtcatgacaccaatgttcattctgcagataaccacgctatccgggtcttaacacgctctaaatccaaagctgagcaaatatttcctggtaagaaggtaatgactactctgcttctgatttataaggatcatatgtgattagttatgttataaagncttttatctgactcatcttgntcttgataatggtcttcttcagccaaggacttcccaggtattgtgattgcagaagaatcggagtgga

SEQ ID NO: 4140 - DNA, 531 bp, Arabidopsis thaliana landsberg
ttccggagtccctccaactaaatgatatgactcctgttgaattacccttagtattaatctgatctttctcactctctcttggtgttgtgagttttaaatgtccttcttttcataagagtaacagtatttgccattacattgaacttaaaaactggctcagtaatgaatgtcctatttcctgtaacatcaagttctttggttaattgagaatctttccctagtaatgtgaattacatctgggtgtcctatggagatgattgaccttggtactattcttctttcaggcagagaagggagctcctacaattccgtctaagtcaaaaagtgagtcgaaagatagggacaggaaacataagaaacacaaggacagggataaagacaaagatagagagcataagaagcacaagcacaaacataaagatagaagcaaagataaagataaagacaaggaccgtgacagatagaaggacaaaaatggccaccatgattcgggtgatcattctaagaacatcatgaaaggtaaagacatgt

SEQ ID NO: 4141 - DNA, 5451 bp, Arabidopsis thaliana landsberg
taagaacccaacaacaggtgcgatgtctttggtctcaccgatcctaccaaataagttctgtgacttaactttctcaacaatctcattgctcaatcctgtgaaaaacatttctgtggcgacgggacccggagaaacacagttaactgtgatctctgttcctttgagctcttttgcaagaatcttggccatggcttctacggctgcctttgaagccgtgtatgagccatagtttgtatttaaggtttgaaccagtgatgttgagaggagaattatccggccaccgcctccacgttttagcctattcgcagcttctctagcacaaataaacgcacctcttgtgttcacactgttatatcaaacaacaaatctaattaatatcactatctaattaaattcacgttatagagttgcaaaataactaaatgaaacaatctttataataaatgagtttcttaaaattaacctgataatgcgatcaaaaagttctactgacatgtctgagatagtggaatgattaggatcggctatagccgctgagttaaccaagatatgaaccggcgactcgaagactcgctctgcctcatcgaaaagcgactttacctggctcggctctgagatatcagccttcaccacaatgacacgtggacttttgccggcgacttccgcgtcctttgaacagttggtggtaatcgccgtggcaaccttctcagcctcaacggggctagttgagtaattaacgacgaccctagccccaagctcggcaaggtggatggctatggcacgacctattcctcgagaagatcctgtgactatagctactcgaccggcgaggcaaagcggtggagaagaaactgatgacgctgcagccatactgttaggtagattttactataaatttacttttctatatttagggtagaaatgatgacaacgtgctaaaagagtgtaagcaagcaatttgtagtggtgatggttagatttgtcttatgctgtcaaattcgtaagcaaattgaattgctgaaaatgtttttagatttgtcttaacctgtcaattcgtatgcattttgaattgctcaaaagtttagattgataggacgtgttttcgttgtgtgattgtcttctagaattcacacactcactttctcaaatcttaacttgtattatatatagcacggtaacaacattatacaactaaccaattttattaactttaaaattatttagaacacacatgcatagttgcatactataaaacttaaatcaagattatgtcagccatagttgcttcattttagttgttgatacttttacgatgtgatgctagaattttctagtatactttatatctttttgtctccatcattttattagagaaaacaatcgaaagtgttgagactaaagattgttgttgcatcgatgtgttgttagacgtcaatcaatacaaggtccaggaacttacaagaaacaacaatatggatagaaatattcagaggaaagtaaaagataagataggattttttaatgttttttttggttattctccaattattttatgaaataaacttgtgattataaactaatgaagagagcaagaaaaaaagtgataaaaaagcgaaagtcacgtgtcaagtgaacaatcttatcttactagatttgtgacaatgccaaactgtcctccacaaatagaggcccttcttttcttcgatacgtggaccccactaaacccatattccaccaattatattttattgttctctttttatatctataaaaaaaagtcaccgaggaagagctcgccggagaaactgagcaagctgcgccggagcactaagctgcggcaaatgtccttcagttttaagagtctccacagtagtatctccaccgagatgagacctaagatactccgccaccgaagccggcacagaaacatccttcgccgtctgaatcacacacgtcggaactctaactaacccaagcacacctctcagatcgctgttgaaaaccgtcctcgaaacaaacagagatatatccggacgcatattaaacaaagtccggctaaattctctaaccgccgccggaacatcagctccaacagcaagcggagcaaatccatgaacccaagcttcgtaattagcttccatagctgagaaaactttctcaatctcaccttcttcgaatcctccatgataatcctcgtcgttgagaaacctaggcgaaaatccgatcaagataagcttggagaaaagctccggccgacgaatcgaagcgatgattccgatcatagcggaaacagagtgaccaacgtaagcacagttttggattccgagtgaatcaacgatgttgagaagatcatcgacgtaaggatcgagagttgtgtaacgattgaaatcgaagtaatcggggttgacactgccggcgcaaactaggtcatagaggacgactctgtagttttgagtgaagtaaggaaggatcaagtgccaagctgattggtcagtaccgaatccatgggccaaaaacaggatccgatcacccgtacccacgacccggacatttagagcttctaagatgttgtgttgactcatttttttatgtgtttgggtttgagggtaaagaagagagttggatactgtttatataaaaacttgtttgggtaggtgtgtgtgtgtaatgaaaattcctttatcatctttttttttccactgcatttattattattattatccaatactttcgattggcttttgaagtttatggatacaagagcatgcgttgattattcgtcacacatctgatatattttaagagatttaagatgcttcaaggatattgtttttagacttttaggtgttgttgcacttgccatattcttaaaccatttttttattctgtagttgtatttcaacaaacgacgtttatcccaaagattattcgaatggtgggtgatgataaattgaattatataaaacataaagtggttccaatgaatgtgtcagtacgaagacacgagtttgtaaattaaacataaggtttttaagaaattcaaaagttagatgtcgacgacaacaacaaaaggatgtcgacaaaaaaagaagaagaaatttggatatatttttttggacataggtgagtcacgagtgttttattaagatggttaagacatttattttcaacctcagtgtttattattattattattccaattgaacccaatgttttatttctaacaagttaacccctacatttgcttctcaaggtatcaggaagaggctcctctcaagacgaactcttttatacatatccaccattaacaggaatgatttgaccattgacccattcaccaccgtcaccagccaagaatccaacaagagggaccacgtctttggcttcgccgaccctcccaaagggagactctgcggctatcttttccaccaactctggggtctttccatcaaagaacatctcagtggcgatgggtcctggagcaacacagtttgcagtgattcctgttcctttgagctcttttgcaagaatcttgaccatagtttccacagctgcctttgatgcggcataggcaccaaaccctggctttaaagatcgagtctgggaagatgtcagaagtatgatccgaccaccacctccttgttttagcctattggcagcttccttgctacacaggaacgctccttttgtgttgacactacactccattttaaaggaaacaaacagaggattattggagaatgtcaaagtgtagatgtaatgtatacagtgaaaccaagaaactttagttggaaattagacatacaaatctcacgaacatggaaaacattggatgaaacaaaaaacataagtcgattaattagacacaagaacacgagacatgttgcatttgactcataattagacatacaaatctaaagaacacggaacatataatttcatggttcatggagagtgaacaagaacacagattccactaaaatctcagttgaaatatactaaaggaatcagctttctaactcaaaatcatagaacatgtaacaattgatcaagaacttatacataatcatcaacctaactaattaacaaaaaaaagtttacttttccagtattgagcgggaagacaagaacccaatcaatgaagataaattctctaaaggaatcagctttctataacgaacccaatcaacgaacagtatcgagtatatacctgaacgtacgatcgaaatcttcgactgatgtgtctgcgatcgtagggtactttggatcgagaatcccagcagagttaaccagaatgtgaaccggcgcttcaaaggcactctccgccgcatcaaacattgatttaacctggcttggctcagagacattggcctgaaccacaatagctcttggtccctttccagtaatttcttccctaactggaaaatcattgatctccgacgcgacacgctcggcgtctgcggctttagaggtgtagttgataacaatcctcgcaccgagttcagctaagtggatcgctatcgctcggccaataccacgggaagagccggtgacaatggcgactcttccggcgagaggaagcggcggttgcgagattgatgaatgtgtagacataacgatttgaattcaatgagtcttagcagtgatgtgattggagtgaagaagataaattgggattggccctcattataagttcattcatattgttttacaaatcagcccctaactttatattttaacaaattgacccctacccgctccttgacagttttcctcgttatatcttcatatttatagattaatgacccattcatttctccatttaacaatttaaaccgtattcttgattctttgtccagaaaagccttacatttcgaattggggaaatatccttcttttttcttttttgtggtttaaattatagatatatatttaaaagtttataaacaaaacaattttctttgtaacattataatctaagcttagattttttttttttaaccgattatttttgctgacacagttttattgttttgtcaattgattgtatttactgtagtcaaatatttgttcccaaattgaaaccaaggcattggatttggaccaaatttttggggtaaattatggaaataaagttcatttggcagtaagaatatgaatgcaatttgactactattttccataaaatttggtcgaattgtatctggacaatggataataatagagattttaatcaaacaggattcgatgaattaaatatttttttaatttaaagacaaattgatatatatatatatatagttttaattaactatgagactaacatacaaactttaccggtttgtgtaaaaaacattcaaaacaaccccataactaaatcaactcccatgatctttattttgggtaaagacctccaacgtatcctattgcatacctacattacattcaaaa

SEQ ID NO: 4142 - DNA, 1179 bp, Arabidopsis thaliana landsberg
aacgcgttgaatctcggtaagcatgcaagtgactcgttggagaagttggttggcctacggatggtgacaagaacgcaaacgttccaaacgcggaacggttttattccggttagcttccgcggttggcgaacaacgttggaactcctatgcgtaaaggttacattgaagtttatcttttcggatttatcgatgaagatgcgaaaagtgtagcgccagggaacttcgaacgtcattgggggatatttaaatttgatggccaaccgaaattcccggtagattttcgtggacaaggtcagaaaaagttcttaacgggagctcaaaacgttcagtactttctgaaccagtggtgtatgtttaatcctaatggtcgtggtaatatgagtaggctcggagataatataaactacgcgtgttcgcattcggactgtaccgctttaggttatggatcatcttgtggcaatcttgatgcgaatggaaacgcatcttacgcgtttaatatgtatttccaagtgcaaaatcaggaagctcaggcgtgcgattttgaagggcttgcaacgattactactcaaaatatatctcaaggacaatgtaattttccaattcagattggagagccatcttctggtcattatgattatagctatggttcgatggttaggttgtgtttggtgatgagtggcttggtctttcttctcatatagaacaatgagattatagtatttgatttgttgtatatgactgatttattcttggttcatcaatcatttgaaggttttgttccatcggatcaaattcataacatatttttttctttttgtttgacttcttgctgactaattaactttgatattcctcggtctgttttttaataaaggattaaagagataagaagagtacacaaaccttaacaaaataacgtaatagataattaaacgtatagggatgttgtaacgttatgataagaagagtacacaaaccctaattcttatctccgagaacagagcacataaagcagagcttgaggttgtatttgactggttattgatacatggattattgatgtttcttttcatcagatcaaatccaacgtttgaaatttgaaagcttttgattttataagaagactaataccactctctttctttacaagagacagctacattagccatgatgacttga

SEQ ID NO: 4143 - DNA, 731 bp, Arabidopsis thaliana landsberg
gtatatatcattggctctgcttgggagaaaactggcgttgaatactgtgattgtgcttgagcaagaagaagagcttgatctggttattgagctgagccagaagatgaatgtgaggcctgtcattgggttaagggctaagctgaggactaagcattcgggtcatttcggatcaacttctggtgaaaagggtaaatttggattgactactactcagattgttcgtgtggtgaggaagctgcgtcaatctggtatgcttgattgtctccagcttctgcattttcatattggttcacagattccgtcgacttcgttgctctctgatggtgtcgccgaggctgctcagctttactgtgaacttgtgcgtcttggtgcacatatgaaagttattgatatcggtggtggtttggggattgactacgacgggtctaaatctggagaatcggatctctctgttgcttatagtctcgaggagtatgctgaagctgttgtagcttctgttcgggttgtgtgtgaccggagctcagtgaaacatccggtgatatgcagcgaaagcggtagagcgatagtctctcatcattctgtgctgatctttgaagctgtttcagcagataaaccaatggttcatcaagcaactcccggcgatattcagttcctgcttgaaggtaatgaggaagctcgagccaattatgaggatctttatgctgctgtgatgcgtggagaccaggaagctc

SEQ ID NO: 4144 - DNA, 854 bp, Arabidopsis thaliana landsberg
aaaccacacgacgaccaccttttctcacgcagagatgtaatcgtagacgtcttcgtcgcagtagtaaaacccaaggttactgatcgcagctgaaagagagttacttggcgatgcctgctcagttgcaagatacggcatgttgtggaacgaacggtcgagagaagccgccacattgttgaactcatcatcttcttcttcctcttcattttcaccttcgctaccacctttggtatgcatcatttcctctgctcggtgctttagggtctgaaacattagctccggctcatgctgcattgctcggagaacatccgctgaggactgaccaggcaccgctcgggtcactgcaaagctgtgtggtccatcgctctgggagacccggacaacgcttggtccaccaaacagattgtggactccaccgagagcctcctcgtaagcccctccaaggaacatacccaaaaagtaccttcctccactgccattcttgtccagctcgtgcaacggcaagctggattcaccgcctatgaacttgttgatcttcccgtcactatcacacgttaaatctgaaaggattccgcgagccccgggcctttgatcgagcttatggataggaactatagggaacagctgatcaatcccccagagatcaggaatcgaagtgaaaactgatagattgatattgtaagtatgaaccggatccgatgcgcctatagctttcaacacccattcgcataaaccatcaacagaagctaactgctcgatgctcaaaacaccttctttgaaaccttcacacacctctgcttcagctgatcgacataaagaaggcagctttcgtggtctccacgcatcacagcagc

SEQ ID NO: 4145 - DNA, 2660 bp, Arabidopsis thaliana landsberg
agatcgcagagagaccatccaagtgtttcttgtcactaatggtcaccgtttcataaactcttacaaaaggcatagccaagaacatgacaagcgttggtactatggccaggagaagaatgaaagtagcggggttaccttcaccaccgcagaccgcatggtacaactgaatcagaattgctccacttagtcctaaaaatccctgatgttcaaagataaacacaattagaggaaaatgagtcagtttttggatacatcaagctgagagagtaaacaacaaaaagactcaagtgaaacagactaatcaccatctaggatgcaaacaaagctccaaataaaaaaatgtgagtcttttgtcaataaaggtgaagtcttttgagacttctaaacacacaagatcgaccaaattgtgtttcaacttcacccaatatgatgattctttaacaaagttacaaacttttacctgcataataccaacagcagtcccaccatattgagaaaagttccgagcagccgtcacaacattagccgtattgaaaaacggcaaggagtgaccagccaagaacacgaacaagcacatcaacggcacaggcggcggagcaatcaacccaaccaccgaagcccaaataaaaaagaatccaacaaaccactgaaccaacccaacgaaaacaacaacccaaggcccaccaaaaccgcgtgacttagaagtcatagccgtgtaaaggaaaccggagatgataccaaaggtaccaccgatgtctttgaagacagagacgaaatcaagagtagactggtcataagattgagatgatttgaggattgaagagtagatagcgaatgtgtatgtagctccgctaaagctttgaatccatatactcgctgctgctgctacccatttcgtgtttattctctccattgtctccaatgctttcaattttactacacacaactatataaggaaatctccaggctgaatctgatgatgatgacgtcattgtcaaaggaagagaagaagtattcaattgtactctggacaccgttaatcatcgtgattaattagccttttaattatttgctgctcttgcgagatctaaaaggtgtttaagttgacagttgagctaacgtttaatataatcatataaatatgaattattactaaatctttgaacgagacgaaacagcgatacggtttggttttcaatagtatattcgttattatcagaaccgcatcgctctttatctgccgctaaatcgccatttccattcaaaatcttgaaaacaattttaacaaccaaaatttctatttagatcgaataatagtaaatttgttgtggataaaattttagttatcagcttaccgaaacttttgacttgtggcaactggcaagcggcgagaccactagtcaattttcgcacacaaattatcaaatttctgaaaagtcatatttaggttaaatgactgatgtcaaattaacagaaaaaggtaatgactgatgtcaataaaaagagaaggtaggtcatatgtatgatcatgactcaatttttcctttcaatgaaataaattcacaacacacgctttctacaaacaatagatattaacttttgaaattcgagggaagaaagagccacaaattaaatgaatatggagccacgattcagacccctaggttcatagagattacttcaagatcctcttagccacaagcgtcgcataaaacttctttgtgcggaggagcaacacaagagcgacaagagaaccaagcagagccatggccgccattatcaaaaacgaagtcctaaaacagtgatttccataacaagaatgatcatcttcagagctaccttgtcatacaagtagcctattaccttcactgagaaaaagtacgaaccaaccggactagctatcgaaattgtatagaatatagttcccatatgaagaaccccgaatatttcagaggttattgttggcatgagtgaccattgggagccgtacgctaaaccgaccaacaaggatccgatatataggcttcctagtaaaccggaggccatgacaatgtgacctatagccataaggccaagggttatggccatgaataccggtcttggccagccatgactgtgtaaataggtgtctgagatgtaacccgacccaaaccggcctagaaagttccatatgctccacagagacactagagaattgagttgaaccgtagtgtagcgaagtgactcgcccatctgtctgatgttgtttattgtcgcaagtcctgaacccattccacataccattgctacaaatagaagccagaaatttgttgtgcatattgcttcgagaacgttcatgtcatttgtcatgacatctttaacatctgtcgattgattgaaatgtgttaggaatttgacttacgacaagtataactaagggacctaaactaacatataagggtgtaattcactcaatgaccaaaaaatatatccttcgtcaataaataagaaccgttacgaaaccttaccggaagaagtgttgagcttaggagagtcaagtaatgtggttctctcggtaacaggaaaatccaaagacaagaatctatgtttctcttcacgttgtgctctaaccgccactaagagaggagaggcgagcaagagaagtggaagggtaaaggaca

SEQ ID NO: 4146 - DNA, 1358 bp, Arabidopsis thaliana landsberg
  unsure (1)..(1358): unsure at all n locations
aaagacctcgacggacattttctcgctgtctgtcacaaagtaaggagagatataaccacggtcaaattgcattccttctacaatttagaggttgttctcggcacttttaccctcctcaagggtaaccacacctttcctgcccactttgctcattgcttcagcaatcatatttccaatttcgtcgttgttacccgcactaacagctgcaacatctgcaagttcactgtcttcaacctacatcgacatgacttacattcagaaccttttgaaaaagactcttaacatattaaaagaaagagagttctataaatttgaaacctccttagacattttcttgagctcggtaaccaaagcctttgctgtcttctcaatacctctggtgatcaaaacagggtttgcaccagcagctaccacctgaataagataatcttaaaattagtacaaaagtttttgaagtttcacatagagaaagctgaaagaagaatgttacacagaccttgacaccctcagcgataaaaccttgtgcaagaacaacagatgttgttgtaccgtcaccagccaagtcattggttttggcagccgcttgcctcacaagcttagcgccaatgttctcaaccgggtcttccaactcaacctacaggagaaagtttgaaactctaagactcagttgaatgagaacaaaaatcattatcagaggggtaataattccatacctctcttgcaacagtcacaccatcattaacaattcgtggtgatccatacttgctctcaagaacaacatttcgtcctttgggtccaagtgtaacgccaacaagatctgcgagcttgttgacaccagcctagtacaacacaaaattagaaaccacagaaaatgtaaacctttagctccggtttgggaatgaagtttccattaactttttttaaaaaagatacttacttgaagtctcctaatggtagtcccatctttgttgaaatgtaattcctttgctgcgcacacaattgcagaactggatcttctgggtctaggacacacactttgtctccttccaaatgagcttgaagacaacttgctgataagtttcttatcagatttgtgaccattcggagcaaccattgaaccaatagaagatgtggcagtgaaagttgacgccattttatccacttcaaagacagacaaaattcagcacttagataagatttcaaagatataaaaaagactcttcttttcatctatatacggntaacacaatcaatataacagaaagaaacaacaacccaagtagctaaagtaataaattttcacaacaaaccagaagagaggcgacacctttgaaagcagagctcaataagaacacaat

SEQ ID NO: 4147 - DNA, 2862 bp, Arabidopsis thaliana landsberg
tgtatgcatgtatatgtattgatctgtgtatatttattttgtaaataatatgtgcactatacggatttgaacacatttactagttacgataacattgacacaaatactaggttatatatgtatatacgtatatttttcatctgtatgactgactatatctattatgaatataaagatttgatgagttgtattcataattgtttcatttgtgcctaatgttattttgtaagttttgttaatggtggaaatataacatctaatatagggatatttagttgactaaacaaatgttggaagacaacaaaattatttccacaaattgttatgattcgatcgataacatataaagaggaaaaaagatataatgtatatatacacaaaatattcataagcaaggctactaattttttagaaatcttttttcttataaacaaatttgatctctcaacatttatcaacctcaatgtaacacaatattctaagtttattatggtagaatatggtttaattcaacactgttttcttggaagatatatcacttcaaagctctctatcatccagatataacattgacaacctagcctctctctcaggtttataaggcttatttagttatttatatttaggatatttatatccactcataatgacttttgcatgttacatgcaacgatccaatatcttgacagtttgtaagatcaaccaattcatcataatacataatatttaaaaaataatccctcacatgaacagtacattgaaattttgtcatttcgttgccactcgtcgatttgtaattaaaaacacataaaccaatctcactcttcacctataaaaaccctatcactatcttcatattcttcacacaacacatcaaaagcttgataaagagagagtttttagggttttcttgtacctattataagaaatactctaactaaaactttacttcttcatcaatggcttattctaaggttgcccttctcctcgtcttcaatgtcatcttcttcactttcgtcagctcgacttcggtcccttgtccaccaccaccgcccaagagctaccacaagaagcccgcaacgccatctcctaaacccacttgtaaagacgctcttaaacttaaggtatgtgctaacgtgttggatttggttaaggtttctctaccaccaacgtccaactgttgcgctcttatcaaaggtctagttgatcttgaagccgcggtctgtctttgcactgccctaaaggctaatgttcttggtatcaaccttaatgttcccatttctttgaacgttgtcctaaaccattgtggtaagaaggttccatctggtttcaaatgtgcctagagattacacattttaaattgaggttctatatctcacatttcattcctgtttttcaaattccgcgtttgatgatatctttatctattgttgtaatttgttatatgtttcatatatcaatgaaataaagtgtttcctttttcgaaataaaaaataatcatattctcttatttttttctgaattatcttgtgtttaaaagaatttatgtttttttggggacaaccaaaagaatttatgctatatgcatgatacattggaacttaaatttgacacaagtaacatgaagataattccaaacctaggaatctttgtctaattaaatacttttttggcacgaacttaatcattgtatagtctgtcgcaataatgatataacaattaaaataaagtctgtcgcaatcgccagatattagcattttaacatatgttaattctaatgtgcatgatactaatctttaaatgagactcaaccagcagatattcaaaccccacgagaaacattatctttagctaaaaatggtaatattaatcgtcccatttcgatattttatatagaattaatttaagggcaagaccaaagtaataaatacaaaaagccaaaagcataaagaaggtagcatattaattgcaaataagccaaaacatttcaaaggagtcaaaccaagtagaaagtcaatacccgaaccagctacgcttttctgtcaaaccgaaaatcggtttaagaccgaaaatcggtttaagaccgataatccggttcagaaaaccaaaaggtcaacttaccaacctggtgcgctcttgacttcctctaattaccattatgaccctccctcacaaaagcagcaacaaaaaaaacataaactagtttctcattttacccttaccataataaaccgaaaataacctaaaaggcttatccatttagatgctacgttatttaccaaacctcaacctaaaagccataaacgaattacctatgaacctccctcttttccatttactattttgcccctgacatgggactgctctgactctgagatagaaaaagcaaaaggaggtttaggggtaattcggtcaactagctgacttcttgattggacacgtcagcggaagatgcaatcaccggcgtaatggtgttgctgagggcagaagtgatctgattaacggtggcgcagagatggttattgatggtggtgacggtggagagatttggtttcgctgttgggacgttactcgccaagacctgaatcccgacggtgagaagacacgacggcggagaatgcgaattgacggaaataccctcgggaggattcacggggacaatggagaatccgaggggtaaaatcggaatattggaagaatcttcaccgttcatcgcctgctggattgagtcaacgtcgacggtggagtagacgattaagctaccggagttatcaatgcagctttcttgaagcatcagctcaacattatgccatgagttgcttgcgacctgcaaaaaccataattcattccgaaaaaaattga

SEQ ID NO: 4148 - DNA, 845 bp, Arabidopsis thaliana landsberg
gcgaattataaaacttctcatcatgtgttagaatctccaactcatgcgtgggcagcagcacgtgacatatatagacgtcttttttacagctcgagttcttcagtcgcgatttacaatttttatacttgccatctttgtagcatcattatattcttgtttttcagtgtctcctacaaattaatgatataagttagttcaagagaatgattcatataagttaataacttcattttacaatttaacttcaaaatctgcatatctacaaagccaattgcgggtgcaaattaatgtttgcatattttggagaaaaagacgattcctaaaaagatttaacacccagcctccaacgttgaaagcagactctgatgctagtgtggtcattaggatgctaaacaaatcagatgacattgaagctaaatcaccatacctatgttgattctctttccaaaaacttaaaatttccatgtcagataaagttttcatctctagtcttggttgatcatctaaataaatttctaaaattgacttagtaatttttgaaacaaatataaagttactttcaagctcaaattttttttgtaaatatacaaatacacaagattagttaaacgagaacaagaaagtgaaagatattcaaatatattgttacacttacatcattcacatctgtttctagtggcgatttattgagaagctcgttttgagtaattagtatgagattcttgtcatcacatgtgtaagtgcattgctcacctctgtgcccgttaatgcagtttctgaattcttgctagattgttcagtaaggagaacatatggcaccgagagccaccatttttctgatcata

SEQ ID NO: 4149 - DNA, 2581 bp, Arabidopsis thaliana landsberg
agcctacacaagagttgtcacatgtgtagaaccacccgatcagtcacatttagtttccttctcagaccaataccggtgctttcatgattgctcgtagcatgtgatcaacgaagaaaggtgtcaatcttaataacggttttatactcttgggagaagatgatacaaaagcttttgacttttgatagtttttctctaattgacagctttctgtttttcttatccgacgagtatttgcgtcgtctttgagattatgatatattttacttggttctgctacttttagttattggaatagtaagagacgacgcaagtaagaaaaaacaaacatgtatgcatgctttcttgaaattcaaggcattccaactaaattagataaaataaacactacaataaaaattagggcaatagaaagaagaaaaaacgaacacttcaactagaatatgaaatccgaatcataagtaattaaagcgactaaatataggaaagcgcaaagggagatagatgtaagcaagctacacaggaatcattattcccatagtcttatgctgaaaattgagatcaatgaatttgttttcacactgatcccaatagagcttcagaacatcgccttctacgagatctaatgaatgcttcatagtactccaaccagtcccgaaataatacttcatgtcgtcaattcttttcagggtaactgtgtatagatcgtcttccattatgtcgtggacttgcacttcaaaaccgttgtccaaaccctcatctgtgacaccattcatcctcgtgaggacagacatcacttgcgcttttggtaatgccacattaccaacaatgtcactctttgttagagtctttgatatgatcatagccccgtctagttcatctctggcataattcatcttgctaaaattttaaccctagatcttttgatagtagaaagaaaaattgtttatgtcttgtgttcttagatgcaaaacatatttataggaggcttaacccaagaagaaaggaaaatacaagtgaaaaggactccaactcttccattaacaaaatagaagttgttcttatcggaaaaaaggagattgttaagtaatttccttaatactcccgaaacgaaaaatgggaagagggcattgtaacttgggaagaaagttattgattcaaggcatcaaaatgaagctgagattttcttaactttgttttttgctaaaatgttaatattcatataaatgaaagttcggacttacatattggagtacctaaaacaaatgtaatcttggcaaaaaaaaggtaaaaacaagattacaataattttggaaaagatttgggtaaatctatcggatccatcgaatcattaaatttcgccaacgttttctttttcttcgagcagtgataatattacgaacctctcggtcgatgaagtgaaaaacagtagcaggagagataaagatcgagttgtaaagcacattgtttctttgtttccagaggtggaagacagaagcttgagctgcaattttgcgaaggagagaaggagccttagacgaattaatacgagtccaggacagtagctcagcccaagagttgaaaatggcttgcgaaggggtcaatctgaagaaaacaagtttccagattacagccgagaagacacaatacagcagtagatggtctatagattcaggccgagaagaacatagacaacagtctgttgtagttgtgacaccccaggctgcaaacctttgtcttgttggcaatctgtttaggtgagagacccacatgttgaaggcatgtttggggactgaacccttaaaccatacagacttggtccaatccttaacaggtttctttggtctcatagcttcccaagttctagcagcagagaaactgtgacaagtggaatcatcaacaatccagacaaaggtatccggtgaagagtcataacaaggcaacgcaatggttgttaggtgaatatgcaaggcaagtgcctggtccgttctaggcggagagatgagccaaccaacatctagagcaagcgtcagcaaccttagcctggatagggatacacaatgctctagggcccgacgacccaaacaacttaaacagagggccaaggggactccagttatcgaacaaaaaggatatttttttcccatcccctaatacactaaacaagaatctgccagcaacagttcttaacagagatctccaagtccaggagtctgttgtgaaaaagacttgtttctaaagttgtgaaatttgtgccacgcagcccacaaagactctttttcagaaaaataataaccagactaatcttaaacagagagttgtattcaagaccgtgaatctcctaaggcctactcccccttcctctttaggcaaacaaacttcggaccatgcaacctttgctcctttcttcacgtcaatattgccagaccaaaggaaccgagcacataaagcctcgattcttttcacgcagccctttggcaaaataaacgtagagatccagaaattaataatcccaaagatgactgaagcgatcagttgaacacgtcccgcaaaagaaaggcatttcacagaccatgatctaaat

SEQ ID NO: 4150 - DNA, 303 bp, Arabidopsis thaliana landsberg
gacttttttgggttgaaaccgacctcatatcagcttcaaaaaataccaagtcaactttggaaatctatttagatgatgaaccaagactagagatgaagactttctctgacatgaaaatcttaagcttttgcaaagagaatcaacataatgtgtgggtgatttaatttcaatggcatctgatttatttagcatcacaatcaccatagtagcatctgagactttttttttagtgttggaagccggatgttaaatacttttaagaatggccttcttccccaataggtgcaagcattactttgcact

SEQ ID NO: 4151 - DNA, 6094 bp, Arabidopsis thaliana landsberg
caaaatttgtttaggatcaagttcattacagtcagaaaccctgttgagaaactttgttcagatgtggttcaagacttgcttgctgaagcctctttcgtttatggaaaaccattgcctccccttctaattattacatgaatatgctttgaaaagaaatcatgaatatggaaagaagccatgggtattgttcagctagaaaactgaaccaaggatgatgcttgctttgtcatgcggatctttataacctgttaacttctctgaggcggtctaatcagtccattacagatgagaagaagagctttccgaggtcacaagtccccatgttcaaaaactcctgaatcatgactgtctgattttgcaaaagaatgttcagatgattctgaagcagtgccagaaaggtttatctacagagaggaatgtcggaaaatgaagacaatggtcataaggggtggctgattctgtttgcaggaaagatccagatattagacaacatgctctggcgagcgaaccagtcttacttgatggtgacaactctttttgagaaatttagtttcaggttccaaaccattgatgaaagataatggaatcttcaagaatgaggcagagcagagaacatgaatacattgaaactcaccggtcaagtactcaagtgcaccttaacaacgctggtcgctaagtataagcccctgcttcggttctggatagatgtttccggtttggtttagccgaataaaattagacaggctatagaggaaatagtctttaattaatttaatttcgatgcaactaacaatagtacatgttttaagcgttgattaaccgttaaaaaaagtgatgtgaatcctacaaatttgtaataaacgtacacttaaaataaacttaaaccggcactatttatgtgaagggccatacattaaggaccatttccttcacgcattatccaattctttcacacaaggagcaatgttactctccaacaatcaagaacaagaagaaaaaggtttgtgaaaaaaaaacaaaggcaaacatggtggagggcataccaaagagatggaaggtgctaagtggccaaaacaaatggaaaggcctgcttgatccacttgacccggatcttcgccgctacatcattcactacggcgagatgtctcaggttggttacgatgcctttaactgggaccgtaagtccagatacgccggtgattgttattactccaagaaccgactgtttgctcgaaccggcttccttaaagccaaccctttcaggtaccatactcccacaatgtttcatctttgattcgacgatgtaagcttacccatgatagattttcaggtacaaagtgactaagtacatctacgcaacagcttccataaagttaccaatctctttcatcgtaaagtctttgtcaaaggatgcatctcgcgtgcagactaactggatgggttacattgcggttgctacagaccagggaaaagcgatgttagggaggagagacattgttgttgcatggagaggaactctacagccatatgaatgggctaatgatttcgattttccgcttgagccagctatctcggttttcccagtaactgaccccaaagataaccctcgtattggaagtggctggctcgacatctataccgcttctgattctcgctcaccttatgacacgactagtgcacaagaacaggtcctcacctttctcttttatcatcgcattcacttcagtgacaggttcaagttatcaaggccgaaatgggttgagctcaaaacgtggcggggcgacccattacaacgtcaacaacactacttccatttctccttctttctcctaatggcatcgtgtcttggttttggttttaggtacaaggagagctcaagaggttgctagaactttacaaggatgaagaaataagcatcaccttcacaggccatagcttgggcgcagttatgtcagttctatcagctgcagatcttgtctatggcaaaaagaataatatcaatataaatcttcaaaaaaagcaagttcctatcacagtttttgctttcgggagtcctcggattggagaccataacttcaaaaacgtagtcgactcactccaaccactaaacattttaagaatagtaaatgttccagatgtcgcaccacattatccactcttactgtactcagaaattggcgaggtgttagagatcaatactttgaactcaacatacctgaaacggtctctgaacttcaggaactaccataacctggagatatacctgcacggcatggcagggatgcaagatacagacggggtattcaagctggagattggccgggatatttcgttggtcaataaaggattggatgctctaaaggacgagtacttagtgccaagtacctggaggtgtctggcaaacaaagggatgcttcaaatggatgatgggacatggaagctggatgtccacaggagagatcatgatgatgatgttaatgctgatgacaatgaccactcctcaactagtaaccaactacaagagctaaatacagattagttacaaaaacttatataagattctgcacaatatgtttgtacacaaaaaaaaattcatttagaagaacaaagaatctgggaaccgaatctcacgtctataaaaatgcaatccaagatcaacaagacaagcaaatagaaagtgacaagttcactatttgtgtacttggacaaagaacaaattgaaattcattgaacaaaacaacaaagtatcttgaatgagagcaattccatgagataaattggtcgcctagatcaactccactattatagtcatgcacaaggagcaaaaacataaaattaccataaacagaagcctcactaagagagaaaaagtataagctaacgttaggtttcaactattttgtatgagaacattaatttgtacttccagagcccaagaaattacgcctgacactcattcatcagttataacgccatcaaatcaagactctgactgcatcatttcatttggcaggcttttcaagacttgaattctcactctccattgagataatgtgagtgagcctatcgtaaacctgttgtgatgtgacaaaaatcatacattaagataatcttcagcaagaatttgcctcctccacgaagcatagctatgatacatgaacaaagaagaaacatactgcagagagttgctccttgtcaccctgttcgttattgcctttatccacttccgtgccacatgatggatcatacctaaagatatatggaataagcccatttaatctgttacgctaacttgaaatgttgatatagagccagttcttgaaagagtgtaacttggtgggatgatattccttaccaatctcgcggaatgccagctacctcccgagctgagtggttgaaagggccccttaactcgacaccatactctttgatcagatctgcacagcacatatggttgaaaacatatttatgatatttgtataaaacgagcgggtaaaagatgagatatagaagcatgaaaaaaagacttgggtatgcctttaaatgtaggggaaggagcacggttcatcttttgacacacagagagaaaccagtctacaccaacagctacatgtgcaacttcctcctcagcgatcttcgccacgattttcgaagtcctgttatctccaaatcctgtcagccgtttgaccaacctaggtccagcatcaagtcctctagcctcctgtataactaaattggtatgaataatgctattaaaacaaactggtgtctcatttgtggtatcatccatatcagataagtggggcagtacctgaacaagagggatacaagccaagcgagcagcgacattgttggaagttttctcgcattccctcatgagcaaattattagccggtatatctccataccttgaagaagaagagggtaagagtttaatggttgtcctgaaacaaatagtaatcaaaagtttgaaactttaaaaatataacagacttgaaaccaagctcagcgagtctctgggaacaccacaagaaatggcgactctcatcatcagcaacatgagcaaagtcatcaaagaagttgtgacccaaaaggtcgaagaaaggagagaaacgagcaacagtatcccaagccaaatcaatagcattaagctcaacatgagctagattatgaagcatatgagcattgagaggaaggtttgagtctttcggatttgggacttggttggtcgcaacctgcaacaatacaaacaaatttagctaatttgatcaaatcagattgagagaaaaaagagaggaggaacacgtacgaggagaggtttgggaggacgagctggagaagaaggaagatgagagattgagccaacagggagattctcacggcgccaacgagagaaagctaaatgggagatatgagatttggagagaggatcggaggttgagagaacgagtgctccgagatcagcgagagaagatgcagctgagacgagaccgtagaagtcggcggagatggagtcagaagaagaaggaaggagaggaccagtaggaccccagagacggaggtcgttgacaggactctttctccagttttcgagaccagaccaaagcttgtgttgttgcttcgtcgaagaagaagagagagcagtggaaatggtgagagaacgaggagacagagaagcagttgaaaaaggacgaagatgatgaatcaacattcttcttctctacctccaaactgaagaatgctgcttcactgcacttgcttccacacattgcttaatctttgccaaaattgcaatatcaaaaaccaaactttacatttttactaaaatacaccttaaacaatttcaagtgttacttaaaccccattatattatttgattatacagataaatccctcaaagaacttacatgtttgattttactttcttttccttgggtgtaattttccccaacaatacagtgctagatcgaatcgaggatcacaaaagatagaagaatgagttaaacaggagcaaggacgcaagaagaaaaacaaagctaaaggggtcacaaactcacaaagcatacagtactacaagttttcaagaatccagaatctttgattcaaaagcaccctaactaaccactaaatgatgaaacagtcatcaaccaactaaaccgctaaatagaccagagaggcaaagagagatatacaaagtgagagatcaaacccaacccctacggttacatctaaaagtagagacagacacataatcctcctaagtcaaacaaaaactaagaataatagatttttctttttttactctaacagtgatatgaatatgatacacaatctttttccttccattccatcccactcctctactatttctcttgcctcaagcctgtacgtcatcatccttccttctttcacttcccatatcctcttctactctaccttcaccgccctgtgtttccaccataaaccatcagacattggtaccatatggtttaaggaagtaacaactatcagaatatataacaatatagacccgatatgaacaagacaaagtattagaaccatgccaacatagagataatgtagatgctgttgtaaatgattcaattaacacatatgcttattaggttaaaagtggatgatagagattaccttacatatttgtcaacaccaaccctcttgtacactagcctctaggtctgatctgatccagatgatgaagagctgtcgctgtctgaatctgcacgcccaacacagaggggtttagataacaaaaatcacaaaagcaatatgtatcagatataatgttagataactcagagagacgcatgtaccactagacgagctggaactggaagagctgcttgaactacttgatctgcttgtctcattgttttgcttctccacttgagaaggtaatggcgtaggtagtgtctttttagctgcagtaagagttattattcgtaagttgttctcaccataaagagggaagtaattcataaaaggaacaggcaaaattacctgtgttgccaccctctctagaaaactcatgtgccgctggtgctggagcctgcaattaagaaaaaaatcctcaaat

SEQ ID NO: 4152 - DNA, 1003 bp, Arabidopsis thaliana landsberg
  unsure (1)..(1003): unsure at all n locations
tccatatatggttacttcgtctataaggttaccagaatgtttcataatcaaatcattgtcaagggaagcatggaacaaagagtctaactagttgggttacattgcggtggctacagacgaaggcaagaagttgttagggaggaggggcattgttgttgcatggcgagggaccattcagctgtacgagtgggctaacgatttcgatttcccacttgaatcagctgttatggttttccctggagctaacccgaatgacgagcctcgcgtagcaaatggttggctatccctttatacatccactgatccacgatcacgttttgacaagaccagtgcacaagaacaggtctatacaaaaaaacctgttcccttacaaacttcacatctgaatcgacatccactgatccacgatcacgtttggtttgcaggttcaagaagagctcaaaaggttactagaattgtacaaaaacgaagacgttaccatcaccttaacaggccatagcttgggcgcagttatgtcgattctatccgccgcagactttctccataacgaatggcctaagatcacaccaagtctacaacacagcctatgtgtcacagtatttgctttcgggagtccccaaatcggtgaccgaagcttcaaaagactcgtagagtctctcgaacacctccacatcctaagagtaacaaacgtcccggacctcattccccgttaccccgtattcaggttcacagatataggcgaggagcttcaaatcaacacattaaaatcagagtacctaaaacgatctctaaacctgggacatttccataacctggaggcttacttacacggcgtggcagggacacaacacaaccaaggagaattcaaactagagattaaccgagatatagcactggtaaacaaaggtttagatgctcttgaagataagtacttagtaccaggacattggtgggttcttgagaacaaaaggatggttcanagtgatgatgggacatggaaact

SEQ ID NO: 4153 - DNA, 2962 bp, Arabidopsis thaliana landsberg
ttttcttctccgcggtctcgctcttcctatttccccctttttccgcggtctacttgatttctatcacttgaatctgacccatttgaaccccaattccattctgcaaatctccatctttgttcatttatgtgaggcttttcttggcgtcctgccacattttggactgtggaaatatttgtatcactgtcgccctgggatggccggaggcagcaccaactggtagggggcgcgacgttggagatgcgtcgtgggaggaagactgactaccttgacatccccctcaaggatagtatcaagggatggcgtttggagtggtttatcatggagaatcacgagaattccctccccccacggtcaggaagacagccggatgttcgtactccgagttggaccgagtccctacagactaggaggtggctgaggcaggggctctgctagctgaagttggattgttgaaggagaggggtctgactgcagaagctgtggttgctgactttgtcttcaagaatattcagccgttgaaagacagggcgcacccggcttatctgtatcgaggcctagccgactcaactcgggttaccaacagaagaattccctctgcagacttagtgaaccgacttgagatgatccttagaggcaaggtgtcaaatgttggtgccccagtggcatactcggcctggaacctgcctcctcccaaagccttcaccctttttgtgtcgaatcctcctgtcactgatggcagtttgggccttagagtgtggccctctgctgaagaagttagtgccttggttgcctcgctcggggagattcctgatgatgaacgataggtccattttgaggtgcccctgaaccctagtgatgtagagataagcgctatgcttgatttgctggctgaggactcttctgacgctgctcctgttggggcgttggcagtagcgccctcccagaggctgatactactttggatgcacagaaacctgtcagtactcgcccgaggcgcccttgccgagccaatcagcctgatccttctgctgatgagcagaagaagacaagaagacgcctccggcgagtatccagctttgatcaggacgttggtacctcggttcctgctactgaagaaatgccagcgactggacttattgatgctgaccccaatgggtgtacccaatcggctgctgatccaatgtgggtgctccacctgttgctgatcccaatgggggtgctgcttgtgttgccaatgtggatgatgaggaggaagaaaatgaagctcctttgactcggaaaaaacagtcgacagctcatcgcgagcggtggaagtagtggagttccctctcctgctttgtctgccctcattggtttgcaggaactgtccctggccaactttgatcagactcttgaggatatggtcccagaggatttgttatcggaaccggtggatgatggtgcaatggaggtttgcgttgacgtgcctgatgctggattgaggtcatcccgtgcctcgtcgaccttagagcgtgatctcgagggtcgggagactgacttggatcgtcctgatcctatggaagtagctgagggcccgtcaaccttagaggtggctactgcagagagcttggatcccttgaatagtgctgacacgtgcccagcccccgagggtgtcgccggggaggactcagctcgggtgaggagtgtaggccactacccagcccccgagggtgttgccagggatgacccggctcgagtgggcagtgcaaccttgacccagcccccgagggtgtccgagcgaggtctccttcctgcacttccatggatgttcatgtgggttcacctccacactctggcggcatggtggtggctcaaactccggatcagggggtcgctttagagggcagcatccccactggtctggcgttaggctctgctgaatgtactgagctcgttcctgctggtctgctgcaagctgcttcgggtggtggtctggcacctggtcatcagctgatttctcctgacttggggatccttcgcttttttccaactccaggtgctgtgctgtgctttagtttgatttttatgttgcatgaattgttgccattatgttcatcactcttcttatcaggctttggtggatggaatggccagccagctgaggtcgcagggtgcttccatcctagaagtggcttcatctcttgagcgttggaatccggtgttgcttcatcgtcgtgtatccgagttggaggcaactaatgctggttagtgccctttcttcttcttccttgcctttgttcgtggattgttttaccttctgacctcatttcgtttgattacctcttgataggaatgactcggcagatcgcagttcttgaggaaaaacattcccaagatcaagctgaaatggctcgacggtgcgctgacttcgaggaaaagtactctcaaagtcagaccaaactaactcaggtctctgctgccttagatgatgccaatgcactgagttcttctcttcacgctcagctcaattctgaaaaggtgatttatgagactgtgcttttccttgttgtgctcctattacttgcttggtttttgaggtagctgtcttttgtttgcaggaagaaaaacgtatccttgctgcttctcgtgacagcctcgacagattgtatcgcgactctagcaactcgttgaccatcctggagaggagtcatcgcttcaccatggaggagttagacaaccatcgctgtaagctgcaggaatccacggatgaggtgatccggctcaagcaattgatatcgtcgaaggatgctactatcaaagaactccgtgcttccaagaaatccatctcccaggagctagaaaccgctcagttggctgccaaggttgctgaagaaacttccattactctgagagcccagcgcgatagagccatggataaggccattcgggcggggcgaatcttgatgaggagacctggcgt

SEQ ID NO: 4154 - DNA, 1032 bp, Arabidopsis thaliana landsberg
cagaatgctcgcattggtttcatttttcactgcattgtttgaaatgtgaaacatggaaaaccaagtttgcccggtgtgccgtccaatatggaaggaaatcccaatgcagcccccaagttttgatcttcctatctctttgctcggtcttataacaatgatgcagctattagccttgtccaccgcttacctagatctcgtggagttatgaatcaaggacgaggtttggctcttgagccgtctatgtttgttgatgatgaacggttagagcagcaactcgtgttttctgggaagagctatagtgatgctttggagaacaatcatcctgtaagaatgatggacttgaagatatatcctgaggtttccgctgtaccacgagctgactcccgtgagaagtttgatgtattggtgcatcttagagctgctgccatggttactggaaatgctaactctctcaacaatcagatatctaggtatcctcgagctccagttgatcttgtcacggtgcttgacatcagtgggagcatggctggaactaaactggctctactcaaacgagcaatgggttttgtgattcagaaccttggttcaaatgataggctctcggttattgctttctcttctactgctcgtcgtcttttccctttgactaagatgtctgatgctggtaggcagcgagcccttcaagctgtaaactcagtggttgcaaatggcgggaccaatatcgctgaaggtcttaggaaaggtgtcaaggtgatggaagatcgaagagataagaatcccgttgctagcattatccttttgtctgatggacgagacacctataccatgaaccaagctgatccaaactacaagttgttacttccattgtctatgcacggttgtgaaagcaagcggtttcagatcccggttcattcttttggctttggatcagatcatgatgcttcactgatgcattctgtttctgaaacctctggggggactttctctttcattgagagtgaatctgtgatccaagatgctcttgctcagtgc

SEQ ID NO: 4155 - DNA, 2854 bp, Arabidopsis thaliana landsberg
catgaccgttccgaaagaattccctcttcttttggtggagaaagaagcgttgatttaagctgaggcgcaagaaaagatcgtgaggacggttttagaactgaaaattccttatctctctatcacgctttcactcatatggagggcggagtttcaaaacaagccggacaatcagcatggggtaggaaccagaggtatttgcctgactgaagggcagattgtcaatagtgtaagagcttatagggggtaacacttacttgagactaaaactagatcggattcatgactttaactctgctctggtccacatatgcaggtctttaaaaagccaaccatggggccaaacggtgagctagtaagcttgggtacagaacctcaaaaggttgttggtggatgtgaggtcactgcaattctcatcctatatggacttcgtaggtacaataatcttttttaagctcatctcatccttctaagtaatctcacgcaaatagactaaatcaaatctctttgcggacacaggtccctaactggatatatcttggctcatgagatgatgcatgcttggcttagactcaatggtactactagtacccaatttgtatttgccaatcaatatggagagagctctcaactaaaagtgctatttggtttgatcacaggttataggaatcttaagttagagctggaagaaggaatatgccaagtgctaggccacatgtggttggagtcacagacatactccagttctgcagctgcatcatcagcttcttcttcttcgaggactccagctgctaatgcatcaaagaaaggtgctcaatctgattacgagaagaaactggtggaattttgcaaggatcagatagaaacagacgattcaccggtctacggtgttggattcaggaaagttaaccagatggtctcagactccagcctccataaaatcctgaaaagtattcaacactggacgaaaccagattcaaatctttgaagcacctaatataggacaaatcgaaacatacctctctagaacatatatatacaaacgcacacttatgtctggtttttctttctggatccaaaatacaactataacagaaaaatagacatgagcacgtccaattatataactttctattttcagcacaatatcatttcatagtacaattatgacaaattaagacattgcatttttgctgctacataagtttcaatatcgaaaaactatgtttcacactttcttaatttaatttccagtagttgcattgtcattttcacaaaattaacccttttacttatatcatattttgaaactttcttatatttttttaatgaatgatagttagtaagtggctaaatgctataaatattttcttttatttatttatcatgattcttattggatgttgttgacaagaaaactagtactatttgattggatacagtatttcgcattaaggagctgaaacggcaacgtttcaagagggagggaaacaactaattaaaatcgtctcgaaagggtaaacaattacgaaactgccaccgagaaatgtgcttgcggcacgtgtgcaaaaaaacagctggtctttcgctttggaccacaaaaagtaagtgtgtgtgtgtgtttctctttcttctccacacgccttgcattctactactttctttttcttttcttctctcaaaaagaccaattcaacacagtagctgctcaatggtctttcgaaacttctcgaaattctcgtggaagacctcgcgaactttccacttgaggaaaagaatcggaaaccggtttgggctacaacgagacccaaaaagacatggcctctgattactattcatctgacgatgaagggtttgggtaagtgttgactttttttaataattatctcaatttcggtcgagtcgttagttattaactttgacggctcggaaaaagaataatcctttgtaaaaggttcatccatcattaatgtgtcgtcgttcagaaccgtgtctgcacaaaaattggggaattttagaaaaacacatgtgaacactttttatcattatagtctctgcattctactttcagctcaaattcgtccaaggttagatcatgtcccgtttcagatattttcaatcttctgtagacatagattcttctttcttttgtttcatactaagctgtgtttcatacctgtatcaggttgttgttgttgtctttgtgtctgtcttgttctttatctaatgtcgatgtcttagtttgctgagatgatcgtcaacatgtttcctaactatgctgtgaactttcttaacctagttttcgtttatttgattatagttcaagcattttgcctttgtttgatgtaaattgagatgtttggcttggaaaagtgaaatcttttaatgttctcccgatccttgggttctcaatgattgattcgtttgcagggaaaaggttggtctgatcggtgaaaaggttggttttcgaagatgtggtgcgtcccctgctgcttcaagccctccacttctgaggtaaatatgatatgtttggttgtttcttttgtctcagcaaagtttggttccaagtttgtctttttccctttctagactttaacttttggggtctgaaaacatgtaggatcgttttgaagcagaaactattcacgtcatagaagtttcacagcatgaagctgacattcagaaagctaaacagcgttctttggccactcatgaagctgaaaagcttgatttggccactcatgaagctgaacagcttgatttggccattcaagaattaaaatcgtcaagaggaggaggaggaaagaaggcgcaccagagagttagaaaacgatgcgcagatagcaaatgttcttcg

SEQ ID NO: 4156 - DNA, 3012 bp, Arabidopsis thaliana landsberg
  unsure (1)..(3012): unsure at all n locations
cttaatctccaacatatttatttgttttttattaattcgaaaatgttttgtaaaaaaaaaacacaaagctttatatgtttccaagaaaatctgattgcagagatcatcaacatcagcctgtaaagaatcttctccatgactgccatggaagaaacccacctgcaaataaaacagaaacaaacactaaagtatacttttatattttcaaaatgtaaaagaaagatatagagagaaatcgaagttaccacattcaggacaacgaaaatactttttgtctcgagaaacaagtcctgttcctccacattcttcacatctcttctgtgcaatctgaaaccaaaactcatttttcaatagacaacacaaccaaataattaatgtatgtgtgtaataatacatactattcttttgctgaattcaacacctgcaacaacgaatggtatgattccagctgcaagatcaattgatttattataagcttataagaaaaacacattttttaatcacatcactaattagctaattaattaaattaccaatggttccaactataatctgccacgtaatctccgatttgcctgtctccgccaccgtgtcagctagttcacttagagccgacgtcgttttgagccgtcgattactcatcgtcatcatgccgccgccgccgcggcttcttcttcttcccggagaaacgaaaccagccgtggattttatctgacgtggtcttgatctaacggtccacagagacggaactctacacagtgaagaagcctccattgtcgccattatgactcaagaaatcaaattcaccgatgaaaatatgttaaaaaaattgggccacgtcgacgttatttcgggtcgggttcgcgccaaccacaaataccatcgtgtggctttaaaaaagctgccaatcaaaaatatattctaaaatacattaaaacgacggcgtgtaatcggaaaacagtaaacgccattaaagtcttgtgtgtgttaataatgaatctcaaaacaaaacttttttgtttgtttgttttggaattagggttttagggtatattcgcaatcactctaatcggataattcctctactctgttaacattatcttcttcttcgttcctaccgcaaatggcgggtttctcactgtactgttttaaaaaccctcgaattctctttactcttccgtcggaatcacctctctttgttttgggttctgataaatgttcaccggcgacgagacggccgagtagaaagactcgtgggtttgtcgtgacgtacgcgcactctaatccgaagataatcaatccgaagaagaagtcgaggtatgggcaaacgttatctccatatgacagtgatgaagatgatgatgatgatgatgatgatgatgatgatgaagatgatgattagagtgtctgccgaacgcataaacaccaccaccccgaccgcgaccaccacctctgctgccaccaccaccaccttttgccgcaaggcccgcaacagaagttatcgaaagggttaagattagaccggcagtcaggaattttagcatcaccatcatctttggtgaggaataagacttcatcatcttatcgaaagagaaatataaacctataaaaaaaaccaaaacaaacaagtgacgcttgtggttttgatttgtaacagagaaaaacttcgacaaaataacaagttggggttttgcataaggaaaagtactttctccaattcctattttgtctaggtttagtcccttattattgactactcttccttttttccctagaaaaataaaatgatcgattatataaataataatttttagccaataataatggagattttcctttttcttcttcgtttttccatttattctcattggttagttttaaataaacttttgaagtgtcattcgttcttgtgttaatctctataaattttaactttcttgttcaatttgatcgaatatttttaaataagcaaatggctgaaaaatatttaaaggtaaaaacttttgaactctcgagattcttaaaacagataaatagataatgtccttttatgtttcaaaataagtattattttagattctaaatacaaaagttgacatcaaatacataatgtatccccaaataaaagataattaattgaaaagtatttgttccgtttttaatgttgatgtcgttgttgttcacgtaaataagtaccacatatttttctaatcagatgtccccaattaggaatgacaaatttttgcaaaaaatgaaaaaaatcaatatattgttatgtatatcatattaaaagcttttaacaaaagagagtatgtcatatgaaaagcccctaattaaaaagccagttctttattttctgaagagttcagaatcttttgaacaacataagcaaaacgcaagaaggcaacacacacgtcatcgttaaacccatatttgatccgtcaaccaaaccgctattacgatgaccagaaccgccgtggcttggaactctaccaccaaaccaacggccaccgcgaataccaccaccttttgcggccacgtaagttatcagaaggattaagattagactcgatgtcacagattttaccgtcatcatcttcgttgaggagcaagacttgatcaacttcttcagggtaaataataaacttgtaaaaaaaaaaacaggaaaacgctctagattttannnnnnnnnnnnnnnnnnnnnnnaaaaaaaatagcaacttaataaggttttgcataaacaagtacgcgataaggagttgttttctgaagttagtccttattagctcgactctttttcctttcctaagagttaatcaaaataaatactactatatgttaaaacctcaatcaataacaaaaatattaaaaggtcatttaagattatcttttgaaaaaaaggatcaagtataaatacatgtgcttaaaatatagaaatagtttaattatcattatcattttgtaaaaacaaattattaaaatttataagttgtgtactttggcatcagagat

SEQ ID NO: 4157 - DNA, 1909 bp, Arabidopsis thaliana landsberg
acatgctacaagtcacaagatactttaaccaagtgtgggcatacttaagaattgagattaagaatgcaagaaaattagcaatagacgcataagcttacctaagaggaggattcacctactggaatgctggggcattggtctgcaatattatctctgcactcgacctcgtcatctatcaagggtttcaaatgaaaagtgggaccaaaacttgtgaactcaaaccgagaagtcaccaaaatcttgtaatcaggtagctgaatcagaaacttttgtagcaaggactcttcctcagcccaaacatcatctaaaaccaacaatatagacccatttcgtccaagttgcttcagcagttgttgaatgtagagcattgcatctaagtcattctcatattcatttgctttacaaccaatgtgctcgagtaacttgtgtccgatgagcctcacgttagggaattttgacacagagataaagaagatctgcttgaatttttctgccaaaagtagacgacatgagaaacatgctcttattccaataaaaaaaggggaaaccaagattttgggtatacggtaatacccttaacatctgcatcatggcaaagctttgtaaccaacgtggtcttcccgagggcataaggagcagagaccacgacggtaaccactccgtcttcaaaaagcatcttctttaactccattaatggcctcttcaaccaaaatttagtaactacttcgggctgagccactagacaaagcttggaaaattcattcccaatatcactcagtaggtcggctttcgtactcacgcttgccatgcccatggaacgcatatattgcaactggttcctatgctgaataagctgtaactcaatctgacagaacttgagaaaatcctgattgattgcttttatttctctggtatataaagctttcttggcgatactgtaccactggatgcgtgaacacttatgaaccatttccccagctcgttccatcgtttcggtcagaacctttagctcactcgtacctcggttcgatccttgttgcatcatgtcgatctcgttgaaaatcggaaccaatctctccatcgtcgaagcgagatcctgggataatggtttaaagtccttcactttcttggcctcttcaattaccagtttaaatatctcagaaagtggagctcccaaagcagcacctccaaccaaagaagcgacatccgagatcggcatggtattgtttttccttcttcaagagctctcacaaattgagcgagagagaaactagaaccgaaatggtcaactgattgtcgatagtaaaacgcgtgtaaaacaaaaaagaacaacgtacgtacgtaccactgcctctccgtggggcctgtatttgtttactactttacttgtagaaaataccttcgttcttgccttggcaattgcgtaaaaagggaaacaaaaatttttaacacccagataataaatgattttgcagcaggatatagcattttattagagtaatttaatatgtagttcatggtggtctctaaaatgttgaacaaaaatgcttaaaactatttccctggggaatgatttataacggacctgtaacgaataattagcaacgcaagaaatagtttcactaaggagtttaatccgaacgaagatacatttgctgaacgcagaatcctccaaaggtttccaactttacgggattaagatgaaaaagggtttacacacaacaaaaacaaagaagcagcattcccaaaatcaaaaacacaccaaagaaggaaacgccggacaagaaaaaaagggtacttggtgatagcttgaaaacattgttctgaatctatatatatatatatgtgtgtatatggtatgtatgtatgtgtcgacgtgtcttgtatggcaaattcaaaactttgaatc

SEQ ID NO: 4158 - DNA, 2045 bp, Arabidopsis thaliana landsberg
  unsure (1)..(2045): unsure at all n locations
gtttagatttaactttgtgtaaatgcttggcttgctaagctaatttttgcttttcttctaatcctttggtttcagagaatgtggtgtttgtcctgctttaaaccttccactaaacatgatccctctgaggtaattcaatttatttggctctttcttggtttcgtgaagattgcttaacttttgacgtctgaaacttgcaggaacgttttgaagaagaaacaaatatcgttacaggtatttctctgtatgaagatgtcatcttacgtcagagaagatcagaagctgatcagatagaatgggctattcaagatagcttcaacccgcaagaaacttctcgttgtcgtcagcgagaggaggatgatcagatagcgcgtggtttgcaatatgtggaagaaactgagcttgataaatcagttgtggacgaagaagatcagcagctttctaagattgttgaggagagtttgaaggagaaaggcaaaagtaagcaatctgaagatgatcagatagcgcttggtttgcaatacgtggaagaaactgagcttaataaatcagttgtggacgaagaagatcagcagctttctaagattgttgaggagagtttgaaggagaaaggcaaaagtaagcaatttgaagatgatcaagtggaaaatgatgaacagcaagctctgatggttcaggagagtctatacatggtggagctttctgctcaacttgaagaagataaaaacatttcaacaatacctccgctgaatgaagatgcgcagcttcagaaggttatttgggaaagcgcgaagggtaaaggccaaatagagcatttcaaagatccagtggaagaagatggaaatcttccaagggtagatctcaacgttaaccatcctcataggtaagtgtttgtctattactttggcggtttccttgcatgctttattacaagatagaaatgtcctgacctggttaagattatttcacttgtagcatatgtgatggttgcaaatctgcgattgaatatggaagatctgttcatgccttgggtgttaattggcatcctgaatgtttctgttgtcgttattgcgacaaaccaatcgctatgcacgaggtttagaaccgtatatgaaagcttccttttttatagtgattggtactttaatatactaattgagttgctcattatgttttctgatgcaacatctaactcctgagggctgcttagttttcaaacacaaaagggaggtgtcatataacctgctacgagcgtagtcacccaaactgccatgtctgcaaaaagaaggtaacttcccattggggtctatgagttgaaagttaaataattggtatcttataacagtttacgacttatgtataatctgttgtacttttcctggcgatgatggatcttaatgtaattgtattcagtttcctggtagaaagtataaagaacatcccttctggaaggaaaagtactgcccttttcatgaagttgatggaactcccaagtgttgcagttgtgaaagattagaggtgggtttactttcacttcaatatgaatattggcaaatgagcatgagataaagaatcaaccgccatttcaaaagaagaagtaaagctttctcatgattttttttttgtttgcagccctggggaacgaagtatgtaatgcttgctgacaatcggtggctatgcgtaaaatgtatggaatgcgcggttatggatacttatgagtgccaaccattgcactttgaaatccgtgaattcttcggaagcttaaacatgaaggttgagaaagaattccctcttcttttggtggagaaagaannnnnnnnnnnnnnnnnnnnnnnngaaaagatcgtgagtacattttttgaactgaaaattccttatctctctatttctctttcactcatatgttttgtgagtttcaaaacaagcaggacaatcagcatggtgttgtaaccagaggtatttgcctgtctgagggcagattgtcatagtgtagagctattgggggtacacttactgagactaaactagattgatcatgactttac

SEQ ID NO: 4159 - DNA, 891 bp, Arabidopsis thaliana landsberg
tgtaacatctccttccaactcatctcccccttctaagtactctcctgcgccgatagactaaataaaatctgagttcaaacacagattgctaacaggatatatcttggctcacgagatgatgcatgcttggcttagactcaatggtacgtaattggtcaaatatccaacatttgtaacgatgatgatcatgaccaagaaacgtgagggagaggtctctaagcgtttttggtttgattacaggacatatgaacctgaacaacattttggaagaaggaatatgccaagtgctaggtcacctgtggttggagtctcagacatacgccactgctgatactactgcagatgcagcatcagcttcttcttcttcttcccgcactcctccagctgctagtgcctcaaagaaaggtgagtggtctgatttcgacaagaaactggtggagttttgcaagaatcagatagaaacagacgaatcaccggtctacggtcttggattcaggacagttaacgagatggtgacaaactccagcctccaggaaaccctcaaggagattcttcgccggaggtaaagacgatcccagattcaaagttatgaatttccatacaagacacgtcgacacatacataccaataccatatacatatagtcatatatatacagagccatgttttcaagctatcactttttttcggcgtttccttcttttggtgtgttcttttatttattttgggattgctgcttctatgttgctgtgtgtaaactggttcttcttcgttttcccgtaaagttggaacctttagaggaccttgcgttaagcagttctatcctctcggattcagttcttgcggcgtatccattcccgcttaaaataaaacaagtgtttttaagttttt

SEQ ID NO: 4160 - DNA, 617 bp, Arabidopsis thaliana landsberg
  unsure (1)..(617): unsure at all n locations
tggctcagaatctaaaaggtaactcgtgagtgcgaggtcactgcaattctcattctatatggtcttcctaggtacttttacatctcttccacctcatctcccaactgagtactctcttggctcaaaatcaatctatgttgaaacacaggttactaacaggatatattttggctcacgagatgatgnnnnnnnnnnnnnnnnnnnnnnnnnnnnnnnnngtcaaatatccaacatttgtaacgatgatgatcatgaccaagaattgtgagggagaggtctctaagcgtttttggtttgatttgattacaggacataggaacctgaacaacattttggaagaaggaatatgccaagttctaggtcacctgtggttggattctcagacatacgccactgctgatgctactgcagatgcatcatcatcagcttcttcttcttcccgcactcctccagctgctagtgcgtcaaagaaaggtgagtggtctgatttcgacaagaaactggtggagttttgcaagaatcagatagaaacagacgattcaccggtctacggtcttggattcaggacagaaaacgagatggtgacaaactccagcctccaggaaaccctgatagag

SEQ ID NO: 4161 - DNA, 1774 bp, Arabidopsis thaliana landsberg
caaaagtaattctatacaacttgtggcttaatgatgaaggaatctatgagctgagttttgacgacgacgaggaggtaacacacacttttgctcaattgatatatactcgacgcgatatcttgccagaggtgtttttgttttaggtctggtcatatgttttgatattggtataggatatccggctccgagatgagagtgtgaatgacggaaaacggttgcaccataaaatattggaactgagatctcatatttcataccacttacgttattctctgagggtaatctccttaatattttcttcctttttctaattatgttttgttccaaggatgtctgaagattcattttgttatttcttcatccctaggcttatgcttcaatgttatatctcaaaaagttcaaaaacttcaaaattataattcggggaatccctgtggagcagttcaacattgctgatggattcagatttcccgagattattaagtacaagccccatacagctacaacggaacaagtgattcctttttttcttttctactctctagttttgttatgtggagctttggctaattgttttgctatttgccgttgcataactgtttgtgttttcatatgcaaacattaatctagggaatgagaaaaaaaaaacactaggctttcttgttacaggcttccactgaaatcaaaattggatttgtaaaggaggcacctaagcttgcaatctgcggtttcaatgtgtatcacaaaaaccgtctcatccgggtacgctttcatatagcagacatttgcatgatctagataatctaaagaagcatctgtagtaagattgttatttgacaattcagagaaatcagcttatttacaagaaagacatgctcaatagaacattaaaaaaattggtttgctagcatacttgttacttaaacattaaagaaaggctttgaatatgccttgattaagtttagatctctctttcttgcaccattacagcctttctggaaggtcactatgggaggggactcgacaggccacggtgttgtgggtatattgattgatttcctttgtgatttcatggactatattttgtttgacgtaaagacctggctgaagactcattaaccaaaatctgttccccaggagttcttgaagcaaacttcatagaaccagcccacgataagcaagattttgaaaggtcttctctatttcagcggctggaggcgaggttgaaaaagattgtctatagttactggtctcttcgttctctccaaaaccttttcaaataattttgtcaatataatctttgttccaaatcgtaatatctttggttgactcttccactgcttgttatggagaaaaacaggtatagccactgccaccttttaggataccataaatatcaaatgcctgcagataagtcgaaaaagatagcaatacctgatcaacctcctactatcagtacagtcaatccttcgcctttgccttctgataaaattagtcaaggtggccctataatacgtgaaatcaatcttagtaacgccacctcaagccgtacagttgcttttgcttcgccacatttgagaaattccactggtttaagaagtaactttcaacccgtgcagctcaacccacaacctacagctgccgtaagtgaattcagtggatgataatagttttattcacaagtcgatctaaagtgaaaaacccttcgcaggatactggaaacaacctcgataacaagacagcgggtgagatacgccaagagaacttacaactc

SEQ ID NO: 4162 - DNA, 3668 bp, Arabidopsis thaliana landsberg
caaagctagtttcgtacagattgtcattttccagtgaaatgaggtcagagttgaaagtagtatactgaagttggaagaagacgacgaattatgtggggattctgttctcaaccacatttttgtactttactttcttttaaatccaatgttggacatgggccttgcccattatatgttacgagacccaaaacagatatgcacaagtataaaaggggcttcaactactaaaaaggcccattaagcttggaaggacaaaaacgtaatttacagaggagacaagagggattttagggttcatattccctataaatactcagaagcactattgggagaggagaaagaggggagttgagagacaaaaagaattgttgccttgcccagaatcgttgccttgcccaggatcgttgccttacccgaaatcattgcctaccccgacatcattgcctaccccgacatcgttgccttgcccagaatcgttgccttgctcaggatcgttgccttgtccgaaatcattgcctaccccgacatcattgcctagcccgacatcgttgccttgcccaggatcgtcgccttgcccaaaatcgttgccttgcccaggatcgttgccttgtccgaaatcattgcctaacccgacatcgtcgcctaacccgaaatcgtcgtctcgcccatttctgtttttacgattaagtctcggctcggcggatagtctacaaccgccgcagcgaaactaacttgttgtaatctctcgatctttgctatcgttaataaaaaggaccagctccgttcaccccccaaaatctcgtatattattattgttacatccccagtacaaacaattggcgcccaccgtggggccgttgatcgaagctatccttttttgacgagcctatgcatcctgagcctcacacgattcgtgacgatatgatggatacttccagcgatcgagaaaccgatactggcatacctcaagcgcctaacgtgctgggcttacctccgctcaacacagcagccatccgtgccgagcaggatcccacgcactgcatcttgttcacaccggtcacaggaggcgaaacggatcatgttcaagtcgcacgacctcccgccgcgcctaccgcacctaccgcgtctaccgcacctaccgcgcctaccaccctcgcagcaacagaagtagacgaagcaactgccgcagcaaaagcagctaaaggtgccgcacaaagacgtaccacagcagcagatcgaggcccccacttaaacgacctcgttcaaactatccttgaccagctcgacggacatgaagcacgaacgaccgaacggattgacgcccttgtggcagcgcaagtcacttccaagagtcagatcgaccgacttcgacgccgaaaacgcacctcccaacctcatgatgatcaagatggacagcagtctccgcgaactccagtcgctgaacgctccgagatccaatgctgcagaccagcgtctgttatcttaggattcattgacgagcattcttgcgatagcccacaatatgaccataacctgcagagcggccacaacctgcactcgatcaaacggtggtgatgcttctctcatttggtcattcaaatcaatggctcaaaaatgctcctcctcattctactcgatcaacggttgagatttttcttgacttggtttaaatttactcgaccgttgactctcttagggtctctaaaataaacctgaaacacttaaacaaaaacatcaaaaataacaagaaaaatagaaagttatatacataaaaagacataaaacttcctcccaagtgagcttgttttaaatcactaagcttgactcttacagagtttagtcagaaaaaaggttgaagagaggaacagagaagtcctcatcttaagttgttgaatttttagtgcttgaatcaaactctgcatcctctcttgatatatggtaggatgagtacttatttgatttttcttcaaagtaagcttctttctgatcagcagagtaatcttcttcctttgaaccaggctcctttgaccaatcctcaaattcaaaactggggtagcctttaaccatttcttgaagttccaagattgcatggttcagtccttccatcttgtaagttagctccccaatggtatcctcttgagctttgtattatatcctgagtttcagaagtttttcagtaacagaatcaagtgtaaagtgttcttctggggaataagtcggaatagagatttccccctcactcaacaacttgctctctaggcttctttcctctaagtgaactccttttttatcttctggtgcaagccattatgttgtgaaatgttcgtcctccttgatagatagtgcagtttccatcttctctggatcaataccatttgaaatttttttaactcttttttcaaacatccatagttgatctttcagcttcatcacccttgaagataatccctctatgactctgctttgccatttaaatcttttcctcatcttctgtaggatcttcagtctgagcaaacccttctattgctctcttcttctggtcaaaagttttcttcagcttgctgagttgagaagtatagataactcttggtggggtaccagcttctgttttttcatcaacatccatgtcctgaatcccaaaattatgacctcatgtttttgatttccctgaagcttttctgatgtcaaactttatcttgatgcctttatcaaggttgagatttattttcccttcctgacatctatgactgctcccactgaggctaagaaaggtctccctaggatcaggggatccttgccttcttcatctacgtcaaataccacaaaatttgtaggtatcttaacatttccaatcttgatatgcagattttctattagaccatgaggatgtgcaacagaaccatcagctaagagcagagctaggttgcagaacttgtattccattacccctagccttttagctgtagagaggggcataaggctaacaaatgctcctaaatcacaaaggcacctattgaatgtcaatgctcttagagagcatgacaaaatgaatgaaccgagatcatcaagattttcttagatgactttcttcttgtaagtttattgagtcatgactctactaatcatttcttgattctgatccttgttgagtttttctcttttgaatttttttcaaagtggtgagtattcagcaaaggtgtgtgctctatagtcctgatgaattgttgggtggcaggttcagcaatttgagttgaatcccccccttcttgaatcataatgtcctcagtattgtgagtctaatgacttggtggagactcatcttcttggcggatggtgataacattagcagtagcatagtccttacgattctgaactgatttccctggaaattgcaacggatgcttcggcgcagaggttgatgcaaattgactctccacatacttgactttgtaatttagagcttcaaacttgatatttagatcgttgtaagaacaatcaatattgttgtgtaattcagctatcttcttgtcaaaagccatagctccagtagcttgtccttaaatgatctattgaataagttgcttaatttcaggatcttgagcagttgggtcttgttgtggttgttgagtgaatcctggtggtggattttgctgttggtatcctccatt

SEQ ID NO: 4163 - DNA, 1176 bp, Arabidopsis thaliana landsberg
ctttcatggtgttcttgtatttgcttaatagcctgtcatgtgcatatatgtaacggtatgtacataagcgtattactcatataaacatttttgagaaatgggcctataagtatttgagctatggagcccaattagactgttgacccaaaaaaagaaacgcaaggcaatgaataatgatgacgaagaagacgtttgcgtttcttcacgctgtagttgaaaagtctgtctagactaatcggagaagacgtttgtttcacaaaattcgaattcgttttctcgattcactttcaccgtcgacggtaatgcctcctatggcgaaaaatgcagcagtcactgatgttgttcatctcgacagtgatagtgacagtgacaacggagtagtaggaggaagagaatcaggaagtacaatcgctggtgctgcgacaatggctcctcgagagaccttagaatgccggagcttttggaaggcgggaggttactttgtgataccgaacgttgtgactcctactgctccaggtcatctctctcttcctcatacacacgcatgcatcacgattatggtatctaatgagatggaatttgataggtatgcttgagcatgctcgagttcatcccaggtttcttcactcgaatgctacctcacacaaatgggcttttggaggtaaagctatgagcctatgaattgtctctactggtgcgatcaatttgattaatttgtgattttgtgatgatcatctttgtcaatttcttcttctttgtattgtattgcagcaatcgctgagctacttgacaatgctgttgacgaggtatgtgtgaggattgaaatgctttcttaagttcattttttattatctttttcgtttttgattgttgcgagtgatctggttttttaaagcatcggtaccgtgtttggttaatttgaattacttatatctcagatacaaaatggtgctacgtttgttaagattgataagatcaatattgtcaaagataattccccagctttagttttccaaggtacatttcctttgaatgactgtggtgcttttgcctaaccaaggcttgggatgttgttattgatatggtttctctcctttctttttgaacttgaagatgatggtggtgggatggatcccgctgggctcagaaaatgcatgagcttaggctactcatcaa

SEQ ID NO: 4164 - DNA, 760 bp, Arabidopsis thaliana landsberg
ggaagaacaggcaaaatcactgtcacattttcggataccaaactgctcaaatccctgcagataagtcgaaaaggacagtaatacctgatcaaccgcctactgtcaatacatacaatccttcgcctttgccttctgatagaatcagtcatggtggtcctataatacgtgaaatcaatcttagtaacgccacttcaagccgaacagctgctgttgccgcgccacatttgagaaattacacaggtttaagaaataacttccaacccgtgcagctcaacccacaaccacctgcagctggcgtaagtgaattcagtcaatgatatagttttattcacaagtttgatctaaagtcgatgattttttttttccgcaggatactggaaacaacctcgttggcaagttagcggctgagatacgcgaagagaacttacaactcttcatgaggtatatttacaacaagagaaaaacacatttcagtatcatatctctcttggggatctgaattaaatattattcttcaacaggtgcgaggaatatgtaaagaaagagaatgaagtagaacagacggtaagtttgattccgcagtacaaaacatccgtttattacatggactctaacaccggtatacattggatgataaaacaggtaaagagcttagaaaaagaactggaagaaattcaaagtaaatgtgcacaacttgctctgcttgtggatgctaagaagaaggagatgcaacaagtttagtaaaagcgttacgagttaa

SEQ ID NO: 4165 - DNA, 747 bp, Arabidopsis thaliana landsberg
tttaccaaatctacacagagcattggtcttctgtcctatacattccttaggaaaactggtcaggatgatgtgatcgttcctatggtaaaatcctcagcttatgtagctttttgtttggaaactcatgaatctgcaacgattattttgtcttgatgttatcatatctgcaatgcagattgatttcgatatatccagtgatagcccccaaccaattatttatgggtctcccggagattggtctaccaaccttaacattcttctcaaatggtccccgttttcaacaatggtcgaacttttgcagcaggttgtttcctttaaaaaactctggttccgagtgttatattaacgtggcttgtttattcattcatttatttccattcttcatctaccagttcgaggatattggaacacatggaacaaaagtaattatatacaacttgtggcttaatgatgaaggaatctatgagctgagttttgacgacgatgatgtggtacttacacttccttaaagggtttatgatgaagttttttgcaaaagttgggttttaaagtatttcaattattttccttaatattggtataggatatacggctccgagatgaaaatgcccaggacgggaaacggttgcacgctaaaacattggaagtaaaatctcatatttcgtaccgctatcgacattctctaagggtaaatccttctgaaaatcttctttctaattagattttttttactggtgcaaggatgtg

SEQ ID NO: 4166 - DNA, 535 bp, Arabidopsis thaliana landsberg
  unsure (1)..(535): unsure at all n locations
aatgctttgctaccctcgcctccagccgcagaaatagagaagacctctcaaaatcttgcttgtcgtgggctggttctatgaagtttgcctcaagaactcctggggaacagattttggtaatgagtctcccctccagggttttagcccaaacaaaacatattcaattgacatatagaaattataaggagaatgaatcactatacccataacaccattgcctctcgttgacccttccagaacgaccttccagaatggctgtaatggtgcaagagagatctcaacttaatcaagccatatacaaatggaagcttaagtgaaaatatactaacaaacttacgaaagttgcttcttgagattaagagcatataaataactgcaacatcaaaacgtacccggatgagacggtttttgtgatagacattgaaaccacaaattggaagtttaggggcctccttgatgaatccaactttaattccagtggcagcctgtaataaataagaaagncttagtggttttgcactcgcagtctaaaaca

SEQ ID NO: 4167 - DNA, 5650 bp, Arabidopsis thaliana landsberg
aagttcagtcaccttggatttagttgtagtatttccgtaggtgcattgcgttccaggatcttggaacgactttgccgtttaagtcggcgagctcatatactccgggtcggacgaccttagagatcaggtatggcccttcccagttcgtcacgagcttcccagcgttcggttcggcagtgttttgaaaaacttttcggagaactcgatctccttcatggaatcttcgctgtcggacgtttgagttgtaataccgagccgtttcattctgatagtattgtatgcgaaccaaggctgaatctcttcgttcgtcgatcagatcaagtttgtcgagcagcctgtgagtattatctggtttgttctcgggagatagacatcggcgcatgctcggtaccatcatttcggctggaattacgcattccgttccgtagactaaggagaagggggtttctcacgtggctcaacgaggagttgtctgatgcgaccatagaacaccctcgagttcgtcggaccacgagccctttttagcagcgagccgttttttcaaaccatcgaggattgttttgttcgcggcttcggtttggccgtttccttggggatatcgtggtgttgatttgctaagtcgaactccccatttatcacagaagccttggaagcgagttgatataaactgcgagccgttatccgtaacgatctcgtaaggtatcctctggagacataggatatgtttccacacaaagttctcgacttgagcgtccttgatgctggcgtaagattcagtcaatacgagaactaactttttctgctttgaaggatgcataggtccaattatatccattgaccaccgcatgaatggatatggcgaggcgattgatgacaagagctcggctggctgatggattgttggtgcgtgcctttgacatttttcgcatcgttttgaaaaaatttcgcagtctttgatcattgtcggccagaagaatccgtggcgttttattttaatggctaaggcccttcccccggaatgatttacgcacgagccaccgtgaatttccttcatgatcttgcaagtcgcttctccttccacgcatgtcgtcaagggtctggataatcgccacttgtaaagtttttcatcaactagaacgaaacgtgcagcctgagctttgagtttccgagctttccatttgtccgagggcaacttcccttcggatatatagcttatgatgggttccatccatactgagctgcagtcacccgggtcgtcttgatccgcgctgacttgtattgggaggacgtgttcttcttcgccgagctcaattcctggcttctcaatgaattccaatgggatgactcttctcaagcttgggtcagatgttgaggccagagcagctaaagcgtcagccgatgtattttctcctcgagggatcctcgttaactcgaatttgtcgaaatgcttcgccagattttgtacatgagccagatatgcttcaattctttcgtcccgagccgtgtattctccgttgaattgatttgcgacgagctgagagtcacaaaagctcggattttctctatctttagcccccggctacgagcgcttcgtattcagccacgttgttggtagccttgaagtttaatctgaatgattgctcgagaacctctcccgatggcgaggtaagacggatgcccacgcccaaaccttgctttgatgaagagccgtttacgtgcaatagccaagttgtatcgagcggattctcccgggcctcctttgtgggtaattcgacgataaaatctgctaggacctgtgattttgcacatgttttgatccgataatcgatgtcatactcgctgagctcgattgccgatttagccaggcgtccctattggtttggactgtgtaggacagcgcggagcggcatggatcccattatacgatggaatgggattgaaaaagggtcgcagtttccgagccgacattacaaccgttaaagcaagtttctccatttgccgatagcgagactccgcgccggtgaaagtctgtgagacgtagaaaatcggcttctgttcgcctctgtcttctcggactaacactccgctgactgcagtatctgatacggcaatatacaaatacaatggctctccgattacgggtttggcgaggatgggcggtgttgctaggtactttttgagttcctgaaaagcttcttcacatcggattgtccactcgaactttttgtttccccgaagcacatcgtaaaaggctaagcatttgtctgtcgatcgagagatgaaacggttaagggccgcaactcttccggttaggcgctgcacttctcgcttgttctgaggcgatgccattcccagcaatgcctcgatctgctttggattcgcctcgatgccgcgatgtgtgaccaggtacccgaggaactcgccggatcttactccgaagcgacacgtcgcaggattgagtttgacgttgtataggtttagttgtttgaaacattcgcgcaggtgggtcacgtgatctttctcttccatggatttcaccaacatgtcgtcaatgtagacctccattgtctttccgatctgtaaggaaaaaattttgccgacgaagcattgataggtcgcccgggcgttcttgagtccgaagggcatcactcggtagcaaaaaattacttgctctgtgtaaaaagcggttttttcttgatcttcggggttcatcatgatctggttgtaaccagcgaaagcatccatgaacgacagtagcttgtttccagaagttgattccacgaggcgatcgatgtgtggtaatgggaagctgtcttttgggcaagctttgttaacgtctatgaaatctacgcatactctccatttgcagtttttcttttttactacgactgggtttgcgatccaatcgggatatttcgcctcagtgatggatccaatcctcaataatttttctacctcggcttttacggcttctgctcactctcgacccaattttctcctcttctgcttgacgggtttgaaagttggatcgatgttgagctcgtgtgatacgacgttaacacttactccgggcaaatcttctggggaccaggcgaaagtattgacgttttctttgaggaaggcagtgagttcagttgttagttcttctcccacatctccgctgatttctacgcatcgctcgggctttgcgtcgtcaaggcaaattgagatgatcggatcgggagttggtgtcgtagatttttgagcttcttcgatctttagctgctataactgctcggagattgacttttcttgagctcggccaagcttggccttcttatgattcgcgtcggccgtcgactcagtgacggggttcctgagcttgtgttctgccatgaagcaaatgcgagcatttttctggtttccccagatggttttcacgccgtcgcttgtgggaaattttaagcatagatgatacgtcgaggcgacagctcggaactgatttagccatggggtgccgataatcgcgttgtacacggtcggctggtcggtaacagagaaatcgacgatttttgttacccctttggctcggactggcagtttgatggttccgagagtcatagtggtttcccctgagaacccgagcacaggtcgtggagttagaacgatttgcgtcatgtcgatcttcatttctcgcagagttgtaaggaaaatgatgtccagtgtgcttcccgtgtcgactaggactcgttcgacgttgaaatcaccgatggtcagtgtaatgactaagggatcgttgtgtggacggtctaaaccgttggtatcgctttcgtgaaaggttacttcgtcatttggtccattaaatggccgcgtccagttatgattcgcgtcggctttcctttgatatgccttgattgatgctgtcgtgtcttgacagaaagccgaatcccctaaaattgtgaaaatccttccccgagcagcttctggctcatcgtcgtctgtttggcgattaccccggcctcttttgggtccttcggggtttgccgcgggggctgtctgctcaggattggccacagcgttgacctgctcggttttacctttttctgcctttaaatcatcgatggtcaaacctccaccaatttctccggccaggaattttgctaccaaccttgctccgaggcagcgacatctggaagtgtgatggccgtaactcttatgcaactcgcaatattcttgctcgtttcctgcgggttgatccttcgtccacgtgtaggattcccgaccgcgtcctcgtccgcggcctcgccctcggcctcgggcggcttcgccttggggcgatcggcctggtaattatgggctctagagaaattttgtccttcatggtgaacgaatgtcccgccttgggcgcctttgttgtgattcggagcgtcgggttgaggtttatcgatgcgaggcgtttgcttggtcggttcgtgtcttttagctagtagttcatctctttttcatgggatacgtaataccaggctcgaagcaaggcagctcgcattgactgcggtctcaacatggttaattcttatcaaaattgggacttataccacaaggctaattcaaagcacagagagcctgtacacaaatgaatcattcgactatggatacggtagagcggccacaggcgagtcatccaaataaaatgaaattcaatgatgatagatatgttatatgtgatcaaagattttatgaacttgttggtaaatctatcgttttataacagattttgctttaaaaaataaattactagacagtatcctaatgataacagatttgtttttactgataacagttttgtttttcagatcttaagcataagagatttactcatgtcttgttataacatatatgtttataaatagaataaccttttcattgatgacagaccttttgttgacagatttgttttcaaattttgaaacatcacttttgttttcaaaattttgttaaacgctcaattaaaaacgtttcccggtttgagagcttcggtgaaccggtttatttacaatgtgttacgacagacttataattgatgacaacaaatttgtttaatttatttccatatttgacatttggtgcattaaattgagattattcacttccgttttttttccttattttacgctccaactgtttaaattatacactaaaattacgcttccttccttttcgggatttcttagattcagtggtttgttctcttcctcaattcatcaattcatctacgtttttaagtgtgacttttttatcatgttttgtgattcgctttataaagcgttttcttcatactaagaataaggggttgggtatggatcaggattattctctgtgtgtggaagatggatttttgagaaaaccaaatggctctttgttgttgataatagttgaggatgtagagttaagttaggggtcagtaaaacctattttcatgttcttgatccaatggtgtataagaatgacgatgtggatatcaggcattgtgaagtagtatagagtatcagatctccacataaaatacacaagttcccacccatactaccaccagaaatagtagatcatcatataacagtttctacattcttagggcatatgacataaagaaacctcttgacactgtgatgag

SEQ ID NO: 4168 - DNA, 547 bp, Arabidopsis thaliana landsberg
tcttcttcctgcgaccagttcagccacggaccatcagccatcaccaacaccggaaaaacccgtgggaggaaggccagaaacagtaataactccaaggtatgttaaaccaacttgtaatgtatcatctatcatttatgggatggggttggatagtcaaaaacataaatgttggtgtggtttggtgaattaggaaggagtagagggaagaaaaagcaaaaaacagaagagaggaagcaaagaagagcctccaacagattacattcacgttcgagctagaagaggccaagctactgatagccacagccttgctgagagggtattttagtcatttctcttaacattttaatttttcttcattaatcatgttttcataaaatacattttgattaatatttgattaaacttatatatatatatgtaaaggtgagaagggaaaagataagtgagcggatgaggactctgcaaaaccttgttccgggctgtgataaggtcagctagagtagagacaattttatttaggagaattgataatggtttattttataat

SEQ ID NO: 4169 - DNA, 2454 bp, Arabidopsis thaliana landsberg
  unsure (1)..(2454): unsure at all n locations
tgtaggtcgactctagtaggatcccccgtacgtgtgggtgttaaagcatcatcatattgcatcatatcatcgcatcatttagcatagtatcacatcatacatcatattgcatcaatagaaagattgaatacgaagcaaatctttggaaatacttcgttgaatgaaaatgtgctaaggaacgaagcaagcttcgggtgacaattctatcaaatctactgttgggggccttcgtcttccgaaggtcctcaaaaacatgatttaacaatgtttcccgagtgtaatatatgaacaggtgatttcggactcagatcagaaccacgcagtgtgaaaagcacgaacaatacgaaggttgacgcagcgtcgaagcaacgcgcaagggagcttcgacataacggcaaaaaagggaaccgacttacaagggacaaagctatttagacctcggtggactaccttaaagtcattagcaaatgtgaagggcatggatgtaattttacatgggatgcgacccgtgcctataaatagatgaacagtactcccgtactgttcatgcgctgacttggcatttgcttttgcatcacacttgtacttttatcttctttcgagccgaagtacatttgtaatttgaaatcatttctatttttccatagtaataaagtagaaatgagttaataataatatataattgtctatgtcatttcttatactttatatgattctttcgtcattattttgtgttgtgttgatgaaggtttgtccttcataaccttcgtccgaaaatcattatatcccgagggaataatgcttcgaaggacgaaggactctaacgttctttgtgttgccttgttcttaactcatagcatttgagaacaagtcctcaacagatatagaacaaggccaattacagtgcaaaaaaactcatgatcgtgagtatatggagttccttagtgcaatacaggaaagcaggattctgttagaaatatgccctagagataataatagagatgagcatatttctttgtatccatgatatatatattgcttaattgaatatccatggaaggcaccttgtattgattagcaattatgtgaattgtttgtgagattctttacttatatggttattctaaatgatgtccctagtcagagtcgatgactagcacatgtattagttgatgactacatttcacaagtcatgaacatggagatgttaaactaataatgtgggcgcatgtatgacatgagctggaccgacccaacgtgagatattgtaatatagttctctttttgcaacatgaatactgtatccttagacctgagattgttgcatgttctcaagatgtgaattgacttacttagggactatcaaacactatcccgtaactgggtagttataaaggtagttttgggtttgtcaggaagcatgctatgaggcatggtcagtcaagatggaatttgtccctctctttgtgagagagatatctctgggcccctcgagtgattggatcaagaaatgcatggccgtgctagggttaagagttaaccattgaaaggattccaattcacagtatcgagaaagagaggtcagcttagagccagaccaaatatcgtgagacaaagggaacaacatgtacttaatgtcacaatggttcgtctgatatgatctttacgtacacataggagttgacatgtcttgctagaggccgctgtcaattattgggccaagtaagagtactcgggctatgtctatttgtacgtgaacctatagggtcacacacttaaggggaaggaagcctaattcggattagatccgaaattagactgggctttagggttaatgatgggcctcggcgtcagaagcccaccataacgcctatataatgaggggcgagggcgcggttaaggataacctaattcgccaccagcgaactaacagccgccgcccacctctcgccctcgccaagccgccgtcgcgaacctagcatttcggtacgcggcgcttcctccctgtacgtgtggatacctcggaggtgctgcatctggagcacttggacggaccgtgcgaggacgtgaaggacgccggcgactgcacggcactgctcgacgcgttcgtctacatcaagacgtcttccgctgctctgcgcgtctagtggtaattccatnnnnnnnnnnnnnnnnnnntcttggtattatggggttgaaaattttgttttgcgctagtgtagcctccccgtaatcctacagtggtatcagaaccaagttctgcgtagttttaggtctggatctaggttcatgagatggatctacttgatgcacggtttgattagatcaattggtaagatagggttgaagtagattacatcggatatgactggagagatcagttcgtccttctctgttgtatgcgcgacttgcccctaccggctggaatcaccatcggggctaacagtgtacaca

SEQ ID NO: 4170 - DNA, 955 bp, Arabidopsis thaliana landsberg
  unsure (1)..(955): unsure at all n locations
tatgtgttgctaatgtgtactgtgattacctttttgaattcagggggcacatgcaggtgcgaggcggatgggggtgacgatcaatggaattggtgaaagagctggaaacgcttcactggaagaggtcagagttttattaatttgtcaagacatgtgaacctttcctgcattgaaatcttttttggggcttgatcttactgagcaagacaattctgtataaccgaggaggccttttcattatcagtagcagtgagatatcaggaataatattctctagtaagattttaaaaggccaaatgtctaagtaatgagtcttagtatagccttggcccttggctataattacctgaagaagaacatgtgggtgagattgtctcagggtaggcgttttagactttcagtttattttctgcttacgctgcaatgggatatataatccttacatgatgattttcgtgtaagtgtaggttgtgatggccataaaatgccgtggagatcatgtattaggaggtctatttaccggaattgatactcggcacattgttatgacaagcaagatggtacctcttttgaactttattctttacattgtgaaaacaaatattactttttcttaagaggaaaaagtttgtagatttccacataagctgtctcataactagtggcttgttttctcaggtagaggagtacactgggatgcagacacaacctcataaggctattgtaggagcgnnnnnnnnnnnnnnnnnnnnnnnnnnncaccaggttaatatttgcatgttcactctttcagtctagtgcctaacggtcctcttttcttcatgattattgttcttgttgaacttaaatgactcttttacatttttaggatggaatgctgaaacacaagggtacatatgaaattatatgtcccgaagaaattggacttgaacgatcaaatgatgctggcattgtc

SEQ ID NO: 4171 - DNA, 3891 bp, Arabidopsis thaliana landsberg
aatctcctagacagtggaatctgagatttgatgagtttataaagagtattgatttctctaggagcgcttatgacagctgtgtatacttgaagcatcaaagtgatcagtcatatgtgtatctactcctatacgtatatgacatgttgatagctgctaaagaaaagccaagtatcatggagttaaaacagttactgggtaaagagtttgagatgaaggatttgggtgaagctcagaaaattttaggcatggagattgctaaagatagagctgcaggtgtgttgactctgtcacaggaaggttatgtgaagaaagttttgagatctagtcagatggatcaggctaaacctgtgtcaacaccattaggaatccatttcaagctccgagcagctactgaaaaagagtatcaagaacaatttgacagaatgaagattgtaccttactcaaacactgttggaagcatcatgtattcaatgataggcacgaggccagatcttgcttatccagttggagtgatcagtcactacatgagtagaccattaaaggatcattggcaagcggctaagtgggtcttgaggtacatgaaggggacagagaaaaagaagctttgcttcagaaagaataaagacttcttattaagaggttactgtgactctgactatggtggtgattatgataaccggaggtcaatcacaggttatgttttcactattggtgtaaacaccattagctggaaatcacggcaacagaaggtggtagctatatctactacagaggcagaatatatggcattaactgatgctgttaaagaggctttgtggctgagaggtttttctgaagaacttggttttgcacaggaaagtgtagaggtgaattgtgattcagagagtgctattgctttggcaaagaactctgtacatcacgaaagaacaaagcatattgatatcaggttacatttcattcgggatatcataaatgcaggtctggttaaagtggtgaagattgcaagtgaatgcaatcctgcagatattttttcaaaggtattgcccgtggagaagtttgaaggagcattgcatatgctccgagttactgagaactgagaggtgaatctcaggtaccggaggggagatccaagaactagaacaagttgagacaaggaagacaatcagagtcaaggtggagaattgtaagaagtgactcagattttagtcttcgggtctaagtgtgggagaaactcagtgaagaagcgagctgcgagctgactaaagtcataacatgtgcggcgagctgactaaagtcataatatgtgaggcgagctgactaaagtcataacacgtgaagcgagctgactaaagtcataacacgtgaagcgagctgactaaagtcataacatgtgaggcgagctgactaaggtcataacaagcttgagggcgtttttggtcttttcgcatgagctctgtaactatatcttcttcttcgtctctgtaattctgtgagatcggagatagagaaagagagagagaattgtaatcaagttctagagagaactagagagagaaagcttgtaaagatacattgtaaagaaaaggttctattggatttccggagagattctccggcgagacgtagcgattacggttgaggaacgtgaactcgttaaatcgtgtgtgtctttgtttctttaagttctcttcaaggtttcgattcattctcaaagtttaagtcgtttgattcgagagttttgtgagctaagtgttgctcaaatccttacaccaaagatttgtgggacaacttgaagaagagattttctgtgacgaatggtccgcgtattcagcaactgaaggcggagttggcgtgttgcaagcaacgtggtctcgccattgaggcgtactactgaaaactgaaccagatttgggacaacatggctcattatcgtcccgtgcgtgtctgcaaatgtggaaagtgtgactgcgatcttggatttctccaagaacaggaccgtgaaagtgacaaagttcatgagtttctgtctggtcttgactacagttttcgaactgttcgatcttctctggtttcccgtgtgcctatccagtctctggaggaggtttacaatgttgttcgtcaagaggaagatctcaagacgacagtacgtctcaatgacgatgtcatcgaggttgcagctcatgcggtcaatgtcaagcctcgattcaacactgctcgtccggatacctccgacactgccgctgtatgtaagcactgtcaccgttctggtcatgcttctaatagttgttttgctgtgattggctatcccgaatggtggggaaagcgaccaagaaccagaggcgtctctggacgtggacgtggagttacttccggtgttacctctgctggacgtgggcgtgattatgcaaatgcagttcaagctcctctcataccgatgcagcaccaggcgaattatactattactgatgcagatcgcagtgtgatgtttggcgtgtgaccaaaggcatcagaatcaattgagtttaatgtacattatgatgattgatatgagatcatatgagataatatctcattaacatacactttgtaacgaatttgagttcttgaaggtattaattggagctgaagaaacttgaaactgagcttagcaaacttgagtaacatctcgttatggtcttttactttttcatagaatgggatgaattccactgggactaacatgtccatgttccaatgctgagctagaccaagagcacgtcgtgtatacactgtgagatgaggcgggcacgtgacacttgcagcttttctcgcaaaaagaaatccaagaaattcaggtaggattccacgtaattcacgaagaattttatgattcttgaattacgtgaaatctgtcctgaaattcatgaattttgtgaactctttccaaattactaagaattctttttcaatttttatgaaaaattttcagatttataaaaaatctttcctgaaattttaaaattttatggaatcatttcctgaaatttagagaatcttttctgaaattcaagaaatctttcctaatttataaagaaatctttcaagaaatctttcctgaatttcctggaatcattctcgaattacttgaccactcttttaaaatattaataacttaagcttttttttcgctaaaagtagatattcacactgccgatgagctcccgagcgggacggaaaatcaatatgtctaacggactaatcgatgttagtttatgagttatacgaagaattagtgcctgccgcttgttgatgacatgataaaaaaaaaaaacttgtatcacgcgaaaataattattttgaatttctaaaaagtaacacatagtacagctctaggcgatctatccgattttttgtatcttaccagattatcagtcttcaataaatttggcttattttttagtatgccaatctgattaatttcatattaccatcaaatggaaatcttactcaattttctatattgtaatcaacggtggagactggaaagatttttgcaatgttctgatgctatggcataatgtttcagttttccgctttgaagaacgagatacacgaccaccatcggttatatcgatatcctgttacataaaaaacaacatattatataggaaatatatagtgagatactgacacgaaatttacaatatttcacataaactgtgtaatagttaacatcttttagaaaatcaataaaaacgacaaatccgttggtacttggatgtattttggtactcttttcattttattataaatatccgtagaggtttaatattccctttcttgtatttagttgatgttttcggaaatgcttcagattaaaaaacatttatttttattatttttaactaaaca

SEQ ID NO: 4172 - DNA, 2190 bp, Arabidopsis thaliana landsberg
gcattcattaaaaagtctatgtatggtgttggggttcacgctgcaaactgccctatttcaggtttttattcgccctctatgccagttcctctctcatttagcctgccttatgctatttttgtttcactttatagttcatttgttttatggttttatctaagcacatgtgaaagatattgtttacagtgctagatactgtgatattgacgataatggtgtgcggcacatggttttgtgccgcgtaataatggggaatatggagcctcttcgtggtgataacacgcagtactttactggtggagaagagtatgataatggggttgatgatgttgagagtccaaagcattaccttatctggaacatgaatatgaacactcacatttacccagaatttgtagttagcttcaagctgtctatccccaatgctgaaggtgattaccatttgttatttctcctgtaatttccataaaaatcaactgatgacgcattgaatgggagacagcatatagatcttactgaagatcagctatttggatcctgaaatcttcctctataagttagaaaaggatccacatcaccttgtgacctctgggggtggtaaacatacttcatcatcccaagggtccagtgagatatccatggctaatatatatgggtatttcgatgatcacatttgttttctgtagtattcgaaacgggatgacatgttttgtttgtgcagggaatattcttcctactactcagagtaggcacgagagttcgggactcaccttggaaggacccaaaggttctccctcaaatgtaagttgaattgtacctgatcagattctcattttcaagcagtcattgttaatatttgatatggacacaaacgagtaatgttgcttgtttgtatgaagcaggagccaggaagggtatcaaatggaggttcagggagcgaaaagaatagctccagcagtagaaggcccagatctcctataatgcctttccctctgctgttcaaagcaatctcgagcaaaattgctcgtaaagacatggatttgataattgctggttaccaggaactcagggtaaataatataaaccatgtcttttaccaatagtcaaggttatcatattgtattaacataatcggtgtgctcttgcaggagaagaaggtgtcgagaaaggaattttataagacgctgagtatgattgtaggagatgatgatctgctgatatctacaataacaggccttcaaaggagtttgggttagattaatgtgtcgacttctctttgctgtcgtgaaaccttaatagtttggattacgacaaacgtgacttgatctttagaaacttagtagtagtactgttatatttactcttttggtgaaactagtctccattatcctgtttttctttacttggaatcaaagagtcttttattgatcaacagccttggttctttgtgaggtttaattcatcagctggaagttattcaacagccttagttttaaaaagcgcgctaatggcgtgccatggcgcatagcgcaccgatgctctaagaatagggcaacaagacgtggaggcgaggcgacatctataatgcgcacgccatacgtgagccttggccgatgcacaaggtggcaaagcgatcgcctcttgtgttcaggcgaaaactcttcgaaaccaacaacagaattctgtgattttagggtttgcacgaagaaatgactaggaggaataggataaaccattttctaaacctagctggttaatacatgattcaatttagctggtcaatacctaatccacgactagaaagtttaaccatgagttataattagcttatcaaaccaaatcaatcctaggtttatcttaaactaaaacggatttgacccttacctcttaacccacgacattttaaccagttagaagatgtaaaatccctaatttttctaaatagaacaccatagacgatataagcttgaaggctaaaaccatatgcagagaatctgttaatagaacaccacagatctaaaaagcgcgcgctttggtgagccatggcacatagcgcactaaaggactctctgagccatggtggcgcttgtgccatttaaaactcagattggtagtcaattctcaaattatccaatatacaacttctttaacaattaaataccattgaccatgacaacaataacagaaaat

SEQ ID NO: 4173 - DNA, 1610 bp, Arabidopsis thaliana landsberg
gaagattttgtttgttttttgtacaagttttaattttttaaaaatggagggtttacaaaagttgggggaaggatgattacaacatgtgctaatatcgaaaatgataacctaagaaatagttaaaacatttaagaagatcgatcaactaaattgacatttacatgaaattaaatgtgaacttaaagtttagtattacatgaacttgcataaaaacttattcaccaaattgattattgaacaaaaagatggcacacaacgaaactgaaaacagaatgaaaatcaatcccacttgctctttagcttatcaacatgcctaaactcatatgtgaacaccaaactcccatccattctcgtcaattcaaagctctctatcaatacataacatcgataactcttccaatgcgatgaaccgccttcaaatctctctgatctcttaatgttagatctttcgcctgcttcgtttaaccatccaaacctttcctcttcccatttcatcctctctacgaccacagatccaagacctatcttcttgtcgtctttctcatcccttaagacactaaaccaaacaactccatcacctgaatcctctctcaaattagtttcttgtccctcaagcttcaccgattctgtttctacatcaacatcaactacaacctcaaaatgttcattgccaatgttttcgcagaagaaaacttcttcccatctttgttgaagtgtcacgctgtaaaacgtcgatttgttcatctgatcttttacatctccttccatcacaaatatgaaaggaacataccatttccctatctcaatactcttacctaaactagtaagttctgagtctaagcgaagctttgtgttaatcccttttgcatcatctcttagaccaaagtcgtgcgaagtcgagtagctgacccaccaatctttcctcttaaggtaatttggtggtacaccatcagaagcaacagaagtggcagagtaatagcgagatgatgatcggcgttgatggatctcgaattgttggtatatgtcataaggatctgcttcttgtggcttagcgtcaggaatatagctaaagcaaaagcagcttgaaaccctctcctcctctgttgcacttgcagatgctttcctatattcacaaattcacatacctagatagttagtaacaattcctaaatcctaaagaaaacagtgaaaattattgagatgacaagtaaataaattacccagtatgcttcccacgcctttgtaaaacatagtaaaggtttgaagacaatggctgatcaagaacaggaatgaacacaactggagtaagatgtgttgtctggtgttctcctcctccactagtatacgctgcattcagcttcacgttttgtggaaacggcaagcccttaagtctaccctcatagcaagaaccaaagcagcaagtggcctgtgattcttcgtcttgaatcaccattatgccggagtttggaccttccggtggaagcagtttcagctccgatggctttttctggtattccgataaacgccttgtaacatacatctttagtttggttcttgtgccggtgatacttggagaaggagctttggtttaaaatttataggcttatatg

SEQ ID NO: 4174 - DNA, 1567 bp, Arabidopsis thaliana landsberg
taaaagttgtaccctggtaggtggcacggtttgctcaccggcgagacaccagagaacatcgaaattgtctttgccgacgtcatcagttggttggaaaaaagaagtgattatggaaatgataggtttgagtcagagcttaaacagcgtaatgatcgtttaaatttcaagaaatagtcgtttgacttattttttacacataaaagtgttttaatgaaattctggtgttttgcattttgatgtttaacgttgctattgtgaattgtactatatattttaagaaaacttatactatagtccaataatatttcctaaatagtccaacaaaataaagaaaaagttttcatcatctagtatgattttaaaatgagatttgatataacatagccaataagactccagaggaaactctctgattcggcttggtttggctaatgtttttagacgcaacgatttacttagatctagaaccatcagattaacaacataaaacaactttaagctttcgagaaacggaaaaccacaaagattcttagcaaagaattcatcaatgtaaagaacattgtctaaaatattttggtatagaggtgaaaactcataatcttgggaagcttgtatcgagctagggttttgtttatcgtatcagccttcagtcccctatacaaagttcctggtccatcaaagtatatgtaaggtgtgtcagaccatacatgcctccatcgtgtggacaagactgaagttctgatagctaaattggtcggaagagaggagaggatttgttggaggatcacatcaggaagcgagctgattgagtctatattttcacttgcatctcttgctagtttgacatctctgtagtgatgatgagcgtagcagtcaccggcggtggcaccgtctccgtttccgccgtcgtctgcctctgccattacgttatcaaccaccgattgtaaacctagatatttgtttgcaatgacatagctttttgagtttttgggtttatcacaaagcccagctatatatatccaaaatattttaaaaagcccattactaaacacgcacaacttttttcttgtccggaactcaaaatatgtatgtacttaacaacttaatctgtgaaaaaaaaaaaaaaaatgtactaccaacttagtcatgttgatgtgatcatcttcttcttggattgatattactagttgcagaaagtgacaatttgatctattagaaaataattgcttatactacacatttgttttctttcgtaacagattagtgggatctttaagaatgtatcgtcatgattctgattttatagaagaacaactttatttaagatgtgcttacatattctgcgaaaaaaccggcatgttgaatggttttagtctctctgaaccgacaacaagttttgtaattttcaattttatcttacagtcgtcacttgaatcttgatcgccaatttttacatacttgagaagaaaaatatttaaaaagccaaccgatttattcgtcaaagcctcaaaggctacagatttttttagccaacgagcaaatgatatgcacacgcggatatggggga

SEQ ID NO: 4175 - DNA, 1367 bp, Arabidopsis thaliana landsberg
tttgatggatctggaattgctgatatatgtcattaggatctgcttcttgtggcttagcttcaggaacatagctgaaacaaaaacagcaggggactctgtcttcctctttcgcattagccgaagcttttctacaacacaacaaatccttgtaaatcacgtcacaaaacaaagaaagttgaaattttgcataattctaagtcataacataccctgagtgtttcccgcctcgtttaatgacatagtaacggtttgaagataagggttgatcaagaacaggaatgaaaacgacaggatctatataagtaatcgtctggttaagaaatatgcggctgctgccgtaagatacaatcaggttcgcgttctgtgggaaaggtaagcctttgagtgtagcccggtagcaagatccgaagcaacaagttggccttgactcttcatcttgaattataagtacgccggagtttggactttccggcaactccgatctgtttctttggtattccgacaaacgcctcgtaacatacatttttggttataaccggcgaagatatttcagtggtttttgtgattcatatgagttctgattgggtctatatatatgtagactactaggataagacaatttgtaacccaaaaaaaaaaaagagacttttctaagatcttgacttggcttttacggaagtctttttgttatggcagtttctatgtacctcacattgttttgaaattctgtcactcaatttaagtggtccctagaattaaaaagcaagttatcagcaattgattccaagttattaagaagtaatgcttacgttgacttgcctacgtcatcaggggtggctctataattttatgggcctttgttgtacagatcttaacaatgggcctctttagaaattctaaacgctatgttatgtacgtatagcctaaaaatcagaagcgttagttggtgctggactagggctttttcttctttgtttcattatcatctccaccttcaaacaaaaaaaatatgaatgcatttgggctcacatattaaatgtaaaatctcacctataaatcccagtctagatagttttcttacaccggcctcttttgctttagacgattcatgttaaacataaaatatgatcattaaagttaaaacaaaaaatgatcattgattaaaaaaaaaaacacaagaaaaagtcaaaaactgatcatcaatctacggaaaccatttctgcaattttaacagttatttttctgcttaacaaaaaatttaagaccttgaaggtttaccatatttttgttatggtttatggtttttgttttttaaaaactcatttttacagattaaagattttttaaaagtggttccctaacaatga

SEQ ID NO: 4176 - DNA, 3286 bp, Arabidopsis thaliana landsberg
cctattaactataagcctatgaacagtaggaaatcaggacagatgcctattccaccagaagaacttaggtgtcccatatctttgcagcttatgtatgatcctgtcatcattgcttctggacagacttatgaacgggtctgtattgagaaatggtttagtgatggacataactcttgtcccaagactcagcagcaactcccacatctttccctgactcccaattactgtgttaaaggtttgattgcgagctggtgtgaacagaatggaatcacagtccctactggaccaccagaatctcttgacctcaattactggagattagccatgtctgactctgaatcccccaattcaaagtcagttgatagtgtaggattgtgcacaccgaaggatatcagagtcgttcctttggaggagagtagtactataaataagaacggcaacaaaaagaaaaaaacaatgctcctgatgaggtggattctgaaatcaatgttctagaggggtatcaggatatattggcaatcttggacaaagaggaggacttagctaaaaagtgcaaagtagtagaaaatgtcaggatattgctaaaggataatgaagaggccaggatcctcatgggagccaatgggttcgtggaagcgtttttgcagtttctagaatcagctgttcatgataacaaagcagccgcacaggaaaccggagctatggctctatttaacttagcagtcaacaataacaggttagttattatcacatccttcctgtccttagcaatgtcactttctgacatcccattcatggtgctcttcatttgcaaaccttgtcataatctcttctgtttcgttcttttggatgcactgcaggaacaaagagctgatgctgacttcaggggtcatcccactgctggagaaaatgatttcttgttcccaatcccaagggccagcaactgcgttatatctaaacctctcttgcctcgagaaagccaagcccgtgattggctcaagtcaagcagttcccgtttttgtgactcttcttcttcaggaaacggaaacccaatgcaagctggacgcccttcatgctctctacaacctctccacctactctcccaatattcccactctcctttcatcaaacataatcaaaagcctccaagtccttgcatcaacaggtaaccacttgtggatagagaagtcattagccgtattactaaatctagcctctagctgggaaggaaaagaagagatgataacaacacaaggaatgatcagtacacttgcaacggtgttagacaccggtgacacagtcgaacaagagcaagcagtttcttgcctagtgatcctatgtacgggaagcgagtcgtgtatccagatggtgctacaagaaggagtgattccgtctctggtgtcgatctcagtgaacggaagtccccgaggaagagacaagtctcagaagcttctgatgctgttcagggaacaaaggcatagagatcagccatcaccaaacaaagaagaagctcccaggaaaaccgtatcggcaccaatggctatacctgcgccagtttcagctccagagtcagaagtaaaacctttgactaaatcaatctccagaagaaagacaatgacaagaccattcagtttcctctggaagaaaagccactcgatccatcattgacactcctatgtaaagttgcgttttcttctgtcgtccttaacttcttacaagtcatccgcatagagaaaaaaaatatttgtacaggtcacattgtgatcacaccattttttgctaacgaatcctctctcgcgagaggtatccatgtagatagtctactgatgtatcaggttatatatatgaaacctcacttttcagtacaaaaacagagtcgacaattcttgaaaactctgtttgacatctgtttattttgacggtcgattcacaggtcgaccaattctagtggataaaactagtgccacgtagtatgaataaatactatataataatacttaaaatgacaaaatataataacaaagccccaccatcacctgctgtcctgcgcggcgtctccgtcgtctctgtcgccgcatctgcgtcatcattttcgctaccgcataatctctgtctccgccgtcactgccgcagcctagaatatgatttctcgtttctgaaacccttgtataaggtagaaagagagagaaatcatccaaagcaaggaccttccagcgactttcagggtttaaggtttagcttctcgactatggcgattctagggcttatcaagagggttacacgaataaccgtaaacaattcgagggtcagagtgtacccagtgaggtacttccaaagcaaggacctttcaagcacaaatctattcaatggtgaagatgctgctaagcttcctgttctgatcgtcggcgctggaccggtgggactcgttttatccatccttctcaccaaactaggtacaatatttctcataatttccctgattttcatctgaagttttgagttttgagcttacattatcaagttaagttcacgtctttgatcgaattgaattctcacatttatgttaggagtgaaatgtgctgttgttgacaaagccacaagcttctcgaaacatccacaagcacactttatcaacaaccgatcaatggaggttggattttttgtgtttcctgccgttaatattgtttttggtggttttagatttttgaactttaatgtctcagttctcgtatacttagatcttccgtgcattggatggattagctgaggagattgaaagatcacagcctcctgtagatttgtggagaaaatttctttactgtacatctctctccggctcaactctaggcacagttgatcacatgcagcctcaaggtgtgttcttccctacatttttcttgtgtaaatagttctcatagagtagaactattttatgttgaggaaaaatgcagacctttcacagaagtccttgtggtgtttatatgtagattttgagaaagttgtcagcccggcttctgttgctcacttctcccagtacaaattgacaaatttattgcttaatcggttggaagacctcagctttcatgttcgtggttccaaagagtcggatggtcttgaggctgactctgtggttgcgaggcaaattctcatgggtcatgagtgtgtggggattgatgctaacaaggacaatattactgcaactgtatcttatctcaaaggaggcaagcatatgaaaagaaacattcaatgtagtctactggttggtgctgatggggctgggagtgca

SEQ ID NO: 4177 - DNA, 1701 bp, Arabidopsis thaliana landsberg
  unsure (1)..(1701): unsure at all n locations
aattgaaccataaagtaaaaaaatttgcaaagtcttcaaacgataacttgtaaaatttgcttaccgcgttatcctcaatacatggtgcaatatataaacatatcatatctcttctaatcaataacctgatcaagattctgaattcaagatgtatgttacaaggcatctctccgaataccagagaaactcgtcggacttgacacgatcgttgccggaaggtccaaactccggcgtacttgtgattcaagacgaagagtcaaaaccgacttgttgctttggaaattgctacgatggtgaactcaaaggcttaccgttcccacagaacgcaaagctgactgtgacttacagaaccggaactggtaatgacaggcgcagttaccatgaccaggttctgttcattccggttcttgatcagccttattattcgaaccgttattatgtcattaaacgacgtgggaagcaatcagggtatggccaaaaatcttaattactttcttgactttgttttgtttttttgaggttttaatcaatttatgtcatgcatggttcgagatacttgcttttgggtttggttttcttgggatggtttcggtttgaccggattggccaccccttttgacctgacttgcacaaatggtattcattaaaaaaaaactaattttggattgcagaggagcttcggcgagtgcaaaggaagaagacagagtcccctgctgcttttgcttcagctatgttcctgaagttaagccacaagaagcagatccttatgatatatatcaacagttcgaggtccatcaacgtaaaccatcatcaggctattacactgccacttcagttgctcctaatgggataccaccagggttccttaagagaaagtactggaccgttgagtattcgaattcccaagactttggtttgacagatgatgcaaaagggatcaacactacgcttcgttccaagcttcccaacgatatgaatacaagtgttgtggtagggaaatggtatgttcctttcatatttgtgaaagaaagagatgcaaaagatcagattaagagctcaccttattacagcatgacgcttaaacaaagatgggaagaggtttactcatgcgtaaacgttaactacaaccaaaaaggaggagaggttgtagttgatgttgacgtagaaacacaagtggtaaagcttgagggacaagaaactatttctagagagacaagtggtggtggatttgtttggtttagtgttttaggggatgagagacaagacaagaagataggtcttgggtctgttgtcgtggagaggatgaaatgggaagaggaaaggttcggatggttaaacaacggtgaaagatctaacattaagagatcagagagatttgaaggcgggtcatcgcattggaagagttatcgatgtttggtattgatagagagcttcgaattgaagagaatggatgggagtttggtgttgacatatgagtttacgcatgttgataagttaaagagcaagtgggattgagttttttattcatctttgttcagtttctatgtgtgtcatcttttggttcaataattaatttaatgaataagttttatgcaatttcatgtagtaattaaaaaaaanaaagttcgcatttaaattcacgtacatttcaattatgaatcatttatttgatcattcttcttaaatgttgtttttttaata

SEQ ID NO: 4178 - DNA, 1176 bp, Arabidopsis thaliana landsberg
agaagtttgaatgtcttcaattttatcggagctcaagatagattggaattttcagttatattggtcgcatgccaaacagatgaaaggctgacaatatggtagtcgctgaaaaatctatcattattcattaatttaaataaactcagtataaagtggtacgttcatttcatatacaatttaaggaaatttaattatttttcaataacaattaggttttattatatgttatccatattaggaaaaggggatgagaaatgaatagtacatttaaccaattaacttttggcatacagttttggcgtaattttagatttcacaatttatggaaagatgtaaatatagcttccttcttattttcttgttagttttaaagcttgtcaataaggttttcgccatactgtctgattacacaacgattttcaactaattgttttgcaaacatttcaatggtttttgcaaacgaaaaaaactccaaatccttatcagcttattatacacaaatgaaactgaataacaacgatttcaacaacacacaagaaagcttaaaacatacaagaaatctctcatgattcccacttggttctcaacttatcaacatgcttaaactcaaatgtcaacactaaacttttatcctttctcctcaactcaaagctctccaccaacacataacatccataactcttccaattcgaaccgcctccattaaatctctcagatttcttaaccactgctctttgcggttcaatcttccacccgaatctctcctcttcccatttcatcctctccatgaccacagatctcaaacctatcctcttttctgcaaccgcaaaccaaaaaaaaccattttcatccacacttttggtatttttcccaatttcttgtccctcaagcttcacaacttctggttccacttcaacatcaactacaacctcgcggatatcgttgtaagcgttttcacacgagtaaaccttctcccatctctgtagaagaatcatgctgtaataagctgagctcttaagctgatcctttggatttccttccttcacaaatatgaaagggacataccattttcctaccacaacgcttgtattaaaatcactaggaagctcagaacgaatctcagtgtaaataccttttgcatcatcttttagaccaaagtcttctgatgtcgagtac

SEQ ID NO: 4179 - DNA, 836 bp, Arabidopsis thaliana landsberg
gaagttagttactcttctgttaactccttagagctctttcaaacttgttcctttactctgtttctgtttcttatctgagctttgttttcaatatagaggttgtctatcttgacccggtcgctttcatccccgttcttcatcagccactttcctccaatctttactacgttataagacaaagcgggaaacacactgggtgattttctatcttgatgtgttcagaatcttaaatctcttgtgtgttttgtttatgttgtatacaggatttactagaactctcaatgtttactccttttaaatttccagtgaagcatgtgttagtgcaacagaaggggacaaaacttcttgttgcatttgctttagttttatccctgatgctgatccaaggcctctggatccttttgacatataccaacaatttgagatccatcaaagaggatcatcaaaccagaagttttttgctacatctgttgcttcagaagggataccacctcagttcctgacgagaaaaggttgggtggctgcttccttgcctttcgaagaatatggtttgattgatgatgcaaagggtgtagttgatgcaaagcttccctatgagcttcctgatttagataagagcgttgtagttgggaaatggtatgttccgttcttgtttgttaaggaaggtggtgatgcaaacgatcagatgaataaatcaatgtattatagtatgacgcttcagaaaagatttgaagaggttttcttctgtgaaaacattggcaacaataaacattttgaggttgtagttgatggggaggtagaaacagaagtggttaagcttgaaggagacaagattg

SEQ ID NO: 4180 - DNA, 482 bp, Arabidopsis thaliana landsberg
ctggtttcattcaacctcgaatcttcacattatacaaatacacttaccagatagagaaaatattgttttttaaacattacattagaaagtatgaaaagattactagtccaatagtaaggctgaagatgagatgattcaacactccaatcatgacgaaggaggaggaagacgtagcagtcttgccatttcctctcagacatatgtaaaaaatgacaacaagttaacttccttgcacgttcttaattatgatcctttgttctatataaacgatgacagtttgagcaacagagaaaacaaaggaaatatgtatgtaacaaagcgtttgtctgaatatcagaaaaacccatcggagctaacatcgcttccgacagaaggtccaaactccggagtattggtgattcaagacgaagaatcacggactccatgctgctttggaaaatgctttgattggaaactccatggtttgccgtttcctcagaaca

SEQ ID NO: 4181 - DNA, 689 bp, Arabidopsis thaliana landsberg
aacttccaataaacttttttgatctccttaaagatcctagcctaccctaatttcacctctcatcaagtgtctctaaaataagataaacaaagtcttcgcctctctgtatcatgacaccactctgcatcatgaagtattcaacgctccaacaactctgaaagatgacatttttattttcattttaaacagagtttacatcaatgtaaaagcagaagactaaataaaagagagaagctcacaagtcaatattggatagtcctcaacttatcagcatgtctaaactcatatgtcaacaccaaactctcatccattcttttcaattcaaatctctctaccaatacataacatttataactcttccaatgcgatgaaccgccttcgaaccgatccaatctcttaaccgtcactcggtttccgtctaccttcttccacccgaaactctcctcttcactttccatcctctccacaaccactgaccttaaacctatcttcttgtctttaacttggaaccaaacaatccctttagcatccacattcgttgtctctatactaaccttctgtccttcaacgttaatcacttggagttcaagatcaacatcaacaacgacctcaacacaatcttcattgtgaacattctcatagaagaaaaacttcttcccatctttgatgaagcgtcatgttgtaataca

SEQ ID NO: 4182 - DNA, 551 bp, Arabidopsis thaliana landsberg
ctgcgaattcctcatggttcactcaagtacttgatttcaatgtcaagaatagagtgaaatgggcacggagaaagtgcatggtctacaactattgcactgataagaagagatttcctcaaggtgctcctccagagtgcagttaaataactgattgcttgattcacgaattaatcatgtggcattgtctttgtaaccgaaatgatgtttatctatattttggcactagctgagtattttgcgttaaataaattacttctctattagtaattgtttttttttgttctattatgttgattcttttatattatttgtacgtgtgatttgcattagttaactagttacttgtttcagtaacttttactattcttaaactctcttccagttgtaacattaaaatttgaaatttacaaatgagttatagtatgagttaattatagatcaatattatagttctttaaattgtattcttagaaattcgggctgtgaaaatattttatttaaaattttaaatgaaataaatttcactaagataccatcaatgtgagtgatat

SEQ ID NO: 4183 - DNA, 466 bp, Arabidopsis thaliana landsberg
  unsure (1)..(466): unsure at all n locations
ctctatcttctaaccgttattacacatatgaacgattcgggttttattcaaggtagtatgactaacaatgcaagtgccaaatatgttttgaaagtcttaatttataaaaaaattcattttggtttgcagagaatcatnnnnnnnnnnnnnnnnnnnnnnnnagagagttacatgctgcttctgcattagatttaaccatgttcatatgtataagaagccacaaccagatccttatgacattcaccaacaagtagtgatcacaacaacctcttcgccttcccgttgttactactttgcgaagcctgttgctcctaatgctctactacctgcatttcttatgagacaaggctggacaatagaaaactcgacttctacactacaagactttggtctcatagatgacgcaaaaggtcttaacttagagcttcgttctaagcttcccggtcttgatataagcgttgtgtag

SEQ ID NO: 4184 - DNA, 525 bp, Arabidopsis thaliana landsberg
acatcgaatttcttcatttgatctttagcatctccttcctttacaaacaaaaacggaacataccattttccaactactacactcttaccgaaatcgggaagctcatagcgcagctttgcatcaactacaccctttgcatcatcaatcaaaccatagtcttgggaagcagagaaaggaacggtccagccttttctcctcaggaaccgaggtggtattccatctgaagcaacagatgtagcgaaaaacttgcgagttgatgagcctctttgatgtatctcaaattgttggtatatgtcaaaaggatcaagaagccttggcgtagcattagagacataagtaaaacaaaggcaacaagaaactttgtcctcttcttttgcactaacacatgcttctctgcaataccaatcaaagttttaaaagatgtgaatttaggccgctaaactattaatcttggcttaattaaaactaaaacgataaactttgatatctacataacatgagaaagattcaatagaatcatacccc

SEQ ID NO: 4185 - DNA, 2539 bp, Arabidopsis thaliana landsberg
aaatacagagaaatcccaaatccaaatatataaatggcctcgcagtaaaaaaaaaaaaggatacttacagaaaatgaaactttttcttcttattgtttcatgtcgattttgtatcttttaagactcctcctttctcaagctctccaacgaggtccctaagagagggaaccttcatggctagagttctgtagagtctagagtatcgagcccgtgtgccatcagctgttctagctaaggccagtgaacttagagcttcgggcaactgaccaaacacttgtttcatttcctctaagctcatgttttctaaaaccgaaggtcttggcacaactctcactatttcgcctcctttaggttcttgaatacgggcatccgctttgatcacgagctctgagttggagttagctccgcattttatgatgaatggagctgaagagcctcctgtgttgaattgcaaaacattccattgagacacatcggtttcagtcgaagatattgaatctattgaaggtctcttttcgtcttgaagattgtcctcttgttctggaattgtctgcagtccaataaaaaaccagcacgtaacaaggtatcatcaaacttctcaacatttttggatcgatcttttgctggacttttattcatcacttacctcgaccaactggtgagccgtatcaatttctctctgtgcacatggatgatcaacatcaagcagagaaggcattcgttcgttaagttcatcaagagactcaagcaatgcctttttcttgcttttactcaaaacgtggacagaggcttgtcttgttatttccttcaaaaagcaaaccatttttattttttctcgtggtttatcataactaagatcaagaaagactcgtaatggtttcatatgataagagtaataaataccttgacttgcttcagtatggcatccagagaaatgagggaggctaatctcgagtcttcggctgctgtagatggattttgaacaggggaactgccttcttccaaggtaaacaaagctgcatcacttctcatttgttgcaaaatctgatatagtagaaaatggaatttaggttcgagaaaaactctgaagagataacaagagtgggattaacgatatgacatcatacggttctttttcagggtttacctttcttcttttgtggtcaacagactcgagagctgatcgaagcttcgcgacttgaccagcatcttctgcctcttccgaagccaaagtaccggcaatatcctaagcaagcattcccatatcagatctcacatggcaaacaagttcttcagcgactaagacctagatctcaacataatcccttaacagatttcttatgtaaaatcagttgctgctgaaatcattctgaaatttccacccaaaaaaaaagaaaaaaaacacacacatctagttcaccttggacatggtatatttacctttagatgctgcatctgagaagtgtagactcgttttgcatactcagacaaaagctgtcctaaagcgtctgtgtgaggtggcaccgcagctcctactccagccatccagccatccataattgctgtggaaagaagctctaattggccagtggttactcctgaaacatcatctgctgtaacagagagaaactcaaaactttctgcaagccatgacctaatctgtctttgcagttcaccagccggagtgtgaacaaataaagcagctaagggtttgtttccaatggcaaaacttttggcttcatcttgtatctccctcagctttcctccagtcacttgctgcctcccagtatcctaagaaaaattcagaaacaagagaagcacgtttgtttgtatcttggattctcagttattaggttaaagaaaagcatctctgggagtcatagctatattacctggtcatgtccacggattcttgaaactacagataccaacttacttttcttttctggctttaaattaactttaaagccataaatctgctcatcataatatcgaactggtgatctacctgggctgctactcccgctggagcttctagttcgaccagtatatggcttctccaaaaagcgttcaacaggagaaacctaaaagaagtgggtgacgtgagattgatcttgccgggagaagaaacttgtgacacataccagcaggaaaagctaaaaggaaaattagctaactaaatctggttatgctcaccttgatcgactgaagctcaggtgatcgtgcaagtaaggaccttatgtacaatatcctgactcgagaaacaagcattggatccattactctccttggttccattttccggataaatgaaaagacagaatctctgatctcagcaaggatttcatgctctctggaagcaccagcctttatgacagctgctaagacctgcaagtcaacaataacaattgttaacatataaacatattaatatttgaacacctatccaatcagcgataaatgtattttcatctccaaatactgttgaataaattcagctatttacatccctgaaaaatctaaatgggtactcaatatc

SEQ ID NO: 4186 - DNA, 2358 bp, Arabidopsis thaliana landsberg
tgaatattgtgtctacattatcgttttcatttacaggcatgtttctatgttgaaggaggtcgttaatcataggactgtctattttcacagtgatttgttattccctatggctctccgttttatcagctttgttgattgttgttttgccaggaaggttcgaatcacgatcgtggtttatatgctcgatgttttgaggaactcttcgacctagtcaattcggattcaacttcgacatcacgattcagtttctctctttcagtgtttgagatctataatgaacaggtgcttccaatcgagtttacgtactaatacttttgggtttcattttctttgccaagatagttctgcagtggaatttgacacttctaatttgacaaccttcattgtcagatcagggatctactttcggaaactcagagcaacttgcccaatatcaacatggatttacatgaatcggttatagaactcggacaggaaaaagttgataatccattggagttcttaggagtcttaaaatctgcatttctgaaccggggcaactataaatcaaaatttaatgtgacacatctgtatgttttatattgtgcttgaatacctccttcggttacatgcatataattatctgctaaggaccaagattctttagcacttctttacggatgttttctgccttggtaggattgtcacaatacacatatactatagcaacacgattactggagaaaacatatatagcaagctctctctggttgacttggctggaagtgaaggtttaatcatggaaaatgatagtggagaccacgtcactgatctgctgcatgtcatgaattcgatttcagcgtatgttaaattcttatatctctgtatttatccatgaatttgttcttgttaactttgtttatgcatatatttctggttctataggttgggagatgttttatcctcgttgacatccggaaaggattcaattccttatgataattcaattcttacaagagtacttgcagattccctaggtaaaatttgatatctcagtacatgcatctttcctcttttgcgtcacccttaatattatcatcttttgtttttgtttttgtttttgttttgccaccatttcttaaagctctttgtaagtgagatacaatattctgtaatgtgtaggaggaagttccaaaacattgatgatcgttaacatctgtccaagtgtgcaaaacttgtctgagacaatctcatgtctcaattatgctgctagagctcggaatactgtaccaagccttggcaatcgagatacaatcaagaaatggagagatgtggtaagtggaagtgaaagagatttttccttctcggatattcattttgttacaaaatttgctgcataggtaaccttttgtcctgcaggcaagtgatgctcggaaggagctgttggagaaggagagagaaaatcagaatctgaaacaagaggttgtgggcttaaaaaaagctcttaaagatgcaaatgaccagtgtgtattactctacagtgaagtgcagagagcgtggaaagtttcatttacattgcaatcagatttaaaggtcataaagcttcaccagggttcttgtttagcttgtcaacaattctttataacttttttgttgttgctcattatccgttttgtacttcatgcagtcagagaatattatgcttgtagacaaacatagactagagaaggagcagaattctcagttaaggaatcaaatagctcaatttttacagttggatcaggaacagaagctgcaaatgcaacaacaagattccgccattcaaaatctccaggtttgtgccccatgagtgttagtatctacgctttaaagttttagatctatgttaaggcaactgatttttgaaattgttgacttctctgtacatgatagacatataattaccctgttgttcaattcaaattaatgcaggctaaaattacagacttggaatcacaagtaagtgaagccgttagatctgacacaacaagaacaggagatgccttgcaatctcaggacatattttctccaataccaaaagcggttgagggtacaactgattcttcttctgttaccaagaaacttgaggaagaattgaaaaaacgtgatgcactgattgaggttctcctccctcttactctgattagagttcgtgccctctggctgaaccatggatatttgcactagtacatttatctgaagagaattatgttttccgcagaggttgcatgaagaaaacgaaaagttgtttgacagattaacagaaaggtcaatggctgtttcgacccaggtcattattttctcttgtatagctatgctatattaagcatttcaatatca

SEQ ID NO: 4187 - DNA, 3053 bp, Arabidopsis thaliana landsberg
taaaaagtttgcttgatactttatttgggttctctttgtaaaagttttcacaactgctccatgcagcggaaaagaagttactgattcagacataatgtagctcgaccttacaatatataacaatgggaataaatggcactacattgaactgttcataacattttaagtattttctaacaaaaactcaggaggctgaccaaaaatgagttaatgtagtgaagagagcttttctaacaatctgtcaaagtcgtatgtactcgcatctgtttccattattcttttgccaatcccatctgagttcttacattgcagcttttccagctcctttgggcattttctttgatgcagctgaaagatcggttttgtctttagagactgaaagagtcgattctacaaaggacagtaataactaaaaagtataactggatttgagaaaaaaggttcataccgtcttcaacgtccttgagctggtagtagtgaggagctaactcaatcaaccactctggtttcaactctgttacctgcatttttgggtatgggagttttagtagcatacagacaaaccgatgaatgaaaccaataagttaaaccaaaagtaattaagaacagaaatacaattatggctaaaccttgcagtatcaaacatattaattacctgtcgcatgtattccttggacgtaagtactagttcgtgatatacaacccatctcggcaatacctacaacacgcattgagaaaaacttatcagtattcaaagttttgagattctgtcagtaatcagatatttgtggtttatgtagagtgagaattcattaacctgagataagcccgaattgggatgtatgtgcactgtctggggatgtttcactgttcggtacgatccattcttctgtagctttgcagtgtgcggaaaaaaccctgagtatataagtaagaagttcattagcagaggcataattgtaaagaattatacatttcaaatcaacaaaaaggagaatgagattggcaattaccggctacgatggattttctaactgaatccaattcattcaggtttgagctgatatctatttccaccctttcgagaagtccctccaattgatcacggatatctctggctcttttcatgctccggacctgaacacatgtttaacccaaaacaaaggtcaattggatccacatgtgatctgataaacataaagaaacaacttggtacctgaatgtagttctcgtagcaccactgagtagagaagtttgtttccttccatgaactgtaaacctgaagagaaaaacaaagacgataaacatacagagaataaaagtataaactagtggaagaatgcagaaaaggaggaatacagaaggttcaaacctttagcaaagcaatatggtcaccgacattcccggtgtggaaattcattcttgcgttgtccgcatgaacttgtttgtccttgggacggtagaagatagagccaccaattgacaacatagcagcgattgatattatctcatcggagcacttatacttgtcagaaacaacaatcattttcgacagcattggatcaagggggaactctgccatccttctaccagctttagtcaattccccgagcttatttagagcacccagagcaaagagcagttctaaagactttacaagtgcttcagcaggtggagggtccatgaaatcgaagtttatgagatcatgaattccaagactcttcaaagcaagcaccacactagcaagattcgtcctctgtacttctggcaccgtgttttcctccaagtcattgttgtaattaaacgcagtgtacagacgataacacttccctggacttgttcttccagcacgaccagctcgttgagttgcagaagccttagagataggagtaataagcaaagattccatccctgtcctcgggttatatgacttcatcttgctaaagcctggatcaacaacatactttataccatcaattgtcaatgatgtttcggcgatatttgttgctaggacaactttacgtgccccttctggagttggctcaaatatttttgcttggagttcacttggaagatttgcgtaaattgggcatatgattaattcacggatctttgtacccaaacctcttatcctgtgcttcaagatctcttctgcagtttcaatttcctcttgaccagtgaagaagaccaatatatctccaagtggctccctcacatggatcgtaaggatagtaactatggctgcgtccatgtaatcagcttcaggtgcacttgtatagttgatttcaactggataccttcttccaggaaaactaaaaatcggggctgtatcaaaataatcagaaaatttttctgcatccattgttgcactagatatcaacaacttcaaatcaggtcgaaaccgcgctatatcctgtcaaatataagaagagtcaatcagaatgtatccaaggatttaaccctggttacacaagtaagaagagacattgtacaagaaaatctgcttgccttgactaatccaaacagtatatcggttgacaaggtcctttcatgtgcctcatccacaataacgacactgaaatgttttgcaatcagtaagcaaaaacgtttagctgtccaatagtgataataaaaaaatgtgccagaatattcattacctgtagctggccaggtctggctcaccaagcagctcgcgcaaaagcattccatcagtcatatacttcagaactgttttgtctgaagtacaatcctcaaatcgaatggaatagccaacctgtgacaagtaccaaccaaagttcagattctgagagtgaaccgacaatttaaaacaatcagctaccagcagaaaaagacgaaaaacaagcatacctcatgtccgagtttgacacccatctcttgagccacacgggcagcaacactcatagctgcaactcttcggggctgcgtacaaccaacctgaaatataatagaaaagcattacggtactttatttgataaaggagctactctactagccagtctatacttttgaactcattcaaccacaaaggtca

SEQ ID NO: 4188 - DNA, 477 bp, Arabidopsis thaliana landsberg
tgtttttctcttgctgagtactctacatgcttactctaggtgttcagttcttgtgagtggagatattacaggaactgtccagttttgggatagtgagcatggaacccttttggaagcacactctaatcacaaaggtgatgtcaatactcttgcagcagcccccagccataatcgagtcttttctgctggtgcggatggaccggtgaatgaaaatactctaaatgcgcgtccggggtacccaggctctttaaaaattagtggtgatggatcagattatcaaggtaattgtgaagacctgtttttaatgtagatttgttttttgctgattgaaatatttcttgttgacaatatttgggatctattattataccactatactagagacagatactttgacaaattatagaagttaaatatatgtattagaaaaagggctttttctgaaatgattggcggtgttctgtttcaattgcaaat

SEQ ID NO: 4189 - DNA, 2748 bp, Arabidopsis thaliana landsberg
gtactaggtggcgttctggacagtacaagcattaagcttaaactcaactagaaggaatagtgttatacggtcaaacaaagccatagaaaccgccaacctagatcttcgatctgttggtccccatgaattcccctttgaaaccccctcaaacctgactagaaatctactcgctcatggcaaaggagctaatcaaaagttgggttgagtagaccataagtaaaagatgaataatacttaaaaggggtttagagattatttctttgaatgtagaatacaagaggcaaagctccaccttaaagagtcttacacgaaaacgagaaagagaaagagagagatggtgttcttcaaggttcaagaggtgcggcggcaacctaatggtcggtgctgagctactaggagctgcccggtttcaagtctcatcgtccagatgagttttggacttattatttccaaacagacgattcttgacatgtcttcactcttcgggtcatatcttttgaacgcttcatgaattgtttagattagacttcgacgttaatcttgactcttttagctttcaaatgacaccgagatatcctcatgccgagattgggaagaccttggccggatgctaaacttccgaagcactggaatgatcgtcttttgatacttttagcttcaaaattcttaaaaccttcttggcacctagaatatgtgtttctcttcttattcgctctagaatgacatcaaatgctctctgaaacatacaaaaacaatagctaaaacggactaaaaagccgtgttatcaactctcccagacttagactttgcttgtcctcaagcaaacaaaagaacaaatctggtggagaggtttgaaaattgcgggaactcttctgttatcagtgaccgtgtctcgaatatatcctacaaaccacattaaacaaaagttgcgttagaacggtcgctcaatagtcttacgccttaatcatccttgtccatccgctttgatcctgcagaactctgaattcacgttaatcaactctttacattctgtaaatgttttggcatggactttctcattagaaggtgtcatttggggtagacggcgcttggtatgaaaggggattttggtgtttaagtggtggagttaaagtgtttagggttaccatatagtctcgaatgcaagataagttgcaaaaacgcaagagagaacggaccggttgaggtccacagttttcaactacttcttcttttaaacaccttcttctcctttacttctttcttactttcggttccctagagttaggtttttttgaggggactctcttctgtaattggctcatctctcctttaggttcccatgtctttccttggaactatgcatgtaaggcccccaaatcgctctatggccggacaagccaagggcaacccagaaacgccacattgatagctcacacggacaacccaacttatgttccaaacggatttagacccttagccggattacccacatgaaccaacccttgccatgatcgtgagttatgtcagtccagacaagactaatattgcatgaaacacactctttgtatgaaaataatcttttataatgtgagagtcgaaactcgcacaatagaatttatgttaagggttctttcaaagaacggatctctgtgagattctcaaagaacaacagaattgttgattaccgcggacggtgtacttgattgtattaatgagaaagtaatgattttatcgtacaagtgtgttagaaatatgagaaataagtgttttgccttcaaagttagagcgtttttgatagcctgaggttgagaacgtttttgtgcgtctcccctttgtttgtcctcacaggttctttttatagggctttggcagatcgcttctctcgatattttcggaagatttctctttatcttagagttggcgaaggagattgtctttttcttccggcgattttgggaacttctatattcagtgacatcctcggagattctctaatatctcttccgggtttttcggaaatggtatgtttgatcttctattggttaagtcttttcttgaaggttttctgacccgagccgggttgagctgaccctcgggtagtggttgagctgctcggaccacgctagtcgaatgatgcactcccgaggcgtcttgaaacccgcttcgggatgattttccaggttaccatccgaggcacttcgagaccgggtcggggaaccattttgaggtgatgctccgaggcgttctcgatgtcgcctcgggatggttcctcgatgtgatctctgaggtgtttgaggcccggttcgggatggttcttcgacatgatctccgaggcattgatcatggttggctctggttgcctgggtggaatcctgactccaacagtttgcaccccagctcattgacttagcagaaagatgatgagcttcatgaatggattcccgagccgactattcgtcttctagttctgtcgcttcatcttctcggacggtcaaacttctgtcgcgtgtcgccgactattcttgaggagtggaaacgtttctcgcttattcccgaggatcatgcgaatctttttcttctgccgagcccacgcgcttgaacgcgttttgaatgtttaaagcggatccgacgcacctttgaaaactctatatatacggcaagccactccttcaatacaacatttgaagttttcgaagaaaataaacaagatttgcttccttctctgagatcttcatatacaatcggttt

SEQ ID NO: 4190 - DNA, 2797 bp, Arabidopsis thaliana landsberg
gctttttgaagtgtttcaagctcaatcaatctatcttcaatatcctgcatgattgtgccaccaaaaaagatagtttagtagtctgattttcggtgacagattaattgttgttgcttcaagaaagttgtaccgcagtcttagtaacagcaaatcgaatctgtccgatttcaagtcgtatctgcgcaaagaattcgtcgtttaacctgtaaaatttacagtaatcatgagctcgtttgaagtttagtagtcatctcaaatccccaaatttattactctagtatctatatttcaacgaaaacggattcacttgagaaactaaagcaccaaaacatcttcacagggtcgattcatcgaacactgaacatctatattcaacaatttactctcccaaatgctattttgatcaaccaagtatcaatatttcaacaaaaacggattcacttaataaactaaagcaccaaaacatcttcacagaggcaattcatcgaacacgttgtgtgcaacatacaaaaattgacaaaccttcctctaagcctagcgatctcatactcaatctcctgagcttcagtatcaagaaagtactcaatcagctccgcagcagtatccggtacaactctagactaacaaaacccaaacaaccaaaatcaatcgatataattgcaaatcacaaatcagtatgatttcaagaaaaaataagagatttttaacttgtctaagagcttgacgacgctctttctcttcacgaagttgtttctgaaaagcttctcttgcctctgaatctctctctagccgacgcttaaactcaagccgagctatatgaccagtttgagccggacccaacacacctttcggatccttccttcgaatcaatcaaacaaagaatcaatttcatgaaactaatctcaaataaaactttcttgtttttgatcaaattcttacccattcgcatgagattttactcccccgtgaattaaatctcggaatcgtacggacggtggttgcagcggcggcgattccaaacgaaagcgtagccattttgttttttgttttctaagtgtgagctctgcttttttggttagctacgttatctctaaacttctcttatctagttatctgttttaatggcgggactattcgtgaccgttgaatttacaagtgctgagagacgtttgatcagatcgtaaccgtttaaacgttttgatctgacgatcacatgtttgtcacgtggcaatataaggaggtccttttaaacatgtgcagaggcccaattaatcaaaaccttgtaaggcctttctatagcccaattatagaactattcttatcgcgctggttatccatatggtttaatgctggtttggatccaaaatttatgaaatgatttagtcttgcaaattacttgaagatcaaagtatttcaggttgacctagtcctaccacaagaatattcaacaaaatttatggaaatttggtagatgttttattactatattagcataggctacaatttttatttttgacagctacaaattgaagtgtacaaagaacaaaagttggcaagaaaacaaaacgtgattaactcatcctagaatctagagatttacgtcaaatggcaattaatataaacatcattttcaataaaatttattaaattacctaaaaaatattcaatcttctagttgaagtatctgagaaataaaaacttatcatgaaaaagaagtctttaagaaagcggcactaaacgctattagaccatttcggtatttatagacgatgaaatattttttgtggattatgcggtcattaagcgaattaaacgactattagatggattgtgtagatttaaatgtgttataatatttgataaaaaatttgaatcttttaaaaaatatatataattgtgttaaaaaagctatactttttattattttattttatctttctttaaaatgttaaatttaaatttattttcaaaaaatttgataattttaggctttttgataatatttttcaactttttatataatatataaatacatattgttttattctaaaatcgtttagatcttaacgaatagttataggcgttagacggcctcaactaattgttacaagtgttagacggaaagttaccgtccccttagcgtttattttaacattaaaagaaaagatacatactattaaactaatggagtattaacaagaaaaaaaagaaagagtaaaatacgaaaggttccttaagcaagtttataaatatttatagccaaaaacaaaagcaaaaccaaaaatcacaagtaaccccaaaagaaaaaaagcaaagagagaggaaaagaaaaaaaatgacgaagacgatgatgatcttcgcggcgacgatgacggcgatggctttgctttcagttcctgcgattgaagcacaaactgagtgcgtgagcaagctagtcccttgcttcaacgacctgaacacgacaacaacgccggtgaaagaatgttgcgactcgattaaagaagcggtggagaaggaacttacatgtctctgtacaatctacaccagtccaggtttgctcgctcagttcaacgtcaccactgagaaagctctcggtcttagccgtcgttgcaacgtcaccactgatctctccgcttgtaccggtaaccaatttcattttctccgatctccgatttttttattttttgtcaacaacatgcattatgaatggatttgtggattctgattaatgtgaatgtgactaagaaaattagcatagtttttttgtctactactaacattttttttagatcttgtt

SEQ ID NO: 4191 - DNA, 618 bp, Arabidopsis thaliana landsberg
  unsure (1)..(618): unsure at all n locations
aaagacgtcatcgctaaaagtcaggagacggtagtaagagcttctgttgttcaaatctcttaattccggcacggagcttgttaaggataggagttgcaagagcatcactttccacatcttcagaaacaatcaatagtggtctttgcctctgtaagattttatttggacaacagaaaccacatcagatgcctttcacacagcatttacatgagaaaatgattacagatttactataaagataaagtagacataccttcagagccaactccaacactttcactatagagttgatgcttgagatcttcttctcgtggataagaatgagaggatcgtctagttcctacatagattaattccaattcagtaacttctataattgatatgacacatcaagaaacttaattgagcagggagtaaaaaacttacacatttttgggttttttgattagtgataaagtatggtgaagtataacctctgtccaatttcatcccctctacaacttccaactcgttaaacaatgtctntccatcctgcaatgcattatacccacgtcagaattatgttttgaccaatatataagtagcaacatgagcaatcatttcgcgatttacttactt

SEQ ID NO: 4192 - DNA, 1659 bp, Arabidopsis thaliana landsberg
gaaataataccgacggtcactcttgtcaccggaatcggtggtgtacggcaaggttaatgttggtttgtgatggaagctctctgtttgttctaattgaaacacgtgttagtgatggaggctctctgtattttcctcttcattagggttatgtttaggctcatgctgggctttaattaatttttgtaaaatcatagttacagggcttttgtttatattagcccatattgttggttcagtacttcagttcaataaaatccaacttttgtgagaaaaaaaaaaaaactgttaatattcttctattaatataaatatctaagttaattagagggggttatatgcaaatcaacaatttagcaaatatcgtcattctcagtttctccatcatctttgtttgatcaaagttgctacaccacagctcggccactggttttgggcattttcttggatgtagctgcaaaaaagatacatcatgggatgagattatttaatattagagatggattccgaattcatagaaccaagtaaggattagacgaagagaaagcacagtattattaccatcttcaacgtccttgagctgataatagtgtggagctatctcaatcaaccactcgggttttaactctgttacctgcattttttaagttaaaagaacaaacccgataaatgaaaccagaagaatcaacccaaagaaggctttggttcagaatgatcgaaatgtggtttacaaagtaaaaaacaaaaacagaattttacctgtcgcatgtattccttagaggtaaggactagttgatgatatacaacccatctcggcaatacctaacaatattatcggagaaggattcatttgtttgatttctctattttttagttatatgttttcaatgagtgagagttaaactaaacctgagataagccagaggctggatgtatgtgtacggtttggggatgcttcactgttcgatatgatccattcttctgtagcttcgcagtgtgtggaaagaaacctgagcataagtatacaactgctttagcaacaacaaatatagctttttatgaactggagattaagaaatttaccagctacaatggattttcttattgaatccaactcattcgcgtttgagctaacgtctatttcaactctctcgagaagaccctccaactgatcacggatatctctggctcttttcatactccgaacctatacacataggattcaaaaacccattctataactataaccagaaaaataagaacagaggatgatgccatatacatacctgaatatagttctcgtagcaccattgtgttgagtagttcgtttccttccacgaattgtaaatctttcagaaaacaaagaagacatattaataaacagtaagactgcaaagaaaaacaaagtaggggagaaatgtacagaccttcaggaaagcaatgtgatcaccgacatttccaacgtgaaaattcttcattgcattgtcagcgtgaacttgcttgtccttggggcggtaaaagatagaaggcccgatggacaacatagcagcaattgatataatctcatcggagcatttgtatttgtcagaaacaacaatcatcttcgacaacattggatcaagaagaaactctggcatccgtctaccagctttagtcaattcg

SEQ ID NO: 4193 - DNA, 1612 bp, Arabidopsis thaliana landsberg
  unsure (1)..(1612): unsure at all n locations
gccataagaggtaacagctaaagggaattgatagtatgcttcggttcttctacttcttctcttcaattaaaactgcaaatcactaggataattcctgaaaatctgatataacatatgaaaaaaccagaaactcaaaggataaatcagtgaaaacaattgattagtgaaaattcactaaattgaaatcaccaatgagaaatcccataaaattattcaaagcaaataagtacggaagccgaccaaaggatgttaacgaaaccatccatgtcagttgataagctggacatcactgcgtgggaagccaatagattccagacggaagccgaccaaagagaattaaagaaaccatccatgtcggagagaagccggacatcacggctgaggaagccagttgattctggacggaagccaacaatcttggctaacagggccatcagatgctggacaaaagctcgagtcatacgagacggcgatttactgaaaaatctagtcggagaaacagagttcatctctctaaaagtgggagaaaaaagagagaacgtttttgtctcgttatgaatattaacagttggatcgtggtgtgagttaaaaaagccgtttttagttagttagaaaacagcatgctgtccggctctagataagttaaacaatatactttatgcgtagtgaaacggtatacaaaaaataaacaaattacacgatattgagattttactacaacaatcaactgagattgatacgacttaatagttaaaacaatatgattttccgaacactagaacgaaaactaattgcctccaagaactattagtcatatgtgcttatctagttttctaatagcaaatagtcacattattgtttgtactttcctatatgaataaaaaatttcagttcacaaacaattgtaatttggagcaaggttctacttaaaattgaaatatataaaaagaggaacagtatgcgattaagaaagccagagaagaaaatagtattttttcttaatttttttttcccaggaggaaaatgttctatatattacccttttgtccccaccccccaaattacatatcctcttttttgtttttggtttcaccgctattccaatccctaccctattcaacaaagaaacaaaatataaaacacccccacctaatctgacccaaaattcctaaggaaacaaaaagcaagaaaacttggcacccttttgatcttatgctgcattaagtcaaaagaagttaatctataaggagcgttttttatctgttggcttcatcgaactgtgtggtttatggtctcaaagatactttcctgatgacttccatatcctacttcctccaagtgctatcactaatacagtgcaatcatcgngatactttcttctatctccttgcgggatatcgagaagttcatgaaaatccattcctgtttttaaaacaatcaatcatcaaaccatatcgcacagatattcagttgtgtataaaaaggcaagttttatctaccagctttcttggctgcacggactagaagttcctgtataacatgttgagcagggtctccatctggaaacttctccatggcaagagaaacaacttccacattgctcaagtattgg

SEQ ID NO: 4194 - DNA, 2043 bp, Arabidopsis thaliana landsberg
  unsure (1)..(2043): unsure at all n locations
tgatcacccaatgtcataaatctcataaagttccagattcataagcaaggttttgaagggttaaagagcaataccaaatctcttcggtgaaaagtatgaaccatgagatatcaagaagaagagcgcagaaaagaagaaccgcataggtgcggccgagactttggctattactctcgatagcaacaagcgcgaacaaagcaatcgccaaatttatcaacaaaactccattgtataatgctcctagtgatccgattagcgcgcacccaatctgaaatcaccggaaaaaaatctaattcagaaaaacgcgtttgccacaacgatgagacgaattcagagaatcgatgaaccctagaagaccccaacagatttgaatcaattactgagaaagagagagaaaaaacctgagcataaataaggaagacggcgagagattggagtttaacataatcgcgaagccaaggatgaattcgatctcgtaaagaaccacaaagcatcataaatctcgtggcagctccgatgtcccttcataaaagacaaatgattcacgaagctttttctaatgtctaaattttccggcgacacatcacagatcaacggagggagaagagtaagagaacgacgaagaattattcgacggtggagaatttcgtgaggaggagaagagtaagagtttgtttggcgggatcacatcgaatccaagattgaggccaaattaatcataaatatatttctccggtgaaattaaaaattctctaacgaaataattattaaaaaatatataaaaaactgtgggtttgaatggttacggcggttgggcggaaaaaaccgtcagcggatcagaccgttttttatttatcattcatcaattatagtccgtagtgatccggactaaaataaatagaagaaaaccgctgcggaccatctgcggactgtttttacatacaaataaatttggtacgcagcgttttattgttcgccccaaaaataagatggactaaaccgcagataaattagaccgttttatccgctgcctatattcatagcctgtctctgctctttccaacttggccactcctttttataacaacactcgaaaataaagcaaatgggaaatataaaaattatggattagataagaaaatatcttctcttattatatgtaggttgtgtaataataatgaaaccaaactggctttcttctgaaaagggatgaaannnnnnnnnnnnnnnnnnnnnnnnnnnnntaagccacgtgagagagttaagtcatcaatttactaaacattttggaggttagttgactttaatcaaattttaaagagcacgaaaacaaacaaacacacacaatatatttaaattatagacaaatggttattggttatggtctaggtaggtaagaccaaaatttcaagagacgagtgcaagtctaagtagaagatatttgaccaaacattttggtttcattttctcatctgtgtgaagagttccgagggctttcctgttgctcccgagttgccaccaaaggctgagaatccaccaccacccgcttggccttgcgcttgtccgccgaaaccaccaaaaccgccacctgtataataataataatacaatcacaaacatgacaatggtcaatctgtatgagcatgaccttgtatctgtaatgtataggtcaatcgatgtttagattgtaatattacctcctgctgctcccgcgaaacctccactactaccctgaggagcaaagcctccgaaacctccggtgcctgaaccaagtccaccaaatccaccgcctcctcctcctggagcagcaccagcaaagcctccactacctgaggctaacgcagcgaagccaccagtgggagtagaagaagcaccagcaaagcctctaccagctgaagccatggccgcaaagccaccagtggcactagaaccagcagcagcaaaaccaccagatgctggtgcatttggcagaccacttcctgggttagagccacaaatcctgtaggagaacaaacgtagctcctgggagccagcaccaatctg

SEQ ID NO: 4195 - DNA, 3609 bp, Arabidopsis thaliana landsberg
attataggggtgggttttgtgtcattgagaatgaaatgcctaatattgtagaggctgatgttgatgtcgcttatggtcatccagggaaagttctgagttctattacttcagtcaagcatctcactttatgtataacatcctcaaaggtaataatctacttaactatacaagcttgtttgtacttttctaccatctgtatccttaattttattttcacaatcaactattgaaaaacgactaattcactctgtattaattccagcatcagaaagagtactatattctgtgagcttaaaacttgttgccactaacattgattgtgtactatattctgtctcgtattgcaggatgcatatcctgtgggtagtatcttcggctgtcttgtttttctaaatatatgcactttggaaatagagtggttgaatctacttatgtctgttctcagagatgcacctattttacgagctctcaaacttgaacaggtatatatatattctagtttctttggttcagtatatatatgttgatctaatgcactatacttctatcacgtcaatttatagagccatagttgtccgggtccccaaccacgcccgtgttggagtgaaccgagttcagtccccgaatgtgtgacatcgagtcttgaaactctcaaatggacagaatatgaaggaggaggagaagagaaagaagtaataggattcatcttaagaaacggaagctgtttaaagaaggtaagcatctcttctaattccacagaccgcgacaagaaatttgagatgatcaaggagttggcatttttgtcaaggcgttcacctacctgtcatcttacattcgagtgaagtaattgtggtcaagcaacatctatcagaaattcttatgtttttcttttccaatttgagctctttgaatttgttatgtagctttctctacatctttactaagacataaataaatattatatctttcattggtttatatccatgattatcatcttgctcttgtggtttttgccccatttcttgtgtcaatcactaaatgaatagtgacggtgcacatggagtgccaacgatttttgaggcttaggacgaaaataaaatttggtccaatttatgatttatctagtcaaataataaattacaagaaaactaaaatataaacaaagaagaacatgttcatatataaaaagaaaacaattctaagccaagtgttcaaatgatatatttgaataaatgttattaaaatggatcatatttgaagcataaggcatatttgggataacttaaaccaacaaaatatagtttgaattgtggcctaaaaacttgatttattactggcttggggcatttgctcttttttttttgtagctctgagcacgaaaacatctgtagacatgcaaaaataaaactgaaacaatatccattatatgcaaaaattaatactatcagaaacaatatttaataattatctacggagaaaaaggaaataaaacaaaatatttttgttattaagaccatctcgccgtcgtcctcaagtttctattagggtttatagaccagggaacagactaaggtattgcctcccgatcacttgtgatcttttcttactattcgctttttgaaacgaatcacttcgtatttaagatcatttctttgtttcacttccatcgtcatccaatatctctaatgcatatgtgaatcgtctggttccttttcatgtgtaggttactcgagaaagcattaagattccttttgtcttgagctagcattcgtctctggtttccgaaatataattaatggatagaatcagtcacttacctgacgatgtcctattgaagattttgtcatttcttcagagaaaagatgttgcgcgaactacctttttttctaaacgctttaagactctctggatgtttgtaccaagacttgagtttgatgataccactcactttcccaaacctcggtctgtgagaactccagagcctgattatagaatatttcggcagtttgtggacagatctttgatgtcattcgaaggccaggttctacaaagtctgtatctcaaattaggtggacgattcacagatgaagatattttgatttgggttagaagcgctttgaaacgtggtctagtggagctgaaactcgaatacttatactactcgcaccctagcgctattcttccaaaaagtctatatagaacttgtgaaacccttgtggtcttaaaacttgtatcggtttttttagttgttcctgaccttgtttgtctaaggtctctcaaaacattatctctcgaagatgtacttaactctaacccgcattctctacttagacttttacccaattgtcctgttcttgaagacctgttcatacaacaaaaacacttctcaattcccaaattggttttccagattgtagtgccttccttgaagagattatctttgacttattatggaatcagggaacttgagatagatgctccttctttgaaatacctgcacattaatttactctctaacagagtgtacggttgtacggttggagctatgtatttgcatgacagagtggttgaatctacttatgcgtcttctcaaagatttgcctaaactaagatttctcaaactagaagaggtacattaatttactctctaacactaaaatgatatcatataaccatttcaatttttgttcagttttgatgagcgcaatgcgcgcgactaactaatactttgctcccttttgtgtcttaattagtaccatcatattcgaactggacatatatggccgttgtggagtgaaccaaattatgttcccaaatgtctctcgttaagtctcgagactttcgtatggatgccataccaaggaagagaagtagagcaccaagttgctagatacatcttaggaaactctagtcgtttaaaggcggcaaccttctatcacaaatcaatagatcctgaagagaaacttgcgatgctcatggagttgtcattaatgttacgtaggagttcaacatgcgagattgcattcaaagatatggctgaacttccacagtatagcggcggtataagtaaagattggttgtttcgctgatagacttgttgccattgttggtttcttcttatagccttatttaatggcatatatgcaatttctgttctaaaattctccatctagatacagattagatggatttggatttgaaaagtattagagttttacgaagccatccaaaaaaaaaaaaaaaaaaaaaagagtttgattgagatacttactctgtttttactctcttctgaaaattacagttcgcaacaggcaatggttccagtgtagagcacgatgctctcgatgtttgatgcggtttcatagtcatcaacatattggtaacaggagagatctgatcacacggaggtatgataagtgagatcatgctatagttcgtttcaagtgcttttatcagcttattaatctttcatatctctatgttcgtgaatcttgtcgtcatcatcatgattgcctcccatttttatcaaaaagagaaaaactgcaacaaccaataagcataattaataccaaaatattgaaccactaatggatcaattcaacgaactta

SEQ ID NO: 4196 - DNA, 957 bp, Arabidopsis thaliana landsberg
tggcatagaagtacagtgcattagatcaacatatattactgatcgaaggaaactgaataaattgggacattttatatgcacctgttcaagtttgagagctcgtaaattaggtgaatctctgagaacacacataagtagattcaagtcattcgaccactctgtatccagtgtccatatctctaaatatacaagagagcagaaggctagaccaacaggatatgcatcctacaaaacaaaacagaacaaagtacaaaagcaatgttagtcgcaacaggtttgctcacaagaacacccattctttgcagtaatggggtacacatttttctattcgttctgattctgaaataaaatcaaggatacagatggtataaaaaagtagaaacaagcatgtatagttgagtagattattacctttgaggatgttatacataaagtgagatgcttgactgaagtaatagaacttagaattttccctggatgaccataagcgacgtcaatatctgcctctacaatattaggcatttcattctcaatgacacaaaacctatcctcatgaagatcacgaatcttaaatttctctaaagaaggggcgtctatcacatacccagctccaatatcattatatctgagatcttgattttccaagactaaactcttgagagaagagttttttacagtgaaaatggtggcattgtcatttggacattgtttcacaaccaagctttcaagaacaggacaattggataataggctctggacaaattcttcatctgggtacttgacagatttaaggctcaattccttgagagatgggaaagagaatggagaagtaacatccacaagaacaactttctttagtttcaacttcacaagtatgctacaccctgagtacaaactccttggaagcataactggagctgtactggaagaaaacagtccatctcgataatcaattca

SEQ ID NO: 4197 - DNA, 527 bp, Arabidopsis thaliana landsberg
agaatctcgagaaatgttgaaagtgggatgtactgtacatctaaagagggactgattttagacgggtttactggctggaattcaacatatcacatgctctctagagccataaaattcaaagatgttctaagaaatcttgcagatgttgaaacaagttacacaagctttccttctgatttagagtggagtagaggagagttgatatgtgaattcttccgaaatgacaaatctgatttcgggttcttcttatcctacatccaacttatattttatgcaagtttggaagatagagtgttggttgagagctcatgagttttcagctgatgagactatttgtcaaatggtggaaattatgactcttaagtttgaaaaatactgggaagagtatagtgacattctcgcaattgcagcagtattcgatccaagactgaagtttaaatgtttggattattgtttcagtactctagatcgattaactagtacgtccatattcgctcatgtgcgttcgaagatctataagcttttaa

SEQ ID NO: 4198 - DNA, 3685 bp, Arabidopsis thaliana landsberg
  unsure (1)..(3685): unsure at all n locations
cgacaaaggcttgttgcggtaatggaggacaatacgcttgtataattccgtgcggaccgacttcgagtttgtgggaagagatggataaatatgtgttttgggatccttatcatccgagnnnnnnnnnnnnnnnnnnnnncgcgaagcaattgttatatggtgatgttaaagttatatctccagttaatctcagcaaacttagagatatgtgatttgattgtttgttgaactaaattaaatgtcccttggaggtatttatatacataatttgttatacgccaagttaagattactctttcactctttgtatatgtatgtgtgttggtcgtgtttgattttagtgagaatgcttttgttttgtcaagatgtgataaaattcgattacctcttttcccaaagttttcaaaatcggagtgaaccaggatttggatattgaaatcgagtcggttcagttaaaccgattttaatctagactcggcaaccttaaccggtcggcctgattcggttttcactgtctctctttagtctttcccctctttagggactttccgttaatgtcgccggcgacggaaactcaggaatgtcggttctctgtgatctcgattccgacgaaaaggcagcaaatttgcagccgtgtcagccgcagagagcatccccttcttctcgtaaccgcagcagccgcagaaactccgacaaaaacgccatcgtttcgatacagtaaatagtaggtggattttcaaaagcacctgctttagattcttattttttatgcttcagtgcttgaaactgttcgaagggtagaggaaatttgatgaaatgttttgtcttttcttgtggtggaagctgaagttcgttactaaggctgttgtctaaggtccagagaatggtaaaccaacgttaaagtgactgttagttagtttgtggctgttcattaagttccagataatggtacaccaactttacattgagtgttagttttaagtcggtagagttgatggagttagtttgttggtaggtcgccctctggattgtatataatcttagagcataatctttggatgaaaaactgtttatatgtacctgccatcttcaagagataatgatagatttcttgaggcttttgataacatggacatatgatctgcatctttgcattttcaagtgcaaagatgcagatcatatgtccatgttaatatcaaagcctcaagaactctatctgcccacgaacaagatcagaccactcctggttatttaccttctcaagatcagaccactcctggttatttaccttctcttttttagcctctttgtcttctattttttcgactattagttttgctggtagctgtctgcgatttacaagagatggccagttagtagttgaggcttgcagaacattggcatatgatctgtgtctaccatctctatcgcctgataattattaatcattaattgctgatgttcttttgcaatggctttgtcctctctgatcagttgtatttttttacagacgtaggcgtattagtgaattacaataccaaattggccaatcttcactcagtgaatcagtcagttatatgaacttacttttttcctctcattagcctagattcgttttccgttttctcctctagtttttctttgcttcagtgcttgaagttgtttgatcgtagacgaaagttgatgagaagttatagcttttcttgaatctaagattagatcagtgcagttgccatattgttcagttgttttcatcttgcatatagaaattgctctgcaacattggttatagtgatgcttcgcaatgcagacattgcagttctctctattatgatgctatgatcctacatttgaaaccaagaggccttgtaactacttctctgtgtaatacagttttctcacgaaactttattatataagcattatcatttgcttagttctcatacatatagatgtattctcttatggcgtattatttattggtggaagctgaaattggttaatttttgcaatatttatttgcaatctccaggagaagagcacaaacttcttgaggcttggagaacattggcatatgatctgcacatttgatagtccattacttcttttggtggaaagttgctaatcatccaacgctggtaatcttcgacttccacaagatcctctctgcatacaatatatatacgtgtaacggatccgtacccttcctcactaaagcttcttgtccctgccagattgtttgtaactaacgggttttccctcactaatgtcttcaccacttcaagatccttattcgccacaacaacaatcaacaaaagattgactgagattactagcacaatcccatttgtttttctttaaagattggagtcttacttgaactggagagttttgatacattttcttggccataaactttggtcccaaaagagtatactgtagaggaaaatcaggtttcccgtagttcacacacgtggtgtccaaccattcctcttgtggaatgcttctgagcagctgcagatttaagtatcagaatcactctgaagagatatcagtcagataacatcatgttcatttatgtaccttttcgtaaacataagcaggtgggtttattgtgtcgggcatgaaagctgtcaaaaagacaatagcggcaatcttacaagcgaagctgtcagcagcaagtgcagcggatattcctcccatgctatgagcaacaacaatcaccttaccgtcatctgagccaagcgagctcagaaactcaagcaatggtttgcagtaatcgttcagagtctgaatctcttccactttggtcatgtttatacctgatgcagcaagatccactgccgtcacacagtgacctgcaacctccagctgcgttttcaccttgtcccaagtccatgccccgtggcacaccccatggatgagcacaaaccgcttctggttcttattctccattgcctttcttactctcagcatcttggttcaacactaatatatatggtaagtttcccacagataatctttgcatattgactgttagtttttggtcgttctctgagttccattgactgttagatttctcatttcaaatatagtaagcaataaagtctgaacctttagaaagatccttttagaacacacttaattgtatcaaatcaagatacattttttgttggttgacttgaagactccacatgaggtagtttgttgccatgttggatttggtagtaattgtttcagtgactgtcacaggtgagaagtggccatagtatttagtatctgcaggaaagtttttggaaagagagattgtaaaatttgtagtttttgaaagtgaatgctttattggagaagagatgtacaaatttatagggatacaatggagagtctaggaatatgtttattatagttctcttatgatctctatttactaaatcattcttctaaaatattgtttctcatatggctttttgttgtggtgaagttgaaattcattactaatttgcagtaacgatctcaggtttatttaggcgtatttatctgcaatctccaagagaagagcacagagttcttgaggcttagagaacattggcatatgatctgcatctttgatctccagtacttccttcaccgggaagtcattgatcatcccacgctggtcatccacaggtaccgcaacgtcctctcc

SEQ ID NO: 4199 - DNA, 4133 bp, Arabidopsis thaliana landsberg
gaatcttatgaaaagagttttaaagattaacatgaattgatcaagcgtccactagcactttcattaagcaaaatatgcattcataacattttttttttataaatcgtcaacaaactaacgtgaaattataaaatcataaccttaatctcaacataataagccctgattactgctttaaacctcgccaacctcataagctcccaaccttaacaacaacacgtgtccatcgaagaggaatctaattcgtgggataaacattatgttaaaatatactatactccatcactgaaacagaaccttgaacacaaaagtgtcataatagttgggttataccataaaaaagtaaccgttttttcaaggtctttataccataatgtttagtagcactaatggctaaacccgtttgagtatattatttggggaaaaggtgattataatagttttactattttttgtaaatcttaaattggtcaaacttcaaagtgataattcctttgtcccattttattaaattgttccagatggatcacaatcacaatcttaactcatgaacaacttcactcttaggccccatacaccatttacataaatcattgcccacataatactaaaatgaaaatgttacgtatgtaagttaataatgtttacgaaaacggaaaggcttacgattgtagctagtttgggctttggacagaataaaatccaaaataatatgagccttgataaacacagagacgcatcggcatcacgcaataaagaaacagcagacgggatgatgatttacgttttacaattccatagaatggagatcaaataatttcttactgatcctgtcttcacaaattttataagacagacaagtctataaaagatcattacatagaaataagaagagtttaattattagggctcttccttaaggacagtatttgtgtcagcccatggcatacttctgagtccagcttcgtgcagtggactcgtacttgttcttgtcagtcttgtacatgtgagctatctcgggcaccaaaggatcatccgggtttggatcggttaacaaagaacagatcgatagcagcacctgttaattgcaaagcagttgttagaactgatcgataacaaacaacaatttttcatcctcaatgagtctaataagcttaatgtttcagagacaaccgaaatgagtcaaagtttaatgaagacagctcaatcttatcacttcaactagggattaaggagcaaaagcatgtttgataagagtagattactgcttctgaagcagttttaatagagagtatttgttttaaggtgggtttctattgttaacaaaagaataagagaaaccgaaccttggaaatggtgagcgcaggactccactgctccttcaagatgtcgaggcaaatgctaccgttgctgttaatgttgggatggaacaccttggtcctaaaggccacctagatatcatcacacacaccataatgaagaacaatgagataatgaagcaaccataaagaacatacgagctttggcaaaacatacttgataacaattctcaaaatattggaatcaccttaggaggcttgaatgggtaatccggagggaaatggatggttacaaggaaaacacctccagcataaggactctctgaaggacccattatcgttgcctgccagtgaaacatgtcttcagcaacaggacctgtacacagaaagataaactcaatctcacaccacataagcacatggaaacaaagagacagttttttcttcacaagtataaccagaccccagaaactaagacaatgaaacgagttttaagcctttataagatcttcaccagagaaatcagaaacgagataaaccaaatttagttctagccagatcttaaaaagtaaaacgagtacttagctcgagatcggtaccaaacaacacataaacacacaaatccaaacaaatccaagcataagcgaacaaaaaaaccggatctatcaacaccagctcagggaaacaaaactttttaagatgaaatctcaaaatccaaacacgaaacaagtacctgcgctacatgatgtaggtggatccttctggagatccttcaattccttcaagatccgcttcgacgccatatccaaaaacctaaaaatcaaaaatcaaacaaagattctaaacgaatcagagaagctataaatccgtgagaaatataagtaatagatccaaaagctacagagacaatacctttgatttttcgcgtaatcggattggcgaggttttcgcctttttcttctcgtattagagagaagaagaaccaagacttaggggaaaggaagaaaatagagatggtggtggacgaaagacgaagaatacgaattattctctgtgctcacgtctacaataaataccgtgtggattatttactttctttgactagtggactctacttttaaccctcttattattcggtggaccttgaaacgacgcggcgcttcttaattaaaacatcaagttgcattgaaacgacatcgtcttaaaaagtcatctaatctaacggttgatatcctatccttaaatcaagtggtattgaaatctaacggctgcgagtttattataaatttcaaatcaagtggcatcgaaacgcgttgcgatgaagtcatataatctaacggctgagatttgtatcttttaatcgatcgaatcatttgaagccacgtcttctctctcactttggagatttttctaacgcagaatctgagaataagctgaccgattccgatttcgagttcgtcgccgggaggaatgaaccggttgaaggagcaaaaggggccgaagttcgacggcgaagaatcacctccacctgattttgatgaagatcgaagtgtgggtgaggtagacggaggagatcacacgccattcgctggaggtaaagtcagaaggaaagcgtctcgctatagagagcatcgtggtgactatcttcacgtttcttctcgtcctggattgatgcgaattctggagaaacaaggttaggtttctccaaacttttggtttttatttgatgaatttgagattgagaggcaatttgtgaatcgaagaacttggaggaatagttgaatcagctgtagaattgtggcatcgatttatagtttcttatgtggttgtttggattgctaatgattggattcaccttgaattgcatgtgtttgatgttgagaaggtgattcattgttgttataggtgatacatcgattctttttgctgataaagttttgaagttcaccggctcggggaagatgaaacggcgtatttttatcctcactgattttgcgatctatctaattgatcccgagactgaagctatgaccaggagaattgctttgtcatcagtagagaagatgtgtttaagcaaattgagtgataacttcttcgctatcattattcccacggaatatgatctcttcatggccagcactaggaagactgagcttgttcaggtcatggtagatgtcactaaaagtgcttctgactatgaacttgaagtgcttctctctaacaggtaactatgaccgcaatttttggtttttgatgtctcctctttgaatgctaataccatgcacatgagaattgtttattttcatctcatttcctgatattgacactacaggtattgtgttactgagaactgatgtgggtctttttagtctctgaaacttagtgagctctgtttcttaagtgacttggctattagttagtggtgagaccagaggatccacttgtacctattaatcatatctatatttatggaagaagataaagaattaacacttttaggagataactactgaaattagtacgttgagatacaaatggttacaactatattttaaatactgttagatgacatattctagttttgattgaaactgttctcaaatggcaatcacgataatagtccgtagaaacattttgtatatctcccatatcgtaaaactcagctattggtttatatgtgcagtttgtgttttatactgataatggtttctccttgtgttcattccagatttgagtacaatgcatctgcctcattagtaaaggaagtttcttttgaggaatctgaaggtttgtatgaataagattctggatatt

SEQ ID NO: 4200 - DNA, 1193 bp, Arabidopsis thaliana landsberg
tttaaagtctgttgcttttcaaaatacagcccatttgccattgtacctgtatgctttcttgaatacatcaagcaagtcaagaccgtttgagtacctgcggctgactagcttgggggttattggtgcacttgttaaggtatgtattgatatttgagttttgtttcctcgtctagttatttagtatgtttatgccaaaaaggcaggaacacttcttttacatgctaacaactgtttggctgtaaataaatattttggtgatttgagaaacaacgattttagcatgctaagacctttgagtagatcctgttaagacatcattagtgatattggtcttgcaacatcgttcatttggtttggtaggttgatgatactgaagtgatcagattccttcttcaaactgagattgtcccattgggcctccggacaatggagaatggcagcgagttatcaaagactgtaagtttgtctatcttcagatgcttctctttagattcacatgcttgaaaaatgtatatcaagtttcctatcatttatacagccagttgcaaatatctgaaatctttgcttcatacaaagaacttgtataagttttcttctgcaattgatgtttctgattggttttggtcatgtacagttcatctgattgatttatttgaacggttatgtcaggttgctactttcattgttcagaaagttttgctggacgatgttgggcttgagtacatgtgcacgacagcggagagattctttgctctgggtcgggttttgggaaatatggttacttcacttgcagaaggaccgtccgctaggctactaaagcacatcatacgctgctatcttcgcttgacagataaccccaggtgcaataattatccattttccttcatttgaaaaccatattatacactcgtgcttacacaatacagttactgatgacattcagagcatgcgatgcacttggaagttgccttccagatcttctgagggatgctactttcagtggttgtctctatgtaagtgtcatatctcttgatagcatcataaccaattattagtgattctgataccaaattgttatctatcagtttattggtatcacgactcaatttttttgatacttgagacttgactggttttagctaatcgtctcacttaatttggcaggatgacccacctgcaatgcaatggctgca

SEQ ID NO: 4201 - DNA, 2046 bp, Arabidopsis thaliana landsberg
  unsure (1)..(2046): unsure at all n locations
gcataccaaaatcagggattgacaaacaaaccaaacaccaaatttagtataagaataagaagagtgtaagaaaaataatagaaaaattgagactttgaatacagacctttcattctgacaagttgctgttatgccagttggtatgtgaacgattctaacagcactgtctgtcgtgttagcgtgctgcccaccagctcctccagaacggaaccgctcaatccggagatcggagtcattgatctccacacgggtggacccatcacctagaattggaatcaccgcaactgccgcaaacgaagtgtgtctccgttttccactgtcaaacggggatatacgcaccagcctatgtactcaacttctgctttggcgtatccatatgcgtattcaccgttcactttgattgtagcacgctgttcaagacattggatcaatcgttagccaatggttcaatattatagatttgaccaattgcactaaacagaacatgagattttagcagtgaataatggataaactacacattttgctctatatgtgagcctatcagccaaagcttatggatgtcattttgataatttttggtttagtctagagcagaggagcattgaaattagcctaacttgtttacaatggaagctaaattagatagctcagcaaatatagttgactcggttagctagagatataacatgttctaaagacaatgggactgaacaagttgagtggtatccgggattgtctagatctctctatgatgtgtagttctagctgaagtgaataaacaaaagttaaccggttcggatactatcagattcctctaatacaaaatgcatgattcaatttctacatgaaggaaaataaaatcaaaccttgattcctgctatctccccaggatgcttcatcaaccacagtgactgaaaatttgcgtcgttgagcccatgttttgtacatttccattaccatagctgcccaatcattgctctctgttcctccagctccagcttgaacggagggaacaaaccttccagctttataatatgaagtcagagacagaacaatctcatacatattgtcttcgagagtcacctcgatataacaagaacaaggatcattatccgcagataataaagcctcgagttctttctcttttnnnnnnnnnnnnnnnnnnnnnnnnnnnnnnnnnnnnnnnnnnnnnnnnnnnnaacaatcatggttagcaatcttacaatgaagcaatactgaccattttgttctcaagtagttcccctataaactacaaacccgaaactttcgggttaatcatacctagagaaacagaaacagaaaaagaaaacatgcctagagtttgagaaatgagtgctaaaactcccaccgattctaactctgaatcgttctcctctttagcgagtttcaacatgtcaatgtgttcaagaagctctctctcaaatgtcataactcctttcatttttcccgtaagcgagccgtgctcccggcttatcttaccagcatgagttggatcatcccaaagatcagacttgttcaactctgcagataaaactttcagcctcaccaagagtttcttccactgccaaaatcataaaacaagagtataaattatatgtaaaccccgatcgtgtatctgtctatgtaatagagataaatgccaagattcaagcagagtctaaaactcaaacatataaatattcaatgtgttcctatatatctaaaagtacaaatccacgatttaggcaaagtctaaaattcaaacatacaatgattcaaatgtgtttatgcctatacatctaattctaatcatacatacacacacatttcaagtgaaatttcatacatacacgcacacataaccaaaagaagtcatacacacacgatcaggtaaacttcaatactgtacttttagtgtatctgtgtaacgtataaaatagccaagattcaggcaaattctgaaatccaagcatataaaagattcatttgtgaatatgcctatatataatatatatctaaatcatgaatatggatatgtagcta

SEQ ID NO: 4202 - DNA, 846 bp, Arabidopsis thaliana landsberg
gagtccctgagtattagtgtggatatcccaaacttcgcaatcgcagtaattagggttatacgatttttgcagtcataaatcaaggtaatcggctatgttttcgatacttttgtaattagtgttttacgagttttgactgattacgatatctctgttatggaggttgatgtatttctcggctacgtgcctctatgatcagtctattaaccatgttcctcttctacatatgtggtgatttggggaaagacatatcagttttatgtaaaaacctttcgtttttgtaaattgtagtggatcttcaaaccctaagcttgaacatgaagttaagtaggttactttgtgatttttatgctttaacgttttgtctggtcattaagctcttgattttgcatcacttccgggagatttgtctctagttagattccacttttggttaagtgttgtcttgattatgatgaagagaaaaaagagaatgagagcgttagagagtaaattatgatgaagatgagcgttgcagccaagttgaacaaactcgggaaacatatgagaagagagtcatcgatagatcattggattaaaccgaaaacatgtttttgccacttcttgttctgttttccctgttttagctctgtttcccctgtttttgctctgtttcccatattctctgtaactttttcagttaaataacactgaagttacaaaaaaagtttatgatacttacattatgttttaaaagctagtaccaatatacgtttaaagacgatataacaacaccataagctgcagaatctgaagaaacatctaaaacccaaaatcttacaattcaggtgattcatggatagattc

SEQ ID NO: 4203 - DNA, 626 bp, Arabidopsis thaliana landsberg
aagctgcaaaattatggttctaatatgataaagatgaggaagaacaaaagaaaaccttggaaattgtgagagcaggactccactgctccttcaagatgtcgaggcagatgcttccattgctgttaatgtttggatggaacaccttcgtcctaaaagccacctacattttttgtaacaacatacatagagagcaatgaaatcaagaacacagagaaaagaacaatagataaacgatggaagatattagcaacagaaaaatgatggccgaagtaaagttggaaaaaaaattcaaagaagaagaagcagctgtagagatttgaatataccttaggaggcttaaatgggtaatctggagggaaatggatggttacaagaaaaactcctccagaataagggctatccgatggacccattatagtggcctgccaatgaaacatgtcttccgcaacgggtcctgtcaacatttaaccaaaacttcaataccaaaccagaaaagcaacaacatgcatataagatgaagttggtcaaaggggcaaaactagaagagaacaacagagttataatcctaagatctcatccaggaaatcaaaaatgaaccagatctatcacgagcagacagtttgaca

SEQ ID NO: 4204 - DNA, 2267 bp, Arabidopsis thaliana landsberg
ttagtcaatctatgttcttctcattttaagaattaatttatgatagtaatttatgttattatttttgaaatatggtatctactctattattttatacttagatgcaatgagtgtggtgacaaatatctcagctattaagaaatttccatttgtttgtcgccaaggtgaaaccgactatgaatcaagatatgtctcattcgaacttttggacaatatgtaagttgtagtgtttttaagtaagtttagtaatgcattgcttagtctaatattagcttaataatgtgtgagtagatgtgtcatctgtctgaaaaattagcttaataatgcattgcttagttatattggttaggggagagaaaatgaaatgctatgctgttggaagatgctgtgaactttttgttataaatttctcaaaatgtatcagttcagcctcttataactatcagcccattgtagccatagtgagtttttggagaattgctgagattgagggttagtttttttcaatactattgtaatcctatttacttatgatttttatttttattatataactttaaataaaaattttgtaacaggtgagaatgttttgatgagtgaatttggatgttcaagaatttacatcaatccaaccactttccctgagatagatattcgaagttacatgtaagactttaaacattttttaattatattaattaaccataacatcaattaatcaatacaatttttttatttttctcttttacagccgcagtttcaaagattatgatgaagttccagagaaccaaaggatggaagtgattgaaaatatttaggagtttgacctggcagctcttattcttctttaaattatgttttgaacttcttttaagtttctccaaactttgtcattgcaagttgttttttttgttaaactttgcttatgttttgaacctatttaattattatattcccgttggatttttctctatcttactttttgttaaactcctaacaaagtttacaaatatgacataaagaaactccaaacaaactcctatcaaagtttgcaacgattacataaaagtatagttatagttatacttatttctgtgaaactactatgcttatgatttaatattttcgaccatgtttagcatagatataattattgatgattatcttttacatttaaaaaaataattgtttgggtaccaagaataaaacattaaaaactttgtgacaaatcattcttggaaacattcaggattgataagtgtgtattttgcatgttttaagcatccatttgtcatcactttagcatcatatcatcactgttttataacatttcacatcatttgtcatcactttacatgtttaggatagttttgcatgcatgttgcatatttgcgttgatttcaggtgatttggagctgttgacgagctatctggaagaagcggacataatcatgacaaaccactcgaccagaggtcgagtaggagcttcaagatctcaagagaccactcgacccccaggtcgagtagaggacatcaccacttcacttcaccactcgaccacgaggtcgggtgccctcatctccatcactcgatcacatcactcgaccatgaggtcgagtgtcttcacctccatcattagacaatcactcgacctcgtcactcaacctggaagtcgagtatctcctgacaaacactcgatcacttcactcgaccacgaggtcgagtgtcttcaccttcattgccagaccactactcgacctcattgctctacttggaagtcgagtatcaccatcacaccactcgactacatactcgatgataagcttcagagccttcttcattccgcactcaaccagacactcgagcacaggaaaggaaagaagactccagctactcactcgacctcccactcgaccacatgggtcgagtacagttctttatccgtcccaatacttcgtcgttttgagtattagggtttcgggatatttggctataagtagcatgtacttcacattttcgcaaaaagaagtttttacctagttttattccgcagaccttgtgttctagtctttttgtaatccggatttctctttatctattcagtattcagtattcagcttttgtcttgatttcgtttactgttgttcattctgttatcatcctgctattacactgttgttatcatgttttcaacttgttcaacgtttatgctttctattatgatgtctgagtagtgaatagatttctgaggatgggttagagtagtg

SEQ ID NO: 4205 - DNA, 1099 bp, Arabidopsis thaliana landsberg
aacagagaaagaatggtcatgtgcggatacacaatgtgggaagatttatgacagagagcagatggagagtagccttctagagatggtgagacagagagaaagaatgtaccatatgcaggatgtagtgtgcattaggtgcaatcaggtgaaagcggctcatttgacagagcagtgtgagtgttctggttcctttagatgcaaggagagtgggtcagagttcagcaagaggatggagatattcatggatatagcaaagcgccagaagtttagactgttagaagaatacatctcttggatcatatatggccctagctattaacaaaacaatagagaaagacatcgtttataggttaattgatttgtgcataggtttacaacctttttcaagctctcaaatatttaccggtgaagaactgtggaaaattcacaggcaaaatcacagcttcctttaaagcttgtttggcactttcaagcccagcaacaactgtccacttaacgttaggcttttcccttataatagcagagtttaacccagctcgaagctttgattcttctccatctcctccgtctttgggcttagtcttaggcttcgtagcaaccgctgcgtcgccattcgatcctttccccgatccaacttcaactaataccgcacgaatttcctcagcacgacggagatactcgtagaacttgtcggtgatggcatctctgatcctagggttcttctcatatttgagatagattttgaagtattcaagcgcgttcatgtacaaaggaaaagctttgttgtagttaccagcattgtcctctttaccgcttgtctaacgtactcgatcgcttgttctttgaaattactgtacatattttttttagggtttatagaaataaattccttcaatcataaaattgaataatttatcgaaaaaaatcagatgattaaagaaaccctaggagaagcgtggttgatccatgatcagaaatttaagggaaagcagagagttttgaagtcggtgaggctaacagagagaaaggaaaattttgatttttttttgacgtttgaaaatagaaacaacagagtgtttgtgtgtagaacacaaagacg

SEQ ID NO: 4206 - DNA, 3820 bp, Arabidopsis thaliana landsberg
  unsure (1)..(3820): unsure at all n locations
tgaggttcaaggtttaatcgcggtgaaagagtcaaaaggcgaaaccgatagattcttgcataatcataaaagatttcacatggcataaacttttcttcttaaattaagactgacatctttcatcaaccatgcttccaaaagagtttatcacgattacatcattagccccaaaagactcaactctatctagcctagtaccccaagggtgcaaaagctaagctagcttcgaggagtcctaccatcacagacttctaactctatccttgcgatctaatgagcaaacgaggcaacactcgactcgggggaaggtggtctccctgagccagcagtgtccaagctggaggcaggctcctctcctccctcgatgttgacatcctcgttggcctccatatcctggatctcctggtgatgcatatccaggtgctcattagcctcagccagctgctgctgagtgttaaggagctgatcctcgagaacctcaattgtgttctccctggtccctactaattcctccagctcttggatctcattggatagctgctccacctgcaagtccttttccaccatctcagtggacaaatcaaccacgagctcctctctattgtacagggtgatcttcgttgcctccaacaatgccaccagatgggacatcgcctcaccgcgcatcacttgcagatggtacactgcattcatgcaccgtacagtcaagtgcgcagtctgacctgggtagatagcccaaatgtccttggcatgctccacccgatccttccacattgggtcgtcctccctttccgcgggaacaagccaatggggtgggtagatagttccaagggtggaatccgcagaaagtggtcaacccgtgcagagcaatcgcctcgatcgtgtcctcagcccagtatccaaaggactcagagtccagtgaacgccagcctggcttaggggatgaggctccagggtcatcctcaccctacagcggggcactcggtgcttcnnnnnnnnnnnnnnnnnnnactgaggaggcgtcgtgtatccggcccactgaagtacctcccacaaaatacggggaaagccctctcgtgcaagcccgtcagtgcgggacagtgcatttccgtcgtctgaggatccgtgggaagtcatctgtgtacggttaagcgtaagtaaaagaaaaagaattataaaaagaacaaggaaaataaaactcagcctttctccagttaagtaaaaaggcactagggacctagttggttgttatcttgtttttaagtcctttactcagttatccattgcttagttatgaatgcatgcatgctcgtcctgaacggcctcacaacaagataaaaggaatagggaggaactcccatcctgtaaaagtggcctgtagggctgagttacttagccacctagctacccttctattaacctaaggcttcacgtcctaggtctatcctgctcgtcctactatctatccaaccttgtttctatcaagttttatttagaaaatttatggtatttacattttattgattcctctgtggtggtacaagctccgataccagctgtggcggaactgcccgaattattccaacttaagtgcctaagccccgccttagaggctagaccacacttaaatgggaataacccgtcaatccctcggatctagtccgacacggccactgacaggatcaagtaccacaatctcactcgaaggtgagtcacagagcaaatacaataaagcataaaaccataaaattaagagtattaaattattacatcaccatcatcatcatcggagtttttgcaaaagtaaccatcattgttcgaagtgcagcggaaattaactaacggtaaataaagggagagatggggaagcctgtcccatcactcctcatgctcctcctcagccgaggcagggtcccactcgacagtccaacccggtggcaagatggacggccaagttattccagcaaccatgtcctccagagaacctgtaaaaattatgccacaagcaaggctgagtatactaatactcagctagacttacccggtgtgaggagtctactcctctacctctagacatgcagctgtttggctgtggggtttggttgccaaatgcactagctgagtttctaagtcaacttttaactttgtcaatttaagtgtgactctcttaaggctaaaagtgtactatctactcatacatagtagcaagcattattagcaatcaacagcttatatcaacccatcacatttccacttgttactcaatgcagtacaatgtatcaagcagtctcattagctgcgagaagcagacgattcgaatcgagtttttaaccttgcaaggtaaacctacacacacgacgtggcgaggcactccgtcaccacacacatcaactgtccccatcgattccctggcaacagaaagggctcaccgccttggcgtacaatgcctcactgaccccgactgccgtcgtgcagtgaccgcacttgtacccaccataaccggaatgggagacctcgtctcaggtcgcgtgaggagggcaatctgctgccaggttcaatcaggtactaggcttaccgatttaccatatttctcggtatatgtttagtacgttcaaacgcttgactcacggtaccacaccttaatccttattcaattttttttatcccgtgaacaaccaatccccatggattgttgcccacaacccaacatcagtacgatatgaaagtgggtacaatcaatgtcctgacctcgtgcgagtgctagaaaaatcactcgacttctaccgcgatccctaaatagtaaagcagctactcgacttagcatactagtattcatctcaatgggattcctgagatcatgcaactagggtttcaaacaactcctacacttaagtgcacattcaaatcctacaatcaataagtgtagtaaaatagcatatagaataggttatgcataaaactggggcttgccttccagagctggggtaggcagatcctcgatggcaggctctagtgctggctcctggactgcctcctgagcaactccttgctccggaacgaggatgtattccccgtcagtgatattacagtctatcgaaatgcaatgaacatgtatgtcatgattatgcaggatttaataacattatgctaaggaagaaaaaaaactaagttaatgagtaacttagggttttcttggtcatacgtgacttttagtggtttatgcttatcactctaggcttaggttttgttagaggataggcatagtggattggtattgtcttgatacatttcagtggacaaattacaaaggttttaggatgacattaatttacattattcattttcctttctttaatttctacttagggtttctagtgtaggtttgaactacgacagtgttttaataatttccaaaaattctgtaaaaattacagtgggttgtcatttgctattctagcatgttttaagaatttaaggcttaaaatataaaggctatgtttttagacaaaaatagcaagagtggtgtaaaatgggtcacttacactacatctcctaattaaaggtgggttctgccctaagggttatttttgctagaatctaacattaataataggcttttgtgccaaaaatcacagaaagctaaggggtggttatttagttatgattttctaaagtttaatgcctaaaaggcactttctactacatggttatttgaaaaatgtcaaacagcagatttcatatttttcttaagttcttaataacaaaacatttactatccgaagggtgggggtgtttcaccttggggttatttttgtagggg

SEQ ID NO: 4207 - DNA, 5595 bp, Arabidopsis thaliana landsberg
  unsure (1)..(5595): unsure at all n locations
tttcttcaagcagagggacttcttgttctatcctccatgggctttcgcattacccggttttcttctcaagattccgttatctcttattgaatcagttatatggatcgctcttacatactacactattggttttgctccttctgctgccaggtacatttgctcatgaaaatcactaaggaacttgttttttttgcttctattgtcattcccttgaactaaccaaacttgttccattaggttcttccggcagttgctagcatacttctgtgtgaatcagatggcactttctttatttagattccttggagcccttggaagaacagaagtcatcgccaactctggcgggacattagcattgctagtcgtatttgctcttggaggctttattatttctaaagggtaagcagataatcccttttgatatcgtgttcagcttctttctctatgggattattaagtgaaacatatattatgtcttgtttcgcagatgacatcccgtcgtggctgacttggtgctattatacatcacctatgatgtatggacagactgcattagttataaatgaatttttggatgagcgatggggcagcgtaagatttctcacctagacctcatctggttgacttctcttttcaaattgtgatataaattctgttatgttacatgatgcagccaaacaatgatacacgcatcaacgcgaaaacagttggagaagtcttgctgaagagcagaggcttctttacagaaccatattggttttggatctgtattggggcgctacttgggtttactgtgttgttcaacttctgttacataatagccttgatgtatttgaaccgtaagtgctctcattttgaactttctgactattcagaacaagaatcatttttagttgacaagatcttgaaattttttcttgtagctcttggtaactccaaagctactacagttgtggaagaaggtaaagacaaacacaaagggagtcacagtggaacaggaggtgaaatcttttacctcttcaattctgcagccttttcactttggttattctgactctactaaaaaagttgcaggttctgtagtggaactcactagtacttcaagtcatggaccaaagaaaggaatggttttacctttccaaccactttctctagcattcaacaatgtgaactactacgtggatatgcctgcagtaagcaactgcgtctcatacttgttctcgttgtatcgctttacaaatgcaccttaagttgtattcattgtttcctttaaattctgcaggaaatgaaggctcaaggagttgaaggagatcgacttcagttactaagagacgttggtggagctttcaggcctggcgtattgacagcattggtcggtgttagtggtgcgggtaagactaccttaatggatgtcttggccggtaggaaaacaggaggctatgtagaagggagtattaacatatctggttacccaaagaaccaagcaacatttgctagagtcagtggttactgtgagcaaaatgatatccattctccacatgttaccgtttatgaatcccttatctattcagcatggcttcgtctttccgccgatatagataccaaaacacgagaggtaagtattactatacataacgtttcatttgtttttcataatcactcgcatgattttataatctggtaacctttttttgcatgtagatgtttgtggaggaagtgatggagttggtggagcttaaacctcttagaaactctatagttggtcttcctggtgtagatggtctttcaacagaacagaggaagaggcttactatagcagttgaattggtagctaatccatcaataatcttcatggacgagccaacatctggtcttgatgcaagagctgctgccattgttatgcgtactgttaggaatactgttgatacaggaagaactgttgtttgtacaattcaccaacctagcatcgacattttcgaatccttcgatgaggtttgcttccgaaattttttccacttttaagtccctgaaccaggataaagttaatcaatcatctttggtttaatgcagttgctgttgatgaaacgaggaggacaagttatatatgctggaacactaggacatcactcacaaaaactcgttgaatactttgaggtgaatcattggttttgcttttcctctctcttggtcatatgaatatggaactatatctagaacttttcttgcaggctattgaaggggttccaaagatcaaggacggatacaatcctgcgacgtggatgcttgacgtcactactccttcaatggagtcacaaatgagcgtggactttgctcaaatattcgttaactcctctgttaatcggtatgtgttttaagaaaaatgctactactaatgcagagttgttacactgtgtttctaatatgaacttgatgttttactcaggagaaatcaggaactcatcaaagagctgagtactccaccaccgggatcgaatgatctctacttccgaaccaagtacgcccccccattttctactcaaaccaaagcttgcttctggaaaatgtattggtcaaactggagatatcctcagtacaatgccattcggtttctcatgacagtagtcattggtgtcttgtttggtctacttttctggcaaacaggaactaaaatgtaaggcatcttcttttctctattccataagtaaactatcatcttatcaaaatgtgacgtattcatccaaaaacaccaaaacagagagaaagagcaagacctgaataatttctttggagccatgtatgctgctgtattgttcctcggtgccaccaacgctgcaacagttcaacccgcagttgctattgagcgaacggttttctaccgcgaaaaagccgctggaatgtactccgccattccctatgcaatttctcaggtacttaaccattctaataattttgcctcaacttttatatgctacttttcctaagatatggttatctaaaaatgatgcaggtagcagtagaaatcatgtacaacactatacaaaccggagtttacacacttatcctttactcgatgatcggatacgactggactgtggtcaaattcttctggttctactactacatgttaacatgcttcgtctacttcaccctatacggtatgatgcttgtggccttgacaccaaactatcaaatagctggaatctgcttgtccttcttcctcagtttctggaatcttttctccggtttcctcatccctagaccggtaaataaactaagcaacttccatttgaattaataatataaaaaaaaagtgttttaagagctagactaaacttttaacttttgatgcagcaaataccaatatggtggagatggtactattgggcatcacctgtggcttggacattgtatggaatcatcacatctcaagtaggagacagggattcgattgtgcacatcactggtgttggagatatgagtcttaaaacgttgctcaaaaatggattcgggttcgattatgacttcttaccagttgtagccgttgtccacatcgcctggatcttgatctttctctttgcctttgcttatggtatcaagttcctcaacttccaaagaaggtgaagaaaacttttattagaatagatttcaaaaatctttatagattagtgtttgaatgaattcatgtaaattttctttgtcttacctaattatttatttattgtcgtttggtaataataaataacagttcatgtttacaatatgatattttccttattcatacttggtatatgctttattctctagtgattctcattacaaagatatttgtgcaagtttggactcgtcccaaatcaagaaaaatgttgtagtcaaaatgcttttcagttacgagtctgaaacctgacaacacaaaattataaattgtttttatttattttttcctaatcaaaacgattttttcctaatataaaatttgatattttgaggggtaaaagaagcaataattgagaatattgagatactaaaattgtgacgagacgcttgatgggttccacttaaatatctgatatgattacacgtggcagactatgctccgtccctaatgagcttcgtgtgattttgattaattttgttaacttttatttttgtcgtctagttttttaaatttattaattaatttttatttatcttctaatttagattttattcctttaagctttttcgctcctcactctctcttcccaaagttctctgtaaaactctctctccgtcttcaatggtttacacgatttcaggcgtacgttttcctcatcttccatcgattaagaagaagaattcgtctcttcacagtttcaatgaagatctcaggagaagcaacgctgtctcattctctctgaggaaggactctcgttcttctggtatttgctccatctcctttgtttatatctccgtgtgtctccttctagtggcacgggtttcgagattggtgatttccatggagtcaatgtgtgggattcaatttttgtatcctgcttcgtggaacattcttttttatggaggattgatttggtgtataattagaatttagatggttgatgaagtttaggagataatgagatctttgaggtttcggcaatgacgaatttatacatgttcgtctctggaattttggtgatattaggtttataagaccaagtttcgacttaatgcgagctttgcatctagagatttcccagttcaatggtcctctatattatgtatctattattgttgattcaaatctagaagtttgaatgatagtagcagtgttttgttactcttcttatttctctgtggagtgattcttatatccattgtgctaatttcttagggaaggtttttgctcggaagccatcgtatgattctgattcgtcttccttagctaccactgcatctgagaagctccgtggccatcagagtgatagctcttcatctgcctctgatcaagtacaatctcgggatactgtctctgacgatactcaggtttgttggcatgagaaccaaccatgaacttgtgattagcacgataattagatagaatccctttctcccctctactgttcttaaatgattattattaggtgctcggcaatgtagacgttcagaaaactgaagaagcccaggaaacagagacactagatcaaacttctgcactctcaacatctggaagcataagttataaagaagattttgcaaagatgtcacactctgtcgaccaagaagttgggcagaggaagattccacctcctggagatgggaagagaatatatgacattgatcctatgttgaacagtcatcgtaatcatcttgattaccggtaaacaataaattctgtcttgctttagcttgtttgcaaagagtattccctcaaaactattaaacaatgaatgtaacttttgttggtggaacatgtaagttttatgtcaccttaatttccatccttctcctggcttaagaaaatttgtttcttttcttattaagnttaattactcagcatgacgttgtagatatgggcagtacagaaaactgcgtgaagaaattgaccagaatgaaggt

SEQ ID NO: 4208 - DNA, 2050 bp, Arabidopsis thaliana landsberg
ggagtacttaaatctttgatgagttcttgatttctcctgagaaagaacatttagttcgttttaaaaggacagagtaacactctggtttagtagcagcattttctttagcataccgataaagagaggagttggagaatatttgagcaaagtccaggctcatttgtgactccattgaaggagtagtaacgtcaagcatccacgtcgcaggattgtatccgtcattgatctttggaaccccttcaacagcctgcaagtagcgttctagatatagataattccacggatatatatgactaagagatgaaacaaacagatgattcacctcaaaatattcaactagtttctgagagtgatgccctagacttccagcatatataacttggcctccacgtttcatcaacaaaagctacaatgaccaaatatgatttgttaaaaaaaaaataattctgtttttgggacaaaaactgtgattttttggaggcaaacctcatcgaatgattcgaaaatgtcgatgctaggctggtgaattgtacagacaacagtcctccctgtatcaacggtattcctaacagtacgcataacaatagcggcagctcttgcatcaagaccagatgttggttcatccatgaagattattgatgggttagctaccaattcaaccgcaatagtaagcctcttcctctgttcggttgaaagaccatctactccaggaagtccaactatagagtttctaagaggtttgagctcaaccaactccattacttcttcaacaaacatctatcaatcacacaaaccaagttacttgggtataaagtcttgcgagctattgtgagaaaacagtgaattgttttgcatagtaatatacttacctctcgtgttttgatgtctatatcggtggaaagacgaagccaagctgaatagatgagggattcataaacggtaacatgtggagaatggatgtcattttgttcacagtaaccactgactctagcaaatgttgtttggttctttgggtaaccagatatgcttatactcccttcgatgtaccctccagttttcctaccggctaagacatccattaatgttgtcttacctgcaccactgacaccaaccaatgctgtcaatatgcctggcctgaaagctccaccaacgtctcttagtaattgaagacgatcgccttccactccttgcgccttcatttcctgcaatattttaaggtacaacgaatgaaacttaaaacgcatttgttacgtaattggtgaagtctaaatagtatgagacatggttacttactgaaggcatatcaacgtagtagttcacattgttgaatgcaagagaaagtggttgaaaaggtaaaaccattcctctctttggccctttatttgaagaactattaagttccacaacagaacctgcaaattctaagcttagtcagaaactaagacacagaaattaaagataaaagaattaaaagattgcaccttctgttccacggttttcccctttttgtttgtctttaccttcttccacaactgtagctttggagttaccaagagctgaagaaatatttttttcaagaccttgtcaacaaaaaatgattctcttcaaaagtctagaatagccgaaaaataagattacttacggttcaaatacatcaaggctagtatgtagaagagattgaacaacaaagaaaatccaagtagtgccacaatacatatccaaaaccagtatggctccgtaaagaagccccggctctttagtaggacttctccaactgttttcgcgttgatgcgggtatcatagttgggctgcatcatgtaacataacagattttgcatcacaattggtaaagagaagtcaacaagagaaggacttggtgaaatcttacactgctccatctctcatcgagaaattcattcataacaatagcagtctgtccatacatcataggggacatataataagcccaagtcatccacggtcgaatgtcatctgtgaaacaaaaatataaaatatgttttgcacataacaatctcatagcttagaaaaa

SEQ ID NO: 4209 - DNA, 1008 bp, Arabidopsis thaliana landsberg
atgcattgcacttggatgcacactattcgcagctggtgccgttttatttaagagatataaacaataatcacttgggaatatagacatatcaagggtactaattttggaaatgaaaaatcataatttcataataacttaagctggttttattaataatcaaatgacaaaacaattaacaaaaagtgcattctaaagaaattttacatgaattcataaactttcaacactattctataaagatttaaactctttctattaaggttctctcttcaccttctttggaagttgagaaacttgataccataggcgaagacaaagagaaagagtaagatccaagcgatgtgaacaactgctacaactggtaagaagtcatgttcaaacccaaatccttctttgagcaacgttttgagatctatgtctccgattccactaatgtgcaccattgaatccttgtctcctacttgagatgtgatgagtccatacaatgtccaagccacaggtgttgcccagtagtaccatctccaccatataggtatttgctgcatttttaatcaaaacaaaaacctaaagttaagctcttaaaacacttttgttgatattatcaaagtgtaagttgcttaatttaccggtctggggatgaggaaaccggagaagaggttccaaagactgaggaagaaggacatgcagattccggcaatctgatagtttggtgtcaaggccataagcatcataccgtatagcgtaaagtagatgaagcttgttaacatgtagtagtagaaccacaagaatttggccatagtccagttacatccgatcattgaatatagaatcagcgtgtaaactccggtttgtatcgtgttgtacatgatttccactgctacctacaccattttagatacatttttggttagttctgattgtggcttaaccatattttaggaaagaatcatataacaagtaaatacaaaattatgagaatggttttaacctgcgaaattgcatatggaa

SEQ ID NO: 4210 - DNA, 5188 bp, Arabidopsis thaliana landsberg
  unsure (1)..(5188): unsure at all n locations
cgactctggagcatgagcctctcgctctgcacgcgtcggcgcggattacgcggccgaccgttggcctggctgaccattggctcaccgggtagtccggtgcaccaccggacagtctggtgatttatagccgtatgccgccgggaaacccgagagcagccagttcgccagagccagcctggcgcaccggacacttgttcggtgcaccaccggacagtccggtgctcccagactgaactgtctttggctgaacaaagccatctcttttccaaattgatttctcctgtttccagtacttagacacaatacattagtccttaaaacaaagtactaagtcttagaaacatacctttatgttgattttcactttgtccatcatttggcatagattaacacatgaccacttgtgttggcactcaatcaccaaaatacttagaaatggcccaaaggcacatttccctttcaatctccccctttttggtgatttatgccaacacaacaaaagcaatacaaagatgtgcaacatcaatgcaaataagaacacagatttgatttgaatcaaatttggcatatttggatcattctttgccaccacttggttttgtttttgcaaatcaacctcaatttcctatctctaagtcaaacacacttgttgagacataaagagagttgtccaagataaattgatcaaagatttcaataacttcccctttttcccataatcaaccattctccccacaagaggccaacttttgacaagagagacaataagagagttttgcaaaccaaaagctctattctactattttcaaaattctcaagtggtagctgatccatttattgctttggccttaatttctccccctttagcatcaagcaccaaaccgagatcatttttggccctagaaccccattgcctcaccaaaatcttcaattaagagtaaaaaggcaataagagcatggagatgaacttggaataagttaccctctcatcggagtgcagtggaagtcttgcatggtccaagtccaccatttccctttcaaacctcctttgagactaattaggaaaactcaagcacatggttagtctcaaagggtcaagttgtagcacatctccccctaaatatgtgcatcactcacacatggacttttgaggtccggggagtgtttgtacaacttgaacaccataaataaacaacaatatgcataaaagaacatgatcaaaggcataaaacacatgtatgctataaatcaatccaagttatgcgaatctaagacatttagctcactacgcagccggcaaaaggtcttctcatctaaaggcttggtaaagatatcggctagctggttttcggtgctaacataaaacacttcgatatctcccttttgctggtggtctctcaaaaagtgatgtcggatgtctatgtgcttagtgcggctgtgttcaataggattatctgccatgtggattgcactctcattgtcacataggagtgggactttgctcagattgtagccaaagtcccggagggtttgcctcatccaaagtagttgcgcnnnnnnnnnnnnnnnnnnnnnatactcggcctcagcggtggatagggcaacggaggtttgtttcttagagttccacgacaccagggaccttcctaagaattggcacgtccccgatgtactcttcctatcgaccttacatccagcatagtcggagtctgagtatccaaccaagtcaaaggtagacccctttggataccagagcccgaagcaaggcgtagcaaccaaatatctaagaattcgcttcaccgccactaagtgacactccttaggatcggattgaaatctagcacacatgcatacgctaagcataatatccggtctactagcacataaataaagtaaagaccctatcattgaccggtatgctttttgatcaacggacttacctcctttgttgaggtcggtgtgtccgtcggtccccatcggagtctttgcgggcttggcgtccttcatcccaaaccgctttagcagatcttgcgtgtacttcgtttgggagatgaaggtgccgtccttgagttgcttcacttggaacccaaggaagtagttcaactcgcccatcattgacatctcgaatttctgcgtcatcaccctgctaaactcttcacaagacttttggttagtagaaccaaatattatgtcatcgacataaatttggcacacaaacaaatcaccatcacatgtcttagtaaaaagagttggatcggctttcccaaccttgaaagcattagcaattaagaaatctctaaggcattcataccatgctcttggggcttgcttaagtccatagagcgccttagagagcttacacacgtggtcggggtaccgttcatcctcgaagccagggggttgctccacgtacacctcctccttgattggcccgttgaggaaggcgctcttcacatccatttggaacaacctgaaagaatggtgagcggcatatgctagcaaaatacgaatggactctagcctagccacaggagcaaaagtctcctcaaagtccaaacctgcgacttgggcataaccttttgccacaagtcgtgccttgttccttgtcaccaccccgtgctcgtcttgtttgttgcggaacacccacttggttcccacaacattttgcttgggacgaggcaccagtgtccaaacttcatttcttttgaagttgttgagctcctcctgcatggccaacacccagtccggatctagcaaggcctcttctaccctgaaaggctcaatagaagagacaaaagagtaatgctcacaaaaattaactaatcgagaccgagtagttactcccttgctaatgtcacccaaaatctggtcgacgggatgatccctttgaatcatagctcggacttgagttggagcggcttgaggtgcttcttcctccatagcgtgatcatcttgtgctcccccttgatcatacgcctccttttgatgaacctgttcatcttcttgagttggagggatgcatcattatcgaggaagaaggttgatcttgctccaattgttcctgtggtcgcacatcaccaatcgccatggtgcgcatagcggccgttggaacgtcttcatctacatcatcaagatcaacaacttgctctcttggagagccattagtctcatcaaatacaacatcgctagagacttcaaccaaacccgatgatttgttgaagactctatacgcctttgtatttgagtcataacctaacaaaaacccttctacagctttgggagcaaacttagaatttctacccttcttcactagaatgtagcacttgctcccaaatacacgaaagtaagatacattgggtttgttaccggttagtagctcatacgaagtcttcttgaggaggcgatgaaggtagaccctgttgatggcgtggcaagccgtgttcacggcttccgaccaaaaacgctcgggggtcttgaattctccaagcatcgtcctcgccatatcgattagcgtcctgttcttcctctctaccacaccattttgctgtggtgtgtagggagcggagaactcgtgcttgatcccttcctcctcaaggaactcctccacttgaaggttcttgaactcggacccgttgtcgctccttatcttcttcaccttgagctcaaactcattttgagctctcctgaggaagcgcttgagggtcccttgggtttcagacttatcctgcaaaaagaacacccaagtgaagcgggaaaagtcatcaacaataactagaccatacttactccctcctatgctcagataggcgacaggtccgaagaggtccatatgcagcagctccaggggtcttgaagtggtcatcacattcttgctgtgatgcgctcctcccacctgtttccctgcttgacaagctgcacaaggtctatctttttcgaattgaacattggttagacctatcacgtgttctccctttagaagcttgtgaaggttcttcatccccacatgtgctaagcggcgatgccacagccagcccatgcaagtcttagctattaagcatgcatctagaccggcctcttcttttgcaaaatcaactaaataaagtttgccgtctaatacacccttaaaagctagtgaaccatcacttcttctaaagacagacacatctacatttgtaaatagacagttatatcccatattgcacaattgactaacagatagtaaattatatcctagtgactctactaaaaacacattagagatagagtgctcattagaaattgcaattttacctaacccttttaccttgccttgattcccatcaccgaatacaattgaatcttgggaatccttattcttgacgtaggaggtgaacatcttcttctcccccgtcatatggtttgtgatccgctatcaataatccagcttgaacccccggatgcataaacctgcaaggcaaatttaggcttgggacttaggtacccaactcatgttgggtcctacaaggttagcacaaatattcttagggacccaaatgcaagttttatctcccttgcatcttgcccctaacttcctagcaacaattttcttatcctttctacaaatagcaaaggaagcatttagagcacaataaattgtagaaggtcattcactactttcctaggagcataaataacattctttctaggcatagcatttttcctagacatatttctaccatgcatataggaagaactagaagcaaacatggcatgagagttaaaatcatcatatgcattataactcctatacgcatatctagtttgtcttctatcatgatataaaaaggcatggttccttttagcactagtagccataggggccttccctttctccttagtgggaatgggagccttatggcttgttaagttcttggcttccctcttgaagccaagcccatccttaattgaggggtgtctaccaaccgtgtaggcatccctagcaaattttagtttctcaaattcattcttgctagtcttaagttgggcattaagactagccaaatcctcagttaatttggaaattgaaactaaatgattactacaagcatcaacatcgaaatctttacacctagtgcaaatctcaacatgttctacacaagacttagatttattagctacttctagtttagcattcaaatcatcattaatg

SEQ ID NO: 4211 - DNA, 686 bp, Arabidopsis thaliana landsberg
gttccatataactttactatgttaccagaaacaactccaatgttaacattcaggtttgcttgcatggaaatcgatacaactgtgtagcttatgaaaacaatagatgggtcagatatcttcgttctgagatagaggtataaagcttttagtcttttagacatttttgtatgtggaattgtgacttctttacctgagtgaggctatgtcgcttctccaggttattggagactgggagaatgttgtcagcatttgtttaaagaatatccgtccacagattctgtttttcgaaaacgtaaggccctttcgactgcgtacttgctcatgttttgcttttattatgtgtgttttctctcaattccacctactttgaattgcaggttatgcaaagggagcaataaatagaaaagctttttcaatggcataggaatcagattgatgtatagacataaaagtgcttgagtctgaagtcaaaaactttataggaatcagattgatgccttgttggtgttacactattgtggacagattttgtatatgttttagcccaaattcactatccggattgttatgctcagtgaacacttgtgtgtagataaaacacagctctgtctcttaagtttcagaagtaatagaccattttgtgatgctcattgaacacttgtgtgtagataaaacatagctctggc

SEQ ID NO: 4212 - DNA, 490 bp, Arabidopsis thaliana landsberg
ggctccgcggggtcctgatcgcggcggcggacctgtttttcgtcgggtcggcggagcggatcgccggctgggtcggccgggtgctgacagcggtagccgccggtccggggatccggccgcacgcggtgccggtgctgaccgcggatgagcgcgcgcgggtcgtggcgggatggaatgacacggcggcggagatgccagccgggacgacggcgcaactggtcgcggcgcgggccgcccggaccccggacgcgctggcggtggcctgcggggatgagcacctgtcgtacgccgggctcgaggcgcgggcggggcggctggccgccgcgctggagtcccgcggggcggtcccggagcaggtggtggcggtgctggcggaccgcacggccgggctggcggcggtggtcctggcggtgctgcggaccggggcggcctacctgccggtggacctcggcctgccgacggagcggatcgggttcatgctggccgacgc

SEQ ID NO: 4213 - DNA, 963 bp, Arabidopsis thaliana landsberg
ttgtgctctcagtcacaacatactagcttgtcttttacaaaaatgtctataaagctttacctctatctcagaacaaaaatgtctgacccatctattgttttcataagctacacagttgtatagatttccatgcgaccaaacctgaatattcaacattggtaaacatagtaaacttaaacggaactgaaacaaattaaaaatcaaatacttggacccttaccattgagacaagacggtatttggtaaatgcactgtcacctacatatctatatatagcactaatatctatttcagtcgccagaacagaagctgtatcgaatatctcttttgtggtctcattgttctcccactgaagtgctataaaaaataagagaaaacaagctcaaaactactgcattatgttgttaaagctactaaccaattaacaatccaaagcttaccaactataaaagcagatggaaggttacttatcatagtatcaacatagtttcgtttcccacatccttccttgtcacaaagcatctttacattgatcatgatggccttaatgatattctcaaatgtaaactccttgaatgcagactgtgattacccaaaaacgttcaaagacttaaagactctctctttcacatcaaagataagagaaaagagaaatgacttgccttgtatactctgagtgaattagcattgatgatgataccataagacgtttcacctgaatatgccatatccgtcttgcacctaatgcaaatcgttttcgctacttcattcacttcaaagtgatagttccagcgagggataagctccaagatgtttagaaacagtttagaaacaccgtttgcttcctgaaaaacatataaagcgtgagaaagaagtaatcaacatacataagacacaaagggtttaaagatcagagcagagaccagaggatgagcgagactgagattgttgagcatgaaaata

SEQ ID NO: 4214 - DNA, 1192 bp, Arabidopsis thaliana landsberg
gtcacatttatctttttttgccattaccacatctccggcctccattttctccaatacaccatccgttggcatatttatgttctttcacttacaagactttggcaccctctcttgtttcttaggctttgcttgttttattcgatgcatttggaatataaaaaaaacaatcatttcaaacgaaaatgagaaagaaaaactaatcatgagtgaaaatgaaactataaaatgacacacatctctttaacttaaaaggatataaatattgatttagtcaaaaagatatagagaaattcgggtctgtggctcaattgtgaaaatttgtcactgaaagtttaattatcatactctacgttgatcataacttggttacccacacggttcaacagagtactagaacagaaatgttttcaaatgttactgaccactacatcaaacgaaatgctaatagcgatgtgtttggaaactggtatctaactatatacattgatcaatgaacataacaatcagtcaggatgctgaatttgggctaagaaataacactcgaggcttgagatccctgcgcggaaaacatatgttccctctgcatagtaatgcaatccaagaaggtggaattgagaacacacacacacacataagaaaagaaaaaacataaccatgtatgcagttataggagcttacattttcaaaaaacagaatctcaggtcgaatatgcagttctcgaaaaatgctgagaacaccatcccagtctccaataacctggacaacaaaaaaatacatcactcagtcacagatcaaataacttgcttatctcttaccaaaatgtctagaagctttacctttttctgagaacgaacatgtctgacccatctattgtcttcataagctacgcagttgtatcgatctccatccgagcaaacctgaagatattaacatatgagttgtttctggtaacataatcttcaatatgaaacccaaatggaactgaaacgaactagttacttggcccttaccattgagacaagacagtatttggtaaatgcactatcaccttcgtattggtatatcacactaacatcaatctcagtctccagaacagaagttgtatcaaatatctctccttcagtctcattgtgttcccactcaagcgctaggaaatacaagaaaaaaaaaagacaaaatcaatagcctgaga

SEQ ID NO: 4215 - DNA, 526 bp, Arabidopsis thaliana landsberg
ctcttgttcgagttcataaccaaccttaactacaaaacaagaaatgtatgtaaaggagtatgacatttgacatcacaagttaagaacgtctattgaaaatgtcatcagctcctaatttatcccatgagaaatcgtaacatcaatagtttttgacttacgccatcctttaaggtgattggatccacgcgggtctagaacctgcaggttcactcgcacgaaaatcagctcacccttggataaagtttccccgtcagctaaatgcaaatgctgggataacttgtcatatgcctcagagtccccctttggatacaactttagagtcctttgaaacataagtacataaccatccacttgttagcaagttaccactattgcacacatacaacaatatctatcagaacaaaaaaaactcaccaatctttttctcccatgtgaaaggttttggatacgcaatcattctgttctaggagagcgaaatcactaatactccaagagaatttgtaaaagggagaacttcaccaaaaag

SEQ ID NO: 4216 - DNA, 463 bp, Arabidopsis thaliana landsberg
ttctcctgctagctcctgatttcttctctcctgttttttatttgattgaaacaatttctgggttatggtattttgtagtttacattgatcattgatcaatgagattaaagttttggatttttataatgttctttcctcttttatgatcctattgttgaaggagcttgaaggacaatgattcatctaaaggtttactcggttctgagtactctcgcgacattggttgtgatatatcatgcttctagtagccgaggtcaattttacccagcgactgtgtatctatcaacgtctaacatcaatttggtagttcttttgaacatggcgtttggtattaatgttgagtttatggaatcttgtcaaaattgtgtttttgggttctcttagagaagctgaagttgagcgtttgaatgaccaagcttggagagagcttatggagattctctttgctattactattgttaga

SEQ ID NO: 4217 - DNA, 855 bp, Arabidopsis thaliana landsberg
  unsure (1)..(855): unsure at all n locations
catgtctactactctaaagtctaggactactctgtgttatgcgtaaaattgaatgtgaagttaacgctctatctatgtatttatctaccatgcatgtctgactattgtatgtctgtatgacttttcatgcgtttattaatgatctttagttatttaatttttgcttttggtatatcattgtttttggttgattaaagttcatgaaatcttgttatgattgaacttttgcatttttcatctattaaggtaacaccaatgctataggacatattagagtgaattagagattcacttaaaaatcaaatgctacaggacatattagaagggtcaaaataaaaatttctatacaaaagactcgaatgggtttctatcgagtatttttcggatatgatcttcgggtcgtgttttttcaaggcctaaagcattttcgtcgatggtgaagaaccccctagacaaagaaatagttgannnnnnnnnnnnnnnnnnnnnnnnnnnncaaattaactcgtgattgatatgtctaactcttctacacgtgtctttgtccaaaaaacaaaactcttatacacgtgtcgttatatcattggttgcgcttacgcagacgaatttctaagagagcttttcttcttcctcctccctcttcgttcgtgatttctcatttccttaacggaaagcttaaggctttaatcattatatctcttcttcaacctatacacgactctgaattatcatcttctcctgctagctcctgatttcttctctcctgtagttatttgattgaaacaatttctgggttatggattttgtagtttacattgatcattgatcaatgagattaaagttttggatttttat

SEQ ID NO: 4218 - DNA, 1462 bp, Arabidopsis thaliana landsberg
tctttatgtagcaccaatttttcataatccaaatatttaaacgatcgttgaatcatattttggattcctatagtgagatctgaagagagaaattgattggatcatttggtgattcctgttacattttgagatgtaattgtcattttggatcagttatttgattttatcatgatttgttctgattttgtaagctttatttggcgattgatttgtaattttgtgtgtagatcatgtttaagtgtgtttctgatattgtgcaggacaaatcggatatgctcttgttcctatgattgcaagggggataatgcttggtgctgatcagcctgtgatccccacatgcttgatatcccttttgcagcagaagctttgaacggtgtgaagatggaattggtcgatgctgctttccctcttctaaagggtaagtttttattctagtatatatttttactgttctcgtattggaatatggtatgttgcttgaggctgaaatgtgatgttggcgtttttcctgtggcaggtgtggtggctacaactgatgccgttgaagcgtgtaccggtgttaatgttgctgtcatggttggtggtttcccgaggaaggaaggaatggagaggaaggatgttatgtccaagaacgttttcatttacaagtctcaagcttctgccttggagaagcatgctgcaccaaactgcaaggtgataagtcttttcgaatcgttcttatgatcattatgcagaaatgaagcaagttaatctcttattttgttgtatgggatatttcatatttgctatctcttcgtggtgtaggttcgtggttgttgcaaaccctgcaaacaccaatgcattgatcctgaaggaatttgcaccatcgatcccagagaagaacattacttgcttgaccaggcttgaccacaacagggcattgggacaagtgtctgagaggttaagcgtaccagtgtctgatgtgaagaacgtgattatctggggaaaccactcatcaacccaatacccagatgtcaaccacgctaccgttaagacttccgctggagagaatccagtgcgtgagctagtcaagaatgacgagtggtaaaaatctctaaaacacccttttaatatctcaatctagtttcgtgaatgtgatgctcatgtatgttagcaactaatgttgtaggttgaatggagagttcatctctaccgttcaacaacgtggtgctgccattatcaaggccaggaagctgtctagtgcactttctgcagctagctcagcttgtgaccatatccgtgattgggttgttggaacacctgaggttcggcattactactgttttatctcgaatcaattggttgctttgtgtactaagtaaaactaatatgttcttcgacttgatttctcagggcacatttgtttcaatgggagtatactcagatggatcctacaatgttccagctggacttatctactcct

SEQ ID NO: 4219 - DNA, 467 bp, Arabidopsis thaliana landsberg
tccgagctttgcgaagacgcagtttggtaaagcggcgagacagtttattatgatgtctcaatcgagggtttctttgatgagcgtaaaactccatggagacggtaacgaggacgagttggccgatccatatatatatgaagggtataggtaagcttacaagcctaaacaatttagatcaagtggagatatcaaaagtgtttcactgcaacggcttactcttgtgcctgaccaaggacaagactaggctcactagcctcgtggtatggaacccgtatttgggacaaaccaggtggatcaaacccagacacgctttccacagattagacgtgtatgctctaggttacgacaaaaacttgaaaaaccataaaattttgaggtttgtggatagatacgaacctgctgtgaagcattctattatagaacacgaaatttttgatttgaagtctaatgcatggagggttcttgat

SEQ ID NO: 4220 - DNA, 1186 bp, Arabidopsis thaliana landsberg
tcactctgttgtcttgcagtattcttccctgaagagtgtggagcaatgtttgactctcaccatggatattatattgaaaatggtgaagatagggatcctccattaggtgagtccctttgattttctgcttttactttgctgcaacgattctgcaaaaattctcatagggccgtacaatctttcctggattgcaagaatattctgtgatacttaagctgcttagagaaaaccaaagtaaattctttagtagcaaacataaatattttgatcaaagtcctggtgatttttaagtgagtctatgttactgttagttgggaaaaagtatgaatgtctccatctttagacgtccggggaaaacagaaatgttacatgatggatgatggattaaagttcttatatatgtctgggaaaaacgtccggggcagaccacttgtgactatctttgtttgggcagtggatgcttctttttattattctcagtgactagtgcattaattatcttttaaatctgcaggctatcatttagatgattcggaaataacattgaatgtttgtgtgaggaaacaatttgagggaggggaaatatctttcataggcacacgatgcttgagacataagcgaacagacgtaaagccagaggtatgtgtgaccttttgatgagattttttgtcctattacatgccaatatttcgtatatggcaaaatgttaatgaaggaaacaactatttctcactgaagcaggaagtttttcattactgtcattcaccgggtcaagctatacttcatcgtggccgccaccgccatggtcccagagccaacacaccatcttgttctcgggccaatatgattctttgttgcagaaagtaagcaatttttgaagcttgcctcaggatttcagatgacaattgaatcacattttactcttcttttccattgcagctctttgtttagagagatggaaaaatatgagaaagatttcccagagtggtgcaatgaatgcgcccatgaaaagaaagaaaaggaaagccagagtcttgctgccaaaagaaaggttattaaaaaaagaagacatgattatgcacaagtttataagatttttggtttgagcatggttatgaacctgcgggggtccttattgcaggggatgattcgaattgcgactggaggcaaagcatgatgaaacata

SEQ ID NO: 4221 - DNA, 1253 bp, Arabidopsis thaliana landsberg
gttttgcatgtattcttccctcaagtgtgtggaacaatgtttgacactcaacatggattcgttattgaaatttgtgaagatagggatgctgaattaggtgagtcccttttgattttctgatattacttgagaaaaccagagtgaattctttaatctggtgcagtgatcttttaaatctgcaggctttcatgtggaaaattcagacattacattgaatgtttgtttgagtaaacaaagtgagggaggggatatattattcacaggcacacgatgcaataaacatttgaaagcaggtccaaagccagaggtatgtgagtcctcttacgttcctatattcagtaaatggcaaaatggttagctaataaaggaaccaattatttctcactgaaacaggaaatttttgagtactggtatgaaccgggtcaagctatacttcaccttggctgccacagccatggtgcaaaagccgccataacatcttgtagtcgggccaatatgattctttggtgcataaagtaagcaatcatgaagcttgcctcaggatttcagatcacaactaaaacaccttttcttctgcatttccatttgcagctctttgttcagagagatgcaaacttatgacaacgaattccgagactggtgcggtcaatgcgcccgtgaaaagaaagaaaagaaaagccagagtcttgcttccaaaagaaaggttaagaaaagaaaaaaggacatgattttgctcaagtttataagatgttttgtttgagcatggttatgaacctgtgggggtccttattgcaggagatgattaggataatagagtaaagccgaagcccgctgaaaaaaatgaagtctatgctttgaattttgactctttacttggaaaataacactgagtatatgtagaatcatttgatgtaaataggtctttgtgtcttcgaatttcttacattactactatgtacatgaaagttaccagttacatgtttaggatcggctatatgtttacattttactcgccgtatcgaagcagtgttcagtgtcagctgaaaaagagtacatatagccggtccattcggttagactcatgaaaaccggtttagtaatcatatgtttacagtgtcagcttttttcttgaaatgtatgatttggttaacaggttttaaaattgtgaaccaattgtgcaattccgaacactagcgattcgaagtagagaaagtaacattgtaccaagctaaaccaacggcgatgaatgctag

SEQ ID NO: 4222 - DNA, 2646 bp, Arabidopsis thaliana landsberg
  unsure (1)..(2646): unsure at all n locations
caacacttaccagaccatctgtgaggaaagaaagtccaaccttctctgcttataatacaataattccccaatgctatcaaacctatcacaaagccttgagtaaaatcgattctcttaagatgttatctctacgagtcctactcccacttccttcgatttccggcgatatcaagccggagatttagagcggcgatggcggttaagtagagatagctttctctctttctcgccaaaattcgaggaaannnnnnnnnnnnnnnnnnnnnnnnnnnnnnccaaatcggatgtttcgtttacggcggcggaggaagaagaaactctgccggaagagctacatgcagagctgatgccgaaacatgtggcgattataatggacggaaacggaagatgggcgaagaatcgtggtcttcaaccttgggatggtcacagagctggcgttgaagctttgaaagagatcgttgagctttgtggtaaatggggaattcaagtccttacagttttcgctttctctactgataattggattagaccaagagtgagtgacaaacctaatttttaaattttagggtttcttttcgaaatctcagattttgatgcgattatgagtttattcctctgcagattgagattgatttcttgtttagtttatttgagagatcactcaaaacagaatttcagaacttagccaagtaagtattgcgtataatttgtaatcaagaagtgtttgtgattgattaattatgtctcaaaagctaatcttttatatgtaggaacaatgttcggatatcgatcattggagattcctcgaaacttccgaaatctcttttaagagtgattaacgaagttgaggaagttacaaagaacaacacgaggcttcagctaatcgtagcggttggttacagtgggaaatacgatgttttacaagcgtgtagaggtatcgcgaggagagtgaaagatggcgaaatcgaagttgaggagatagacgagagactgattgaggaagaattggagacgaattgtactgagtttccttacccggatttacttataagaacgagtggtgagcttagagtgagtaacttcttgttgtggcaattggcttatacagagcttttctttgctcaagaactttggcctgattttgggagaagcggttttatcgaagctttgatgtcgtttcagcagagacaacgacgctttggtggtcgtaaatcttgattttcttgcaaatggtgtaatgaaaactgaatatgatgtgtaatatacctcaagaactatgcttttgagatagtacagttccttgtgttgcaagatatttgttttagtgataagtaacgacaaagtaaccgctgatttttattagcaaattttcaatttaccgacataaagttacaacagcataatgatctctgactgtggaacaagtagtttgatagaaatctcagatgaacataacagaacagagcggagcagaggatcaaacccgacagccaaatcgtctttcccggcgctgatacgaaaccagggcctctagaagcttatccttatcgaaatcaggccaaaggaccggcgagaagaagagctctgtataagcaagttgccacaagaagaagttactaatcctctgttctccacttgtcctaatcaatagatcaggacttgggaactcagtacaatttgtcagaagctctctttcgatcaatgcctcgtctacatcttcctctcggatcaaccctttttctgatttcttcacaatactcttgcaagctcgcaagatgtctaatctcccgctgtaatctattgccaatatgagatgcttcttcttatagcttctcgtagcttcctctatctcttgtactgttcggaggagagactcagggatcttcgttaggttcccgataacagaaactcgagtttcctctctgaaacaacaagattttggtaatccatgagcagatcatttgtcaacaaaaaacctcaattgagttgtactttatacctttggaaatattggatcttggacttgaggtaatgttggatcaaagacatcaagcacttaacctcaatcttattaataccaacaaatcgttagagtcaagagttgagtgagaatgtaagctacatagtctaaaatatcacaccttgtgtcttccccaattctctgtggagaaagcaaaagctgaaactgtatgaatccccaatttaaagcaaaactcggagaactctataagccgtttagctccggcctcgtggccttgagacgtcagcaatccggcccgtttggcccatctccggtttccgtccattatcactgccacatgtcttggcatcagctctctttgtagctcctccactcctacaacataagttccctcgtcactacacaaacacaaaactaaagctacattaggaacgatctatcattgaaactgtgaatcttaggcgcagatagtctatttgacaattttggaaacattgccaaaatcttctactaagcaaacaagttatagaattggtcacgctcgttttctttaccgtttatatgaaacagaggaaactttcgttttttttttttgaacttcaaaacagaggaagtctaacaattaatttctctggctttagtagatgattatcattcaatgaaat

SEQ ID NO: 4223 - DNA, 846 bp, Arabidopsis thaliana landsberg
tggggtccctttttcttctgctcctcgctgaactcattttcggtaaaaatctcacgacccgacaaaaagaagagagtacgaatcaaacagttttgtttctttttgggtttgatacgacgcagcggacacaaactaaagccggttaggtcgatgaccggtttaattatttacgcggataaaaacacttttactcccatttagatttaccattatacccctccagatcttgtaatatgttcctgtaataatctgagggtatattggtatataactaactatctcgtggcgggagaggttaagacgtggcgaattaccggccggaagcaccattcacgtggctctcacgagcaattctagtattgggcctttttattcagataagtaatgggctatggcccaattttcatttatcccatatttaaatttgacttacaaacaacattaattgaggttctttgctggtatgttgacaaacaacattagttgaagttctaggaggaggttttaatgcatttattttctttaagaaaaggaaaattaggagacgtggacgaataggaactcgtataaaccacacaaaaaaaagaaataaaaagacaggagcttggaatttcttaacgataaagtttgtttgtggcgctcaatttcgaaaacaacatgtcaacatcatcttcttccacaccgacaaaacacgtcgtcgttttcaaacacttaccagaaccatctgtggaggaaagaaagttccaaccttctctgcttataatacaataattccccaatgctatcaaacctatcacaaagccttgagtaaaatcgattctcttaagatgttatctctacgagttc

SEQ ID NO: 4224 - DNA, 627 bp, Arabidopsis thaliana landsberg
gattgaagtcaaatgcttgatgtatttgttccaacgttacctcaagtcaaagatcctttttttttttaggtatatataaatgagtgagcttattcgatatagtagagcttctcaatagctcagtttgttaccaagaatcttgtttgtttcagcaaggaaatccgagtttctgttatcgggaatcttgcgaagatccctgagtctctcctccgaacagttcacgagttagaggaagctacaaagagttacaagaagaagcatctcatcttggccatagattacagcgggagattcgacatcttgggtgcttgcaagagcattgtgaagaaatcacaacaaggtttgatccgagaggaagacgtggacgagacgttgttcgagagagagcttcagactaagtgtaccgagttcccaagtcctgatctcttgattaggacaagtggggaacagaggattagtaacttcttcttgtggcaactcgcttataccgagcttttcttttcgcctgtgctttggcctgactttgattagcacaagtttatagaggccctgttttcgtatgagcgcaaggatagacgatttgtctcccggctttgatccacattagaccctatgaactgtcatgtt

SEQ ID NO: 4225 - DNA, 6865 bp, Arabidopsis thaliana landsberg
acaacagctatttgtgcagctacggatgatcttacagcgtcctcaggttcgcttcgattcgattttagagcaataaaagctgcaacaagtaattttcataagagtaacaagcttggtcatggtggatttggtgcagtttacaaggcatgatgttcttaaattttctcaactacttgattgtattataaactcagatgctaattctgatagtaaaggtcatgcgaatgagcagggtatgtttccgaatggaacagaagttgctgccaagagactatctaaaccatcagatcaaggtgagccagagttcaagaacgaggtgcttcttgtagcaagacttcagcataaaaatcttgttaggcttctcggtttttcgctacaaggagaagagaagttactcgtctatgagtttgtttcaaacaaaagcctcgattatttcctctttggtatgtaatatttaactaaaaacagtttcctctttggtatgtaagttttaactcatacatgtataagtatgcagatcctacgaagagaaatcagttggactggacaatgcgacgcaatatcatcggtggcattactcgagggattttatatcttcatcaagattcgcggctgaagatcatacatcgtgacctcaaagcgagtaacattctcttagatgcggatatgaatccgaaaatcgctgatttcggaatggcaaggatctttggagtggaccaaactgttgccaatacaggaagagtggttggaaccttgtaagtatcatcttaaaatggactttgatgatttttgatcattagtttaagagaccttttttgacttccagtttataacctctattttgcagtggttacatgtctcctgagtatgtgacacatggccaattctcaatgaaatcagacgtctatagttttggagtattgattcttgagatcattagtggcaaaaagaatagcagcttctatcagatggatggcttagttaacaatttagtcacatatgtgagtaattctaaactaataaagtttgattgattcttataaaacagtaatcatagttctaaacatatatattttacaggtctggaaactttgggagaacaaaacaatgcatgagctcatagatccctttattaaagaagattgtaaaagcgatgaagtcattagatacgttcatattgggctgttatgtgttcaagaaaatcctgcagatcgaccaacaatgtctacgattcaccaaatgctcacaaacagctcaatcactctgcctgtgcctctgcctcctggatttttctttaggaacggaccaggatcgaacccgggtcagtcgaacagcaagtcttttgcttgttctgtagatgaagcatcaatcacggacgttaatcctcgttgaaatatctagcatgttctgtttttgttttttgatgtttccatatagaaataagttttataggggtcacaataaaaaaaataaagggtttgaacataaatttgtaagtttaagggggttaaattaggagaaaaataaacaatattataaaatttaaagggctaaaacacaaatttagaaattttcacttggtgactgcgtgtagatgacgattcactttcagtgggaattatggttacgaccatcgtcatcgtcttgctgcttctttctctgcgttttctttttagcggaggagaaaatcgtaccgagaaattgatattcaatgtgagttttgttgttccatgtggttatgattcatcttccaaattaaagagtctttcattcataatcagggaaatttagggtttgataatgattgtaagggttttgagaacccttgttcacttttacagatagtccccacttgtcgtcaaacaatcttatgctcactagcaatatcctgaatttacacgttcctcaaccatcaagaacagatggcctcgagtcatagccaaatctaaggtcaggtccaaagcctttggagtacttgtgtcgtgtgtgagttactgaattctcttacactaatcttttactgaaattagacgaattttatatgaatgtaattcaaaaccgattgttttactaaaccggaaatttaagcttttgactgatggttccttctctcgttccgagtcacattttgaaaaatgctttgttttcgctcaactacgtttaggatattagagttaacattttgtttgctaattgctactttcgctgcgctgtaaccgggcagcttgctctgctttaccctaccaattgactacttttccatggaccattttccttttttgctatcttgtgtcatttagtctaaaatgttttggcttatctcatcgtccaaatgtgcattatctctgcctagaagatgctataatgtgttcttctggttctgggggtcacatggttcatcttataattgcaactataacattactttttgtctattctcacgtaccaatttgtttacacacttgactcaaccaaaaaaattgcaagataggcaatgacttggacttggataccaacgggtcaaggacgttaggacgcttgcaatgaaaatttagttgacacaaacgtgtttaatggacaaaaacatatgcatatattcatacatgcttacttacttgctctcctaaacccaaacaaaatctctatgatattcataatgaaactgaagaatctcttgccaatcttctggtttttccttgtaagcttctctatttcatctgcacaaaaatgcggaaaaactggtttatttaaacccaacgataagtatgatataaaccgtcacctcctcctttcttctctagcttctaatgtctcagctcgaggcggcttctacaatgcttcgattggacaaggacctgatcggttgtatgcttctgggacgtgtatccaaggttctgaaccagagctttgctcagcttgtatcgactctgcttttattagggtgataaagaaatgtcacaaccaaacagaagccctcgactggtcctcctttaacgaggagtatccttgtatgatacgttactccaaccgttcgttttttggattacttgagatgacaccatttttcaagaattacaatgctacagatttccaagtcaacttgacagagttttatcaaaaatgggaggctttgatgcttggtgtgatagctgatgctatctcgtcgccaaacccaaaattctatggtgccggcactggaaaaattgggattcaaaccgtttacgctttcgtgctatgcagtaaggatatatctccatggaactgttccagatgtttaagagggaatgtggataactataagttgtcctgcagtgggaaacctcgtggccatagtttcagcccgagctgttatatgcgatgggatctctatcaattctatggatttattgagtatagggcttctcccacgcttcctcgtgaaaaaggtagaatctcagaactatctgacggtactagctttttagtctcatattttcccttaagcgcaataatcgtaggtgatttggccttgttcagatggcggaaagatttctacaagaaatatcctcggaatcactgttgctcttgccttttttatcacggtactgcttgttctagggtatgctctttctaggaggagaaaagcctaccaagagtttgcaactgaaagtgagttttttttttttgttttaacaattatgagttcagggcataaacgtttttaaatatgtcaattcagttgtctctttctctgttcttcaacgatggttatatttctcttgcagggaggtcaatgaccacttatggtactgcaccgccagatgatggtaagagactatacagctatttgcattaaaactgttaatgtccctttggatacgtttccaccataacactatgtatatatgctttctgctgcagatgatattacaacttcaggttcacttcaattcgattttaaagcaattgaagctgcaacaaataattttcagaagagtaacaagcttggtcatggtggatttggtgaagtttttaaggcaaaatgttcttaaactttctcaactactagtttgtgttataaacttagttgccaaaaaaaaaagataagaaattctgatagtgagtgaagatcatatgaattgacagggaacttttccgaatggaacagaagttgctgtgaagaggctgtctaaaatttcaggtcaaggtgaagaagagtttaagaacgaggtgcttcttgtagcaaagcttcaacatagaaatctcgttagacttctggggtatgctgtcaaaggagacgaaaagatattagtctacgagtttttgcctaacaaaagtctcgaccacttcctttttggtaagaaaagaaacagatgatagggttatattctctgaaaccttagttcttgatctcatagtctaattgcttaatacatgggatttttgcagacccggtaaagaagggtcaactagattggacaagaagatacaacattattaatggaattactcgagggattgtgtatcttcatcaagattcacggcttacaatcatacaccgtgacctcaaagcgggtaacattctcttagatgccgatatgaacccgaaaatcgtggattttggtgtggctaggaattttagagtggaccaaactgaagctaccacagcaagagtagttggaacaatgtaagtaattttccattttagttatataatctgtttgtacttattgttgttgataaaagttgaaactggtatgcgttgtatttttcagcggttacatgccacccgaatatgtgacgaatgggcagttctcgacgaaatctgatgtgtatagctttggagtattgattctggagattattggtgggaaaaagaatagtagcatcaacgagacagacggctcaataagtaacttagtcacatatgttagtatatttccaatgccatctcaaacttttctacttctcttagcaaaatgatcatagctctcaacatttaaattagtttcttgataaatgacttgaataggtatggaggctttggaacaatgaaccattgttggaactggtagacgcacccatgggggagaattatgatagaaatgaagtcattagatgcattcacattggattgttatgtgttcaagaaaatcctgctgatcgtccaacgatgtctacagtctttcatatgctcacaaatacttcaattactctacatgtgcctcaaccaccaggatttgtctttagggtcagattcaagccaaatcccttagctgatagattgcagcgtggtccgtctactagcatgtctttttcttgttctgtatcggtcacgtgtgttagtcctcgttaaaagcgaggctaatgttgtatatgtagattctttcataaaccaattattgacaaaaatgaatagcttaatatcaattagtctggaaggataacctaaaggttttcacgtgtcccacgataattcaaatgagtgaagttactcgtgaatatatgtgcatggcctttcatgtagaaaatataacttgttatttagttgataagaaccagatttcctaaacatgcacacattatctgaaccaactaaaggaaaagaaacaggcaaagaagagctctgtaataatcctctgtttcgtattctaagcttcagtgccgtaatataaatatacttattttcaaaaagaaaagaaaatgaacattggaaacggtttgatttagacgaaatctttgtatatagtcacttttagtgaatagttttgtcttcaacgaggagcaacactagtaatggaagcatcatcgattgaacagagagcaagcctatccacagatgaacctacttctcctacttgttcatgcctaccccgaaagaaaaatccaggttgtttaggcacggcgagaacaatcgagctagtagtgagcatttggacgatcgctgacatgtttggacgatcatcaacatcttcctgaacacatagtaaagcgatatggatgcacctcgtaatatcatgtgtttgataattatctccaaatgacggatccacaaggtctaattgtgacccattgctccatagtctccaagtctattgaacattttaataatttattgttatagtcacttttaaataaagcaaaaaatgaaaatgaaagtcttaagctctatactcacatatgtaaccaagttgctaacactatcatccatttgatagagactactgttcttcatgccgcttataatctcaaatactaagacaccaaaactgtacacatctgatttcatggagaactggccgtacatagcatactcgggagccatgtaaccactgccacaatactaaaaatgttgagtccatagaagcataatacagtctatagagaggcaatacattttaagagaaaaacttactaggttcccacaactcttctcgtattggcttctgtttggtccatcccaaaaatcctcgccattccaaaatctgcaactttggggttcatatcagcgtccaagaggatgttgcccgctttgaggtcacgatgtatgattgtgagtcgtgaatcttgatgaagataaagaattcctctagcaattcctccaatgatcttgtaccgtcgtgtccagtctagctgtcgtttcatcgtagtgtctgcacatgcaaactgaaattgttagaaacaaagaatggcatgcaatttgaacaaactatcataggctaagtattgaatttaactgaccaaaaagaaagtaatcgaggcttttgttgtgcacaaactcgtagacaagaatcttctcttctccttccagacaataaccaagcagccttaccagatttctatgctgaagctttgccacaacaacagctgtcgttttcgaactctc

SEQ ID NO: 4226 - DNA, 2352 bp, Arabidopsis thaliana landsberg
taaggaaagagagggggttggcgcatcaggttttatgccagccacaccatcttaagcaatcaacggtcacttataaaatctcatattatattacaaccatcatatataaactaaattttttaatctaacggtccatgttactttagttaccattcctgcttttggtttgtcattggcaagttaaaagtgaattgtgctaaaataggtgaaaacttggtaaaaagtgagtttacttataaaaaaatgtgacaaatggaagaaatattgaaaaaaccaaaaaaagatgtggccaagggtcccttatttaaatcctatatacaatttggatctaagtaatatttttttctgaatgtgcatagaaaacaggtattgggatcaatttactgtaagtaaacgaaattctgtattatacagtctgtataaaatggggacttataaaatcaccttgccaattagacagtgacctcaacaagacaacaacaatgaagagaaccactagagttttggagctatattatttaaatcctggaataataatttgttgagaatttaattacaaagtaaacgatgacttacatataaaattcgtaaagtcttggtcaatcttaattataaagaacaagttggtcattgcttattataaaaaaaaaatgaaaatgcttgttgtcaagtaacattaactccattttttcttgcatttactcaacttcaccaaatcgtagagaagttggagaaataaatgatcagaaacacacatcaatcgcaaccaagcggtcaataaaatactaaatagacaaagaagaagtagctccagctcctccgccttggattatttttacaccggagaagcaaaaaagaaaagaagatggacatgaaagaagtgcctccacctcctccaccttctggattcaaacgatataagaaaaaaagaagcaaaaagatggacaacaaagaagtgcctccacctcctcctcctcctcctccacctgttctgcctcatatccgatcaagaaaaaagatggacatcaaagaagtgcatctacctcttccacgtcactatcctcctcctcctccgcctcttccgcctcctccgccttatggattcagacgacatcataaccaaagcggcaacgagcttgagaaacgaatagcacgtctaggctttccaactcttcgcccttttcaatccaaacgatatgataaccaaacccttccaaacccaagatgtcctctgtctaatccaacctacccccacacactcaatcctaagttcagcgtaaacactacaaatggttgttttacatgcggtgaaaacacatccccctggattgaccaccataatgtccatttcttctgcaagaggtgccatgtcgagttccactttggttgccacacgtaccctagtgagttaacacatccttatcacctccaacaccctcttattttcacatttcataactatcaaactggggtcatatcagacgccaggatagatgaatccttttgcactacagttttgtctggctccgatcctaagaagtctggctctatagataaatgttcatggtgtggaaaaaatatccaagggaattggttctatcgttgttctatatgcaaattttgtttggatctctcttgctcccaaactgatccacctctgctcgttgcaaacccaaagagtcatcaccattcactcgtattctatgctcgaccactcttgactccgtgtgatgcttgtgggtcggtcaatgtgttggatccaagttatgcttgctttcaatgtaactacatggtccatcaaagttgcatcgacttaccacgagtcataaagatcactcgtcaccagcatcgtctttttcatactccttacctccattccacgattccaccatgtcggatctgctacaaaccagttgacatcaagtacggtcagtattcttgcaaacacgaggatttctcttacgttgtccattccaaatgtgcaacacatgagaatgtatgggatgggaaagaactcgaagaggaaccagaaaaacccgacaacattgaagatatcgtcccatttgagaaggttagtaatgatatgatcaagcatttctctcatgaacatcatcttctgaagctagaaaagtatgaccgtgttcgagatgcagagaagcaatgccaagcatacatccttcctatcaactctcacgacttcttctataactgcatggaatgtgattttttcctccacgaggtatgtgctggtctacttagaaaactggatcatgcgttgcacgttcaccctcttgtaaaagacccttctcctcaacgacactataatcaaaatggttgtttgggttgttccag

SEQ ID NO: 4227 - DNA, 1532 bp, Arabidopsis thaliana landsberg
aaatttaaaataacaacgtaagttattcaacaatttttatcggatgtctcaaaataacaataacagtgacgagtcacataataaatgatttatcaccacgatgaaatataaggttacactgttattaaaaattctggatagaagatggatccaaaatttgtatatttctttgaatgtgaacagcctggctacagcctacacaggtcgtgggataaaaatttaatgagcatttattaaaagtaaacgaaaatataaaatagttgtgcagaaattttattggtctattattcaaaatccttgaactaaccttgatctaaaatcttagtatatcttatttatgatattgcactgcctggaaacaggtcttgggaataaaattagttattacaagtaaacattgaccgagtataaaatcgtatgtcttggtcattattaattaatgataaaaacagcaaactggccattgtctattaggaaatatggggattcttgtttattaatattattaactcccatttactaaactccgcgagaagtgggagagaaggatttaggagaaacatacattgatcataactaaaacagcaaaaagatggaaaaagaagaagtatctctacctcttggatacaatcaccaaagcagcagaaagatggacaaagaagaagtatctccacttcctccgcctcttcctcctcttggatttggacgatatcaaaccagaaaccacaaaaagatggacaaagaagaagtatctccacctcctccgcctcttccgctttttggatatggacgatatcaaaccagaaaccacaaaaagatggacaaagaaaaagttcctccacctccttcacctcatccacctcttcactcccttccatcaagcaaacctgaagtaaaacctcaccctcgtcctacaggaaacccaatatgtcctgtgtctcatccaagtcaacctcacaccctctctcttagatctggcagaaacaccaagtttgattgtttttcatgccgcaaacatatgtctcccttgacttaccataattaccattactactgcaagacgtgcgatatggagtttcaccatggttgtcacacgtttccaaggaagttaacacatccttatcacctccaacaccctcttactttcaccttcaggaacaatgaaaccggattcctatctgatggcaatatagatgtatccttttccactacactttcgtcctactccaacctgcctggatccaacaaatctgatcataacaagtttgaatctacggaatctgatcaatgcacatggtgtggaaaatatatccaaggcaattggttttatcattgtcctatatgcaacttttgtttggatctctcttgctcccaacaaagtgttccacttctcctcgtcgcgaaaccaaagagtcatcaccatccactcgtcttctacacgcgaccactcttgactccatgtgatgcgtgtgggttggtcaatgtgttggagcccagctatgcttgttttcagtgtaattacatggtgcatc

SEQ ID NO: 4228 - DNA, 529 bp, Arabidopsis thaliana landsberg
attcgtgttctttcgcatcccatacgttctcattcgttgcacatttcgaatgcactacataagagcaaacctcgtggtagcaagaatattggccgtagttggtgtcaactttttgatagcatacccggcatagtgaaatcttagattggaggcaaggtgtgtgaaaaagacgatgctggtgacgcgtgatctttatgactcgtggtaagttgatgcaactttgatggaccatgtaattacattgaaaacaagcatagcttggatccaacatattgaccaacccacaagcatcacatggagtcaagagtggtcgccggtagaagacgagtggatgctgatgactcttcgggttcgggacgaggagaagtggaatgttttgagagcaagatagatccaaacaaaagttgcatatagaacagcgataggaccaacttccttgtatactttttccacaccatgtgcaatgatcagattcggtagatcctaacttcttaggatcagacgtgttggagtcagagaaaactgtagt

SEQ ID NO: 4229 - DNA, 3807 bp, Arabidopsis thaliana landsberg
atgctgttttttctattggtgcggacagggcgccaggttttgatggattcacagcggctttctaccatcaattttgggatcttattgggggtgatatttgcaacatggtgaggcatttctttgaaacgggagagatagatcaaagaataaacaagacacaactctgcctcatccctaagataacggaaccaaaacatatgtcagatttcagaccaatcagcatttgtactgtgaattacaagattatctccaaggtccttattaagcggttgaagcagtgtttgggtttagttatttctgattctcaggctgcctttgttccgggtcgtaatatctccgacaacgttctggtcgctcatgagctgttacattcgctaaaatcaaggagaaattgtcaaagtgcttatatggctattaaacgagatattagcaaagcctatgaccgagttgaatggaacttcttggagaaagttatgcttcagttaggattcaatgctcgatgggtacaatggataatggagtgtgtcaaattagtttcatttgaggttctcattaatggatctccgtatggtagcatacatccaacgagaggacttcgtcagggtgatccgttgtcgccttatttacctttgttttgtgctgaagctctcagccatatgctccggaaagcagagagggatcgtttcatacatggtatgagattggcagacgggtgtccgtctatatcacatctgctttttgccgatgactccttgttcttttgtcgctccacaacatccaattgtgaaaacttggccctcatctttaaaaggtatgaagaagcttcagggcaaaagattaattatactaaatcctctgttatttttggtaccaaaatcacagcctcgaagaaacagagactccaaaggatcttaggcatcgagagagttggtggaggtggaaaatatctcggactaccataacagtttggacgaaaaaaagttgaactctttgactacattgtcaaacgggtcaaagaaagaactcatggatggtcttgcaaatatctctctccggcaggaaaggaaattttgatcaagtccgttgctttggcattaccggtgtcctcgatgaattgttttcttctaccatcaaccatctgaggtgagatcaacagtgttatatctaccttttggtggggcaaagataatggcaaaagaaagctaccttgggttgtttggaatcgtttatcgctaccaaaaagagagggtggactgggattcaaagatcttcagaaattcaacaaagcgctcctcgcgaaacaggcttggcgaatcctgaaaaatccctctagtctccttgctcgcttgtacaagacgttatactatcctacttccagttacttacaagccttgaacggttctgctgcctcctatggctggagatcaatccaagaaggtaaaactattctacaacaaggattacgagttcgaattggtaatggtgagatcacaaaaatttgggaagacccttggctgccatgtttaccaccgagacctgctcatgggccgattttggatgaagaaatgaccgtttcggatttgtggaaacccaacataagagaatgggatccaatagttttcgatggtgtgctaaatcccgaagatcaacaactagcaaagacgttgttcctttcaaaacatgcagaggaagatacatatgtctgggcatatactaaagatgcccaatacacggttcactctggatattgggtaaccacccatgtcgacgtacaagataatgagattatccaacccccacatggatccgtagagctgaagcaaaaaatctggaaattaaaggtcgtcccaaagatccagcatttcttatggcgatgtcttagtgatgctctatctactgctaccttattacggacaagaaatatcccagctgatccgacatgtcaaagatgctgccaagaggaggaaactgttaatcacatattatttacttgcacatatgcccagatggtgtggagatgtgttaatatcaactttggttctctcctagtatcagataatttggaggacaatctcaacaggctgatggaacttcagaaggtacaaaatatccccctcagtaatcgattattacccttttggataatgtggaggatatgaaaatcaaggaatgctttcctatttcaaaagaaagactatgatcctgcttgtgaagcaagaaaaggcacttatgatgttcaagaatggattgatacgaatgcgactagtcctgaggcgaatcatgatccccctttgtcgtctggtcactccaatgagcatactcgaagccgacaatggatacccccactagcgggatgggttaagtgtaatttcgatagcggctatgtgaggggacgttcttttacaaatactggatggatagtcagagataatagaggcaaagttatccgtttcggaggtgcaaaacttcaggaagcacattcagcgctacaagcagaggcaatgggattacttcatgccttacagatgatatggactcatggtctcaggtttgttacttttgaaggtgataattgggaattaatcaagctggtaaatacgatgggagatcacaatgaaatcggtactcttctcgtcgacattcgattttggatgaaaaagctgccatacatgtctttgcgtcatgttaaccgggagagaaatgcagcagcagacgcaatagctataaaggcttcttctttaaattctctgtctcaaactttcacaataccaccacaatggttggtgaattatttgtattacccctatacgatctaataaaagcatagatgttaaaaaaaaaaaaaaaaaaaaaaaaaaaaaaaaaaaatcttctcattaactctaatttaaaacatcagtgcttaattacgtgggcctcataacatagaccagagctaatagcatacctttctctattaaatatatgggccaggcccaaacgtttacccatctgtatttattacaaagtacacgtggctgatggacatgtgacgatacgttttgacctattcaagatattcaaactaatgaaaaagagtcgttgtcctctgacgcgtctctctctatctccttagattttcaaagttttcaactttcaacaaaatcattattttaattttgcagagacgaatcgaatcgatctcatctccaaaaatcttgtattcgaagtttatttttctgggtttcttctgtattatctcgatttttgaaaaaaatggcgaaggaaattgaatcagcgacagatttaggtgatactaacatcaaaggagttcttgttcatggaggaagatattttcaatacaatgtttatggaaacttgtttgaagtttctaataagtatgttcctcctattcgacctattggtagaggagcttacggttttgtctggtacaacttctacccttttgtgtatttcatattcttgtttctttcttagtatttgtaaccctaattagataaagaactaagtattggtataggtttttgaattagggttgcttgcaaaatttgatcttttttggatttaagaaggttctgtcttcaaaatcatagtttaaattgaatgaatttgatgatttgtttgtgtttgtgtttatgtataagcaaaatgattcatgagagtattggtttattgttatagtgctgcagtagattcggagacacacgaagagattgcgataaagaagataggtaaagcctttgataataaagtagatgcaaagagaacattgagagagattaagctacttcgtcaattagaacacga

SEQ ID NO: 4230 - DNA, 5196 bp, Arabidopsis thaliana landsberg
gagaaatcacacattaatgctcgaactcggggctcaagcctaaagaattttggtactgtgagattcactcactgatctcactttctttgttgttgttcgtttttgctgtaaaatctagttactgtgagtcaagtgaaccagcaagtggtcatcaatgtgtaagtcctgtattgtggtgtcacttgaatatagatgactcatgtgttaataataaagtttcgcaatgtcatacactctacatgatgtttttccggaaacttaatttttcgataatcatatacttagtccattgttgaaaatctcttcgtctataagtcgattgatcatttattttttatttttttaacaatatacattaagtggatatgaagtggagttgaatttgggatggtaaccttttgatcacattaaaccaggttggtagttcagattttaacgtagtcatgtaactcatgttggtggttcatacttttcatgacctcattttcctccttgttgacctctacacattttcaggagatttagtgttcaaacacattgtcatttttcatagcagaatgtaggtctggacaaataaatcgaaccgaatgtaccaaaccaaaaccgaagcaaaagaaataaaccgaaccgaatatttaaaaataaccaaatggatacaatattttataaccgaaagattagaaaccaaatcaataccgaaccaaaatattttgggtaaccgaaaatatccgaaatataattatattttcaaaaatattagttattttttgactaaatagtaaaaatacttgaaaatatccaaaaaaatcaaaaagtaccgaaatatccgaaaatattcaaagcaaaataaccgaatggatactaaatatttaaaccgaaagaaccggaaccaaacccaaatttcaaaataagcgaatagatattaaacattagacccaaatagatacgaactgaaactgaatggataactgaacgttcgaactactaactatatcttaaaatattttttaaaaatattttaatactaaaggatacaaaaaattatactttgtagaggggatttgatactgctgtcatattatacgtttttttgaaaattttgagagtattagttacctagaaaatcaattataagacgaccgtctgaagcacgaccggctggtttcttgaaataagtcattccccatggaccagattgagcaggaaaagcagcccaaaatccgccagtgtccgaattcgagtctccgaagttgaaaattgcttcgaaatcacattttgaatcacctttatgcccataaagcatcacaataatcaagactagaagagagaacgatcttcttctgtttatatcggaagccatgtctatctctgtgtgaacaaaatgtgtgtttgtatgtgagagtgaggatgagatatttggtgctatatgattcttgtaatcatcccgtccgtgactctcactctcattgtacgtgtaattagtgtgttatagccttaatggtttttttagtccaacaattccctttaagcccaataaaagataaataaagcccaatctattatattgattccaagggttcaatatatatgagatatgtctaacaatacatcaaaagaccagtttgaataacaacacatcaatttatggattggatatgaattagatgtcatgtatgcaacaaccaaatttgacatttctctagtaatgccttgcaataaaagttattttgttaactttttgcaaagtatgtgccaatcaagaacaggataaaacggttgggtctaataattcaactacggcccaataataacccaataaaggagggtattaacgtaaatttatgtcttggaccgggagtctaactgcacgcgtcaagtggctcccactagaattggcatcaagaacacgtcaccttgaccttgtcggatttgtctgaaattgaattcattctttttttagtgtctcttaaattggaattagatcttcattctaaatcttaatgattataagaaacaagattatatgcatcatttcggatttaaacaacatggattaatctcaactaatttagcattaaagataagattttgttaaccattttttattgggtggatcctacgtggcgaagattgagtcatcgtctaaaattttaaaaaagatttcaagaaaaaattaaaaaatgagctggcgtcgaatcccacgttgtccgtagggaccacaacggtattccttattcagtgggacacgtcagctttataaaaccactaacggccgacacaagtcagtagatcctaaagtggggaccactctaaccttttttttggttaaaaagaaatattttaccttagatgaaatcaatattagccgtcgattaaatggtaaaaacaaatatgcttgatttggtagtccacgtttcgtcatctgtggatctcaaatgaattatacattatagtttaattctgtattttcattatttaaaaggaataaaatcagcagcacgtcaagtctacgtagacatctcaagatgaacggtggagattatgactacgtgtaccaatcattatttaagtcagatatttaaaatgtccagcgcagatctagggttgccagctcagcatatgcgttccctttgcaaacccttcaagatcatgacacgtgtacggtgacgtgttcatcagcctcttggcgctccattgtgtctctcttctttttcttctcttctcctttctctctcttcttaccgaactctggttttagagagagaaacgattctctccgactaagagagagaagcgaatttgttttttttcttttgtgggttcaattcgaattgttttccctgagactcaaggtacgtttttggattttggttttcgttattttcttcaatgaatatctgagtgattatatatgaacgctctgttttctcgagaaagtgtgtattgagtgaagaaaattactaggaaagttaaaggtagattgaattgtgtaactctactagttggtgatagttttgaacttttgacagaggaaaaaacttcaactttgaatcttttactggtagatacagtggtgctatacttgatagttactcggatctctgttatatttacagtttgatgtccacaattgcaagatctaggtgtaattgaatactgttcttttagatttatgctttacagaggaactgcttaaagatctgatcttttttttttataaagttactgtgtcattactctgcattgagcaatgggtagcaacgaagaaggaaaccccactaacaactctgataagccatcgcaagctgctgctcctgtaagtaatggaatcaatggaaactgattggttttgtcacagatttgtgtttagtcaaagtttgactgttgttgttgttttactttgtatatatacaggagcagagtaatgttcatgtgtatcatcatgactgggctgctatgcaggtgatttttctttgaccttgttttgtttctgctgtgtgaattgtgtttcgttagcctgagtgattttagcttgtttctcatgatatttgtaggcatattatgggcctagagttggtatacctcaatattacaactcaaatgtggcgcctggtcatgctccacctccttatatgtgggcgtctccatcggtacttatatttcaaacttgttgaatgtatgtatatatgcttatttgttactttggattgagtttgacttttctttgttattgtagccaatgatggctccttatggggcaccatatccaccgttttgccctcctggtggagtttatgctcatcctggtgttcaaatggtaatcctcccttccttttagtggttacttatatcaacaaatagttgaaaagaccagatttactgatttgtgttttcctactttactttaccagggctcacaaccacaaggtcctgtttctcaatcagcatctggaaaagtcattttcttgtgatgtttctatgtgaaatgtgtagtatgatggatattggatatgaatgtatgagaatgtttgcaggttacaactcctttgaccatggatgcaccagctaattcagctggaaactcggatcaagggttcatgaaaaaactgaaagagttcgatggacttgcaatgtcaataagcaataacaaagttgggagtgctgaacatagcagcagtgaacataggagttctcagaggtttgtcaaactagcctcaactctttcttattcaatagatacttagatatatagaatctaacgtggttttgatatcaactagctccgagaatgatggctctagcaatggtagtgatggtaatacaactggggtatggactcgtcctctctgctctgaactaggtttagatttatcttttgcgatctttattcatattcttcttttttttattaccacagggagaacaatctaggaggaaaagaaggcaacaaagatcaccaagcactggtatttcttcctgaaaaataacacaacgcaaataattgtatgcttttaatgtttacaactatttaaagctaatggcttttgtacttggtaggtgaaagaccctcatctcaaaacagtctgcctcttagaggtgaaaatgagaaacccgatgtgactatggggactcctgttatgcccacagcaatgagtttccaaaactctgctggcatgaacggtgtgccacagccatgggtatagtattcttgtgccactctcgttgacttcatttattcgtgacatccccttttgtttgtttattggtgttagtgtgtgtttatctgcagaatgaaaaagaggttaaacgagagaagagaaaacagtcaaaccgagaatctgctaggaggtcaagactgaggaagcaggtgattgctactaaacattttgtaactaaagactaatgatgagagctgatagattttcatatttacttaatggattgtttgttgttcacataggctgaaacagaacaactatctgtcaaagttgacgcattagtagctgagaacatgtctctgaggtctaaactaggccagctaaacaatgagtctgagaaactacggctggagaacgaagctctattggtaacaatctactcgcattttgaacagtaatcataagtctattgatcataataacgctagttattcaaatgatggttcaactgaaagcgcaagcaacagggaaaacagag

SEQ ID NO: 4231 - DNA, 478 bp, Arabidopsis thaliana landsberg
cctagaggatacaagatccctaaaaaatagcttaatcacacaaccgcaaaatagcatcattgtacttaaaacttgtacaaaacatcacctctatactcgtctaaacattaaaatcatcatctttcacaaatttcaaactcatcaatagaaagagcttagaaacataattcttactcaaacccaaatatacaaatctcagaaaaacattatcacacctgaactttatccttcaaactctgaaccttagacgcaagctccgacgagtgcggtggaagcgagttcttcgggatcgagtaccgtcgaagcatagaagacggtgtccgatgaacgccttcctcactagaaggcgacttcttcgattcgaacccagtcacctcccagttccacatattggtactcttctgctccgccattttcaaattcacgaaaaaaccctaatcctattccagatttcagcacaaacccaccaaaattctcg

SEQ ID NO: 4232 - DNA, 4272 bp, Arabidopsis thaliana landsberg
agatccgaaaccgtggagcctgacccgaatggagagttttgattaggtaagtgacgaagaccttgctgttgctgtggtgatccatgaaacgttggaggacccgacccgggtaatcctctatggatatagtaagaacctgacccggataatcccattgcatctcttcgatccatttcgcatttacaatagttgaagaagaaagactcttttcaactttttaagtgaacttgtgaaaccctaaaaagattgtggctagaattatgaggagagagagaaaaagaaagaggataaatggataagaggaaaaaacagaatcaaaggttgagagactttacgatgaagatataaacttggagagaaaggaacatgcaaagctctaaacactttctctgcttcttacttctcctcctctctctctttcattctttcaccataagcaacaagaaaagaaaagctttctcttctatcaacaatggttaggacttggttttgaggctatctctctctctctctcttcttgaatttgtttgctttttagttttctgggtgacagaaggaaacagaaacaaacaaaaaacctctaacagactctctctcaagcaaaagcatttactgtgaggataacaacaatgggatcttttaattcttttttttctgaaaatgtatttggaaattcaaaatcctaatgaataaactgactttgactgtagctctatatagcaactaggcatctgtatggcacatgactcttatggccacactctttattcaggcgcgtgcaccaacatgtcactcttctttcttctcaaccagaaatcttggtgaacagattcctccttttcaagctgatgctacttcttactagtctctctactgtttctatagactgattgatctcttcggaatttgatctgagacggaagaatctgtagagacagtggaggccacgcgccggagagtgagaaaagatttgggcctgtctggtcagagacttgcccactggcttccactttgagaactattttgacgagagagagaggctgatcagaagaaatctataaaatatctcgcaaggacccattgatgggatgatataacctctcaaagcctttgagattttttcctattaggattcaactttaaatgtaccatgtaatgtgtgacactgtttgtataagacttttgattatgacaaacataatttgactttctaaaagacagtttttttcttcaaaatatgtttagtggaatactggaatgtactaataaactagaaaagatcttgggtctgactaatgcaccatgaaagtcttatgccaattataaacatacttgtgtctttgttttgtttacctaaaagttgactttttctcagagaaatcagaatctatgctgaatttgaactttagaagcaattaggaaccatacacatttcacttcatcaatagctacattccacaatgatcccgatccggttagatagcaaaatcttgcattcaaaagagagagtgatacataagagtttaacctataagaagaagctagcttcaacatgatttctccaaaataaagacgaagatcaatgaagaacaattttacatacaagtgaaaaaaaacgaagttccttgtcaattgtctagctccattgcctgagcagctttagctttagcagttggagtcagttttgtctttaatttcttcttgccaacagaaaatccacctttcttcttcttcccacttccatcaacctagacaacaaaataaaccaactcacagatatcataaactactctagacttcatttaaatgatttggaaaactcaaacttattcgtaagatgttctactaagaagattcaatattattatttttaccccacataagcttctgactaacactatcgaaatcaaattgaatccaagcgaattcaatcattgcaccattggtaaccaactagagtaatatatagctagaaaagaccatgctctgcaacagaatcggtccgctacttaaccgaacaccaatgtatatgaactaaatatcagaattaagagataagagagacagaaaaggtccttactttcatcttattcttgttggcatgaagcttcttgatcttcttgtcctgtaactctttctcttctgcaaatcgaaaaaattccaagttttgttgagaaacacatgcgtattgaattgaaagcgtttaaagagatttaaagaaacctactttggagattgtactcgtgctgcttctttctcttggctaaattgttcttcttcgacattttttccgttccaatttcacctctccaaccagataggcgttctctataaaccctaaatttcaactgacctcaaagggtacggaactttaatgggctgagataagacataagcccatttagaagatagaatagaagtttcagtataagcccatttaagcccagataaaagcttagaaaccgaaacgttgtcgagcgcacaactgttcgttccaactacctttctccaagtcacacttgtctctctttacttatgcactctgcaatttttgcatgtgtctttattgttgtctctgcttcttcttcttcatcgtcgtctccaccaaaatccctaaccctaaacctcgattttcccgcccaaaatgtatcagtcaatgaacctatctttttcttctaactttaccaacctatcctttctcaaaccacgattatactccggaatctccgccagagctcccaaatccctacatttcaaattcaatccttcctgcgtctcctccggccccaaatccgacgattcacctctatccgagaagctcatttcgctgcttaaagctgtcccaaactggtcagacggtatcaaagagagacggatgcagcagaaacgatctctctacactcacgagaattgggtcagacacagaagctctcttcgccatctccgtcacgtatcctcgagcccatcttcacgcgttatactgtctttgataccgcctgttttcttcttcaccaccgtcgcgatcctgatcgccggctataactccgcggtggatttggactggttgcctgatttcttccctgtacttcgagcttctcctctaccgtatcagcttacggctccggctttagctctgcttctagtgtttcgcactgaggcttcttattcaaggtttgaacaaggaaggaaagcttgggttaagatcattagtggaaccaatgatttagctaggctagttatttcttctgttcatggctccggtgatgaattgatcatcagagatgcgcttttgcgttacattgttgctttccctgtggcgcttaaggtttgttttgtgaagttagcttatgttgagttaggtagaggaaggttcgtgattgtgattctattcatgtgcagtgccatgtgatttatggttcagatattgctagtgatctcaagaatgtgatagaagaagatgatctgtctttgattcttcaatccaagcatcgtccacgttgtgtcattcaattcatttctcagagccttcagctgctgaatttggatagtacaaagatagatatgttggtatctttcttgaatcttttaagcatcttcattcatttgactgtgatttctgaatgtaattctctttccatagactttggatatgcactataatgtttagtgttctccttcacaggaaacaaagatgatgcaattacaggaaggaattggtgtatgtgaacaactaatgggaattccgattccactttcctacacacgactaacgtcgaggttcttagtcttatggcatctaacactccctgttattctctgggatgattgccactggaatgtagtccctgctactttcatcagtgctgcctctctcttctgcattgaagaagtacctaactttttctcgttcatagattagtcaccttttttttttcgaatcctcattatcactctttaagttggtgcttgaaatgtctgcaggtgggtgttcttatagaggagccattttcaatgctagctttagatgagctatgtgctatggtgcttagtaacagtgatgaagctgttgaatccaaagaggtcatacgcaatcgaatcatcgcaaagaaaaggatccttgaaattaagcactcatcaaatggttggcataaaatcttgaagtaatggatgccaatatactctgtgtgatggctaacttaggttttctaatgtatgattaatagacttttggtcattaagtgtatcttccttagttccttgtgtcttgtgatt

SEQ ID NO: 4233 - DNA, 433 bp, Arabidopsis thaliana landsberg
gaccggggaccaagactggcaaatggaagttttccactgctatcagtgaccatggaagcttcgggagacattagtgcaccttaaaagatatcggcgacgatctgctcaaactgcactaatgtttttaaaaatgccgtgagtactacaagggccacttctgtgttgcctcaatcaacggataagctttatatatgcgcgaagatcacctgttacgggtcacacacaagctgcatcgtagcattatccacatacatatgcgatatttcaacatatggatattcataggcttaagctgatactctattactccacaatattggtgcctataccaaacaggacagttgaatctttgtttaacgaccatcacacgagagtggagtgtaaaagctatttaaaacatacattcaatacattggctgtgctaacagaacac

SEQ ID NO: 4234 - DNA, 685 bp, Arabidopsis thaliana landsberg
cacatctttgatgatcaattcatcaccggagctatcaacggaacaaataacttgcctagctaaatcattagttccagcaataatcccaacccaagctttccttccttcttcatacctagaatacgaagcctccgtacgaaagaccagaagaagagccaaagccggagctgtgagctgatacggcaacgacgaggatcgaagaattggaaaaataccaggaagccaatccaaagccacggcggagttgtagctagcgatcacaaccgcgacgcttgtgaagaagaaaacaggtggaatcagggagagtataactcgtgaagaaaagctcgagagtagatgacgcacatggcgaagagagcttctatgttcaacccatttctcgtgtgtgtagagagagcgtttctgctgcatcccacgctcttttatctcgtctgcccaatctggaacagctctgaggagatggataagcttatcggttaaggtttcgtgacctgaatcgttggattcaggaccagatgagacacggggaggtttgagattgacggatttgccgaatccggtggagaatataggaaatcgtgattcgaggagtgatcggtgagtgaaattggaagaaactgattgattcatggattgatacaatggcgggaaaaaaagggggtttaggtttagggtttggtcgaga

SEQ ID NO: 4235 - DNA, 5180 bp, Arabidopsis thaliana landsberg
actttggtataaagattcttttaacatctcaaccatataatcagtctatgtcggtttgaatcatatcattcatctatcttcttcaatcaattcatcagtaatgtagttcggacaagatctaaaatcatcgatacctatgtcttctaacataaatgtgttacttaaaggaatgcagaacaacgacatgccacacaatcttcaaaaatcagtgtgagtaagtaagagtgatgctgacctgtggcaaccaatcggttcgagtagttcttcttttgctgccttaagctcatagccattctatgaatcaatccaaacttgaggtgactgaaactgaaaggggatccaatcatgagacttaaaacgattactcgttgtaggacttgacgcttccaacaaatttgaattgctgatgctggaaaatggaaaggatactatgtcacatccagggactttaaaaggacaatgatccactagagagtttgaaagattacgataatatgtgtaatctctggttaaacaatctgagctgtttgtgtgatgaaatgtctggagctcttggtttgcagcaaccacgtcttcgtcatcaataatatacctctcgagttcatcatgctcaaaatggctggcttggttcgttgttggtaagaggaaactgcctgaaatggaatgagagagcagaggtaaagggtacagctcccttgtaaccaaatcatgggatgaagaatagtcagagcaccatggattgtctgtcaaagatgaggatgatgcatttggatacgtgatgagtcttgtgtgataactaagtggaaaatcatctgtctttctggtgcttgcggtttcagtattccactcgagaagtaatgcagatgaaggctctctatgttcgtgtgataagtcctctgtgctgtatccaatttctcctctgtgataatccattgaaaaaggcttgtagtttctgaaatggaggctagatatgggagaacactccaaattttcttcaacaggaaacgacaggaactccttctgtttcaacagtggaggtcgataaactgattccttaggatataagatgggaaagctaatctcttcggaatctcttgggatgaaactgctctgaacgtgaggatactgcagcctcggggtaatgttattttccagccatccctgccaagatatcaatctctccctttccatatgcagactgtggtcaacttctgcatagctttcatgggacctcttaagaaactttgagccaggagattcaacaaacgttcttcttttggctctggccgtcgtctccttggaaaacctagaaggctgagaaggaaaaaaaaagtgctgaggattgatcaagataagcaattgacaaatactcagggattctatcaagcttacctgtgtctcctccgtaccaggggacagccgagttaggagaacagaaactaaatcatgcctgaaaaatgattattttctgagtgcattatagaaacaagtattaagattaggataaattaacaactattgtgtacccgtttgaggtaagctcagggatttcagtaagccatgtatctttgacccactgatgcagtttctttctcttcacagagaatatatctcctttctcttcactgattcctgataattcaaactacaaaatcatatctcttaattgttaactagtatcttttgcttctttgatatgtaagaagtagaatatccaacatctacctccactttcagatctcagattgtcaccacttggaactgtgtacctatctctactgaatgatgaagaagatctcccattacattttcctataaacaacagaaatcagaagaatgtttatggatcactacttccaaaataccagtaagagattctacagaagtatccggataagagacacgagatcttatcatgtggcacaaacatgcaccaagaaatcgaagtagcaacctctatccctttgagtcaagttggcatgtaacatagacgacccaagtctggcactatgaatgggtgtggagaagctatagctcttggatctaccattatcgtcgcagtccgttcctgcacatcctggtttatgaaacagtatagatgaaaatccaggggaaagccaagcaaacactatcatcatcatcatcacaaagaaaagctcaaaaacctttgtctggtttggctctggattcgaaggttttaggaatttgttgaactttatttgatggtttagaatcagaagattcagagcagtgaccaaaattagactttaacttcttaaagaatgcaaactcagaggtcttggcatcaatcgctgcaaataaccaataccaggcgattttcaatcaaattcaacattctaagaaactctacgcttattcacgtgaagtagacgcgaacacttacatcctccggcctgagattcgttcaagggactccgatgatcagcatcgtcgaaactcacccttctcctgcgtttcaaatctaaaccaccagaaggaaacaaaattaaaacacacacacaaactcacggaaatcgaaatatatgttgtaagatacctgaatttgctcgagcgctcgaaggatcagtaaacttgaatccgatttgtggatcggtcttatttagggtttcgccagctttcgttcgctgattccttcttctcatcaccgagtatctgaattcgttctacagaatcgtggatcaaacgctgttataatcacgaaggcgatgaagaatgagagatttcacatcacgcgtccatggcgattcataagaatttgaaatcggagaagatgagaaatgaattttggcggcaaaatcaatcaacccttattacagattctttgctctaattatatatttcattttctaaggttgccacgtcatcacattatccagacgatactgatatgtgatcacacgtgtcatatcacaagtggtttaaaacgattccttttaaccccaaacaatctaaagctttgtccaccttttcggatcactcacacaacttccaacgatcacacacaaatggcgatgacgtcagcagctaccggatttattctcacggccaacgtcccggcggcaataggcggcggttcttcaaagagcaccaccattgtgtctttcttgccgatgagaagcttcggttcaaggctagtagtcagagcggcggaagatacacctccggcaaccgcctcgtcggatagttcttccaccaccgctgctgctgctccggcgaaagctccggccgctaaggctaaacctcctccaattggcccaaagagaggatccaaggtacttattcatacataatctttgatgcatgtttatacttcaaaattttgagtttattgatgatagccaagtttggattacaataaagtttctggactatttagaataattttgtaagtatggggtcaatgtgaaacttatatgaagtttttggacctctagatcaggattaaaaggaactaacccttgtggtagaagaaaattcaagcttaattagatgctagtagagaagattggactaatatttgagctaaactgggtatcatcaataagttctgggtctatttagtatacatattaagagttatagggctactgtgaaatttataaacaattttgaggacttacaggtcaagattctaaggaaagaatcatactggtacaagaacgttggatcagttgtggccgttgatcaggtaatgcatttacttttgaagttaacgatctaacggttagatatcgtttcatcttatattccggtctaaattgtcaggacccgaagacccgatatccggttgtggtccggttcgccaaggtgaattacgcgaatatatcgaccaacaactacgcattggacgaggtggaagaagtaaaatgagagacatggtttatctctaaaccggttcgtctgtttgtaatcttaaacaaaaccgtatgtaccaaaaatttaaccaacaattcatcttttatcttttacaatctcaagatcgatttccaaatatgcatttagccacccaaaaatgattgcaaattccaagtagtgtggatcaaactcagcaactccggtttagtaacagaacccagcatgactcattgactgttttttgtacgtagaaagaaacacaagattcttattgaaaatctctatatagacagtaaattcaaacagcaaatcatcacgacttcaataaggaaacatgaagaatcaccaaccagtttcatctctagaaatctctaggtctgaccgttttttccattggcttcagctaaaattgcttccagctctcctttattgtgcagctgcaatgtatctgttcaacaataatgatatgcaggtcaagttaccagaaaaatcacaagacattgagcaagatcttgagtactatctatcttggtgccaaaatacacaaagacgatctcaattacatattagaaaaatctcggtgttgaggtaagaaaggaagagagattgtacctgagcagccaccaatgtgcttgcctcctggtcatgaacaaaaacatgatatcaaaattagataagtgatggtcatagcaaatgtagtggctaagattttatcgatagttttgttttcaggcaaaataatcaagaaaaatgatcagagtatagttagtaactggcttaaatgatgaaacaactaaccgatgaaaacattgggaacagtgtattgtccagtaattttctccaacacattctgcagctgcgacccttctgaacctggaaacgccaaaaaccaccaaaacttttgtaaatgtttcagaccaatatcatgaggcagagatgttttacccaaagaaactaaacaagacaagaaagaacaaatggttttggaaagtcaccaaatcttgacacgagaaaagataactaagaagatagcaacataatagtttctaacaaatagaagcatactgtctaagattcaaaggcaggaaagaatcttcaatttgaaaaatttaagccattagaagtactagcctacccgttgattcttcatcaacaagtcattggtccaaggaaaactacagtggaagtaaaattttcacataaacaagacacagaatccctgaactgtaaagctatcttaggccattagaaacccaaataaccatcatcaatcctccatcaaaatctaatcaaaggacatgcaa

SEQ ID NO: 4236 - DNA, 4611 bp, Arabidopsis thaliana landsberg
gtttaaaccatggacccaaggaatcctttgagtctatgcgtacttctagtgaaagagactctgaagctccatttgttgttgatgatttgcaaccttctccaaagcgccagaaagtagagaaaccctcccaatttgcttatcctgacacacagggaaacccagcgacaatatctgctggtgtcagccaagctcatttttctatgggtttgcaagagaaagataggctaccaagtgatgtttgcaaacctgtcagatcaaatgtgccgatgaatgcagatagttctgattcttcaaggaggcttgttccagtttcccgtgagctggagaagcctgtttgcaaagatactcacatggggagacatggtgtaaaatctgcattagatggtgaaagtcttcgtttatcaaagcaagaaaaaccaaagcgtatgaatgaaataagcgcacccaaagaagagaatgcggaacaatctttgggcgttgtatctgcgtctaattgcggaaagtcaaagatcaaaggcgtctcactgattgagctgttcactccagagcaagtagaggagcatatccgcggtcttcgtcagtgggtaggccaggtaagctaacgaagttttagatgcaaatcttgtttaagatgaaagtttgggcttaacctagaacgattttcagtttatcctggcagtttctttttactttatgtaggtctatttggtgttgtttgaatctttctatctctttctgcatatcttttcgttaatgaaaattcttgagttgcacatgtccattaacagttgataatggttgttattctttctttgtaattttatttcagagtaaaaccaaggcagaaaaaaataaagcaatgggactctccatgtctgagaactcttgccagttatgtgctgttgagaggcttgcatttgagccaacacctatttactgcacaccttgtggggcacgtgtcaagagaaacgctatgcactatacggtagtggctggggagtcacggcattatgtctgcattccttgttacaacgaagcgcgtgcaaacactgtttctgttgatggaactcctgtaccgaagtcaaggtttgagaaaaagaaaaatgatgaagaggttgaagaatcggtatgcctcttcagttactgagttctgcaattgttttatagggattattttatattagctgctttactctttttctgaaccattaattctgtgcagtgggtgcaatgtgataaatgtcaagcatggcagcatcaaatttgtgctttgttcaacggccgtaggaatcatgggcaagccgagtacacttgccctaattgctatatacaagaagtggaacaaggagaaaggaagccggtatcacaaaatgttattttgggggcaaaaagtttgccagccagtactcttagcaaccatttagaacagcggttgttcaagaaactgaagcaggaaagacaagagagggctagacttcaaggaaaaagctatgaggaggtgattattaacttttccgataaatcttgggcttatttcccactgtatatctttgtcttgaccgctggctgtgtttttttttccacatttaaccatattttgttgatttattggtgagagttatgaagtttacacactggagatggtataaagaaggatacaaaaactagtttatggctgctaatgttagaaaattcacttacatgcttgatacctagtttcttataatgctctttccattaataaagttagggctaagaagatacgatcaaatttcttctttgttgatatatcaggtcccgggagccgactcgcttgtaatcagagttgtagcatctgtcgacaaaatattagaagtaaagccacgtttccttgacattttccgtgaagataattattcatcagaattcccttataagtctaaggtacagattgtgtatgcttggttcttatttcttttccttctttttgttttctaattatgaccttctgctacatgatgcctgttgactatcaacttccatactcattttttttcaggccattctgttgtttcagaagattgaaggtgttgaagtatgcttatttggcatgtatgtccaggaatttggaacagattctgcgtctcccaatcagcgccgggtttacctttcctatctggactcagttaagtacttcagacctgacgttagaacagtatctggagaggccctccgtacgttcgtataccatgaaattctggtaagccgcatttcttctgatcctagttgctttcaggcacctgtgttgcttcacaagtcttatcaacaatgggcttttcggattgcagattggttaccttgactactgtaagaaacgtggattttcaagctgctatatatgggcatgcccccctcttaagggtgaagattatattttatattgccatcctgaaattcagaaaacgccaaagactgataaactaagggaatggtatggaatatatactttcctgtaatacttgtttttcacgtgtaagagagaatattgcatataatgatgcataatactccttccttttcaggtatctagcaatgctaaagaaagcttccaaggaaaaggtggtcgttgagtgtacaaacttctatgatcactttttcgtccagtctggtgaatgtagagctaaggtaacagcagcaaggttaccatattttgatggcgactactggccaggtgctgctgaggatttaatagatcaaatgagccaagaggaggatggcaaaaagtcaaatagaaaactaatgcccaaaaaggtcatatcgaaaagggctctaaaagcagtaggtcagttggacctttctgttaatgcctcgaaggatctcctgctaatgcataaagtaacttctttacctttaagttttccctttattcgttaactttgtttcactgatactcttacctaatcttcatgcctttgttgaagaaagtgatattatcaaccccctaacttttgattgttactctgtagctgggtgagatcatcctcccaatgaaggaagatttcatcatggttcatttgcaacattgttgtaagcattgttgtactctcatggtatctggaaatcgttgggtgtgtaaccagtgtaagaattttcagatttgtgacaagtaagttttacttatcggctcgctttgtttatttgatacttgtatagtttaattaaatcaactatattgggatgcgatataaattcagaatttcccatagactgttaaaatatccagcaaacagatttttcttcacttaactaaatagcagtattctagtacgtttgcgggagggactgtctagttttcaaatgggagctagacaatgttagcttttaagcacttggtgtattctgattttttttttaggttagattgacaggtgtgcctgtgaagtatatatacattttttggctgtatctctcaagcttttcgtttaccacaggtgtcatgaagtggaagagaaccgtgtggaaaaggaaaagcatcccgtcaatcagaaggagaagcatgtattatatcctgtaagtttctaccgcgatagggctctaaagttttttgttttccctccttgttgggttggaaaatgacaaggttttggtctctgcaggttgccattgacaacattcctactgaaattaaggacaatgatgacatcctcgagagcgagttctttgatactaggcaagctttcctgagtctttgccaaggtaatcactatcagtacgacacactaagacgggcaaaacattcttccatgatgattctctatcatcttcacaacccaaccgtccctgcatttgcaatggcatgcgccatctgccagcaagaacttgaaactgctcaaggttggcgttgcgaagtttgccctgactatgatgtttgcaatgcttgctactcaaaaggcatcaaccatccacatagcatcattagccgtccatctgcgacagattctgttgtacagaacacacaaactaatcaaattcagaatgcccaggtattccttttctttcaattttttagctttgatcatagaattgatgtccatatgcatacataattattcacttgtcaaagctggaaagatagataggctcaactccttttaggatttttaccaaaattcctttcaaatattgtgtagctagataagtgtcggttagaaaattgagtttgcatctcttggcttctcttttccttattgctaactacggtttggcttgttggtactgcagttaagagaggtgctgctacacgtaatgacatgctgcactgcacagtgccagtatccaaggtgtcgcgtgattaagggtctcattaggcatggtcttgtctgcaagaccagaggttgcatcgcttgtaagaaaatgtggtccctcttccgattgcactcccgaaactgcagagatccccaatgcaaagtccccaaatgcaggtatgtaatctaactacttataaagcaaattttcaattatcagaatagatttgttcaagaaggtgatgtgtttaataatgatctgacaagtttattttttgcagagagttgagagctcattttagtagaaagcagcaacaggcagattcaa

SEQ ID NO: 4237 - DNA, 891 bp, Arabidopsis thaliana landsberg
tgtttcagaagattgaaaatgtggaagtatgcttgtttggtttgttcgttcaggaatttgggacagaggctggggctcccaatgagcggcgggtatacctttcttatctggactctgttaagtatttcagacctgaggttcgaactgtgtctggagaagcccttcgcacctttgtgtaccatgaaattctggtaagccgttttatctctaatcccatcttctttaggtttcatgttttgcttcacgagtacatgaaacttatcattgttacgaatttgcagattggttatctcgattattgtaagaaacgtggttttacaagctgctatatatgggcatgtcctccacttaagggtgacgattacattctttactgtcatcctgaaatccagaagactccaaagaccgacaaactaagggaatggtatgagatcgcgactgttctgtttttacttgtttgtcagtgttatgtacatttgttggcactaatcacattcctaccttttcaggtatttggcaatgttaagaaaagcttcaaaagaagatgtggtcgttgaatgcacaaacctctacaatcatttttttgtccagtctggtgaatgtagagctaatgtaactgctgcaaggttgccatattttgatggagattactggccaagtgctgctgaggatttactacgccaaatgaaccaagaagatgatggtgagacaaagtttaatagaaaaggattgaacaaaaaggtcatatcgaaaagagccttaaaagcccgtgggccagttgggacctttctcttaattgcctccaagggatcgacttatgatgcaaaaagtaactttttatttctccattccactattatgaacttgcttccaccagcttttatttatttg

SEQ ID NO: 4238 - DNA, 5460 bp, Arabidopsis thaliana landsberg
acactccgagcattgcctttgattcagggagttctacctttattgatacgcgtagctcttaaagactatgatcctgagatgggcaatagcttccgtgaatttgtagcagggcttgaggaaacggcaaagaagcatcactcaattgactcgacactggagctagattatgggattccatatgctcccacaaaaaccgaaagaatggagatcagaccggaaagccctgcagatagcgttagaggaaacgagaatgcattgccaaatcctcaggatataaataaagaaaccacagatgccaccaataatcagtcacagagagagcaggttggcgattcggtaagccaaaaaaaatattttcttggggagacaaaaacttctttcgtttctcaacagtttggatgatcacaaaacgcaggtagaagaagcaaaacctaaggaaacagattccacagaggcttcccaggagaaactacaggtagctgctaatggacaatattcaagcagttcttcagactttgagacacagcaaaggaaaataattgagctttgggcagcatgcaatgtaccactggttcacagaacctacttctttttgctcttcaaaggtgatccttcagactatgtttatatggaagttgaacttcgaaggctatcttttctgaagcagacgatatctaatgacacggaaacttcaaggtatttttctgcaacacctttttaacgagtctcatcaatatcaatcatatactcataagtatgctaaccaattcctttggtgtctaatcaggatgcaaacagtgaaggcactcacacgcgagaaggaatggatttccaaacaattaccaaagaagtttccatggaaccaaagaatagggctttaccaaaaatggggcgtggaggtgaactcaaagcagagaagcctgcaagtggcgcacaagctgtggaccaacacccaagatatggaccacataaaagaaagtgcttctcttgtggctaagctgcttggatttgttgagccaagtcgaatgccgaaggaaatgtttggcctcagcttgttacctagaaccgaaaacgtaaaatcatctggctggagatttaccaaatcattctctgctatacgcttgaccagatgataaccagagcacaattataaaacataaacaagacagaagtctccaaacactgatagtgaagttgtgaaaggcttgaatgtaaggtaagtcaagttctgcttgtacctgattgcgaaagaatccaaaattgtagcccttatgttatagtttagatcaaggaaaagggtgtgccaagaacgttaatttttttgtgttcatttataaacactaacttagagagagaatttacaaaacaaagagaatctcgcaagctcagacatgctacatatgagtatattatgatgcaagaacagagccttcagtgattttccaccctgacttggaccagaaaacttcgtatcttgttgtgtaggttctgacatcagtagcattgttttctggatgaaccaaatcagatagacaagcagactcctccagagttgcttccaccagagcacgggttccatctgctgagactgtcacactgtcaacagatagtttcaacagtgtataatcataaaccaacccaagctgcgcagtttcagctgctctgtcagtccaaatcttcagcattcgcccatccaaaacctataaataacagaatcaaacaaggcaccagactataatcatgtccaacagttttcacacaattgattgaattgtagatttattccctcacctctggtaacatttctatgcggtgatcaggcccaaaagccagagacttaatcttctgccacttggatactatattctctgcagtcctagcatccattctgggaagtgcttctgaatcgtcagctctgactgaccctaaatcgaaaagaaaaaaatcaaggaaagaaaagttggacaaagccacactaaggcaatctctaatcctacgttattctaaacagaaatgttgagagtgaaatttacatttctgtctacagtttgatcaaaaaattcaagcagcataattagtgaaatttactcagcaacttgttaatcttggtacaacttttgggacatgtattaagtgggaactatgttcttagctcacaaaacaagcatattttgagcaatgcagatatatgaaaattgcatcatttaatcatacctatggtagcgacatcagattccataaaagaaaccatatccttgcgttgaaaagatgagctgcttttaagaaaatacttctggctgaacagtgaaatcagtccaattgccacaccagcagctaggatcttcacacttgcctcctttaacatatcagcaacggacatttcaacagtagtttcatcaacgctactctctgagaccccagctcgaattgcataatcattagtttcaaagttttcagagggtctttcagcttctgcaataaagacaccaggctcaccatcacggcctacattgttaccaacaggatctacactaaacactgtctcttgcacatccttgggttcagccgagtttctatctgcatagcgggaaggaaaaactttctgcagtgcctgcatagcactagctttcacatgctcggctccaatccttgccatagctgcagcagcagctaaaggagaaccctgaactacctccactctttccaagtaactcaaaaccataggatcatcatagtagtccccgagtttaaattttttatctttggtgtctctgaacctaggaaagacaacccctgccaaccaggtttccaacaatttgcatagtccagggagatcatcattgtcatcacgatttgaattctccaaaacaaactccacaatagctggattcctatattgtgaatcctcactgtctaagcccaaccacatacggcattcatcaactttgcctataagcagtgcacagagtcccctttctagaccaaagtctatctcccaattattccgtgtatcatacaacatcgcaggaatctccatagccattaccttagcctgctgaagttgctggaattgcttatcagcatcctgtaaaaggtgtggcttcttaccaataaaagcttgagccacaagagcaagtgcaacttcgtaaacttcaaatgactctgctggaatattgcttggggtagctacaaaaagatcaacctaccacacaacatacattaaaatgagaaacctaaagttatatcatgctaaagaaattaaaaaaaggtatctaaactgtatacctgctcagcagctgtcattcgtaaaaacgcctcattcataaacttctcacgggtcaaacccccaacaagagctgatgctccacctcctccaacagaccacaaaatattccgcacaccgcttaaaccatttagtcttttcgcagcgtaatcatcaccaagcggtaagccaagtagctccaagacataacgcggagtgatctcttccaaagtctcatcaatttgtgcacgtaaatccggtgcaaggctacttgctccttcctcctacacaagactcaataacaaagtatcaaatcaagaaagttcttataaagccaacgctcgtcaaattaccaaagcaagtcaaactacctgtaaaagcttcaaagcttcctcaacaaactcataaccagttataaaatcaggtggatccaatgccatagcatccctcgagacatcgagaaacgcaagcgccataactaaaaccacatcttgcttaaacgacttaggcaacctctccttaagcagagcctcaccaacccgaagaactatctcagtctcaccaccttcttgcaatacacagagagcaccaggaaccttcactagataaaagttccttcctttatccaattcatgaaatcaaaacgaagaaactttattattccgaaatcgaaattaccttatcccaaggaacatcagtgatgactgtagcttcttcatcatcaagaagaccttcattgtactctcttctagaccgaggattagacagagtttcgcaagcagcttgaagaatctgtctccggctgattaaagcgtcgtcgctgaaaccgaattgcggcggtttcgaaaccctagcttcgaatgctcttctgattccatcggttaagaaatgtgtttgagctcctaatacctggtagaaatcaatggggatggggacgtggcgttcgggacgatcaatagatggtggcggagagacgagagtggcggtggtggtggcggtggcgaaggaggaggaggaggaatcggaggtgaaattgaagtcggagagaagacggtcggcccatttgctggcggagcagatagttgtagaggtgttgtggctacgtcggagctttgtcgtcgccggtggtaatcggcataattggaatggggagagaccaatgccgacgtgactcagagcttccatgggagtgtctttttaggctactacaaaaactttgttctgttttacatattgaagagactgtttggtcgtctagggtttatggaattttgattttgagtagtataagttaaatcaaaaaacatcaccagctactgaaaaaaataaaaaacaatctatgatgttacagtcgccacggactttatgatgttaaatcgtctaaataatctattccacctaagaaccgttggagttgccttcattttacacatatagagcaacagtaaaccaatgacttaattcttgactactttaaagtttaaacccacaaaaccccatcaattccctctcttttcttaacatccaactgaaatgtgtaaaattcgaaactattatgacatgtaaatgtaaaagcaaacagagccaatgaatcctatagccaagcaaaatcttgttgaaatcaagacaaattgcttataattgtattctccttaatgcagaacagtaatccatttcagtttacatagcaagaggagtgtcacataaaatttggacaatactaactttcgaaatagatacactaatgttggagcagagcttcgttacaatattttttaaagttgacagcctcgtcggtcaggaagtcactgcaaaaaagtaaaattttaaatgttcagaaggagaattagttaaataagacatctaagaaagagtccatagagactaaccacagtcgctcagccatgcgtcccacttcccatcttggactccatgggaactcagtgaggagattcgatttcactggcacactcgattggtttaaatgctgcatataaaaagcttgtcaatttttataccaaaataaataaagagaaagtcgaagccttctacttagttcgtttacaaatagttttgatactgacaactttgcagcatcagagttggttgcagcttcggaaattgagttgaaaagaagaaatgaactacagcaaagcaaaaacccaataatcactgctacatatttttgtgaattgaga

SEQ ID NO: 4239 - DNA, 457 bp, Arabidopsis thaliana landsberg
attgcatttgccaaataccaatacactagactaagctccagtgctctaacattgtgttcgctcattgagaatcattcatggctaagtcttccacagttgaaatgagactttttcacacgcaaccaagaaaggaaagaggacatgaacttgtctctaaacagggtcatccacttgcctctgctctgctgtatgaaacctactgtatatgatgtagctataagatcaatgcttctccatttcctcgatcctgcatacttcttcaaaccatcttcaatccgcctataactctcgttctcatcttctgtttcacctttcatattcttagctttcattgcttcaccgagacaacgagcgaggataactccgtcctccatcgccgagcaaccaccttgtccaatatcaggagtcattgggtgaagtgcatcccctgcaacacatacgttgtcttttgcaatgt

SEQ ID NO: 4240 - DNA, 352 bp, Arabidopsis thaliana landsberg
  unsure (1)..(352): unsure at all n locations
tttgatccgcttgatgttatttcgcagagttttttccctgttttgactaagattgttgggactctgggtccggaatctcgatccgtcgaggtgattgctggttgtctcaaagctggaatgtccggtaattgcgattacttcactatttgatacgtgattcgcctggggttctctttactggttactgatgtgtcgttctttttgcagtggctcgattcgatttctcttggtgcgatgctgattatcaccaggagacgctggagaatctgaagatagctgtgaagagcactnnnnnnnnnnnnnnnnnnnnntttctcttttcttttggttttgctctgctggatcttatttt

SEQ ID NO: 4241 - DNA, 428 bp, Arabidopsis thaliana landsberg
ttataaagcctacaacatgtttctgcacataaccctttgcaacaagtcttgctttgtgtttagttatgttcccatcagagtttctgtttatcttgaacacccacttcagccctattggtttgataccgacgggtagagagactaagctccatgttctattttttattattgacttgatctcttcatcacacgcatcacgccattctctgtatttatttgcttccttaaaatcccagggttcatcattaatcagaagcagaagtcgttctccctcaatttcagccaacaacacataatcatttaagtgtgccggttttatgacctgtcttcctgagcgtgtaaagactggtacatcatcgctgtgattgggttcaggataacttggttcatcaagaccgtcttctgcgtcttcattagttgagtcctct

SEQ ID NO: 4242 - DNA, 712 bp, Arabidopsis thaliana landsberg
aaaaacaaaaaatgaaagaatcattcaaagtgtgtttctgttgtgtaagaaacttcaaggtgaaatcaagtgagccacctgaagaaatcaagaaccttttccatgattactctcaagacgacaggatgtctgctgatgagatgctcagattcgtgatccaagttcaaggagaaacacacgctgatatcaactacgtgaaggatatcttccacagacttaaacatcacggcgttttccatcctcgtggaattcatcttgaaggattctacggttatcttcttagtgatttcaactctccattgcctctgacccgcgaggtaaagatttaggaatataagaattgtttacattgagagaaagagttttgtttaaagagattttggtttcaggtttggcaagatatgaatcagccattatcgcattacttcttgtacacgggacataactcttacttgactgggaatcagttgaacagtaatagcagcatcgaaccgattgtgaaagctctgagaaatggagttcgtgtcattgagcttgatttatggcctaactcttcaggaaaagaagctgaagttcgtcatggagggtttgaatcttaccataaaaccacttcttgaatcacttacaaatttagttgttttcttgatttgttttgggtatgatcatctcaggacgttaacgagtcgtgaagatctgcagaaatgtcttaacg

SEQ ID NO: 4243 - DNA, 3939 bp, Arabidopsis thaliana landsberg
tttcttatcgaagcactttccttttccctccctccctttcttcttcgtttccttcttcggcgtctcatcatcgcctttatccgcttcagtttccttctcaacttaaacatgaccttcaaaagaaaagacaaccattcataaacaacaaacatcatatagtaaaaagatcaaagattattaaaacaaaacataccgattggagagcctccaacacaaagaaccatagcagaactcgtatcatcgggctcaacaaactcgggtacaaaaccctcgggctcaacaccatcggtctcaacatcatgggtctcaacatcctcgggctcaacagccgcgacctcaacagcctcggtctcaacatcatgggtctcattagcctcgggctcaacactagcctcggtctcaacagccacatccacgttcttctcattcttaccaccatcttccttctccttattgacatcggaatggaccctcttctcaaatggaggcacactctcaccggcttgtctcctttcaatggttacaagcctttcattgtgttccgccaacatcgccatcactctcttaaagccttcatcaatagtttccttcaaagagcaagagctactgctgcccggaacatctggaacatgtctcggaacattctcttcctccatttgctcgccgcttcgagcctggacatccgcttcaaacatatccttccagaagattctcttcctctctttgatcaaacggtttctccagctatcgacaaccggatcaacaaaccctatcccatcatcaacatcatcaccatctacaatgcgcctcaacaaatctttctcttcgtaatccgattccaaaacgctagagataacctatacaaattcaaacataaaaaataatcatattctagctcatagataactgggctaactctagaaataactaggacaacgctagagataactgggacaactcttacctttacactttcaagctcctcgtttatctcttccaacgagaaccctttcatgacactactagagaatttggccttacacattctcggacactcattctcgaaccttacagggtctctaaacttttgtcccaaatgtggaatagcctcaaaaggcaaaatctacacattcaaagtaaaagtcacattagtattatttttaagtctactaatgcatctcactatatataatactctaaattgttacctctaatggaagaataaatccggagaaacaagtcatgcagttttgctttccctttcatggatttcattaccgacttaataccttccatacatccatcaaatgtgaaacgaccccatggggatgtctcacatgcacgcacatcatcaacaatctttagaaagaatttgtcaatgtttccatcagcctttgacttggtcgcgatcaccttgcacaacatcaaaaagattacctacttcttcctatccgtcttcttcttttctccacatttcttcatttcatccaactttttctcaacatcaacgatcttaatcccatataccttcttaaagatctttttggcaaacttcaaatctgcatccacgatcttcatactcggctgcaactcctccgggtaatcatgacaatcgaaaccacataacaacgcatgctctttaatggagtacctaataggcactccattaacaacaaaccagcactccctatccatctctgtctgtgctgtgcgaagcaaaagcatccacaagccttgggtcatgtggtttttctcctcaggcatgtggaatacatgcctaaactgtggatgcgccttgaaccatggcaaatattctttaaactcctccaaatacttcactgtctgctgcacagtgcatctcgtccctatcttacacgtctttacgtattcgcttggactaaagaacatcctctctggctgcataggttgttcctcatcatcaagttcctgaaatttcatacacaaacatacaattaatattttgctgtactacttgtactagttatctcataacaccaatcatacaattgattcccatacaatttacctcagattcttcttcttcttccccttctttttcctcttcttcagggttttcttccatcccctgagactgcattggttccacatcatcatcttcctgaaaattcatacacaaccataaaattaatatttcgcgttatctcagaccaacattataaaattttctcagaatccaattttctaatgcaaatcaatgtatgattgatcacgtataaatccatacatccaccaatcaaacaaaccaatactattaagttgtactcattgttttctagttgtccctatacactactttcaatattcaaacacaatttacataaataaccatttacctcagattcttcttcttcttccccttctttttcctcttcttcagggttttcttccatcccctgagactgcattggttcctcatcatcaactttctgaaaattcatacacaaccatacaattaatatttcgctgtactacttgtactagttatctcagaacaacattatcaacttttttcagaattcaattttctaatgcaacccaatgtatgattaatcacgtatatccatgcaccaattacacagacctatactattaacttgtactcattattttctagttgtacctaaacactacatcaatattcacacaaaagtttcataaatttgtatatacctcagaaatcttttcttcttccggttcgttaaggttttccagaggctcttgttcacagttttcgtcttcaaatttgttttcctcggctgcaacttcttcacggttcatatccgcttcacgggtgatcgtgaccctctcgtcttcactttcactcgaactaggagtgactaaccttacacgacccatgattaccttgcaaaaccactcaacaatcaaggaaaccgttcaaatcaacaaaacgaaaacctattctaatgtttcaaatcaaaaaccgttccaatttctaaacttaaagccctattcgacacttacaatttggaacgccggtggtttggaacgacgacggtttggaacaacaccggtcacggcggaattgcaacggcggctaaacgggatgaacgactatgcgaaatcgaacacgacccacacaatcgacgacggagagagaagagaaagaagagaaagtcggcgacggtgaactgaacggagagagaagagaaagtcgatgactttggatgagaagttcgccggaatcgaaacgcaacgagagagtcgacggttttgatgaatttttgaaaagttacttaggttaaaaaaaaatgatttgggggaaaacccaataatattggatcggattctgggctaaaccatgaactgtggttggatcctataatttcactaagtcactaaggttatttggtaatctccctctattttggtatttaaaaataaatcaaaaagaaattcttttttttgggtagcagaatagaatttttttttccgaatcatggcagaatagaaattctttcaaatctatacatattttatttatttaacgaaagcgcaaaaatataagtcctgaaatgactttatgagcatttctccatgtttttagtagtggttgctttatttcttgggtacttgatagtggttgtacacattaatttctatcaattgattcgctactttggtgtcgtatctaaattattcatgttttttttttcttgcaagctggtaggaaataaaagagaactgagatttgaacatccaacattttcaatgttttgttatacatccaaatcatttttcgtacgatactttattcatgttttttatgtgtgtgaaatatcataattattttaaagagtaattttaaaaagtagagtctcgtatcagtttgtttttgaacactaaatgaaagttgtaaaaaagaaatacgctaaaaca

SEQ ID NO: 4244 - DNA, 4236 bp, Arabidopsis thaliana landsberg
  unsure (1)..(4236): unsure at all n locations
atacaaaaaactaatccatttgcaaataccaaacaaatccaagattatttacaattgtcacttttgctaatcttagattatgaggtggtatatcctcacatcttcaaataattcactacattctactactaataaaatgaataaaaaactctttgttttatctatattgaaacaaacaaaacatatgttttgatcggtaacttctatcaatccgcactaggcttacaactctaatcattctcatttttaatttttttacctgctttttctttacatnnnnnnnnnnnnnnnnnnnnnnnnnnnnnnnnnnnnnnnnagacaaccgatataacaatgttaaacaagacgccatggtcatatagtagtatttaagaaagaaaaaaaaaaaagagaatgaatgaacaagtgtaagagtaacggaagaatcttgtcccaaccaacaacattggctttaaaaataaaaacgatggaatcttataattgcataaacacacacacacaccctttaccctacgggatcgtgctaaatcaaggcccctaactgtcagtaggtcccatcccccccctcataaaatggcacactacgtaaataagaagaatggctctaggacattatcgtcattttcttatctgatgcaaaagacttgacttttcctttttgcagacttaaccattcctcctccttccctctctatttaaccaacttaaccaacaattcttccacactctcacttctccactttttttctcggttagtgtcagtttttttgttggctagtctcttcggtcaaaatgcagctctttccggtcatcctaccgacactatgcgtcttcctccaccttctaataagtggctctggctctaccccaccgttgactcactccaatcaacaagtggcagccactcgttggcttcccgccaccgcaacctggtacggaagtgccgagggagacggcagcaacggtaaacatctctttacaaataatttgttttttttactcacaatttgtttggtttttactgtaacagacaaaaagtttactgcgaaatcaataataatggaaggcttaattattaatgaaaccgcaggaggagcttgtggttacggatcgttggtggacgtgaagccgtttaaggctagagtcggagcggtgagtccgattctgttcaaaggtggtgaaggctgcggtgcatgctataaggtcaggtgtctcgacaagaccatttgctcaaagagagcagtcaccattattgtcaccgaccagtcaccgtcaggaccatctgctaaagcaaaacacactcatttcgacctcagtggcgccgcctttggacatatggctattcccggccataacggtgtcatacgcaaccgtggcctattaaacatcctctaccgccggtacctcttcgcgctatcttattattttatttgactactatatgctaacgaacaaataatgagtacatttaaatgttttttttcttacattgggaggagtaaccaaataaagaaatcttaacggcgttcttgttttttatcgatggtcccattattttgagctttgactacacataaacacacatatggatctctgacacacttgcacttgtttgttttttgcaaaacagaacggcatgcaaatacagagggaagaacatagcgtttcatgtgaacgcaggatcaactgattattggttatcgcttctcattgagtatgaagacggtgaaggagacattggctctatgcacattcgtcaagtaatatttctcattattaatcattagtctctcccacattttctttaaaatgtatacttaatattacttcatttgtatgttgaattatgaaggcggggtctaaagagtggatagcaatgaagcacatttggggagcaaactggtgcatcgtcgaaggaccactcaagggaccattctccgtgaaactcacaactttgtccaataacaagacactctctgcctccgacgtcatccccagtaactgggttcccaaagctacttacacctctcgcctcaacttctcccctgttctctaattagcctctccttcatttttttttgttgtgggagagagtaacagagagaggacaatgagtgagccatctccaaagttaggggattaagagctttcattgtgtgtgagactactaacattctatgttgtcccttttcatttttttccttgtccatagggacgtgtgtatcatctataatgttgtttgtgggacattactatataagagtttacaaaagatgtaataatgtaatatgcaatctcattccttttttagctcaactcttttgcatgtcccactctctctaatgacaacacaactaagctactcttgcaaaataataatatacctcaaaattaatgtgtttatcattcactttctaacatgttcctacatacattatacatacattgcgtgcctggaaagagacgaaacaactggacctgaccaccacgtgccccattatcaagtcactacgaaaataatgtaaagaaagatagttcacatgccatgacgctcctcaactacctcatgcccacatcacacaatacaatcaaatgattcatccaacaaacctttacttctctcaagtcttataaatgtaaaatacgtggaaccaaaatgatttaaggtgaacatcatccaagacaataaccaaattttgcagaacaaatataatggtaataaaaaataataaccaaaaacaaaaggactaaaattctctctccagaagaggaaatgttgtgctcacagacagcgcccataagagcttctatgtgcacataacttacctcttcttattttcgcccgcagctattgtgacttcatcaatatcaaataatcccccaacagtaatactaaagacccttcactccgccttggttccctcggcctctgtcacagctacaggtttctctccctctcccgaggcagtagcatcaggtttcgctgtttcaacacttgcgtctttggcaggtgaagcaggtttttcctctgtcacctttggatctgcaggtttcccatcttttaagtccttagcgtctttccctccttttgcatccttcccatctttcccagcttttgcatctttgccatctttggcatccttcccatctttggcatcttttgctggaggaggaggcggcatcatgtgaggtgggggatttgtcttgagcttcaagaatatctgcctcattctccctagatcagttggcttcccaggtttaggaccctgaataacattcactgatggtttcttgtccggatcctttttccctctctttttctcaatgttgggaacctcacgagggattagctctgcaattgctttccagtaatgcttgtcaacttctttgtggaacttctcttggttagcccagtatagctgcaagagaggcaaaactcacacaagtttccaatacatcaaaaaaatcccaaatggctgtgaataggaattctatcactacttaccttctccttttcacggttatcagtcttgttggtctcaatggtcttgtctcttttctcatagaaggctttcttgaaatcttctgcttcagttatgatctgattccgcatctccttctctttcttttccttctcctcaaggtgaatggtgttcaaactgcaccaatgcgtgccaaaatatcagtttaattatgtcgaacaagaaaagcatggtggttccagtctaatctgatacagaattcaaacaccagagaagaagatgatagctacaacacatacactattcaggttctttcttattccaaatcagatcacagagattctttcatatacataaaacaaaaagcacggtggttccattctatctgatacagaattgacacatcacagaagaagatgatagctacaacacatacactattcagattctctcctattccagtacagatcgcagagattctttcgtaaatgatgaactaaaaaccgtagcggttcaagtctctaatctaatacagaatggagacatcacagaagaagataatagctacaagcctacaacacatatactactcaggttatttcttattccaaagcagatcacagatgaattgcaattgaaatccgacctacttcaatttccttagtaactcagtcataaaacacattacttttagtttcaagaacaaatgcggaaacaatgacaaaaaggcacatctttctaatagtgatcgaat

SEQ ID NO: 4245 - DNA, 1977 bp, Arabidopsis thaliana landsberg
  unsure (1)..(1977): unsure at all n locations
taactgaaattccactaactgttcaagaaatcataaactctgggatataaatatagaacaagtaatctacgatggactgtatgcaagctctgctatatcgatatagaacaatatatcatgcaaaaatctcaaaaaaaaaatcatcataatggatatacctgaaaccgctgagtaagctcagaaataagaggatactgctccaaatcaaagagattctgcagaacctcaggtgacaccagaccaaggtctaatccattttgaatatcctggaaagcatggaatagatttccatcattctgaacttataatatacaagcttgattcaaagttaagctcaacaaagaaaaaattggggagaagaattgaactgcataataaacccattgataagagatttttagatacaagggtgcatgtcgtcaaaataatgaaagcaaccatatgaatcttacgggaggaagggcatctcgcctcctgccagctgcattcattactcgagcaatctctgctcggtcaaagcagtttctactgcagggtcttgcagcagaataccacaagaaatcagcaactggagtttcgccctctcttcgcaagaactgtctttcagggtcaagtaatacaacaacttggtttttctttggaaacttccttgagatccttgctggcaaacctgttcctcttgaaccatactcaacatgacttgcccctgtcaccactaacagtagaccagtaccccctccatctgctactgcttgtaaaataacttgtgacattgtatggtcttcaacaactcttgcttgtgccgacaaatatgaactcggtccaaaaggaacaatctgtgttgggagactcatatcgaatgtagatctacgtgagaatgaagaaaatcctgagataaacccagaaccagcagggggagtgtataatttacgctcagattttgaaagaccacggataccttctgcttggacagttcttaaaacctacatcagattaagcagagtgttgtcagctcttaccagagtcacaaaacaagagcaatatttctgataagctcgctctctttagtcttaacagcttaaacatgtccatactcatttcaaatgatcaaaaccatattcataccacttacaagtatcaagatgtaattagtctcacaaacttccatcagatagaaaccaatgtaaaatgaagcagcatagtttaaaggattagaaattaaacactgaactaggaagatcatcgaaaccaaatcaaacagttaacaaaatccaaatactttcaagactctaccttgagaggagtgccacaagcaattagtctaacagagttatcgcggcaataacttaaaagaggctcatattcttgccaacgttgagcaggccaatgtgtcacataagacttcaatgtctctccgtccatcctgccaccaaacaatattcacgatcacgtgaaaagtacgcggcggcaatctcgaattttgcagtaagtttatgtgtagacaaacctcttatccatgtattgattaagctgatcctgcaaatcgagagggaatgcttccagtgctacagagatttgacgctcgctctcaacgcatctcttcctcaggtttctaacgatttcgagttcaagctctttgtcgtctttggtaggcacttgctccgcctcaccgaggtacacaactctcgcgttcaacagcttctcccacaccttcttcttatcttttcccatagccatcggctcaccaatggccgtcgcgtcatagattctcgaggttatcgtctcttccttattcacgggtggaggcggcggcggtgttgtggtcgcaggaggaggaggaggagctgctgattccgcaggcgatgttactgtagcggacgagctctcctcggaggctaaagcgacagacggtttgagaaacaaggaagcncgtagtgctagnagtggtagcgcgagtagaaaagcgcggcgagagaa

SEQ ID NO: 4246 - DNA, 506 bp, Arabidopsis thaliana landsberg
  unsure (1)..(506): unsure at all n locations
tttctcagccacaaccggctcgtttttaatgacctttcgtgctagattcaatgcatttgaagctcccacagctgcaaaactggaaacaactccaacaccagcaagcttcaagccaccaacaataactgaagcaattctaagattcaggttccactctcttccagcaagacttttttgaaatgcgttatcaggtatggatcctaggaggcctctcagggcgtctatgctgtctggtccagtggtctcatcagcatatgaaagaaaagacaaaggttggtgcaggaagccaaactgtgaaaaaatcaacgactgatcctctcactgtatcagttataacatagtcaatttcttcaaagaaattctcttttcgcttctcatattgtgctattagtggagntgatattgatatagcttcttcgatggctaacctattcaggaatnttggatctgccaacaacctttctcggaaaccctgtatcacaattacacaggaaatcatcataact

SEQ ID NO: 4247 - DNA, 2480 bp, Arabidopsis thaliana landsberg
agtcgcttcgcaccctgcatcacaaattttagttacacatcggcactaccattaccaaacaagctcaaaggtccaaccaatgcttaccacaacgttttctccagcagacggaattcttcttgtccggcggcgtcctggtgcacgtttcacatccggcggtactaactgagtctcttctacagcggcagggacttcttcatcagcttgatttgggaccgggtagatcattgcttcatattgtttcgcaaagagttctgacctatactcaataccaacaagagttagtatatgaacattattgatcctcgcagcagcaagtgcatgacagcacggcataagcagcttctgaaactgcaaacaggtgcaggtttttgcttccagatcaacatagtatgacaaatcatctgagacagcaacttggtaggaccactaggacacttgaatgacagccaagccagcaaagtgaacattgtgctccaatagcatcttgtttgcatttggagttattggatctttcagagtcgctgctttggcacgccttaaacaaaaccacctcatcagcttacctcttatcccgtcaaccattgtcacaagtggaagttccagaatttttgcaagagcagcattcaacgcctccgcaatattgctgctcataatgttatacctttttgcgggacagtatgcttgcgtccaatgttctttaggaatggcttccaaatactgaaagcagctcccactttgagccctaatttcattataatgtgctttaaactgcccgacattgaaagctcgtgccgctttgcgcactagtcccgggattccatatcttgcccacctaacctttacgttcctttctagatgcacagcacaacaaccatgaaacgctttaggataaatctgaccaacagctgcgtaaatagacctatgtctatctgtaaccagaaccaaatcctccgcatccggcaaaatctgactaagttgttggaagaaccaagtccaagccggctcgttctcagcgtctacaataccaaacaaaataggatatacctgcaaattcgcatcttgcatacttgcagccaaaaggacacctttaaatcttgccttgatagcagttccatcaacaagaatcacttttcgcatgtgctttataccaagaatagaagccccaagtgcaaagaaaaggtacttgaattgttgaacgccaaatgctttctgaatatgatgcagcttatagacagttccaggattgccctgctcaagcaaatgcatgtagacagccaacagtttgtagctggtctcttcactgcctctactcttgatcatagcagcctcacgcgcataccatgccttcatgtacgtcacaaacacttttagctcagacaatacaatgtcggggacgtccatggcccgtggctctgccgctccattagaatatttcccttttaagacttcagcaatcaccttagctgtagcttgcttaccatattgtgcccttgatgtaacagagcatgtatgagttaaagtggcagttctgacttcaaagttcttggatccgttggcaacaacatggccatatacacgccaagcacagcctctgtcgacacaacacatattagtcgcttcttgtcagaccttgtttgtataaaatggaagagcctgcgaattgcataaattgctaacgttgtttgcatatgcaatttatccctgaagactcgtcctctgtagatagcatcttcagaagatgacacagtcgcagctacttcagttgtggttaagttcaactcatcgtcaaaacatgggtccgcatcagttgttggacaagttccaatctcatcatcatcataaatgttgtcaagctgcattggaaaaggccggtacgcaagaacagttgactaatgtcctctccaacaccgccaccttgacaaccagtttcctctgggattacgtcactgtctgcaacttgaatttcaggttctggagttcctagtacttcgtccctcccactagaaacatcaaactcaggattcgctctttggtacacatcagcccagaattgtgagtcctcaacgtcgtcatcaacagacaatgaatcatccaatacattataccctgaggtatagccatcaaggctttcactgtggaaagctctgtcttcgctccctgtaaagtctacatctgttaatggcattttccctttgcctttaacccaagccttttccgctgcagctctttctaaggcctctatctccctcagaacagcctcatcctcagagtagttggcaaagatatcttcttcgcatcttccatcaatgtcggaactcaatgacggcgttcctgcatcagctagactgataatccttgccatatcaaaatcatcgcaagcatctgaatcaggctcagtccatagagatttgccgtgacgtctattccctcgaacaagccactcccctgcagcatctcctgcgtcaacaattgggtct

SEQ ID NO: 4248 - DNA, 2172 bp, Arabidopsis thaliana landsberg
attgaatgatagtttaacttacatccgtgatgagttgtgttatacgctagtttgttatgtaagtgagttgctgttatgttatggctgagtttggtttatgttttgactgagttgttgttatgttatggatgcgttttgtttatgttttggctgagtttctgttaagatggctgagttagatttatgttatggctgagttatgttatatgtggctgagatagatttatgttatgactgagttatgttatctatggctgagttaggtttgtgttttgcctgagttatggtatatgtggctgagtttgttttatgttatggctgagttattgtatgcttacggctgatttatggtttatcagatgtctgaagaccaagcaagggattaccctccaagactttacccagagggggattctaatctggaggttaaagccattaatcacaacataaagctcggagatttccctggaattaaagaatcaataggacaagatctatgggatgaactgaaagagacaccgcttggattaattgctaagcttgttgatagtcattttgtatggtctcgtaagactctacattatctactatgcagatagttgagaatactgaagaaggagctttggtgtctcgtggctggtcaacccatccggtttggattgaacgaatttcgccatatcacgggattaaacacagatccactacctacaaaaaagtttgagcctgaagcggactacaaagcgttctttagggaattgcctgtgccaaccggtgaaggtcctaagttagaagaacttacggaaggcttagtaatgtgcagagcatggcctcctaaaaagcgtagatggtttgggttattgactcttttatccattggactttatggcttgcatcctaactctaggataccattagagagtgccaaaagagtttttgatgatgaagccatgaagacttatccatggggtcgggcagcatttgaagcccttgttgtttctataaagttgctgaggcctattggcaagacgtacaccgttagtggtatggctttcgtgttgcaggcttgggcgtatgattcaattatcaccatcggcgagcattttgggaacgtagttaaagcggatgagattccgttgcttagatggggaggcaacagtactcgtgcaataatagaatcggccattgctgaagataagtgaatggtggtgaggtacggttttggctctgttatgatagttattgactgagttatgttctgtttttttatcaaatatttatgttacggctgagttatgctcttttatcactgagttaatgttttgtttttttgtcaagtatgttatgtgacggctgagttatgatctgtgaaggctgagttatgttctttttttttttggcaaatatgttatgtgacgattgagttatgttctataatggctgagttatgttaagtgacggctgagttatgttctgtaatggctgagttatgttaagtgatggctgagttaaacatactgatgggttttattatctcttgtgttgtagctgcgtgttcgtaaaatggttgaaaaggctgagttaagcaagctgtttcattcttggccagaccaattagaagacccacactcgataacttgatccaagacttacacgagcttacgcttgttaaaggttattgggatgtgaagacgagtgagaagaaaaagaaactcgtaaaagataaagaagcggatgtgtctgaatctcccgcaaagaagcagaaagtctttcacagtgagggtgttcattctcctgagaaagatgcacaatagatgaagaagaataagaagaaggaagtggctgtcgaatctgatgagggcaacgaagagcaggatgttcagggagaacagcagtcgctcgtggatgtggtctccaacttgatctctcccttaaactcaaggtttgacaccgttgataatagcatcaaagaaatgtcctcgcgtctggatgtgattggagttcaagtagaatcgaggattgatgcaaagtttgaaacaaggtttggatctaatgagaacgatgtcaaacaaattaaagagcatctgaagggcatatctgactcagaattaaactctactagttatattagagatatgtttttacccaaaacacagcaaggctaccctaagcccc

SEQ ID NO: 4249 - DNA, 1224 bp, Arabidopsis thaliana landsberg
ctccggtctcctcaatgcgttcacaagaatctcatttgtgtttgcaagctgaaagatgtcttcttccatttctttcatctgtttcctcactctagcaaaatcagggttagtgaacttgcctggcttctcgtttatctccagcttgcttttcagatctcttaggctgattctaaggcttgccaatcttcgagaatcagacaaaagtctctccagaatctttgcattgtcctcagtgcttctagataactctagtttgtcaacaactccaaccattttctcagactgtgattcaacagagggattcctgcttctgcgatgaagacggggaatcaaaggcttctttgagtttttattgttgatcagaaactttatgctggattctggttcagcagcctcttcccataattcaagcatttggtcactcgaaccacgactagttctccggcttcttccataggacgttgtgtctgcaacttgatcaaggggaatgtctttcattaatgaaccatttttcgactcagtcatcgcaggtgatctaggctgtctgatttcacccgagaattggtcctcaagttcaatctcttcaaacagcttgcggtctttgcttctgtgtgaagagcttcgtcttctcagcttcccacgcctctttttttcctcagcaactgcttgcttaatggttttgattcttgttttcatgtcctgcaaaagcacaattccattgtctaggttggtactgcaatgtcctacaggttcttgagagactgctgcttcttgatgttcatcattttggacaccctggggaaattggaagttattagttcatgaggcatatatgcaaaacgcacaggtttcaccaaatggaagcctaggtacaagtgccaggagaatgagaaagatgaggtaagatgccaaatagagaaaacgggaataagtttatgatagatcaggccagagagttctatcagtttacctctctgcgtctaccagctggcacagggagtttcatcaacgacaaggcattttgctcaagggatctgacatcttctgctagagatgctaccacaggatcataggcagacagttgagtcttcagctcagacacttcaaattccaagaatccaaccgtttcttttatttgggttatctctgtggtctttgtaacagcttcatctttgagaatttcacaaactccagtgagttcttgaactttgttctcaagcaaga

SEQ ID NO: 4250 - DNA, 2386 bp, Arabidopsis thaliana landsberg
caagatctcttttttggccaaattattctagttaatgcaaatttataataaaaatatcatcaaaaatatttattagaatattaaatcgaatcaaatgtaaaacaatgttaaccatctgatttgaacctacgtttgtaattctcactctatatcatcaaaataactttatttagataacacttcaactcgttatccattatgtagatcaaataacttaactattatatgaaatcatacatgaccaagttctttttacactaggtctatatagaaaacaatgtgagatttagtattatgcaaaaaataaattgagtctctttatacatcatcaatagaataacatctatatgataaaaaaaattgtatgaacatttaccaatatattaaatcatcattgatacgttaaaaataatattaaattttgacttgaacattcactttgacgtcttactattttaaaatctcattaatactagcatttatttttgttatagaatatcatcaaatgatcttaatatatagatagatgatcaactcattatccattatgtaaacgaaataacttaatcttcatatagaaacatacgagtaaattttatttttaatttaacatacatatatgagaaagacgtgagattgtatatactgcaaaaaataaattgaatccctttgtacatcatcaataggataacaagtatatgataataattttgtcgaaatgcttacccacatattaaatcgtcattgatatgaataatgttaattattggattttaatatacacttggaattcttattgttagtagttaaaaatcccactagcacggatcttatttgttatatgcaaaatatagtaaaaaaagaagctacatatttagattcatgtaaaaataataaccacataagacaaatttatgtagtagaaaaggttgaaacaattttgtacaacttttaagaattgtcaatataaactaaagcttcatattagaaaaaattgtttttattttccaaaacaaaactaaattttcattagaatatatgctgtaattagaaagtgtcattgtattcttgttttttctaattcagtcttcttattttgcaggagttcacgaacaatagtgatcacaaatcaaccaacattaaaattacacttatcaaatagaacatgaatctagaaaaagataagaatactaacaaaatcgaaataaatgagaagtaaatttaaatttacgcttgttttcttattcttatgtagcatctgatatttgattctaagtaatgttgttcttattgagttgatttgacattatgtctaatttgcacttcttggtttgataatgagaagctaaatgagaaattcgcttatttatttactcttatgtagcatttgatatttgagttttaaagacagtaaaacctctataaattaataatgtcgggaccaagaaaatttattaatttagagaaggtattaatttatcgataaattaataattattaatttatggagatattttacaaattttgtaattttttacaaaaatttgatctaaaaggtagtttctctatacaatcaataatttttctaaaaatcaattacaagtagaaaaccattattagatttaagaaaaaaaaaacttttttatacgtagtaaaattattagaattaaattttacaaagaattaatataaattaaagaaaaacaatactaaagtcatattttattaagttttacatgatatattcataaatataaatatatatatatattcataatttatacaattattaatttataatattgatgggaccatatatttacataggattttcaaaaaaaattttatcttattaattatcgatttgtatcaatttttacactgatctcaactcgggaccggaagaatttattaatttgtagaggttattaatttatcgtgtattaatttatagaggttttactgtagattcaagatacttttgtttgttgtagtggtttgtttaatatatcatgtcagaggtgacaggttcgaatctcaaattcaacaatcaacagtttaaaattttttcaatttatcttcgaagaatggtatattggtcatttagtatccatcttcttcttatgaatactaatcctccaaacctaatttatggtcgctacgaattttttggaatatttattttcatattttttgattttctgcactcaaatatttgtgatccatatagaacagtgagtttctaacatgtaacaaacaaaaaataataagttatgttacatcgcggcggcttcaaaccattttatgctttccgaccgttagagacctcggtctccatggccatgttttaaaacaaagattttcagtaatttaatatctttatttt

SEQ ID NO: 4251 - DNA, 954 bp, Arabidopsis thaliana landsberg
tcccctttaatatctcctccagtgtctcacccttctgcttcaggccactattaatgttttgtaaactattcaggtttttagcaaaagcttcagcctgctcggccttttcagacccaagagactggtaaaccacagacacgttgttcaaggcgatagcttcttcaagaatagcaccattttcttcctcgagtatacaaatttcacctttaagttctgagaatttcagatgcaaacttttgttcttgccaagagcatctgagtaatcttgatgcaaagccatgtatgactcatgcaaattttcaaacttcaaatgctctgtttgtagttcagctttaagctctagctcccgctgctctctgtcaatcagttctgatttcaactgccggttcatttccaatagctcgagtctgtcctttttcagcattccataatgatgtactatcgtctccagatctttctctacatcacgtttctctgattccaacttcatgccatctgattggaattgtccaagtagagataagagcacagagttctcaattacaagtcgctgtgtctcgtattcagcgctagagagtgaacattttagttcattaatctcacccaagacacgtgaaacaggaattctctcttttgcaatcttctggtcagctgtcttacaatctgcttcaacttgaagtgccttaaacacttgacaaattgcacccctgaagttatcaatctcatgcaccaaaaattctgcttccatctgttgctcaagattctcgctttcgagctcagcaatgagtttctctgaaaatgatgatgcctcagcatatttctggcactcaatcagcagagaaaagttcttctgctccaagtcttctataaacttttgcaagatgaagatctcgacttgagcatttacagctctgtcaagctctttctcaaactccttttttctggagcgacact

SEQ ID NO: 4252 - DNA, 987 bp, Arabidopsis thaliana landsberg
  unsure (1)..(987): unsure at all n locations
ggacaggtctgcgtcttcggtaccagcagtgtttggaaactatatctaagctagagagagaagtttcgcacgctcaagacaatgccaaaagactgagtagtgaagttctggctggagctgcaaaattgaagactgtagaggaccagtgtactcttttggagagctcgaatgaaactttgaagctagaagcagatggtctaacgcataaattagcagctaaggatcaagaaatttttcagaagcaaaacgagcttgaaaagtttcaatctttaatcgaagatgagcactctcgatttttagaaatcgaagtcagccttaagactttgcaaagtttgtattctcagtcccaagaggaacaaaaggttatcacttcagaacttcaaagcaggattggcatgttgcgggacttagagactcgtaatcttaagttggaaggtgacatcagctcagttaaagaagaaaaccaaaacttaagtgaactaaatgattcttctatgatcttcctggagactcagaaatgtgagatttctagcttgaaggagataaaagaaaaacttgaggaagaagttgcaagacatattaaccaaagcagtgcctttcaagaagagatccgtcgtctgaaggatgaaattgacagcttgaataagaggtatcaagcaataatggagcaagtgaatcttgcaggtttggatcccaaatcccttgcctgctctgtgaggaaactacaggacgagaactcaaaactgactgagttgtgcaaccaccagagtgatgataaagatgcnnnnnnnnnnnnnnnnnnnnnnnnnnnnnnnattcttaggaagaatgtttgtctagagaaattgcttctggaatcaaacactaaactagatggttctagggagaaaacaaaggatctgcaaaaagatgtgagtcattacgaggagagaaatatgagtttattgctgagcgagctaacttgctttctcaattgaaatcatgact

SEQ ID NO: 4253 - DNA, 591 bp, Arabidopsis thaliana landsberg
ccaccagagtgatgataaagatgctcttactgagattctgtttgaacttgataacattcttaggaagaatggttgtctagagaaattgcttctggaatcaaacactaaactagatggttctagggagaagacaaaggatctgcaagaaagatgtgagtcattacgaggagagaaatatgagtttattgctgagcgagctaacttgctttctcaattgcaaatcatgactgagaatatgcagaagctcttggaaaagaactcgttattggagacatccctttctggtgcaaacattgagcttcaatgtgtaaaggagaaatcaaaatgctttgaagaattcttccagttgctcaaaaacgataaggctgagcttataaaggaaagagaatctcttatctcccagttaaatgcagttaaggagaagctaggagttttggagaagaagttcactgagttggaaggaaaatatgctgacctacagagggaaaaacagtgtcaaaagtcttcaagtggaagagttaagagtctcacttgccactgagaagcaagagcgtgctagttaccaaagatcgactgacaccagattggcag

SEQ ID NO: 4254 - DNA, 2591 bp, Arabidopsis thaliana landsberg
cgtctcagtcgcaacaatccccgattcaaaacctaaaggaagtgacaatgaaaacggttcacattcagacgaatcggtagaagcgaaattttgaatacaaaggcaaatcaaaacataccaaaaagttttgtattccatctgtcacgttgaatagtcaataggacaaaaatatgaaatccgatgagattttttagaagaagaaggaggaggaggagaagaattggattcgaatcttcgaaaatcggtttgatggtattggtgagatttagaggaatctatgtggatgctgacgtggcgtcgtcgtggcgagcggagaatcgaccgtcagagacaaggttctcatacggtggcaagtggtttttaaactcttttgatttgcgtgcgtctccacagtgacgaagacgaagaccaaagagaaatagaaagagagactaattttgcattgcgtttttttacgttttagtccttttagttttgtcaaaagtgttgttttgacactttttttttaatctaatcaggaacatgtttaaagaccacttaacattattaattggggaatctttcaccgaccacatctggataatagggttggatttggaaatctcttgtctggtttttaaatttaattatcgtatattgtagtaatttataaacatattaacaactaatataaggtaactaattaaaagagattatccagattagttgtacacttgtctttttcgagaacgtatttgtacggttttacaaattttcttctaaaaaatgtgtcactgtcttaagccaattatttgctgaattagattaaaaaaacaaaactttctatgataacgtattttaagaataatttatatataaagacattatattatactcaaatgccaatttgtagtaataaaaaaaggtattatcgtttttaaaataattttaaatgtcaaacatacaagctcatgtctaaactattaaattttacaattgttaggtaaattaatataggaaacctaattaaagagttggagatcagttgttttttttcttgaacaaatattttgattggacaaatgtttttttcctactatggctatggacctatggtttacaatgtttctttttaattgcgacatttgatgctgttggtaagattaagacaattagttattgaaatacataagaaaacatttttaaccaaaataaaaaatacataagaaaacactataacagcgacatcgacgtcattaaatattgttttataagaaaaatatatcatactcaaatggcaaattatgtaacagtataaaatagaagaaattttaaataactaaatgtcaaacattttaatatataattgtgtagataggctcatatcttagtatagttactttttgataatccgaatggtaactatgttttgcggtataggaaaaatgtggtgcgattcaaataataacgaaaatacataaatatatatatatagagagattttaatattgtaaatattgttgcgatgtggttttggatgtggttttggatgtggtctacatcatcattcgtgttctatacatgagttgtgattttctccaatgttaataagtgaatatcgaaatcaacggaggaatagaaaatataataaaagccgagaaaccaaggtggcgccgacgtagcacaaagaaaaagtacaaaaaagtcaaaactcgttgccgacgtaatgactatcggtgtaaatccgaggtcgcgacttcgaatcgttctaaaacccattttacatgctcccattttttttttcgaacaaatgatgtcacaatctcagagtcaataaataaaatggaaacaaataatcatcatatgaacttggtcttgccacgtggaccctccattgccgttaccttccggtgaaataccaaacactccgcttccacttagagccgtagaagagctactacttcatcaaccacaaccactatctcctcaaaatctctctctaccgatcgatggaagcagcagtgccacgtctcgtcaattgcggaccggagccaattcgattctccgtctcctcccgccgctccttcgtctccgggattcctcaccgtaataaacgctctcgccagattctagccgtcgctactgatcctaaacctacacagactagtccacccaagtccaccaccgtaaacggatcttcttctccatcgtctgcgtcaaaagtagtcaacaacaatgtttccactgtacgatttctactcctacctctgccgattatgttatggttcaattgagcaatttcatagaaaatttctattggattgtgtaaaattataacctcgaattttggtttatggcaatggtacagagaattaacgatgtatcaaaagagattaaaagagtacgagctcaaatggaagaagatgaacagttatctgtgttgatgagagggcttcgtggccagaatttgaaggattcggtttttgctgatgataatattcagctaaggcttgttgaggtaacactctttggcaattcagctgagattctagtattgtatctagcattgtaatgttttaattttgtctttgttgggatttgtagactggtga

SEQ ID NO: 4255 - DNA, 3376 bp, Arabidopsis thaliana landsberg
  unsure (1)..(3376): unsure at all n locations
ctcggggaatctctacgaagggtcgtttcttctacccaaactcagtattcgttcgcgggattcgaccatagaaatgaatctgatcatggatctaaacatgaaaagagtaatgttacacgagcttgtgagtatttttgaagaagaaggagctcaagtaatgagtgctaatcttcagaacttgaatgataggaccacttacacaatcatagcccaggtaccacatccacacgcatatgtttgtataatacacacgtatatgcatgtgtcatgtctttcgtataaagttttattacatatatttgcaggctatcattagtcggattggcattgatccatcaaggatagaagagagagtacggaaaatcatctatggatatatatattttgaagcatgaaatcccaaatgataagtctacgctaacgctagtgtgttttttcacacatgtgttagttctttaaatatgagatgagtaattgcttttgagttcgattatgataaatatgttgaccgtcaacataagaaaccttaaaacgttgtcgtttcgtttttattcatcccggtttaattcagtttggcttggcgtgattttagattggtccagatttgcaaaattttaaccaccgagtaagacagtgggatgtaaatgtcaataaaatacactattggggtaaatgtgaaaagaaaaaaatagtaagaggctatatttgaaaatctaaatatcgcacaaattgcaacccttattttagatttaggaattttgaaacccttgtcgaagagaaaagaggcaaaatctcagtataaagtttctcaaacacttgtggtaagagagcaaaatcgtgagagatggatctgattcaatcctacgaagaagaagacgaagccgttgcttcctcgccggaatcttcaccgcctcgtatgttaaaggcgaaatcatcggcgccggaggtagacgatacggcactagctctcacggtggctaacgtgaatcaatcgaaatcgaagccgattgacccgactcaacacgtcgtcttttataaccctacccatgatcagctgtgggctccgatgttcggccccgcgcatccgtatgcgaaagacgggatcgctcaagggatgcggaatcataagctaggttctgtggaagatgcttcgattggatcgtttgggtttgaagagcagtaccatacgtttcataagtgcggttacgcggcggatccgtctgggatgaactacgtcggcgatgttgaggcgtttaagaagaacgatggtctttcggtttttaatattcctcagagtgagcagaagcggaggaagattgagaggagcaaagaggagagggaaggggaagagaaaaaggaagagattgagccggaagctgagaatccggagacggaagcttggcttaggaagaataggaagagtccgtggtcgaggaagaaggaggtggttcagggagagttgacggaggagcagaagaagtatgcggaggatcatgccaagaagaaggaggagaagggacaacaaggtgaaaccaaaggagagcattatgcggataagagtaccttccatggcaaagaggagaaagattatcaaggaaggtcttggattgaggctcctaaagatgctaaggcgaacaatgatcattgctacattccaaaacgtttggttcatacatggagtgggcacacgaaaggtgtttccgctattaggttcttcccaaagcaaggacatttgcttctctctgcaggtatggattgtaaggttaagatttgggatgtgtataactctggtaaatgtatgaggacttacatgggtcacgccaaagctgtgagggatatttgcttctccaatgatgggtctaaattcttgactgctgggtatgataagaacattaagtattgggacacggaaactggccaagttatatcgactttctccactgggaagattccgtatgtggttaagctgaatccggatgatgacaagcagaacattttgttggctggtatgagtgataagaagattgtgcagtgggatattaatacgggggaggttacgcaagagtatgatcagcacttgggggcagttaatactatcacatttgtggacaataacagaagatttgtcacgtcgagcgatgataagtctctccgtgtttgggaatttgggatctcttgtggttatcaagtatatcagtgagcctgatatgcattctatgccttccatttctgttcacccgaatggaaactggcttgctgcacagagtttggataaccagattctgatctacagtacccgagaaaggtttcagctgaataaaaagaagaggtttgcagggcacattgttgccggttatgcatgccaagttaacttctcgccagatggacggtttgtaatgtcaggagatggtgagggtaagtgctggttttgggactggaagagctgcaaagtgtttaggactcttaaatgtcacaatggagtatgcattggagccgagtggcatcctctggaacagagtaaagtcgcaacttgtggttgggacggcttgattaagtactggtatgtaaccttcttccagactattttgtttatttgtttctcttgtcatgatgtgtggtgtgtgcctttacttaacagctgcataatagttattattggtatatataattgtagcaaagctaaagttgtcatctgagtatccttgcatgtaacatgtgtcttaattcttttggaatcagatatcgtatattcctagtgtatgagtaatactttgagttcacatctgtggagtgatttggaaagaaagtttgactttgattctaatggtttttattcataaagaagttgcgcaattgtaaaatctttgaaaattaccagtccatgtaaccatgtcgtaatctcatggctaatgtttgattgtgatgttttgttgcacatttgcagggactaagacaagcagaggcatttcggagaaagagagagtagaaggcacagaaatcacggcctagcctgggctatacggaatgctgcatctttgggatacaaagcccctttgagttttgctttccgctgttttagattctttagtgttgtatcaatctcggtttaatggattatgtagagggacgaccaaaactatttcaaatgcttgagagaaactgttgactgaatcgttataaagatagcttgtaagacttgaaattttgctaaagctgtgttactttgcaccattgcagcaatgttggctttttattcggatacgttattattaccttgttgatttggtctgattatgtcatgcttcttagtttattacaggacttgaacaaaatgattgntaacaaaaacgtattcttcatttcattccttaattag

SEQ ID NO: 4256 - DNA, 963 bp, Arabidopsis thaliana landsberg
aacgaaatgatttttgataataattttctccaaacctactgtaaatcacaggacttaaactcatggttagtaatctgaaagaagaagaatcatatctctgaacgttaggaatctcatctcacacggtaagcatgatgctatctaaactatgtctttgaacgttagaaatcttacatcgaaattatgatgcgtcctagtaatgtgtcaacccaccaacaaatctaattttttttttaatgataaacaacatatctaattgttttgaaacttttgtatctttaagaacgtggaaattccgaagtaaatagtaaaatttacttggtaggaaagatgcatgcatcttattaatttagtgtgtaagctcacggacgcaatcacaaaagccatgactttcttccaaaacatccctttcatctaaatcacgtagctctttctctcaaagttgagatttgtgactctgtatctcccggccctctctatctctttaactgtatataaagagagatggatttgaaaagagaaacttgtacataaaagcttaaaagaaaacaaaaagaatggggagagcaagagaaataggagaaggaaactcatcgtcgttaagggaacaacgaaacctcagagagaaggatcgaaggatgcgcatgaaacatctcttctctatactttcttctcatgtttctcccactcgcaaggtccgttttttctctctaactctccctctctctctttctctctctatatatatcttatattaaattgtagatgtgttttatgcgtatatacaacaatacaaacattatctacataattactgtaagatgtacgttttattctaaagagataatattttgattaattgaataggcagttgtccctctatgaccgtccatattagctctcttttaagtacggtgtctaattgacaaataaatgattcacgtagctagggtttttgggtta

SEQ ID NO: 4257 - DNA, 5312 bp, Arabidopsis thaliana landsberg
ccaatagtttagtcaaaatgcagttcttacaatggctatgaaattagttacagattttttttcttgcgtaatacaaaaatttacccagtggcccttatttgacaaattattcttatgtacaaaaattgaattttagagccgacaaagttgaatttgaagtgaataatattaataaatgcgcggtttcttggactgatcaggtttcgatagggcccttgctgtttgcatctacctttgtacttgttggtgaccactatcaactaccgccactggtgcaggtaagcatttacaccttttttgacatacctctgtttttttcctgtagtttcagcatcattgttgtgttgatgaaagcagagtacagaggctagagagaatgggatgggaataagcttgtttcgcaggttatcagaagcccatcctcaggcaatttcagtgttacaaaaccaggttgccgtatctactaagatgaaactatgttagtacgtgttgttaataggtatgcctttctgctttgttgagacatcttctatgtgcagtaccgaatgtgtcgaggtattatggaactatcaaatgccttgatatatggagacagattatgctgcggttctgctgaagtagctgatgccacacttgtgctttctacctccagttctacttcgccatggcttaaaaaggtcagtgtgttgttcttaaacatttataagtagaggcatctttaagcaactaagaacattttatcacatctgtgtaaacctagatctgtgtatataatatgttccttctgcttaaaactctggatacctgggcatttgattatgcaactagccttggcctggacagcctatgaaaatcttaacaccactttcagatattgatgcaatgctttatttaattagacaaagcatttcagcttggctccagtcgcttgctttacaatatttgttatgttgcacattgactcggtgtaggcgttgtccactaataatctaattagcatcttaacttatatttgtttccatcaggttctggagccaacaagaacagttgtatttgttaatacaggtttttggctacttactagttgctttttttttcacatgagcgctttgccatatgggctggagttttcacgagactatatgatatgtttttgtagatatgctgcgtgcttttgaagctagggatcagaatgcgatcaacaatccagttgaagcttccataatagctgaggtactgttaagtatgcaagatgcatttaaacttatgaaaaagtgggctaactgctttacttagattgtagaggagctagttaacaatggagtggatagtaaagatattggaatcattactccttataactcacaagccagcctcattcaacatgccattctgacaactcctgtggagatacatactattgacaaatatcaggtttgcctctaggacctaccgttcttcttttcatgactatcttgatttggcaagtgctcgataaccaacgtttgatgagctcacattttgtagggaagagataaagactgcatattggtatcttttgtgagatcgcgagagaaaccaaggagctctgcttcttcactgctcggagattggcataggatcaacgttgctttgacacgagcaaaggtgagactgagagaacaactgatgtggtgttgagtaatgttgtttattccatcgatcattgattgaaatttgtttgggtttgacagaaaaagctgataatggtgggatcacaaagaacactctcaagagttccacttctgatgcttcttctaaacaaggttaaggagcagtcaggtatcttgaatctgttgccgggagatttaaaaccataacaactcatcaagaaacgtttcaaatatcacaagtttaacttgtatctccatttttgtccaaaaggaatgataatgtataatcgatttactttccgagtctgaatttgttgataagaaagaaatcaggagagcatgaatcacttgcataatgacatgtaacagaaaagcggagatattgtaatgatggagaagtttcatttgaaggttagctcagttaacgttatgacagtagattttgaacgaacaaagaagtttgtgtttgtaaaaacattcgcgtattgaagtaccatatccaggactcttgttacctttaagaacttataactgtaaaccaactcttttttattcatgaaataataaaagtacggaattttctctgttttctgtctgaattaaaaatgctttgagccacactaagctcaaaggtttttagccacacaccagaagatacacacaactaccaaacccaggtctaaggttggacctccttattacatcaatctcttctttggaaacgtagcagctttagccctggagaccaatgatgcctgcgaagtcatagacaaaaggtcaatcagtttgataattttaccattcagttggacccccaaaatgcaagataataatagtcaatagatgaaccaagatgaaccccgagttaccagagaatcaatggagtctaaggtgacaatgatggtaatgatcaagattaaatagaatatacatggttttcacaggagatgtgagaaaaatgtaattttgttttacttaccgcaagcaacacggccgcctgcgtttccagtagccaggctgagttcatggcctcctgaaatgtaaaacaccaatgacactaggttataaactgttcttaggatggatgttgaatcataagcattctacattggatgccctcaaacggactggctaacttttaaattctgttagcataatatgggtaaataaaatctcaagaaaataaatggtcaaaggtcattaccctttccgaggtcatcagggtctgcatggacaacaacagccctaccaacaatagagtttggtccagtaagaggaatctgttaagccaacacaaaatgtatcttaagagattggttcactacagcaggtttggattaggaaaaaagcataaaaaggtacacagctataaacctggcaatcagtgattgtgaaggtggcagttcctgagaaaagcaaaacaaaagcttttatgtaaatccatgaacactaccgctggtcaaaggtgacaactgtactatacaactaagactgcaaaatcaaatttgagagagtagcgaaatttgatgcaaaacagctctaaataagcttgagatgagggatacaaatgttgagaaggcataccatcatctccaacagtgatgtttcctagatcaccagcatgtcgattagcatcctcaggggcaccgtgtgttttaccatcggggttgaaatgtggacctaaaataggaatttaataacaagttcagttacttttggcgataataaaagttcccaatacgaaacataaatataagctccaaaagtttctaatccattgaaaatttgcagagaggtatgcataagagttaccagtagacatgcaaccgttagtggtgtcaccaagagcatggacatggaaaccatgaagaccaggcttaaggccagaaactgttccactcacagtggtcacacctgcaaaaaacccaaacaaagaactcaatcatttgagaggaaggaaaaaaaagataggcttcaaagatcttataaagcactcttataaagaactaccatcgccttcctgggtgaaaaagatagtccccgtaacaccctcactgctgttcaaaactgcaactcctttcgccattgttacttggcctttgtgatctgtaaaaacataaacataaaccaatacatatacaaataagtaaagatccagaaacaacaaatggttctacacaacattaaattagctcaacagacaagaaacagaatttgaaaacccaaaaacatcaatctcaactaagctttaatacgcaccaaaacatagatcctaatcccattataagaacacatataccagatattcaacgatctaagccataataactcttactagttcacataaaaaggtcaaggcatcttcagaagagtgtgatacatccaaagaaaacaagcaaaggaatcggtagatccgccgatcataaatcgaaaaaaacatttcctcaaagatctatacgtagattcggcggagttggaatcggaaaagttcgaaatcagcacagacgaggacaagaaccgatttaagaatccaaagtgaagaatcgatctaagatttgaaacaaattaaaaccaaaaaggaaagcaaacatacctcaggaaacccctttggaaagaatcaagtgcttgagctatcaaaaatgctgaattttctctctgaatgtttttgcttcgtctctctttggttacttgttttctatatagcccacgaggtccaaaagctgggtaggtacgtacgtgattggcattaatttatttcttacttgaaaaaagccacgtcaggataatccaagatagacttttcctaagtttgactcttctctgctgatgtggtaaaatttgattggataaatactgtaaaacattaagtttaagtcatcgtcattgaatttaaattacgtatgtcgtataattatttctaagacgttggctcaattataaatttcataaaatcttaagaactaattttaacaaaatacagaaaatatcatttgtatttttaataatataatctataagcatatatatatttatgagagtctgtcaaatttgtatgtagctaatttctttggagaagaagaagggaacctttgatggatttgtaatgttagactatatatgcctatctagatgcatgcatctcctaattaacctagctagctacaagaggttatagataatggatgatcacctataagtctagaacgttgatatataaactctgttatgcgtattatatcaaaattttggcatattattctctttgcaggtgacatgatatttgtatgttgtttatacactagaaaaaaatattgtgattttgttccacttccaaccatcagaggcactatttatgcgttcccaaattgttatctccataacaaatacctgattgttttacgactataacagccaatgtatataaaagacttaaaaactaaaataggctgcatggtcagtctgcttatcaaatgttaaaaatcatgcacaatgtgagtgctattactgagtttaaatctgatacagactgattcaaccatttggaagctaatggaggagcgggcggctataagctctccccaacacaacacacacaaagattgcaacatgatatataagttataggcagccaatgaagccaatggataaatcatagaaaca

SEQ ID NO: 4258 - DNA, 1662 bp, Arabidopsis thaliana landsberg
ggcagctccttctttgaatcctcatgaattggtggctgcttattttcctcaaggaagagcagtgtctttaccaaatataggaacactgaatgtaatcttaatccatcatttagcagacaagcggtttcaaggaattctaacattcaaccgtttttcggtcctgttattgctacaaatgttcctcgtgtggttgaagtaggtgagtgttctagacaaggagagtttggagaaccagtaaacaagatggataagggagattcaacaaaaaggaagaatatgggaagtgctagaagtgatgaagaagaaagaactcatggagttgctgagcataaggatggaggtattcttaaacctccaaagaagcgctaaacactctgaaaattctgtcatactttttgttttctatgctgcttaggatccatgatcgcagcttcaaggtttatataataagggctgcattgggttcaagtatgcaggtccaaggtttgaataaggtgaagagtgggtatggccgttggaacacatttggttaaggctactctttgtgtgcagtttgttgtttcagtttacctatcactttttgattttacaacatgggtaacattgatgttttgttaggccatgtttctttacttgttttggtgtttgtcttcaaactgaaagtggaaggtctactgatgtactttttgaactatgagagcagccccaacggtaaaatacattctcagtccattgtttctattattttaatcatttaaatataattttattatttatttatatttttagttacaaataaaaaaattgatcaattatattttatcacatataaaatgggtttctaagtacagtaaagcaaatccgtctttttaggactttatttctttctttctttcttcttctctcttactttttccaattaactatcatttttttctttttaaaggacttattaaaaccgaccgttggggctactctgatcttaatatatatataaaaaaaagttgctccatgagttagcattgattacatttatcaatgtcttacatgggctacactaatgacagtatgttgggctttttatgtgtgctctagtactattgtcgtttgtttgtatttgtactatgactcatcctcttgttcatcggatctaaagcgccactcaaaagggtttatgaaaaggttagggttttaacaacaactcaaaaaacagagatggatttcgagaagagaaaagctgcgacacttgcttcaattcgttcatcagtgactgataaatctcccaaaggttttctcgacgaacccatcatccctctcctcgaaaccatcaatcatcacccatcttacttcactaccagttcctgctcaggtcgaatctcaatcctttctcaacccaaaccaaaatcgaatgattcaactaagaagaaagctcgtggcggttcatggctctatatcacacacgacccagctgattcggatttggtaatttctctccttttcccttccaagtcaaatcagattgacccaattgaccaacctagcgaattagtcttccgattcgagccgttgataattgctgtcgaatgtaaggatttgggttcggctcaatttcttgtggcgttggctatatcagctgggtttagagagtctggtatcacatct

SEQ ID NO: 4259 - DNA, 704 bp, Arabidopsis thaliana landsberg
gtactactttattagttcatgacttctcttgattgcttggtgcttgtccttgaccctgaatggaatctatagttcataagaatccaaaatatgaaatgtaagctcaaaagttgactcggtcagaagagggtgtatactttctgcgtggtatccaaattcatatgcaccgttctatgaccaggagttagagattcttgtagcagaatttgtttatcggatattatcagcatttcttaacacaacattccaacgcttatagattttacttctgcaggaccagtcgaagttgttgatgaagtaacaggtggactaaagcttctttagcagattcgaatttcgatatgacatttcttcaacctgatctctcagatggaccaagcagaaaggagagacatgaactccaccttctctgttcgcccgaggttacctgtgagaaatctgtagttgttacgtatactcgttcctgatgatgacgaaatattcattttaaaacattttccccatttttcatgggcatgtagcatttccctctaccaatggtgatatcatctttttttgctggatttgtattagaagcatcaaaagctcgagccttttttggcacattgagaaaatggcttgttctaatgccagttcatgggagtgttggctatatgaacatttcaaatgtaacaacagatctttgttattgaagataaacccat

SEQ ID NO: 4260 - DNA, 2467 bp, Arabidopsis thaliana landsberg
  unsure (1)..(2467): unsure at all n locations
atataatgatatttgttatgtatttgagtagttgtaaaagtagtttgagatagaaagtcctatcttttcttgtggggataagagaaatatatcttacagtcccgatgtgattcgaagtttgaagtttctaatttaaattttgaggctgacacaaaaatataccaacataaatatatatagttgagtatacatggttgacatttttagtttacatgtatgtatgattggtttttaatagtagctagtatgtatttgttataagataaaaacatatgaccaagaacgagttagtgtagtggttaagcctcttagttaccaaaattataagaaggtcagagatacaattcaagttaggaggagtctgctcttcaaaaataaaataaaattacatggtctaagcctcgttatggaggatgtacggggccataacttcctagaaatcagaagaaaataaaacttatggcggcttgtcttttcttttggtaataaaagaaatatggcggcttgtttttttcaaatagttggatttagaaaaaaataatgcaagctaacacctcttgcgcgaccattcctggtttttaaattagatttcggtattaccgcaaagttttggcacgatgactggacgggtcttggtcccttaattgacttaaccgcccctcttggaccccaattcactggtttgtctcttgatgttgtggtaagagacgttgttattggttatacttggagattctccacctctataagcaagaatcatatcatcaacatgctcagaaacattctaccaaacccggtgaacatgattgagagtcagcatgatgactcttatctttggaaggctgaccatcatgctccctcaaacaccttctctgctgcaaagacttggttagctctctatacctttgctgccacagttccttggaacaaatccgtctgctttaaaggtaacttcctgaaacatgccttcatttcttgggtggtgacgtggaatcggcttcatacgcatgacaagttgaggaactgaggtttggtagttccggggatctgtctcctatgtaatcgtcatgatgagtccatggaccatttgttttttgaatgcagnnnnnnnnnnnnnnnnnnnnnnnncttcacctctagagcgagattgtctccatccacccagtttatggcttgtctcctttggcttcagtctgcttcgaggaacaagaatatttgcctcattgtgaatctcatacaccaagcctctgtgtacctcatttggcgtgaacgaaacattcggcttaattccgccaattataggtctgcttcctccattattaaggaaataaaactcaccatcaaggcaaaactagatcctttatctagggaacaacgatgtttacctcctgctttatcacttcttgctacacagttctccctctttagtaaacccacctttgtggctcggttccatttttcttctccctcttttgcaggtggcttggtttctggagaagttttgtttcctccagttgggcatgtggccattttaagtgtttctaccatgtatgtttgggcatgaggcctctttaggcgtttctaccatatatgttttatgttttaatggaaacttaaaaaaaaaaaaatgtaacatcataagagcatcctcaacggtaaaatacatttttagtcccttatctctattattttaattatttaagtataatttcattatttatttatatttttagttacaaataaaaaaattgaccaattatattttaccacatgtgaggtgggtttctcagtaccctatttctctctttcctcttctctctcttacttttttaattaattatcattacttttttttgaagagactcatcaaagctcaccggtgaggctgctctaaggacgagttagcctagtggttaagcctcttagttaccaaaaatataagaaggtcacatatacaattcacgttaggaagggtctgctcttcaaagaaaaaataaattacatggtttaaaccaggtcatggaggatatacggacagcccataacttcctagaaatcagaagaaaagaacatatggcatatgacgacttatcttttcttttggtaataaaagaaatatgtaacaacataacagaatcaaacttgtgttggagtttattatataaacatagactgttattaatgtcaatattttgtatacatacacatatatatccatactgttaattggtaatcattgtaaactaaataactttatgaggtagtttactacataggatgcaattacaattttgcattccaagagtaaattaagtattttgtggaaggatactttggacaattggctgcacattgacacgcggatcctggatatgtggtcggaactatattcagtcatagatggataccacgtggatcttgtagtaattgaatttggaataatagtaaccatactaggcttacgtag

SEQ ID NO: 4261 - DNA, 765 bp, Arabidopsis thaliana landsberg
atagaacaaagcacaatcctataacatattcgatcattggcgtcaacaaaactatttttttcttggacagtatttttaatttattatggtgggctttgattcaatctccctttcttatgaaaaggttgatctcatggaagaatttgtgttaggtcattgcaaagataaaaatgaaaaatgaaattgacgtagattttttatttaatgtagcgatcataattatgaaatatggtaaaagattataactgcttaattacttttgtgttgagacgaaaattatcaaaaacttttattaatgtgagctcgcctcacttctgaatgtttgttacaatctatatttgtttttacagagttatcctagcataggtcgatcaatagatctgtggttgccctataccaatcttgattttattttacaaaaaaaaaaacatttactagctagtgattataacataaagtatttgtttgatgattttctgagaattaatgtagctatgccttttgagttcagtttgtgttcattttgccgacagaagatgaagtagttgaagaagattgtgtctcgctctgaatagcagtctcaacgaattgggttgtgacttgttcccacttagtaattgtcgtcttaatctgtgtttgttgttctggtgtgcatgtcaaagacccctcttgcttgcctttattctgactcacaatttgactatgaatggtatctaactcttcgagagtcttcatcacttgttcttggtaagcttccatattctt

SEQ ID NO: 4262 - DNA, 464 bp, Arabidopsis thaliana landsberg
tgctgctgggaaactatcgggtgcgatgggagttatgcttttttataattggaagcaaatcagcagaggtagtgcatataagaatttttccttcaaatggatacaacaacaatatccattaacatatttttttgaaaaattgtgtgctatgtccacaggttaaaaagtctatggaaacttaccaagagcaagtgatgaaaactcttcaagagttagataacatccacagtcaaattgtgagtcagaaccaaggcaagaaagaaggatctttgacatgcacaccagcacaacaaacacagattaagacgacaattactaagtgggaacaagtcacaacccaattcgtagagaccgctattcagagcgagacaaagtcatcatcaactacttcatcttctgttggcaaaatgaacacaaattgaaatcaaaggcataactaaaataatgccctatgttaatactac

SEQ ID NO: 4263 - DNA, 446 bp, Arabidopsis thaliana landsberg
tttacatgtggaaaaatatattgatcaatttttttatttgtaactaaaaatataaataaataattaaattatacttaaataattaaaataataaagataagggattgggaatgtattttaccgttgggtttgctctaagaaccacgaaactctttgctattattttgaccttatatattccaccaaattctcaatggtgaaagggtcaataattctaaacatagaacacttaacataactataaagcagacacaaaattccattattattcattcattcttcaacctttattcctaaaaaaatataataaaacaaaaaacaaaaaaataaaaaaaataatgcgaagagttcagctattgttatgcttcaccattctttttgcatcagtgaatcttctggacgttgtttcagctcatttgaagcttaagccaactttgcctcagatt

SEQ ID NO: 4264 - DNA, 1711 bp, Arabidopsis thaliana landsberg
ctatactattgaacgcacacaaagaagttagatttgatcttgaacatccacaagagagttatagtttaactatatgtttatttttactcaaactagagaagttagagaagtgccattttatttgtttccattgtattaaattatctatcctcatcaaaccaactcagagatgaccacaaagatacttaaagcaggcccatttttgtattcaattatggtagtgctttcacttacctcagctttttaatttttccttccaattttgtttgtgccatagtgccatgttctaacatcagagacttaatacatgacaaaatggtgcaagtttgggaatctttgaaagaagatgaaaatagaaagttaatttgacaatatataagaaatgattattcattttcccgccttgatacatgaaagagcttaagacggtgtttaagggaaacgaatattttagctctcaaaacagctcatcaaattcgttgctttagcttctcaaaagtaaaaaatgggctttttcaagtgggcctcaacttatgttgctgaatttaccgccatatccttcccttacaaaaaatcaatttcaaaaaatcttcatgctacagtagtctgaaaccaggtcaaaggagttaaagagaaaagggcaaaacagtcaaacagcataaaaagatgtctgtgtcttggagatcgcaaagctaccgttttctgttcactctgtacaacacacttgtctccttcttcctctcttctcttctctctctccatttcaaaaagggtgaaacttttcttctctttctagaagaagaaaaccagagatacagagagattctctctctaccaaacccctggaaaaatctccagattcatcttccatagaccaaactaaactctgttcactgtactctctgtcattgtcctgtaagagaaattgaaaaccctaggagattttgaatttcgtaaaaccctaaacacaaaaatgaaaatcccagaaaaacccatcttcttaatcttcgtctctttgatcctagcttcgagcttaaccttcacagcgacagcgaaatcaacaatcgagccttgctcaagcaacgacacttgcaacgctttactcggctacacactctacaccgacctcaaagtctcagaagtcgcatctctcttccaagtagacccaatctctatccttttagctaacgccatcgatatctcttacccagacgtcgaaaaccatatccttccttcgaagctcttcctcaaaatcccaatcacttgctcctgcgtcgacggaatcagaaaatctgtctctacccattacaaaacccgaccttctgacaatctaggatcgattgctgactctgtttacggaggcttggtctctgctgagcagatccaggaagctaactcggtgaatgacccgtcgctgcttgatgttgggactagtcttgttatccccttgccttgtgcttgtttcaatggcaccgacaattctttgccggctgtttatttgtcgtatgttgtgaaggagattgatacattggtcggaatcgcgaggaggtattcgactactattactgatttgatgaatgtgaatgctatgggagctcctgatgttagttctggagatattctcgctgttcctttgtcaggtcaggtctacacaatctttaaaagttgtatcttcagatgtttgtataatgggaaggagcttctattggta

SEQ ID NO: 4265 - DNA, 1274 bp, Arabidopsis thaliana landsberg
ttattcaccatcaactacattatttccaggagtctatcacatgatggctctaataccacatgatagactcctggacgtggatctatgctccaaggacacactttgttggttttgaaatggaaatgatgtagttgatggtgaataatggattgatgtcgaacaaagcggcggaagacgacaaacggggatgacgacgagatcgagtggatgcagcggaatgaaagggggaacgagttgtacttccaaaagtgataaaagactcttagactctatgagcttggatccaactaggcctgggcaaaaaaaccgctaaccgattaaccgaaccaaaaaacatggttcggttcgggtttggatagcttaaaataaccggcggatattatatgtcttagatttcggtttcggttaggttagtaaccgataaccaaaggataaccaaagcatatatgtatgatagataatatatcatatatattgtatgtattgacacttaactatgttcttctctttattagtttgcaagttgaatttcgtgagttgtgaattaggtgtttaaatatcatggagagtatggaccatatttgcatttttgtgagttgtgaatatgtctttttttacgtacgttctatattcggtcattgatcaatttttttggtagtttcggtttttagtcggttatttcggttttgatttatttatggttaccaagtttaatatccgaaccgaaccgaaccgaaagataaccgaaccgaaccgaaccaaaattcctcaaatatccaaatggttcttatattactataaccgaaataaccgaaaccatgcgcaaccgaaccaaaaccgaatggttaaccgaatgcccaggcctagatccaacttagatattacacactaagaagaaaacatgttaaaaagatatttcacactttttggatcaaacaagtgaaagagagagcttttgattaaaatgtttgatattttgcaaatgagagctacaatgagtttatataggagaggaggaagaggggaagaagggagagaagaaagacatgcaagagcatgcacaagtccacactcatgcaagctcatgcaaaggtcttggaaataacaaaagcaataaatgcaagtttgaagaaaaaaaaagaaaatgggccaaggcattgtgagtgggctgataaagggagacttgtgttacttatgcctcattaaaaaaccttgtcaagaaaacccattgagacaaaacttgacaagggaaaaagggtgtataagcaacactt

SEQ ID NO: 4266 - DNA, 501 bp, Arabidopsis thaliana landsberg
  unsure (1)..(501): unsure at all n locations
ttatatgtacattttcttgtaaaattgatgttttttagcatcagttaaaaatttcaaattttttttcctttgaacttgcttaaaatactttcatcaaggtcgtatatatggtcatctgcaggaatgtgtatggctgttcaattgttttgnnnnnnnnnnnnnnnnnnnnnnttacatgtcttagctgggtatgctctctttcctaagctcttttccattaatcaagaaagacaaatctcacgattacatactttgtttttataatgggtggatcattccaaacttgcgcagttatgaggatggttcaatacttctttgggatatacgcaatgctaatattcccctaacaagtgtgaagtttcattcagagccaggtcttgtttccatcctctgtacttagagttttcttatattttgatcctgctctctgaatcttccaaattacttaattggtcattcttatgcagttttaagacttagtgttgcatcatcatgtgatgg

SEQ ID NO: 4267 - DNA, 1802 bp, Arabidopsis thaliana landsberg
  unsure (1)..(1802): unsure at all n locations
gagaattaccaatttctcatccaatttcatggatcttccataatacagtatccattttagtattattggtgagaagagtgatgatgcaaacctggttcaaaacacaaccgatcgtagaaaacatagacgcaaatggagtcgagctgaagatgccattcttattagtgcttggttaaatactagcaaggatccaattgtcgataatgaacataaagcatgcgctttttggaagagaattggtgcatattttaacaatagcgcttcacttgcaaatctgccaaagcgagagccgagtcactgcaagcaaagatggagtaaacttaacgacaaagtctgcaaatttgttggatgttatgatcaagctttgaatcaaagaagtagtggtcaatctgaagatgatgttttccaagttgcataccaagtctacacgaacaattacaagagtaattttacacttgagcatgcatggagggagctccgacacagtaaaaaatggtgtagtttgtacccctttgaaaattctaagggtggtggaagctcaaagagaacaaagttgaataatggagatcgtgtatattcttcaagctctaatccggagagtgtgcctatagctctagatgaagaggagcaagtcatggatcttcctcttggtgtgaagtcatcgaagcagaaagagaagaaagttgctactattataacgattgaagaaagggaggccgattctggatcaagacttgagaacttgtgggtactagatgaagaggagcaagttatggatcgtcctcttggtgtgaagtcattagagcaaaaagagaataaagttgctcctaaaccaacgattgaagaaagggaggcggccgattctcgatcaagacttgagaacttgtgggcactaaaggagaaagaagaaagggaggcagattcccgatcaagacttgagaacttgtgggcactgaaggagaaagatatagaagagcaaaagaaactaacaaggatggaagtccttaaaagtcttcttggaagaacaactgatcaactttctgaaaaagaagacattttgaagaacaagctcattgatgagatgctctaatctctatgttcatctctgtattttagctatgtttcattgtatttatctctgtattttctctaggtttatctcactatctatgttcaacatttgtttcactttccaattcacatcatgaaacgttaggaaagaaaaggaatgatcagagcatatgaaagaaaagcccctattgtttcatcagcttttggctggtttggtctatggagactcactcaaatgctaagtttcaaagatttcgagatgcttttgatattacttttgaaagtttctttgagaaaatcgacaggttggtattataagttttttgtaatgttgattatttcattaacgtcaactttatgatacaattttcaacttaatggtatttagttctctagataaccaaaaaatgatgcatctgtttcaaagaaaaacaaaaaaaattgtgatctcaagtctcaactggttctggttaagggccggttctgccttgtaattgtattgctttgatggtgaagaaggagcaattagcctaaccaaccggtttagagaggtctttggtcacaacagagaaacaaaaacggcacggtgttttactctctactgtagaaacagncagctactgtagagacacttctcttcttgtccatattatcaccaccgttcagtgatccacanaatcagacgaanaagaagatgatgaagctcaaagtgtatgcagatcgaatgtcac

SEQ ID NO: 4268 - DNA, 1132 bp, Arabidopsis thaliana landsberg
cgtactgtcctcattttctgcaagtaaactctttcttcgtcttccttgttaattcgcgattcagcaaaaaaaaaaaattgattctaattttttgtttgtttgaagggttaatgaaatccaattcgatgagattttgatttccttggggaaacgtcaacagttatgtcctgaattcaaaggttcgtataaatagtttttttttggacatgggtgatttcggatttggataaaagttgaaacttgaattagtctttaaagtgagatttgatcttaaagtgtgtattcattgtttctcagatattaacccaatggggaaagttccagctattgttgatggcagacttaagctctttgagaggttccctttaacacaaagttgcttcctttgtatcaaaacaccattgtttatgaataatcttaaccgtttgtctgtttcttcttctcgcagtcacgctatattaatatatctttcctcagcatacccaagtgtagttgatcattggtaagtttctctacttcgtttgacacatgcatgttcttgattgcaaagtgtaatcattttacttttaggtacccgaatgatctatccaaaagagccaagattcactcagttttggattggcatcacaccaatttacgccctggtgcatgtattatattcataacaatatcgatgttaattagttgtatattcaaatgaggcttcatgtttctgattactgttatttaacaatctctcagctggatatgttctgaatagcgttctagctccagctcttggtcttccactgaatccgaaagcagctgctgaagctgagaacatactaacaaactctctgtccactctagagactttttggcttaagggcagtgccaagtttttactcgggggcaagcaaccatctatagctgatctcagccttgtatgtgaacttatgcagctgcaggtacgcaaaaaaatcatcttctttaccaacttttatttgttttattaagtcatcgaaataccaatgtaactaaccatatcaaacattatggagcaaaaaagttgcttccttatctcggttatgacttttgattgtaaaatttattctattttataggttttggatgacaaagatcgtcttagatt

SEQ ID NO: 4269 - DNA, 682 bp, Arabidopsis thaliana landsberg
tgttagtttcttttgctcttctatgtctttctccttcagtgcccacaagttctcaagtcttgatcgggaatctgcctccctttcttctttctcctttagtagccacaagttcccaagtcttgatcgaaaattggctgcctccctttcttcaatcattgttttagtagcaactttcctctctttctgcttcgatgacttcacaccaagaggaagatccataacttgctcctcttcatctagtacccacaagttctcaagtcttgatctagaatcggcctccctttcttcaagcattgttttagtagcaactttcttctctttttgctttgacgacttcacaccaagagggcgatccataacttgctcctctccatctagagctataggcacactctccggattacagcttgaagaatatacaccacctccattcaactttgttctctttgagcttccaccccccttagaattttcagaggtgtatgtactacaccattttttattgtgtcggagctcccgccatgcatgctcaagtttgaaattactcatgtaattgttgtagtacaattggtatgcaacttggaaaacatcatcttcagattacccctacccctttgattcaaagcttgatcataacatcaacaaatttgcagacgtagtcgttattttcctccatcttgcc

SEQ ID NO: 4270 - DNA, 513 bp, Arabidopsis thaliana landsberg
ttttcctccatctttgcctgcagtgattccactctcgctttggtagatttgcaagtgaagcgctatttgaaacatgtgcaccaattctcttccaaaaagtatgtgcttgttgttcatcataaacgacaactttacgatccttactagtatttaaccaagcactaatgagaatgacatcgtcaggtggactccatttgcgtcttcgagctttacgatcggttgtgtcttgaacgaggtttggaccatcactcgtcccaccaatactactaaattggatactgtattatggaagatccatgaaactggatgagaaattaaacggagtgtttggatctcgaatgacttatctttagggggaaggagtctctcatatagagaccctgatgaaagtggtcaagttttttgttcttacatcttagattgaggacccggtttagatgcggttgccatctctcgctgcttctgaaatctatctttggctctgaaaaggacctcatggacctcatcagagta

SEQ ID NO: 4271 - DNA, 559 bp, Arabidopsis thaliana landsberg
cctaccagtcaccataccaaatctaaataatcaaagtggactctctaaccctttgcacctcttggaaacgattctttttctgagctctccagaaagacaaagcaccaatccggtttattctgtgtcgatacatgacttatatctcacttctataccacattgtaaatgatactaatttaaaacgatccaaaaatataattttgatagtattttgattgttcagattctggcaacattagagtaataaaatgtttagtgagaaatattcgatatatgttgcgttggatacaaaccaaatgttccacatcgaaagtctaaaaaaagagtttttgatatataagctaaattcaactccaactagtatgaggctttttggaagaagtccaataacaaatctttgcggttttgaacatgtgaacccagaaaagacaatatcatattaaatgagagttggaatggccttacaaaactcgctaaatggtatcaaaatatatgtcgaaaaagtagatttatggcttgaactatgatcggtgtgggaagacctctcaagcatgacacg

SEQ ID NO: 4272 - DNA, 1457 bp, Arabidopsis thaliana landsberg
atcgtttccagattcaaggatcagtttactgtgacacttgccgtgtccaattcgttacccgtctcagcaaattcctcgaatgtaacatattcacgcacgtatatctatgtttctacacatgtatgtgtgcatggctaatttacaacgtgcaaccgtttctttttaagagaatattttcgtttaataaaaaaacttgtcattttgagatggccatacatgcatgcgcacgcaaactatcttgcatgttagagcctagaggatgcaagcactgtcataaaataaatatatcagtttctaaattcgaatgagagtattgcaatgtccttgactacattttttcaaatatttcgtaaatcagcttctaagattaacattgatcagattcaaatttccaaaatatatccttttctcttagatcaaaaaggatatataaaattataaattaaccgaaacaaattcttgaggtctatagcttgtcgaatatatttccatttaaacatttaccatggtcataacaaaatgacgaaaatttcagacatcttaaaagttgatccgtgatcttgatccacatgataaattttccatccacacaaaaaaaaaattccatccactcaagcaaactaattatagttgaactaatttctatttattttatcttattttttacatttttaattgtgtttgtgcaggcgcgaaagtgaagttggagtgcaggagcagaacaaacggaaccataacattgaccaaagaagctgttaccgacaaaacaggaagctacaaaatggaagtaaccggtgaccacgaggaagaagtttgcgagcttgttttggtccaatcaccagacagtggttgcagtgatgtcagcacagaggcttacttacgtaacgccgctaagatcagtttaacggcgaatgacggaatcgtctcccacgagacacgtattgttaaccctctcggtttcatggttcagactccattggctgattgtcctgctgctttcaaggagcttggtattgtccctgacgtaacattctaagcgaaaagaaaaaaaagaaaaaaacatataacatgagagattttctatttgcttaactttatcaagtttataaccatataatgaattaatatcattaattaccttttcacgttttggttttgtttgatttgatgtgtgagtgatattttgttgttctatagtaaaaagaatgtaatttggttacacacgatcgaggaacttatattttactattagtttattacaaaataaaaaataaatcaatgagtagaagtttactgttgaatattggatttagatcgaaaaccaaatttagaagggaaagagatctgctcggactcccaagtcctctattttttatatatatatctcttgataattcatgcatgtgctcatatatatgtatataacacattacacaacttaacaagggatataatat

SEQ ID NO: 4273 - DNA, 1318 bp, Arabidopsis thaliana landsberg
gtgtgcttaggctagacattagtttagccattatgttgcttgattgtttgattgtggtaggatttattatcgtatttatttgcggtaattgttgtttgtttgtttgtttgttcgtaatttttattacgaattaaattcttagcaagcatgttaggttgtttgattgttgattgattgattgttgttggttaatcttgtttcagcttgattaacctttgtgtgttagttgcttgctattaggttttattacgagtagtattaggctatattaggctcgtaataagtaatgtgattagtcatttttatgactaaggtgtgacgatgtcgtgattgtcccaatagctcggaatggttcgctaccacccgagactgcccaacggggtagtaaaagttttactataaaggagttggtcccttttacacgatttggagtggggaagggatgtgatcgttttagactttgtgtatagcggttggagacattgccttgtgcgaaatcagcatcgtatagtatagagcccgtaggatgaagagtcgtcagcatgctagttttaaattaagcagtgcccgctgcaatcactccataaagagtattcattgcttgttggtttgtgttgtgtcattttgtgtcgagtatactccattgagtatactcgtattcattgtttgattggggactgggattgggatttttgttatttgttagaaacccgggctcactgagtaatcttagattactcaagtaactactttttgtcttacaagtaaccttagttggggagacctaaaggggaccacggaccttggggaaccggtgtagagtttgttgtcttagtaaaattagatttataaatttactcgatttgggcattagcctcgggatcccaatctattgtaagtgttttcatgttttattgaataaaggagattttctttaaaaatccttgtgtacttctgatattagtcttgtccggactaacacaacttacggacatggtacgggttgaaaagccttaggccgtgttcgtgaggaacgatgttcaaggatggcctgaccttggtaccagatgtgttctgggaactcggtcggatcgtctacgggcatctaaagtaacgcttccggattggttcttagtcctagaaccgttcgggggtgctactcaggctcaatggtctctacttcagctgcaaagtggacatggttattctttgtaagcaagttaataacggaatcaaacttagcatgtacctatgccatatgatttcctgaaacagctctagcaatcttcttcctctcaaagtcagcattcttggtatt

SEQ ID NO: 4274 - DNA, 3242 bp, Arabidopsis thaliana landsberg
tctctattattcttattattttgctctacactcctgctataggattctccagaaactcgataaaaccatccgcatactgatcttgcaatctcttgttcccgaatattttcttttgctgagatgcagcattgttcctgtagatctttccttcttcttccacaacaacatgtctgattgtctctgcaacagaagcactcgtgaacagcccgtctcgctcattccttggaatctccaagcctatattcatcccactgagcaacctagccactagcggctggtctaggttacatggaaacatgatcaaagggacaccaaagctaagcccttccacagctgatccccaaccacaatgagtaacaaacccaccaactgaaccatggctcagtatcttggtctgaggtacccactcggtccaaatgactccacgctctttgactctctctttgaacccatcaggtagtagcatagaagctctagtcctcttccttagcgtccaaaagaaaggtaacctgcaaagctccaacccatgagctaaaccttgaatctcttcgttactaatagtcacttcagttcctaaggctacataaaccacagactttgcttgatgtctgtctagccattctctgatgtctaaccatgttccctcgtcatctgcatcatccattggtgtagccgggagtaaaccaattggaatcacaggctttccttggagtttactgagcaattgaatccactcaggttcgagttccatacatgatctaatcacaataacctcagagccaacgtaagccaaacccaatctacagttatcgttcaattcaactccagttacacctgccgtgggatactccatgatcctcttagcttcaaagagacggtaaactatgttggtctcaaacgggacccatggtggaggcacgataagatcttcagcagtctttcgagggtcatgaccttgaatcatgactgatgctggcccaccgatgatgatgatggaagctgcgttgaacgtgcagaagatggctcgtctcacgccgagcttctcagcgataggcgggacccaatggtgcaagatatcatacactatccagtttggtttggaagcttctaaaaactctgtgaaagcttcagaaagcccatcaaatgctttcttcagataagctatgtgagtctccgggacatcagtggtggcctcagcgttctctgggagatggtcgacggtttgacttaacggcaaagaaacgaaattcacggaaaggtcggaggatatattgggaagacgtgaaatgttacgagctgtggagatgaaggacacagtatggcctttccttgctatgagctttgagagttgcaagtaaggaatcatgtgacctaaagctaaccatgggaacactgcaacatgaagcttcggttttggctcggccatggtctctcttcgttgataaacaagcaagactcagactgattctctaaagctcttcttcttcttctgtttgaacatctggtagtcacaatggcggctaagtagatgtactcttgacacgtcaaaatctctatctgtcgtgggtctttggaatcatgcgacatgcggtaacagatgtgtttttatttgaaaagtgtgaatcttttttttttttctctgagagattttattagaactaaagctcttacatcctcaagaacagaggaaccacataagctcaaaaccggttacacatatccggtttcagagacacagcaaacaaaaactttaagaaacgatgattatgcaagttctaaaattctaacaacttttccaatcaatacttttcaaagatttgaaactgaaatcaccatgtggaatcttcaatatcttcaatatcttcaaatccttttgtcctcacttggtaataattagacttaaagtgtgaatcttatatcgttgtatgagtgtaaaatgattaaaaattgttttggtatatatcaaaaatgaaaaccaaaagacaacaataatcatctgggcgtctacaaacatcaaagcccacattggtctgtttttcatctcttttgatctactctgcataggagattaaatataagcaacagaagacaaaaatgttgtcaggagttaaaaaatgttaggttccatacctaataattagaaccaagctgccacgcatgaagcagagaagctaggcagaaggaaaagagtttgcttcaagaagaaagctcaacgagtttgcttcaagggccttctctttaagtaaaaagacaactcatttaaagaatttacagctccagtgccttaataagtaaatattgagcctttgacagcaatattcatacttgttgtttagttaaagatctaagatgaatcggaggaacggctatgccaaagtttgaacctgaaaacaagtaaatcaaaattcagaaaagaaagattagagcgtgaaatggaatggtaatgcaacacattttagccagaaaatatgaatatttgtgcgctacctttattgtatgacctgtagcaatatcacaagaaacaaggcaacttgcagatttttcaggtcgagtcatggatcaaaagaatctgagttccaaagaattgcatgagcctctggcaaattgatataatatagaaacccctttatgtgctatcaggaggtccttcgattagcagtgaatatgtctgagagctaaacttgcagccatttttctccataacgctgaatagttcataaaatgcctctacaagtccctgcttccccacaccatcaatgatgatcttccaagctaattcatcctcataataaccacattgaagcaaattctggaaaaccgaagtacctctctctttttctccttttttatacagcccgcaaatcaagactttgcaagactctagttgcggtaagtgaccaacacaaatcatatcatctacaacctttgctgcttcgttatgctttttcagcttgcagcaacagctaagaagcgcattgaaaaccaactcactaggagatattccttcgtttcgttgcatgtgatcaaacaccttttccgcaactctgagattcccaacttcacagatccctagtatcagtttttcataggatttggcgttgggagttacactgtgttcaaccattttctcaagaagctcaacaacagtatcaaactccatcatattagacattgcacagagttctggttcactgcctttctgctttccatatttcaatcctaacagatgtttgatcagagac

SEQ ID NO: 4275 - DNA, 1272 bp, Arabidopsis thaliana landsberg
  unsure (1)..(1272): unsure at all n locations
aactcgctcattgctactttcgacggtttatctccgcctctctatttgctccgtcaagccaatccatgaagcatagtttatgatcgggaaagtctaattattaccaagcgaggacaaaaggatttgaagatattgaagattccacatggtgatttcagtttcaaatctttgaaaagtattgattgggaaaagttgttagaattttagaacttgcataatcatcgttttttaagtttttgtttgatgtgtctctgaaaccggatatgtgtaaccggttttgagcttatgtggttcctctgttctcgaggatttaagagctttcgttctaataaaatctctcagagaataattaaaaaaaaaaactcacaatgcgctaattctcaaggtttattaagggttacatttttcagaaaaacataatacagcaataatcaaacaataatttaaggttttacttatcaacaataatttaagggttttttttaatcacaagccttggagaaacatatttcaatgtatctagctagataatttctttttactgtttgtatattttggtgaccacagaaactcaaacagtactcgaagcctgcaataaagatagaaaaaattccgagtttccgagtttccgagtttggaatcggtgtttcaccttgcaacttagccttcttcgcttagaagtgatctgaacctttttgagttgtaatgttgtatttattttctgtagattgctgtgatctggtttttgtaatctttgtaattttgtaaaaaaacaaaaatggtataaaatttaaccttttaccaataaaataaataaaaaaaaatagaaaaattggtgggtgaaaaacagttgtcgttttaagcactaccagagactttttctttttttgttatcatttttcgttttaagtcaagctgaattaaacatcactctttctcctaaagagcgacaacaggagagttccttgacgccatcaagaggttagtaaattttttcttgtaatgttattttctcttttattcttagaaacctttctttgtccatgttctggatcggtactactatttgtctctgtaattgcatcggggactcggggtacgttaagagagacacaagcttgaatccagttaaagataggttttgtttgacttctatatgttgaataacaaaaaacaagccttatgccaagaattcattacttgaaaagatatataccagtttgattatgtttcactatanatggtaaaacttaactacattngactaatata

SEQ ID NO: 4276 - DNA, 150 bp, Arabidopsis thaliana landsberg
tcgactctccccggctcgctttcggcacagagatagtcaaagcagatcttgcttcaaagacacttgttagtgatgatggcaaaatttacaagtaccaaactttgctaattgcaaccggttctactgtgagtaaaatacttatgatctctt

SEQ ID NO: 4277 - DNA, 4368 bp, Arabidopsis thaliana landsberg
  unsure (1)..(4368): unsure at all n locations
caaggaaggtttataacagacatcatttatgttgaatttaattggtaagtcaactaaggaatgggatactttctgatgagggaacatacatactatcatagtactctggaacaaaaacacatatacagagccactttcaaaaccaaaaggctgtaatgaaaacacagacaaaggagagatagaattggtaactaggagggtttcttacatttttcaactgcctgacttggccatggagacctgtgatctcatcatccaggtcagagtgcatcggatcaatcctcagctggatttcttctgaacctgcagcatttctagtactaagcccttccctgcagccacaaatacaaatcaatagagctatagttccgcagaaattatcaaaatctatgacccataaatctctagttttctctatccaaaagatcagagaaagaaatttaaaagcaattccaaaacgagaaactgataataaagttatacctagatctgtatggagcggctccgccataaaggaaaccacccgcaccgcttctnnnnnnnnnnnnnnnnnnnnnngcaaaatctaatcggaatctgctgaggtttgaaatcgaacgcgaattgaaattgaggaagaacaaagacgggtcaaaatgtcgggttaatgggtctagtcgtttaatttaaaacgctgcgttttagtctagttatatccgtaaacacaatgacgttttatttaaccgttggatcatatcagcaagcagagcaatcgacggttaagattattcgactaggtgctttaagtgatatttaaaccaaattacacgaataaacttatcgtcaaatcactttctctctctctttctcgncttcaagagtctttattgatcttgaaacaccattgatacaatgataagtgtgatcatcgagaatcagagtggctcatcgttcaccattgatgttgctttctgggacacagtgttaacgatgaaacggaggatcgagatgactcaaggtattcccgtttccagacaaacactcttcttcaaacgcaagcttcttgaagatcatcttgatatgtttgaatacggcatcttccacaactctcgtatccttctctccatctctcctgacgataaccctactcagaaccaagtccctcaatctccatcaaatccgattcatgatacaatgataaaggtgatcatcgagaatcagagtggctcatcgttcaccattgatgtttctttctgggacacagtgttaatgattaaacggaagatcgagatgactcaaggtacccctgtttccaagcaaatacttatcttcaaacgcaaggtacttcaagaccatcttaatatgtttggatgccagatacgtcacaactctcgtatccttctctccatctctcctgacgataaccctactcagaaccaagtgcctcaaaccaaccaatctccatcaacaccatcaaatcctattcatgagttcgttaacaatcaagattctccattatcgccaaaatcaagtgctttgacgatggaaaagttcagtaagaatcaacaagatcggcctccattaatgagagtggtggcgaagagaatcgacaatggatcatcacgaccatcatattcacttgatgagttacttgcccctcgagattcgtcgactgtggcggttgggagcataagaaacagggatcaagaggttaaaaacagagtatcttcgccgtcagactcagtcgaagaggtcattaacattacagactcgcttgcgatgaagatgatagtaatggtgcagccatatggatataccaggatgattcaagtagaggttacagcagatgataacgttgaagaactgaggaaagagctggttaagatgcaagagaggggtgagttaaatctgcctcaaggaatgtattacttaatacacaagcataagcaggctgtattacacgaagatcagtcattcttgacgaacggtgttgcttacggtgatacgattcagatttcccaagtggttgaacgtttgatcactaatcgatcttaaattctttttcttattggttttagtctttcttcaagttttcttgcttttttccaaagttcacagctttctgaaatatcctaacacatgtaataccaatatgagctcaaagaagagaaataagttcttgttgagttactataagctctgtgtacattctaattcacatttcttttactactttaatgtatcactagtacaaagatcaaatgttgaatctttattgacaaagcagagcaaaagacagtaaagtttcttgctttattcaaaaactaaaaccaaagaaaaatcacattactaatttgcttataaacactctgcgactaataaccgttggatcatatcagtaaggagagaaatcacgaaattagcaaactctcgtcacaaatcatcagtttctctttctctcttcctcatttagtctctctccactgatcttgaaactacaacgatgaacgtgtacatcgatactgagactggctcatcgttctccattactattgatttcggcgaaacagtgttacagataaaagagaagatcgagaagtctcaaggtatccctgtttcgaaacaaatcctttacttggatggcaaggctcttgaagatgatcttcataagattgattacatgatcctcttcgaatctcgtctccttctccgcatctctcctgatgctaaccctaatcagagcaacgagcaaaccgagcaatcaaaacaaattgatgataagaaacaagagttctgtggcattcaagattcatcggagagcaaaaagctcacgagggtgatggcgaggagagtctacaatgtatattcatcactaccggcttattcacttgatgagttacttggccctaaatattcagcaactgtgacggttggaggcagaacaaatcaagtggttcaaaccaccgagcaagcttcaacgtcaggcacagccaaagaggtccttagagattcagattcgcctgtggaaaagaagatcaagaccaacccgatgaagtttacagtacatgtgaagccatatcaagaagataccaagatgattcaagtagaggttaacgcagatgataacgtcgaagaactgaggaaagagctggttaagatgcaagagaggggtgagttaaatctgcctcacgaagcgtttcacttggtaatcagtgagttaccattgatcgaaactaagtcattcaagtggaaccgtgttgctgatggcgatacaattgagattatccgtagactcgtgcctttttgcagtctcctcttttctcatacctagtttttagtctttcttcaagttttcaaatatgctaagacatgtaattaccaatattgttgttgttaaaagaagagaaactagttcttcttgagttaacatcttttcgaaattagctctgtacattctctagaaaacattacgatcgggtggtctagttcacatttctttcggtatttttcaatgtctagttacagcaacaagtatgaagatcaaatgttgaatctttgttgataaaacagggcagaaagactgtaaagtctcttgctttactcaaaaacttaaccaaaaaaaaaatcaaaatactaattgcgtcaaaacactctgcaactaatgaacgataacgttaaagaactgagaaacgagttgatgaagattgaagaggaaggtgagtaaaagctgcctcaagaagggtatattcttatacacaaaaacagagtattgaaagagaatcagtcattctgggtggttggtgttgatcacaacgatacaattacgatcattcctacacatcttactcgtggctcttaagtcacagttctttgagtagcataaaacttgtatatttccatacatagaacaaaagctataaatacaactcttcagtctcttgctttgtgcaaagtttgcttttgttcccccttaaagtaacaaaaagcgtagaaagttttggaaaacaaaatcaaaagaaggaaaaaaatggtggttcatatgagatcggaccagcaggccatagtggttctgagcgacgctaaactgtgatccgtccactgctgtaagcgggaagtagtcgctgctctgtgaaaccagcctcacgcattgccctccgactttagaagtcgtctgagccaagccttcgcttgacacacacggattactcacagcttggactgggcagctcagaaacatgccaacaccagaaccgacccgtggatccaaaccattgtcccaccatcttattgtccctacttaggttacaagctttcgtcacttagctcgacgttaaccatataatttcgtgtaatatataaacaaacataaaatgagtacagttaccgatg

SEQ ID NO: 4278 - DNA, 4053 bp, Arabidopsis thaliana landsberg
aaaacatgagtgcccatgaaacttcttttcgggtaactcttttttgtcattaccaatatcagtatttacttttagaaagaaagaaaaagagagaaatacagtatagacaatttttagcgtctccgcatggttactagtgaaaataaggtctatagttgtttctactacagtatgattgatgagttgccatttgaagattcagtttctatataagctctaccgatttgtgtgtaattatgttacactacaagctatattgtattggtaatttttctaccatttagtaccattacatgtgataagcaccatacttcatcaactaacaacgaaattttcaatcatgaaggaaccaaaaattatcttccaagtatagagaacacgatttaaaattgtctaagggatccaaagacatggcaacaaaagagaccgagtatcttacgactcttgaacgatttcctcagtgacatcgataagatcctcaaactcaacttctttggcttcatattcatcttcttccacatcacttacttcaccatcccgaaggttttgcctcacgagtttctcctcttcatgcagagacttccactgcatcacccatttctcccattcttccttcaatgcctttctcttctctctgtcttgttcactcaacagcaacgacacgtcctgatcctctgcctcatacttcttgctgtacttcttcagggtctttgctatctcttcttccttctctgcagtcaagaatgatggaggtcttggacgccaagccaactgtgtaaccaaccatacacaaatattttattagacatcggaatggacgatgctcgtttaagaccgagtttttcttgttacatacctggaagaaatgatccttcaatatccggtaaagcataatcccgttgaaagaccatatggtgaacccattctccatctcatggactgatgtcactgcggttgcaacgtacctttgaaaataaaaaagtgcaaacaacatcagcaattggaacaaatagaaacaaccaaaggactggtttagttaagacagtaggaccttccagtcgggtcccattcgatatccgtggccatgaagtgttcagctgtggccattgtctcgagctcatccacgttgaaaaattcaagctggccattgaaaccttttaacccagcaagaattatgtacttgcctgtgggcgaccagaagagggcattagcttgtttggccttcaaagttgcgagctttgaaacccttccagtgttttgtgcggtcttcattgagtagaaactgacatctggtcttggttggtcaccatgaatcacagcaaacctgtgacccttgggctcccatgcaaaagcaatgatcttgtcgttcttgttgtccagctcaagaacctcgatgggaatatccctttctttgatacggaaaagttcaaatccagagtatgtgctcttcttagtttttgtgtatcgatcaaccttgacagcaagatactctccactactctgccagtacatcttgcagtcgctcacactgaagagattcttctgcctcagctccaccttgctcgggatttggactagggcaacctggagaagggatatcaacatgtaatttcaaaacaccaggcagagaaacagaagcaaattaaggattcagagcttttcatgtacatcagaaataatagaaacataccttcgcaggttggtttccaccaccttgttcaggaacaaacaatgaaaggatggaatcagtaggagaccagcagatatccacaacattatctaccttcatggatttcttgtctattaggctgaaagtctcagtctcatagacagagatagtgtttttgctaagcttggcaaagtatttatcatcttttccaccagcccatctgtagaaaaagtttacaagatatcaacatatgtccataatagtggagaagatgataatattggctgtttatttttaggacattgacatgcagttgaaagaattacctgaaaacaggccaagaggcaccagcaacaccaccaggtcctccaattgaaaactcatcagcactacccttgaaatctctcatcatcctcccggttctcacatcaaaaaccttaatctcaactttctgaaagtttgacagaattcagcgtcacaaatagtaaaagttgaaaagaacagaagaaaagatgcactcacacttgcatctcgcgggttgcttggttcttggctatggtaagttacaagatatttctcacctggcgagaaatcaactagttttacctaaaacataatcaacaaaagatgcaattttcaggccaacagaggaaaaacggaagtaatatgtagcaattgaaaggaaattcaaaccatagaatgctgataacgcatgagacgcgtgaatgtatcagcaccaccccaaacagctgccccctgcttgtggagtgtcacaaggtatgtacctaaaggagaccactgcacataactctctgtccaatactgcataggaagagaacatcattaattcaaatgaaggtaacataacatataaaagtgctctaaacagtcaagtaaacaaataagggatattaattcaaatgaaggtaacataacatatacattgctctaaacagtcaagtaaacaaaagggatatacacacaggaagtaacttacaggacgcttatgaacaggttcaggcgccttctgcctagtatcattccataaaacttcagtatcagggccagaacgaatgactagctggtctcgggctttttcatcagtaagccatttttgcaaattttgctgaggggacaaacaccatataagtaacgacaattagcaccacaaaaggctgcaatgaattaaaatatatacatgaaacaagagttatgaaaattatagttattagttagtatacatcaattacgtaaaaagatcctaaccctaacgcagcaggcaaacacaaaataaatcagcgaattaccaaaataaagaagtgattacacagacacaatggaagttattcaaagaaaattattcaaggtacagggagtaacatgatgaaaactacacataccccagggacgtagggcctggcctgaggaggctcccactcctccttcacattcatcaacctgtcaaaatcatcgaacatgtttacagcaaagatgtgagacttgtccaacttgtagccatgagacttttccttagcgttttgtgcttcctgcaaagagccccagacattgagagaaactcttaggaaatactcaaccattaagaacaacctagttcgggctcctttctaacaagagaaataaagtattgaaacatatgacgccgacattattgcttcagaatccaacaaaacagagattaagctaatcaagtagataaataacctgaggagtgttgaactcaataaaacagtagcccaatgtcatcttggtatcaggatcaacaggcatccacagtccattttccttaatcacacctaactggttgtaaattttcttgacaacaccttcaagtttctcaaacttctccttgggaacaacagggaggtgatcgaccacgataatgttaccgaatccagtgtcgaattcagactggtcatcctggtaaacagcttcatcatcactacaaccatcacagaaaaaaaaagtgtataacgaatcagttccatttttcatacgttcatagataaaatgtataaatataataagctttgcaccatcaaggaaagagataaaccaattcgaaatacacaaaattttcatacatacaatagcaaaacctagaataaaatcatcccatcgtataaacacaagaagattagaaatagaagtgaccgtatatgaacaaccagagatctaaaggaaaatctcacctctcgatcccaaagtcttctccaggaggaagttggatggaatcaaaattaacctgagaccaatcaatccctaacttagcagctcgggcatcaatatcaacgacctccatgatttaaaccttatatcaaaatctgcaaagaaagcattagagagagctataatctttacacatc

SEQ ID NO: 4279 - DNA, 2289 bp, Arabidopsis thaliana landsberg
  unsure (1)..(2289): unsure at all n locations
gggtttgtgcaatcgcctaaattgtttttaacttgcattcgttatatgcaaatatctaaatgattaaagccaaaaccaaaaatatctaatatgatatattaaaatattaagcttcattgtatcattcttacgaagtgaccaactttagaagttagcgaattgtctgtcattaagcctattgctccttgtcgtcttattctttgctcaccaacgagctacgtcctttgaatttcttattaaagttgttagcatataaactatgactagtgcccatcaaatttgaagatttagcatttggactcttcttgtgttaactgaacatggtcagtcttacaatatctatatattcaatggttatcgagtgattgtgtcatgaaatgttaatatagttggatcttttttaaaaaaatgtaaatatagttgaaccatatacatccgttgaaaacaacaacagcaaaaactgatagctctgaaccatctttgtaagagtgtgagtcttgatatcaaaccgaaaccacccaatatatgtcaaaccaatttctcgattattttaataagatggcatatcgggtgttaaaagtgtttgtgctacacaaaacaaagataatgtgaagtctcacagaagaagctactattgaggatatgattgatattaaggatatgattgatatcctagattgccaatgtcgtggatacacatatgtaaactcgtatatactctcattcattacattgatgtaccctaggtccctagctactcacccttgtatatatattggngattctcacgatgtaagaaaatcatctcttttataaacttctatatggtatcatactatcatgagcatgagttctcttcagacgttttacctccccagtccccacaatccataagctacataaaaccgatctccggtttccacattaatttaccattagtatttacaaaattttgtaagtaaaagaaaaataaggcaatcatgcaaaatcggaaaaaaaaaaagatggcgaaaaggaaagggtgaattgcaaaagtgatgcttttgggtgaaagaattaaatatatagcactataattggggaaattaagaaagtaacaaatgaaggtgaggaaatgtcatcaaactcccttttaaacgcgtggatagattgtaaaagtgaatgacgtggcttgtgtttttaccaacaattttattactatttggctcaaacagtacaaaaaatattatgtaaccggtttcatctaaactccatcaaaaattgcagactatcttcaatttatgtgctaacactagcacaagattttgatatccacatgaccacattggcaacggtggtggctccggcaacggtggtggctagctccggcgacggcggttgctccggcgacaatggaagctccggtgacaatgggaaccccaacaatggggtggtggctccggtgatggcattcattccggtaaggttggtagctccggcggcggtggtggtggtgatgatggcggagacatcggtggtggtgatgacggcggcggcggtagtgtgtggttatggtagagatggttgtggtgataagaaacaagggtataatggcaaatattgtagaaaatatactgaatatcatccttttttttttttggttagttagtgaattattaaatttttgtagattattgatgtaaatttcccaaaaggaaaagaaagtaaggcgggagtggcaattcaaaaccaaaataaagtaaggaagaagcgagtcaaagtaaggcaacataattacgtacagtatttgatgagtcaaacgtacatctttctatgaccaaatttgagaggtggctacttctcttaggctttgcaacttgaaaaatatgttccgcatctaatctaataataggatgttgtcatgttgatatgtttcgttgaaaaatattaattctaattaaaactcgtgttaacatcaggattggatttttatgttcatagtgataattaagtatctccaagattagtgtaacaacaacaaaaaaaagaataatacttatatcataatctcaggatgatcatgattgctcaactaagtagggattgggtcaatcactggttaaaagaagaagaaaaaggtgaaatgattattctagagttttccttaatgtgtggctattaagaagacaaataacataacgtaatgtcataatccattaaagttgaaataccttaaaaccaagattgaaatgtctaaaaagaacactcgatacttccttttaattccaccggtctaagtcttctttcatt

SEQ ID NO: 4280 - DNA, 1756 bp, Arabidopsis thaliana landsberg
  unsure (1)..(1756): unsure at all n locations
catctcagtggagagttttcctttcgggattgaagtagaaaacataaaatggttgtttagatgtgtacttgcgcatcgaaaacactatttcacccgaagcagtggctccagcaatggaaaggtgacgatggaagaatgtatcatcggtccaagtgtaggcatatttagaccattcctgtttctcaacatcttctagaacccacacatgcaactcgttagtggcatcagcgtcaagattttcgtccaaatactcatcgagatccttcgcaaagtaacaaatctcatgaatgtcgacatcatcctcccaatagatcacatctaacttgcccttgtagttgatcaatagacaaaacttttgtacgccaacaaaggtgaatttctcagacgtcacatcaaagcaaactatcacatactcataatatctgtaagatatgtcttcagtgtgagctaagaaatacaaaacaccattgatgcatatcccataatgtacatttaatatttctccatgtcannnnnnnnnnnnnnnnnnnnagaactttactacgaccaggaccatctacataaggaagggacaaggccttgtattgcttgtcaatcgggtcaaacccgaaaaaactatacgcctttctgtaagtatacagataaggtaagatggcataccgtcctgtgatggggttacatattagaggtctagcctcgcctcgatcaccatataaatagatcaaacccgaggcgtacacattgaaaaatattttaggtcataacaatgacagacatgtagatcgtctggagagaactttacatgaaattcagcggctgctacaagagtcgatgaggatttctcatatggattctcaagctgtggcgacgtgaagaacctccacacacagttttcctcttcgttgactttctctgcgatggcgaataagaggcgcggcttagtggaggacctggtcaggaacaactccttgaaatatggactaccaaaaattgatccccattgcttcgacacgcaatgaaacctcgcgactgactttgcaggcaatctcgacaatatctccacggtgagatcattcgttattgtacttggattcatgattgccgatcaaacgaagaaagagagatgtgataacttgtatataaagtaagacctagagaaaccaattaacaaaagacctaaagagtaaagagtaaagaccatatttatatatcgttaacgtccaagtgggccaccagctattggattttcttcagtaatcgctgctttataaggagacgaacaagatgagaatcaatcctgatgatgtgtgacatacaattgcttgatgaagaagattgggttggttcctaccagatttgcttgcatggtgaacaatgttatggagtctatgttttgtatattaatatatactttgattcattaattcatctgatatggttatcatgacagctttgaatgaactctgtttctggtgaatactataactcgttttgagacacagatttgcaaaagaaactcgattgttgcgagttataatgcaacttgtgaatctggtttgctttcttagtcattttctcagggaaactataaaacacactacatactaaaattggtccaaagcctcaaacacattgagctagatagaatgatagacccatcagatagacaataagaaaagttcagataccaacttaaacataaacgaaagtgatagattgttgttactcttaattcgattccacacttataaaacac

SEQ ID NO: 4281 - DNA, 2806 bp, Arabidopsis thaliana landsberg
  unsure (1)..(2806): unsure at all n locations
cactgtatttccaaaaagtattccccgaaattaccagtattacacaaatcctactattcatatattagtcaattgtaaatagtactgccacagtattactctgtatttctcagaagtattccccgtaattaccagtattacacagatactcctattttactatgtagtatttctcaaagttactagtactaactatcgataaatcacaattgtagtattactctaaggtattacccacatccgccaatattacctaaatatcaacatagcattttccaatgttactagtactgtccacatttcacaattgcattattacccaattagattggtattacgaaatggaatacttaccacatttgcgatgtcctcggctatggtcctctcctccacgggtttttccacttggactatcacgtcctcgtctctctcgtcctaaatatcaacatagcatttcccaatgttactagtactgtccacatttcacaattgcattattacccaattagatcggtattacgaaatggaatacttaccacnnnnnnnnnnnnnnnnnntatggtcctctcctccacgggtttttccacttggactatcacgtcctcgtctctctcgtcctcgtctccctcatcctccacagacttttccacattgacgtcctcgtcgctcgcggagctcctctcctcctcctcctcgataacggctaggcgtcatcttgtctctccgcctcttccacgggattagcacacgcgacttctttgtttgtctccgtctcctctgaatcggaatcggagcccaaggtttggctactactccctgattcttcttcttcacttccttcttctttttcattttcatcttccacctcatcagtttgcatattctcttgaatttcttcagcaggaatatgattcagagcatcataaaacgtagaatcatcaagcatcgggctctccgtcgttggagccgtcgtcgttggagccgcattggttgccatcgccgtcgcagtcgtttgtgccgtcgcagtcgtcttcgccggcaccttctccttcactttctctgccggcgccttaactttttctgtcttcgcctgcgccggcgcttctatctcctttcttttcccttgacctcctccacgcgtcttaggcggcatgactgatttcgaatcggaaatagaacggaaatactggtgaaaggaagaagaacgatcgattgaatttaaagaaatagagaatgttgcggttaatttcagcggttactaaggagaagaagaagaaaaatcgaaaacggttgtaatgaggaaaagaatgaaattcgaattgggaaatccctgtaaatattagagtttttttaatttgattttcaaataaagagtaaaggtggttcggatggtttggttcggaaacgaaccatggtttttctggtaattaataggttcggatggggatatactagtaatatccatatatttcgaattaaaaaaaaaaaaaaattatttctgttttttacaaggattttttggcttcctctttgcaaaaaagggactggccagatgattttttgtacgtgactacaaacgttgatagaagaagatcggaccaagttgactcgttcttggcttgttctttaagtttcttgatgttcgcttcactcaactcgagcgtgacccaaaccacgttgatgttctctttagcgggaggcagcattaaatttcttgcattgactttctcctttgagagatacggcaagagttgaaagagttttggttcgagtctggccggaacattgatgatcgtacgatctaaaaccataggtagatcaaaatcttgtggtatgttcccgtgtttacatatatgagcccaagctttgtaaaacttggacggggttttgccgtccatgacgacatggtgaactatggttccaatggagaagccttggtttgggaaaaaagtgatttgtatagacagaatcgatgctgagtcagaggaaacttgtaactcggggacaagaggacgtaactcagtctccagacaaagctctttgctagagatataagagaagtcagcgtcagactcgaccactgtgagagaaacagtgtctttggggcagatgactatgtgtggtttaggatcttgggggttccatttgaggtaaccggatagtgggagaaagtgtgaaaggaagagggagagggattgttcgagcttgggttggatcgaggagaagaaggagtcacgagatgactcggtgagtttgtagaaggtgactctctctgtgggataaagttttagccaaagtaaatcaaagaaagtgagtggaagaacgagtggttcgactgagttagttgcagggctcactcgggcgatcttgatcacgtttaaggccatcgttgacggagacaatctatcttgggcagtcttcgaacagacgagtgtttggtgtgtgccaaagtaaaactttattcaccaattatcaaaagcatatgaaagatgctcagggtaggtaaagcccactacaggaaaattgagtattcttagcggtcgaataacgctatctaacgagatgatagcggagtagaaagcgctatatcttcgtccatgataataggtcgatgacttccgatagcagttttaagtagtgctatattttgattatatattatagcgtgttctttttgcaatttaatattatttaataacgattatattttgttattaattattaaataacagtatttaatatatgcaatttaataaattggaataacatttataatatgcaatttattcaattaaaatagcatata

SEQ ID NO: 4282 - DNA, 2455 bp, Arabidopsis thaliana landsberg
gggacatgtgtcctgcatattgtcttaatccccagagactgataagaagattgcacagaacacgatcacgaggaagaacttcatccttgtgattatgttacgaagagtactcaacttgtcattaaccagatttaaacagaaaatttaaataaggccaaaaaatactctgtttctaggcgatgtggcttagggttgagtacactacttagtggcattttgagtaagattatgttctaaggtgaaaatcgcttctaagtaatatttttcactgattttccaacttattgatgttgacattattacttcttcaagctctaattctattctgtttacctgaaaacgcaattttgctttgctataacaggaaaccaaaaagaagcttaactgccttagcttactttcatgaaactctcgatatatttctctaatgagaaagtacaatggtttagttaacgaaattatacaattgaaagggacaaacgttcatgtccaaaacccaactagtccaagaaaggaaaaacttggagattatttgaaatggagccgggaaaaacgacgtttctctagcgcccgttctcaagtagggaagtatcggtttcatcgtgcttttcaacgctctgaagaatatctttgatgaactttatgaaagagcagagtccacccaagaaattatggtcgatgacaccgtttccatcaagaacatgcgcgaaatccaccagcttcacttgtgcccgtggtgccggtgcatcatctcctcctttcatcaagattgattcattctcgtaaatcatcagaatcgagcaggaattgaaatggtaaagcgtttgggtttcgaaccaatctttaagctccaacaactgcgctaagatcccgttacaaccgccataaacctctgatgcaaaagcacagtttggtgtcaagttagagtcagcgggagagttcgatgacacatacttcctcagagccaatctagcaccatctgcattatacccaagaacaagcttcttctcagctctccaaaaacttgattcttggtgatcaaaaatcttaaaacctgaaaccctgaaccccaacgaaaccgtggtggtctgtctatctttcttaatacatttcttgaagtattcttctgatacatccgggtaccatgtcctagatccaatcttaacatccattaccgacgggtttgcgtaccctgaaacaacatcatcaagaacaagatgaggaagcttgccagatccatcagatgcttcacctagctgagtgccgtgatacaccggaaagtatctatggatgtgatctggaaccttcttgttcgatgtgaaagactcatagaacttagcctcgtgttcgccacgagaatctccctgaagtggcttgaagaaccggccttggtcatctacgagtggacctagcttcccatcactagcaatgtgaccagcaacttggtgttcagggaccttgagcatcttctttgtgcaagagtatatactgaagaataagaaatcaaattcgccgttaaaaaaaaattgaaactttctcaagatatattagatctaaatatttacagatcattcatcttaagtcaaagtagacgattagatccgagtaacaaattagggttactctaatcaaccaaacgcaaaatctaaaaaatagagtctttcttatgaatcaaattagggttcttcaattctctccagataacaaagagaaagaaagaaagaaaaaaaccaatcacgtctatcagaattccttgagttcatcgccgaagaagagtaataaaaagcgcgtaatgaaacaatcccagagtcacaccatgacaaaaataaacaatttgagatctctaaaagcgtacaaaaagtgaaaagtctttagattagaataaacattgtggaactttagaaaagtaacgatttctggtgataatacataaatattgaattggagcaacacgaagaactttgctcaaaggtaagagatttatcaaagaagaaatatattaccaaacaaatctccccggagaaatttttgagatgctcaaacgatagcaaaataagtgtaattgttgattgttctatgcaaaaaattcccaagcaaccttgtcgggaagacgaataaataaagaaaattaatttaagtaataattgaataaattctttatggaaaaagattgaatcactaaaccggacccgaatgaaccggatcgtagagataaccggttttgaataaatagggcgtcttcatcagtctttacaaaattcagccgtcatctcctacctcagactctattactccggccggcgaaattagggttaggtaatagtctctacttcgagtgtattactctctatttgagtcatccatggtttttggtatctatctgtagaagccctaatttagagctcattcactctcaagggttttaaagaggtttttgcttttgttaatagataaa

SEQ ID NO: 4283 - DNA, 1596 bp, Arabidopsis thaliana landsberg
aaacatgtcacggaagaaacctcgtttaaaacataactacacaatatttttaccttcatattccgcatatcctcgcaaccaattacgagtacaaagcagagtttgaaagttcttcggaagcaaccagttcatgtatggactcgagacccgtgctctgatgctaaaagcagactcagatgctactgtcgtgataggaatgctaagtatgtcatgcaccatagatgctaagtcactaaatctgtgttggttttctttccaatagctcaaaacatccaaatttcgaaaagcctttctatgtaacttggctcatccaaataaacatctaattgcgtcttcatgttgtccacatcactttctaagcttctttctagctcaaaaaggattacaatatcattttggctatgagtgcaatcttggatcctagatgaagttgcagattcttgaaaaagtttataagcttatgagtatgttgatctttctacttctaagtcgaaagctaaagaactcaaaaataaattgaaagaactctacaaagattatgagaaaaggaagttggcaagtttatgtggagctttcgtcggctctctcaactatgattcgcttgtggagctttctttgactctctcaatattaatgtgaaaaataaagaatcggatcaaactgaaactgtataatcaaatcgaaccaaaccgaaatattaataccaaagatttggattgtagctctttcgattttagattttgttgtaagtatggtttttttaagagagaatgtaaaatttattcaatttttttaaaaatgcatcagtttacaaatatatcaaactactgttttcattttagtgtcgcaaaaaattagtcgttaaagcatagtataacacataatgtgttattgcatttgaaaaattttatttgttggcaaaatgttcaccaacttgtattttgttgtggagcattcataagctttggaaaaaagtatgaaaaatttaggagataaacaattttgttaagaattaaaagataaatttgtacaaagatttcatttgatgaattatggatcaaattatttaggtttcagtttataggacctgaatcaaaaataattttaatttaagtaaaactaaattgagctgaaaaataatagagtttattaaaaatatatattttttagtttttttatctattatatcatcattagaagtatttgatctaatcctattatgaagtagtttacctacaataataatgtttaaaacgataaacaaaaaaaaaaattgaacataactatcataaattgggttaattggtattgttccgtcagtcagcttaattagtattgctcagtcatattaaacgttacaaagttcggatcgaattctgaccgaattcaaacggtaaataaatcgaagttacttattacatggatttaaaagcaacccactataaagtccagtgggtttttagaacccaaatgggaaaacgacgtcatatcatatgtaaatttcacatcactgacgtggacaaatcggtatgaccaaacaacggcagagttctcacttattatcatcaccggtgaaccaaaaggtttagggtttta

SEQ ID NO: 4284 - DNA, 829 bp, Arabidopsis thaliana landsberg
cacctggaacaccacccactacagcaccgcccaccgcaactccacctggtgcaattttcaccggttgcaacaccaccaatagcaactccacctgccgcaaagccaccaatctcaactcctcctatttcaaaaccaccagttgcaacaccaccagccgcaacaccacctatcacaactccaccacccgcaaaacctcctgttgcaactccaccaatagcaactccacccatcgcaaaaccgccagttgcaacaccgcccaccgcaacaccaccaattgcaacttctcctgttgcaaaaccaccagttgcaataccacctataaaaactccaccacccgcaaaaccgcctgttgcaattccaccaatagcaactccacccgtcgcaaaaccgccagttgcaacaccgcccaccgcaactccacctattgcaactcctcctattgcaacaccaccggttgtaacaccgcccaccgcaactccaccagttgcaactcctcctattgcaaaacctccaacgacaacaccgcccaccgcaactccacctgttgcaatgccaccaatagcaactccacctaccgcaaaaccgcctgttgcaactccaccgatagcaattccacccgtcgcaaatcccccagttgtaacaccgcccaccgcgacaccaccagttgcaactcctcctattgcaaaaccaccagttgcaacaccacccactacagcaccgcccaccgcaactccacctgttgcaaaaccaccggttgcaacaccaccaatagcaactccacctaccgcaaagccaccaatctcaactcctcctatttcaaaaccaccag

SEQ ID NO: 4285 - DNA, 2730 bp, Arabidopsis thaliana landsberg
gtaaaagaaaaatcacccatagagtagccaatggaatgggaaacgctctaaaagagagaagcctgattgatgttgtcaagaaagattgaccaatatgtttttcctaacattagttgtttattggcatctcgatctgtcagaattttttgggaggccctaggtttcaagtctataagcaaggaacatatttcccaagtgtgagcactttctgatcacaattgatcagactgttaagatgaggatctattttaataaacaaccacatatacatagcaagacctgtgtgtgttggaacacattagtctcacctactatagaatccaatgttttgcaaagtttccagaacttaactctctcaactaagaagagctaatctagtaagagaggactaacaaataaaatcaaaaacaaagataaggtaaagaaagaaataaattgcacagacacaacgggaagcacctgagaaagggacaaatctgctcgaacatggtgaacaatctcggccagtaggttgttagccagaggtctcaaagactcaaagcatgctcgccccgttccaactagaaccctgacacagaaaaaatagcaaatagatgacataagtcattatttgttaatatattatactgcggcacagtgaaattatacagaacagtagaagatctacttgataaaacaaaacagcttcctgacaggtgtacaagtttaagaattcagaaaggcaaaaaaggcacattatacctctcttccaaaagagtgtcaataagaggaaataaacctctcttgaaatccgtcccaagtacatgctttagtgagactaatagttcctacatttcatagaccaaaaaaatattctttacttgcaagcccatgactgtattacaaggtgaaaacataaagaagaaaaaggaacagacagttctccacctttctgatagatgcagaatccgaacaggtgacaagcaaattacaatgctcttacaaatgctttcttcatgcggctttatatattcggcacaactttttaacaaataagtcaaaaaggaaacggtctgcaaacaaacactacaagtcaatatcccttaaaaaacaaaataattcaggtgaaacaacaaggcagtgtaggccttaattaaatatttttctcactgcccaaataagttatggtttccttctggatagagagccattgtctcaccttaacctgagcacccttcagttcgatgaactgaggcttcatatgtgaagaaactttctcaggtccaggaatagatatagcagcaaccatcaggggtaacaaattaggaatattaatctgaacaagtctgctatacagctgaaaaagaaacataacgacgagggggctctctgtgactattttgaatgaacgagtacttgggttgatctgcccattcctggaaggtgcagtaatggacagcgactgatcagatggtgtaggtatctccacaggtttcacttcttccattttgacattctcgaaaaaatggctaaccgtcaatctgaagttctggtatattttgcagacaaaatccaagaatggttgaacctcattttctaatgttggcctaaagttcctaagaagatcaaagatgatgcgaatgcatattaacccattttcttcattatctgtcgtgagcacctgcattgcaactttcaagaggtcttgcacaaaaggacgaagaacctcgctatgtggtagacgattgaggatctcaaccacaatgttgcgtagtttgtgctcaatattatcagtgaattgaggctttgtaatctgaagaagaatcactgaagatgcccggaagtaacatttcagaaaattcaagtactcagccgtatgtgtgatctctagactgtccctgacctccaccaccatcgcaagcctctcctcaatagctacagaacacaaaaacaagcttcgagtaagtgtcgctacatttttaaattaacttgaactgactcaaaatcaaacaaaaattcctcagaaaaaatcaaagcttgaagaaattttcaaatccaaaatcaaagcttcttaaactaattctgagcaaacaaacaaaacaacacaacgacgaaatgaagagaatgagtggtattacgtaggtcaggctccacgagacgacgagagtgttgctcaaaattctgaattggactcatggctataaaaaaaagctgacccagacaagcgaaaacgctgtcttagggttccatcacacagtaggaatagtaaacgttgcttcctcctcctcctttctaaaacccaaaccgcgacgatccctaacgctaagcccaaggtgctccactaggtcagacactaacaagggtttatcaaattaagctaatttaataagagtcgattatctggtataacaccaatagcctcgaggttaacgatggaagatgatgaattttccctctcgattttttttttttggtgtgggtctctctgcgagactcccctgaaaagaaagagaggagaaccttttgagaactcgagcgtagcagtgcaacgaaacgaaattcagcagccgagttatatataaaggtcccaactttttttatattaaaagtccccattgttccctcaaatttcagaaatgcgaagaaaacaaaatcttatggttaaggaaatgtaattaacactgataatatagataagatcgtttcttataatcatcgagctttttatacgagatgattcaatgtttaaaa

SEQ ID NO: 4286 - DNA, 2624 bp, Arabidopsis thaliana landsberg
  unsure (1)..(2624): unsure at all n locations
gaaatccccctgcgaggctataactgcaaccaggcaaaatggtcagggcattaaacactttctatgaaaaatgcagtcacatcaaagagtgcgattgtgttaacggaaatttacttactttcccattccagcgtaagctttagaaagattctggcaagcatcgatggaatccacatggtttggaccaagtgaaacatccataatgtctttagcaactgcaaacatttgagcagcggattgaggtcttccgagttctaaataagcagcaccgagattgttatatacatatccaactccaaaatgtttagcaccaaagctttcttttaacctctccgctgcactttccaagtaaggaaccgcttgtgagactcggcctgagaatagaagcaaccaacctatcctagcagaaacacttccttctgagtgctgttcttgaggaagcttctctagtatacctaaagttttctgcaataaagagatggcggtttcaaattcgttcattgactcgtactgcattgctacctcagagtatgcttcagcgacttcaactggcaaagctgtttcttttttctcgaggatttcacaagcaaactccaaacatctctttgattcagcaaacttctgttggtttaccaaagctttcgacattgatataaacaccatagctctcatctcactgtccttgtcagtttgttgaacaacgctcttcaatatatcaatcgcttcctcgtatttacccaaagcaaccttcatgttagcagcatcaatctccgcacgaatcagctccaacttcatcccccaattctttaacactctctgagacaatcggttctgctccaacgccttgtcatgttgctccaaaccactataaatcacaccgagtagcctccgatcctgcgcaacctcagctgaattattccccaactccttcttatgaatctccaacgccttcaacgcataaggcaaagcctcattaaaattcaaaaccgcaacataagcatcagcaagactccgattcgcaacacccatctctttactatcttcatcaaaagtcatctcctttatctccaaactcttcttcaaattctcaatagcttcctctctccttcccatagcattcttaacattagcaagctcaagctgcacagcgtgtaaaacaggcctaacgtcttccacaacacaatcaccatccgcctctaacttcacaagaatcctattagctctattcaagtaacctaaactatcactaaaacgtttcaaaccgtaattagcagaacccattaattgcgacgccatagcaacgagaagattaggtttattaccatctccatcgaatgatttaagagctttatcagcgtaagacagaaccttttcaggatcttcacnnnnnnnnnnnnnnnnnnnnnnnnnnnnnnaagcagataaacctaattcgttcccttcgaatgataactccatctccttgaacaaacgtaccatttcatcagtggtgttcgctgactcgaacgcttcttcgagatcgattttttctttatcagatgacgaaatctccggaggttcctcgacatgggtattcaaattccgatatggattgacccagaactgacgcttgatcagatcattggttcttctgcagctagtggagatttcgcgtgctggcgagatcagagaagaggacgaagacgatgaagaagcagcattggggtggattgaaagtgggattggtctgattttgtggaaatgaagccgacggattagagaaatcgataaacttttcattgccggagctcgcgtcgagaaaatcctctcgctaacaaaaatgaaaaaccctaaaagaaaacaaaaccccaaaagaagaaattcgtttttttttttttttccaacgtttcattaaaaattaaaaaacaagaccataatgtcaaaacagagcaaaaactcaaaagaacagagcaaaacatttctactttttgtctttctttgctctaatcttctcctcgagtaactctccgtcgagttcataaattctgttcacagcctgcatattctctagcgtctcccgcagcttgctgctaccagtcccatcgtatctcaaatgtttcattgggtaatccaggatattgttcactataattctggtttgtttctctactgcttccctcgtctttttgtccatgccattcccatgtttcgagattaatttttcaacacattcagctctgattctctctgttttgcttcttaatttcctgattgttggaaacgtctgcagcgaatccctccacccttcaaactctattgtctcctctcttattatagggagagcttccattgatttcctcgccctgtcttctttattggcagcaacaacttccttgaggtcatcaacgttgtaaacccgtgcactgtctaattcagcaacacaagacccaacatttctaggaacagagatatcaacaaagagcctcgcataatctgcaggacaaggagggaggatctctacgtgctccttcaagaacaatggtgtctcagatgatgtgctagtaaaaatcccttccgcttctgcagcacaagctagaatcacataaaggggtttataaataatctcaacgccagactgcatcgcc

SEQ ID NO: 4287 - DNA, 1329 bp, Arabidopsis thaliana landsberg
tttgtctttataatttaaaatttaaataagtaatatatttattattaactgattaaaaaatataattgagaaactgacacagtctctctgcgttggagatgcccttagagtagagggatggagctcctgaccttcgcaccgtcgccctctctcatgagccgggatattcttgttagatctttcgtaacggtgaacaattttagtttcttcttttttacttgatttaacgcaatttaaaattaaaggtggctatttgctaaacatcattaaagtctatgtaataatgttatttatttaaattttgtgtctccgaaattaaattttgaatcgttttaattaatttaaacttattgacaaaaagataaataaaatgaaggctcacggtgagaatgaatccatggattgacgagatggaaagattagaggaagagtgtaattctgaaaaagagtgtgagtattggaatactgtgtgggaaatttggttggttacttcatatattttttacagtacgtgacactttccaatgggaaaaaattctgaaattaattttatctatgatttccattcattatgtatacatctattttttgccgtctgaatatttttaattaaaaccatgggataaaaagtactacaaaccatagcattacagctcaaaaaagaaaaaaacagagcataatgctcatacatacacttatagaaaaacagagcttcatatagcaaaaccacaccaagaaattcaacttcgtttgtcctcttcaatacgtgagtgtaaccacatcggacttccgcgagccaaataggatctgctcctaccttctctcgttacgctcgtggctatatctcgtgctattgtattggcttttgtagatgaaaccttaaacacgagcttaccaaaattcggaagaagccgctgaattctatcaagataagataaatacgttggccaatttatgggatcactaatggcttccatagcagcaccacagtcggaccatatctcaatgttatctaagtgtaagtcacataaactgtgtaagacccataaaacccctctcaactccgcatcaatacgatttgacgttcgtaaaaacatttctcgcgcatgaaaaacaacatccccatgatgattcctgacaatccaagctccaccacagatgtgaacatcattgagccaagaaacatgtatattacatttaagcgtatctagtggtggcttagtccatctaactgcacatctaggttgcaacgaaagacgagttacagactgggttggcatcatccttaacctgttccacacctcagattcttcaaaagcatgagctata

SEQ ID NO: 4288 - DNA, 1239 bp, Arabidopsis thaliana landsberg
cctcgtgctattgtattggcttttgtagatgaaattttaaacacgttctaaccaaaattcgaaagaatgggatgaattctgggaagataagataaatacgttggccaatttatgggatcactaatggcttccatagacagtccgaccatatctcaatgttatctaagtgtaggtcacgtaaactgtgtaagacccataaaacccctctcaactccgcagcaatacgatttgacgctggtaaaaacatttctcgggcatgaaaagcagcgtccccatgatgattcctgacaatccaagctccgccacagatgtgaacatcattaagccaagaaacatgtttattacatttaagcgtatctagtggtggcttagtccatctaactgcacatctaggattcagcgaaagacgagttacagactgggttggcatcgtccttaacttgttccacaccttagattcttcaaaagcatgagctataagtgcatttaagtcgccttgtgttcccgccaataccgttgtgttccgatgtttccaaattccccaaagtaaccatggattggccattctcagagaaagagataaaccatcgttactcattaagttaaagacaaagtctaagttatcagtaatagacggtgtgaaaccatgagtgggcaaagggatgttaaccctctcccaaacttctcgagccggccaacaatgaaacaagacatgactaatcgattccctatcattttcgcacagagagcatggcgatcaatgtccttgaaaactgctgacggagagatagttatctggttatgaatgatgttattccgttgcctccagaccatgtagaccagagtgtggaaaagaagtagccgaagagttcttggtgaatcaacgctggggacctacaaatctcagtagttccccttccgttttgttttgttgtgcaggattgacaaatggaacgagagaaaaagagtagaatggctaataaagatgtacattgtgaattatataagagtttatctacagagagggatatatagggagatatatgttctacatgtaatcatgtaaaagtatactgcctgcaaaaacacaaaacttagacatataccaagaatcactttgatctttttttgtcatcaagaatcactttgatcctaatgtatagccttttgggttggtttttaattgatttttgctaacagtcaacaaaaatcaaattcgtattattaggttttagggag

SEQ ID NO: 4289 - DNA, 4082 bp, Arabidopsis thaliana landsberg
  unsure (1)..(4082): unsure at all n locations
ggatgtttttcactgcatttgtgcatgttgggctttgtttctttgctgaatactactgttgttctttttatactacgataaaacttcttactgattttagatattttcagatttgtaatgacaagctgcttgcaattagagtgagaagatgcatacgcacagtcataaaacttcgtaagaaatacttgtacaagggtagatgctcaacaagttgattcttcttttcttcttcttcgaaatcccttcatatgaattgaaacgttatatctcagtgcattcatttactagcgtgtcctttcatacttnnnnnnnnnnnnnnnnnnnnnnnnnnnnnnnnnnnnatattccatcctcatatcgaactgcataccttttattagaatcaggtaatcaagattgagagccacattcagtctcagaatcataaacaccatgagatacagaatcaaaccgcgatggagaaccaaatcccagaagagattacaagtcatgatgagaactgtagccaaagaccaagtttatgcaatggtcctgtcatgccccttagagaatgatgactgatgagtacgatagattccacctataatttataattttatttctagatttccatagtctgctaagatatacaaaagaagaacaattgtagaataggtaggtcgtctttagattttgaagaaggttttgctataacatttatgaggttatctatgtatactccgttaatttatgtgatcgatatctttgattccatcggtacacatgttgaggcttgagagcatctacacatgttgaggcttgagagcatctagctccataattcactccatcacaacacgtgctagtctttcatttccagaatcatagagaatctcaaaaacttgtttttttacaacattgtcaaatttgaactcaagtgaagtattggctaatgatggaatttagacgtttgtccatctcttagggtgaagctttacttgtacaaaatgtaataaaaccagggctcaaaaaattaagaattgactacttcctcgtctagcttcaatgttaataatatacataagtaagtttattaagcattgtttattcacgtttgaaccttagaaaaaagggcaggcatcaacttcaaagcgatatctccgtatggtcggtcctgttgcatatctataagtcccctagacttcaaaacctgcaaattcaaaaacaactcgtctaagctcgaggcactacagagatacaaagaaaaacatatgtacagagaatcactcaccagtgtctcgaagaacattcgagcagctagcttccttgtctttcctgccaagatctcgctcaaacttagatctccagaaggatggcttgatgtggtgggactacttgaagaacgttgtttaagatactgagccaaggctctgcaatgttcaatgaatgttacaggttagtagagaaacagtaggctcttaaatgaaatccacatggttttaggaatatatataccttgctctccctgtcaaagcagcagaatcttgactagctggtgttcctactggggaattgccacctacctccaggaaataaagttcctgtatggcacatgcaaatggtattgctatcaaggttagcaacgcaccaagaatggtaaaaacaaaacacgcgaacatgcgagaacaaacctcgtcagtcctttcagaaacaggtgaaagccccaaatttctttggccaggcaagtcctctggaactgtggaagttgaaggctctgttctataagattctgtctcccaatttccagactgagtggtgaagtcatcggttctaaaaggtgaagatcttggaggtggtgacggcatgtacacagggaaaccaccatcccttaaatgttctattcccatgtcatcgttatcaaatgtccgaggagattgtgcttctgttgctacagactctgcatgcgcgggtcgaggacctgcagagtctaggacatcttcagttttctgcgctggagatagctgaactgtactgtctggattagtagaatctggaattggagagaccggattaatttctacttcagcttctcgagtaggagatacagatgcaggttctggtaaagtttcatcagaaacagcaagatgtggctttgaagctacatagtccttttcaaagacattgcgtaaatcatctgagaagcctgcaggttgacacatacaggcaataatctttcttcaaaaacaaagggaaaaagaaggcaaaactgtcgaaaataaaataataatcaaagaaagttaccagtaaacaagggctcattgaaaagttgatccttctttgactggttatcaagtctccgaaaacctagttttgatgaagacaacttctttctcttacgtagagtcttactaggatccttaagcctttcacttatgttcctgttccaaattcagtaatcagtatgcaaaacaggtaatgaaataatcaaagccacatgaagcaacggaaaagttattacttgttggttaatactgtgacaccatcaaagttcttcctcttccttgcccttctttgtggttggggaggagatggctgaagcaccagttgaggtgatggatgcacttaacataaagaaaaaagtgttttaaatagataataagagagagaatgtagtggttaagcttcaaattatcagactatgttgctagctcaccaaaatctgcacgttcttcctcagaaccagcagcagaacctggagatcctgagcgaagctcaaacgcagaatgccttccagaatttaacatttcttcatcaatactagggatagtgggttccttctcattcaaagtttcatccaatgactcagtgcgttcaactctgacatcctgttgttgtgcagcaaatgatggatgggacgtggggcttagatcatgtgcagcgtcacgcattctctcaatctcgggaacagttccaggagaagtggcatcgtttctctcggaattgggaatgcgctcttctgtcaagttactttgtctaggatcctggacttcagtgaattcctctgtgtttttactttgactataggttccagtatcgaaggggataggggagtctcttggctcattgtctggtcctgtctcatgagccgtttcaacatcaatttctccggtatgcctacgcacaggttctgttgattggctgctcaaagcataaaaatatgtaacaacattattaaagaagatcaactaaacagataaggaagattaagagcaaggtgtagtaaaggaaatcaaaactctatgaagagcctcactcgacatccatcgggatagattctgagatgatgtcctgtaagaaaggcatacaaactttcattcaataacaagtgctcggagacatgggaaacaagaagtcagaatcaacttcaatgtcataagaagcaagcagtaatctcacctcgtcgaatgttacagcaacataaggatcaatgccagtaggaatttgatctgaaaaataagcatcaacatcataaacacctcaaaatcatggtatgctgcatctagaaccaaggaaaaaaaacacagacaaaaggtacctgtgagagtgatatcttcctcactccgagtatgattatcgaattccctagaattcacaagaaaagaatgttaaagatgagtcaggctttagaacagataaaaactcaaataaaagcaagaaagaagaatacatgtcgagagtgtcatcttccaagtcgaactcgtccagatttagtgcttgaggcaaagtaacagactcaggcggggcctgtctggcatcctcaggcaagttaacttgagtagaaacgaaagccttagctacccaagtattaaggagattccagtcattgtaaagataatccactttctttgaatatattcgcactaccccaactagaaggtgacttgacgttctcaatgccaatggtacttcaggaaacattatattatctgcaaagccaattgcaaaattctcgaaaagtcagaaactttattaaagcagagaatttcaattactacaatgggttatatataaacaacaaaatcggaatttgatgaatgcgcatg

SEQ ID NO: 4290 - DNA, 1748 bp, Arabidopsis thaliana landsberg
cacataccaagatttgtgtgttgaagttttgcataagcatagcttcgttcttgaactcgactaatccttgcccggatgctaatgatagtcttttgatagccacttcctccccatctattagtctccccttcaagggagtagcagttacatcaaaatctgcttaagttaatatcaaaatctgaagaatctgaactaccttatatacaggaccaaaacctccttcaccgagcttgtttacatcagagaagtaatctgttgcaaaagcaacagtttcaaagctaaagatctgaagctcattattattattccttgcacttctcttgcctcggcgtctcctgtcaattcccaactcacgtagtagcatttcttggtctattgttgaaccaactctctgtgttgaaagcctcctccgtatgcatccaataactaaataaaataccaaacatcacaaacacagttcttaattcaacatggattttttgcatacatgtttgcttatacgaaagtgattcagctgagccttactttgtggaatgacttttccccataaaaagtagaacattccgcgaaatataacagccactggatcaaacacaaaagaagtggtgaacttgtatgcaaccatcactaaataaaagtagcaaacattgttcatacatgcttatacaaaagttattcagctgagacttactttgtggaatgacttttccccgtaaaaagtagaacatttcgtgaaatataaccgttactgaatcaaatacaaaaaaaatggtgaacttgttagtaagaacacgattgggtaaaaaagtttgagtgattctgatagaaatttgtacctttcagtttaaatttcctcagaacaagatacatgatcaaacaagtcagaggtataattaggaatagtgatgccacaacaactagccaagttgccgccttctcgttatagtggtctcctttataccagaaatctttgtgtccaaacagaaattatggagttatagagacactttataaaaggcagataaacatatatccacaaggttagtaccttttacacggacatttacagttctaggtgtatgaaaggacgacccattgtttgtagttgttggatcagtattccagatttcgcagccggaaccatcggcacgggttgaagcataggcaagacaagaacaattttggagacatttaacatagcaatcatatgagcttaatcttccatcagtctcactaataataaatccatttcccaaggaaggaaatactgtatctctgaaattatcatcaaagctccaacaattcctatgctgcggacaattcccattcttgtctacatctccgtaaactttgtgcacacagttcatagaattttttaggtaacaaccatagtcaagctcgccaccaaatacaggagaacaacggacatgtcgtttcacactgttaagatcgattgttgtctgcaaagtgccatgttggtctatccttatcctgggaaataacgttccaccatagttctgatcacctgagtagataaaatattgttcactcttggttgaaacaaaggaaacgccgaaacccagcttgttataaacctcatccatgagaaattgacccttgaaccagagcccacttgcccaaaacaagtttccacgccataagatggtcaaacggtttgtaacattagcattcatcccaaagacaaaagatccagaagcaggtgaagtatcacctagccatgatgtcag

SEQ ID NO: 4291 - DNA, 1408 bp, Arabidopsis thaliana landsberg
ccaaagaggaagtagtcaaggctcttgttctgcatgtattcatatatttgcattttctcatctttttcgatgcagatgctaaaacctgaacaagatttgtatgctgaagctttgcaataagtatagcttcgtttttaaactccactaatccttggccagatgctaaagatagtctcttgatagccacttcttccccatttaataactttcccttcaagaaagtagcagaaacataaaaatctgctttaagttaatcaaaaaaacatgaagactctggactaccttatatacaggaccaaaacctccttcaccgagcttgttttcatcggagaagtcatctgttgccgatactacactttcaaagctaaaaatctgaagctcgttattactcttcctttcatttctcttgtgtatgcagctcctatcaattcccaattcacgtagtagcatttcttggtctattgttgaaccaaaccttagtgataaaattctcctccgtatgaaaccaatcactaacatattaatagcaaatattacattaatagacatgcttttacaaatattattcagctaaatctcaggtacgtacgtaccttgaggagtgagctctctccatagaaagtagtatattccacgaaataaaacacgtcctggatcataaaaagaaagaaagagggtgaacttgttagtaagaaaaccattgagactaaaactgttttgtgagtaattctgatacaatttctaccttttatattaaatttcctcaacacgagatagattataaaccaaatcataggtatcatgaggaacagtgatgccacaacaatatgccaagctgccacttttttgttctcttgacctacaacatattcaatattccagaaaacttaatgtccaatagatttcctgcagttactaaagcgacactgaaaaaaaaaaaacagagaatatatttccacaagttatataccatttccacggatatatatagttctaggactatgagaagccgaccctttgttggtaggataagtattccagatttcgcaacccgtaccatccagctcggttgaagcataggcaagacaggaagagttttgcaaacatatagcactgcaatcaactgaactaaacgttccactaagtacaaaaccattgcttgcggaagaagatactctgaaagaagtgaacccatatggctcatcccggactacgtaacctgcagccaaacaattccggttcctagaattttgcctgttacgttgccgatgcatttgctctctacgcaaaaagccttgggcgactatcatcatgggtggaaaaaatgttttggcatctacctgaccacctgaataacaaaaaataatggcccactctggctgaaacgaaggaaaagaggaaaccgcat

SEQ ID NO: 4292 - DNA, 1929 bp, Arabidopsis thaliana landsberg
agaattttgaaaggaggtacatgtcttagatttatattaacttctacaacatcgcaacatgattttaatggttataacttataaactagtcatggtacattgacaagcatatataaggtgatataggattacattgaggcagatttagtcttatttcttcccacttttcttaagtcctgagcctccgaatgatcctttttgtgaagccttggccctgagttctttaagtgcctgttttcatcacataaacaagatcatcaacagcaatcaccttctccttcaatgaatcaaaactaagattgagaaaactaaccttctcttcatccttctttttctgcattaactccatatcgtgctacatttgaaacagagtaaaaccattaaacgttgagctaaagaaaaaggcaagggtacaattgctatcatacctcatcgtactccttcttaccagacttgggctgcttcaaaggcttcaatttccctcctgaaatcatatttcattttgcagaaaatgttggattccataaggaaccatataaattcaaatgacaaggttgatgaattttcgatgcgttaagagcacacaagattaataaatcagctgatcgatcgatgaattcatgagatcatataaaatagcaagcacatgtaaacacaaaattgtgaaagcaagatacagatagatcaaaacgattgattcgaaccaagataacagagatgagaggagagggaaaataataaccttgcttggaagacatggctaaattttagggttagggctagacctgaaactcgaagagaacagaaatagcttccttaatcccaaaaaaaaaacacaagaggaacttctgtttcttagagttttagatatttgattctgttctgcgtgagcatatatatatagtagtaggcgtgaattcacgcgatcactccgagccacagaatcgcgtccacgtgaaatgtctaattttgtattcgaattcataagctagtgacataacgagaaaacgatactttgaatcttatacgatcagtcatcattatgccattatccaactagaagtaaaatgtttatagtaaacaatgagattcacatacgatcagtccattatcaatcagttttctacaattcactagctcatcttgcttccatcactgtgattgtaactctatttgctgatacattttccagctccggtggctcaacctccatctctggcgagcttctccgtgaaccatcatagaaagctggctctttaggcaaagaaagagcgttgttgccatcaccgtatatcatcgacacaacgtctaacatacttggtctatcgtctgcgttttgttgtacacacaacagagcaacttgaacacatctcaacacttgagggttctcaactgcagaatctcccaacgacggatctatcacctcgtgaattcggtcctctttaaacagattccacacctgaaaaaaatacaaagtttcagagactcaaagactaaacaagcaagctgaaaatgttaacatttgaaagaggaagaaatttggcttttacatgaactatgagattcagaggtccttcggagtcatggtggaagctattgttcttccttccacaaatgatttcgagcattagaactccgaagctgaacacatctgattttgccgagaacagtccttctctgaagtactccggagacatatatccactacacataatttcaacacaagacatttagtcagaaattgatgcctatgaatgatgagagaatcattgtttctagtcactctcaacttacaatgtgccagcaactcttttggtgttggctctggattcttgcgctccaaatatccgagccattccaaaatcagatattttggggttcatatcctcgtccagcaaaatgttgctggctttgatgtctctgtgtatc

SEQ ID NO: 4293 - DNA, 1909 bp, Arabidopsis thaliana landsberg
ttccgtggccaaatatacaatatttcagtcacagatggttatatatatttggtatttcccatgtaaattagtaaataagctaagttttacatgcagtgttgaatgcagcttttacttagaatagttttgcattataatacaaaataaaggtggtccattaattgttatactttaccaagataagaaggtatatctagatgccacacacactgacacatatattatacgtttcatcacttaaatcaaatacgaacaaattatttaaatgaaatggatagagattagttacctagagaagatggtaccacagtcacatcgatactctttagtaccacaagtcttagagtgagctttccaatctgattgaacagcgtaacgcttagaacatttctcacatttccacttcttttcgccatgtttacggtaataatgcttcttgattccggtgaggtctccgagagcacgtgacgggtcatggtgaacgcacgttggctccggacaaagatacactttcctcttcacttctttggttgatttttgtttcagcttccatgggagattgtgtcctcttcggtgaagctgtagattttgttctctttgaaaccctttgttacatacatcgcatatgaatctgtttgtagccattagtgtctttggagataatgctaccacttccgcatcaggatctgtttcatataattaaagaatttaatcatttaaattaagtcaccaattagacccaaaatgtcaatctatgtagactatatcgaaaaaaatgatacacacacatgtaaacataaatcaaatgacatatacacgtataaacatataagatatactggcctgtcaatatatatgaaatcttgatactagctagatatacaaaacaaaatagaacaaatgattagggttctttttcttcttggtattatcttaaagcttatatatagtgattcttatagaaaggtgataaatatatagagatttatatgtaagagatacttgcttgggtttccgggttggtttcttcgtttcttgggtggtggagctgaggagttaggttgttgaatcattgacataaaagtatctttccggttaaagtcgttatctccggtgccggagctggtgatgaagaaaggctgagcagaggatgatgatgaaggaataacgcttgtgttatatgatgatgacgacatctttagatcttcttctttgcgtggaagagaataatctacaaataattcgtaagacaaaaaaaaagttaagaagaaaacgaagggaggaattataagaacaggaaaaatccatagagattgacgacatgaagaaattttataaaaaccatttcactagaagacataaacaaagaaaaacaaattaagagtttatacttttgttttttgttcctaaacttttgaaagaattaagaggaaagatttctaagttgtatttttcttgtacctgagatcaagagaaagaaaccaagtagaagaaggaaaaaaaatagtcaaaattaaaagctataaatcggagctaaagaaagaaccaagaagaagatgatgcatgatgatgatgatgagatagaagatgatgatgaagaagaagacactattcctatatattatgtattataatacaaacacaaacctcaaagccctatctctctctatctctatatctctttctctctctactgttttgtgttcttctacttttaaaaataagccatatatgaaatgatcttgaaaagtatgtctctaaggtcccctctctgtctctatcattttattttatttcgattaatataaaataaagctactttttttctttcttataatttaatttgacagaattaagaaggatggttacggtttgggtgtcactgttaaaacggtgaaatgtgtccaca

SEQ ID NO: 4294 - DNA, 1118 bp, Arabidopsis thaliana landsberg
gtttctgctagaaagcatctattgaaatatggcagtttcagtgtcatatatagatatagttatatagacacacacacacattcacgtgtgttcttgtatcatttgtttttataaaaaaaaagaaaacaaaaaaactaaagttgcatttactgcacgaaagaaagcgataagagcatcgaagacttcgaggcgaaacagaaagtgaacctaaaaaaaaccctaattcatgaagaatgactcacagacacatattcacacacatatcactatagcagctcaatagattaaattataatttaaagagtttgaaagatttggattactaaccgagagaagagtgtaccacagtcacaacgatactctttggtaccacaagtcttggagtgagctttccaatccgattgaacagcgtaacgcttagagcatttatcgcatttccacttcttttcaccgtgtttacggtaataatgtttcttgattccggtgaggtctccgagagcacgtgacgggtcatggtggacgcacgagggctccggacaaagatacacttttctcttcacttctttggtcgatttctgtttgagcttccatggaagattgtgtcctcttcggtgaagttgtagattctgttctctttgaaaccctttgttgcatacttcacatatgaatctgtttgtagccattagtgtctttggagataaagctatcacttccgcatcggaatctaatcaagaggaaaattattaactaaattttaaaagtcttatattgcatggaagataaattgattgaaatctgaattttgaaaaatccagtactaactagggtttgctaattttcttatttcaagattttaaaaaatgtaaaagggagaagaaaaaaaaggacatggaaaagggatttatctttttcaccaatcaataagttcctttaagaaatgatcacatgattatataaaatcaagatttgaattaagaggtaattaacttacttggagttcttggttggttctcttctttttctgcggtggacttcaagcggtggcagcggtgcatggtggtgaggaggtggaggaggaggagcacggcggaggaattaggtgggaggaggtgagattg

SEQ ID NO: 4295 - DNA, 1230 bp, Arabidopsis thaliana landsberg
gaggagaaaccaaccagggaatccaggtttgtgtgaaaagaatacaaaaactttcatgcttttggactgattcattattccaattatttgatatagtcaccttcttggaaattctgtgtcttctcccgaaaagaatattcttttttccctttttgttctctttatcatcctctattccaaaacaaagaaaaataaaaccaagactcagactaaaaagaaaaattaataacttgttaaagtatattttgggctgtggttagtatagttttggttactattaagcattaatcattaaaatgtaactttatttagtgtttcttgatttttctaacaatggttcaataattttctttttaaaatttcagacccagaatcagaagtgatagctctatcaccaaaaacactaatggcaacaaacagattcgtgtgtgaaatctgcaacaaaggttttcaaagagaccagaatctacagcttcatagaagaggtcacaatctgccatggaagctgaaacaaagatccaacaaagaagtgataaggaagaaagtttatgtatgtccagaagcaagttgtgtccaccatgatccatctagagctctcggtgacttaaccggaatcaagaagcatttctgtagaaaacatggtgagaagaagtggaaatgtgataagtgttcaaagaaatatgctgttcaatcagattgcaaggctcattctaagacttgtggcaccaaagaatacagatgtgactgtggcactctcttttctaggtaactctattctcccaaaataaaactctttttcgtttctctctgtttattaattgattttaagaacaaatatagtaattacattaatcgatattggtgatgaatatgagatatatgctgtggtgttgtaagaattgaagggacacatggtacaaacttttctttgttgtgttatgagtaatttcatttaatttgaaagaggacaaaaatggtagctcaaaagaatcttcatttataatatggaactagttcagggtactttcttcatttcttttcatttctcataaaaaaaaagttattatgggttatttttccttgcattaatcattcgtcttataatacacatgtgattgcaacatgctttagatggaccacatgacttttagctcctcttaatttgtaaaaagagagacttttattcttttattgaataacatgttattgatcacttcatggttttttttt

SEQ ID NO: 4296 - DNA, 1021 bp, Arabidopsis thaliana landsberg
acagtgcttcgctcccaatcgtctcttaagaggaagagaaatcaaccaggaaatccaggtttgtttcttttgatagtcttgatgatgaagaagaagaaaaatcaacttttttttttgtttttttttgtttggacgtattcataataatcatcgattattgtttttagaattatgggtactctccgaatatttttttttacccttttaactttgtcttctatctcatctctattattacaatggtcaaaaaccaaataaaaatccaaactttatttggaaatctcttattctaatatgggttaagttaaatcttcttttaaagcacatttcagttataacctgattaagttttggactttatttggtgtgtttttttttcagacccagaagcagaagtgatggccttatcaccaaagacactaatggcgacaaacagattcatatgtgaggtctgcaacaaaggttttcaaagagaccaaaacttgcaacttcacaagagaggacataatctaccgtggaagcttaaacaaagatcaaacaaagatgtggttaggaagaaagtttatgtttgtccagagccaggctgtgtccatcaccatccatcgagagctcttggtgacttaaccggaatcaagaagcatttcttcagaaaacatggcgagaagaaatggaaatgtgaaaagtgttccaagaaatatgcggtgcaatcagattggaaggctcatgctaagacttgtggcactaaagaatacaaatgcgactgtggaactctcttttctaggtaacgacactcttaattatttcaacttgatttaaacatgttcttgatgaaacttaatttgtgcattgatacttaaagctaaggttaattatttactaggaagtagacaagagtgaatgatgcatgatgaaactttggaaaagtggtgtaatgtgaaactagtgaccatataatatacggtaacgatctgttggggtttagctagttcatttaatttgaataggcaacatggtaataatg

SEQ ID NO: 4297 - DNA, 624 bp, Arabidopsis thaliana landsberg
tcaccaaaaacattactagcaacaaacagatttgtttgttaaatctgtaacaaagggtttcaaagagaccagaatcttcaacttcatcgtcgtggacacaatttaccatggaagcttcgtcagaaatcaaacaaagaagtgaagaaaaaagtctatgtttgtcctgaagttagttgtgttcatcacgacccttcacgtgctttaggagatctaactggaatcaagaaacacttttgtcggaaacatggtgagaagaagtggaaatgtgataaatgttctaagaaatacgctgttcaatctgattggaaagctcattccaagatttgtggtactaaagagtataaatgtgattgtggtactctgttttctaggtaaagtgtttgccttttttgatcatacataagaaaaaactcaaaattcaacaatctaagttttgagtgatttttgtttgcaggagggatagttttataacgcatagagctttttgtgatgctttggctgaagaaaatgcgagaagtcatcatagtcagagtaagaaacagaatcctgaaattttgacccggaaaaaaccggtacccaacccggttcctgctccggtggatactgagtctgataaaatcaaat

SEQ ID NO: 4298 - DNA, 4503 bp, Arabidopsis thaliana landsberg
acaagcgtgtatgcttgaaagctcagattttgtgtttactgattagctaagagttagatttgatgagtagctacgttgggtcgttcctgccctagagatctccaactgaatcatcttcttcttcaatctacaaaaggaggactttgaaaaagggtcagactcagatcgagagatatggatgaggtaggagctcaagtggctgctccgatgtttatacatcaatcgctggggagaaagcgagatctttattatccgatgtcgaatcggttggttcaatctcagcctcagcgtagagatgagtggaattcgaagatgtgggattgggatagccggagatttgaagctaaaccggtggatgttgaggttcaagagtttgatttgactttgaggaataggagtggtgaagaaagaggacttgatttgaatctgggaagtggtttgactgctgtggaagagacgacgacgacgacgcagaacgttagaccgaacaagaaggttcggtctggatctccgggagggaattatcccatgtgtcaggttgataattgtactgaagatttgtctcatgctaaggattatcatagaaggcataaagtttgtgaagttcatagtaaagctactaaagctcttgttggtaaacagatgcagaggttttgccaacagtgtagcaggtataagaaaggactctcatttcttttttctggaaatggttctctgttttctttttgaatctggtattaactaaatgaattttgcaggtttcatctgctttctgagtttgatgaggggaagagaagttgtaggcgtagattggctggccataatcgacggaggaggaaaactacgcagccggaggaggttgcatctggggttgtggttccggggaaccatgatactactaacaatacggctaacgccaatatggatcttatggctttgttaaccgccttagcttgtgcacaaggtacactagttttgcgacttgtagaagtattttagtctgggaactctgctttgatgttcttgttttattaacagattttgttgtgtgtgatctgcaggtaagaatgcggtaaagcccccagtgggatctccagctgtgcctgatagagagcagcttcttcagatacttaacaagataaatgcattgcctttgcctatggatcttgtctctaagttgaacaatattggaagtttagccaggaaaaatatggatcacccgacggtgaacccacaaaatgatatgaatggggcttctccttctaccatggacttgcttgctgttctttcgacgacattaggttcatcttcacctgatgcactagcgatattatctcaaggtgggtttggtaacaaagacagcgagaagactaagttatcgtcttatgaaaatggtgttacaaccaacttggaaaagagaacttttgggttttcttctgttgggggagagaggagcagtagcagtaaccaatctccttctcaggattctgactcacgtggtcaagacactaggtctagcttgtctctacaactattcacctcatcacccgaggatgagagtcgaccgacagtagcatcttctagaaagtattattcttctgccagcagtaatcctgtggaggatagatcaccatcttcttctccggtcatgcaggagttattccccttgcaggcatcccctgaaaccatgaggtccaagaatcataaaaactcaagtcccaggactggttgcttgccccttgagctctttggtgcatcgaatagaggagctgcagatcctaactttaaaggtttcgggcaacagtctggttatgcttcttctggctctgactactctcctcctagcttaaactctgatgctcaggtttgcagcttttctactcctcttttagcatctctttgtacgtagataaaacaagccacttatagttttaattttgatggtattcaaacaggaccgcactggaaagatagtctttaaactacttgataaagatccaagtcagctccctgggactctacgatctgaggtgatcatttctggccatgccctgaaatataatgttactgactgcttctgtttgagtgctcatagtcatgattgtttaccttttattacagatctataactggctttcgaacattccatcagaaatggagagttatatcaggcctggctgtgttgttctatctgtttatgtagcaatgtcacctgcagcctgggaacaagtgagtgaatattttgaaatgttcggttattgaaatatactatgctatgtgcagcttaatgagcagttggtggcttttttcagcttgagcaaaaattgctgcaacggcttggtgttttgctacaaaattctccttctgatttttggagaaacgcaagatttatagttaacacgggaagacaactcgcatcacacaaaaatggtgagtattcacgagttgttacttctatcctatgtaacctttaatgttgcagtttttgtatcaccaatggtcataacatatcattggttacaggtaaagttcgatgtagcaaatcttggagaacttggaattcaccagagctcatctcagtgtcacctgtagctgtggtagctggtgaagaaacaagtttggttgtaagaggtagaagcttgacgaatgatggaatcaggtataactttaaaaaatcaagtttcatacggtttctcatattcacattttcctttctaacctttttatcattgtactaccagtattcgttgcacacatatgggtagctacatggcaatggaggtaaccagggcagtgtgtagacaaaccatatttgacgagttgaatgtaaatagtttcaaagtccaaaatgtacaccctggttttcttggacgctgtttcattgaggtatgacttcatatataacttatctttatagtttctcattgtgggtctagagatgtctaacgcctagtttgtgtacaggtggagaatggattcaggggtgacagttttccattgataattgccaatgcatccatctgcaaagagttgaatcgcctcggagaagagtttcaccccaaaagtcaagatatgacagaagagcaagcgcagagctcaaatcgtggtcccacatcaagagaagaagttttgtgcttcttgaacgagcttggttggcttttccagaagaatcagacctctgagcttcgggaacaatctgacttttcccttgcccgcttcaagtttttgctagtttgctcagttgaaagagattactgtgctctcatcagaacgctcctcgacatgttagtagagagaaatttggtgaatgatgagctgaacagagaagccctggatatgcttgctgagattcagttgttgaatcgtgctgttaagaggaaaagcacaaaaatggtcgaactactcattcattacctggttaacccctcggcactcagttcctccagaaagttcgttttcttacctaatataactggacctggcggtatcacacctttacatctagctgcatgtacatctggttcagatgatatgattgatctactcaccaatgatccacaagaggtatgtctctctctctctctttctctcaaatccaatttttttgcttcttcaaaactgacaaaaccgtcatttatgttttcagattggattatcgagctggaacactcttcgcgatgcaaccgggcaaactccatacagctacgctgcaataaggaacaaccataactataactcattggtggctcgtaaacttgcagacaaaagaaacaagcaagtctcactaaacatcgagcacgaggtagttgaccaaaccggtctgagcaagagattaagtttagagatgaacaagtcatcatcatcttgtgcctcgtgtgcaacggtggctttgaagtatcaaaggagagtttcaggttcacaacgtttgttcccaactcctatcattcactcaatgcttgcggttgcaacggtctgcgtttgcgtctgcgttttcatgcatgctttcccaatcgtcagacaagggtctcacttcagttggggaggtttggattatggctcaatctacagaactatactatataaaagtattataatttattcttttggtttctcgaagacaaaaaaaaataagaaaaagagaagagactttggtacaaatagaaggaaaagctcagagacatgactgtgacacacgaccaaaagtgactacagtattactcgaggaagtttcaccgtcgggatgttccttctttctttctttcaattatatatatattttggctttgctaatttgttgtgtatttccttctacgtttcctactttttatgattattattttaactaagataataacatgctgcttcatataagaagcagttgcttatatgttatgattttatggttcttctatctttgaaaatatgtactttgtacaagcagttctcttgctgtaactttaagacattatgtcattcttttcttattctcgaaagtcaaaatgc

SEQ ID NO: 4299 - DNA, 470 bp, Arabidopsis thaliana landsberg
tgtctgattagtggaaatgtgaaatttgagatgaaaagaagaaaaacatttgtgaaatttgattagagtgtaacaatgtgttgttaaacttgtgattattattctcttagaactgatttaagtagtaaaactttttgtatcatctactgatccttagttagtaagtcctttgattaatgattcatgaatgttatttttattgttacaactatataataaaaaaaaagattagttatgcaatcaaattaaaacaaaaaaaacttagaagagaaacaatctcatcgctcagtgacaaattcagatgaccagtgtctccgtcgccgtcgtagctcctccgcatcgttgcccattctctagtcatctgaatctgaacaagctttctcttcaagtcagtctctttctctctcttctatctatctcactctctcagtgtgtctctccataggtctcatcttcccagggtaccgagc

SEQ ID NO: 4300 - DNA, 561 bp, Arabidopsis thaliana landsberg
aaattagaaattgtaacagagaactttggttacctttataaagttcgctcttgctgtttcattttttcagagtagtggctgaaatcgaattcattttctcctctttctctctgggatttcgattttttgtatttttgttttgttcgtcatggtgatgatgaagaagcttttgtcgaagcgtttgttcaatatgtcaaaaacggcgtcgcaaagtctcatgaactgtcgtacttcgtcttcttcgttagccatgcgaactagggttcctaaagatttagaagccacgattgatccagagcctggagatttgacgatttctcagaggtttgtgaataaattctccatgaatgggattgatacgacttcgaagatgtcgatgggggagagtctgatggagaagcttaaagaaatggatatgaacaacgatcggattcgattagatggtctttctcatccgaaggaggagacgttagggcttactgtgcaagacgtgaagacgtgctaagagcagcagagatcgaagttattaaaacgaagctgatggagacaggaaaaatctgg

SEQ ID NO: 4301 - DNA, 1154 bp, Arabidopsis thaliana landsberg
cttgttttctttaagtaaatgaaaagtatcttggattattacagaaatgaccctaaatctttttgaatttacagtttgtaccaccaccgaataaaataagaaaaagtttcgttaaatgttacgagtgctcgttgaagacgaagtttcgaagacgaccatcaaagagaaagatcagaatttgagagggaaacaaaaaaagaggaagagagaagaagaagaagaaaacacccttgattaataaagtctcagactttttgattcgattcgaaaaaagtgagtttatgcttgaagctgggaattccaaaactcggaattcgtgtaaaactagttcgatttatcagagttatgctaaggtaacatagtcgattcatttcaaatttacgaactttatgttcatctgatctctctctctttctcttctatttttggtaacgaatctcgaaatttcttgtgttgaattttgtagttagtgaaggtgaatgaaaaagagttgatttttgagagaggagagaaatgggtgaggtaggtcctcaagtcgctgctccgatttcagttcatcatcctatggggaaaaaacgcgacctttatgtacaaccacactggcttgtgtcatctcagttacccaaggatgattggcagatgaacaggtggaagtgggatggtcagagatttgaagctatagaactacaaggagagtctctccagctaagtaacaaaaaaggtcttgatttgaatctaccttgtggttttaacgatgttgaaggcacgccggtggatttaaccagaccgagtaagaaggttaggtcgggatctccgggaagtggcggcggaggaggaggaaactatccgaagtgtcaggttgataattgtaaggaagatttatcaattgctaaggattatcatagaagacataaagtttgtgaggttcatagcaaagctactaaagctcttgttgggaaacagatgcagaggttttgccaacagtgtagcaggtgaaagagaatctgattcttttgttcgtagtccatcttcgtttttttgttggttatgattgggtttttaaagattggtactttttagttgttaggtttcatctgctttctgagtttgatgaggggaagagaagttgtaggcgtagattggatggtcataac

SEQ ID NO: 4302 - DNA, 810 bp, Arabidopsis thaliana landsberg
  unsure (1)..(810): unsure at all n locations
ttattttattaacactttttagattttatgcatatagccatataagaaaaatggatttgtttgaattttatggtatgtctaacgtcttaaaagtctattacttgaaaatgttgaatgtcaatgttacgaacttacctaaagatacaaaaatgaaaagacagaatttcatatgataagatatgaaccataacgtaataataataaaaaatcaacgtaaaataactaaactaatattaggtagcaaacaactaaactacaacacaaataactatttaatcattatagagtgatgaccattgaccattaaatttttaaaaaaatagaaaataataaaagtagtaattgatttatttaaataaataatttataattttatttttattttgaaaaaataatttaagaagtgaattaatggaggatttaacacaatatgagacttttgattttctctcaattaattttgctgatttttaatttaatcaatgttaaatgacacatgtcattttcttatgtgatgatgtgtcatccatatggagaaagttggtcaattttcatatatataactaggtgagtgcccgcgctaagcgcgggattttgttgttgattttctttatttttttttatatatttgagtttatcattctttcttagaaatgttatttttataagagagattgtattacgaaggatgaaaactacatattttttattaaccactatatattgntngttaattnttactcctatgtagaagctttgagtgtgttggatgtgggttccatctttatattttgaggataaattttatga

SEQ ID NO: 4303 - DNA, 566 bp, Arabidopsis thaliana landsberg
  unsure (1)..(566): unsure at all n locations
acgttaacgctgctgtagaacgactcttggggagtattggccagtaacatacaggttcgtgaactgatatcactccactctggcttctcaattatagaataaacaatgtgttttctttcagtaatctaatttatggaattcgtataactacacttatgataggatcgcgaacttgtggatagaaaagccgctcatcgatacactatttgttttcaatggtcatcttctttcctctttacccaatccccacaaccttttttacatactttgggtcgtctgttatctttcagattctatttgaagttgttacctcgtacatctgtagaagttgatttcgaaatgtggaatggttacatttacgttttcttatctccattttacttattaaatatagctgtagtgacgttgataatttgtgattgagcgttaagtttttcattcgaataacaaagattaatacaataataattggaagaagaacaaaacttatgaggaaacaaaaaaagaaatgtaaatcgacaaaacagggagaagtactgctaagaaccgtcgatganactacttgt

SEQ ID NO: 4304 - DNA, 2053 bp, Arabidopsis thaliana landsberg
ataattatttaaaaaaaaaacacaactatctagaaacttacgttgtgatcttcagtaatattcacattatcagacttcccatccatttcctatttaaaaatgttatgcaaacatttacaatgttatatgataccagaggaagatgcatgagattggttgatgttcttaataacttcagacaatcccccataattagaccaggcttgctgctgcaatgcattcaagagttgagcatgagtctgtccacttagggcagggttcttgcttgacgaatcagcgattggcgagggcatattactttgtctctcagggataatcttggggtcgaggttcttcgcggggtcaccaatttgtccctcatctgctatgtccttttgggacgcagccttagggggtggagtgacaattccatcaccactagtggactttggagactttccaccagatttgggacttggaaacttgtcaccatggcgcaaattgcttattatctcgtctaatagttcgtcctttaacaaagaattctctaagataaacataccagtaaggtccccaaataattcaaccttcagttcatccttcaattcacgaaatttagaattaacctgttccatgatcagaccatggagaatatcatgtccatcagtcctcggtggtggagtactgaactcttcatgcaccttccctttacctttagcagagggcccttttggggaccagatggaccagcctggaaagaatcagggatatccgatggtctgtgtggaggcaccttctttgcctttcgagcattgtcttctttaggatggttctcatcaacgacgatctttggccaggttcgacaaccacctctccagtcagattgttggaacttgtatcggctaccaatgaccctttccatatagtcaagcgtcgggtcttcaacttcatcgatccagtagtcgttgatatttgggtatggtggatcatcaatgggcaacaacggagaaatactcaactacattgaagccgaaacaatttatcaactaaacaaatcatcaaaggcaaactagtgagagactaataagaatctaataaaattaggtccacagattaccccaggaattagctctgtctccattatgttggagttgtggtaagtcttcaacggaggcaaactggtgagagacctctcactgatagtctgcgtatcatcggggtttggaaggtatctttccaattcagggataacgttaaagacaaaaagttggaagacaagagggaatccatgtgttgaattgttagactgattgaacttcgtgattagtcctgggagattgctgaccttggatctaactttgtgagaaggaaggactctcgtccccagggatacgcctcaaaagcctccaagtccttcaccatttcaacgacttgtttagaaacttttacaggttgggaactacagatcaagatcccctcaacaataactataacagcgagacaaagccttctccaaggttccatcctctcttctttaggcttcagcttatctgtcttcaaccatttgaatatatccttgatgaggacgactttgtgttccttacctattaggacattccagtaaggatgtctcagatttatgggttgctgcgacttcaatatgtctctccgagaggggtaaggaccacaattcaaaccagtaagaatggcaaactcccttaacaaaaaccggaagggctgaccggcaaaaacaaaccaaatctcgtgttttttccttgtgtagaggcctctacacaacatttggtggaccagtttcccggagaaagaacatttacggacttcaaattgaaaaaagggactaaaacaaggggcgcaaatgtagtttaactccttcgtcccatctagaatatcgacgagataaagaaggtacttaggcttagagtatgtatttatacgtccattcagcggatagcagtcagttgcgtaaagtctcttgggaagtctttcccgattgaattcagggatgcgaggaattattggcagatcagagctctgctcagcggttgatttggca

SEQ ID NO: 4305 - DNA, 2272 bp, Arabidopsis thaliana landsberg
  unsure (1)..(2272): unsure at all n locations
tcttactcgccttaacgtactattccagcgcgcccagcgatttaacatcttcgtggcaagttgtaggcaggccgccagataaccgagaccaggaaaaggatcgttgtaatccgaaaaggaaaccggttagaccgatagcgagagaggtgaagacgatcnnnnnnnnnnnnnnnnnnnnnnnnnnnnntggacgcgcgtgaaacagcttgggagaagatggcatgattttgtaacgacggatcctccagctacggcggatccactttctcggaagcgtttgtaacggttttttgttttgttttgtttattcagatcaggtggatccgattatcggattcgggtcggatccttttgaaggtacacggatttatgtgtatgttttgtatggaaattgtgaataaatacaatttgagaactaggggtatgactaaatacaattttagaacattaatgataacaaaagttaggcaggtaattaattaatttgacccacaaatgaagactcttttatgtgaataaatacacaaattaagtagataagaataaataataaaaataaaaacaaaatagataagaacagcattctttgataataaaaaagttgattgtgttttccttgctaaaagttgttagtaggcaatacttattttgtttactaggggatgagggttgaaaactctcaccattggccatcattaggttacattcacttggatgaatatattgaattcaaaggactatatatagagagtactgtaccgaatttaagagaccatttttctctattttgggaaaccatcacaatagaatcttgttttttaagacggttccactagtcaaaggctcaaaacaaatgaagacaaattacagtatttaactcaatgatgaaagatgttgaaatcgttttcattactaagacattacatatcggagttgtttacacataattaagagttacaagaaacggcaaatgcaatatcttaaactagaaacttaacaaaatttacatagaaaatgttcttataccctctatcaagatatttggaaatgaatacactttcgatatcactcgaaaccctaccaactaattactaaatcttaccaaatcgttaacaattgttttagtttctataaaatctctaacaatctttttaaaatcatcagaatatccttgacccccaccaaatttattagatccacaaatcaataaaacagcaatgaaatagcttgatgaatcatattgtacagaacattcaaatgcataaaggaaagaaaaaatgaaaggattacgtaaacggtaaacgaaactaacacaaatggttgagagatggattttagggtttaggtcggaaacatggcacgacacaccggacaaatcccactacacctaagccaatcttcaccacacgtgcgatgaaacacgtgagaacacggcattcgacccgcagccacatccaatccaatccggatcttatccatgcatatcacacaccaactttcattctcaacaacaaccgtctccaagtgttgctccaccgcttcattgctcgccggggccaccgcaagtctcacatctacatcatcatcatcatcatcaggaaacctccacacaataacattgatgactacatctacctctttcacgttagagatcttatcacacttctttaaatcaaggatcgcatcaatgagttctgtaacaacatcaatataacgaggggctttaatcaaatcaagaatgtgacagacaatgacttgtatttgctccctatctccactgaaaagcaatcctttatcaaactcgtgagttcgatcaacgagtagagtttcaagatcgagaggattttcatcttctccatctgaatttacttcaggggcaagattgtaacataaatgaaacttgaacatcaagttttgggttctgccaaaatcgccttcatcgttatagatcggataatagtaaacgaagctgtcggggtctggattgacagcatcaaaaaccatgatttgttcggaaaaatgggcgttttgatatttggtatttagggttttgaggcttgataagacttgaaaatgaaaatgaaaatatagaatcctcttttatgcggtttccttatcttagtagggttttctttcaaaaaaaaaaaaagtgccgagaggatatagagaaagaaacgatcatagttttttagtctaataatattattccgaatcctgagagctatcagagtcaagctgttcatcaacacaaagcaacatctcatcgcgtaca

SEQ ID NO: 4306 - DNA, 722 bp, Arabidopsis thaliana landsberg
caacaggagaaggcgggatgataatatcgccgagttctctcattttaaccaaaatatctttaccgccttgtctactccatctctgctcaaaattatacaagacatcccaagcaataggtccttcaagacgacaatgaatgtcatgccaaggctctctaggaccgcctttggttatcgcagcaccagtgaaattcggttgatggaagtcatcgtgatgggcagtgtccaacgttctaaacaaggagtgaaacggagtgtcatatcttccatcacaaagatcaagaccaccaacaaaactcacaattcttctggatcttgatcctccactcggcatttcactgtctacaacaacaatcttttggtgatgagtgaacatagttgagatttgcaagttttggacaatgcttccaccatcatcagggttacgaggacacaaaatacagttcacgtcggttcctctgaaaaaattctcagtttcttcatcatgagtggccataagtccatcttttttcagcaaatcaactgatgttctgtcattccaaacaagcaaaataaccttaacaccttcactagctttcttcttgagtagctctccaacagtcacatcacctccatgatttggcctctatagagtccctcactaaagaaatcacagtgtaaacagaccaaccagtaatgtaaatctagtgtttagcattagtaattgcatagttctatatcct

SEQ ID NO: 4307 - DNA, 664 bp, Arabidopsis thaliana landsberg
ctttagagccgagaggtcaagaaagatggagagtatgagccttcagagaaacctgaaccggacactgactatatccgagcacaagaagcacgccgcttcatgatctatgttcacactaaaatgatgataggtgagtgttttataacatttacatcatttataacttttcaatactaaccaaatgattcaacatcaaaattttcgcagttgacgatgagtacattataatcggatcagcaaatatcaaccagaggtcaatggatggtgcaagagactcagagatagcaatgggaggctatcaaccatatcatctttcaacaagacaaccagctcgaggtcaaatccatggattccgcatgtcgttatggtatgaacatttaggaatgctcgatgaaaccttcctcgatccatcaagccaagaatgtatccagaaagtcaaccgtgttgctgataagtattgggatctttactcaagtgagtcacttgaacatgatcttcctggtcatctacttcgctacccgattggtattgctagtgaagggaacatcactgagcttcccggatgtgaattctttcccgacacaaaagctcgtatccttggtgtcaaatctgattacatgccttcaattcttacaacctaagcttagtggcagtaattatgggt

SEQ ID NO: 4308 - DNA, 571 bp, Arabidopsis thaliana landsberg
  unsure (1)..(571): unsure at all n locations
aaacatcaaacatatgagagagaccctaggctctaggggtcttacgcttgaaacctttttctcctttgcccatatcttctgtgtggatattctcacaacaagctcattcaccttagctttcgaaaactaatacaagcaacaacgccaatggctagaatcacccatcccataacaatatacttctcatcactacttttcttattcttcactacctgtttggaaaaaagtacataagaaaaataaacatggtttcaaactcatatatcttcttatattatctaattttttgaatgtattcatcaaaatattgaaaattgaaatgcccataatgagaatgaacgtacctttgggctcggtagtgctaaagtttcaacgccacccaatagtgagagtaagcggtttttatgaacccccgtgtgtagttgtggagcctatgaaattaaataaacaacaaaactntgagtttgagtttctatgagtaatggacattttgagatgcaatgttcccttcatgatatgccttacttagtagaaagtaacanaccagctagagaacaaacttaagacatga

SEQ ID NO: 4309 - DNA, 6850 bp, Arabidopsis thaliana landsberg
agctatatatgaggtttcttctgctggtatttccaatgaccacattggaatgaaaatatttatcacagaaggtgttgttccaactttgtgggatcaacttagcctgaaaggaaatcaggataaagttgttgaagggtatgttactggcgctttgaggaatctttgtggcgttgatgatggttattggagactgacactagagggtagtggtgtagacatagttgtgtctcttttgtcatctgataaccctaattctcaagcaaatgctgcttctctgctggctcgtctagttctgtccttttgtgatagcatccagaaaatattaaattctggagttgtcaagtctctgatacagcttttggaacagaaaaatgatatcaatgttcgtgctagtgcagcagatgctttggaagctctttcagcaaattccgatgaggctaagaaatgtgtcaaagatgcaggaggtgttcatgctctcattgaagccattgttgctccatcgaaagagtgtatgcagggaaaacatggacaatctctacaagaacatgcaactggagctttagcaaatgtgtttggtgggatgcgccatttgattatatatcttggacaagtctcacaatcccctcgtctaacggaaccaattggtgatgtaattggagcccttgcctatgctctaatgattttcaaacaaccagagagttccgagaatatatttgatccaagcgtgatagagagcattttggtaaagttactaaagcctcgtgacacaaagttaatccaagaacggatcttagaggctatggcgagcttgtacggaaacagtagtctgtcgtgttacctagatgatgcagaagctaagagagttcttatcgctctcataaccatggcttctgctgatgtacgagagcgtctgataatttgcttgtctggcttatgccatgacaaggttggaatttgggaggcgattggaaagagagaaggaatccagttatttatatcatttctaggtttgtctagtgagcaacaccaagagtatgctgttgaaatgttgaaaattttgacggctcaggtggatgatagtaaatgggctgtaacagcagccggggggatacctccacttgtccagttgctcgagactggatctcagaaggccaaggaagatgctgcctgcattctctggaatttgtgttgtcacagtgaggaaatccgtgattgtgttgaaagagctggtggtattccagcattcttgtggcttctgaagactggtggaccaaattcccaggaaacatctgcaaagacacttgtgaagcttgtccatacagctgatcctgccacaataaatcagttgttggctttacttctgggagatgatccgacttcaaagattcaggtaatagaagtgttgggtcatgtgctctcaaaagcttcacaagaggatcttgttcatagaggatgtgccgctaacaaaggactgaggtccctagtcgagtccctaacatcttccagagaagaaacaaaggagcatacagcttcagttttagctgatctgttcagctcaagacaagatatttgtggtcatcttgcgacggatgacattattaatccctggatcaagctgcttacaaacaacactcagaatgtggcaaaacaggtggctagggctttggacgcactgtcccgcccagttaagaacaataataataaaaagaagtcttacattgccgaaggagatattaagtcactcataaaattggctaagaactcttccattgagtctgcagaaaatgcggtatctgccctcgcaaatcttctgtctgatccggatatagctgcagaagcactagctgaagatgttgtttccgctttcacaagaattttggctgatggatctccagagggtaagagaaatgcgtcacgcgcacttcatcagttacttaagaactttccagtttgtgatgtgctaaagggaagtgctcagtgccgttttgctatactttcactcgttgattctctaaaatcaattgatgtggatagcgcagatgctttcaacatattagaagtagttgcgctcttggcaaagactaagagtggggtgaatttctcttaccctccatggattgcccttgccgaagtgccatcaagcctggagactcttgtgcaatgccttgccgaaggccatactcttgtgcaagataaggcaatagaagttttgtacaggctttgctctgatcaacagtttctgctcagtgaacttatagtttcaagacccaagtcaatgttggttctgcctgatagaatagtgaatgcatccagcttagaagtgagagttgggagcacagcgctgctcttatgtgctgcaaaggaaaagaaccagctgatcacggagacacttgatcagtctggttttttaaagctcttgttacatgccctcgttgatatgataaagcacaattctacaagcttttctctagagactgaagtccagacacctaaaggttttttggaaaaaaatgttttccaggatacaggtagtttttattttcctgatccagctaaaatcttgggtggtacagtcgcattgtggctgctatgcatactcacttccgttgatgctaagtcaaaggtcattgttatggaagctggcggacttgaggtgctcttggggaagcttgctaggtatacttccagtgctcaggtaaatgttcctttctcgggtataaaaaaattatatgcttcttcatgtttattggttatgggtatcctacagggcaccttcgttgggaatgaaataaattagcgaacttctgttatgagttatacaactttgcggggcggggtttggtctttaggtccttctgttagataagaggttctgttacagtaaatctcacttctttatatcgttacagacttgtcaagcatgaattgtgcatttcggttttgaatcacactgctctctcagtttctcttaggcttgacttgattcttactttttttgtggcagagatgccttgtatgatgaattttcccccttgaaagtaatcttgagctaaactattttaccaggctgaatttgaggatacagaaggcatttggattagtgctctcctcctggctatcatgttccaggatgacaatgtgtccttttcttaacgacaatgcggatcattccaacacttgcagttttgctaggatctgatgaactgatagatcggtatttcgctgcccacgcaatggctagtcttgtttgtactaggaacagaggaataaatctgacaattgcaaactctggtgctgtttctgggataataaaccttcttggctatgtggaatcggagatactgaacttggttgctttggcaaatgaattttctctcgtgaaagagcctgatcaagttattcttcaacacctttttgaaattgaagatgtgaggcttggctccactgcacgtaaatctatcccgctgcttgtagatctcttaaggccaattccagataggcctggagcccctcagtttgctgtccaaatcctgattcgcattgctgatggaagtgacacaaataaattacttatggctgaagctggagctgttgaagctttaacaaagtacctttctctaagtcctcaagattcaactgagtacgccatatctgaattgcttagggtattatttagcaaccacgagcttagacaaaacgaaatggcactaagttccttgaatcagcttatcgcagtactgcggctaggttcacgaagtgcaagatacagcgcagctggggctctgaatgaactatttgatgctgaaaacatcagaaattctgaaatcgcctgccaggctgttcaaccacttatggacatactcggttctgtatcagaaagtgagcaagaggtagctctctctgcattgatcaaactaagctcaggaaatacttcgaatacagctcttctgattgatgtggaaggaagtctgctggaaaacgtgatcaaaatcttatcatctgctactgcttcagaggagttaaagataaatgctgccagactttgttctgttgttttctcgaataaaaacatcagaacaagtgcatccgcctccggatgcatgaagccgttaataacacttatgcagtctgaaagaagtgcagcagttgaagcagcagtttttgctattaagatattattggatgacgagcaacatttagaactagcagccgcacataacattcaggagcttcttgttggcttggtttccgggaaaaattacgttattattgaggctagcttatcagctctcattaagttgggaaaagacagagtaccacgcaagttggacatggtggaagctggaataattgagcgatgtcttgagctactacctggagcctcgagttcgttatgttccgctgttgtagagctgtttcgtattttaacaaatagtggagtaatcgcgagaagaccagatgttgcaaaaactgtagagcctctcttcgcggtcttgctgcggtcagacttgaccttatgggggcaacatagtgccctgcaagcactcgtaaacatattggaaaaacagcaaacccttgaagcttttagttttacacccagtgaagccattgtgccgctgatttcttttttagaatcttcatcccaagctatccagcagcttggagcagaactgctgagccattttcttacaatggaagatttccagcaagacatcacaacacagagtgctgttgttcctctggtccggcttgcaggaattggaatactgagcctgcaggaaactgcgataaaggcattggagaagatatctgctagctggcctaaggctgttcttgatgctgaaggtatttttgagctatccaaggttattcttcaggaagatcctcagccccctcttgatctatgggagtcagctgcctttgttctttccaacattctgcagtatgatgcagaatgctttttcagagttgaactgccagtgttggtaaaattgttgttctcgacaattgaaagcacagtgttactggctcttaaagctttgatgcttcatgagaagaacgacgcttcaagtacagtacaaatggctgagcttggtgcaatcgatgcattgctggacctcctgagatctcatcaatgcgaggaagaatctggaagcttacttgaagtaatatttaacaatccaagagtaagagagttgaagttatgcaaatatgcaatagcaccactatctcaatatctgttggaccctcatacaagatcagaacctggtaggcttcttgctgctctggcactgggggatctatctcagcatgaagggctttctagatccagtggttctgtttccgcttgtcgggcactcattagcgtgctagaagaacaaccaacagaagaaatgaaagtggtggccatctgtgcgttgcagaattttgtgatgaatagtagaacgaatagacgagctgttgcagaggctggtggcgtattgttaattcaagagctactgctttcttgcaacccagaagtttctgggcaggctgcactgatggtcaaatttttgttttccaaccacacactccaagaatatgtctcgaatgagcttataagatcactaacaggtacttttcaatttaagttatacgaatcctatgtccctgtcactctagcactacagtttttatattctgataatttgttttgttctatcttcaactgtttgacatcttattcttgtgaacagctgcacttgagagaggcttgtggtctacagcaactataaatattgaagttttgagaaccttaaatgtgattttctccaattttcctaagctccgtgcctcagaagctgctactttctgcatccctcatttggtaggggcgctcaaatctggtgttgaagacgtccagggattagtattggatattctttacttgctaagacactcctggacgaatatgtctatagatgttgcaaagtctcaagccatgattgcagctgaagcaattcccgtcctgcaaatgctgatgaaaacatgccctcctaggtttcacgacaaggcagatagcttattgcactgcttaccaggttgcttaacagtgaacgtcatgcgtgccaataacttaaagcagtctatggcaaccacaaacgccttttgtcaattaacaataggaaactgccctccacggcaaactaaggtaaaacaaatccatcacaggagaatattctacactcccaccattgccaaaaactgtctttgtatcattgggtttttgtctctttttctgtaggtcgtgagcaatagcactactcctgaatggaaagaaggctttacttgggcatttgatgttccccccaaaggacaaaagcttcacatcatatgcaagagcaaaagcacatttggaaaggtaacattgtaacaagagccacactgttcaaattgcagtgttgggatagagatctttgatatgtattgtcttatttggtctttgtctaacacacaacacattccttgtctgcagacgactctagggcgagttactatccaaatcgacaaagtcgtgacagaaggagagtacagtggatctctaagcctgaatcatgaaaatagcaaagatgcttcttccagatcactcgacattgagatagcatggtccaataggacaacggatgagactcattgatcttcacaagcacaatgcacttggtcattggaagactgaaatctgtctaatgctcctaatgactgcattttggtagtagaagaaggaaagcaaagtctgcagcagatgtatagcaatacgtatatatgggtagagaatatggtgtgtgaaaaggaacatagaagcaaagagttc

SEQ ID NO: 4310 - DNA, 2553 bp, Arabidopsis thaliana landsberg
  unsure (1)..(2553): unsure at all n locations
tgcgtcacacgggattgatttccctgaaacggtgccgtttctaccacgaacagctataggaatcacttttggcgcgtcggctatgttgtgagtaaagcgcgtgtaactcaaaccatgcccgaacgggtaaacaactggaccgtcgtagaactggtaagtccgacccgggatccgcttcgaatggagcggccgcatcgacatttctgtcattggtaaattggttaaataatcttgcggataccaagtcatcggaagctttcctccgggattagcactgccgaataagatatcggcgattgcggtaccaccttcctgacccggatacccggcccaaacaatcgctggaattttccgatccttctcagcaaaagatatatcgataggcccaccagacatcaatactaagataactgggcctttagcggccttagcaactctagagacaagctcttgttgtttccaggcaaaagcaaactgtttctgtccttgaactccgcttcaatagactgatcaaacccatcacaagaaccgtcgcannnnnnnnnnnnnnnnnnnnnnnnnnnnnnncgaacaatctatcatccatgcagtgtacgtccacgcaacccttttgatgaatggttcgagcataaccggtaataccttgaaccggactggtatatccacaagcaatccctgcataattaccaatcattgtgaccgtagcgtctgaattaggtccaattacggcgacagttcggtgacgttggcttgagagaggtagagacgagccgtgatttttgagtaggacgattccttgttgagctgcttcgagagctagtcctttgtgaaccggtgtacacacgtgtgccggtccaaggtgtccgtacggttgagccgctatatcgccatcaaacattcctagtctcatttggactgttagcgtgttgattaaggcattatcaacatcggactcacgcaacaagtttttcttcaccgcatcgattgtatgggctcctagaaatggcccacaatctaaatccaagcctacacaatcaacacacaagattggttagtttaaggaaaaatattcaattttaattttctactaaaaatcaataattttatttaccagctttgatggaatcagcggcagcttcttcaggagtaccagtgtaatgttgggtatcgtacaaaacaccgacagagtcacaatcagacacgatatacctgtttgcagaaaaaaaaaaaaaatcaacggtcaacggtcaacgaaattctaaattacatatacggaatgttttgagctgacgtggcgtgatcttacccgttgagaccccattgattgcgtatggtcttcttgaggagattaggatcagcacatgtaggaacaccattaacttgattgtacgaacacataatgctcgcaacgttaccttctttaacacacatacggaacggtacgtcgaacgtgtcttctatgtcttgcttgcttacctatcaaaaccaaacacgtgagaacaaagaaagaagttgaagcaagacaaagaataaaagattaaattaaaccttagcgttgaaatggaatctgtcgacgccgttccagttatcgagatcgtaagctgtgaaatgtttgcaacaagcagctacttttaaccggctacggtcgtttccctgtaaccctctgacgtagctcgctgcgtatttaccggctactactggatcttcaccgggagtttcctgtccacgtccccaacgtgggtccctcaatatgttaacgtttgggctccaatacgtaagcccaccaactccaccgttgtacatggccctggcctcatttgacacaacctgcgaatccccaagagcgtaacttagtcgtggttaattgttaatgataaaatgcgcatgactaatgttgcaagttgagagcatcgtatgcaacttgcggcttgcctcgattttagcgaaaagcgtacgataagttcatattcatttcacctttttaataaatattaaaatagagcagtgttattttttaatatgttatctgattaactataaatatcattaagtattcaaattagttaaaaattgttagaatcagatctttgtcgtaaattggagatggcataaaaacgaaaccaagagcagaatgtaagttactttaaataaattagttttatttaagaaaagttactttcaatagcggtaggctaataagagattcgtgcgtatgtttatttgcatgaagtaccggacaaaatcagaacatgagaagtgtcgaaatatcacaattgtatataagttattttaaaaataaaaaacaaaaaacgaatattagttccgataaaagagaatatttcgatacangtaaaagtgttttacatataaatcgcactagaggtaattaaatacataataaatgtgagctgtatatatatatataattaacattattacttacgtcattttcacagagaaaatagtgaaaagtatttagtagttagatcggnggcacacacaaaaataattgaaataggtgtttntaacttactgataanagagagagaaaga

SEQ ID NO: 4311 - DNA, 1637 bp, Arabidopsis thaliana landsberg
tcttttgctctatgagcttcgaatctaaacttttataatctctctgggcaggggcacaaaagttagcaagaatgggggagaacagcaactttttcagggctgagttgcagaagatggggtttgaagttcttggagacaatgattcaccagtcatgccaataatgctttacaatccagcaaaaattccagcattctcaagggaatgtttgcgagaaaatgttagtttctcttgcttttcttaaaaaatatttttttttgcttccacacaagagactcacctcctatgttcaacggataatgaaatttgtgaacagttggcggtggtggtcgtcggtttcccagctacacccctattgctagccagggctcgtatttgcatatccgcatctcactcaagagaagatcttataaaagccctacaggtaaatgaaatcttgcattgagttcactggttctcactcccatatcatttaccacgaagagccctagtagtattagtataaaacacgagttctcgggtttctagataggtctatgtaaataaagcctttctcagaaagggaatctgcagttcatccacaagatggattcacacgttttaatattctccgtgttatgataggttataagcaaagcaggtgaccttaccgggatcaaatattttccggcagctccaaaaaagcaagaagtagagaaaaatggcatcaaattggattaaacccgtaaggcaacagtttctttccaagagatgtttggctagcaattagctgtagtgtacaattatctcgctgttcgtctttgtcttgtcgtgaaacatgtgattgttgtcattcttctctctttattatttttattgtttttgtcagagttaataattgtatagtgtccctctatatattgttgccccaaaatttttacagatgttatcgcagtcatctttgctccacgaaattaggggcccaattcgttggaccaggtccagaagtatttatgaattgttttgttttggtcttccagaccacgaatgtgctagcagaagagtggttctcacagttaccaaataaacttctatcatgttggaattgcattcataattatccttgaatttaaaagtttgtatatgcaattcaaggggacgttccataaagaggtttgtgaatactgatgcactcgttagtcatttcatgtcttcgtcccagcaaaccacatacaagtattgagtaattaataacttatgtcacactcctcttctgtaaaagctttgttgatggtactctgccactattgatcttgctaggagcatgaggctaagcatatatccttgggaacctgagaagtgagaccaaccggctctcgatccacaacttcttcggtttgttctgctacgagatctcatgcttcttctcacatttttgtccatacatgtaactatttaaaagattcgagttcaaatattttagaattttggatatggactaaacatgtaactaaaatttgatttgaatataaagggattaaaatctttttcgaaaggttgccgtttttgtcatatacgaatactaaaaatagtaaggtccagtcaggggggccaagacttgagagttagaggtaatttctctctaaagtaacatccgagg

SEQ ID NO: 4312 - DNA, 1454 bp, Arabidopsis thaliana landsberg
  unsure (1)..(1454): unsure at all n locations
aaaagagttacagctgaaagagcaaaaataagctatcaagatacctctgtttgaaccatcctctccaaggataacctttatcgccgatatgatttgtgtcgcggaaggagttgaaattgatgtggcgtaaaggtgagccgggcattggtgcttcaaatattggatgaggtcctacaaaaaatgaaacacaatatgctataacgcctttggttgatttcgaaatgaagtgtactagcctaaacaatcaccatgtctattgtagatacagttgcgccttagtgtatcagctctttattcatctgtgaaaaaaatggccgtatctttcttgtgcaattctgaaagatctcttatgattaagtaatttggttttctagttctaagtttttctgaaaggttcaaattctgatttaccaaaattaaataaaccaaggaatgcaaacaaaagatcagtaaatgcaaaagaagtataaaattgccaacctttgatcccgcaatatagccaccacaagacccaaaagatttcgtgaaagttcccatcattatgtccacatcagaagtgtcaactccaaggagttcacaaacacctcttcctgtcttgccaattgctccaatgctgtgagcttcgtccaagtaaacatatgcctgaaacaagaatattgaagaagttaagttacgcatcagacaatcaaattagtctagacaactttgatgttaaaaatgatagtttagttgattgagtttcttaatctctcatcaatgttgaacataaaagatgatttattatgttgcctcaccttatacttcttgcatattgaaacaatctcgggcagatgacaaatttccccttccatgctgtaaataccctcaacaacaacaataattttcttccacggtctatgcgtcctgggttgtccctcggcgatttgttctttcaatactttttccagatgaccaggtgctgcgaagaatttaacaaaagagcataaagatgacatgtcacccaattaactagcaaaaaattatggaaaatgatgcttactgttgtgttggaaaacacggatagtagctcctgaacctcgagcgccgttgacaatcgaagtatggttcaaagaatcgcttattatcaaccctccctgtacagatggcagcacataaagctacaaaaacataggttttgggagtaacataagtgtccatcacaagatgtagcagcatatacttacctttccaatcaagacgggaatgatagccgagtttgttgcataacccatgccaaagacaacagcagcaggttgtccgacatatttagcaacacaatcctcaagttctgcatgcacagatgtagttcctgataacaagaacaactagtgtcaggcaaccacatagagaagagattgttcgagacctaatacacaaagacgacncttgtcctgcatcaacgcgagagctacatg

SEQ ID NO: 4313 - DNA, 2751 bp, Arabidopsis thaliana landsberg
  unsure (1)..(2751): unsure at all n locations
atttggagagaagagttgctgagctgaccacaacagttgataaattgcatgaagagaacaattatgttaaacaaactctctccaagttacaagagagttacgcaggtgctacagaagatcttgatttcttgagaagaaactttgaagagaaggatcaagaatgcagggagttgcacaaatctgttacaaagtttttcagaacttgcaaagaacaagggaagacaattgagggacttcgagatggtgtttctgaggaggttaagaagcaaccgtcagagaaattagaccagttggtcaagaaattgcaggtcgagcaggtaaggttgacagggatcgagctttcacttagaagggaagtagaatcaatgaagcttgaaactgactctcttcgtcatgaaaatatctgtctactgaatcgattgaaagggaatggtcaagaaatagacattacaacccttaagctagagaatgagttgaagatgcgtgtctgctacttgcaagaacagggactgtcaatgttaaatgagagcagccagctgtgttacaagttactgaagttcatcaaagggaaattaactcagcttcctgaaacctatcaggataagaattcagtgaaggacggattaagtgagcagtttatgattgagtctgaaatgaaagtccatgggataaggcgcggaactgaaaacctgaagaggagtttgcaaacggtgaccagtgtggtagcttcgaattcagaatcgtcttcctcaaatactggtaggcctagggaacaaagaaaccaatcagttgaagtaagtccacggatatgtccatttcttaatatctctattgtattttcttgtatgtcctgttttgctttacactaatatgtggctaatgtatacctggcccaatctcatgtaggaaaacttgcgagcagaactgagtgctgagaccctaatcacaagtttagtgcgggagaaactgtattccaaggaaaaggaaatcgaacagctccaagcagaactagcagcagcagtacgaggtaatgagattctgagatgtgaggtccaaagcagtttagacaacctatcagttacaacccacgaactgaaagacctcaagcatcaggtattgcaaaacaagaataacacatgacccatatctgtttttgtatataaagaaactattcccatttataaaatgtaaactttacgctaatcttttttgacatcagatgtggaagagggaggcaagcataagacggctcgaaagcaatctccaggaagcggcgaaagaaatggcgaggctgaacgcactattgtcaaaagtgtctaatgaaagaggccagatatggagtgagtataaacaatacggtgagaaaaacatgcttttgaactcagagaacgagacattgaaaggaatggtagagaaattggaggagaaggtattagagaaagaaggagagatcacaatactacaagacacaatcggaagcaagcatctgaatctcctctcaagtcctgatttcttggtataagggtttttctttatcattgtttcttagacgatgggtcattctttggggcttatagatatgattgtttcttcttttatttttacttttcttcttttggattgcttatctcaaagctggattctctctagtttcagatttgtacttaaaaatgggcttataaacttagtggtgaagtttatggtaaagaaagtttgtcatttgactcaattctattcaataaatcttcataagccattagttcaaaaagagactagcaataattttatatatatactatcttacataaatatatatatatatatatatatagacttggtacttttacttttttcactaaatatatgatcacttttcactatagttagtcattctttttctcaataagtttgacaaagctagtcttatattattttttttcctacacttgtagaaacaaattggtaccatattttagagaatattttataaaaatagtagaggtattaaatgttgcaaaaaaaaagtcaaaccgttaaagtcaaaaagaaatggagagacgacaggtagagaaaataaaatactataaatttaccagaaaaaaaaaacaccataaacacgatgaccgcgactatcggtactttctctctctaaaaaaaacaaatccaacgtctccgtctcttcttcaaacgcgtcttcttctctattttaaccctctttcatcgtctctttcgctttttataggttttgatttgtattagtaatcatcttgctaatctttccccctcattgatctgaaatcgaatgatggattattattctactccaagcttttgaaataaggaaccctatttctttcatctaatcctcgatttcatcaggtatttcaaatcaattacccaatcaggttgatgggtcaaagttgaaacctttagattcatatgtggatggagttatgtaaagttttcttcttaatcaaaatttgtttctcccagatgcttgttatcagattgatgggttaaaagttaaaaaatttagtttcctatgttgaaaatttggagactttatccttttttcgattctagattactaaatgttttgtttttgtttgtgtggaatgcagattaatgttgtttacatttgtgaatgcgtgtttgaattctgaatcctgngtttgtggagttggaattgagtctgacaagaagattgggtttcttcataatatagttataagcactgatttgatgaacgat

SEQ ID NO: 4314 - DNA, 493 bp, Arabidopsis thaliana landsberg
  unsure (1)..(493): unsure at all n locations
atgaactataagcaccttttggagtagattcaaatcattgctactatgctgagaaagcgagtgaactcaacctgcagggctttaataagatcttctcttaagtgagatgcggaattgcaaatacgagccctggctagcaatagaggtataggtgggaagctgactaccacgattgccaactgttcaaagtttaaaatgttcattataacatagaggtgaatctcttttgcgcggaagcaagtgagatattggaaaacaaataagagacttacgttttctcgcannnnnnnnnnnnnnnnnnnnnnnnnnnnnnnnggattgtaaagcattattggcatgattggggactcataaactccaagaaccttgaaccccatcttctgcaactcagccctgaaaaagttgctgttctcccttattcttgctaactttagttcccctgcccatttttttagaaaagttngagagtataacttgagattatgaaatgctg

SEQ ID NO: 4315 - DNA, 2788 bp, Arabidopsis thaliana landsberg
tctagaggatccccataccacgaactgggcgcgtggaccgctgacttcgaagtgccagaccgagagcccggacttcgctgcctcgagtggctgcaggaggagttgctggcgctccccgccatcgtggaggggtttatgtcctatgcctccctggtcacctgcgaaggggcgatgaacgcgctgtcccgcgaagggtgccggcactatgaggtcttcgaccaagctgatgaggatttcgagcgcgatatttacaaggttgaggaccctgtggtgaaggaatccgcgggaccctctacgaccggatgtggggccctcacggtcgggaggtggtcagggagcggaccgagacggcgaggggtcaggtaatgtttggcttttgtttggtgtttgttgaatgtgggttatatgtgggtttgttgaatctgtgtgctgtgtctcaggcggcgcgtggcgagagggtggatgacttcggggctttgaacagcgtgctgcctgacccggagctgaacccggtggcggctgtgtccgaggccgccctggagccgccccaggaaaccgccgaagtgtccatgatgcccccgcagccactgcggccggcggaggcctgtcgccaactgccgcgccgagggctgaggatcctgcgaaggtggcgacggaatcgacagcggaggatcccgcgacggctgggtcttcgcaggtggcttagtgggtgtgggtagttagggaattttcgatatgttgctgaattttggttgctgcgtaggttcaagattttgggcctacgcacgcaaccgccactactaattttttggcggcttcgaccgtggatggtggtaataaatgtgatgggtctgcatctgagttttctgattttgctgactctgggagctcggttgagtggactgaggagtcgtcggaggacttggactactttgcggccttggatgtggcagcggcggaggcttcaccgcacgctacggacacagaagatgtgcctggtccgagcatcgggcgccggcggcgaagggcggttgcgaacggtagggtgagtggggcggagggaggtcggcttcgtgtgagtagggctggctggcaggaactgttgtctttgccggccgtcgtgagcacaggtgaaggggaattgcgaagtctttttgcgggtgaggagcttaggataatgttatttaattatagggagatgggaattattccgaaggttgagccgatgtagagtgtgatgccctcgcttgtacatgtgtaatggcttgtatgatgaggttgtgtgccttcgcacattcggctatgctcgcgaaggcattacgtacttggtctggtgtatttgttatgttggtctggtgcgcatgtagtcggtctttgcgcggacagtttggtgtagtcgttttcgcacttgttaagcttcgtccggctgcacccttaagcgactgttgcacggatagtcttcgcagaagacttcgatttttcgcacttgttgtgctagcccggctgcacccttaggcgacttctgcacggatagtcttcgcggaagactatgattgttcgcacttgttgtgctaagtccggctgcacccttaggcgacttctgcgcggatagtcttcgcgatagacctcgttttttgcgcacttgttgtgctaagtccggctgcacccttaggcgacttctgcgcggattggtcgcacgcgagggtggctagcgcttagctcgcggtgacttcgaattggtcgaatgccgaagaccgttgttgcggtcttgtttcgacatgcttttgtgggggatttcttccacgtatatcacatggctccgcctcactaaaaacctcaccccccgggaggaaacgagtgcgggccggtacaagattgtttgcggcgaattacaagggcgatatcggccctaaatgggtcaacaaaaaatttgcgaaggttgtcgacgttccaggagtgctctaggtcctcgccgtttggcgttgtgagcctgtaagcgctgggggaagcttttgacttgactatgaaggggccctcccacttgggctccaacttgcccttggactccgtccgagctgtgcgatgagtacgaggtcgccctcgctgaactccctcgggatgactgcgcggtcgcgcatgctttggtctgggcctgatatttgtttagggcttgtagggcgaagaccggtctccgtcaatgagatcttttgaagttggctcatccacgtcggggacggctgacggaactgtacgcggggacccatgctttatttcttgcggggtcatggcctccgatccgtatagaaggcggaaaggagtgaaccggtcgccctgcactcggttgtgtttagcgcccagactgcctctggtaataagtcggtccatctgccttttctttcatcgaggagcatctttttgacagctgtgaatattttcccatttgcgcgttccacaactccgttggattgcgggtggtatactgaggcgaaggaagcttggtgccaatggagaagcagaaatccttgaagtcttggctgtcaaactgcttgtcgttgtcaactgtgagttcggatgggactccgaagcggcaaacaatgttttgccagaagaatttctgggcagtcttcgatgttattgtggatacaaccctcgcctcgatccacttggtgaagtattctactgctaccaaggccaacttgcagttcccctgagcggtgtgcaaggtcccgacgatgtccaggccccagctctgaataagccatgtattggcgaccagctttttgtattg

SEQ ID NO: 4316 - DNA, 1279 bp, Arabidopsis thaliana landsberg
cactaaaaaagaagagattaaaagtaacatgtcaatctttcttatgaaataacagcaaacgccataagctcactatgataacaacttcaatcctagattaaaggtatcagtagtctccatcgtcacatactcacatattttttggattcatctagaggatataaaaatatttcgcaaagttttccaaaacgttgataaagaaggttttcataattacttgtaaaaaaaataaaaacatttacaatataactctttgattaattttacggtaaaagccctcataaaccctaaattaaacctcccatcccaaggcacgaacacaatgacgaccgaagaagatatgaggtcatcatcgaagtctccgaagtcgtttttgtctttacccaacgacgttgttcttaactgtctgtctcgtgtctcgagaactcatgatccaattctatctctcgtatccaagagtttccgatcactcgtcgcttcgccggatctcgaagccgcacgattccgcttcctaaatacggagaggtgcctctatgtctgcttaaaacttaataacaaccataaccctagctggttcatactttccgaaactcccaaacattaactgataccacttccttcgtttccttacccacatcccaattgctcaactgttgtcttgtctctactggttcagagatttacatgcttggcggattcgacgcaaagggaaagagtagcaggagagcttatgttctcgattgtaaatctcatcaatggcgtcgactccctaaaatgcttatagctcgaaaaggtgcagccgctaatgtaattgacggtaagatctatgtgtacgtaggattcagcagcgtttacaataacggcgtaaacgggggagagatttacgacccaaagactcaaacttgggagccatttccgcaaggagaagaagatttctccaataaagagggtgtgactcgatgtgattttatagttggtgaattattttttcatgattgtggcatcctaattagtggaaaagtttatgacaatcttctgatggacaagcttaacttgtgtccgaatgtttgcatggtactcatagattgcaaagacttccaagcaacggtttccaatgggaaactcaaactactttgcagtgatgattctaggccgtgggcgtggagtaccaaggttgggggacttgaaggactgtcttgtaattatcatgtttaagtggcaaaccctggcggagaaaggagagtgacagtttatggaagacgtatacaagaaatgtgaa

SEQ ID NO: 4317 - DNA, 1005 bp, Arabidopsis thaliana landsberg
attgaccaaatggtggttgtagaagagctgagattagatttaccaaatcatcagctgtgaaaattagatgtttggtttcccacttcttctgccttgagcacaggcttttgaaattccttggtatatacaagaacttgccattgtattgttcatgttttgacctctttacctcaatgttattctcctttctggatcattgaagtgaagtcttattgatcaaacttctccacaacaattctcagacaaagtaaaacctaaattcatcaaatggacccttcacttaccatttgatgattcaacatctaaaatgagatcaagtgcataatcatagtaaggaacttgaccactcaaaccacagagattgaaatcatcttgtatataatcttcatctacttcacagaaaaactcattccctctcaaattacaaaaccatgagatccaagaggtatcatcaccttctgaaccactcacatctgatccttcactatccgtgtcagattcaactgcatccacaaagaatcaaaatttataattacccaaatcagaaagtactaaaaccacatgaaattgaaattgagtgagatataagcaattaaccatcgggggaacgagaatgaagctgagatttagcagttgaagtagaagggaaagaatctttgtccttagaagtgaaaaccctagatgtagaaggtgaagatttcttaagatgtttgtctaaagcatcattgattcgtttccgatcaatagctccaccaaggatctccgatctcgatgatccaccaccacccattattcctcctccactccgatccttgtacataactcgattcgattccctcaatgaaaaaaacaaaaattttcagctttagattctcaaagtcttcgactttcttatcatcagaggaagaagaggggcggataaatctagggtttgttttttcttcgatagtttgatcacagagttgaagaaagagagaagaagagattaagagtgctctgcttttt

SEQ ID NO: 4318 - DNA, 629 bp, Arabidopsis thaliana landsberg
  unsure (1)..(629): unsure at all n locations
aaatggaaggagcaaagaactggaaagcaaaaaaagaacaaaacagttgagaggagaaagagagaccatctttacatcgcctatgtcctgtcctccactctgttaccaaaattatatataattttttaaaaaaaattaaaattaaaaagaagaaaaccctagatttctccgtctctctaatttcctttctctctcaagcttctcagaaagtctgacactttcgagaatctaatctccaaatttcttgtctttttggagaaggaatcgaattatgtacaaggaacgtagtggaggaggtggtggtgggtcatcgagatcagagatcctcggtggagctattgatcggaaacgaatcaacgatgcactcaataagaaactagagaaatcttcaacttccaccaccacatctagggttttctcttctaaagacaaagatcccttttccttcacatctactaaaactcagcttcctgatggtttgttcctctctttttcacatctgtgagtctttntgttggttaattgctttctttctgatgattntttttttttggtgttgcagtggaatcggaaactgatagtgaagggtctgatgtgagtggatcngagggtgatgatacgtcgggatc

SEQ ID NO: 4319 - DNA, 3892 bp, Arabidopsis thaliana landsberg
  unsure (1)..(3892): unsure at all n locations
gaatgatctacaaagcaccgtctctactctctactttataatttatatatttcttttttaagaaaaaataaaatatacgttaatcctctattaactattggaataacatagcatcaaatctaagattctgcttgaaagaaatgtaaaagaggttgcctaactacatattaaatttgactttgttaatttggagaaacaaggatgcaagattctagaaagttatatataatttgaccattcgtcactaaccaaaacaattggctttgttgtttttatataccacacgaattacggcttaagcattggagattgaactcgttaactcaccgcccactattcccattgtcgccgctccggtaaccggtaccgcttcttctttaccaagaagaacaataaaataaaagagattatgtggcttaagttagcttataacctaagtacctaactctaaaccgaactaattagttttcggcagattcgttgaatcatgtatgatatattgatacacatactttttttattaaaatgtatagagaatattggttcaaaattcatttgccgtgatcgaagaataatgcgattatcaaaataaaataaaataagaagcttcaaagcaaacgtacatggtagagttacaatttgattaattatgaaccgttattggccataaccaaacataaaaattaatgattttgaacccactagtttaggatgttatttggtaattcaaatttgattgatctattacagattttaaatttatttttgctattacgtaattggcctgtggtggtggatagcttcggataacatcactaacgcatatttataatcacacgattaaagagtgttttggtagttaatgcatgtaatagattatcttttctttttgtgcaacggtaatagattacctaaggaatatcacaatcgtattggacagatattggaaactaatcaaactcaaaattattatgttttatgacaacattatctctatagagaatccctgtgttgtcaaaaagaaaaacaattatgtattaggcccaaggaagagcagaactatctcatttctattgggctattaagataataggctgaaagagcgattttaggcccaaggagtcgtatttcaagaaatgacgaccgatgggactccaccgagacgaagcgacggccatggaaacccttttcagagtctcacttcgtctacttccggtttccgccgccgtgacatgtcgctcgatccgattccccgtttcaagacccggttcctcacacttattgaaccgtaagctgtataatttgcctacttcttcttcctcctctttgtcgacaaaagccggttggttattgggtctgggtgagaagaaaaagaaagtggatttaccggagatagtggcatctggtgacccggttctgcacgagaaggcccgagaagttgacccgggagaaatcgggtcggagcgtattcagaagataattgatgatatgattaaagttatgagattggctcctggagttggcctcgctgctcctcaaattggtgttcccttaagggtaagtctataaatgcttttcctagtttcacccatttcgaagcaaatgattgaattagtgtttcatggtgaatgatgcagattattgtattggaagatacaaaagagtatataagttacgcaccaaaggaagagattcttgctcaagaaagacgtcattttgatctcatggtaaataatagaatcagagtgcttaagagttgttacaattttcgattagaacaaaaatgttgaagtttgggggttttggttaggtgatggtgaatccggttctcaaggagagaagcaacaagaaagctcttttctttgaaggatgcttgagtgttgatggattcagagctgcggtggagagataccttgaggtggtagtgacgggctacgatcgtcaaggaaagaggattgaagtgaatgcttcaggttggcaagctaggattttgcaacatgagtgtgatcatttggatggtaatctttacgttgataagatggtaccacgcacttttaggacagtcgacaacttggacttgcctttagctgagggctgccataagctcggacctcaatgacagattcttcaacaaaagttgtaatcttctgttttgattctttactaaaactcttctagattgagcttgactcaaataatttcaaagatgaaactttgtcggaaagagggttcttttttcgggtttggtaatggattgaaagattttcatttaataaaatattataacttgaagacagaagatattagtacaattaaagacagctattctacaaatggtaatgtgatgttatgcttactccggacaagacacggtgtcgtagccgtttaatgcggcggtgaaacggccctccccctcggcgggtccagtaagtatataatttgagatacgaatattaatattaaatcaaaacatcaaatcagagccgtctaattccaatcaaagcagattgatttatcttttcttggtcacgatccgccgccttctctgccagattcgaaaccctagaggattagtcagtgagccatcggaagggacttggacgttgtttgatttttctcaaaaagttttatactgaaatcacttaatcagataattcgccaagaagaagaagatcaccaaatcagaaagtttgattttgtacagaaatgggaattgtccgaagacaaagaaagacagataatttacaaataaccagagtctgttgatcaaatcgaaaaatcaaatgtaaagtgttttataacaaagaacacacacatacaaaaaagaagaagaagaaagatgaaagacagtgtatactattttttcctcatgaatattattaatcctgacgcctacctcgatctacgtttcggcggccttttcctcggattaactttcttccccggcggattcttcccaaacgcagagcaacaaccgcatgacgaaattctcggagacggcgggtccactgccggagaaactcttcccgttgttctgtgatgtcgttgagctcctccaccgttagatcgactcctctctattcctcctggtgctcctccaccggttttaatcggtctaagcttgtctttctcatcgattggtttgacctgttcagagctttccgacataggcttaggttgttcgtcgcgttgactttcgtctttctgctcgttgtttcccgatttgttgagttcggcgatgagacgatcgtcaaacactataccggaagatccctgacggcggaaagagattgttgatctttgaagaccctccatggatctatctctctctctgttgatgagctaaaagaagggcaaaactaggaaaagtgagtttaggccttataagtgattaatcaatcattgtgtttcagacttggtttccttttatttctgtcctcattattttttcatggggtcggtccactatttattgtttatttttatgatgatgcttccagtttctatttatttctttgtagcaacaatcatcggaaattaatgtaagcggaataacgatatcattcaaccggattattcaaacattaattgtaataaaaaaagtnnnnnnnnnnnnnnnnnnnnatgattaaggcagagaattacatgttaattttttgtttgttttcacatctttaatcggattctcaacaccacataggcacataagtcctcttatatccatatttgttattttattccaaacttttggtttctttaaactcaaaaggggtaagactttttgtaattactattgttttatcagcaaattgaaaggattagataatagattagaaatgaacaggagaattgacttataggacacactaatttaatatttccttcgtcccca

SEQ ID NO: 4320 - DNA, 2136 bp, Arabidopsis thaliana landsberg
cgttttggaattttgccgtaacgtgtttgtcgtggtaaggtttgaggtttggaatctctcgagtgaagtcgaatatggtgttcaagagcaaactcttcttctcctcgaagaaatcgagatcttctagtcccagtagcagcaacagtccacgatctgttggctccgattctccgattcgatccgataagaagtaaccgaaatcaaattctaaagaggaaactcggagccctaatacgaagaagcatgtctcagcgaagggtaaagaagcttcgttagaagttcactcttctagtccaggcaaatcaaactcgtcatcttctggttccgaggcgaagaaaccaattactgaaacgccggcgacttctgacgtgaaggaggaatcgccggcgtcggtttcgcctatcatggcttcatctttgggtttgaatagaatcaagacgaggtctggcccgttgccgcaggaaagttttttcagttttgagaatgattatgcaattccggtcttaccgtgttacaagttgtcgaagttggatactggcaagaaggaagctggaagcagcaaggtagatattggaccgctaagaagcagcaatcccgcgttgctggcttcgggaactggtatgacttcagatgctcaaaattctcttgatcatgttgttgaatgatatgttgtgtgacttgtgtccatctcatcctaagacttcttgcattttatggtggcaccgttggtatttcagttcttgcttctcaagtttgattttgatgttacaaagcaggtcaattcaaggtatcacctaccatatctggccctgaaggaagcgcagaagtttgcacaccagaggtatttctagtctgcttaccgataaaaagagagtatgtgctatctatatacatcagctctatgtgacctttgtgacttgacgtctatcgttttagaattcatacgatttggatgatccaaaagagtcagactcgcctcgttatcaagctttacttcgtatgaccagtgctccaagaaagaggtttcctggtgatatcaagagcttttctcatgagctgaactcgaaaggtgttcggccttttccattatggaagcctcgtaggttaaataacttggaggtagtctttgaggctactttttctgtattagtttcatcttaaatctgttcaatgcattctctaatcatctctcttatgcaggatatcttgaatctaattcgaaccaagtttgataaagcaaaggaagaagtaaattcggacctttttgcatttggtggggacctgttggatatttatgataaaaacaaagaaagtcatcctgagttgctggttacaattgaagacttgttggttttggcaaaaacttgtgctaagactacttcaaaagagttctggcttcagtgtgagggcatagtgcaagacttagatgatagacgtcaagagcttcctccgggcgtgctcaagcagcttcacactcggatgctttttatccttaccagatgtaccagattactttaatttcataaggaaagttgggggcaggaggaagatgctgtacaactacgtcagtcaggagtcttgcattctgccgataaaagagaccccactggagaagttagggacgggaagggttcaagtactgccaatgccttaaaggtaccatccaccaagaaagcttatagtcaggagcagcgtggtttgaattggatcgagggcttttttgttcgtccagctcctctctcttctccgtacaatgaaacgtcaaaggattctgaatcgcctgcaaacatcgataaaatgtcttcttggaaaagacttccatctccagcatcgaagggtgtacaagaagctgcagtatcgaaagagcagaatgatcgcaaagttgaacctccacaggtcgttaaaaagctagtagctataagtgatgatatggctgttgctaagttgccagaagtttcttccgcaaaagcgtcccaggaacatatgtccaagaatcggcataatatttcgtggggttattgggggcatcagtcatgtatttctgaggaaagttcaattatttgccgtatatgcgaggaggaaattcccaccaccccatgtggaaagatccactctagaaatctgggcaattgggct

SEQ ID NO: 4321 - DNA, 1326 bp, Arabidopsis thaliana landsberg
  unsure (1)..(1326): unsure at all n locations
gtcaagtcatactcaaatttaactcaacatcgattgtctgtaaaaaaaatacttgcatggcaaacctcgggggtagagctagaagagctgttttttgctgctggaaactcttaactacaaccggagctcgaggtccagctctgtgtccgagacgagtgagctcatcctatttgcctcttgtaaagcctcgagacaagtcgtctcctcgcacaatttagccaataaatttaggcactcagtcggagctggatctggatctgaaagaacgaaggcgaaaaagagcatgtatggggagtggaaggaccagatccgaagcctagtgcctctctgtagaatgttatcggtgacgaccctgttccatcctaaacctaagacgtagttggaagtggaagtcatatcccatctcttgagcttaagcttcctctgtagacccttagaattcaccacgatcacatccgctcctttgtcactggcactaatctttttgtgatgtctatctattttttctaactcttcctcgtttaagaagtccatatctagtatctgcttccagggcatcataagacgtgtctgaagttcgtcgacatcactattgggaagaaccttcacaaatatcagctttgcatccataccgttcacttctctcatcacgtcaatcagccattccgtcggtgtcctatcttcatctgtcactataaccggctttctgtttcttaccggtttgtttgaaaccactttttgaggcctcttggactctagatggcacaaacttggagaagaagcaacacgattagggttttgttccgggtcttgattcttgcactcatcaatcttcagtcgtttgctcaagctgnnnnnnnnnnnnnnnnnnnnnnnnnnnnnnnnnnnnnnnnnnnnnnnnnnnnnnnnnnccctccttttatcaccttcagtggatgtttctcctatttcctcatatgcaaaagcgctaaccgttctctccgtcgctacacataaaatatctaacgctctcttccctccctgcaaaccattaagttgatcatctcctctcaccattgttataaaaaatagagagacaagaagaaagagttaagcggcagagaggagtttatagtcttgcttttatatgattctgattgtcaattcctttcacaaacgaacaaaggtatatataactctctattaatttttttttttttgttagggataatctctatatatttttatattagttttagatattcactaaattactngcttctattctattggtagtctcttttgttcggttcaatctttaaatcatgttttatcctcaattttttt

SEQ ID NO: 4322 - DNA, 2214 bp, Arabidopsis thaliana landsberg
  unsure (1)..(2214): unsure at all n locations
tcttcactgccttcttcactccttctttatccaccaacactcctatcttctcttcttctccccatttcatgacctctttaacctcggcacttacaccgacttttagtatttgtacgaccagtttctcgttgcagaattggtctgcaaatagtggccatgtaagcattggtagaccagcagttatcccctcaagagtcgagttccatccgcagtgcgttaagaaccctccaacagaaggatgtnnnnnnnnnnnnnnnnnnnnnnnnnnnnnnnnnnnnnnnnnnnnnnnnnnnnnnnnnntatcttcaaagccgctttccgagaaccactcaactaactctttgtatttctcccaacctcttatgacccagatgaaaggtctttgggattcctctaggcctagtcccagctcaaggagctgagacagaggaagattacaaatacttccaaggcaaacgtagagcacagatcccggttccttagaatcgagccattcaaggcactcatcttgatcaatatctgatttgtttcccctctctgctttgtctactcctatcttgttgcacaaggaaacaggtccaatggtccatgctttaccagaccttgcctccttgaagtctttggcatacgcaggttcgagctcttgaaatgagttgactataacaccataagatgtcttatccgcttctaccatatcctccaagatctctttccagcctgcaggaacatatgtttccaccggaacttgaggtcttgtgaattcaactctatcaggaaaataaggaacaatgaagtactccttatcagactttaaattgtccaagatctcacggttcttgcgcagaacgttaacacacagaagacaaaagcaacccatgccatggaagaggatctttggtattttgaacttcttggcgatttcgcttgtatacgacaaacacatatcagagattagacagcttggtcgagggctcatctcttcaataaggttctggactggttctttgagtaagttaaccgctttaaagaaagatgttatctgctccatcgtggtaagcaaatccatattttcttgtccttcttgcagaccagcttcttgatatggaaacttgacttgcactaggttgatgggcaaaccagactcaatggcacggtttaggacattcttgaaccttgctgcattgtgaggcgtcgtgacaattgttataagcacacctcgctgagccaagagccttgcaatatcaaccatgggaatcatgtggccttgagccatgaaagggaagagaacaaagtgaagaggaaaaggttcgttgtttttttcgaaagccatgacgatgcaactttagtaagaacctctcaagttttgtttcgttttcggttaatatctgtgtaagcttatatatagaacaagatgcgtggagagcaagaaagaaagtgaacagaagacgtaaacagatttttacttgccaaacacctctttttaagtccacagattgtgcttgcgacagactttagtaaatgcttaagtttgtccgtatgtgaccatcctacatcttctagtgaccttccttctcagaaacattttagagacatatcttcacaatgaaaaagaagataattcacatacacaaaaacagcaacttggagcctcactgatagctacatctatccgcaagtctcaagaagcaaaataaacaaaaaggaggccacatacataaattactcatgttaccaaaatcgaattcgtatatgaaacttcaaagaccgattaaactctcatataaaacagtaaatgaagataaatccaacgctggaatttttcaagacgattatatatctagcagaagcctcaaaaatataatcaacaaaacgagttcgtgtgaatgtttctttcgtcagttcaataatagagatgacacacaagtgacaatatcctttacacgatgaaaacataataaactttacaacaaacacacaaacataatatatttcaacgaaaattagaaaaacactaataaaatctgttattaaaaaaagcatgagagaaatgaacttacttatttatgaattttcatttcgtgtcaattttggaaattagaaactaatttatgatttctttttcatccgtttttgtaagtaaaagaaaagaatttggctatgtagtgcatataattcattttattagtactatatatgagtgaatacaacatgttt

SEQ ID NO: 4323 - DNA, 3935 bp, Arabidopsis thaliana landsberg
agcaatttatggaggactcataagtaacaacaaagtacactttgaaacaaatgtcacatgtaatacttggttttttttttccgtttaaattcacatgtaataatttaactcacgtaaatactaaagtgattcacccatcacgaagtattttttgaattaaatacatcaactaatcgagtttttgatagagacttttgcttttttgaatattgcttatcaaatcaaaattttcaaattcttgtccatatacgcctatcaaatatcttcttttaaagaaagtctcctaaagagttgaaaacttgaaatatatacttttctaaaatataattttatttgggcgttacgttctagaaaatggaacccgtctactaaaatgggccgctcgtgaactcgtggcagtcaaacactggtcggcgcataaaagcatatccaaatacgctgcgtttcatgcttgcccgacccgtcttaaatatttaaagaatattccagattagcgcgtgagatgcagttgccatgtctcgcctcaggaatgacgacatttgccaaaataacagagctacaacggtaaataaggaaaatgattaagggcaatttggtcttttaggttaagaaaagtattgaatcagatctgactttttggccaagaaaaactctcagccactagatcattccgacccctcctccacgttcttctctcttttaaataacctcttcacggaacccttctcactcacctatctcactctaaaatctctctctgccaatctcatcttcaacctctctctaactctcgttttcgattctacaatgggttagtctctcgcttttactaatctctcgtcccgtcgctgctattttacgttgttgagttttctgatctgatcgtttttctgattttgtttgttgttttatgtagctgacaagaagattaggatcggaatcaacggtgagtttcgaatcgattttgtaattcgggtttgtatgttctcatgtatctagatctagaatctgactgttgatttctgttatcgttaggattcggaagaattggtcgtttggttgctagagttgttctccagagggacgatgttgagctcgtcgctgtcaacgaccccttcatcactactgagtacatggttagtgttccttccttggttttgacggtgattcgatcttggtttgcttcaatattattttgatctcttgacgataagattctgttagtcgctctggtacctttgctttcgttagatttgatagatggatcatatcatttatggattatgcatgtggatttaagtgtcagatgatttgttcaattagtgcacagatctggaaactggtttagtgttcattgttcatactgtttagctgatcagtatacttgtggagctgttgtttgctttgctgtgtttgtaatgttattgattagcctgtttgtgattagagttgatatggttgagttgattttgattgcgctctgtgtttgattgctgcagacctacatgttcaagtacgacagtgttcacggtcaatggaaacacaatgaactcaagatcaaggatgagaagacccttctcttcggtgagaagccagtcactgttttcggcatcaggtacatttatcaactttttctctttctctttgcgtgtatacatattacaaggtgttgtggatttcaatctcattagtttttggtatttgtgaaggaaccctgaggatatcccatgggccgaggctggagctgactacgttgttgagtctactggtgtcttcactgacaaagacaaggctgcagctcacttgaaggtttgtcttatttgaattggttatttttgtcttgtaatgatataaatagtttatgtgctagaatttgcttagtatcattcaactaaatttgtgacttgttgtattttcagggtggtgccaagaaggttgttatctctgcccccagcaaagacgctccaatgtttgttgttggtgtcaacgagcacgaatacaagtccgaccttgacattgtctccaacgctagctgcaccactaactgccttgctccccttgccaaggtaaaatatctgatattctatatgatcaaatttgactttgtatttcaagttgaagtgactaatttcatttaacgttctttgatatcattgtgtaggttatcaatgacagatttggaattgttgagggtcttatgactacagtccactcaatcactggtaaatttatcaatgagttagaagtttattacaaacttgcttgcctataggtggaaaatttgtgatttaatggggtttgctttatgatttcagctactcagaagactgttgatggtccatcaatgaaggactggagaggtggaagagctgcttcattcaacattattcctagcagcactggtgccgccaaggtatcatttcagcctcttatttgttttaattgattttgattgagaaattatgttgaatctgatttttgtatcatggttgttgataggctgttgggaaagtgttgccatccctcaatggaaaattgaccggaatgtctttccgtgttccaaccgttgatgtctcagttgttgatctcaccgttagacttgagaaagctgcaacatacgacgaaatcaagaaggccatcaagtaagaaccatcaaccctcacgcctaaccatatcatattatagaatatatattggttacttacaaagattttggttaaaacttttcagggaggaatctgaaggcaaaatgaagggaattttgggatacactgaggatgatgttgtctctaccgactttgttggtgacaacaggtcgagcatttttgacgccaaggctggaattgcattgagcgacaagtttgtgaaattggtgtcatggtacgacaacgaatggggttacagttcccgtgtggtcgacttgatcgtccacatgtcaaaggcctaagctaagaagcagatctcgaatgatagggagtggaaagtcatctgttcatccccttttatggtctgaatttgtcgttttcgaataaaatttctttgaacttggaactttttttttttttggttttcttaattctcattcatgtgaggtgatgggagtttgtagaccgatgttttactggaagccctttgtttttggcttttgatatattgagttaacgttatggttttcaattttgttccacttctctttttaactatatactaaatcaaatctgaacgaaaaatgaaactaaatgagctcccgttgatgatgacgtagcaaatctaaggaactagaggtgtacacttataatctagcttcttctagttttcgaataaaagtttctaagtggaacctatattttatgtttgcgattctcatttatgcgagtttgtagactgatgtttgaatgaaaagtatttcatgttgccttttgttattgattcttctcaaaacataagaaatttattaacagatgtgcggtttataaagacaacgaaatatgtgttcatctgtaaaggtactttgaacaaattattaaaccatgttacacaaattcacgtatagtggcacttcaattatttgtacacatccgcatcgaaaaaatggggaggtcgttgatatacgacacaagaaggcccaatgccaaagcccagttggtcaaacacaaagcctaaccggtttttcaaaccagacggtgtaaaacgcttccaaaaccagagagcccaactttgggccgtaaacccttctcttgcgattagtcctcctcaaatttctccggcaagagagccgtcgtcattttcacaatttccctttgctccatctttcaggtacgatctttgagtttcatgtctaacttattttcgtcatatgtcactagtaagattcaaatttcattgatgatgataaaaatttgattttcctatggttgcagttgaagaccctgttc

SEQ ID NO: 4324 - DNA, 2470 bp, Arabidopsis thaliana landsberg
atatcttctgattcatatgtaagattatataatcgataaaatattttgatgtatcatactatgattctttttttatgttttgtcgctaaacgtttaagtggttggataatggctagccgtataacatgtaggctatttggcatggggttttattcagttatattaaataaaaaataaaaaaataaaaaagagtgtgttggtaaaatagttatttttaaaaatataatttaaaaataatcactttgatatttataatttgtaaaatacatttttcactatttgatatgtatactaaaatctgtacaacatatttagtatatagatctaaatttacagtatgtatatttatgtatatttatacattataaatattatacagatttaaatgtacgaaataaatagtaacaataactattttataaattataattaatataagtgaccacttttcgaattatgttatgaaaaacttatcctaataaaaaaacaaacaaacgtttagggcattctgtctctgcatttgataggtcaatcgtattcgtatccatacgccagccacattgaagactttactcaacaatatcatgtgcatattttgtcgcatatttggataagtcgacgaagtttggagaatggtggagccacaatgatctcgcccctcacgtttttgctatcttctctataaatgaaatgaaaggctcacaatgattttcgatcctctgttacaattcttgtaatgcaattcaataaacaaaaccatgagtcaataacaaaaaacaaagagagtcaataaccggtgtatctgcttcctacttactattatatatattcattattttaaatttttaatcaaataatttttttttttaatacgatgttaaattatacgcaaaaaaaaataatcactgaatgttaaaaatgaatgtaaaaacttttcataaattttacaagagaataaaaagttctacccttgatttcttcttgtttcaaaccaaagtactatgccacttcgtatttcgatatgcacccactcttgagcgtgctaagccggtttcgaatgtttttgtcgatcatcttgacaaggtttaatgaatcaagtttctgtgatgaatcagaaccggaacatgtaagtttcgtaaacgttaattacattcctcaaacacaaatgaactttcaatttagtattttactgaaaaatatacttcatacatcatcagagaagcttacatgatttgcatgatatttttatacaaaaggtttggagtttggtctgatcattgaactcgaactggaacaagctttaggggtactttcttaacgactgtaagagtaccagcttcttcagtatcgatatctttatgtgacatcccatcaggcaacttccaatcgaagaagtaaagtaagttcaagagtcccaattccagagtagccatccccatcgccatcccgggacatatccttcgtccagacccaaacggtaagagctcaaaatgttgtcctctatagtccacagggctatcgataaacctctcgggcttaaactcttccgggtcagtccatagtttaggatctcttcctatcgcccaagcgttgaccaagatccgtctcttgggaggaatatcatagccttgaaccttgacgtgagccattgtttcccgtgggagcaaaagaggagctactgggtgtaatctgaatgtttccttgatcaccaagttcaagaaaggaactttatcaagatcttctttggtaattctctccctattgttgccaaggcgatctcggatctcgccttgaactttcttcattagttcggggtttctagcgagctctgtcattgtccatatcatggtcagagctcctgtgtctatccctgcgattattatattctaccaaacaccccaaaaataagttaaataaattcagatttcatttcaatacaattatatatacaaatgtgttgaaacattaattaccgtgagaagccccttaatatgatctattgtgagcctcaaagaatcatctttgtcttgtttatgcatcacatccaacatcacatcgacaatatctttgtgatctttcgatcttccagggtttgaatgatcgtcaatcacatgctgttaacagagcatcgagcttgaggaaaacatcgttgagccttttgtgttgcccggaaatccaatcaacaagccatccaagtccggcgatagggaagaaatcagagcaagtgaaactagcttgagctgtctcggtttcaaatacaagttcatcgatcttgtctgtatcgataaacttactcttgtggaaactctgttcaaaagcaactttaaacaggatacttgcagctagccagaaatgggttttgctcaaatcgaccggagattgaaccactgctgattccgacagtttcttggccagaaagttacattcttcttttttgatttatataaaaagactggacctttttagaaca

SEQ ID NO: 4325 - DNA, 2804 bp, Arabidopsis thaliana landsberg
  unsure (1)..(2804): unsure at all n locations
tgttcacttttatatttgacaagattttgtggataccttaccatttgcagataatattatcttattaatttttctcaccatctttttgtgtacttcaactttcagggcaccatggagactcgtccagcatctcattcattatccggggttgcaatgttctttaaaaagaaggtcatccttatgtctaaactaaattaggcttgcatgttcacttttatattggataggagtttcttgattcgttatactttgcaggttatatattcttatgtttttctcaccatctctttgtgaaccctaaacattcaggtcaccatggagacggctgcagcaattcattcaggagtttgtaaagtcaacactgatcctatgaaggtataacaagtatcataattttcttgtatattttaatggacagctctgtttggattgtttttaaaattatcttcttattccaagcaatggttgtgtttgggaagcctgtatttgatacaagttccaaagatgacaaagagcctcaatcatctcccacacatagtcccaatattgtgggtacaaggaacgaggtattgcgtaacatatactgacttttgttaataatgactagggaatgatttttcagttttctaacagcttgtgcctattggtctgatatattatcttcctgtacaggataataactcagaacactctaactcacctgcccaggaaccagatcaatattttgagttatctgattcatccccggcgcataaaagagaaaaaccaaatctctcccaagctgaagcacgtctcgtagccgagttcatatcgcaaccaatacttgagacacaagcacttttaccaacactaaaaaaagcagagtattcacagtttgtcaaaaccctctcgagctctccaaatatgtatggttatcattcatttttcctatttccacaacattcatcatcaagttcttcactaatgctgtttttttacctcatagtgaacatctaaccaagtgtggattccttatttccaacaaattcttcgtcaaacttgccaaacctcagcaatgggtttcaaccctggtatgtagtccactatatttatcttagtacaaattaacctgttaacaagagatactaatgtgtaaatgttttatttcctagcacatggaggttttggtgtcattactttctcggaggctcagaactacacttgagaatcatcgttctgcttttgttgatccatggttcacaagccatctacaagctaaattcagagccttcaacgcnnnnnnnnnnnnnnnnnnnnnnnnnnnnnnnnnnnnnnngcaacgcttcatcaaaggatccaaaactgaatggttcaaggacataaatacaatttacgcacccatgatatggaatgattgccactgggttggtctttcaatcaatcttggcatatggagcgttgaaattcttgacctaaatacagacctctacgacgacgctaaggtaaaaagatgcattgagccagtagtcaatcttttgccccacctcatccaaaggtactgtacgccagagttttctcagaatcacggtcttcaaccgtttggctggagtcgaattgatggtatctacaagaatttgcggagtggtgactgtggcccggttgccatgaagttccttgagattcaagcaagtgataatcatctctgctttttgtaatattaaccatcttaaccatctctgctttttgtaatataaaccatcttaactttccttttgaatattatcactctgtaaactattttctgaacgtgtgtgttctattttgctttgttgaatagtaaacataatctaattgttgttgtatgaattatgtctatccttttttttcattactcccaaaaggaacaatctctattttatatgttatacatggatttaatgtgatatgcggtatattattgtgttccatccatatttttatatccataaggtatacgatatgtggattattattctatcctaattataaaataaaggtttgttacttacttagtagaaatgtccaaatcttaaatggtaatgtagcataattggaaaactaaaaccagaaaaaagaaaggagctaatacatgaaaaacaaaggttcttaacggttcaaaaaaaaagacaacattaaaatcgaacttcatatatttggacaagttttgtgtgctgcacttttgcatcggcagcaccttgcattcattgctcgcacttggggctgagcccagtaagctccatcgatttgtacccatcctccgtcctcttcataaggctccacccataaaggtgccttgtagcattcttcaacgaaattctcatatgctattcctttgtcaatacatcagtcaaagcatggggattgtttgcttgaagacatttattgaagaaatgataatagatcgagtgtggcattgaccaccacatgaaataccgagatctgtcaagtcggacacactgtagggtttcctctgaatacacagcctccttaaataccggacctgctttaataaaatttttcaatgcatccatgtcatcttcagccaggtagctaccaattttagcaagcaatggagggggcatgtgaaattcttgaatggtggtttcctgtccaaaaaataataacttaataagacaatataaataaaagtataaagtaggagagtttatgatttttgtaatgtatgaaaaaccatttttacactacagctggccgatggttcactcctgcgtttctgtcttctcataattgatatgctcgtaagaaatcaaataaagaataattta

SEQ ID NO: 4326 - DNA, 3251 bp, Arabidopsis thaliana landsberg
  unsure (1)..(3251): unsure at all n locations
acataactgttgaattggttttttatccatttctgtcatttttatttggtgtttgcttttgtatctctttgtgggggggcagggttgactcatctgaaaaagctaaaagctttggatctaagtaacaatgttttttcgagcataatggaattgcaaggcaagctttctttttaatctttctttatgcataagaaatgtctcatgaactattattctcttattattctcaacattttgttgttttccaaactatcttttttttgcagtagtttgtgaaatgaagaatttgtgggagcttgatcttcgagaaaataaatttgtaggtcagcttcctctttgtttaggtagattaaacaagctaagggttcttgatttgtcatgcaaccagctaaatggaaatctaccatctactttcaacagactcgagtcccttgaatatctatcattattagataacaacttcaccggcttcttctcatttgatccactcgccaacctcacaaagcttaaggtgttcaaactttcatcaacatcagatatgttgcaaatcaagacagagagtgagccaaaatatcaatttcaactaagtgttgttgtaataagagtttgcagcttggagaaaatcccttcctttctcgagtaccagaaaaacttgcgtctagttgatctatccaacaacagattatctggaaacctacctacatggttgttggcaaacaatccggaacttaaagtattacagttgcaggataatttatttaccatcttccagatgcctgctacaatagtgcatgagttgcagttcttggatttttcagtgaatgatattagtggactgctccctgataatatcggttatgcgcttccgaatctgttacgaatgaacggctcaagaaatgggtttcaagggcatttaccatcttctatgggtgagatggtaaacattacatcccttgatctatcttataataacttctccgggaagctacctagacgctttgtcactggttgtttttcactaaaacacttgaagctctcccacaacaattttagtggccattttcttccaagagaaacaagctttacttccctggaagagttgagagttgatagcaactcattcactgggaagatcggagttggtttgcttagctccaacactacgttatcagttcttgacatgtccaacaattttctaacggnnnnnnnnnnnnnnnnnatgtctaacttatctggtttaactatcttgtcgatatcaaacaattttttagaaggtacgataccaccatctttgctagccattggctttctttctctcatcgacctatcgggaaacttattatctggatccttaccgtcacgtgttggtggggagtttgggataaaattgttcctacacgacaacatgctcacggggccgattccagacacgttgttggaaaaggtccaaatacttgatttacggtacaatcaactttctgggagtattccacaatttgtcaataccgagagcatatatattcttttaatgaagggaaacaacttaacaggatctatgtcaaggcagctctgtgatttgagaaatatcagacttttagatctttcagataacaagctcaatggcttcataccttcatgtctatataatttatcatttggaccagaggatacaaattcatatgtaggtacagccataacgaagattactccgttcaagttttacgaatccacatttgtggtagaggattttgtggtaatatcctctagttttcaagaaattgaaatcaaattttcaatgaagcgaaggtatgattcttattttggagcaactgaattcaacaatgacgtacttgattatatgtatggaatggacctatcaagcaatgagttaagtggggttatcccagcagagcttggaagtctctcaaagctacgagtcatgaatttatcttgcaacttcttgtccagttcaataccatctagcttctccaatctcaaggatattgagagccttgacctttcgcataacatgttacaaggaagtattcctcaacaactaaccaacctttcttctcttgttgtctttgatgtgtcttacaataatttatccggaatcattccccaaggaaggcagtttaatacctttgacgagaaaagctacttgggaaatcctcttctttgtggaccaccgaccaatagaaggttgtgatgctaagaagacctcagatgaatcagaaaatggaggagaagaagaagatgatgaagctcctgttgatatgttggccttctattttagtagtgcttcgacttatgtaactacattgataggcatttttatacttatgtgctttgattgtcctttgcgtcgagcatggctccgcattgtcgatgcttccatcgcctcagtcaaaagtatgttgccttaaaatcatttcacttcagtttttacgtaccattgtgtttctataactatattgctttggattttacctgacatggttaataataatgtgtgctttggattttaccatacacggtaatgagtcgtatggaagaattattgtgtacgatcgatagttttttttgacagatttattcttttagtgatagagaaaaaagtaagtaacaatttttttttaagagatatatatttggtaacgacagagctgtttctttcaatggatttatttttcatagcgacatagttaatgtaacaaattaatgactaaagtagcacaacattgactctagacttattctacgtcctagtaaatttgttaattaatggaatcaacttttagaaatagttgtgacatagtaagtccgtattggctgtgatagacttgagtctgattgaaatgggaaaacgttgatatgaaagtggtgacaaacttaatatcaccaaactaaattactaactctctcataactatgaatataactgtcacaattacaagtataactctatcataactcataactatatatggttaaatgagtatgtaactaactatagttcacaagggtaatatatatagtaaattcttgattgctagatgcaggagggtaaacttgaactttgttgtggtatctagatactttcggacaaataacgtataggtgatgaaacaaagtgcatatcttattgtacagttttagactttaatttggataaccctactcattgccaaggttattatcgtttagggatatgattttgcaaagataattctcgcaatagaaacatagga

SEQ ID NO: 4327 - DNA, 1427 bp, Arabidopsis thaliana landsberg
  unsure (1)..(1427): unsure at all n locations
ctaccaaaatgtggatctgtaaaattccatctgaaggctgtctccaaagttaatcccctgagagaagctactcaacccaatcccttctcccaattcagttgataaacgattgaggcatggaggtatgacgccattgagcttgttgtctgaaagatctaaaagtctgatgctggtcaaatcacacagcttccttggtatagatcctgttaaattgttccccctcaacaataaagttatcattttcccgatgttgacaaactgtgggatactcccagagagtttattattccgcaaatcaagtatgtaagcattttccaacaacgtgacaggaagtggccccgtgaagctgttgttatgaaggaatatctttatcccgtacatagaattaacaactgacgacggtaggtctccagataataggtttccagagaggtccagaaaattaagatgatgaatggctagcagagaaggtggcaacgtaccttctaagagattgtttgatagcaataacatcatcaaataagacgagtcggggggtatcgaacttgagataagacctgtgagacgattgttcgacgcatcaaatattgacaaattaaccaaggtacgaaaaccgactccgatctctccggtaaaaaggttgttatgcatcctcaatacgatcaatgaagttagtctcgtttgtattggaagaatagggccactaaaactgttgtgagagagctgcagatttactaatgaaaaacaacctgttaataagcttctaggtagctccccagagaaattattgtaagacaagtccaggaatgaaatgtcattcatctcacccatggacgatggaagattcccttgaaacccattatcagatccattcataagtagcagccttggaagcacatggccaatattatcagggagcactccggtgatatcatttgctgaaaaatccaagacctgcaacttgtgcactattgtaggaatctgaaaggtagtgaatgaattattcttcaactgtaagactttaagctctggattattctccaacagccaggtaggaatgtctccggataatctattgctggatagatcaactagacgcaaatttgtttggtagacgagaaaattagggattttccccaagctgcaaaagggtagtgcagcaactgtcagttnnnnnnnnnnnnnnnnnnnnnnnnnnntctctacttgtaacatctcagatgttgacgaaagtctgaacaccttgagctttgtgaggttggcgagtggattgagtgagaagaagccttcaaagttattatctgacaatgatagatattcgagggactcgaggctattgaaactagctggtagatttccacttaattggtttgatgagagatcaagaacccgcagcttggtcaaattacctaaacacacaggaagct

SEQ ID NO: 4328 - DNA, 525 bp, Arabidopsis thaliana landsberg
tatcacaaataataacagatgcccaacaagaagaggactaactttaggatttttcataatcgcttgattggcacgtgtcatgagcgagaggtaggatattatacgggacatacaactgtgtcttttctgcaaccttatcttgagcttacagaatctggaaccattcaacttcattgtaaaggtgcacaagagatggaaaaaaaaaagagacaggactagaaggtcacaatgccttacctaccggtcaacctcaatggactgtgtcagattaacagccttcaacacctcaaacaaaacattggcagattggtatgcctttgtcagctgggcactgaaaattaacagcacttcaaagtatcattaagagaatttagtgctctcaaacactggcaaaacacaaattagcatcttaaaaagacaatttaagtaagttagacataccggtcacacttatcagcagcattgtgcaaagcttgaatatacttcttatagtaatgttgataaaagctttgcatttcacgggca

SEQ ID NO: 4329 - DNA, 1760 bp, Arabidopsis thaliana landsberg
tcttatgcaacttgctttttccatttcctctttgtcaaacagcagtgtatatgcttgtaaaacatgaatataagtctaaacttacaatccaaatcttgaagtttctgactatttttggctctaaccaatggaaaggaaggtgttctcgggtcaaaacctgatatgggttatgctactgttggtacagctacgtggatacaaatgctgtattgaaaaagaaaggaaagctttgttggagctcaagaaatacatgatctcaaaaactgaagattcgggccttgactctgttctccctacttggactaatgatacaaagagcaattgttgtcgctgggagggccttaagtgcaatcaaacaagtgggcggattatcgagctttccattggtaagacggactttaaagagagttctcttttaaatctttctttgctgcatccgtttgaagaggttcgaagtttgaacttatccggggaaggatacaaccaattcaatggcttgtttgatgatgttgaaggtataccaggcttttcacagtgtttactttacccttttggtcttcatttggaaacagtcttcatgcaatgaaagtttagaattctagatgatctcatttctttgttctaattcttgtaaagtaacgctcttttgatttattgtacttagattttctcctgcctccagaggttataatagtactttattctgtatttactcaaatgttgatgtctatgccatgcaatatctttcttaccatgaagtatctttctgtattaactaatctgctgattttcgtttgcaggttatgaaagcttaaggagattaagaaacctggagattttggatctctcttcaaatagtttcaacaacagcagcatctttccctttcttaatgctgctacatcacttacaactctttttattcagagtaactacatcggtggccctttgcctatcaaaggtgtgttttttcatttgcatttaggtgcctatctagcattatttatgatctatattttgtagttttaatcattcttacttacttctggactcggtttcagaacttaaaaaccttacaaagttggaactgctggacctcagtggaagtggatataacggcattatgccaggtaacatctacgtcatttgtcacagtcttttttcttcggagtagaacgtttacaagatttaactccatacataactgttgaattggcttttgccatcgcaaattaataatatgttccatgctttgtgtctctttgtcgtatggtagagtttactcacctggaaaagctgaaagctctggatctaagtgccaattatttttccagcttagtggaattgcaaggcaagctttttctatataggaatggagatgaatatagcttatacatttgaaataatcatttttcaaggtaccatatgttggctttcactcaatttcagaactaaaggttttgacgaacttggaagtcctgggtcttgcttggaataatcttgacggaccaataccagaagaaggtgttctctttatgcttgacctccaagattatctatgtgaacaacataacattttactaatgagttacgagagttatctcatgaatctcgagaaaagaacaactactcttgttattctcatcatcttgttgttttctaaactatttttttgcagttgtttgtgaactgaagaatttgcgtcagcttgatctccatggaaatcatttcaaaggtcagcttcctgtgtgtttaggtaatt

SEQ ID NO: 4330 - DNA, 1294 bp, Arabidopsis thaliana landsberg
ctaatgacacaaagagcgattgctgtcagtgggagaatatttagtgcaatcgtacaagcaggcgtctgagcgggactttccctttacacatcgtactacttagagatttctcttctaaacctttctttgctgcatccttttgaagaggttcgaagtctggacttatcaaactccagattaaacggattggttgatgacgtggaaggtataacatcatgcttttcccaatgtctctttcttacctattatggtctccatttggaaacatttttccctgcaataaaaaaggtttgaattatagattcgtgtaagttgataccgtttagaactatgccatgaagaacaaaattactgaattctgaagtgtctgtacagttttaaattctcataattctatattgacatgtagattagactcagactgtaatggaacttatcatagttattagagttttcgtatactttgttaacaagaatttattttcttgcaggttataaaagcctaaggagattaagaaacctgcagattctgaatttctcttcaaacgaattcaacaacagcatctttccctttcttaatgctgctacatcacttacaactctttctcttcggcgtaacaatatgtatggccctattccccttaaaggtatgtttctccttctagtacacctacttattgctgatgtatcattggttagattgtttgatttttatgtagtatatatacgctacaatttgctgtctctttattttcttatcagtctactattctcttggactccctttcagaacttaaaaacttgacaaacttggaacagctggatctaagtggaaacagaattgatggttccatgcctgtaagaggtatcatttacgtcactggtgactgtccatataaaatatgtctgtttcttttctagagtagaactttaacacatttaaccctctacatagttattgaaattatttatgccatctttaagaacatcatatccatattaattgtagtaggtgcctaatttgcttttggtttctttgttttgtggcagagtttccttacttaaagaagctgaaagctttagatctaagttctaatggaatttatagctcaatggaatggcaaggcaagtttgctcaagtttaacgttattttttattttactaagaatggatgtgaatcccttttcccaagatcatttttcaaggtatatcctttatgtctttacgttatttcaggattaaagaatttgactaacttggaagtcctgagtcttggttatattatttcgacgg

SEQ ID NO: 4331 - DNA, 723 bp, Arabidopsis thaliana landsberg
tcttatctaccaaaaaagttgatttgtataattccatctcaaggcttgtttgcaagaaagagggcggaatattgggagccattgcgtcctcttgtaagcgtccaaatgacaaattagagaggcatgaaggtatgacaccattgagcttgttgtctgaaagatctagaagtctgacgttgctcaaatcacaaagctcccgtggaatagaccctgttaaattgtttcccttcaacaaaagaatgtttatgctctgtgtatcgtcaaactgcgggatactcccagagagtttattgttccgcagatcaagtatctggacacttttcaacaatgtgtctggaattggccctgtgaagttgttgttgtgtaggaacatatatatcccgagctcgctatcaacatgtgacggtaaggctccagaaaattggtttccagaaaggtctagaaacgaaagaaaaggcattcccaacaaagaaggaggtatcgtaccttctaagaaattgttggatatcaatacgtaatccaaataaggaaactcaaataaccatcttggaatagcaccagagagcccattgttggacatgtctagaatccgcaacattgtggagttactcaaaccacctccgatgttccccgtaaacaagttgttatccattctcaacacgtcaagtgaaggaaagtttgtttctcttggaagaaaacggccgctaaatttgttgtagagag

SEQ ID NO: 4332 - DNA, 5375 bp, Arabidopsis thaliana landsberg
  unsure (1)..(5375): unsure at all n locations
gttcttagaaaagatactctttgagtatgtcaaggaaatgcctaaaccagagactaaactgagcttagacatcgcctctctaatcggcccgctcttcttcacatgggtcattctgttgttatttcctgtaagtctttagattatctaactgaaagattttaaaaacattcctcatgtcggctttaaacgtagttttcctctggatcatattataggtgatcttaacaacactggtctatgagaaacaacagaggttaagaatcatgatgaaaatgcatggacttggagatgttccgtactggatagtttcatacacttattttctcttgatatcgattctctacatgttgtgctttgcgatattcggttcactcatcggtaataatagcaaaaccttgctaatgtatttttatgttctttctcagttcttgatgcttttactttttctacagggttaaacttctttaggcttaatgactatagtatccaacttgtgttcttcttcatatgcataaatcttcaaatatcagtcgcctttttagcatctgcaatgttttcagatgttaaaactgctacaggtactgtaccatcacggctttggttcaagatttgttaaaatgatagtcacagttgttacattttcatttgagagtttcagttatagcatacatatatgtctttggaaccgggcttctaggaatctttcttttccaattcttcttggaagatcctctcttcccaagtaagttcttaaaaccgaatcaaaagttttgctagatttattatgattcatgtgatttttctctaggaggatggataatagcaatggagttataccctggattttctttataccgcgggctatatgagttatcacaatctgcgtttgcgggtgattaccgcgggattgatggaatgagatggagagattttggtaatggaatgaaagaagtgacctgtatcatgctcattgagtggctgttactgcttggtttagcatattacattgatcaaatcatttactccaggaaacatccattgttcttcctcctacaaagcacttccaagaagaaacaacacttctctgacaacaaaatatccaaagttgttgtagagatggaaaagccagatgtgtgtcgagaggtaatgaaaaatacaatatgaagataagtttcattattgacaaggctaagtaagatttgcatgcatcttttttggtgtcagagggagaaagtagagcagtgtctacttaaatcaactagagactctgcggttttatgcaataatctcaagaaggtgtactcgggtaaggacggtaatcctcagaagctcgcggttagaggattatctcttgctttacctcaaggagaatgctttggcatgcttggtcctaatggagcaggcaaaacctctttcatcaacatggtccgtataaacaatatcatacctattgatcttttgtctaatgagtcaatcctcaatcttctagtcaacctctttgacattctaatgttctgtgtagatgacaggaatcatcaaaccatcgtctggcacagcatttgtccaaggtcttgacatactaaccgatatggaccggatatatacaacaattggagtctgtccacaacatgagtaatctataaatataacaatctctgtttctttctttactttaaggctgccttgtttcttagtccattactccatttcattgaaatttctgcagtcttctgtgggagaagttgagtggaagggaacatctactgttctatggaaggctcaagaatctcaaaggttctgtcttaacacaagtaagtgtttgttttaacttttaacgtggtcggtttgtgaatggcttatgcaaaaactgatgagtttttaggctgttgaagagtcgcttcgcagtgtcaaccttttccatggagggattggtgacaaacaagtcagtaaatacagtggagggatgaagagacggctcagcgtcgctatttctcttataggaagccccaaagtaacttgagacatctcttggtatctatgttctatgatatgtaataagcctaatttgaggaaatttgtcaaggttgtttacatggatgagccaagtaccgggctagatccagcctcgaggaagagcttatggactgtcatcaaacgtgcaaaacaaaacactgccataatcctcacgactcactcaatggaagaagcagaatttctatgtgaccgattgggtatttttgttgatggaggcttgcaatgcattggcaacccaaaagagctgaagggaaggtacggtgggtcttatgtgtttacgatgacaacatcatcagaacacgagcaaaacgtggagaagctaattaaagatgtctccccaaacgccaagaagatctatcacatcgcagggactcagaagtttgagcttccaaaagaagaggttcggatctcagaggtgttccaggctgtggagaaggcgaagagcaactttaccgttttcgcttggggactcgccgacacaactcttgaagatgtcttcatcaaggttgcgagaaacggtcaggcctttaatgtcttctcttgatcttcttagattcatacgtccatattttgtccaatgtcaatatttgcttattatgtcaaattgctaccacatgatacgaaattagtgtttataagatttcatgtatattactggaaatatgttacaagttcctgatttttcaatgagattatacttgaaacaattactagcggtcctgaagcaaagaggcgacacttcaacacttggagatgttttttcaatgtcataaccatttgttctactctgtttcggaattcatgtatcggttataaaagttgggattaatttgagttggtagcaataaacccatattttcgacattgtcgtaataattaaggaaaaaaaccatatctatcttattatattcatatttgtgtaggttttggtaaagagtacatttcttaggtgagtgatgcaaatgaatactattacttgacctacacgaaatatcttacaaaaaaacacactgctattgtccaatacctgtatgccacttcagtaacgtgtatagttaaagtgttatctcttaatccttgatatttttagtgtaaaaaaaaacatttagagacttcttaaaaactattcaactccatcaaaccttctcatattctctgctatggcggattctagtcctgcaagtttcttgactcaagccgacgctttacttaggaagaattaagttttccaggtttcaatacacttttaataactaaaacggctaacacagagtaaaacttttacaataggttatgttttcttttgtcttgaatgcaganccggaacatatgaagcaacatacgactcatcacaatccctttcttcctctgtttacttctccttgttattcaaatgctcttcgacactcaattcaacgacgtccatggtcaatgtggctgcaacgagaaaacttgcggcttaaggtattcgacttcagagcaagcagctttttgtgccattcctaatccaccacaatggactccactacttcaaatcccggctcctcaataccgaaccgcgatcccatacctgagccatacttcccctgcaacttttctcttcaccgggaataatcagtcgctcggaaatagtatgtaaaccctatcaatctactcctttgagatgtgaaatgtttatatgcaactcttttttctatggtcaacaaatttttttcttttgctagttctaatgggaaatatgtatagaaattcatctggatttgatggagatttagctaattatgtcttggtatgtttcatgaaacaatgtcacatcatgaataggtttttgtgtgtttctcagtctctgactttctaatatatatatgcagggctcatcatctttccctgcatacaccaatcatatggactctgctttcatctcagatcttcccatctacaacatccaacatgaatgctcaccaaacgcttctttctcaatcttaattcaccaatcacctcttgctttccataaaggtataacaaaaacaaactccaatttacaatatcaaaatgttgaatgttttcaagcatgctttgaaaaacagaggatttctttcttatgtctagagataaactgtgtccaaggcttaaatatgtggcgaaatagttcttccgatgtgaacaacgagctttttaagggttaccgaaaaggaaatccagacaagaagatcaatgagtttgttggaggtctctcaacatcatctcatctcatctcacttctttaaaataaagttgtgtgtcttagctttctcttccatagcttttgattttcagaacacaaatgggaacaatctcaatgttagtgtttggtacaactccaccttcaagaacgatacagtggttcgacctatggcactgattcgagtccctcgcttagttaatctggtgcattttgtgcttaacccttttacttaaacatagattttattatttagtacacaatcttgagttcatttttttttttgtttctgtaatttttcaggcatctaatgcatatcttgagttcctaaaaggttctgagacaaagatgttgtttgagtttgtcaaagaaatgcctaaaccagaaactaaacttcgtctagacatcgcctctctaattggtccaatattctttacatgggttattctccttctgctaccggtaagtttgcttaaaataaactgctttaggctgtcactatactcatcgacctatatatgatgatctgtaaatctatgaagcatttatatgcaggtgatcttgaattcattggtgtatgagaagcaacagcgtcttagaattataatgaaaatgcatggcctaggagatggtccatattggatcatttcctacgcctattttctcgctttatccacgttctatataatattcttgatgatctttgggtcagcaataggtattgaatcattaccatatcttatgttattattttcttgtccttatagaacttgctataacagttatggttcctttcaggattgaagttctttctgcttaatgacttcagcttacaattcagtttctatttcgtctacataaatctacaaatctccatagcctttctactttcctcagcgttttcaaaggttgagacagcatcaggtacgaaataaaatcacacgttaactaaatgtgctcaagaacatgaaggtgttaataaaagaaacactttctgtttcatggcaccactatagtcgctgcttacctatacgtgtttggatctggactcttgggtatgttcctcttccagtttctattggaaggtttatcgtttcccagtaagttatcaagatgacct

SEQ ID NO: 4333 - DNA, 467 bp, Arabidopsis thaliana landsberg
ctttcgttttcagtgttttgcgaaatgaagaatttttggtttcttgatctgagaggaagtagttttggggggcagcttcctctttggtggggtgacttgaacaagctacggtttcttgacctctcatcaaaccaattaactggaaatataccacccagtttcagcagcctcgagtccctcgaatatctatcattgtcagataatagctttgaaggctttttctcgctcaatccacttaccaacctcacaaagctcaaggtgttcatgatttcatcaaaagatgatatggtacaagtaaagattgaaagtacttggcagccattatttcaactaagtgttcttgtactacgactttgcagcttggacaaaatccctaactttctcgtgttccagaagaacctgcgtctaggtgatctatctgaaaatagagtatctggaatcattcctgcctggctgttggagaataa

SEQ ID NO: 4334 - DNA, 1485 bp, Arabidopsis thaliana landsberg
cgttggtatcatatacccgtttgttctactcatgtacttacattcatatcttttttgttaagggcctctagatttctacgtttttggtgcttaatgctaaaggggagaaattaatagacccgcttgattacgctcgggcatgtgacacgttcctcgtttgccaccgttgccatgagcaaggacgacatagtaggggtagcctagtgtggtgttgggggccttcggcttccgaaggtcctcaaaaacatgatttaacagtgtttctagagtgtaatgtgtgaacaggtaccttcggacatatatcaaagagggagaacctcaaaagatacgaaggttggcacagtgccgaagctgtgaagcaggaaagcttcggcatgttcgcagaaaagggaaccgacttaaagatgaaaaggccatttagacctcgatagattgctatggaattatcaccaaatgtaaagggcatgtatgtaattttgtatgggttgtatcccgtgcctataaataggtgaacagtacccccgtactgttcacgctgacttggcatttgcttttgcgtcacgcttgtactttttaccttctctcaggaccgaaggtacatttgtaatttgaaatcatttctatttttccatgttaataaaatagaaatgattctatgatgatgcttatattatattccatgctttatatgagtccttcgtcattacttgttatgtttacgaaggtatgtctcttatgaccttcgtccgaaactcattatttcccgaagggacataatgcttcgaaggacgaaggactttaacacttaacactttttatgttgccttgttcttaactctaaagatttgagaacaagtccccaacattggcgcccacctccggtgaactcacttccacttcgagcttttttgaacaccttcggaagctatggcgccgaagaaagcttcagcgacctggggcttcaacactgcaaccgttggacatcaaccaggagaccgtctctctccgggaggcccgaaaccagaagagaaaggctgtcagcccgacgattcaggaggatgaactagaccaagagatcagggacatggagatgctacatcaacaggtgcagaggaagaaggagaagatggccaggctagttgagctgcagaggcagatagacgaagcttccgaagaagtccgtcatcttacgcacgatgagcagaaccgaaggcctcaacaaaaagaccttcatcaggagggcttcttcaatgaagatgactggtatgataattttcatcatggaaattttgttgtcgaccgatggttcatctgtggtccggtgaagctgcaggctacacgttggccttcgtcctataagccaccccagcttcccatgttcgatggccattcggacccgaagcagttcttgatgagttacgaagcaacagtgtcttcgtatggtggcaatgctgcagtaatggcaaagtctttcgttatggccgt

SEQ ID NO: 4335 - DNA, 770 bp, Arabidopsis thaliana landsberg
tgacctctctaaccatcacacctcgtataaatactctctcctcttcacacttatcctctcaacaaaaatcgtttcgttcttttccaaaatccccaaacaatagaaacgcgttttaaacgatttgattagttttaaattaaaaagaagatccgagcgatgtctggttcgacccggaaagaaatggatcggatcaaaggaccatggagtcctgaagaagacgatctgttacaatcgttggttcagaagcacggaccaaggaactggtctctgataagcaaatcaatccctggacgttccggtaaatcttgccgtctccgttggtgtaatcagctttctccggaggtagagcaccgtggattcacggcggaggaagatgatacgattatactagcgcacgctcggtttggtaacaagtgggcgacgattgcacggcttctcaatggtcgcactgataacgcgattaagaatcactggaactcaacgctgaagcggaaatgtagcggcggaggcggcggaggagaggaagggcagagttgtgatttcggtggtaatggagggtatgatggtaatttaacagatgaaaaaccgttaaaacggacggcgagtggtggaggaggagttgttgtggtgacggcgttaagtccaacgggatctgacgtcagcgagcaatcgcaatctagtggatctgttttaccggtttcttcttcttgtcatgtttttaaaccgacggcgacagctcgtggagtggtgattgagtcatcatcgtaaaa

SEQ ID NO: 4336 - DNA, 864 bp, Arabidopsis thaliana landsberg
ctttttttgacaaaaaccaaaagtgaatgagggcatggtacatactttgaataacaaggctcgatgacgagccaatccaatagttagagaacccaggggcagaaccatgctacggagggttgctttcaagctgtagctcagactccaccaagctcttaacgtgctatctggatccaaaactggtccacccatgtaatcagcaactaaaactgccagttgccttaccaattcactgttcacaaaccctgaagaagacgctgactttgattttgctgcaatatcaagagccatttgttcaagtctcaacagattagaatctttgctgctgttcactagaacagcatcccaagttacaccatctgacacaagtgtcccctgaagatcaactaagggaggtattctttttaaggaagattcattcattactccacacaggtcatagaaaccatccacaatcttgtcatcatagccaagacagttataattctgcaaaattccagatgatgtaaaattggttagaagagacagaaaacagttatcaacttataatcaacttaacacattttgtttcaagcatagtctattgtcgcttaagtgaactggaaatttgtttgtatgtctagcaatgagttaactcctcacccaatatctatagtccatgagttcagctggagtattgtcgggagcagaagaaccagaacatgagttgacgggcttcatagcctcaatatgagcagcttcaggatcctccgtagcacttaactctagagccagctgcatatgatattcaactcaaaagtctgggtcctcggaatatctactagaacccaaaccctgcatcccagggtcggacccatcgagacc

SEQ ID NO: 4337 - DNA, 2055 bp, Arabidopsis thaliana landsberg
ggaagttttcccttttggagttggatgattctcattatgctgcaatctgtattgaagatgatgaagctagtggaggtgcaatttttcagttgacatatctcttgatactgaaaaatccattttattcagtaatttcttcatcacatctttttccttcttgcaggagctcctatgagggtgattgtccgaaaaaccatcccgtttgtagaagatgaacttatatctgaaagcaaacttctttagatagcggagcctgaaacctgcagatgtctctgcaagcatgatggagcgagtacatgctctctggagtagacaagctgggcaagcgaaaaataaaagtagcctattatgggaccatcatgtttgtgcgacacttggaagatcaccagaaatctgtgcacgagcagaccccgtctttgaaatagtggaaccgagatgcatcccttacaacaaactggcgatctacaatcttgctaacctgcttgaggaacacatgacaatcttcacaaaccctcaaattctttatcacaagaatttctgtgcctggaatactgttgagaatcccaaaagctattgctaacctctcactatgctcacgggtagtgctcgaaacctcttcgcctctatcacagtccatgtttcccgcaagctccatcacagaagtctctaactcatccaacattctatggacttcctctgtttgctcatgacttctatcgccagctaaaaacaagtgaactcttcccttgtgttccacataactatacccaggctttttcctgaatgctctctctctcatcattacccggattctccagattccttcttggtttttcgagtctgaatatatatttgacatcaatacatagtagccaatgttattgggttcaaactcaatcacctttgcgaaagctaactctgccatatccacattcttatggattttacaagcacccaatagagcaccccaaacagcaccgtccggttcaacaggcattgactctataaactccatggcttcatctagccgaccagctcttccgagtagatcaactaaacaagagtagtgttcaggaccaggctccagcttatactctctcttcatcgctctaaataactctaaacctttatccgttagccctgaatggctgcaagcagataaaaccattacaaacaccgccccatctggtcttatgcctctttttatcatatcatcaaaaagcataagcccaatctctcccattccatgcatcccatagcaaccaatcatggcggtccatgaaactaagctttttacaggcatgatgtcgaaaacagcacgtgcctttgccaagttaccgcatctagcatacatgctaatcgatgcattgcttacaaaaacatttggtacaaaaccattggattctactaacttccctacttcgtgaccaatcttcttagctccaagatgggcacaagaagacagaacactaaccaatgtaaaaggatcaggacaaacacccgatgatttcatctgctcataaagttccagaacattgtaagctagcccgttctgtgaatatccagaaatcacagcattccaagtaatcaaacccttcacaggcatctcatcaaacaacctcctaccagcttctaccgacccgcatttcatgtacattgtgatgaaactattcaaaacagctacttcagaatccagtcctcctttaacacattgaccgtgaagagacctcccaagccagaggtattcaggaaccgtgcaaagcgggacaagcccaagcattgtaactgaatccacagacacaccagtttccttcattctacgaaacatatacgcagcatcagagaccttcgagtttgctgtgtacccagatatcaaagcattgtaacaaacactaagctgacttgactgaggattttcttcgaacactttacgtgcatctgcaaccaaaccgcatttacaatacattgagatcagagccgttagtacaaacggctcagtctcgcaaccgacataggtcacgtggcaatgtagctgttggccggagacagggagcg

SEQ ID NO: 4338 - DNA, 1867 bp, Arabidopsis thaliana landsberg
cttgcggggtgaaaactcgattcgaatcgtctgcttctcgcagctaatgagactgcttgaccccttgtactgcatcgagtaagaagtgaaatgaggttacatgagataatttgttgattgaactaaatgcttgtcaccatgtatgcttagaaagagcaaatctagctaagctaatgatgatagaatctgaaaagctaaaaattgattttagaaacagctagtgcttttggcaaaccaaacccctcagccaaacagctgcatagtctagaggtagaggagtagactcctcacaccggttaagtctagctgagtattagtatactcagccttgcttgtggcataatttttgcaggtaccattcaggaaatggttgatggtgtgacttggcctaccaccctgccaccgggttggacggtcgagtgggatgttgctccggcaggagaggagcacgaggagtagtgggctaggccttgcccaattcctcgataccgatgacatcgattatccgctgcattttattttgtgaactcttatttgctactcaaaaacttcgatctatgtaataattcagcacttaatttgaggtttcctgttttattgtatttcttctgtgactcaccttcgagtgagattgtggaatttgatcctggttaagtggctccatcagactagatctgagggactgacgggttattccgatttaagtgtgttatggcccctgaggcgtgacttaggcacttaagctggaataattcgggtggttctgccatagctggtatcagagcaaattccaccacagagaaggacaataaaccatgaataccaattttcaaaatctaaaacttgcctagaaactgctacggatcgtcaggactagaccgctagacctaggatgaaaggccttaggcatagagggagaaatagatggctaattagttaggcccgtgggccagtacttatatttttaaggatgcccttagagcacctatctttcttttgagaggcaacgtttcttccagcatgcatgcattataaacacaaagaggaattaaaaacttgagctaacccccctttctttaaaaccatccgggctctctttttctttttccttccaccataatctttatctttgattcccttccgcagatgaattcacccacccccgctagtggaggagacaccggtttcagttctgacttcctttctcgcgatggctttccttccattttgtgggaagtgcttaactccgccggttaccctacgccccctttgtacacagtgcagttgtatgaggagcatcgggtacctcgttgtcgggtctggctaactttggaggctcatccccttcagccgggttggcgtctcttgattccgagacagttgattcaggatgacgacaccactgaagcgcaaccatgaagactctgacgactttctgtgctaccatcccctggagatggtgatgcaccccttggactcttccctgctgagaagaaggatgaccccatgtggtgtaaccgcgtgagtcatgtgaaagatgtgtgggcaatgtatcctgacttggtcgggagggtcaccgttcagtgcatgagtgcgctgtaccgccttcaggcccttcagagcgacgctatggcacaccttgctaacatcgctcaagccaccaagctcactctcgacagtcgagaagattttgtggtcgatttatcctccgagttggtggagaaggatctgcaagtggaaaggctgagccagcgcattaccaccttggagcagcaggtggagatccgagacaacactattgatgtcttggagaactagctccacgatgtggagagggaactcgaagaagcgaatgaccacctggaca

SEQ ID NO: 4339 - DNA, 1432 bp, Arabidopsis thaliana landsberg
gcaagactgggcattgaatcagctactacatctttttattgcttttccattcacgctcatacaagtttcccagatggaaacgggttcctcacatgtgtcactaccattctcttcgtcttctaaagcatttgtggattgcagccattgcagaagcctgaattggactaagatctgacataatgctgctatcaccacaaagacaatgaggtcctgaaggtaaaagagttcccgcacgcactcgtttttctgctgttgtagctgcagttgctctgagagatgatagaagaggctggcgagaaagtccacccaaacgcttactaggcatatcaaatccctgtcccgtccctgtaataccctttgacatcaagtcatgagcaaacaaatgaagtttatagaatgctggatgagttagagacttctgtattggagattgcccaaaacacggactgtggttgagatggagaggttagacgtgagcatagtgagagctttgcagtaacttttgggattttctacagtattccaggcacagagagtcttgtgaaggtttttgaagattttgatgtcttcatcaagcaggttagtaagattttagactgctgatttgttttaagagatgcacgaatgttcagatgcgcgaatacaacagaagagtctgcaatgttgtcgagcaaagctgcactgcagactagtaataatattgttattgttgtagcatttttcatcaaaaagcattaagcctccttcctctcttgtgttccacacactctcttacatgtctttgtgtgtttttcaaattcttttgctttttattcacagattactaagttagctaatataagatatttcaggtagtccatgaaactacatcttgacttgtttgaaacttattattgtttctacagtttttgcctctctctttatgatcatttcattcatatattgctttcattgatgattcatgattcccactgcttggtctccatccttgctgcacttgaattgtatactgtagattccacacaacatcttctatggaaggacgcttgctttgatcctcgcaaagacagttgatagcaaactctactgtcgtcctcaacgactcataagcatatgatcctttaacagatggatctgctaagttgctcaatactgatggttcatctctcaaaccgttctccagctgcaagaaataacattgaggttctaaatttgtaagccgtgtcggatttataaagatgaaaaggttctggctgacctgaagcttcaaacttcccatctctgaagatcctgcagcaactactttccctgtgatgatttgtagtagtatcactccaaactggtacacatcttctttctctctatcttcattactgcacattattcattaaccagtttcaaaatttgatataagagaacacatttgatcata

SEQ ID NO: 4340 - DNA, 4939 bp, Arabidopsis thaliana landsberg
  unsure (1)..(4939): unsure at all n locations
aaacacttttcctatagaaggctcagtccatggggtatgcatgattctatttttaaacttgacataagttatgtttgacatttaaggtttttattgactataatattttctgagacttacgcttctttccttgtctgtatttcaggataagatggttaggaaacccatcgatccagaagaggagctccgggggatgtcccaagaagcacggggttacgtcgaagctgttcttaacagccttgcagccaatgttccaaaggtgaactatccttatgcaaaagctcgaaagctctaaattttcttgtccatctcttttctcttacagagattcctcggtcatgctactaagcgatgtgaattgaccatgaacaggctgttgttctttgtcaagtagagaaagcaaaggaagacatgctgaatcaactctacagttctataaggttcaatatcttttcgttccctgtgccttgtttcgtttcagttgtggtgtgcttacttgtgctctcctgtatttgatctttagtgcaataggcaatgaaaggattgagtcattgatacaagaggatcagaatgtcaaaagacgaagagagcgttaccagaaacaatcctctcttctttctaaactcacgaggcagcttagcattcacgacaaccgagcagcagctgcttcaagttattcggacaacagtggcactggtaaattcatccgccttattatattcgaaacatgataacagttcttctgcttgcttggtttggattgatacggtttcttaaataccatctgaaagatcttcaatgaaacttaggtttataaatcttttaatcttggtatcacttgtcctacagagagtagcccaagagcaagtggaggttcttcaggggatgactggatgaatgccttcaactccgctgctaatggaccctcagactcattgtcaaagtacggttccggtggtcacagccgccgttacagtgaccctgcgcagaacggagatgcagcatcaccagggtctggtagcaaccgccgcaccacccccaatcggttgccaccagcaccaccgcctacaggttcagcttataggtattagaacctgaagaaaaaaccctggaagcgcattgtgtcccgttttctgggactacgttactcttattttttctagtttaagacagtgattggatgattgtactactgttttttggtctttgtagatagatattatcacacacatgtgttggcagctaaaaaagagtttggtctcatgagtcaaatgtctgtttgaatttttgttttatttcttattcaacttttcttggcatccattttttgagcacgctatgctgtagtagttatagaatgaattttgtatctgatattcttatgaatctgaactgtttgggtaaattactaaatttataaaatcgaagtttcatagactacttccattgtttaagccttgagagaatactttcagggctagttgatgaaatcactaaattttggggtttattggtaaagttgtcgtatgcggtagtacgtagttgcaaatgcaccgcaagtattttctttattcagaaagcctaaaattagccaaacggcatcggattatccctcgaaccaaattagtaacatacaatttcttataagtaattttaactttgttaaacaccagggtttaaatgagattttcctgaacatatggtgtttttgttaaattttaatagatgttcttgcaatagttttgaaatttgagggttatttttcattttcgcgaaacttgggaaaggaacccttctagccctaattaacgtgtctgctttaaattagggcagacaaattaacgttctctgtctctgtctgttataggctactccaccgtctcgatctcattcaccttttagtaaggtgagctatctcttgtcttcattgacgaaggtttgtgtggatctcgaagttagattgataaacctaacttgttcttgttatatagttatgcacggcagctagaatttgtcgagctataatagcattgttataagattagcaatcgaaattgatttagttaacgttttaagattaggaatccaagttttagaatctgtttggaccaaatgaccatcgtctctacttgttgtccttttggtctctctaatgtcactaagtgtatcaatttcgtgcagattaaagaagcaaaaacaatggtgaaatataatttcaagaagataacagttgtgccaaacggaaaacagtttgttgatatcgttctttcccgcactcagcggcagacaccaactgttgtccacaagggtgacaggatttgcaaactccgtagcttctacatgcggaaagtgaagttcacagaatcaaactttaacgagaagctctctgccattatcgacgagtttcctcgcctcaaggaaattcaacccttctatgaagatcttcttcatgtgctttacaataaagatcactacaagctcgctcttggtcaagtcaatactgcgaagaacaagatcagcaaaatcgccatggattatgtgaagctattgaagcatggtgattctctgtaccgatgcaagtgcttaaaagtggctgctcttgggcgtatgtgtactgttatgaaaggtattggtcctagtttggcttatcttgaacaggttaggcaacacattgcaaggcttccttcgattgatccaaacactcgaactctcttgatctgtggatgtcctaatgtgggaaagagttcttttatgaacaaagttacaagagctgacgtagctgttcagccatatgctttcacaacaaagtcactctttcttggtcatactgattacaagtgtttgaggtatcaggtgattgatacaccggggcttttggatagggaaattgaagaccgtaatatcattgaattgtgtagcatcaccgcgttggctcatatccgagctgctgttttgttctttcttgatatttcgggttcttgtggttacaccattgctcagcaggcttctctttttcacaacataaagtctgtgttcaagaacaaaccgttggtgattgtctgcaacaagactgatttgatgcctatggagaacttatctgaagaagataggaaacttattgaagagatgaaagatgaagctatgaagactgaaatgggagcaagtgaagaagcagtgattttggagatgagtactttgactgaagaaggtgtgatgtcagtgaggaatgctgcttgacagaggctgttagatcagagggtagcggcgaagatgaaatcgaaaaagatcggtgatcacttgaacaggttccatgtggcgatgccgaagagtcgtgatgaccaagaaaggctcccttgtatacctcaggtagctggtgaaaaggagaagcgaaagaccgagaaggatttggaagatgaaaatggtggagctggggtttattctgctagtctaaagaagaactacattttggctaaagaagaatggaaggatgatataatacctgagatctgtgactgtcataatgttgctgattttgttgattcagacatcttgaataggcttgaggaattgacaagtgaagaaagtcttaggaaggcagaggaagaagaagttggttttgagattgaaggcgaagaacttacagagaaggagaagaatgatttggctgctattcgtaagaagaaagctttgcttattgaagagagtagacttaagaagagcaatgcacaaaacagagcagctgttccaagaaagtttgacaaggataagaagtttacaaggaagagaatgggtagagagttatcatctcttggtcttgatccgtcttctgctttgaaccgtgcaagaagcaagtctagaggcagaaagagggaaaggtatgatgatttgagttacgatgcaatggatgtggatgtgaatgatgatgagcaacatatgaagaagaagatgtgtctgagatctaaatcaagatctttgtcaagatcaagatcagtgtcatggccaccacatgatgttgcacctggtgaaggcttcaaagattcttcacagaagattaaggcaattaagattggacacaaatctcacagaaagagggacatggctgcacgccttgtagaagcagacagagttataccatcttttaaaccaaaacacttgttttcagggaaaagaggcaatggaaaaaaccaaaggcgttgaaaccagtgatcaggtaacaagggctcattagtataagccatgcatatctctatatatcaagcttatgtgtccttcacttgtacttttattatatgactcatataaaacattgtggttagcaagctgtagcaaaaagagatgataatatggcgcattgggtttctgcagggggactatgcagatgatgaacggtttgaggattatctatcaagttttggatttggaagctttttacttacttttgttttactatttttggattttctcggcatttgttattcacgttggacgaaatgtagagaagagagttgattgtttggagacagctatgagtgatcaattgtggtttttagatgttttgaatttttttatacttggaaattgcaatagttttttttttttttttaaattgcaatagttataatgttatcgttgatcctgcaataaatacatagtacttgcttatcataattttaaagcacttacaactatcataaccttgatgcaattacaatactgatcgttataacttataggataattttgaaaattgtcatatttttgagtttttgtttgaaaattatactctatcctattttttaaataataatataattttaaatatgttaaatgatttttccgttcagatttaaaacacanagattatttttaattaattaaaattaaatacaaatttttgaaaaaaaagaataaacttacattaaatcttaatattatttac

SEQ ID NO: 4341 - DNA, 1576 bp, Arabidopsis thaliana landsberg
  unsure (1)..(1576): unsure at all n locations
gtttgcatcaactgtctttgtgaagatcagaggaagcggccatcgatagaggatgttgtatggaatctgcagtacacaattcaagtgcaacaaggatggacaagcagtgagaacctcgggcttggtggttcagaactatagaagagaaatataaaatcaccatccttgaagaacatagagaaactgatcaatgtcaaattcaaggcctatatgagaatacataaagttgaacctactaatacttaaggtacttacgagtctcatgtgaagcttcagattttggtgtagaaattggattagcgtcacaaagaaagcaatgcaattgttaaggcaatgaaagggtgtaacagaaggataaggccacaaacccttaaataaaatatcgcaactttgtggaatttgggtacaaagttgttttttgtagctagcaagtaaatcgtaatacatatatacacaaaagtgaataattcagatggtttggtacaaagttgtttttttaaggatgttgggttacatcaaagcatggaatcacttaaatagttttggaaacacaagacatgaatgaaaagagaagaaagctgttgctgaatcgtgattgagagaaagtagagagagctacaacgcttacaacaaactactactagtcagcagtccagctttgctcaacaacatcacgcactctcctgttgtactcgcgcttgctttcgctgtacatccgagcagcttccgagtttgcaggagaattcggattagggtcacagagcaaggactgcaataacaaagggaaaaacggattagagaagaagaaagcaattcaagcttttaagggcatcaagagatgttcatatggcattttgaattcacctggatggaggtaagtatagcagcaacatcatagattggactccactggttttgtagaatgtccaagcagatactcccatctgcataaactacacaacgaatagagcagaagaacgttaattggaggcaaaagctgaacatcaaccaggtggatagaaaatccaatgttgtatctctataacttactattaggatgaaacatccgtgacacaaaccgaactgttggtggtttattgggataatcttcagagaactgcagtgagagtttgaaagtacctgaacagcatcaagaaagagacataagaacaccactacaacgatcccaaaaatttatgcttcttgtcaaaatgcaataacatatcataaccatacctccatcccatgnnnnnnnnnnnnnnnnnnnnnnntagaaacaaaaaggtctaagtaagtacagaaatgacaaaagtttcagaaatatttagccagtatctaaaggtacttgttcccattacccaaatatgacagcattccagagcataatgttgttgtcctgtggagcaccactaatacccgcaggtgggtcttgctgcaacctcttgaaatccctcattaacctcttccttgggctggcgtcgacaatcctccttttctttctaataaacaaaacccaccaaatattcatcatctttttaggtcttgaacctttattaatctagaaattactactaac

SEQ ID NO: 4342 - DNA, 1782 bp, Arabidopsis thaliana landsberg
cgaatagttgtaaagtttgacatatacacaacgttggtcatgtgaataatgtacacaaaatatatttattgtgtgaacgaagtatgcattaatggatgtttgcattaaagaggagattgaaagacttttaacgaactcgtgaagatgtccattggaaaaacaattaacttcacctactctttcacctatcccatgttcttatctttaatgccttcaattttatctcccttcccaaaatacccctcatactagccctaaatcacttaaaaacctgcccctccgatctttcttgacatacaagaacacaaaacagaaaagggaaccctaaaagttattatcttataagctacttttggagatatcttcacggaactgaacaaaccactgtggggttgttgtatctgaagagtggctctcacgccgttcttccccttcctgtacttttgcaggcgacggtaacttctttggaggtggagacgggacaagtgagagcagaaccctagagacctcctgcatggtgggtctctccaaaggatttcgcttggtgcacaagagagctagctgaaatgttttcttgatgtgtcctgagtccatgcaagtcactgagacctctgcatcaacagcttccattactgtgttatcatccgcctttgatagaatctgcaacaaaaaagttaatgatatcaaattctttccaagaataaacttgtgaaacactttatactcaaattcataccatttgatgcaagttggcctcgttatccacagccttcttgccggttagaagctcaagaaggacaataccgaaactgtagatatcagacttctcgttcagacgcgaagttcgagcatactctgggtcaatatatccaatggttccaagaacataggttgaagcataagttttggtggctggtatgctcttggcaatcccaaaatctgacaaacgcgcttcgaaattcccatcaaggagtatgtttgatgacttgatgtctcgatggattatcctaggtgtgcagtcatggtgaagatatgcaagtccttgcgcagctccaacagctatcttcagccttgtttcccagtcaagcttcaccttcttcccaggccctgcatcatacaatcactacgtttaagtcttccaaaagtagaaaactggctgaaaagaacgtaactggtccaagagaagaagaatagcaaaccatggagaagatcccaaagagagccattttccatgtagtcgtagaagaggaggttgccaaagggagataaggcgtatccgtgcaagcttactatgtttctgtgtctgatgctcccaatggtctcgagctctgtttcaaactcgcggaagttgctgggatactgattgtagattcgcttaatggcaataggtcgggaagttttggaggtgcacttgtaaactgtgctagaagcaccgtatccaatgatgtatttctcattgaggttttctgtaactctcatgatatcatcaaacgtgtgaatagccatgtccatgtgaagaatcaccagcttcgttgaccctgaaggatccatacaagatatatcataatgctgttgtgaatcttaatgaacgaaagagaagagatcataaactatgagaccaagaccttcaggttgttttgaagagcctttcaagactggtttctgctgctttgacttgtaaaccgcaatgaatatcatgcatatgagagtgatgaaaccgagaacaatacaaatcacggcaactctggtgaatactggttggtcaagagcaagagatatagt

SEQ ID NO: 4343 - DNA, 978 bp, Arabidopsis thaliana landsberg
aggagacgatgatttgagaatgagggtagaaatgtttatagcaaaaattaacaatgaatggaggcatgagaagaagcttagggctttgaatttagtttgttaatatgttcaaacaaaaatatggattcattctcattgcaaagattttgtatgaatatgtacatactttttttttatcaatgtataacataatttcgtaatgagtgtattttctagagatgttattattatagaatcatcaaatgtatagtactctctgaaatgaaaagattggctccttgatcttataatatattagttctttactttctgcaaaaagcttttgattcttctttccatgaaaaagctaatcaccaaagattaaacattacaaaactactaggagttagttacttacctgtaattagcgaacaataacatcccgttatgtttctttcatttaaacaccgtcgtttcgtaaccgcgccatctaaatttgctcatacaagttttcaagagacgtgagagagagagagaacaaaatcgaggttttgatgttattctgattgatgctcgatttcaacatgttcttccccaagaaaattgatccgaaaacaatggatatatttgcagaagatttctcccttgagaaattcgacatcgatttcgaattcgacgctcctcgattctacgatttctccaaacctgaactcgattcagaaacagaggaaacagagctttggtttcaatcagctggaaactatcctccttcacgtaagatcaatatgcatatttttggaattgaggctaaaaagactctgtttcttaattatgttatacttttttttctcagcatttagcatacatttgagatacgaagaaaaacatcttgagatccctaaacccgtctcagatcaatacaatggtattatcttgcaaattcttgtctttgatttgatttcttgcaactcaaggtttgttatggtcatttagggttta

SEQ ID NO: 4344 - DNA, 1138 bp, Arabidopsis thaliana landsberg
aatgaagcttgtgcatcatatttttcaaacttatgatcttagagcgatactgctatatatgttgtatccaataggtatgggatttgactgctggaaagcttttgcatgaatttaagtttcatgaaggacctatccgttcgctagacttccacccgcttgagttcctcctagccacaggttagtctgtgattctttgtttttcaggcattatagggatgacttggtgtcgttttcgattggtagattaactactgacatctccttaatcacagttttatattgaattcttgtgatttcacactctccctattcatattcaggttctgctgacaggactgtaaagttctgggatttggaaacgtttgaattgattggatctacccgaccagaggtactagcctgtggtgtcactagatactgttttctaggggactctataacaagtgttttttacgtttatttccttttagcgtgatcaccttgaagggaaacctcacacatttaaaatatcagaaatctgcttattctcggccttgatctgaagagtgtgttagagaaatgccaagataaaatttagttcttaaaaagatgtagaagtaaataaaagtgaacggagtccagaaagcagcatgtgatgaaatatgttttggcgttgagctagctttgtagccgtctcggaagatgttattcacacaatttatgtggtatgtggttttccttgttttcacaggctactggagttcgttcaatcaaatttcatccggatgggcgaaccttgttttgtggtttggatgacagcttaaaggttttgattttctttgtgatgagctttaccatataaagggttctccagagtcaaaaacattgatatcataagctgatgttcataattcaggtttattcatgggaacctgtggtttgccatgatggtgttgatatgggatggtcaacgcttggtgacttatgcatcagcgaaggaaagctcctgggttgttcatactaccaaaattccgtagggatttgggtctcagatatatcagtatgtcagctattgtgattttcctctaaaaatttatgtccaagatggtaaatgattgttttgaaggctcatgtttttgttttttcttttatccttaat

SEQ ID NO: 4345 - DNA, 1611 bp, Arabidopsis thaliana landsberg
gggcatacattcccggttgattcagtagcttataactatgaatcgttttggctctgttttggcatttccttttgtgataaagctgtgggatctaaaagaaatcaaagagtaagctgattaattgtctcttctcatatattatccctagattatattagaggcactcacacttgttattgtctggacgaattataagtcctgtgatggatggttagtttcagataatgaggtctaatattttcactcttgctcttgaagtgtagtggttcgagcttttactggacacagatccaattgttctgctgttgagtttcatccatttggtgaatttcttgcatcgggatctagtgacaccaatctaagggtttgggataccagaaagaagggatgcatccaaacatacaagggtcatactcgcggcatcagcactattgaatttagccctgatggtcgttgggtagtgtctggaggacttgacaacgttgtaaaggtaagaacagcagtaacaacaagtgcattgttttgttccttaatgattgttcttataacaatgtactctttattgtactcaataggtatgggatttgactgctggaaagctattgcatgagtttaagtgtcatgaaggacctattcgctccctagacttccatccgctggagtttctcttagccactggtgagtttttagcttttcttttcatgtgttttagggctgaattggtagcagctttcttttagttgataaattactgttttgcatccactaggtttgttttgaggtcttctgacttcatataccaccctttcgtaattcaggttctgctgacaggactgtgaaattctgggatttggaaacgtttgaactgattggaactactagaccagaggtacctgagcttgtgttttgttattaatctgtcctgtttagcgttggattcactttatagtccataagataagacttagttttacttgcactattgtcaaccttcttcctggcatgtggtgtcctttgttttccaggctactggagttcgtgcaatcgcttttcatccagatggtcaaacccttttctgtggattggatgatggcttgaaggttctgattgtctttgtgctcaactatacaacttagatgatgtccagagtcaaacactgatattataagttcatgcacataatgcaggtttattcatgggaaccagtgatttgccgggacggtgttgatatgggatggtcaacacttggtgacttctgcatcaacgaaggaaagtttattggttgctcatattaccgaaattctgttgggatatgggtttcagatatatcggtatgtaaccgaatgtgaatgtccatacctcatgttaaaaacttaaaccttgtattaagttcgtgtttgtttctcaggaacttgagccatatggagcagtatctgaggataagaatgaatgcatggtgaaaagatttagtgtcttgaatgatcagtctgagagaatgggaagtggcccaaggggcagcgtatccccagattatgagacaagagagataaagaacatatacgtcgactgtgagtgaatgttaattatgttttatatgttcatttgctttgc

SEQ ID NO: 4346 - DNA, 1614 bp, Arabidopsis thaliana landsberg
gtatttgatgttttgctgttttgtattcagttgaagcagttagaagattcaaggaagccatttataaggacccattgctagttatgtctaattggaatgtccccaatttgagtccttgtgattggaatggcattaaatgttctccatctaaggatcacattatcaagatgtaggaaactttgatctctttctatcagtaaaatcagttatgtttagtatgatgatgatttggtatctgtttcatgctgtgaaacttgcagaaatatatcggggacatcgatgagagggtttcttgtgccagaacttggtcaaataacctacttgcaagaactgtatggttttgattcatattgacaatacctgaagatataagtttgatgattggtactgtttgtaaatgtttagatgactttgtttttttctgtgttgaatgcttctttaggatcctgcgtgggaacattctaatggggacaataccaaaggagataggaaagttaaagaaactcaagatcttagacctgggaaacaatcatttgacaggaccgattccagcagagatcgggaaattgtcaaggattaagacaatgtaagaaaatctttaagagaatgtcatctatccgataatgtgctgagataaccattttgtgtctctttaacaccacagaaaccttcagtccaatggtttaataggaaagttacctccagagattggaaacttgaagcaccttaaagaacttcttattggcaggaataggcttcgaggaagtattcctattgcagcgaaaacatcaaaaaagtgagtttagcccattgtccaaggtggcataagatggacacttattgtttatgattgcaatgttaatgtatcttctttttgggttggtcaggtatgcttcaaatccaagtgcaaacatcagtggtttgtgcaagtcttctctatttaaagtggcagatttctcttacaactttttcgagggaagagttccgagttgcttggattacctcccaatgtatttcttataagaccctttttctctagctttcctttatttttctcatttgataatatctctctgtgtcattgaaaatcattgtagaacgagctttcaaggaaactgcatgaaaaccatggatgttaagcagagacctctttcagaatgtggtttgtagaatatgagtttcactttcttgatgttgataatcgtttctttatcttgcttttcattttgaaattatttcaattggttagctcgcttagctgcaacagtggccaagaagaagcaccgagcatcgagacaaacttggctttggaattttgagatagtcacgggatcatcgattggtttgctctttctagtcgtaatgttctctgcatgtagcttgtgcaaaataaagcgctctctcatcgttccctggaagaaatctgcaagtgaaaaggacaagttcacggtctacgttggttagaaacttttaaaaattctaagatttcaatacaaataactgaaagagcttccagacatgaaaaaatcactgataaactgtttttctacagattctgaaatgctgaaggatgtttcaagatatacaagacaagagctagaagtagaatgtaag

SEQ ID NO: 4347 - DNA, 647 bp, Arabidopsis thaliana landsberg
  unsure (1)..(647): unsure at all n locations
ggttcttctgctctgcttttgttagttcaagcacttagaagattcaaggaagctatctatgatttctcctttgctagttatgtctaattggaatgaccccaattcagatccttgtgattggaccggcatttattgctctccatctaaagatcatgttatcaagatgtaagaatctttcatattttcttctttctcttgcgtttacttattcttgtatagtatctgcagaatcagttgtttatgagtggtttaggatgaagttggcttgagcttatagcttgtggatcttcttttcgtgcagaaatatatccgcttcatcgataaaagggtttcttgcgccggaattgggtcaaataacgtacctgcaggaactgtacggtttcatctctttcacaaatatgtagtttgatgcattgagtttgatgcatctcattaacatcattaaaatgcttctgtagaatcctacatgggaacattctaatagggacaatacctaaggagataggaaacttaaagaatctcaaaatcttggacttgggaaacaatcatcttatgggaccgatccctgcagagatcgggagtttgtcccgcatcatgataatgtaataaagattcatcnttttcgcagtcaaagtgatgctttcata

SEQ ID NO: 4348 - DNA, 4887 bp, Arabidopsis thaliana landsberg
cgccatgcaatgatgattgaaaccattaaacaagttgacttaggtttaatgctgactaaacaacgaactggggaaatgaagaaggccatcaaatgtgccaaacttctacttgtattgcgtatgcatctttagcaattccgtaccttaactgctgcaccaaaagcagattcaggaattttactttcctgaaacatcgttgggatactatccagcaaaagctctaggtgttgacggcactgaactcccatcaatataaaataaatacaaaaagtatgagaaagaaattacgataaccaatcttaataatagtagccagcttatacgacacattgacaaacaagggaaaaactaatcaggaagtgcccaaatagaaaacaaatgacccagaactgacctcagatagctgaactacaacatctgtttctaaaggtgtatagacatcttgtacatcagggacaatgagcatcaatggctgcacaatgagcatcaaacatcttgtagatctcgttttttattttttccatccaacaattacaaaagaagaaaaaaaactagtgcaaacaaatcacctgctgcagtgcacgtttcaaattatagaagtggattgttgagtcaaatgtagcaatcccaacaaatgtcctaggaccttcctgaaaacgaatacagaaaaaaaattaattgtctaatggcgatacaaaataagaattataaagccattggtaacataaccataccataacaaaagttcacagtctcactaaagataaggacaaggtacacacgctaagagatatgcagcagaagctactctctaaattattcagatatgaacaccttagtatgcaaaggggtgatgcatgtaacaagcaaatttaaactatcactaaaaacctcaaaaggtttggacagggactgttacttaatttcaaataccaccaaaatagtaaaaaagtcttcagacacgtgtaaaccaaatagatattcagaacagggtggatataactgaatgttttggaaagttggaaatggcgaaaaaacttacaggaaggtctgaaagtacttgctggattgcattgcaagcagcggcagtagcacctgtttgtatcgcattcattgagacatcaatgaggaaaaaatatactgctggcattggatcccgtacctaccagaaaagataatgaccttaaatttccatccattcccgacatgtctgatcatcaacttctcccaaaacgacgttaatattaatatcttagctagaaaggtaatctaggtggtagttcaatagatcaacagtacagtatgtatagagaaaccgttgaccacagtagtaataggttaaaattttcgggaaaacacaaaatcagaggacagaacacttgtcaaatacaatggtagattccagaccacataaaataaattggcatcttatgaagcaacaaaacaaaagaattttacatttataagcagaaagtctcacaaactaaccatgtattcttttgtagcaacaaactcaacggttcccctacacagctcaggtctttcatcaacatccctacgtctaccatctggacccagattacagtgatagtcacggggagtctcatcagtgtatcctgtgcaaaagaaagttgatgaggaaatggatcacaaagcttcccacatcaacgaactcccaagagaatacaacaataacaatatataagcatctctcttaaacaaaatcatatcaccaccttccacaattaggtgaaatccagattgacagaagaaatctttaaatacgggaaggttaagcacaaaaatgttagtgtacgcttctagcttggaatattcaattatttcataacttgatacatactattgcagttacatagctataacttcagattttgtagcttgcataactgaaaacagtaacatttaccacagaaattacagatgaacttccttccttggtcaatgaacttcatgaaaggatttatgtaacccttacagcgtgaacatcgaacaggcccaccctcaccaaagtccacaacctgcaccatagtatagtaagatgtaaatgaaaacgtgtaagtcaaagatactcgtttatgcgatcaataagaccaaatggtaaatgcaaatactaataggaatagcatagaaaccgaatgcccacatgctttgttttgtcagacaaggcttacttgtataggctcttcagatggatgagaaagcgccagcggttggaccatcaacgccagttgcattccagatgtagatagaagatcaactgtacatgggatctattacgaaaaagggaaaaaggtatcaagttcctaagaatcaaggaatacaatgagaaaatattgaacggaaacacatccgactatagaataattcatgcttcattgctacctgattgatggtacacctcatgtaacggggactacaatttccggtgtctcgaacaacataatcactagtagcaggcttgaaaaaatagaagagaaaatcaggaaaggatatagcagttcgacaaaacccccaaacaaaagatatggcatctcagactaatgtccgaattgaaatctgatcatgtatacataccgggggaggattagcctgattactctggcgagtttcaaatacagttgggctggagcttgaacctggccttgggatttgattaggatcaattcttgagggtccaggaacagtggcaccaggttggcccatggcagtgggtatgttggtcatcgactgatttggcaaaggacccatcccatatcttggtggttgcatttgaccaggaaagcctagaggtggggcaacctactaacattcaaatttgaagaccatcagaatctgccacacaaaggaaatacatcaagtgaaaagattttgcttaacaataaaaaagggagccacaagctaaagcgctacattaattgttgcttaattaatcagataaaagaatcctgccaatgccagttcaaatctttcacggtcaaaatattccaaagatcggtcaactagtatggtcctatctgctgaatgaataaaaatacacatctacatgttttcatcattccatacataggattcacaaaagttacatagcaagaatatataccataaccgtatctcgacatacctgcgctgatggtggaccataaggcaagcctgataccgctggcctgccatgaggggctccaggaaaggttgctggtgggggcattgaaggagcagtaaacggagttaatggtggatttccggaaagagaatgtgaacctagtggctgcggaggagtccgagcgtaaggtgctgaaggaggccgcacatagggtgcctgtggagttgtaacagcagcaccggggaactgggttcccctcggaaatccccctgaaccaaccatttgatgcccattactgactggaccaccaatcatgcctgagggaggcatagacatgccagatccgacaggtggaggtgaaccaaatgccattgggcgagatcctggaggaggacctgcagctacactacctgatggaccaaaagctggaaaaccactagaagaggcggcaggctgcgccactggtcctccaggcattgaaggtctagacccaaatgatggctgacgagaaggtggaccagtgggtctgttcaagggtacatttgactgaaacccagctggttgtgatacaggaggcggaccacctggtctcgccatgccagctggaggtccaggccgggacatgggtgaaggcccacgttgcggagctccataagaaggggattgctgagggaaaggctgtggtgactgaccaaaaggaggaggtggtctaggacctgagccaggcatcatcggaggtggtcgattcaagctcaagttctgcatattgtcggctaaagcatttgagttcccttgtgaacccgggtagaaattaggtggcccggaattttgctggctgttgggtctaggtgcccctggaggcacaggagcaaccatgcttggatacgagatggagatcaaatcctaaaacttcctccacaatctaaagtcttgcgaaaatcaacaaattcaagtaatcaatcagcaaatgcaacaattaaagaaattgaagataaaaacactgacacactaacaatgatccgatcaatcacacagacttggtggcagtaactacacaacttcttcttagaaacaacaaatacaattgaagacaataatcatccatccaaagacaagattttttattccttcagaacataaagaccctatcaagaccataaacaaaggagacgaatctagaaaacttcatcaatggtaataaactaataaatcaggaaaccgaaatctgatctaaaggagaaaaaacaaaaaaggcaagaatctcaaaagggtctatcgagaaaattgaaacacgtacccgaattgagctaaagcgacgaaattcttaagatttgactgatagcgatccgagaatattgatagaagctcagatctatggaacagagtgagaaagagagacacagcgacagcgacgacggttaacggcgtcggtgtctgtcacaggattcagacgactgataaaaactaaaattttgttgtccgtaagagaagacagaaaattcacattgcaaaatttcaacaaaatgcaagggtacatgaataaaaaacgttgaagagttggaacttacaaaaaaaagagttatcaatttgactgtagtaaaccagactcattcacacgtcaagtttggttcaatcgaatgctagaatttttttggtattgttatgtcaaaaatatacaaaatttattcaattttattttcttgttaaaacgccataaaatatctttaagtttatgcgcaaattgtatatttaataaggataagaat

SEQ ID NO: 4349 - DNA, 1264 bp, Arabidopsis thaliana landsberg
atggtagaggagagtaatagaggtaatcttcatcattttgctaatagaaaatcgtgattacattaaaaagatattcgccaattggtccacaaaaccaacttaacttcctttattgtttttcaaaaatgattaaccgttttacgcttactaattaacttgtaaaattaaggataccatctaactgcatccaatttatacttcaaacatttacattaggcaatcacataccttaactgctgcaccaaaagcagattcaggactcttactttcctgaaacattgttgggatactttccagcaaaatctctaggtgttgacggcactgaaatccagtagaataacagagaataagaaagagattaggaattgacactgtaagaaatataagcagggcgcacccggaacaatgacaagagcttacctcagatagctgaacaatgacatctgtttctaaaggtgtatacacatcttgaacatccggagcaatgagcatcaatggctgcatgtaagcagaacaaattaaattcaaatggaatccagcaaaaccttattctaaaaagagagcacacattctggaaaactatagcgacagggaagtgcctttcaagtgagaaaacaaaacagtataaatttattcagccaagtgacagaaaagaatctttggtgcaacataacatcacatcaacgatactataggaagaaagatctccgcagaaaaagataactccatttccccttttatatagtttagcaaaagaaacaaggatataaaataacgtaacaaatcacctgctgcagtgcacgcttcaaattataaaagtgaattgttgagtcaaacgtggcaattccaacaaatgtcctaggaccttcctgcaaaatgtatacaagactttgttaaaataatgttgaagcaaaacatgtctatttagaatcattactctagtgaccatatcctagcctcatttcccaactcagctgtttataagaaataaaaaataaaaaatacatgtctatcactggaaagagcgagaagatttacaggaaggtctgagaggacttgctggattgcactgcaagcagctgcagttgcacctgtttgaatcgcgttcattgagacatcaatgaggaagaaatatactgctggcattggatctcgtacctgtaaaaaagatactgatatttatcttcacctggctgcatggataaagtagcttgctttgcattaccaagcaaatataatcatcatacattcccgcatagaaact

SEQ ID NO: 4350 - DNA, 5797 bp, Arabidopsis thaliana landsberg
attcagtttgatatcacgttctacgcttaccattttctttctcgcctgtctctttctcatttaatagaattcatgcccggtggaagtgtatatgactatctacacaagcaaaagggcgtctttaagcttccaactttgtttaaagtagctatagatatttgcaaagggatgagctacttacaccaaaataacataattcacagagatttgaaggctgccaacctcttaatggacgaaaatgaggtaatacttgcaacttattactatatatctttgtcatccatgtacactagtacgtttgtagttggaatgtacgaatctactatatactttggatgaaatactgctccatgttaatactcaaatagtcaaattacatgtttgtgctgcatcacatatgatatctccttgagcttgcgttatacaggattttaaccatcatattcttctcatttacgtggtgtccactacctagttagttcttgcttctgtggatagcaattcagttgcagattcatatatgtgtcttggtttattgttacaggtggttaaggttgcagactttggggtggcaaaagtgaaagcacaaactggagttatgacagctgaaactggaacatatcgctggatggctccagaggtacgtttttcatggtggttttatatataggctgcattgacccgcttcccccataagacacttagtaaacctggttacctggtgacggttattagattgactagtatctcattctgagactatgcttttctgaaattcaggtgatagaacacaagccatatgatcacaaggctgacgtattcagctacgggattgtgctatgggagttgttgactgggaaggtacttgcgtgactctttagtctgaaaaacaaaatacatgacctaaaatggctgatagtgtctaactcatgggttgatgacttgatgtgatggcagcttccatatgaatacatgacgccgttgcaggcagcagtaggggttgtccaaaaggtaatcggtgtgaagaatgcattgtgattgtaaacgttttcaacatcatcttacaaaagagtgtgattggcagggattaaggccaacaataccaaagaacacgcatccgaaattggcagagctattggagagattgtgggagcatgattcgacgcagagaccagacttctcagagatcatagagcagcttcaagagatagccaaggaggtaagtaaaaggatttggataggatgaaatgaatatgtgtaaatggaagagtaaacagaattgagtgtgtgtgtgtgtgtgtgtaggtaggagaagagggagaggagaagaaaaagtcgtcaacaggactaggagggggtatatttgcagccctgaggagaagcaccacacatcattgaaaactgtaaagcagcaaattaatttgcagatgaatgataatgagcctctgtatttgtttgtgtgttgctccccttattcaattgattttgatttcctttgtaagttgctgcaccacactatctctatctcaaaaaaaaaaaagcttttaatgaaagaaaaaactcttcatttagcatcaaagcaaatgcacccaaaaatagaaaaaaaaaaaaaggctcacgccgaagcaataaaaccaccacaaaaagtcaaaagccaaagtcaaaagagaggcttcgtgggccctaaaagggatacactttggttctctgtttctgttcttcttctctaataagtttttctctagtcgttcaatattacttaacgataaatcagactttttaaactcgatctggtggggacgatgagtggaaggccggcgaaaaggccgaggaccgaccattccgtcgtgaatgtctgggaaagggagctgggtctcttacccaatcgcagtttctcaaaccgtttttcagcatccgaggtctattgattcactctttttctttctttctttagggtttcgttgaatatattgcgttactttgctcctttgtttatgtttaacagccacccaatgcgttacgaacaatatgctactcaatgaacgtttttagattcttcttctcaattgtctttaattttactctaattgctttcagaagaatgtgtttgcaaatgataaaatctttattgtccaaatgtctagtgataggaaaccaaacaactatcttaattagatattgatgattttacaaaagcaggatctattgcggcgtcttggacttgacaagaagcttgataagcataagggatgtgtaaacacagtgagtttcaatgctgatggagatatcttgctttctggttctgatgacagacaagttattctttgggattggcagactgcttctgtcaaactctccttcgattccggccacttcaataatattttccaagccaaatttatgcctttctctgacgatcgtaccattgtcacatctgctgctgataagcaggtaccactctgcctctcctcttcatacctcctaccgcgaaccacacctcttgatagctcctcatgttacaactagcttatgttgatttttgtaacaggtccgctattccaagattcttgaatctggacaggtagagacttctttgttgggtaagcatcaaggacccgtccacaaattggctgttgagcctggaagtcctttctcattctatacttgtggtgaggatggggctgtcaagcatgtgagttgtatttttcattttgttttcttatcgtctgtttttatacctaggccgcctaaaacaacacgtattttcagtttgatcttaggactcgggtggctacaaatcttttcacttgtaaagaagcaaagttcaatttagttgtctacttgcatgcaattgcagttgatcctaggaaccctggtcttcttgccgtggctggaatggatgagtatgctcgtgtctatgatattcgtagctatcgctccgagggttggtataattttacccaacccatagaccacttttgtcctggccatttgattggagatgaccatgtaggaataacaggtctggctttctcggatcaaagtgagctccttgcttcgtatagtgacgagttcatctatcttttcacccctgatatggggcttggcccaaccccatatccatcttcaactaagactgaggagaggatgacgcctcaggtttataaagagcacacgaaccgtgaaacagtcaaaggtgtcaacttttttggacccaagtgtgagtatgtggtaagtggttctgactgcggccgaatattcatctgcaggaagaaagacggagagcttctccgtgccatggaagcagacagacatgttgtcaattgtatagagtctcatcctcacatgccactgatgtgtagcagtggaatagatactgatatcaaaatatggactcctggaggaaccgagaaacctctgtcgccaggaaatgcgaaacaggtaatgccacatctattgctaacctcgtttgcttcttttatttttggtgtttgaagactcggaggatatgctttagttaacaagaatgtaactttggatacaatacatgtgactggaggctgaatttggttttggaaggcaaactaaatgtttgtatgtttgcttcttggaaacaggcttcgggttttggtaacccacgatggttcgacggatattatgtggatgacgatgatgattctgacgatgaatctagtgaagagagttcagatgatgatgatagttcggaagaggaggagaatggtgaagttgatgttgagattacgaaggatgatgataatgatcatggggatgatgatgatgatgaggatgaggatgatgatggggatggggatggggatgagggatgagatttgtatagacatgtatttatctaaacgcaaaataaaacagcatatggtaacagtaccaaagaaaggattagttatagtttagttagatgtcatcatcgtggatacaaaatactattcaatagacattttcattcttaaccaaatggatcacatacataatcagcttctgtaatgtcagattgtcagtttcttcaatgaactagaatttccaactatccaaattccaaagtaatttaaaatgtaaaagatgtcattggtaaaatgggtttataatccaggaaactttgagcccaaaaaaggcccatagatcatcgaaggcctttgatatctgcgacggcgagatcagcttcgtcttcctccaacgctcgatttagggaggatggtggtttctccggggctgctctcaactgtttcaggtcactattcgctccggttgcttcttctatatactttcccactgctttttgatattgtccttagtaatcatctagcttcgattttggttcataggcgtaatccgattggctccgtcacaccggattctaagacgcgatgggttcggacccatttgcttcaagttttctggggatttggtaatttacctttctttctattgcggcttaacagcttaagaagcttttcacttaagctctgtttgagtgtgtagagtatcaatgggagagtcagtcataaacatgtgcgtggaagtggcacggtgggatctgtaggttccgctcgtgaaagttggagctctcataagaagcttcccgaagaagagcccttatggctgagtcttcttagagacatggtctggtatgaaattctcccactgagtctagcttttaatatatatatctgctggaagagtctgaatgttgcattatattgaattgcatttttcttgtgagaaggagcacgagatctctcttgtctttcatggctgagcaaccaagtcagctgaaatacatagagtggccaacttttgcaagcacggtatgtcttgttgttgttgttacaacatatgagaaagaaagagatagtttgtgggtgtaactttgttttttttgttttggtaacaaacagctaaagactgctacactgagtctgtgtctggtagctgtattcattgttgcgctatcatcggtggatgctgctctttgttacatattggcgttgatcttgaggaaagccccatgaggaaggcaactccattatcatttgtctcttgtagccttattgataggtaaatgtttttgatgtagatagaatgcaggaggatgtactcaaaatcaatgtgtttctaaaagttgaattgaaatgaaacctctctggtctagtatctctcacacattaagggaaatccaatcatatatgtcccaagcaaatcacaccataaataataaggaaggattcaacatgttgttggtttacaagtaagagaataagatgatgctaggtgctacttgagaacaacagcagcattgcgaatggagagatactggtggacttggtcggaagaaagtgatctcacagtctggaaaacatgagcattagcatagcggaggtttgttcttgggtccacataaggtgcctgcgagggattagagaagctcattgagttttgttgtttttgggtagtgaataaatttgtagaaaagaatcgatcactcaaaaacagaataaaacctcatatccagtaatatcgcaaagtctcttgcatggttgagtggaaggaggcgattcaatgttaacatctgcgaggcacaaagaagatttgatttttgattcaaacagagtcaaaaatccattcaaagtcagaaatcagagagagagaaaagagttacaagtggggaggtcgggaggaagatctgggaagttctcagcttgaagaatctgcttgaggtgtttccaccttctgctgcttgattgtgcttttgggtactttt

SEQ ID NO: 4351 - DNA, 4992 bp, Arabidopsis thaliana landsberg
  unsure (1)..(4992): unsure at all n locations
taatacaaaaacataaacttgtgtgctaatggcagagattggattccttgctatatatactcgtgatcaaatttagaaactgaaatattaactatgaaagaaaagaaagtcgatagtgtatatagacttacaccaacaatgttaactccttttcacatgtcactataattttactgtgaatatgaaaagttccttgacaaaaataaaacaaaatgatataaatagatcatcaacatctaccattctatttttagatcggatacaaaaacagatcacacgacctatatattctatgcccaactttaatttgaatcttttgaacaaaaaaaacttaatttgaagacttagaaaaacgtacgtcccctaaattaaatgcgtatctgatagtatccaatgtacttattaatttgtagtacttgttttttttgtagttcgcatgtatccaaaaaattgcggtgaaggacatatagaattaaaccggacaaatactgacgtaatccgaagcggccggttctggtttacacgcgtggagcggtaggtttacacgtgtcactcaaaaagcaatacaaaaagggtactttggtaaaatagacaaacatgccaagtaacgtttccgcttctctgcattaaacactcgtcacctttataattcctctgcaacgcagcgagaatgagatctctctctctaaccttaaatggaaacaatcgatataaattaagtagagaatacaaaatattttgtaattaaggaatttaattagtaaatttttgaattcgtaattaacaaaaaaaaaaaaaattaggaaaagaataaattttgtacggcgataattacagggtttcgccgccgagaggaggaagaaaaattggttttctgatgatggaagagacgacggataacaccggaacaatcagctcgcagaagaacgttgctgcttctggtcacaatcatcaccaccgttacaaatatatctcaaattacggcgtcgggaggcgttttctgttcttcgcttcctgttttggatttacgctttcgtggctgcgacgtacgcgtggttggtgttccggcgcatatcggtcgtacggatcatgtatcgtcgtcatcgttaggttgcagagaggacaatgaaggttcatggtccattggtgttttctatgaagattctcccttctctctcaaaccaatcgaaaccgtgagtttctcaatttttttattttaggtctgttttttttccttagatcacaggtaattgtttgatctcgggttcatgaatttttttcaatcaaaacagagaaatgtatggagaaacgagagtggagcatggcctgtgactaatccagtaataacatgtgcctccttcaccaattctggtcttccaagcaactttctagctgatccttttctttatgtacaggtatgttcaagtctgatctctcttttttgctctgtttctcttctgaaatctctgaatttgggtgatttgtggccattaaacagggtgatactctttatctcttcttcgaaactaaaagccccattacaatgcaaggggatataggagctgctaaaagtattgataaaggagctacttgggaacctcttggtatagctttggatgaagcttggcacttgtcttttccattcgtcttcaattacaacggagaagtaagtttatcagttacctacaatgacatagttttagatcatgcatttctctaactcttttttattcaaaagatatacatgatgcccgagagtaatgagattggacagcttaatctctaccgtgctgttaactttccattaagttggaagctggagaaagttatcttgaaaaagcctcttgttgattcgaccatagtccatcatgaaggaatctattggctaatcggatcagatcatactggttttggngcgaagaaaaatggacaactagaaatttggtatagtagctctcctttagggacatggaagccacacaagaagaatcctatctacaatggtaaaagaagtattggagcaagaaacggaggcagagcgtttctatatgacgggagtctttatcgtgttggtcaagattgtggtgaaaattacggcaaaaggatacgtgtttctaagattgaggttctttccaaggaagagtacagagaagttgaagtccctttctctttggaagcgtcgcgtaaaggtaaaaattcttggaacggggttaggcagcatcattttgatgtgaaacagctaagttctggtgaattcattggtcttgttgatggtgaccgtgtaacttcaggcgatctgtttcatcgggttattcttggttatgcctcacttgcagctgctatttccgttgttatcttacttggctttttgcttggggttgtgaactgcattgttccatcaacctggtgtatgaactactatgcggggaaaagaaccgatgcgctcctgaatctcgaaactgcgggtttgttctcagaaaagttaagacggattggttctcgcttgaaccgagtaccgccttttctcagaggattcgtgaagcctaattcctccatggggaaatttacgctcggtgttatagtcattttaggacttttgctcacatgtgtaggcgtgagatacatctacggtggaagcggagccgttgagccttatccattcaaaggtcacttgtctcagtttacgttagcaactatgacttatgatgctcgtctctggaatctgaaaatgtacgtaaagcgttactctcgttgtccatccgttaaagagatagttgtcatatggaacaaaggaccgcctcctgacctgtccgagctagactccgcggtgccagtcagaatcagagtccagaaacagaattctctgaacaacagattcgagatcgatccgctgattaaaacccgagccgttcttgagcttgacgacgatataatgatgccttgtgatgacattgaaaaagggtttagagtttggcgggagcatccagagagactggtcggattctacccgcgttttgttgatcaaaccatgacttatagcgcagagaagtttgcaagaagtcataaaggatacaatatgattctcacgggtgcagcgtttatggacgttcgctttgcctttgatatgtatcaatcagataaagcgaaacttggtcgggtatttgtggacgagcagtttaattgcgaagacattttactgaatttcctgtacgcgaatgctagtggatcaggaaaggctgtggagtatgtgagaccgtctttggttacaattgacacttcgaaattttccggtgtagcgattagtggaaacacgaaccaacattacagaaagagaagtaagtgtctccggcgattctcggatttatatggaagtttggttgatcgaagatgggaatttggtgggagaaaagacgggtgggatttgtagatcagtagagttacttgtagggcaagtaagtagttcttcaaaaaaaaattaagccatagccctttcttgatatattttttgttgtaggttcaaaatgtaactttagcttcttcttcttcttctttttttttttttttaatttctctttcgtattgttagatattttagaaattggtgtgcatggcgaatggacaacgatttctgattttcgttaatattttcttaggagcaaatatttcgtttacgtatgttcaatcataaatttaaaggtcaagtttgacatatttttcaaagtttggggctgtcattacagtattcattcaataacagtactgggctgaattgcagtttgggctaaaggacgacttgtattgggctgaacttgtttaatgaccgtttgtgtgttatacaatactagaacacagtcctactttgaaacaccaaaaaagagtagaaattcaacacacattgtgaagaacacacagaacaaaccacacaatatgtactagcacaaaccagaattaaacatttaacaatatgtactcaacaaaccagaatgctatatctactagactactagtagtatagaatcataattgcacattaacgaaatataaaaatataatcatccataattatttattgtattttggaatgaatctaaatttaagcctaagcctagtaatgagtgagagcattggttattgaatcgaacgaatcattgcaaagagccaaagatccaaaatttgcaacaaaaacaaaaactctaccaagtgaagaagaaagagaagtgtcacatctctctctctatctctttgatccaaacaaattccctcatatatctctgctctctcttcccaatattcttcctttttcttcaatcgagattttatcgctttttgattcgagaatttcgaaatcggaacccaccaccaccaccctccatcgtcgccaacagatccaacggttctctgattatttttatttgaactaaatgggtcgcatcgagatttagaagaaaagggaaatgttggcaatggagaaagaatttgattcaaagcttgttcttcaagggaactcatccaacggtgctaatgtttctagaagcaaaagcttctcctttaaagctcctcaagaaaatttcaccagccatgatttcgaatttggcaagatctatggtgttggttcttactctaaggtttctattttcattactattttctattgtggctttgattcatgaacccagctcgattctctggttgatttttttgttgcaatgtggtgttgatattggaaaggattggtttttgacctgtgggtgattcatattaggttgttagggcaaagaagaaggaaactggaactgtgtatgctttaaagattatggacaaaaagtttatcaccaaggagaataaaactgcttatgtgaaattggaaaggattgttcttgatcaacttgaacatcctgggatcattaaactttacttcacgtttcaagacacatcctcactatgtaggtatttctaattctaatgaacattcctgtgcttgaacattctgta

SEQ ID NO: 4352 - DNA, 3257 bp, Arabidopsis thaliana landsberg
  unsure (1)..(3257): unsure at all n locations
aacataaatttaaataaaaaagattgcttaaccatcgggttagagaatatttatgtcagtatatataaagagtaatacaaatataaagatttattaatataagattaacaagcaatgtatgtttttttttaattatcaaaaatatatttttgatatgaaataaaaaaaactctcgtgattatttgttacattgttaaaaaattaactctaaaaaaatatttcttcttataatctttcctcctaatttagcctttcttattagtcacacccaattcaaaaaaaaagctaaaatatttggtaaatgggaaattctactatgatgcatagaatctcgtctgccttgcgttaaaaaaaacgttatttggttattatgatgtctataaaattgatgcttagcttaggctagcactagtttaaaaagaaagttgataatgtcatggagactcaaaattttaattgcaaatgtaagaagcttgtgatctgtatttgttgctcgacgtgccaactagttaattagtagtatagactacactaatattaataaccaagtcaacagtacaattttttagtaaagttcatcttttcaacattttactaattatagtttattgacttttgactgaagaaaaaacgttaattaataatgagtgtgttacccttttcctctctctctccatcgacccttaaatttctgcaactttcaaagctaatcctcctccagcatctcacggatctactataccttttcttccctttttctgaattgaatcatatttttttttaatattatacgatcaatacaaacactgctacaaatgtatcataaatactctctcactttctcttatcaagcaatcttgttgaagaaataggattttgagaatttgatcacagttttgaaggaagaaagatcaaacaatggagtcgataacgttagatatagagctgttgcagttaccagagacatcgccaatgtcgatgaaatctaatcaagattttgttaagaagctctttgatcaatggcttgctcttcctgaaaccaatcgtttggtaaatgtttcttccatttttcttgtatcataatatgtattttctttaatggtgacataatgaccgcactagcacaaatcactagaataagatgactatggagatatgaaattaagaaatatgtggggtatgaatccggacggtaacacaacgaactagcaaaaatcactaggaatatatgattctggagatatgaaattaagaaataagttttgtaatgtctttaaattttttggatgatatgtgctttttttttttgttgagtcccaatggtgacataacgacgacattagtgcaaactcgtaggataatatgtgttttggtatatggaactaaggaatattggtatgaatgattacaggttacatctttggtaaatgatgcaaaggcaggagtggctttgaatgttatgtgtggaggaggctcttctggcacgaattcagggtcgaatagtccattagcttcaatgtttccggcacgcaatgggcctcctctttctccaaggaattcaactggttctcctcggatcgccagacaaagaactggactatcaaatcttagttctcctctcaaagtagtttctgatcatgttaaagaactcattcctcaggtctaacattttgatccacctttgattttattatcgtatatagtctctctcggcaattttttgttgtactaaagtgattctattatgtattcatgtaatgtatagttttactttgaagatggtcggccaccaccaaatgatctaaaagagcagtgcatagctaagatcaatagtcttttctatggccacgaggatggtttgcaactccaaggttggtaattaatttctcttttaattagatatatcttcatatctcatttataatgactaatttcctcttttgtttctcagaatttaaattagtcactactgaaatatgcaaagttccatcatttttttccacctccattttcaagaaagttgataccaataacactggttttgtgaaaaggtttgcaaattttttcatgtttagctacagagtttgattagtgaaacgaaatgtatataaagttcagagatcataatataaatacctatgaattgtttaacacatgttatatattatgcttttgccaacttctttgcagagaagacttcattgattattgggttaagggaaatatgttaacaaaggagataacaagtcaagtatttacaatattgaagcagccagatcacaactaccttgtccaggttggtttttgtagctgcactatatatatatcaccctttttttgccacattggtagatgatttaattatttatccttctctttgtatatgtatcaactattatttttctggaattatactcgagagttctcaacttcttgagatattgacaggatgatttcaagccagtgcttcaagaattattggcaacacaccctggtcttgaattcttgcaaggcacaccggaatttcaggatagatatggttagtgcaagaatatgaagtgatctttagttcggtttgtttttttacagttttgctgaaatagtaagatatgtttacattagatagaacaaaaatctaaaatgagatgtggtgaatgtaaagttgagtatatgatccattgtaatgtatttgaaaaacttttggcaacagctgaaactgtaatatacagaatatattactacataaataggagtggaaatgggcatcttaccttgagagagcttaagcgaggaaatttagttgacgcaatgcagcatgccgatgaagaagaggacatcaataaggtgttgaggttggtgtcttaagattaattagtaatatgaaattggtgcttattaacggcttttattaagactctctactgtttattaggtacttctcgtatgaacatttctatgtcatatactgcaagttctgggagttggatacagatcatgatttcttaatcgacaaagagaatctcatccgatatnnnnnnnnnnnnnnnnnnnnnaggattgtcgatcgaatcttttcacaggttagctactccacatctgcatttcttatttttaaaaaacttttttctactagctgccgaatgtctttgtcactcggtctacttaataggtaccgaggaagtttactagtaaaaccgaaggaaagatgggttatgaggattttgtttacttcatattggctgaagaagacgagtcat

SEQ ID NO: 4353 - DNA, 1117 bp, Arabidopsis thaliana landsberg
ataatactagaaaatcatactggccacgattagttcggacgtgtttatatctattatccaagttgcgaaatggcttgcatgtaggaaccaaacggcgcatccggcaatggttgcaatattgaaaaactttttaaaattaaatgttttgatgagagagatggtgtttgcattccattgacaactaaactcgtgaaaacattgtaacaacatatatacaatgaggacattatgtttgtttaactgatctttatctgaaaccgaaccgatccgagtaagtattaaaatacaattctgaaaagtaaactaatttgatttcattttactgattctttagagatcctagattcatatgttttttatataaaatccaaatcaaagttcaaaactgtatcaaacaaatccgaatggtgtttagtttccattcacccttatatatcataaaccgaacaaattaataaaccaaataatgttatccgaaaatcaagggccccataccctagcttcctttttttttttgattatattactcattattggtccgctttttatagtgagagcttaccataaaattctcaaaaggggacctcaagtgagtcgtcccatgcttcagcacttccattagaagcatcttcgacatcttcttccattgatagcctaatatattctctatgagcaaaacgatcccactctgtccatgtcggatttgcgcgctcctatgtatcagcaatcaatcattgagaaatgaatatctctataagtatgtatagctagctttaaggtatttactatattttgtgatacctggcggatgaggaagggatcacgcgtttcaaacgccataaacttgttgaggttaaaaagtatgttgaagacatttccagaaagtttagaacccttcaaatcatttagacaaatgaacccttcgtcctctggtttgaccatgtcgaataattggcacaaaatatcctcaaacaacaccgcctcttgcgccatgcattccattctatgtagctgctcctcgtaaaagaattgcagctcgttccgcgtcaaaactccatttgcatccaaatcaatgcacttgaacctatatcatcaaacatttataacagaatatagc

SEQ ID NO: 4354 - DNA, 1114 bp, Arabidopsis thaliana landsberg
gacttggatgcaaatgggattattacgcgaaatgagatgtaattcttttatgaagagcagttgcatagaatggggtgcatggcgcaagaggctgttcttttccaggatatcttatgtcagatgattgatatgatcggacctgaggttcaacaatatatctcttgttttcttctttctatatttagtatagtcacagaagtagtttgtgttcccagttttctttctgagtcttgtgattttgttttgtgtttgattgttttttatttccttccacagaacgaaagccatataacgctgcatgacctgaaaggctcaaagctctctggaaacgtcttcaacatcctatttaatctcaacaaatttatggcatttgaaacccgggatccattcctcattcgtcaggtactaatcatctaatttaccttgctacttcttcacaccaccacatgcgtcttataacatttctaatgtcaaacggaaacaggagcgagagaaccctacattgacagattgggaccggtttgcacatagagagtatattaggctatcaatggaagaagatgttgaagatgcatctaatggaagtgctgaggtttgggatgagtcgtcgctggaggctcccttttgagttcataaaggtaagtcaacggaaaaccgtagtgtctagaagataaaactagtggaaaaggattagaaaaaaatagaaactgaaaaaactttgatgttgatgcgttgtgcaggggttattatttcataatataacttaatcatgcagaagagaaatgtaaagtccctgagaagaacatttggagctttgttgaggaaggaaagtgaaaaacaaacgaaaagccggtagtatcctctggtgaataccatacttagcttggatttgctttctaacttctctttatttgatagctgattctacagttatatttattaacaatcgtctagattgtacaggcttcttcacctgtattgcattcactttgctctgatgattctatctctgggtgttactacatcatctacagacggtgagactggtgaatttcaatgctatagttcctttaattgttggttggttcctgaagacatacgatgtcactgagat

SEQ ID NO: 4355 - DNA, 1048 bp, Arabidopsis thaliana landsberg
tccaaacgtctcaagttcctccaacgtctcgcatacctcaatgttgggatataccctttcacgtctctgtttctcatcctctattgttttcttccggcattctctcttttctctggacagttcatcgtgcggacgctcagtatctccttcttggtctaccttcttatgatcaccatttgtttgattggcttggcggttttggaggtcaagtggtctggcattgggctggaagaatggtggagaaacgaacagtggtggctcatctcaggaacaagctctcacctttacgcagtggtccaaggagtcctcaaagtgattgcagggatcgagatctcctttaccttgacgaccaagtcagggggagatgacaatgaagacatatacgcggatttgtacatagtgaaatggtcgtcgctgatgataccgcctatagtgatagcaatggtgaacataatagcgattgtggtggcgttcatcaggacaatataccaagcggtgccacaatggagcaagctaatcggaggagcatttttcagcttctgggtgttggcgcatttgtatccatttgcaaaaggattgatgggacgaagaggcaaaactccaaccatagtttttgtgtgggcaggtctcattgccatcaccatctctctactgtggacggccataaacccaaacaccggacctgcagctgctgcagagggtgttggaggcggtggttttcaattcccgtaattaaaaaagcattcatataggcgacttgagagttttgtagactaatcacaagaaattaatacgtatactatctttgtttctttttgtttttgtttatgttcctggtagtaaattttcagataactacatgtatatctggattgagatgtcatgactgtataaatcagcctttgtatcaatcatttcgtctttaaaagtcaatttttcctctcctccactcgcaactgatagtgaaccatacggtaagagtaaaagaggatgggccttataaagtaaatgaagagggagtgggccgtataaattataataagaagga

SEQ ID NO: 4356 - DNA, 4118 bp, Arabidopsis thaliana landsberg
tttctaggcagaattattcttttagttatggtttatagattatggacccccttgatccgtggacccctgagtattgcactgtcctcctatctaagccgacactgatacgatttcgttttagtaatcaaatatctagagagttctttaaaaacattgtccctccaactgcaacaactacaagttaaactaaaaacaattataaaaaaaaacaaattatactgaaaaagtattggacatttctgaaatatttttaataaaaatcattttctaaaaaatactgtaaaaaaggtatttcgaaatacgctaaattactgcaccttttaccttgatcaatgcgtgttctacccaaaaaaaatacaattaactattttagtaaatttgttacgctaacccgtgctaatgagctattctagaaaagagcaagtccagagcatctctattgtccatctctatatttttttctattttagagagatggtctaacaactaaatgagcttcacaagatttttttaattaatatacatgacatgatgagaatatatattggactatgcatcagaccatgtagtccagttttcaaactctccaagtttggactaacacgctcaaatccatgtgtgctttatataatttatttcagtagatgtaaaacccttccccaccagcggctcccctatctgaggctgcactagtccagttgactgttccagaagtattaggaactacaggaactgtggacatgttcctcctccattctgtcttctttgacatgtgtctaaacaacttgtagcctaagtacacaaacaaaccccctaatgtcacgctagagatagcaagaatggcgtaaaacaaccacctcgttcctcttagacgcggtaaaattacccaagccgctgctacataagcaatagcaatagatataacagcaacccacatcatccaatgtgttataaccaagaatttcatgagcggtttcgtcctataaggtatgatactgactagaagaacgacgatgcatagcgatgcaaacaacgcaatgttgttgcttattgaaaagatcttgaaggctagcatttttcccgcagtcgattttcctatagagggtccttcttggtagacgccacctggaggatttataccacctgtgaaagcaagcgacgcaatcaaaaccgctactatcgtgatcatgttccttgcgctttgcaatgcctctgcatgcatctcacgttcgctttgtgtagggtctctatacgtttctatcatccgcctctcaagttttcttatccgatttattaattcggtttctgatgacattaccaagtagttggtcggcacgttcccttgactatgattttgaacagggtctcgaattcgttttgcctcaatcttgagccacttgcagatcacaagataattttcctcatctatgctgacaagatcaacggcttcagaaccgaagttgttcttcgcagagagatctattgttgtttcataaatgatgtacaaaatcacctgtaatacatttaattaatagcccaattaacgctttagtgtcttaacttatgacaacttatcatacacacttagagcaaaaagaagaaaataaaacaactcacagggtagcagctggaactggcagcagcgtgtagtacagtgttccccaagctatctagctggaggagaattgaactactatcaatacaattctcagccatgaagatgaatgcttcaatgttttcgtgtttagcagctatgtggaagacggtttcttgtgctgatgtggatatgttaaaagacgtcggagccttgtcaaaaaactcctccaggattgcaactgaacatctcatgatcgccagatgtaaaggtgtgataccgtctctgttcactctttctgcaagtccttcatcaacttctagcagcatttttaccatcacgttgctgtctacattgcatgcataatgcaatggcgaggatagttttccatcaacttctttagctatgtgtggaaacctcgccaggattttcgttgccagatctgatcatcgccgatccaaacaaattcaactcagcttatattattaaatggttttcaatactacaaagaccatagatcatgtttattccagcgattggtttagagttaatagtctcattttttaaaaaaaatcttcgttacgctaactcttgttgcgttcgaattgttaaaggtcaaaaatataataaaataaaacaaaaattaatactaatttttgttttcttagctttattcgtgagtttaacatatgaagtaaatttttttttataatgttttatgcgaaagctcaattcttgtccctttttctctttcaaactttcctctgtttcggctttcaaattaattttcctaagaatttaactagaagtttaagctttcagttattaactactcctataacttttaccaaacaaaaaaaaaaaaaaaaaaaactagtcctgtaactttaaatttttttttttttttcattgtagttaaaaggtacagtatatgtttattttctcgacactaacctgtgtattctccaaaaatggtcgcacaaaattcaccgatcgtaatcaaaggtaattcttcgagaatgagactagcagcatcagggtgattgtagcggcaagccacgagaaaggctgtttctcctcgttcgttgtgcgccgtgaactcggtattttctgctgccaatatctgagtcactatggttccatgtccccaacgagcagcaacatgaagaggagtgtcaccattgaggttggtgacaacgacaagagaaggagaaagcttgattattgtctccacaatttccttatgcccaagcttagttgcgaggtgcaaaaccgtcccaccaagagtctcccagtgatatgtttcccacaataccgacggtttctcctcggcgagaatgagtaaagttgacacgtcgtttctgaggatagcatcgataattggggcagaaatcttctttaccaaaggtttgaggagacttgggtcttgaatcattagcattttctttgtaacagtgcggagattagacaagatttaatcacttgatgggtgctttaaaataattgtttgatgctatctcaaaaaacaatgctggtttaagagtcatccgagctgttttatattcctataagtttatttcttcttgttccaagaaacatccgttaaaagtccacggtccaccccttgtaaaattcaacaattttattagtatttatatcttataacaaaaaaatatattctttataaaaaattcaagcttagaatacttacatagattcattttatagtctggatttgaaagtttccactactttaattgtttgttccacttgtaaataacctctgactttttattggttaattaatactatcacattttaacggagaaataagatataggtacctttttcgtgttattttcctacaaggtatctatctcatagaggccgtgacataggcccaaaatgtttccattcagaaaatgaagcatgcaaattacactggaaaggcaaatagtcttaaaagactacaatctacaaagacttcttgtttgggttgggggcgagatcaaataacttaagacagagggtcactatcgaaattagagaagaaattagtcctcaaaaactaaattctgaagttgaagctcgaatgtctttgttcaaagactttatttagatgtaaagttatgtcttgtaaccaccaaacagctccttttcatctacactctcaatttttttaacatatgtatgttgcattgcctttgacttgtctttctttctccaacttctctccttcaccataaagccaaatcctaaatccaaattccctaaccgaaccgaattgtaccgaagatgttgagctaccgcgcgaaatgatcataaaaatgtgtcagtctattgattttaagagtttcatgattcgaactgagtggtataccgagtccaccggaaaaaaaaactaagcttttcatacaaataaaaaaagaaaaacaataaatcttaattacctaaccgataaaacctataccaaaacgtactaacaagaatcgtgcgatattagtgacccggtttagtaatgaag

SEQ ID NO: 4357 - DNA, 1106 bp, Arabidopsis thaliana landsberg
ctctttgctttctcagaaggctctgctccatgttcctcgtatggtctcattgtgtggacatagttttgatttctggacaatcaggtgccgcgtcgaattccctatctcctacctgaatcagaaagaaaatgcggtcaagagtgaagatcctgcaggaatcttacgttgatagtttggttcagataagcttctaatcgctaaggcaatctacattctaacaagaatcaatttgtgttcacttagtcaatattacaagttgttcttatcaaagtcactactctttcaaggaacagagtatcgtccctggaacttcagtctcttcaaactcagataatccatttctttagaatgttgacaaagcaatgaagaaatacaaggctttgtctattaaaccaaaacggtgtaactcatacggaacctcgtgtagtgacaatattgggatatgctttgtctacaattattcacaaactcaccaacggttttgcaaaacaagacagatttttgcacatagattttgtaaatccaaattaatctccatatctcctactaatctctaatatatacttggaaactgatgaaactccatcaacttacgggtctagcttagaaatgtcccactggaaacaataacaaagcttaaagacaagaggtatatacttaacagatttgtctagcgaaaataggtgtcactcattcaatcatatactaaacttcaagacaagaggtgacactcattcagagtcacaaactcacaaaggctttgcgcgacgaaacagagaagagccgtaattgtcacgagttttggtttactggttttgatattttcaaattcagaaaacttattccaatctgtgtggtgattgttgttgcctccgttttttaagagccggaatcgtcaatccccgagttttgggcagccttcgtttactggttttgatgctttcagtttcagagaacttgaaaccttctccttcatagtctccatgggtgggatcactatccgccattattgctgcaaaaaactcgtcaagaaagtccacttcgctgttgataccctttatttcatagactccatcttcatctccatcttcatctccatctccatc

SEQ ID NO: 4358 - DNA, 1761 bp, Arabidopsis thaliana landsberg
atcatacaccatataccccataaaaggatccacgtccaaaattcgactttcagaaagataaatgaaagaggagacccacgaacctccatctgcaaaattccaatccaaatagcatagacaaggaaatgagaaggaaaaacagagagtcagtgaatgtatagcagaatgtaaactgactaatctgaagtggaacatacctctctatatcgcatcaggtaaaccttgaggggatcgatgtaatcttcgaatcctaaagtggccatagcccaaagcaaatcatctccattgatggtcttccttttctctctttggcacttatcactagccctaaaaggcaaaacaatattccaaaatcgacatagtgactttgcttaacaacccaatgaatataacatcaatctaacttaacaaagaagagggctttacacgctataaccaccaaagcaacaaaaaggtaacatttttgagaaagtagagaaagaaattactcgctggtgacgaagctgatgaattcagagacacattcctgcatagtctctttagcatctttagcgattttgccatttagaggtaaacctctcttcatgatacggcttatgttagcaatcggaagaaacctgtcctgctcacgaacattcaaagacctcgggctctgatcaccgccactctcatggcttccaccaccaccaccaccggtttgcgattcggccatctcagaaaccctagataatcaggtagagattgggaaatcgggagaatcgaggaaccaaacccagaaagcgcgaagaagtgattagaatacctgaagaagaaggagaattcgaaaaagagcgggagacggagagagaaatgatgattggaggaggagacggagatggagagagagatttgatctgatctgatccgacgctggagaagataggagcttgtctgcgattcaacgatttagggcttttttatttttttatcgacaccgttcattttttttttgttaatttgacaaaaccaaacaaacaaaaaaaactcttttgttttttcctcaacaatgtttctttgttctgctttttttagtaattaggtgaaataaaatatataagatttatttcaatgtagtgaatttttttcttctatcatgtaaactatagtaaaaaaacatgatttcttttttatatacattgtatttatgtaagtggatttaatttatctaaatagttgttatgataagtgatttttctcagtgacatgtaatttcttcttatttaattgtctaatttaattatttaagtggtttactgtttttcttgttatctttattgttttattcagtttttattctgtcatttaagcaaatatatatttgtttggaatcaaaatagtattagttttgcaataaaacctagtatagttaattaagtattgtcactgatatctaaaaactaggtagaatgggttagtctctgccaaaaaaaaaaagtcaaatgttttcatgaagtggatttggttgtcattaccaaagacaatctagtgggccgtctcagcatttagtgcgcaacaaaaaggaaaatagacagaagaaaatgtcaaaaggaagatccaagacttgagaggtattcatgtggcttcttaattagagtttcacattctattacaaacttttactttacactcttgactcttctatacatgtaaagtgtaaaccaatgtataggaccaaactaaatttgctactagcagctcacactcagacaagtaaggtataat

SEQ ID NO: 4359 - DNA, 1690 bp, Arabidopsis thaliana landsberg
atgactgctgcagccggtaatgatactttcattttaccttaaatttcaaatctaactttccatctccttttaacgtcggatcatggatccaattgctgagacaggtacattttgttacatcgaccccgagtaccagcaaacgggaatgcttggggtgaagtctgacttgtactcatttggtgtggtgcttctgcaaatcatcacagcgatgccagcaatgggtttaagccatagagtagagaaagcaattgagaagaagaaactccgagaagttttggatccaaaaatatcagactggcctgaagaagagacaatggtgctagctcaattggctttgcagtgctgcgagctgcggaaaaaggacagacctgatcttgcttcccttctgttgcctgcactgagcaagctaagagagtttgcaacagaggatcatgaagtacataactctgatagaacatttcatgtgtcacgtgctcacaatttggttcctctttccccaatatcttcctgtcaggttggtttcttagatactgcaataacacatttctaatcttcacctggaaaaggaataaaattaataaagttcattgattcctgagtcctctctttcaatcatgtagacagaggatgatgcttgggaaaatcctattgacagaaagattggaacttcgacgtaaatcaaagtgaagcgacattggctatctctgagatccgcgataaacttgttcagtttaagcatccgatgccatcccatacccaccacaagaaggtgatttacatgatcacaaacaagccaatgcaaaggaagttgttgtcagtctctcatgaattgtactccaccccaaagttgaatgttgaacttccattgtatcggagttcctatcttgtttatcaaacactttatttttggtctcatgaaaagaaacacatttattatagaagatttgtatccttcttgcaaaatcaactcatctagtcacttttgctatagagaatgccatctgtagcacataaaaaacttttctacgaaactagaaaccgaaatttgagagtatagtcttctttgaataaaaaatggtttgacagcattagctgcgaagaagatgcaaacagtcgcacacaaaaaaaaagttcttcttaaaaccagaattaagggaatacctgtcggagctgcaccagcaatgttagctgacagggcactttgtcaatttgggactatacgcgcttaggctgaacacttagactcgagacttaagagacaaaagcagaagttcacaacagatccacattacatcatggaattttttgtttaagtcgttacctggagaaattccagagatgacgatgagagacaaaaagcttcaagagaaactccagagaggtaaaaaactgattacaactagggatcaagtgtgatactaccacgttccggatcactgaataatcacaaacaaaaaaaaaaacagctagaaaagccaagaaacattaaaaaaatcttagaaatgaaagtagagattagatggtcaactattaacaaatgagccctcaacatacatagcagaacaatcacatagtcatttctctttacataatcacataatcatacagtctaaactatttctctttacaaaatgataaaagatagaaagaaagccatttcacctctgagtcattttgatatcaacaccaa

SEQ ID NO: 4360 - DNA, 755 bp, Arabidopsis thaliana landsberg
cttgaaacagaaggtcgttgaattgctcaagcctgatcacgaaaacaacaaccatataatgaataagtagaaaagatcagatatatgaaaagagaaaacggaaacggagatgaagaaacttaacgtgattctgtacaaacacatgtgagtttgatcattgagattagtaaggggattggtgtaagcaactcctcctacaccccaaaacattgaagtttcacggccaaataacaatcgatgtggaaatgttttccacattatttcctttggtggacttttgtccattgaaccgacacatgcttttatcattccctcggcctgaaaataaacacaaacagccatagatgtgtcaattaagacacaagctcagactccaaaaagaaacgaaacaaggctacttacttgtcccccttgaatatagcaaataaacctcggtttccacatgttggatccgtaagaggcataccaaacgtcaacctttgcgagatcaattctccaggatgtagaagcggtatctacttgctccttttcaactagtgtaccttgctggcttttcccggcgactttaccgtcacagtttccatattttttgtcggccatggccatatgcgggagatgagagagtctatcgttcgacgagcagggagaaaaaagagaaatggtccaatctttgcttctgaagcttcaaagtatttttacgtttcaatttttatttatacatgttttccaatctcttttttttaaataggtttgtt

SEQ ID NO: 4361 - DNA, 3398 bp, Arabidopsis thaliana landsberg
aaaacctaaatttaagcccatacttcaataagttgagtaagagtttggattcaatgtgttgtttctaatagagcttataagttggttaaattactaaaataagtaagcttacaaaatgatcagtttagaatatgttttagtataaatgacaggtaaggtcaaaactaatattggattatgtgtaaaactgtagaagtagttggacctaatttgttagttaattttcatctcaaatttatgtaaactgtctctaggctctttattttttgcccaccaacattttcttatagttaaccttgttttatagattctctcatggccaattgtactttgatatgttaagaagctatgaaaatttagcttacttgtttaattcactttttcatttttttttttgtcactttatcaacctaattttgttgggccatatgtaatgtaaccatacaacgaataaaaaagacagaactcaactttaaaaggggaacctcttcttagaattcatagaagacaagtttaaaatcattgagtggttcacaaaatcataacgatactatagtttcttgcagctaactaatggaactcttacttccacacccatcaaactcaactccactcaccgtcctcggcttcttagaccgagccgcttccgtctatggtgactgtccgtccatcctccacactgcaaacaccgttcatacttggtccgaaacacataaccgctgtctccgtatcgcatcggctctaacttcctcctctatcggaattaaacaaggccaagtcgtctctgtcgtgggtcccaacgtcccgtccgtctatgagcttcagtttgctgtcccaatgtccggagccatcttaaacaacatcaaccctcgcttagacgcacacgcactctctgtcctcctgcgtcacagcgaatccagactcgttttcgtcgaccaccgttctatatccttagtccttgaagcagtttcattattcacacaacacgagaaacctcacctcgtcctcctggacgatgaccaagagaacgattcttcatccgcatcagattttcttgacacgtacgaagaaattatggagagaggaaattcaagattcaagtggatccgtcctcaaaccgaatggcaaccaatggttcttaactatacttccggaacgacgtcgtctcccaagggagtggtacttagccacagagcgattttcatgctcactgttagctccttgcttgattggtcagtaccaaaccggccagtttacttgtggactctaccgatgtttcacgccaatggttggggttacacttggggcaccgcagcggttggagccaccaacatctgcacgcgtagagtcgacgcaccgactatttacaacttgatcgataagcacaatgtgacccacatgtgtgctgcacctatggttctcaacatgctaattaactatccattaagtacgccgctcaagaacccggttcaggtacatgaagagaaaaccggttcactgccggttaattttgtctattcaatttaagctttactttgagattttttgtgattgaaagcgttatgaatgaacatttctctctgtttcggttttatgaactttgaatcaggttatgacctctggagctcccccaccagcaaccattatctcccgagcggagtcacttggtttcaacgtcagccactcatacggtttaacagagactagcggtccggttgtgtcatgtgcttggaagcctaagtgggaccatcttgatccattggagagagctaggctgaagtcaaggcaaggagtaagaacactcggattcacggaagtcgatgtaagggatcgcaaaacaggaaagagtgtgaaacacgacggagtttcggttggagagattgttttcagaggcagctcagtcatgttgggatactacaaagaccctcaaggaactgcggcttgtatgagggaggacgggtggttctactctggagacatcggggttatacacaaagatggttacttggagatcaaagatcggtcaaaagatgtgatcatatgcggaggagaaaatataagcagcgcagagattgagacggttctgtatacaaatccggtggtgaaggaagctgcggtggtggctaaaccggataagatgtggggagagacaccatgtgcttttgtgagcttgaagtgtgataacaatggtgacgggtcggttcccgtgaccgagagagagataagggagttttgtaagacgaagttacctaaatacatggttccgaggaaagtgatctttcaggaggaacttcccaagacttccacaggaaaaattcagaagtttttgctaagacaaatggctaagtccctgtcttgaacaagttcatttaataaaagactatctttgattttattgttcaaaaactatcatgatgattaagatttaggttcgttcaaaactctctttttatcacttttgtaagactaagtaaaataggcctttaaaaccgtgatatggcccaaaatcttgggttcgacaacagatactgtatggtttttcagactttgcgttgtcgcattggttgctttgcttttcgctttctcaatatccgaaacacttaaaccagaaacaaatcttgaactaagcaattaagatgaagggaaccacaggatgccagagcctaccttttcacattagcaactttcgtggtattttgactattttcatatactaatgccatgtggatgatgaatggtgataataatctatactatatattacgataattatatttactagtcattcattcgtcagtagtactcgaaaaagaaagtctttacataattttattgaaaaccggcgagtaaatttggaagtattcactttaatcattccacatggatatttaaaaaaggtgtgtgaattgaaaatttgaagtactttttaattcattttagctatcattcatatgaatgcacgcgtcatttgtgttttaatttgctatctttcagttagtacagtgtttctatcaaacgatatgttcaaaactatgagttatgactcgtgattcatgtgcggaattatgtatacttaagtaatatgatactgttttaataaattatctaacggccgaaaggtaaaggtagaaaaaaggtgagtgaagccaataatcctaatcatgattaacttggaaaaggaataagtggctttaatcagtatctcaattagttttatacgtagttgcagcataactaattggttctcaaatgaaaacttattatacaaggccacgtgagggaaatagcaagattcatataataaactattgtttttacatgttagcttgtaccacaagtctcatcaagtaataaattgagggcaaatctaagagcttttttctctccttaagtcgaaa

SEQ ID NO: 4362 - DNA, 1225 bp, Arabidopsis thaliana landsberg
agaaaacatcaccatgcgaattggtcaaacaagtatatttggccttacgaaaggctttatacttatagcttaaggcccaatacttagagctgacgacacacattgcagcaaaaccgatatcgttttctatatacttcatatctctcttatgagatcacaaatattttagagagaatggttgtatgaacacaaacgacgaatgagatcggcaaaatcttagtcattgacgaagaagacgaaaataaagaagttaaacaaatatgtcatggaccagttcataatcacttggatcttatttaccctccgattttcctttcttagatcttctctctctgttttcgtactcattagcttgcacatcaggcgattctgttttgaagattttcctttttgttctttggattgatttaatggtatttcgtacaagaaattgactccggaactagatatagtcgatttttctgcttgatgcaaaagttattctgaaattggttggagtgccactctgttctgaatagttcttcatatagtttcttatgaaaatagtagcaagcttgtttggaaactaatcccttcttaagggtacaacaataatacaacacaaaataaatgtcattctttacttcattcttggagattcttcttcatatcctcaataactcaagcgaatctttaaggcagagacttagccatttgtcttagaagaaacttctgtatctttccagtagaagtctttggaagctcctcctgaaaaattactttccttggaaccatatacttaggtaacctcgtcttacaaaactcccttatttccctctcagtcaccaacccattaccattactatcatacttcaagctcacaaaagcacacggtgtctctccccacatcttatccggtttagccaccaccgcggcttctttaactactggatttgtatacagaaccgtctcaacctcggcactacttatgttctctcctccgcatatgatcacatcctttgaccggtctttaacttccaagtaaccgtcttcatgtataactcctacgtctccgctgtagaaccatccgtcctctctcatacacgctgcggatccttcagggtctttgtagtaaccaagcataaccgaaccgccttttaaaacgatctctccaacggaaacaccgtcgtgttccacactcttcccggttctcagggtccttaacatcaactttcgcgaattcgat

SEQ ID NO: 4363 - DNA, 1480 bp, Arabidopsis thaliana landsberg
gcggattccagaaggctaagacgttcttaaaagtgcaaaacaactaataaagaagagagaacagcttcatatcatcaggacaggacaccgactctacacgatttgtggtcaacgacaagaacatagagccaaactaatgaaccagagacttgtactgtggtgtagagaagaaatttgtagagtacaatataataataacaacaaagcaagaacgttcttcatcaaggcaaggacttagccatttgtctgagaagaaacttttgaatctttccagtagaagtctttggaagctcttccaggaaaaccacattccttggaaccatatactttggcagcttggttttacaaaactcccgtatctctctctcagtcacagacccgtcatgatacttcaggctgacaaatgcacatggagtttctccccacatcttgtctggcttagccaccacagctgcttccttaattgcggggtttgtgtacagaactgcctcgagttccgtgctgctgatgttctctcctccgcaaatgaccacatcctttgatctgtctttaacttccaagtaaccgtctgggtgcattactccaatgtctccggtgtagaaccatccgtcttctctcatacttgctgcggtgccttctgggtctttgtaataacctagcatgaccgaaccgcctctgaagacgatctctcccacagttgctccatcatgcttcacgctcttcccggatattgggtctctgacatcgacttccgcgaatactgcagttctaattccttgccttgatttctgttttgctctctcgtctggttctagacgatcccactcaggcttcaatgcgcacgagacaaccagaccgcctgtttctgtcatcccgtaaccgtgactcacgtcgaaaccaagcgcctcagccttggagatgactgtagctggtggtggagctccaccagtcataaccttaactgggctctgaagcggtttctgggctgggtgattagtcaacatgttgagaaccattggcgcagcgcacatgtgggtcacttgatacttgtcgatcaagttgaaaatagtcggcacatccactcttgtgacacagatgtttctggctcccacagctgctgtggcccatgtgtagctccaaccattggcatggaacatcggcagtgtccacaggtataccggacggttaggcaaagaccagtctagcaaagagttaatagtgctcatgaaaaccgatctgtggctatgcaccactccctttggggacgacgtagttcctgaggtgtagttaagcaccattggagtccactcgcttttaggacgtacccacttgaacctcaggtctcctctctccataaacccttcgtacgtgtcaagaaaatccatatcagctgatgaagatcacggcacctcgtttccgtcgttgagtatgaaaagacaaagtctctcatccttgggcaaaaacgagacagcttcgagga

SEQ ID NO: 4364 - DNA, 508 bp, Arabidopsis thaliana landsberg
  unsure (1)..(508): unsure at all n locations
cagatccctgatgaagatgatggcatgtcgtttccgtcgttgagtatgacgagacgaggtctctcatccttgggcaaaaacgagacagcttcgaggactaaagagcttgagtgatggtcatgaatcacgagcttggagtcgctgtgacgtagaatgacggagagtgcatgagcgtctagacgtgggttnnnnnnnnnnnnnnnnnnnnntgacatcggaactgcgaactgaagctcgtagacagatgggacgtttggaccaataacagagacaacttggccgcggttgattccgagggaagcggaagagagagttgaagctatacggagacatcgagaatgagtttcagaccaagtatgaacagtggttgtgtggaggagtgaaggagagtcgccgaagacagaggcggctcgttctaagaagccaagaacagtgagaggacatgagtttgaagcgtgtgggagtaaaagttccatagtcgaatgtattgattttttcttttgttatg

SEQ ID NO: 4365 - DNA, 447 bp, Arabidopsis thaliana landsberg
  unsure (1)..(447): unsure at all n locations
gaaggaaaagccgctgatgagagagtacacatcgcgcaggaacgagcaataagtttcaaagacggtgccaacgcaaagcataccggggcggacactcattgcgacgccgctaacaagctggctcaatgaaggagacgcgtggcttgttaaaatcttannnnnnnnnnnnnnnnnnnnnnnncttgatgcagagaaagaatctggtgatggaaagcttaacggnnnnnnnnnnnnnnnnnnnnnnnnnnnnnnnnnnnnnnctgaggcttactaagagaatcatggcgcggtgaggaaggcgagagacgaaccagcggttgaggaatatgcaaaggaggcgacacacagagcagagatcatgtggtatgagagacttagttgtctttacagaacaattgagactcttggttgcgttaacagcaaagctagagctcttgaaggatcatg

SEQ ID NO: 4366 - DNA, 699 bp, Arabidopsis thaliana landsberg
gtgatcaattatagttaccaaaaataaaataaaatgacctaaactccaactcctacgttttgaagttgaaaacattttgaagagtgtttataaatacaacccctagccttttcacaaacctcataccaatacaatacaaaacataaacaaaaatcaaagtatggaactcttacttccacacccttggaactcaacacctctcaccgtcctcggcttcttagaccgagccgcctctgtctacggcgactgtccgtgcatcctacacaccactaacaccggccacacttggtccgaaacccacaaccgctgtcttcgaatcgcctcggctctcacttcctcctctctcggcataaaccgaggccaagttgtctccgtcgtaggtcccaacgtcccgtccgtctacgagcttcagtttgctgtcccaatgtccggagccatcttaaacaacatcaaccctcgcttggacgcacatgcactctctgtcctcctgcgtcacagtgaatccaagctcgttttcgtcgatcccaattcaatctccgtagtcctcgaagcagtctcgttcatgagacaacacgagaaacctcaccttgtcctcctagacgacgaccaagaggacggttctttgtctccttcggccgcatcagattttcttgacacataccaaggagttatggagagaggagattcaagattcaagtg

SEQ ID NO: 4367 - DNA, 5638 bp, Arabidopsis thaliana landsberg
aatcatgcattgctgtctgtgttgacacttttttttactagttggcagataaatttccctgtatcctaatgtcatttgcataggtcggaattgttcacgcaattaacaagctacacaatgatctacccggtgtaagtttagcagtatccctccatgcaccagttcaagaaatccgctgccagatcatgccagcagctagagcctttcctttacaaaagcttatggatgcacttcaaactttccaaaagaacaggtagttcatgtactcttgactggttcgttgctgttaaatattaaaaccacaatcccttcagttacattgacgatcataacattatgccacattgtcattggatttaacagtcaacaaaagatcttcattgagtacataatgcttgatggagtaaatgatcaagagcagcacgctcatctactaggcgaattgctaaagacatttcaagtggtaaatcttcgatgtcttaatactcttaaaggttctgcaattatctgatgatattttttatggaaactctgtgctcttttcttgaacaggtcataaatttgataccatttaatccaattggatccacaagccaattcgaaacaagcagcatacaaggcgtgtcaagattccagaaaatcctgagggaaacatacaagatccggactacaattcgcaaagaaatgggtcaggatattagcggcgcttgcggtcagctagtggtgaaccaaccagacatcaaaaagactcctggaactgtggaacttagagacatagaagatctgcttctctaactttaggaccagagacatgaaacagacatttggaatggttttgtagtatctttgaagccactcatcaaaacccttttcttaaacttcacattttgtcctctcatcactttgtggaaaacacttggctcactcttatatgcaagacaaacagagatggtccttggtccttccacactatcacatggaggtttaacttctcttataaaatattcaccaacaagtgatgttatgtcatcattaaagttggaagtaaatgttaaactttaattttaatgaagtaaatagtagctaattagcttctcttcccgcctataaaactagctcctcactctgtcttctattccataagagaaaaaaaaacagagagatgagtattagaagatttgtgcgtctctctctgctaatcatagctctagtttcatcactttgcgagtctcaaaagaactttgcgtgtgacataagtgccccagcgacggctaagtatggtttctgcaacgtctcattgtcgtatgaagcacgtgccaaagatttggtctcacgtctctcccttaaggaaaaagtccagcaactcgtaaacaaagccacaggagttccaaggctcggtgttccgccgtacgagtggtggtcggaagctctccatggcgtctccgacgttggaccaggggtaaaaacatcattactgtatatagatgaatacgaacatacatgagttgttatgtaatgaaaacgctaacgttttgagttgtttcttaaggtgcatttcaacgggacggtgcctggagcgacgagtttcccggcgacaatattaacggcggctagctttaacacatcgttgtggctaaaaatgggagaagtggtatcgacggaggctcgagcgatgcacaacgtaggactagctggactcacctattggagtcccaacgttaacgtcttcagagatccgagatggggtcgaggccaagagacaccaggagaggatcctctcgttgtttcgaagtacgctgtgaactacgttaagggcttacaagacgttcacgacgccggtaaatcacggcggctaaaggtttcaagctgttgcaagcattacacagcttatgatcttgataactggaaaggcatcgatagattccactttgatgccaaggtaatatataaatacgtaagtttcaagaccttataattgaccttaatgttgatggatttgttattgttttggtgggaaggtaacgaagcaagacttggaagacacgtatcagacgccattcaagagttgtgtagaggaaggagatgtgagcagcgtaatgtgttcttacaacagagttaatggtatcccaacttgtgcagaccctaatcttcttcgtggagttatccgtggccaatggcgtcttgacgggtacatagtttcggattgtgattccatccaggtctatttcaacgacattcattacaccaagacacgtgaagatgcagttgctctcgccctcaaagcaggcaaaaatctttagatgatcatctcaaaacaattattacattagatatgtcattttgatctttgagaagtaaaatatgttgttttgtctggaaacaggtttgaacatgaactgtggagattttctaggtaagtacacagagaatgcagtgaagcttaagaaactgaacggatcagatgttgatgaagcgctgatttacaactacattgttctcatgaggctcggattcttcgatggagatccaaagtcgcttccttttggtaatcttggtccgtctgatgtttgcagcaaggatcatcaaatgcttgcgttagaagccgcaaaacaggggattgttctgcttgagaacagaggagatcttccgttaccgaagaccacggttaagaaacttgcggttatagggccaaatgcaaacgctactaaggtcatgattagtaactacgcaggtgtaccctgtaagtacacaagccctatacaagggctgcaaaagtatgtaccggaaaaggttgtttacgagccagggtgtaaagatgtcaaatgtggtgaccaaacactgatttcagcagcggtcaaggcggtttcagaggctgatgtgacggttttggtggttggattggatcagacggtagaggcagagggtcttgaccgtgttaacctaacccttccgggttatcaagaaaagctggtgagagatgtggctaatgctgcaaagaaaactgttgttttggtcataatgtcagccggacctatagatatctcattcgccaagaatctgagcacgattcgggctgttttatgggtcggatatcctggtgaagctggaggagacgctatagctcaagtcatctttggtgactacaatccttgtaagcctcttacttcatgaaccctaaaccctaattaaaccctagacactattacttacttatttgtgtttgttgttgcatcagctgggagactaccagagacatggtacccacaagggtttgcggataaggttgcaatgacagatatgaacatgagacctaactcaacctctggtttccctggaagatcttacagattctacacagggaaaccgatttacaaattcggatacgggcttagctactcttctttctcgacttttgttctctcagctccatcgatcatacacatcaaaaccaatccaatcatgaacctaaacaagacaacctctgtggatatctccacagtaaattgccacgatctcaagatccggatagttatcggggtcaagaaccacgggctacggtctggtagccacgtggtgctcgtgttctggaaaccaccaaagtgttcaaagtctctggtgggtggtggcgtgccactgacgcaactggtagggtttgagagagtagaagttgggagaagcatgacagagaaatttaccgttgattttgatgtctgcaaagcacttagccttgtggatactcacgggaaaagaaaactagtcaccggacaccacaagcttgttatcggatccaacagtgatcaacaaatctatcatcacctcaacgttagattggccggagattcaacggttgctatctgaaaaaaacaaagcccatagattctactaaagttgttattgtcaaaagtcaatactgtaatgctatcatcaattatgaccaaaacctaaataaaaatttggtataatagcacaaacaaacagggtcaatagttatccaaatatttgaacctatagtagtcaaattaatacaaagacaaatttgttttctcctttatgccacataatataaatattgggtttccataagattttctttgtattacagaaacatagaattataatggaggggttaattccatatctgattcatgctatcaagaaagaccacaagcctgatcatcagaggtatcgatcgctgtctgtgggatcgagccgaagctatcgaccgttgatgatgggacaagacggctcttcttcaatgcagggatcttctcaccgtcgaactagatcagactacaatccacctgttataatggataagtttgatcagagatcatcaggtttaggtcaagaatttgtgaagaaagattcttcttctcagaatatagcaacaaagacttagcttgcgtatactcgttaattatatgtaagatagaaaaaattatacgtttcattttttgtgtattgatcaatttgtaataagtttgatatcaatgaaattatttatttatttattttcacttactatattggtcaaatccaatagtcaaattgtgtttttggttgaactgacacaattaacaagaatgaccaagaatagtaaaagagaactgtcaaaataacgaaatggctaataaacagaggacacagaagaatgatctgttgattacttggcggtcaaggaagaaagatccacgttaggtctttttgatcatagaaaaagaatgaaggatttcccaaaaaacccttaacttcattctaaaaagaacttaaacataaacacattagactccaccaatcttgttcttgtctgtatgcaacagattgagaaacgtagccttctctgttcgtttctctctgtgtttcatctgatacatttacaagcattgcttcttgaaatggcagaattaagatcaggtgttcttttcaagcttctagaagaaatgggagtcgggaaagtgcgaagagacgtcgatcacagacccgttttgctgcaaataagatgcataatccctgtgttagcagctggagggttatggccaaacaaaggtttcttcttgaggataacagattcgacacattcaatatatgtctcattgccacgagaagagaacgatcttgttctctacgacaagttacaaatcgggcaattgatattcgtcgagaagcttgaatttgcttatccagttcccatgatcaaaggcattagaccaacacctggccgaagggcttgcaccggtgatccaatcgatctaatccctaaagaacggatcgaaaagttctgtgtcggtctatcggatatcgaagaaatctacgatcaccaagtgaagaagccaagaagaactagatggaataactcaagcgtctctgagttaaactttacagatttagggttatcgaaaaatctttcgagtgttatggaagaaaaggatgatacagagtcaatgatttcaagttgctcttcgtctttttcttcagcagctaggaggagaagctggataggctcggctgataataggaagagaagagattcattagatccatccatgattaagaatcatgatcatgacacttaacatgtttcaagagctcgaagttcttctgctgtaagttttaaagaaataacttttcggaagaacat

SEQ ID NO: 4368 - DNA, 3816 bp, Arabidopsis thaliana landsberg
gctgcaagaatctcacccttcaattcccatttcagaaagcaccatctaatcctataatcggccgacaacaactcttccatgtagttctaagcttctcaaaacagatatagaacttgtcaaattgttgcttaccatcagctctaggaattgtcacaatctctgtgtgtgtgtgcttgttagacctctgaagctcaccttcataatcccacaacttcgcaaattgctgtctctgtgtttcaataaccatgtcaaacgccatccttcttgctttcctgcatatccacttagacactgaaatcgtatacctcatcattatctcatccttaatgtcaacctaagtcaaggttggcctccttcttgcttcatctctgaataatctggcaatcacaccttgtttcagcatcctcgcttttccactgatcgcatgcttatgtgcatccacataagttttcactgtccatttccctaccctcttatccacagaacaataaatcttccattgacagttttcatggctgcatatagccatcagctgtttctgaccccatttgcataacttcacatcatagttagtcttcaagacatacctcaaaagctgatccttaaactcttcaccattattaaactgctgcttaagccatagataaagtggcttatctttggtgaatttagctcttgcaatttctctttcttcacggtctaaagcatcccactcctcatctgtatccaacgcagcatcaggtcgctctgtatccatgcattgatcctcaaactcttcttcatcaataccctcttgaccagcctcttgaccagcctcttgaccagcctcttgaccagcctcttgacccgttacatgtccttcatcaactccagcctcttgacccgttacatgtccttcatcagcttcaggaattccctgaccagctgcttcccctgcatcttggtggttattatcctcttcatttatctcttcataaaaggccctaaaccgaggatcatctccctcacattctgctacaggatcaacatcatcatctttacctctgtcttcttccccagttttatctccttcaacctctgcatcagactcttccatctcttcaacaacagcctcttcaccatgctgagacataggaaacggtgttggttcagacacaccttgctcaatataaacgtctacttctccaccaatcaacgcttcactgcacagctgcctaatcccactatctctatcctcgcctatagctcttactgattcaaagctttcgtgtgcaagcttgtaccaaacttttttcacgggagcagatactccattctctgctgggaaatcggcgaagatagaccacgtcatcagatctggatcaatgagcatatccctcttctcaaatcctccaatgtaggcaaacgactcatcgcgaattgagacatctcctccatactttatatgcagcttcaaacaatcgaaaccactgcaaaaacaacaaagaataaggggattaagttcaaatgacacaaacctagaactctaaaaacccagaaatcaaacccgacaaaacccttaacctagaaatcgaacccgacaaacatagaaactgttactctaaactcagaaatctaacccgacaaatccagtaatcgatccagaaatcttcccattctcaatcccgacaacccagaaatcgatcccgacgaacaaaaaaatcgatttcccccaattctaaccctaagaatcgattcgattacatacctcatcgtgacttagcagactcgttgaaatcaattaccgaccacaacgcaaccagttaaacgacgacacacatcgaaatcgatttggggtttcgaaatcaaagagagaattttagggtttcgaaatcaaagagagaattttagggtttggaatcgaaatcgatttgggggagaatgccaaaagggtaacagtgtctttgattagatcgaaataaacacctggggttaagtattaacctcggttagacactccgttaacgaagttaacagtcgttaacccgagaagctggtttttccaaacaaaaactaaacgaaagattttaaagcgaaaagaaataaacctaggtattgttcgggcaaattaaataaccgaggtattaaacgggcaaattaaaaatatatggggtgtttttagggttttttccccattttatatttatcagctaatattcacttatggcttgctcagttcagaaaattatggaaatcgttgtatcccaatcctgtgatagtaaaaactgtaggcgatacgtgaatcggtttataatacttttgttgggtttagttcattagttggaattatgtatagtaaacgtattaaactcaatgggtggataatttgtaaaatttatttgtaaaagctaattttgtattattagattggtagcatattgttcaattctgcatatatactaatcatttattaaataaaaaaagtttatagttcttattatgtataaagattcattaatattttcaaaattagttatttgtaattaacgtaaatttgattttttgattttttaattaaaataatgaattacattaccttcttttttgtcaactaatgatttatattacctaaattttataaaaactgtcattgaaaaattggactttgtgatctcagaaataaattataaaaatattaagtttcttttatttagttttgttagtttaaaccattttaattgaaatccaagaaaaaaataatattttattttaagcatttaatttgcttttgtttttgaagtaaaaaaatcaacacttattttttctagtaatatttattaaaacattatttattttttgttttctaaatttttttttaataatttggtgacattgcatttagagagagtatttaaaagaaaatatgatgtggcatctctaaaatgatttctggaatgatgatgaggatgacttgagaagcctcaaattgtttcttttattagcagtagataatactattttaatcatatactatcgttttcttatacattttatatgggaaaaaactctaaaaaaacctcatatatttttaatttgcccgtttaatacttcggttatttaatttgtccgaacaatacctaggtttatttcttttcgctttaaaatctttcgtttagtttttgtttggaaaaatcagcttctcgggttaacgactgttaacttcgttaacggtgtgtctaactgaggttaatacttaaccccacgtgttttattcgcccaatataaagacactgttacccttaacgaaaacccccaaatcgatttgttattataaaccctagttctattagctcttctttacaagaactcttcttatttccaaaaatgatgagccaaagttcagggtctgatgcgaattcaattagccgtagctgagtcctctttgcaattgtggtagggcaacgacagttacaaagtcatggacaaatgaaaatccgggtagaaaatttttcagatgtgggactcatggcttcatcaattgggcagatgaggagaagccatttggttggcaaaaagagagtttattggaggctcgagatgagattcgtcaactgaaagagtctttgaggtcaatgaaagaatagttaccgagtgggtcagggtctgctactaacgaggatatgaagaagcacaaggaagagaagaataagcttgaagaggagaagaagaagcttgagaaggagaagaagcagcttgaggaggagaagaagcagcttgaggaggagaagaagcagcttgaatttgaagttatgggtgcgaatgagagggaaaaagtgc

SEQ ID NO: 4369 - DNA, 1067 bp, Arabidopsis thaliana landsberg
taaagccagagctcggcatgattcatactttaaaatccagcaaagcagaggttccgccaagtcctttgccattgaagtaagtagcgtgatctctgatggtggtctctctgtactttggaggattttcttcggacacaagctctttaatgggtccgtacactctaggatttggctttacgtgggtatggaagaaacatgcgacagagactcgagctcttgtggctctgttcgccaatactctatgcttcaaactgatgaacttgtcgtttgttataagctgcagccaacgcaattaaaaaaaaaaaaaaactttgaaccaagaggaagatttcttaaacaaatctagcattgtaaataaacttgtgaaatctgagctagcaaacatgtattgattgcgcaaacttgcctgcagaagatctccgatgttgatgatgagagcgccgggaacatgaggaacatcgaaccagtatccctcacgacaaacctgaagcccttctatgttatctggtagaaggacggtaagaaaagagccgtcggagtgcttacttgtgccaaaagttaggtcaggctccggacacggtgggaagtagtggcaaagcatgcgcaaaccctttaagcactccatgtccttgaggtgattagggttcaaccctagtgcttctgacaaaagctcaaacagaaattcacccaaaatcatcacttgctttgagtattccatcataacatccctgaaagaatccaccaagaacgaataaagagatatgaaagttgcttacgtgttcacaaaggcttttccaaacgcaagtttgaatgtttgcataaactagcaaagactaaggtctaaatcactttccaacagatattacacatcaaataaagttaaagcaatggagtcatacctacaaatctctggcagatcctgtggttctggaggatctggagccatgtaacaatagaatgtgtctctccaattcgcagctgcagcagtgtagagatcgaaattacttaaatagataaactttctgccgaaatcgcggctgtacaaatctttcctcacttcaggaggt

SEQ ID NO: 4370 - DNA, 667 bp, Arabidopsis thaliana landsberg
acttcaagatttttgtggatcgaactctggctttgcaatgttattattcgatcaagaatttctctctaaaatgcgccggtggcaagtacgatgagcgtcagaaagcttgtgttggccgctggatatctaatgtcgtagggcgcggtgtttttgaactggacctaaggatgaaagatccaggtatacactttctgcctcctcatctcgtcgcaagcaaaacactggttaagctgacgctaggcacacagctctgtcttggacagcttccttcatatgtgtcacttccatctcttaagtctctcttcattgatacgatagttttctacgacattgaagatttgtgttgtgtgctacttgctggttgccccgtgcttgaggagttatcagttcatcaccatgactttatagcaacgcctcacaccatatcgagtccaacccttaagagactatcagttgattaccattgtcctgatgatgttgatagtgctagtcatatgtcatttgacctcccaaaacttgtctaccttgagtattctcactgcgccttgggtgagtattggcaaattaatctggagtcccttgtcgaagctaagctggaccttggtctggaaagaaaggtcctaaggatggatgtaacggatctcattatagggataagaaacgtcca

SEQ ID NO: 4371 - DNA, 565 bp, Arabidopsis thaliana landsberg
  unsure (1)..(565): unsure at all n locations
gctaagctggaccttggtctggaaagaaaggtcctaaggatggatgtaacggatctcattatagggattagaaacgtccannnnnnnnnnnnnnnnnnnnnnnnnnnnnnnnnnnnnnnnnnnnnnntctttctttctttcgtattagaaaccttggacattcattcttgaactgtgtttgtatgtttcaggtgatttattcatactgtagacatgggctcccggtgtttaagaatcttgttaatctatcttttgggagtaagaataagcgaggttggagattactggcaaatctgcttaagcagtctacgaagcttgaaactctaattgtcaaggtatcttcaatacgcaaaactgatgaacagttatgtaacacggacttggtggttgataatttgcacatatctttttgattgatgcttgttcaggatctgaatggttacactggcgatgtctccatgcctctgacaaagtgacgtcgctgcatattcttggttatcgaggaactgcggatgaggttaaacaattgaagagctttataggggaattcgaatgtcttgaactg

SEQ ID NO: 4372 - DNA, 2704 bp, Arabidopsis thaliana landsberg
taccttgtagcagattctccgttcgactgttgtctcttctctcgtcttacctcttattcattctgtagatacaacaacaaccaatcaatgaattcaactagagcggcgcaagaatcatatttagggctgttgaattcaaaatgtcaacaactacaattagctaatatatataatattgactttctgtaattctgattagaatgattaacgaatatgattgggttggtttcaataatttgtgagctagttaatcacacgtctttttttttttcggtcaactgctaagttgatcacatgtcatctcatataaaaatgaggtgatgtcgtcatttatacatattttgatcactttttacctacattttaaatttaatttcacaatattaccgttttgtatatggtcgttaaaaaaaaaagagagtataaaatggctaactataacaacattcacccgtaatgtgcatatatgtacaaatcgaaagattgtaagatttgctcaactacttaatgtttgtttatattggccttcgatcagaaaatcttggttctgaaagtgttcctaatacttccaaaacataagttttgcatatagctgcaaggaaatggcagatgacaaattgttcttttaatggattatattgttcttctctttgttgaaattttgataaaattaaattaaagtttttaaggatttggttccatgatcattttaccttcttggagaaaaataatactttattgataaaaaagaatactctaaagattaggatagatattattcatttaattttgttactactattttttttataaagaattcctatttttatggtagttctttcaggagtttgtaaattttgtgtcgataacaaaaaaaaaaaaaaaaaaaaaatcacctctgcactctataggggttttggttgagtttctttctcttagtttatggctgagtttctatttatgcacaaatgatagttttcttcatttagtattgttggttctctatagaattaacgttatatacggtttatgttctaatcaatcgctgagtgggtttccacgtatttattttgttcatcaatatataaaaacaacatgtaccaagaatataatacatatacacatacgtatatggcccatgttatatgggaaattgataatgtgcaaaaatgtcatcgttcatacaacgaccgttgctcctaaaagtacgatatcaaccatgtgtgcacctaatgattagaaatgtaaactcttttatcaatcataaaatattcacaacctcttatcatatagatatcacatgtacttaattgtaccatagactccaataacgaaccaaataattatgctctctctccctatatatacccatgcatcaaatcaaatcaattcaaacacaaacacaaacataaactcaaactcacatataaaaaatgacaaaatcagctataacatttccacttatcttcacacttcttaccttcatcgatgtctcgagcagcgcctccattgttttcaacgtcgtgagcttcggggccaaaccagacggagtcaccgattccacagcagcattcctaaaggcatggcaaggggcttgtggctcggcagcatcagccacgggggtggtccccacagggacattttttgttgaaggtaataacgtttggagggccatgcaagagcaaaatcacatttcaagtgaccggaaccgtcgttgctccggaagattacaggacctttggcaattccggttcctggattctcttcaacaaggttaacagattctcactggtcggtgggacttttgacgctcgaggtagtgggttctggtcttgccggaaatctggccagaattgtcctcccggtgttagggtacatatgcttctcctctatctatagttattgtaaataaaaacaacaatctgacattcatacataagcgccaccagaatgcaaaagagcaacaaatagctttaatcattattgattagtaataactaaataagtcaatattttttttttaatagtcaagtaacatatctttattccaatcatttacttacgattaaaaaaaaaaggaattagttgatagttttcaactatattaattcaggcacatttaattttcaatatgatctatccatgccatttttaggaatttattttataagcatataataactattatgataatgatttttggacaaggaaatggattctttggtcaaaataaaatgaaatatttataatcttatttattaatctatggcgtttatatattaattactgtagtcaatatcgttcaactccgcaaaagacgtgatcataagtggagtgaaatcgatgaacagccaggttagccatatgaccctcaacggttgcaccaatgtggccgtccgtaacattaggctggtggctcccggagacagcccaaacactgacggctttaccgttcagttctccactggagtcacattaaccggaagcaccgttcagaccggagacgattgtgttgctatcggtcaggggacccgcaacttcctcatcaccaaacttgcttgtggcccaggtcacggggttaggtatataccaccgtctaattccttagagtaaattatgtaaatatatcattaattgtgaggatcggaatcatgagtttccaacaaaaaaaaaactagcaatattgccttcactcactctggtc

SEQ ID NO: 4373 - DNA, 1172 bp, Arabidopsis thaliana landsberg
tccaaaccattccccatttcatattcttttacaactacccctgaagagtgtgaccatctttagctcttaaactatttagcaaccatatacatacacattattccttttcttttctttattaattaaaaaaaaaagtttccaaaatatataatcatcacaaatgggctttgtaacgggccaatacaacttctcggattacaaaaaacggaagcagaagctccggcaaaaattctttttctcagtttcttctagatttgtcttatattttgcttttaaagccagctctctgctgaccggaaaaaaaaacaagtactgtacaatgttattgtgataagtcaaagtcttccagtttcttagttattaaattttatttactaatgaaaatatagctaaataatttgtaattgcttgacaaaaaaaataaaaaaattgtaattttgttgagaaaaaaaaattgtaattttgtaagctgcagttttttttttttttttttttttgaaaagttgatcagttgttacagaaacaagaacctttggtactctcaaaccgattgatatccaaaactgatttgcatcgaatcaccgttctaattaatctaataatcgtcacggtaacattacgattgaaagatgaaaggtcaaatccctaataacattttaccatttcatcttacaacaaattaaataactttacaccaagatattaatttgatatcatcggtttagacaactagtaggttgaataacaccaagacttttcccaacagcattgaaacagaaggaagtagcaggagttcctttgttgtaagtaagcttaatgtcctgtaatgtgattcctgtgcatggactgctcttgctacacaccagcttcattgcttcctgtgtcgccgacgttccttgtatgttcttatatgtcacttggcttatcttcaccccagaatactaatacatacgaaaacataattaatcgttagttatttgactaagtcgttataacatatttggattgatctgataaaagaatgcgatatggatattggatatatacctcattagggcaaccttcgtgagtaggacaatagttctggtcgattatgattgggttttcgacgttcttcatgactaggtcttggaagaagactgttctaacgaatcccttactcggcctcgccc

SEQ ID NO: 4374 - DNA, 751 bp, Arabidopsis thaliana landsberg
  unsure (1)..(751): unsure at all n locations
atgctatgacactaaagcaatagaacattttatccataacaggtttttgggtctgcagttgattttctatttatgtttcataagtcaccgttgagtaaattttgnnnnnnnnnnnnnnnnnnnnaaaaataaaaatagaaatagaaataattcatatatacaaatatatgataaatatgtgcaaaaatgtcattgttgatacaacgtcctttgctcctagaaattcgatatcaaccatgtgtcccaatgattaattggaaatgttaaactctttttatctatcatgaaacaaaaaatacacaaaccccttatcatataaatcgcacatgtatatatatttttttttgataaacacgtaacgcacatgtacttaattgtaccatagactccaataacgaaccaatcatgctctctctcgctttatatagatatatacccatgcatgatgcatcaaaatcaattcaaacacaaactcaaactcacatataagaaatgacaaaatcatttataagatttccccttttcttcacacttctcaccttcattgatgtctcgattagcgcctccaacgttttcaacgtcgttagcttcggtgccaaaccggacggagtcaccgattccacagcagcattcctaaaggcatggcaaggggcttgtggctcggcagcatcagccacggtggtggtccccaggggacatttctgttgaaggtaataacgtttggaggaccatgcatgagcaaaatcacatt

SEQ ID NO: 4375 - DNA, 574 bp, Arabidopsis thaliana landsberg
  unsure (1)..(574): unsure at all n locations
gagctgcatctgtgtttgatattacgccttcaaaaaccacattttatattcttggtttagtaaaaattaaagacgaaaatttgccaatgaatataagtaaaaacgctaggtacctccaatgataacaaggccatctaactttaaatctgtgcaagctttgagtgcagcgttaacctgctcagttgttttgatctgatccttagttcttccgagcaaatcataaccaccttacaacatacatttcaacaccaatatatcagaacttgaagcaatgaacgggagattctgcatttaacgacaatgccttgatcaaacaagtaccttggtttttgtaagtctgaagtatatcatctgtaatctctagagtcttttgtgcaaatagaccctcggaaccacctattatcagtcaacaacaaattttacttaagtctaacaaaaaatctctaaactggcaaatgatgcagttgtataaaaaataatagaacttacccaaaaatcctagcanagtgctttttgcgttgtgcaccttgagagcctcgaaaagaccccagatcacattatgtccacctggagc

SEQ ID NO: 4376 - DNA, 703 bp, Arabidopsis thaliana landsberg
tactgtcacgttctctactccgtcttctttcagttccttcgccaagctccctatgctgcaaatgcaatcgtcatcacataatcatatgagttatttgctaacttgagtttgaaattcattattttctcagagttaataatttatactatttgcaatttgttcatagatcattatgaaaattaagagcgtgtgttgtgtatacctaaccccgtgacccgggccacaagcaagtttggtgatgaggaggttgcgggtaccagggccgatagcaacacaatcatctccggtctgaacggtgcttccggtgaatgtgaccccggtggagtgctgaacgtggaaaccgtcggtgtttgggctgtttccaggagccactagcttgacgttacggacgaccacattggtgcaaccattgagggtcatatgggtgacctggctgttcatggatttcactccacttatgatcacgtcttttgccgagttgaacgatattgactacaataatgcatcaaagattttatgagattggtttcgccggtcaaattttaatatagtaactaggacgtagccaaatggagtttaatacataattaaaaaaatgtttgcttattcttttcttttttttcaatggttggttattcatcttacaaaattagaattcttataatatattggcatataaatatgttatctttgaaataagcct

SEQ ID NO: 4377 - DNA, 692 bp, Arabidopsis thaliana landsberg
ggatattagaaaagggcaaattgctttgagactgttcttcagggtacagtgagcttttctctctctcgtaaggtagacattacacagataatgaactcattacagatctgttattctagtcgagaagctcaaatagcaatggcttacaggtacaaaatacaagtatatatatattggttattcttacattctgcgtaaatctctcagtatccaaattctctacaaatcagagggcatacattctcttattgtattcaccatttagaatatctgaatcagacggcatacgagacatagagaaagactgagacttgcttctttctttccttatgctcctcaatttagattcttccatcctatgcatgaccacacaatagcacatcgcaccaatcgtagtcaacataatcgtgccgccgataacagtcgcgcaaacagccaaccacatctcctctttgccaacaacaatataagagagagaaacaaaggcaatggatatgaacagacaagcacaccacatgagcttgttgattacaaacacaagcttctttttcgccttctgctcaatcacaacaactgaagtctgcaccacaacaacagctaaggatataaacagtgccaagctgtcaaagatgaagaagaccagaaacggtgctttgtttgctatatgagcttgtcctagcaactctcctttc

SEQ ID NO: 4378 - DNA, 1241 bp, Arabidopsis thaliana landsberg
cattcgaaacaccccttatcggttcggtggtattaccatctatttcttaccttgctggcaccttttttcaaacacctttgcttctcccacacagtccttgtgccgcaacgacgaacgggatgctcttttagagctaaaagaagagttatcgatctattccagcaacagcgctcctgtaccaacagtttcatggaacaagagcgtcgactgctgttcttggaaaggtgtgagatgtgatgctatcctccggagaggtgatatcactaaaactcggttacccctctagaaccaacacctctttgaaatctagcagtggtctttttaagctccaacatcttcgtcacctagatcttttatctttaggtctccaaggggagattccttcttcatttggaaatctttctcatctcacatatcttgatctttctaatagtctactagtaggtaaagttccggattcaatcggtaacctaaaccaactagaatacattgatctttccaataataatctcgtaggtattattccttctacaataggaaatctttctcatctcacaggtcttactctttatagtaaccaattagtaggtgaagttcccgcttcgatcggtaacctaaaccaactaggatacatggatctttcgtttaatgatctaagaggtaatattcctatttcgcttgccaacttaagcaagctttctcaattaaacctcaatagaaatcaattcactggtagggcgatactattagccaatttaaccaatttgcctgaaatagacctctcctccaatctcttcagatcctctattaccggtgaccttagtggactccacaatttaaagcgatattcggtgcaataacaaatcatttgtgggaccttttccctcatccttgctcatgattccttcgttagtccatattgatttaagccaaaaccaattcgagggacctcttgacttcaagaataccacttcatcatctaggcttaaagagttagatgttggcaacaacaattttgatgggacaatctcagaacctatatcgaaattaatcaatctcggatctttaaatcttagccatcacaattttggagggccagtccctagatctatatggaaattacggcatctctattctttagatcttagccacaacaatttaggaggacaagtccctagttcccttatcaaaattagtcaacctcggttcccttgatctttcatacaatatgttgaaggtca

SEQ ID NO: 4379 - DNA, 1264 bp, Arabidopsis thaliana landsberg
aagactatgttcaagcgcctatatacaatactgaccagactagaccagacagtactcttgttccaaaattctgatatacaagatcaacttaaaccatatctaataaaaccaactaaatttgtcaatagttacgtcatttccacgaaaaagtcaactttttacccagtcaataacgcaacactgtcatttttcatgactacataagcttgttgcgccgagaaccagtgaaacataggcacctatatatatactcttcaccaatcaaaagatgagaaaattcacaaatctgaacgcattgattgaccatagattgatatacccagaacctacgaatggtaaacattaacactctttctcactggttcagtagaaccgttttcttgaactggagactacgtgaaatctcgttcaggcatttcatcgaacacttgtaatgcataatcataaacgttcagagataccgttgtacaataatgccccaatctacacactatggccatttccaacgccaaccatcagggattcactgtttttatccaaaatagctgacttcaacagtcaatattggtgtaccattgccaccgactcaccagatagaagaggagacgatcattctacaatttcgaacgcacgtgaaagattgcaaaccaaactcgattctgaactgaaccaaggaaatttaaaaaccaaaccagattctgaactgaaccaaggaaattaaaaaaccaaaccaaactggatccgaaattaaaaattactttatctccaagtctattgcattttctttcacaagcaatacagattctagcgatttttcaacgaaaactctcatttcctagctatgagattcacaaaacactgaatggaatctcccacctgaaatctcaaggcaggggaatctctaagtcttagctccgtgcagctctctttccgccacgggctttgctgcttgttgccttttctgacgcttcttccccactctgctcatcatcacttcttccactctcgaagctttcagctttgtatgtcgactcttcctcctcaactgctctcactgaatcttctttgtcccttactgctctcagtttcgccttctttgcatttaaaacagaaaggaactttgcataagttgcattctcaaactctgttttttcatcgcatagtttttcaccttgcgcgagacatctctcagcttcacttttcatcttctcaaacgatctcgtcttgttcacaacttcttcacttagccttatgttagcctcca

SEQ ID NO: 4380 - DNA, 1485 bp, Arabidopsis thaliana landsberg
gaactacaacatcttactcacttagacctttcaaattgcaatctccaaggggagattccttcttctattgaaaatctttcccacctcacacatcttgatctttctactaatcacttagtaagtgaagttcccgcttcaatcggtaacctaaaccaactagaatacatagatcttaggggaaatcatctcagaggtaatattcctacttcatttgccaacttaaccaagctttctctattggacctccatgaaaataatttcacgggtggtgatatagtattatccaacttaaccagcttagcgattctagacctctcctccaatcacttcaaatccttcttttccgctgacctaagtggactccacaacctggagcaaatttttgggaatgaaaactcatttgtcggactttttcccgcctccttgctcaagatttcttcgttagacaagattcagttaagccaaaaccaatttgagggaccgattgattttggaaatacgtcttcatcatctaggcttacaatgttagatatcagccacaacaattttataggacgagtcccgagttctctatctaaattagtcaatctcgaacttttagaccttagccacaacaatttcagaggactatcccctagatctatatctaagttagtcaacctcacctcccttgatatttcctacaacaagttggaaggtcaagtaccttatttcatatggagaccttctaacttgcaatctgtggatctttctcataattcgttcttcgacttgggcaaatctgtggaagttgtcaatggagcaaagttagttgggttgaatcttggttcgaattcactccaaggaccaattccccattggatctgcaacttcagatttgttttcttcttagatttgtcagacaaccgtttcactggctcaattcctcaatgtttgaagaattctactgattttaatacgttaaatctgcgaaacaacagtctaagtgggtttctgccagagttatgcatggatagcactatgttacgatcacttgatgtcagctacaacaattttgtggggaagcttccaaaatctttgatgaactgccaagatatggaatttttgaatgtgagaggaaacaagatcaaagacacgtttccattttggttgggctctcggaaatcattaatggttcttgtgctccgatcaaatgcattctatggtccagtctataactccactacctatttggggtttccacgcctgagtatcattgatatatctaataacaatttcgttgggtcattaccacaagactattttgccaattggactgaaatggcaacggtgtgggatatcaatcgactgaactacgcaagaaacacttcttcaagaacaatacaatatgggggacttcaaactatccaaaggtcaaactacgtgggggataatttcaatatgcatgcagattcgatggatttggcgtacaaaggagtagacaca

SEQ ID NO: 4381 - DNA, 568 bp, Arabidopsis thaliana landsberg
  unsure (1)..(568): unsure at all n locations
tgtatagaaatggatcaaagacgaatcgtgcgactgagatgggatattggaagacttcaggtaaagatcgagagattcttaatggttcaaaagtcgttgggatgaagaagactcttgtttatcacaaaggtcgagctcctcgtggcgaaagaaccaattgggttatgcatgagtatcggttggttgatcaagaccttgataaaactggtgttcaccaagtaagactttgatctttttgagttccttgttgtttaatgggatttgtgttgttgactttgttgtggaattgtgggaaggatgcgtttgtgctttgtaggatttttcagaagagtggctccggacctaaaaatggagagcagtacggtgctccgtttgttgagggggagtgggaggaagaagatgatatgacatttgtacctgaccaagaagatcttggaagtgaagatcatgtttatgtccatatggatgacattgatcaggtttgtggtctagtatttgatatctcttgattagctttggtcgaatggtgtgttctttgttttcattgnggaatgaaagagctgtgaaa

SEQ ID NO: 4382 - DNA, 657 bp, Arabidopsis thaliana landsberg
gagagcactgagggacaaagaagtttcagtgagagtagttgaggaggaagagtctacagacaaagctgaaagcttccagagtggaagaagtgatgatgagaagagcgaggaagaagtctcaaaaaaggcaacaagcagcaaagcccgtggcgggaagagagctgcacgaagctaagagattgccctgccgtgagattttcaggtcagagtttccattccaagttttgtcaaactcatagctaggaaaattgtttggtcaaaccttctttggttttaaaaaaaaaatttacaatttgtattacttctgaaagtaaatgcaataacttagagatggcatgattgattgttataaaacttgaagccccaaattgtgataactaagaaacatagaccatgacacaaaccatattttattaccaaatggtgagaaaagattacaaacataaaattacaaagcaaaagaaaaaaaaattacaaagacaaacacttgacgaggtcgtttctcgacaacaacttagatgaatttttagaggaactgtgagagatagtgttaagaagtacctatggtggttttgcgcctgtttcgacaaaatttcgccatacagcacttgtgcttgtatgaagtgaaaatatgtcaatcactaatcacaaaacaca

SEQ ID NO: 4383 - DNA, 966 bp, Arabidopsis thaliana landsberg
  unsure (1)..(966): unsure at all n locations
caacaaaatatgtatgtctaaataatgtcgtgagaagtgggtttaaattaagcggttattccgatcatgtggttgagatagtgtcacccactcgtctcttttcccatttttttttctttgtgagaaaatttttgtcaatgcagtttctttctgttttaaatgcaaagaaggcaaaactgagagcactaagggacaaagaagtttcagnnnnnnnnnnnnnnnnnnnnnnnnnnnnnnnnnnnnntgaaagcttcgagagtggaagaagtgatgatgagaagagcgaggaagaagtctcaaaaaaggcaacaagcagcaaaccccgtggcgggaagagagctgcacgaatctaagagattcccttgccgtgagattttcaggtcagagtttccattcagtgtacgttttgtgaatctcatatctgtgaaagtataaaatagctagaatcttttacttccttttttatttggtcaaacaacgatatttattaaaaaccacaaaatagaaaattaaaaatatcaaacacttgaccaactagttacgggagtacaaacttgacgaaaccgttgagcttaacgagctataaaccacaagtgtttgtatgaagtgaagatgtgtccgatcacaaatccacagaacacaccaggtccaaaggctatcgcggctgctatccagttcagcactggctcttctagttctgaagaagactcatcatgttgctgagatgtaggaacaggaacatgatggctttctctacaaatttcatcgaggccatagagtccaggattacccacgaatgaagcacaactttgagttccaaactgtgtgctccgtggcacgaatccttgtagatgattgtgggagaagttgatgttggacagaaacgagaggttcccgagacttcgaggaatttcacctgacaagttatttcgcgataggtctaacgtctcgaggtttgtgatattt

SEQ ID NO: 4384 - DNA, 407 bp, Arabidopsis thaliana landsberg
gttgtgaatggatgagtgtcatcggaaatggaggatttgacgtaatttaaggagaggtctataatggacaagctggttaaattggctaatactgtatccccacccgtgaactgatttccaaagaggtacaattcagaaagcttggttaagttggcaaatgaagtaggaatattaccttttagatcattatcccaaagacgcatggactctagttggtttaggttaccgattgaagcgggaacttcacctactaattgattattcgaaagatcaagatatgtgagaggagaaagatttccaatggaagaaggaatttccccttgaagttttgcaacgtgaaagcacttgctcactaagatgttagctgtacttattattgaatgctaattgactcaccttttcccaaa

SEQ ID NO: 4385 - DNA, 3147 bp, Arabidopsis thaliana landsberg
cccagaaacattcagtttatatatatggtcagaaaaagaaactagactaaaacaggaaattaaaaatgtcgtcgtcgtcgtctctaataattaagttgaatttggcttagctgaatgtttctggcgttgtccaaatgtgggtgcccaacaggcaacgctcacgtggttctttctcaataccccaacatttatatgtataagttatcctcttcttcttaatatacttatgcttcttaatacgcgtgggttagtttatttgtgtcaccaaaatatttttgaaaacgagactagctagggataaaacgtctttgtggatgaataatgaagttaacatatataagaaaccatgggatttttaccaaaaaaaaaaaaaaaaaaaaaaacatggatcccgtgacagtctgcgcgcgcgcgcgcagcatagtagaggccaagagcgaatgttatttgattcacttttgtttggttcttttgtcaacattcactctttatttcgatactcttgcttccgtatcatggatttttttattacgttgacaactagaatatatgttttatttttttgaaaaagatactatatgttttatcgttcaaaaaagatgagtcaagtactacaatttacctatcatttttttttttttttgttaaaccataactttcaaattgatccaatgtatcatgacacttactttcaaagtttatcaacacctattgcattttattttcttaagatattaaattttctgtaattgtttatctaaagcatggttagtattctgattttttgacaaaaggaaaataacgacaacatcactgatatttcaacgttccttttttttcctccacaaaattcaacgtttcattttacgcgcacagatttttattttttctatgtatattttgtaacgattttttttaaaaaatatttgtaatagttattagtatatgctaaatattgaatacaattaatttgctaatttcctttgtagttggtcatgacatgatatctattggtttatgctagttttattgttattcaattttaaactcaaataatgcatattattgatgaaaagatatactacaatattaaacaaaagttaacatagttactgaggaaaatggaatacggagaaattaagaaatgatatattatgtgctatattattattagtcgcaatgatatctttataataaaacacctattaaagaatatttgtcgtttccagttacatctaagatatataatatatatttttttcctaggcataaattcccggaaacagcatgtgatgaaggaatatatcttgaagtttatagttgtaaaccaaaaaaaacattaattctattatttctatagttataaatttagttagagtatgaaaaacaacaccatcttattcatgataaacacaagacgtataaacacgacaaaaattctttaagaagagttttatttcgatatgattcaaaaagtttcaaaagctgttatagttcgatttcggtgtgttatccatataactaaaaagttggacagctttcattgaaatatactactcaaagaataagaaattactagatttattatgttgtctcatcatgtttatgacttatatgagtatcaacgtggatgaaagtggtcgcttcttcctcatcggaaatcaaaataccgcatgttcatacaaatcaagaaaattataatttacaaatattgtaaagagctaattattttataaacataggatatcaaatgtggacctaaaaaagtttgaaaatgcaccactcaaataattaatgcatacagccaagcaagtaaaacattagaaagacaaaaaataaatacttttaaacaatttatattatatagtttttcatctcaaaactcaacaatataaaccctattccaccatcttctattccctcacaaaaaacaacattgttaagaataatggcaccaatcaaagaattcatatccaaattctcagatttcaaaaacaacaagaaactcattctctcctccgccgcaatagccttgctattattggcctccatagtcggaatcgccgccacaacaacaaaccaaaacaaaaaccaaaaaatcacaactctatcttcgacatcacacgccgttctaaaatctgtttgcagctcaacactatacccggagctctgtttttccgccgtggcagccaccggaggaaaagagctgacgtcacagaaagaagtcatcgaagcgtcacttaacctaacaaccaaagccgtgaaacacaactacttcgctgtcaagaagctgatcgcgaagagaaaaggtttgacaccgcgtgaggtcacggcgcttcacgactgtttggagacaatcgacgagacgttagatgagctccacgtggcggtggaggatcttcatcagtatcctaagcaaaaatctctgaggaaacatgccgatgatctcaaaacactaatcagctcagccattactaatcaagggacttgccttgacggtttctcttacgacgacgccgataggaaagttcgtaaggcgttattgaagggtcaggtacgtaaatagttttactcttttaaaagtttagattatagtattatcttcgacatacgacttactcggtaaaataatgtagtgattatagttggtccataattagagcacttaactcttcaaatacgtacccaaaacatttgttttactaggaaatcttttaatatgtaacagctttataatattgaacggtatcaaaacaggtacacgtggagcacatgtgtagcaacgcattagcaatgatcaagaacatgacagaaaccgacatagccaactttgagctaagagataagtcttcaaccttcaccaacaacaacaaccgcaagctcaaggaggttaccggcgacttagacagtgatggatggccaaagtggttatccgttggagacagaaggcttcttcaagggtcaacaattaaagcagacgctacggtggcggatgacggaagcggtgactttacaacggtagccgcggctgtggctgcggcgccagagaagagtaacaagaggtttgtgatacatataaaggcaggagtttatagagagaatgtggaagtgacgaagaagaagacgaatataatgttcttgggagat

SEQ ID NO: 4386 - DNA, 575 bp, Arabidopsis thaliana landsberg
atctgagggacaaggagaagcatgtgtgattatagagaaactagtgttcactgattcccttagtgctaatgaccaaatggttatagatttgtgggtacttgattcaggatgtacatcacacatgacttcaaggagagattggttttgcagttttcaggataaaggataaattaccattctactaggagatgatcattctatagagtcacaaggacaaggatccataagagtgaaaactaatggagggtccataaagattttaaacaatgtgaaatatgtgcctaatgtgagaagaaatctcattatcattggaactttggataagctggggtatcaacatgaaggtggagtaggcaaggttagatatttcaggaataacgtgactggtttaagtggaaatttggtgaatggcgtgtatatactagatggagaaacagttgtgcctgaaagttgcagtgttgcagaaacaaaagataagactgcattatggcccagacgtttaggtcacatgagcatgaatgacatgaagatcttagctggaaaaggactattacagggaagagaaatcaatgagc

SEQ ID NO: 4387 - DNA, 414 bp, Arabidopsis thaliana landsberg
aactgttggaatttgactatgaaatccagtacaaacaagggaaagagtatctgttggctgatgcgttatcaagagtagagggttctgaggtattacacatggcaatgtctgttgttgagtgtgacttgcttaaggtaatccaagagggatatgagaaagatgctgagttacttgccattattaatctgttgaagacaaaggctgatgggaaaaagaattatgcttggagtcaggaaatactacgaaggaaaagtaagattgtggttcctaatgtggtggagataagagataagatattgacctggttacattgctctggcgtggggggacattcaggaagggaagtgactcaccagagggttaagggaatattttattggaaaggcatggttaaagatattcaggctttcattc

SEQ ID NO: 4388 - DNA, 2740 bp, Arabidopsis thaliana landsberg
ggccgcaccgtaaatcataacgttccatttactcttatccatcacaacattctcaacataagttccactcttcacataaatcacaaacatcttcaaactcttcttcggcactttagccaccgcttcattcacagtcaacacatcaccggttccatcacccgccaccgtcacatcaggctttaaacctgccgtttgcaacaacctccgtcgtgcccatttctcaaaatccacactttgctgatgatgatgactcatcagtcttcttctcctgtgtatcggaatccccaaatcgcttaacgcagaaagaatcttcgatactattgcaagactgttacttgtgaactccgttgatctactcattgccgatttcagattctgagtaatcgtcgagttcgcatactctgttttgttctgtttcaactcatctaacgaatcgaaacacgtctcgtgatctgttaccgttgcgcttagccaagttttgagatcttcgattttggaagatgacaaagttttcttcttttcttcgtcatcaatggcggaaacagtgtcgttgagtctatctaaagcatcttcgatcagatctccacaaacccttaacgcagatttgattctttcgtcttcagtctctttcgatagcttctccggtaaatcggaaatcgaatcaagctcatcgatgattactttcaatgagagcttgaatagagtctctggatctgttgtgttggaagatggaagctttgagatacttgaaatgcaagattcagggaaacgagttacactgcaaatggctttgagtgaagtggatggtgttaactcgggaggtggactcggtgttgactcgtttttgttcttgtgaacgacggtggcgactacggcggcgattattacggcgatgagaactacgacggagatggatagtagaagtagacgttttcttgtctttttcttcaatgctaaatcttgagcttcgtctacttttccatatcctttgaaggagttcactgaatccattaattcctacaaaagcaaagctccttttttttctggtttttgggattattactaagattgtttgggctttgttatgttctgttgtttatgttagagaagacatgttgttgtttgcctttttaagtgggattaagtaaatgtgaatgatgaacgtgacgcgcttgttccacggtgacttcttgtcgtctaagtgtgtgtgtaggatcttgcatgtgaagattcatgataacgttgtaattattttgattaatcaacttgattatattgtaatttggtttaaagacaaaaaatggttttatgtattatgtatatgtcaaagtcgtctacatccgtagtaggtccatagaaagcgaacattctttacaattctatgggttcctcggtatatttttcaagcatacacattggagagaaccaaaaaaaaacacatgaaaatgtctacaaattaaaagaaaacaaagaacattatcttagcaaatattaaaatggccatgtgcgtctctaacatgtggcgtccctatctctatctctttcgggctttaatgccgacaagtgacacaacaccaacattgtgtttgattcccggtttatcttaatttatgaattagaatcaagtaatcaacccaataaaccccgtaaagtccggttatttaggccttaaaactataccagcccgagttatgcattgacttggttcaacttgagaatgataacctatgaacatcgatttaatgatacatgtagatagagaaatacaatctttattaaaataataagtcaaccttttaatttcaaagacttaacgagaaaggaaaaccggtcgacgctaaccagcctccaccaccaataaactgaccagccgtaaatggctgagcttctgtatcacttgtaattaccttatagcccttccacttcactctatttgcagttcctgcccctcctcctctattcaaatactctctataagttagagtgtccaacgcaaaactcccgctccactcatgccatccttcgggtcggatcacgtcggatatatccgattgcattatcaccgtccgtgaatattccttccaaggacgaccaagatacgtcgggaacgttcctttcacggccaaaagatccgacgtgccaccaatacgacaattctggatcacaatccccgtgttttgattcggatcagaccgtccttgggcggtaaccatgtttttctgaccggaatttggtctgcgtgcatttatatcacagtcttgtaaaaccgcggctgcgtttccgaagatgaaatcgacggttccggttatgtgacatttcacaaagaattgacgatttgagtggacataaagtgtgtcttgataagcaaacatgtcgcattggtaaaaagcggaaaaatctgatccgactcggagagccaccgcttgatgcttcgacggaccggcggtgttttggaatgtgatgtcacgcgctagaaacctctcgccgacggcagctacagtcaatagaaaacagtactatcatttaaccgtggaaatgagttacgatcgtgtctacgttatcatctaccaacaaaacgttacacatgcgtcattattacattctttttacatacaaacaaatgtgtatgtcagtatgtgttgttagctattacgtgatactactgtttacttaattccttaaaaataaaatcaaagaagaacagtatttaccaacagtagcggggggatcctctagagtc

SEQ ID NO: 4389 - DNA, 1186 bp, Arabidopsis thaliana landsberg
aaccgttcttccatcggaagctattccaacgccacgggcgttcttagcccaaatacaatctatggcatgttcctttgcagaggagacctaaacagaacatcttgttcagactgtgtcaatgccacaacgttagaaatctataaatcctgcttttatcgtaaatcagctttggtaatctctaacgagtgtatagttcggtactcgaacgtttcttttttcacgctcgtagaggatgtacctagtaccgctagattctccacgggaaattctttggattctccgcaatttttcagtcaaacacttcttgaaaaattagacgcacttatccttagagcatccttgtcttcgtcgttaccagttccatattttgtggatgatcaacaacatgtgactcaattggaaggttcctatgatttacatgcaatggtccagtgtagtcctgatcttgatccaagaaactgcaccgtctgcttgagactcgcggtccaaagactctcggggtgttgcagccatgctcagtttgctcggatcttctatactaaatgtctcatcacgtatgaaatctccgctttgcaaccgaacgtaacgagtcttggtgttacaaaaagtgagtcattaacagtatatatcatttaatttacatttctggttcaccgtaaccctatctgtctacaatacagttatcaagaataaacaactaaaacatatgttttggctattttttttggttttacaggaaatgaaatttttgggagaacggtaattgcaatcatgacaggtttggtgttactattaatggttttatgatcaaatgtagtgatggtttaaggattgtggctactaatttatatttctgttctcagaatttgggtgacgtgcgatgtgttgtgttctcgtgtatgtagattcaaaacctagggaaacaaaaatacagacatttgtgtatttatatgttacgtacatttcaatactttgggttaatgtatggcaatgtctcgtgaaaatgtaagataggttaactatggaagcctattacgggtagaacttagaagtgtatataataagaaaatttcacgaaattatttgttaaaaacaaatcttaaaagtgttaattaggcaaactggaaaaactttatccgaattcctcataaattgggatcctctagagtccagcgggcaccccaaa

SEQ ID NO: 4390 - DNA, 454 bp, Arabidopsis thaliana landsberg
gtccatctcggcattgtatctctctaattgtgttccgtgcctcccgcttttgtttcagctctgtgaaatgctttattgtttggagcaccaatcttcatccaatgtaattttgattactgcttcaaatatttttcttccacagctgcgaccttgtcccaagtgtcatacgcctcattttcttcttgcattgagcttgtggtagggttagaaaaattggtctcctgcttctgacacaatttctcatacgcatctgttgttaaaaaacacattttgattctcttataagaagtttaaacattataaatactaaaattttatattacgggtgaaatcttagaattaacgagtatgagtcgatattaatacaggatgatataccacatctgagatcctaaaattaataattaaaataaaattataaaatcttaaaacactaaataaagtaaacattatt

SEQ ID NO: 4391 - DNA, 1537 bp, Arabidopsis thaliana landsberg
cagccaaattcaggcatgattcgttgtgatcatcgtataccacctaaagactttttagcacgttcactgcaatttgtctctctccggtatgattccataattaactatgcttaaatatacgaaggaatgagtactgcgagataatcccactaatataggagaacacatgatgctatatctccattcaatctttgaccaagtcaacgtcggtttactctggttatgatcttaccatcacccaaatggagagaacacaaatataaatcagtagttacaatctttattacatcactagacttgatcataaacccattagtaaacctatcatgattgcaataaacgttctcccaaatatatcatctcctgtaaaaccgaaaaaaaggagcaattcaaagccatatatatcacataagttccatagggtggggaaaggaaaaaacggacattatatactgtgactaaccttttgttgtaacgccaagactcgttaggtttggttgcaaagcagagatgtcatacctcagaagacatttaggaaagtggatccgagcccaacgagattggctgcaacattcggagaatttttcgaccacaagtcccaagcacacggtgcagttgcttggatcaagatcaggactacactgagccattgcctctaaatcatacgaaccttccacttgagtcacatgttctttatcttccacaaaatatggaaccggtgacgaaaaagatgagggggctttgaggataagctcgtctaattttccaggaagtgtttgattgtaaaattgcggataactcaaagaatcattctgagagtaactaaaggtggcaggtgaatcttctacgagtgaaaagaaagaattatccgagtaccgaaccatacactcgtcagagaacatgaaagatgtgtcatgagattcacaggatttatccatttctaacgttgcggaatggacacagtttgaacaagatgttttgcttatgtttcctatgcacaggaacatgccatagactgtgtttgggcttagaccggccgtggcattgaagtaatagcttccgagggaggaatgattacgaagagtggagaggacggtgttgcggtttgattgataagtgtcgggaaattggttgcaatcagttagattttgagaaggttgggacatggctccaagagagaataagaagaagcaaaacagggaaacatcaatgattcttgtcatttttgttatgactaatgagaaaggacaaaacgtaacatagatttatataatgaaataatacctttgtttattttatttcattcagatccgtaatgtccacacataacgtggtagacgagttcagaggaagaatctatatataactattgttgtttttagttgaatatatttcatatttcttgtatatatataaaacgttgaatatctttgcaggttcgatgaagcaaaaagtcaaaagataaagttgtccattggttttgtgaaagatctaaacccaagcacaagacttgttcattccttttaatttttttgga

SEQ ID NO: 4392 - DNA, 933 bp, Arabidopsis thaliana landsberg
acatatcttgatttctatgtatctccaactgtaactaatatcctaataattttctctagattcaacaaaacatgccttccaaattgtaagactaatcagagtcttcttaaccccattaaaaaagggtcttgatccgtacaagtcttatgttctgcttcagacaataatataacaaacgtgtccagcttcaataattctgtattattcctaaacaagtatttcatctggttttcaatattgcagaatcacaaagttaatattttataaaacaacatggcctcaacaatcacctaatagtaataaaatatttttcctatttaaagagtatatataatgcatctttttacaaatctgtctactataaatatcatctttcactcataattcataaacaagaagaacaaataatggcaacaatgatccaaagtctctcttctctcttttgctttctttctcttttatctcttctcttctctactaacctaaccatatccgaatctgaccatatccacatgagcaccttctgcaaccaattctccgacaactttacacaaaccagcacatacgagacaaaccgcgaaaccgtactctcctctctccgcctccgttcctctctcggatcctattccaatgccacggcgggtattagccccgacacagtccgtggcatgttcctctgtagaggagacatctcagaaacatcttgttcagactgtgttcaaaccgcaaccctagaaatctcaagaaactgcacttaccaaaaagaagctttcatattctatgaagagtgtatggtacgttactcggattcatcctttttctccctcgtagacgaaagaccttacatcattagatactctttgagttatgctcctaacttggatcgcttcccacaaacactgttcgataaaatggatgagcttatcatcaatg

SEQ ID NO: 4393 - DNA, 182 bp, Arabidopsis thaliana landsberg
aggttaccgtgtatcagaagactgaaaaccctctgcggtatcttcaatgctctcgatgatggcgaacgacaatatctttttcgatctcttttcgctcgcccgttaaagttgactaacaatcctgcctggctcgctagttttggcctgccaccctggaatggcctaaacgtactttcctacta

SEQ ID NO: 4394 - DNA, 710 bp, Arabidopsis thaliana landsberg
gtacgagcgtgaagaaggagacattggagtatcgaaccatacactcctcgtagaatattagagcagtttttctggaagtgcagttattatttttagtgatttctagggttgcggttttgacacagtccgaacatgatgttttggtgaggtctcctcggcagagaaacatgccatagactgtgtcggggctaagaccgattgtggcattggaataggttccaagggaggaacggtcacggagagaagaaagtagggtttcacggtttgctttgtatgagctggtttgtgtgaagttgtcggataatctgtcgtcgcagaaagtggccatgtgttgaggttgggacatggtttggtgagaaaagagagagaataagaagaagaagcaaaacaaaggagcagtgaatctgatgaaagttgccattttttggtactttcgtgtttatgaaggtagattaaaactgagcagaaacctagccatttatatagggaaagatcttctcctattttttaattcattcaaacatgtaacgtcctaatatatataccaattcagagggagaagatatatataatatgcgttgttgtttcagaattgaacattcagatgattttatcaattacaagttgattctataaatctgaacaacaaacatcatcttttaatgttccttgttcttgaaactttgaaaaaatcattaaagttgacttga

SEQ ID NO: 4395 - DNA, 2759 bp, Arabidopsis thaliana landsberg
gacatgatatttctcattaggatatcttcataagaaatatatttacgtttatggagtttattttcaaaccttattaaatcccaagatgttctggcaaatacaattattgaaacagatggaaaaaaagtcaatgctatcaatttatgatttgaaccaattttcataaaacatgcagaacaatatactaaggttatattttaagtttcgtaccatccagaggaaactaaattaatgcatgattatatttacatgggtcaaattacttactacaagaactatttaataaacatccatgaagaaagtaaaaagtaaaaaaaaaaatatagaataaagactacttgtttgcatcattgaccttataatatattttgagagagattgagtaaaaacactaatttgcttcttaaataatattgactttatgaaaacgaataaaaaattggattagtggcccttaatggtggggattagttcgtaagaataataagagaagtgggtcttttatgtcagtttattgatttggtggatctttatggctttgctggcactaaagtattgttgtcttgactcatcttcaacccacttttgcagtattatggaaggttttgggatatacatgttactctcctaaatttgaaactttattaagtttcatttattctcacttgtcattattagattatacgaatatatttatgcatatttttttatagacccaaacaagtgaaggacaaactcaagttagatagccatcttgattctttcctatagacaaactttagttcttgaagagatgtatatatagactatatattagcatttcttttctattttgattgcataaaatgaaattttgattgtagattactttatccaactagattggttagttaatgataagtattgcttgtggtggaagtagtagaagatgatagggagagagatattgagagaaggtagccattaagcaaacacaaatgcataagagtttgtttgttgcagacagcattgtcactttcatctccaccaccatttctctccactactttacatacttaagtgaacacacaccaagacacactcttacaccaacaacttcacgaatttgattttttaaattgtaagaatgtattgtatatatattaagcaattggcgccaagaactaaagtcgaagagacatattttagattacataaatgaaatgtattgagacgaatagtttattcactaggggatcggatttaaacgctaaaacaagtatatgtaattatggaacctgagtcctgacgatacggattggaggccaccggccaccacctagagacttatttttataaagactttgttaaataaatgtaggttgagacttcaatactaaggcccaaaattaaagctcaaagtctaatcccatctattcatcaaaagcccaatctattttaggagtttcttaaaagaaaattattggttgttctgttttacaataaatattttttgtttctaatatgcttgtggtattcaacatgtataattatttatttatgatttctaactataaccaaagattcatatactttagccaatttcctcatatataaatgggaaaattgtcaaaaaaaatcacgaactttcaaatttgggatgattcaatcttgaacttcacggaagacaaataaatcgtaaagtttttgttgactttccaaataaatgataaagtttttgttgaattgtcattggagtcatgtcgttgagtaggttaacataattattttacggcgttaatgtctcgtttatctcctttgttagaacaaaacaacattgtttattgcaactcgttttgtccgttaaaacaaatttaaaccctaaatctccaaatcgatttcaatatctgcgattttgaggtcaaagtaagtctgtgattttgagataatgaaatcgatttgagaatttaaggtttctatttgtttcaagagacaaagcgacgtcgttttattttttgggcaaagacttaattactctctctctttaactatagtgatagttgctaaatacacatcggacaactcgttatggttgagtatacacattagagagttttatagaaaccacaaaatcattactactctctatacaaattttcatatttcgaggcatttctcatattgaaaatagctaaattgcatatttaacgtcaacaatactcgaatgtattcatttcaaaaacactacattgttttttattattatttaaagagtaaacaaaggaatccacaccatatgaaccaaattggtccctaaaggaagatggagaatcagtagaaataatgattgttaacgaactgagaagcggttgcaagcgcgccaccaagaatggcatcgatcacaatagtgtctttgcctttcttaccaaccgctgagagcactgctcctgtcgccgcgcctgctaacattgcgtttttctgatacaaacaactcaaccaattagttctacaaaactgtaagaattgaaaagagtgtgaaaatgtattagtagtatacccaatctctgctgccacggatacgttcgattccgtattctgttccaatgtacactccaccagcagctcctgatcatattcatatgccacaaactttagacttttcttaatcactcaaaaatgagataaattagaaagcaacttaccccagtaaacaccttctttacacaacttcttaagctgcgacaatattcgacagaattttcagaaactctaaaaaagat

SEQ ID NO: 4396 - DNA, 2307 bp, Arabidopsis thaliana landsberg
acatacttataattactggtgttgctgctcctgcctttcccggaacacgaatcacctttggtacaccaatcttttcgcatgattttccatctctctctctgtgaatgtgatggaccgatcaatgaggttaaactctttgtgtgacttgcaggagatacaaatctagcaattttccgtgttttcaagctccaagatagtgaagaatccatagagaaaccaactacagagtaacacaaaacccgagaattgcttatctttgcttgcaattaaccggtttttgttgaaattctaagttgttttacaacattgttgatttatatatatatgaacaatagctttttatataatattataacatatatatttttgtttttggtacgttacaaattaggtgtgaaagaattgataagtggtaaacataagctttcagatatttccagagggacaaacaacaaaacatttacagaaagaaaatttcccacatttttatctgtaaaaactcttcacgaataatatttatgtttatatatataataaatatggatttatatatatttttccaggtttcttcaaagtcttgaggcattatcaagtctttcagaatccaaagaactgaaaacaaaaacaaaaaaaaacatataaatacgtaaacaaaatcaagtacgaataaatcttgaaaaagagtgttttaaaatgtgttagtttgttgttaccttcttcttctttttcttcttgtcgatataagccattatcacatgctgcgttgccatggtttcctccagcgtctgaattttcaacaaaataaaattgatttataacaggattatgaaaatggtctaaattttagatcaaaagaattaaaatagcttttaacttttataaatgaacaaaatagtctaaattcaaacttctaaactctaaaataagaaactagttatggaggctgtttaactttgtacctttttggtctgagccaactgaagctctagctcgtcgacacggctgagagcagcggtgagaatctgttctttctctggcgagaacgctgcaggctgattgtccaaagacctacatttctcctccaactcggccattctcttcaccatcgacatatactcttggtttgacaccattgtagtctctgctttgtccacttcaccaccgtaaatggcagcctcagtgagcttccttggcatgttcttcgttagcctcaccacggtcattaaccccatcaccaaagacatcactcccccgaataaataaccttctcctcctctcctctgcgatggcttcacggcagagtataaatctgcgacggcaagaacacatttaggtaataagtggtattcttgttgaagagtgtagcggtatagtataatagcagaatctcttttcaaagacatgaaactatgatgaatgtttggaatggtaataaaaaaaagaatcatgttttcaaaacgtgaaaacacgaataaatatagtgtagtgccaatgtttcaatgtagtgtaccttcaggttcaggatagtttgacttgtggagatttgtaggccatgttttagcattcacagttttgtcaatcatcggtatgaattttgtgttctctgcatcgaatttgttcttctgccaataggatttcaaaatcagtcatacagagaaagagagagctaaagaagtaacctttattattgacaaaagagagaaactcaccgcaaaggaatcagatttcttcaagcaaaaatatgagaatgttagatattactgtaaattttaaagatcaaagatatttttgtattttgcttttaccattgttgtgttctcgtccactgagattgtcttctcttcaatgtttgacaaagtcttccttgggcactttccttctccgttctgaaccatctgtatatagttcaagattcagcttctcagttcatcgtttcgttaaacggttttcgaagattctctacttatcctacaaattaccttgaagatgtcagggtcgttccatggacctttgtcagaacgcatacatccacctttgtctgcacaagtgcagttaccacccaagaactcaggaagttcactaaacacaaataaagaacagatagttttcagattacgaatttgcagctaaaatgcagagttatggagctctgttactctcttacttggagtcgataatctcaagcagcttgctttggtatttgttgccaagaacctgtacatgaggcacatgagatttcggacaaccgtagaccttaaagaatggatctttgaagtgacacaaaacagaaaaaaagcttacgtgaat

SEQ ID NO: 4397 - DNA, 465 bp, Arabidopsis thaliana landsberg
ttcttgttctcctctcatcctctgaattctcaaaatctgactttctttcctttttctcatcactgctcaagaatccctcaaaacctgtagtgaaagctgttttgatttgatgagacacattaaaaattatctaaagcaatacacattatttaaccagctcaacaacatatattgaagacacgagaaagcaaagagacacaatttttagattctcattattatattagacacaattccaagtttaagctacagtaaaacctagaaaaaagctaacccagaagcaagaacattacaaagaagattgagatctcttacatggtcttgcaaatcgatcaagtggacctgacatgttaaattcctttcgactaaatatcgaaaaaatattgtgattctttagatctataaaccaaatctttcgagaagatggctgatccacgaatccaaaaaaaaaaaagaaaacctttt

SEQ ID NO: 4398 - DNA, 1870 bp, Arabidopsis thaliana landsberg
caactcacgattgaaagctaagtatactccaacgggagctcctacaagataataagctaccacgttgttcaaagctccaatgtgttgccaaccacttccccttgcaactccatttagaactgctgtgaagccgtcgaggataaaggagaggcagagcaaaggagttaggttagccacatagtccacaacttctttgctgttgctgaatgcgtagcctataatgtttcggcatgtgaagagaagtgtgctaaagaaagctgactctacaagccagagacaaagccctgccaatactgaaaccctagcaacttgaggaatcccagctcccaatttgtttgacacgcgtgtgctgcaagaaaccaaatgactattattgtttaggaagaagatgttgaatatgtttggttaaaaatttgagttcatacctcacagccgccgcgactccacctggaatcacatagtgcaaacttgctgttgtaagacttgcattaaagaaataagattcattagtttttagtaaagaggataataaaaataaaaagaagtcgttatatgatatatatttaccaaattgaaagaacagaggtctcgagtttcgggtttgggagaagacctgaacagagtatgagtagctcaaatagccaccattctaggctattaaaggaagaccaagaaaacgcaagcaagataaaaaaaagcattggttgttgtatgtaacttgaccaacaagaaacttaaaaacgacttaccaaaccattgccgctgatgggactccgaagtggaagaactgcttgatacaagacacgaaatcactggatacaaatacgcgagtcttgtcgcaggagctggagtacctcacataacatgagagaatcacaacatagaaccagaaagacacactaatagccatggcagctccattgcttcccagaccaaacgcgtaaacaaaagcccagcaaacagggatgtggaacaaaagagtggtcagggtacagtagagcagtggaagaaccaacccttgtgctagcagaaaccgagtcagtgggatgaaaaacgcatgggcgaacaaagccggtatgagccacaaggcataggagccagcgactctagagatgtcagggtcttgaccgagagagattaagagcttttcgatgtaaatccagagaactgatatgaggacacatatagggatgttagaggcagttgcagagtatgtgtaggttccgattttttcgtattgtttggctccataagcttggccacaaagagtttctagtgcacccgctaacccaaactgcacaaagaattaatatagtgttatcaagatttgagaggcaacttgatcttgaacttaagaggagagagtagttatagcatatcattaccaaaacactgaacccggaaacgtttgtgaaggaggttgcaagagcgacgccggagagctggagctcaccattgtggccagcgaccatgactgagatgactggcaataagtactgtgcaatggtcacggtggccataggaacagccaagcggctcactttcttcagctcgacattgagctgaccacttttccatgtggctttacaggggactatctgctcatcttgcggaagaaatggctcttccattgttttaggttgttaattttttttttgtccttattttttgtttgttattgttttgtgttgaaagccttgtctagtactttaattgtctataatttatgcggacattcttccatcttttatagacactagacagacgacgaaaccaatgtcaatgtcaacgtagacttttcccttttggaaattgtgggaatagaataatcaaaaaacatgactcttagctcgaccagtggaattctata

SEQ ID NO: 4399 - DNA, 5070 bp, Arabidopsis thaliana landsberg
gttatgttatcaatcacgcacgactcaatcaatcaaaaccaccgtatgaaagctctgtgtctgctgttgctcgaatgggttttgtttgatctaccttaatctcactttcatcttgttatttccaagtctagttttggtgggtatatattacaaatatatgtattggaagatttttgcttaggatgtgaatgtgtgttatctgttttgctctgctagtctataatgttttagtgtttgtttttcactgaagaaagttttgtagtggtgttgtttgtctccttcctctgctccgattttgttctctcttggttgctaactcattctttcaaacaaactccacaaatcagattcttgatattacggaaaggagtattattaacaaaatttctgaaaaagttatgtattattcaattgaaactacaatgaataaagtctgatacattttttaagattgaataaaacttagttttgaacgaagtttatcgtttaaactgtgttaactggggcttgtaaattcacaaaatgtttataaagatggcttaagtgtttcgcaacacaattaaataaactaaagtttagtgtacataaaaagactttttgtggcctatgaaatttgtttttcttaatgaggaactgaatcaaatttagagaaaaggtgttccataaattatcaaaaactcgcaagtttacactgagaaaagtcatcaatacagcaaaattaaaccgggaacaaaagagtgtgtgaaacgacagagcatcaaaaaactaaagtttagaagaaaaagacatctctcgatttcttaagctccgatgatttcagtaggttcctcaacagccatctcatcagccggcctgtctaccttaacaccaacatcttctgctgagtaatctccgtgaacctacaccaattaaacacaagcattcagtttatatataacatggatattgaaccataataaatgtatagtgttcattttcttcactcacatccatgagcttgccaaggtcgaatttaggggccttgaggatcttgactttacggatgaaaacattctgaagagggtagatgccctgagttgccttctcaatctccctgccaatagcttcaggaatgaacttagcaacaagatccttaaggtcacatgaggaagcttccctaaccatgatgtccctcatcttcctgcggatctgaggaattcacaacaaagacatgtgaatttttaagacttacaatttgagagaaatcaaacaaggaagattaagaatcattgacaaaaggaaccatctgagctcaacagaaataacagatcaaagattgcaaaagtaggattcagtaataagagaaagagatcaagttctgtagtcaggcctaactacaagtattgcaggggaatgtgtgcgtacctgacggatttggctggattgagcgtagcaagtcctcttgacctggttagcacgtctcttggtgaaggcgatacagaatagcctgagagtgtaactgtcggtggttttaacatcaacatgagcctcaatcaaagtctgccacttcttaaccaatgacctaagtttatcggtggtgaagtccatgccctaaagatgattaaaaaaaactgtcaagctccacaaccataatctggtttttttaaccaatgaccagaattactgatggaaatcaatgtttacaacaaactatccttacccagaattggcacagaacgttcctgccctggacatcttcagctctgagacggatcttcctgtaagcgttatcctcatcaccttgaagatcagcaagagaaacctcaaaaactctgtgtttcaagccttctgaggcaatctggaagagtaagaacagacatcatcatcagtctcaaagtccgtacatggcaccaatacaacattttacactcaacatgtataagaaaatgaatagtaacattataacataagatacacaactgtaacaatcaatcaagagccataagaatcagacaaatcagcttaatcctacgaagagtataagcagccaagtaatttgagggtgtattgtaataaagagagagacagaaacattactttggtaccctgagttctggaaacaagtgtctttccaacattcctgtgagtgaagattgaaggagccttaacatcataccaatctttcttggagaaaggatcaacactgcaacattcaattttcaaaaacaaccaatcaatcacaaatgataagattcatattctcatacttcaacatggccactaattcatacacattgttaaggaaaacaagagaaataagattcagaaaaacttacgccttcttctttcctcccttcctacccttagagattctcttgtttttcctacagtaaacaaactcatagatcagtgacaaatactttaatgatacgaatcagagatagtagaaatgagaggacaataatctgagagaaaagtacccgacggccatggctgaggaaaataggtcgacgacgaatagagaagaatcaacaataagttttaacctaaaatgctgctacggcgcttcttcaatttaaagtcttcttctagggtttgagtttcacacccaggataaacaaagttttgggccttcaaatttaccagtaatggactaagcctaaagttgtatttacttgcatctaatggcccactaaggtgtccaatatttcttttttccacttgagtctgaaatcgattataaaaccatactatatatatgtgaaaagaaattaaaaaacaaataccatacatgattttaggatatgagaagttgtattttatgaattagtgaaaaatatagatatttatttaattgttagataaattgcatgatttgctaaaatttcacaaatttattattaacgtttaacgtttagattgaattagtttaatttattatttgattaaacacaccttcgtaaaccgtatcagtgattcaacaatatagccaagtgaataagaaaaaaattataagggtaaaagaaaaggaatgaacaaaagtctgactgtaaaaaagtttaaacaataccaaaataccaaaaaattgtttgggctctagtgctttgaactaagcgattttcaagtttctcaaggcagaagtgaggaggttgagcttagcgggagctttttgcttgtactctcgctccaatgcagttgcagccaaagactgaagctctggtgcagccatgtccttgtcctctttgttcctgccttttgagatctgtgcgattgctgatccacactgatttcaaaaacagaacatgtatcggtcattttgtcacttgcataaccaaagtggattaaactggtgtgaggaagaaagggttcataccaagcatattccgagaagtgctcttgtgcttttaccacctgtcaagtctatagttgctgcatagtactttcttgctgcgatgaggttttctagtccacctattgtgtagagaacctgattttggcgattgcaacgcaaaatgaaaattacgttaattacacaatcatacatgatcaatgctgtagtttagagtttcgaactatataaaaaaaaaacttccaaacttttagaattctcagttttgagtttgatatgtgcagtgcaaataatgcaaagttccagaaaatagctcgctcttctattgctactacattaatagacatatgaatgacaatgaacttccagtgtaagatataaggaacaacaaaattgattataggatgcatactagatacattgtcttaaacaaactaagacattttgatgctccttggtgatggccaaaatttgacttttttctttaacaaagccagagaacaatttttacttttttttaacaaataaataaaagatgggacttacatcggcatatgctaagtggtacaatggaagagtaggctgagttagtatgagctcctcgtagcagaaagctgcttgcttgtacctgttacagattataaatttaaatgggttataaagagagcaccctcaaaatgaaaaacatttgttaatcgttgagtagttaattgtttgtcaaatagaatctgaggacagaggatagagagacgcacatttgcaaggaaacataaatttctgcaagttctctccaggcatcatgatcagccatgaatctatataagaaagaagagcatataaaagttatcagctgtttgatatatttcttctaaagtactttctatcagtccagcttggggttagtaagtactcacacttcaagatacttgttcagatgttcaatggctaaggaagatttgccttgtgccttggccatagccacctttcttttgtgaattacctagacatcgagtttgacttacaacagttaacatttggaagtagcttgtgggtagtttcatgacgaaaaaatgcggaagcttacttgatcaagtggattatcctccaaaaggcttgtatatgctttttcagcctcttcccacattccctttgcttctagcagcagagcctccagcttgcctgaatatattaccaagatgcagctcagattggtatcaaggtaactaagaaactaggtgcctgtagagcccaactttcagtatagctagaaaacctctgagcacagatatgaacacccagaagacccaaaatggcaaaataaacaaaaacttgtgagtatggacatgtgaagacacaaaacttacacatgtacaccacgtgaattcagcctgacgtagctggtatactttaaacttgataatatgttcttacttataacttgataatttgttcttactttagagaagcatatgcgagaataagtataaagaaaatggaaaggatgtggagtttatgtttcttgttcctaagttatcaaatcgtatgtggtttatccaaggaggctagagaaaggatacgagtaaaatttgatgtccaacaaagagtgaagaattgctcagtgtgtcaagggttgatattgacttaccaacacgtttgctcttcggaaatttttttttagacccttgatgcaattttgcaaaaaagagattgtcataacaaaagaattttcaaaaaacaactca

SEQ ID NO: 4400 - DNA, 652 bp, Arabidopsis thaliana landsberg
gctggcctgtctaccttcacaccaacatcctctgctgtgtaatctccatgcacctaaagataaaccaaaacaaaaagagttagatttcattacatccttggaaccaagactagtgcatcaatgatgaaattaatgtgacttcaatttacctccatgagctttccaaggtcaaacttgggagcctttaggatcttcactttacggatgaacacattctgcaacgggtagatgccctgtgttgccttctcaatctctcttccaatggcctctgggatgaacttggccactagctccttgaggtcacaagatgaagcctccttcaccataatctcactcatctttctgcggatctacaagaatcaagaaacatttacaaggaaaatgttaatcttctgtttacagaaagccaaatagtaagcacatggtatgataatgttgtaacctgacggatttggctggattgagcgtaacaggtacgcttcacttggttagcacgtctctttgtgaaggcgatgcagaacatcctcaaggtgtagccgtctgtggttttcacatcgacatgggcttcaatcaaagtctgccacttcttcaccaatgaccttagcttgtccggtgtgaaatccataccctacagagatcacagattaaaaac

SEQ ID NO: 4401 - DNA, 3612 bp, Arabidopsis thaliana landsberg
gaggttaactcccattgatattgtgtgtctattcaatcaaatgaatcttgttgatgatatttactgatttttctcgtttcctaggaggaagagagattgagaaaagtgctgagatttgcaaacgcttgtggagcaatcacgacgactaaaaagggagccattccagctcttcctacagattgtgaagctctcagttttcttaagagacaagtagaacagtaaaacttatcttcgagtccagaattctccttgtctattgtaataatctgttctggattcttcctgatgattctgatcatttgtaatgtttttttttttttggttctctctctgtcttttctttttcttcttcattgtattgaataaaacagacttgtgacttctgagcttttcttgctaatagaaaacaacgagtttttcgtagttgtttggaaccgtaaattgcgttgaggattgtttctcaaggctttgaaaacagagtaataatcaggaacaaacaaaaaaaaaccaagaaagaacagagagaacacatttagtatcaagtttttagcatcaaagcattaagcatagaccatgttcaagaggtatgaacaaaactcaaacacagacatttgttataagctctcaacatatcttacacaacttaagacaaaactaaaatgtatatgacattaactccacacatgcagataggtttcttgtttgttcttttacattgaagaatgtctacacatagattacatatagctttttagccaagatcagggacaatgaagtgttcctcatcatcatcatcatatctggtctcaaacctcggcttcttgtgtgaaacatttgacttcataggtttgtatgaatgaacatgacctaaatgcgaaacagaaagctcaggaacttcagctgcaggaagagccttgtcattaatctgatcaccgaagaatcccatgtctgaaaaccaatccaactcccctgccccaagatcaagctgtcctttctgctcaatttaaaccaagaagtcaataaaagcttcttgcaaagaaagtgatctaacattgaatctcaattctcatcactaccttgtcggtggattcaatatcagagaagtgaaagaaatcgtcaacagcccagggaagtggagtagcagaagaaggttgttgttgctgctggcttgtggatttagcaggaatctgattagccttctgttggttgttggaaggctcaggttgattcttctccatttctttactacatatagttgaggtcagagctactttgatcccagtggctaagaacctctggtgattagcagatcgagaattagccacgtggatggattcatcgcagtccctgcaaagcagagctctatcctctacacagaaaatgaaagctgccttctcctacaagtcataagaacataatgagcaaaccctagtcttaaacaacaaggcatacatacaacagttgctacaagatctataaaatcacaactttgcaacagagcagatccaaactaacgaatccataaaatatttgacaagatctaatgagatctgtagagaaacttacttggcagatatcgcaacgagggaatttggtggagagggaattaagatgaagacgttggtgcttgctagcgagtttgttagcggcgtgaatctcgatgtcgcattgaggacagagagcagcttcgtcggcgcaacaaatcaccgtcgccggagctttctcacacacatcacactgtatcttcatcaccggatacaagaaaccaaaatatctaggtttctcaagaaggaaacagaatgcttaaaatgaagggtttattgctagtctggcttctcttagaatagcttagcagaagcgtaggttcagagaaagagcttagagaagatgaaagaacaaagagggagagagtgttttgtggggaacaagtaggtgggatgagcaattggttgtgagtgaaagagagaagataaggatttgatgaatcttgcttgttgctttgttttcattattctgcgtatcaaaaggaaacactctgcttctttcagcaaggtcttgcgggtcccactctttttatgtggctctccttcttcctctagtcatctctcctacctttagatatttttattatattcacgcgttgctattttatattcttgttattttctcacgtagtagagatttgtgttttgtttactaatctagtcaagacacattaattttgactaataaactaacttcaataattccaccaccactagacttttacgctccttttatatgatatgctcgaatttctagtctcgtgaacttttacgatttcaagaaagatttgtatacaaaaatgggcttcatctagaaagaaagagttgggtaatggtattactcaaatcagagaatattactcgactacacgtaatcttgaaaatgacatgtgaattgattccttggaatgacgacatgttatgttaatatgtaccattcgatcagatttttcttcttctttcactttttcgttttctcaatcataaaaacgattaatgcaatcattaaaaatatactggcatgttaactaacaaagatatgaatgcttagcccgttcgagaaaaagaatgatcctaaaagacaccaatacaaaattaggcatggttggtcacaagaattgttgttggatatcacatatccatccatattagtaaaaaccaatctatacatctgtggtttttgtaaagaattgacaagtttttgtttgtgttttttggtaatgaaatcggacgaattcaaagaattgtgaagttaatatctcccaaaacacttactgcttctgtacttgttcatccttctggatgtccccatgagaagtattgttcatgttggccgtatcttgattaagcagattagagaatccatttccaatcgatttccaccagctcgaccgctatgaggtagtttgatcccgctggtcattactggtgcttgaggacagttcgatagatgtggctgactcggtctgcagctcaaagaatctcacagctcctagtagcttttatgaaagctatgcttcggtatgactctcaatgaggaacgcaagatcaactgtcaatgtagtaacgtagccaaatgcaagatgaacaatggcactagcgaccattgaagaaccaatatcgacatcaatctccacaaagttttcccctgaaacatatttgcaagagagtgcacgtccaatcacacagatcgcttgctctccaacagcttttctaacaatccaagggcctttgacaatgtttgcaatcattttaagcctcgatttcttgaacccatcatctcctttcaaaaaccgatccatcaaggaaccttcaaagataggctctgtggtaacaaagtaagccacagcactgtaattgactttgtgaggaagctggaaattgaatgcccacacaaaaggcttagttccatctttttaaaactcctcatcgataactttcctgatggggggtgtgggataactcaggatctcagaaactatttaggacctttaatccaatcaaaacccagaggctttaaaaagaaatcaccagcaggtatcttaactttgtcagagaaatactttgg

SEQ ID NO: 4402 - DNA, 2371 bp, Arabidopsis thaliana landsberg
gaatacaccctacatttctattttgagagaccgagtagccgatttctttttccttgggagatccgatcacaaagagaaaatatgacgatgtccgatcttccgccagatttggtcgaggaaatactttctagggttccggcgacatctgtgaaaaagttacgatctacttgcacacaatggaacgctatattcaaagatgaaagattcactgagaagcactttagtaaagcatcaaaggagtctatggttctcatgttgaaggagcatagggtttgcccggtgaaagtcaatctcaacaagtcgtgatggtttgttgttatgcaccatcaaggataatagactcgtggtttggaatccgtgtttgggggaaaccaagtggatccaactcaaagttgattaccggagatacgtctccaagttttgtctagggtatatccaaaacaacgaatctcgccgtagctataaaatcttgcggagttagtatagttacgatgacaaatcatcaccgcgccaaagagatttgggatttgaaatatacgagtttatctctgattcgtcatggagagttcttaatgacgtcaatcacgaattcgttataggaagtagcgtgtctttgaagggaaatacttacttgcttgcttatgatgttgaagaaaattctagagttttactaatgtttgattttacaacagagagattcaaacgtctacgccttccgcatttccaagatgttggtaatatggatctatcagctgttagagaagaacaactctcaatattacattggactcgtaatacatcaaagatggagatttggataactaataacattgatactgatgctacattgttgtggagactgcacttacacactcaagtcttctcacgtaattgtgttcgagtcttctcaagtctatatatcgacaaggagaagaaagttgtcttgtgttgtaatgttaatgatgatgcgaccagcaagaacatagtatacattatcggagaggacaatggatattacacagaaatccctttcctactccctataaacatacattgggttctacttgaccgtaataaaaaatggtattcatctattttcaattatgttccgcgtttggttcaaatctataatggtcatctcttatttttttcttaattaagtatctgtttttgaacaatgtagagtttttttttctaaccaaaaataaaaattaatttgattcgatgatgagtttttagtggtaaaaatgttgtttaatacacaaatttttaaaaatggttatttaatacgtgaataatttaattatggataggttttggtaccttatttatggttcctttctacatagcgtgaaatacgtgaagttcaatcggcccaagagttgtgggctaaggcctaaaacctctgttttataaaaacaaataatggtttagggcaaacgtgagaaaaacaaaacaaaaccctaatctctctgtttacagggacgagaccgagtctttcttcttcgttgggagatcagatcacaaatagggaaccattgatgatgtcgaatcttcctttggatttggtagaggaaatactctctagggttccagccacatctctcaaacgattacgatcgacttgtagacaatggaacgctttattgaaagaccgaagattcacagagaagcactttcgtaaagcaccaaaggagtctctagttctcatgttgaaagaaataagcgtcaatctcaacgttactcctccatctatagagtttaaagatgcacttggcttaaaggattcccattctaattcagaacaagttgatatagtccaagttcttcactgcgatggtttgttgttatgcaccaccaaggacaatagacacgtggtttggaatccgtgtttgggggaaacccattggatccaattcaaagttgattacgggagagtctactccagctttgctctaggatatatccaaaacaacgaatcttgccgtagctacaaaatcttgtggaggtggaaaagtaacgattacaaatcatcaccgcgtcaaagagggtttgaaatatacgagtttatctctgataaatggagggttattgatgacgtcaatcacgactctttggtcaatcacaactatttaggacgttgctgtcgcgtgtctttgaagggaaatacttactggcttgttgatgatgttgaagacaattctagatctttacttatgtttgactttaaaacagagagatttaaacgtctatgccttccgcatttcgaaaatgttgctcacatggttctatcatttgttagagaagaaccattttagtcataaattggtggccgtctacaccatagtttgagatctggttcacccaataa

SEQ ID NO: 4403 - DNA, 532 bp, Arabidopsis thaliana landsberg
gaagaatcgaaaaaaaactggagcaagggttcataaagattttgtggacgttgagatattttccagaggggaaacgcaactgttacagtttcaacgtcaagcaaggaacaaactatttgattagagtcagaatggtctatggaaattatgacggtcaaaatacttatcccaaatttgatttacacataggccctaatttctggttaaccatggatttgggggaagtggaagaaggtagtggtgcactggaggatatcattcatactccaagatcgaacttcttggatgtgtgtcttgttaagacagacaaatcaataccatttatatcgtccttggaactaaggcctctaccaaataacagttatatcactacatcaagttcattgagatattggagagagttctatcttagtgagtcaaacaagtttataacgtaagtcacctttgatgagacatttatccatgtatttgcattgctctcaaaatccatacataactctttgttaatgaatcaccgatgaaatagtctact

SEQ ID NO: 4404 - DNA, 1532 bp, Arabidopsis thaliana landsberg
aacttctggcggccttctacaactccggtgaaaccctccaccaagtcttgggtatacgaagacacttatttcctccacctaaaacccgaaacttttgtatctactttgatggtgaactccgcctgtaatttcttcaattgccggtaataacttccggcgagtccgacgcatattaagaatcctcttcatcttattatttttaccatgaacttgtgtaatctcaggtagccttgctgaaattgcagaatttcttactactcttcttcttctgatgggctcctggtcagcccatacatgttattttttatggttttggttttacgaattcaacttaacatgatattactaaatctatgatatggtgtttattttcttttaaagttttcttatatatatatatgtaaccataagcagaagaataagaaattaatagctaaacaaacttttgtgtcaattgtttctaatctcatgattggacctatcatcttcgcacaacttctatgaagaacacattgcgtctcattgctcgctatctctttaactcaaaaccttttccagcatttcaggtgaaagttctcaaactttcaatttcttggttcatgatgggtgtttcttagagtaaaagctcgtgtaggaatgatagaaaggatggtgatatatctagaaaggacgagtcaaaagcctatggataatgtttacctacaatacgagattctgatagctatatctaggcgagaacgtttgaaacttttgagtgatgatattaagaagttgcttttggatgtgaagcagaaattattggttcctgtatagatagattatattacaataatttagtgtatggtttctgtagcctgggttctaaaagatatgctccacattgaagtcataagaacttgaggtacaagagttgttgtcttgactttccttgttcttagatcctggaaccatgtgtttgttttaccttttagattgatgagaaaagctcaaagaagaagaagcagaagaagaataagaagaagatagggttagataaatttttgattgagattattcaacaagatgctctggtgatggtattgcatgcacacgcccatccctctcggatagccggtgctttcaagtctttgttggtctttgtaggataagatattttacctgaaattttctgcaattttgtagaaacatttgctatggagtttagataattttgtaaaccactttgatcagagatctccgattgcttatacattactttcgactcattgatagaagaaagcttggatcaacggatttttttgagtagttattcaagtttcagactaaactaaacacgattctaatattattttcatcatcaatgttctcaagttataaaatccaaacatctatcacatcatctctcaacaagaaagaagaatcagtacccaaaagactagaaaaacgagtcaaaagcattattctgaatatatttgactatatcattattagcttcaaaaccaccaccaagataaagagctgaaagaagcatc

SEQ ID NO: 4405 - DNA, 1872 bp, Arabidopsis thaliana landsberg
catcggatctcgacacagataatgaagctttgactcctcccagatctcctccaagcttcgagcttgttgtgaaagttgaaccaaataagctagagaccaataccggtgagactagccgtgacactgaaactgattctaaagagttctctttcgtcaagcctgctccgagtaatgaatcatctcaagaccggtgagactagtcaggattgtgaaggtgtagcctgcgccaagtaaagacttcttttcgagttaagcctgcgccaagtaaagaaccatcgtagtaaagatgtgtcactccagagttttttttttttggtttcatttatctaatgctattgtaaatcaatgccgtggtgataaagtaatgaattgatgaccatattaattaaaataggctgaagaaaatgagggacaaatattaagaatcagttcagtaaaaaggttaaaagactcgtgtaaagctcgaaactatcttccagctggttctcaaatatctgttacaacataaggccactttcttctcctcgtcgattaatagactcgtgtaaagctcgaaatgattaccaccaatgggtaaatctactgtagagaatttgctccgcaacaaagcaacttcatcagtatctactttcttggttacatatatctccatcttcgattcatcaattcgatgtaacagtgagagttgttcttctctaacaaatgatagggccatacagtctcttggttgtaaaatcaaaactgagtaagaagtcctttttaagccaataagcatttcccttcaaagacaagccattagcagatgatggaaagcagtcgggagggaggacatcaagaaccctccatgaatcagagctaaactaatagattccataccccaaaacttggttgtctagtttaccggcctctaaaccgatcttctcttagataaatcataacgtttgtttgattttcagttttctacttaaccagtattaaacgaaagtcgaattgagatgagtggtaacatactaacaaaccacagtttaattaagaagttaattataggccacatgattgagcaaagctttttgttttgtaacacatctcatcagctgcttaagattttggctgcctctccattgccaactggtctaaacatcattgcattggcattctcatgatcaatcaatctaaaactttgaatatttatgaaaaactgaataacaacataacataaacgaacaatgtaaaaaaagaaaaacacaaaaaaaaaaaaaacagtttaaaaaaccaaaaccaaaactcttaaactataaactcatgaacgctgaggtctgaaagggtgtaaccaccacctgttgtcaataggtgacaacttcttcttgggaacattcgggaaagtgacgacttcggtgatggttgtcttaaaattatcttttagttaattcatcgtattttcgatgggcataacgtttgatgcattaaggcccatatgggctatacatgtactgcatttgagtggcgttctaaggattgatgtattgtctccatgagagtattcgtttaactcatggagtactctccacgatattttctgtaaacttttcttttttgttgattagataaatagaaaattgtgtagagcgaaacttttaatgaattaaaatgcggaagcgattaaagcatgaatagataaattggacaagagattaaacgagggatcatctagtttttacactgatcactagtcatctgcttgcagaagaagtatatcattaatcaagcaaaacgagggcataaatttcttacaaataacttttacagtaggttaatgattttttaataacttgtccatttcacatgcatgtgtatctttgtactatacatgct

SEQ ID NO: 4406 - DNA, 1424 bp, Arabidopsis thaliana landsberg
aacatagtgtaaaccccgagtggaacgacgacttgactctttccgttactgatccgaatctcccgattaaacgtgtaaggaatccttacattatattgtagcatgatagctgaaacagaatgataagcggtgggaattatgatgtagacggtttatgactatgacttgctctccgcggatgacaagatgggagaagccgagttccacattggtccatttattgaagctattaaatttgcccatcagctcggaccaggacttcctaatgggaccataataaagaagatagagccgagcagaaaaaattgtttgtctgaatcaagccacattgtgttgaaccaaggcaagattgtccagaatatgttccttagactccagcacgtggagtgtggagaggttgagctacagctcgagtggatcgatgtcccgggttcaaggggtatttaggtcaaatcatatcgatccgatctttattagtcccttgtgcatatggttagaaactagaactatggtgcagtttaaaactggtcaatgaaagaatctcaaactggcttgtgtaataaactcatttcgtattttttttctcttgtttgattccaaaaagtttgcaatttcatgaggagtaagtgtaaacatttggatatctacataaatatcctgtcttattagcgtgaattgtgtagactcaatgatctttcgcctcttctttgtgaactattagggattctgatagttccaattatgagcttaggaacaattgacacaaatgtctgtttagctattaattataatttttctgcttatggttacatatatcagaaagccttaaaagaagataaacaccaaatcgtaaatcttaatctcaacaagatttagtaatatcatgttaagctaaattcataaaaccaaaaccataaaacataacttgtatttgccgatcatgagtccatcagattcttagaaagatagatggaaaacagaggaataaagcttgatgaagaattggtgaaatgatcaacgttttcattattccataacaaatttcatctacaatgtttatgtacagatttaattagcttgaccgagtctaactaaatgttaaacatgctaacaaaaacttaacaaattagtatacacaatatgagtttgagttagactatttcggagaaatcgaaagagtaaaatcgattaaaccttagattgttttcccccaattcgattgtgttttattaatctgaaaacaaacacgtggaagccttctatatttcaatttttagaatgttccgatgaagtttgtcggacgaaatggtaaagtcctccaattctttcgggcaggaggacgccgggttcgaaaaccccggatttttgcaaaaaaaaaaatttggaattttaccaattttccaaacgaatgttaaataaactgg

SEQ ID NO: 4407 - DNA, 2464 bp, Arabidopsis thaliana landsberg
atacaaataagtaattaatagactttggtttacataggcttgattcttttgtaaatacctaaccgggttgttccgggttaattaggttagatagggaaagtgtatataatgtcttgtattcactctttaataagataacagaaacattttccactttcgactccttacattttcctcttctggatcttcttcttccttagtattgagctctctttctgttcatctctacttctaatatggtatcagagctatacgcttagctcgcttttctctctgattttgttgtgccttcgatttggtttcataaaatccgaaaatggttaaagctgtggttcgtcgcaacactcgcaagacaggaagctcatcacgcgcaggaagcacctctcgagcaggaagcttaccacccattcaggaagcattgtttgcttcgtttggctcctctgttctgatgaaccctgacagtgttcactctcctctgtttcttcataacgccgaccacccagggatatcgattgtctctgtgcagctagacggcgtgaactacaaccagtggagctctgcgatgaagatagctctggatgcgaagaataagatcgcattcattgatggctcttgccctcgccctgaagaaggtaaccatctcttacgcatctggtctaggtgtaatagcatggtcaagtcctggattcttaactccgttaacagagaaatctatggtagtattttgtcctttgatgatgctgctcacatctggaacgatttacacaatcgttttcacatggcaaatctccctagaacctttcagcttgttcaacaaatccaagaccttcgtcaaggctctatgaacctttcaacctactacacaactttgaaaaccctttgggataatctcgatggtgcagaggctagtgtaccctgccattgttgcaaaaaatcaacttgtgaaagtcagatttttgctaagtctaatgtgaacagaggaaggattatcaagttccttgctggtttgaatgagaagtactcaatcattcgtggacagataatcatgaagaagcctctccctgacttagcagaagtttacaacatcctggatcaagatgatagtcaaagacagttcagtaacaatgttgcttcagctgcttttcaggttactaaggatgatgttcagcctggtgcgttggcttcgtcctctaacatgcctcaacctggaatgttgggtgctgttcaaaagaaagacacaaagccgatatgctctcactgtggttacacaggacatacctctgagagatgctacaaactccatgggtatcctgttggctggaagaaaggaaagtctttctatgagaaaattgctcaggcctctcagtcttcacaggctcctaagccaaattctgctgtcactgcacaagtaacaggaaacagtcagaatactcctgcaggtctggaaagtctctttgggaacatgagcaaggatcagatacagaatctcattgctttgttcagctctcagttacagcctgcttctccggttctgaacactgctccaatgtccacttctcacaacaatgacccatctggtattactttctcatcctctactttcagcttcattggtattctcactgtctctgagactgaaatgacacatggtacatggattgtggattctggtgccacacatcatgtatgtcatgtcaaagatatgttccttaatcttgacacttcagttcaacatcatgtgaatctgcccactggcactaccattagagttggaggtgttgggaacattgctgtaaatgatgatctgatattgaagaatgttctgtatattcctgagttcagactgaatctacttagtgttagtgctttgaccacagatattggtgccagagttgtgtttgatccgacttgttgtgtggtacatggtcttaccaaggggtcaacgattggaagcggtagaagagttggaaatctatacttgctggatgttgaagattcagtgtctgaagacgttgtatctacttcttttgttgcaaactctgttgttgatgcatctgtttggcatcaacgacttggtcatacatcttttgatctcatagacttgctcacagatgtacttggaatttttaaaaccaagaataaaggattgttacattgtgatatttgccagcgtgctaaacaaaagaagttaacttatcctagtcgtcataatatttgcttagcaccttttgatttgctgcacatagatgtctggggacctttctctgaaccaacacaggaggggtatcattacttcttaaccatcgtcgatgaccacacacgtgtgacatgggtctaccttatgaaatacaaaagcgatgtcctcaccatttttcctgattttatcacaatggtagagacacagtatgacacaaaggtcaaggcagtacggtctgataatgctccagaacttaaatttgaggag

SEQ ID NO: 4408 - DNA, 942 bp, Arabidopsis thaliana landsberg
cacagactacatatactaatagtcccacaaactcacttatatagtcaggtcttttctttttcaagcttacactacgccactcaagcattacaggagaagcctgcataagattcatgccaacattatcaaaaccaattctgtcttcaacagatgaaattgaaccccaatagtcagaccaaaatgctagcgtttacctctattgctgccttggcggcactttcttccttaaactccacaaagccataagacaagctctaccagtttgaagaacacaaattagtgtttttgtttaccccaagtagaagggctctaaagatccaattgttagtagacaattacctttttgatcctaacttcaactccacctcttctaatttctccaaactgtttaaatgcttcctcaacgaaggcaatggttgcatcagaaggaagatttttaacgcaaatggctgcacctgttactgataaataagcaaataagaagtattagataaagaaaccgaaatgtggaagctgctttgttactcaccatcattagtctcggatgtgtcaacagacttgaacatgtcagtcaaaacaaagtagccagttttttggggataaagaaagaatctttgtgtgaagttccttccaggtctctcgtgcgaagtgaagaagccatcagcaacgacacggataaccccactataagtttctttagacttagagctggttacctcaacagaattaaaaccaccagaagataacatattaagatcatcgatcatgttctgttccaagataaggaatcagtatcagagcaatgttttaaccaacattacttaatgaacgactcagtcgagactcaagacaagtatctaacctgtagggtagaggaacgcatcgttccatcaagtccaggccgtgtaatctgactgacgtcgttatagtagccatggagaa

SEQ ID NO: 4409 - DNA, 4039 bp, Arabidopsis thaliana landsberg
  unsure (1)..(4039): unsure at all n locations
agacttggtacctacaataaatatgaaagaggttagtatgtttttttttaataatgtgatggttctgtagataaatttttggttttaaagagaacatatgtgggaaaggaaggaataaaagagtaggaaagaaaataaaataaaagttctaacttaccatcatggggttctctaggaaaaataatgtatacgcctaaatggctaatcattccgaattggtgaaataggcaacaattgatgtcagtctatttactttagcgacttgtgggaaaaatctgaacaaaaccaatacatgtcggtctatttggttttgtacaaaatcattaacatgcagataggtatcacgtttgattcttaggcgacaacaatataagcaaaatatgatttaaaaataataaaaactaaaaagtgtgaacttaccatcatggataagtaattttggtatttctagacaaccgtttttgaattgaatatcccaaaaccggtcagattttcttcttttgaattttataccggcttctcttagttctgtcacgcaatgtagtagttgttgttggcgcttgtccgccacgacgggtttccaggaccatctactccgcgataacctcgggtccggtttcagactaggctggagcagacttcgacggaaaacatccagacaatgcaactcttccttctccttgtcagcaattgggttaaagaatttattgttgttttcttgggagttctcgattttggttgatgacatataagttggcatcaacggattgaagaaccgaaccgctaattgtgccactaaaccggtttggtattgtgtaccgagttgtagctctaataaccggtttaagacgaacaaaggaagttgattttctagcattagcatgtcacgtcgaatcgaatgcatagatcctcgcatcgcgaaaacgggatcgtttcgatcatagctacacaccaagataaaaagaaaaaagttaaaaaagaaataaacgaaagtcaacatttagtttagtcaaccggatctgaaatcagtccggtttagcataaagctaaatcatgcttacccaagtttcgagaatccttcataggctcctctgaagagatcgagaacaaaacagccatcaagaactagcatttgggtgaacttgttactgctcaaaccaataggaccttcgtagcaagcacgagccctctcttcgagctctttcatggcgtcaatatacatttcgatgccttgcttggtacgtttcatgaccatattgaccgcacgccatttgtgatagtccatgggtcgtatgatgttcgtccccatggtggtacggacctagctaggctgcttgagggaagtaagaattcttgtcgctttttttaagggagagtggaactctgtagatacagagcttgtcccagctagttgtggcggcgtctctcattacttgctccatcttgtctttgatccaaatcacccattcttcccgtgtctcttcgggttgttggtttcgggtttggagtttttggcgcatcatgaaggtgaggaagtaccaggtcaacatcggtcgtagttgatagtttcttcttgcttttcttcttatgataatatgagggaaaggaagcttcggtccaaatggtagctggggcggcggcggtggtggtggcggtggaagtggtggcagcaccaatagacgaggaggcggcggcggtggaggtggtggtcgtcgtttactaggagttgccatttttgtttgttgaaggtttttaggagattgagagtgacatagaaaaagtctaaaagcaaatatgtaacaactgaactaaagctgtcattggtcgcaatattatttgatctgtaatgacaacaaccagtgattgacatctaatcatacttatacattaaaatgtcttcaacaatctttaaacgtaatggatatataatgctttggcgagcgatgttttcttggacttttcttccactactcttaatagaaagactttattacaagtctttaatggtaatatatatatttcgtagagtagaatatttatttgaacaattcactcttatttataaaaaaaaatgaaagatgcgttagaactgtttataaaaatactataagctatataatgcgttattcattattgacaatgaatgatgcttgaattatccatatgaaagaaaaaaaatctacgaattagaaaacagcaagtttataatttcaactgagatgtgttatcaaccgtagacatgggtaactaggcacatggcacgactgacgacttcaccatggtcgaggggataatgaggtgctcttatagaaagactccaagaaatagtgttcataacatgccttaaaaactaatttataaaactattatatattaagacttggaatattcaaaatcttatgccttaaaaaaaaactcgaccacccaaaaatggtattcagacatgcaaatnnnnnnnnnnnnnnnnnnnnnnnnnnnnnnnnnnnnnnntatattttatgcttaagatatattcaaaatcttatgccttaaaaaattgacgtaccaaaaaatagtgttcagacgtgcaaccccatttccaagcaaatggaacctaatcagcctcgacccgacgaacatttctaatcgctgtcttgatcatctgttcattgttatgtttatcccactaagtttattcacattactcttttgaatgacaactatttgcaaatccatagttctcacaaccatgtctatcactatactgtttagnggttttttttttcattctttttttcaatgaatgaacaatatttactacttcttaatattcactacgtctaggatatgcagtccaaataaatatccgaaattaacctttttcaatccattaactatttaaaattccaaattttacaacgtcttttttttttaattatgaatagaaaatattgaaaaaacaagaaatacaaatattgtaaataaaatgaaaaaaaaaaaatgaaaactaagagagtggcttataataagcatagacagcaaagaagctttgaaagaatgtgagaaatagcagaataactgcagctgaaaaggagaaatatgcccaagggttattgaagtacttttgtcttagagtagccttcaacgagttccacttacgactataatagcggttaacttcacgagacagttgagatagatacccatcttttggatcaaagatcacttctttacataaccggttgaacaaatctgcaacttcagaatcactccctaaccaatgctcaataataccgtcgtggtgcaagtagctaacatcttgagaagagtttattagattatccatgaagattatgtaggatgttatgttgttgcttgattgtgtatggcactgctcgaaagcaataagatttgagaaaagagacttggtacctacaagaaacaagtgagaccacagtgttttggtaacaaatatattctttgtcaaactgtaagatcttaaagataatggatagtaaaaatttgtgaggaactaatagaaaagttgagaagaaaaaaccggttaactcaccatcatggattagtagtttcggtatctttagataaccgtttttgaattcaatgtcccaaagctggccggtttctttcctcatgaagttaacacctgcgcctcttagttctgtcacgcaatgtatcaattgttgttgcttttccaccatgctcatatcctcatatggagtcccttgattagttgtctcactagattggatgagacttcgatggaacacatccaaacagtgaacccgccattgtcacccaattcatcggatttttcctgcgagtctaacgatctttctgttttggtcagcacctcgctagttggcattagtgttttgaagaaccgaacagctacttctgccactatacccgtttggttcggtgtaccggtttgtagccctaataaccggtcgagaacgaacagaggaagttggttttccaacattatcatgtcacgttgaatcgaatgcatcaatcctcgcttagctaaaagcgggtcgtt

SEQ ID NO: 4410 - DNA, 2989 bp, Arabidopsis thaliana landsberg
taaaaggaagttttactagatactctctctttttgcaggttaagaactacaaatgcccaagtgaaaaggacatgaagcatatcaaccggaagctaaaatcttgtctaggacatagttcttcacatgacgagtacactaacaacctctcttctactaattcttttaaccactatatatatttcataagctttgcttctgcaattgactcccttctctatttatcttcatcaggagtaagaaacgggagaagagatcaaaacacaagtcccataggagctccaatgatacaccaaacggggcaccgccacccataggttgagtttctcgtactgccattagcaattcttcctttgcactttggtttagttttaatcttattgaatgagaaattcgtcttttatagtttcttccccgttgttgttcttactagtaattttgagcagattatgtataacaatgatattggccataagttttgtttattctgaagatgttaatgaatttataacaaaacttccatttattttaagttttggtgtacataacaatcgtcaaaaatggtttgtttgcgataatgatcaactttttacatgatcaaaagtttttccaaacattttgatactttctagttactaccacatctgttcttacacagaaacaaatggatatgactagtgtagcggtaactatcaaatcctaataataacaatgaaaatttgtattaaataaccaaaaaccatcgaaaataaaatttggattgtgaatgaaacttgtaaagatgcttgattggttgtgctaaatgtcttttacagccataatatatttgtaaagactaaattgttgccaattatgttatagtttttttctttaacttagagccccaaaaaaaaatctttttgttttgactgtaaatctttaattttctacatcctattttgtgtctcctctaactttttgtcacgattattttcaactaataatctaaaatgtagttatatgaataacagataaagtattttatacatttagacaaataatttataaatttatatagattccatttacctagatgtgcataattctatttgtgtttttattttaaaattgttattaaataatttatatatattccatttacctagatgtgcataattcaatttgtgtttttattttataattgctattaaataattttagtaattatgatatacaattttctcattttgaaaaaaggtaatttataaatataaaattcaaatatttcttaatcataatttttagttacaactaaaatatttattgccaaaatcctatatttttcaaatctataaaaccaagaggttaccgtcaaaattttacagctgcagcttatacacttattgccaatattatacataaaatattttaccttatgcaaatgcctatgcttttatgggtcatagacggacctggctactgtgtaactaatcacccacataatttatcagtcaaacataacaaattctttttgtgccaaaaagtcaaaaacgttagaaattggattttggaatttgatgcatgcaaatagcaacttgtcgtgccgcgctatataaacgctgcatcaagttttcgtaattaactaaaaccaaattagtattaatccgaaaacttgaaactttggcttcctcctcaaatctccgatcaacggaaacaaaatggctcacatggtgagagcgagctctggcctttcttacccggagagattctacgccgccgcatcgtacgtcggcctcgacggatctcaatcgtcggtcaaacaactcagctccaaattctccaacgatacctctttgcttctctacgcgttgcaccagcaggttcgtcaattcgatttcaattgaattccatagggatctgttgatttctcttctttcgcaatttgctacaatagatgttggtacgatctcgctccgtacattagacaatggaactgtgcttatacttgggatcattgctatgcgaaaactggtttattttgtcactgagagagaatttattcaatcatctttgtgataaagatgtttactaattttgaaatcttctgccttgacatgttaacaggctactctaggaccttgtagtattccaaaaccgagtgcgtggaatccagtagagcaaagcaaatggaaaaggttggtttcacttttgtgtcggtcaatactattctacatttggagaggcttttaagtatcatcatcaaatgtgtaagtagcttttttgagtacaagtatcaagatgtctcatgaattagggctacagcaacaagtatcgtagattttagacttgtatttccatcctaggggaatacatgaaataggagctaccttggttttagcatgcaagaaaattactggtaacatgtcagggaatgtcatcttagagaatgccattatggaaagacagatcgagatcgcagacctcataatggcattctctaagatgactttccctgagcaaagtcatctgtgtaagcttcctaagaaaagtacatgtttactagttggcaggggcttggaaccatgccctccattgaggcaatgcgtctatttgtgaaaatcttggaggtaatatcaacagaggagtttattctcatttctcttcatttgttaatcataggctaatttcttcctatattgctcacttttcaaaaggaagcagatcctggttggtatccaaggacatctaactctgttcttgaccctgctgtacatgtccaaatcaatgtgagtttttcatcgcctatacgtatgatcaaatttcagtttttgtatgtaagtattgctactaattaatataacaatgcctcatccgagaagtatcttacttttttacctgttgcagagcacaaaggctgagcctagttttgagagtggagcttcatttggtgagacaaagacgattacttctgaggatgggcgcttgacggaaacgcaagataaagatgtagttt

SEQ ID NO: 4411 - DNA, 1010 bp, Arabidopsis thaliana landsberg
agggatcatcatgtacatctttctcagctctgagagtgagaatgtaatggatgcattggaacgagaatattcagctcttaactatggggttcgagcaatggcagtcaatattcctggatttgcttatcatagagcactcaaggtctaaattaaaccacccttttttactaaattcaatattctttcttttggaagattttgaagatcattattatttattttgcaggctaggaaaacacttgtagctgcctttcagtccatagtgactgagcgcagaaatcaaaggaagcagaacattttatcaaataagaaagatatgttagacaatcttcttaatgttaaagatgaagatggaaaaactttggatgacgaagagattatcgatgttcttctgatgtatcttaatgctggtcatgaatcctctggccacaccattatgtgggctaccgtttttctacaagaacaccctgaggttctacaaagagcaaaggtaagtggagagaaaaaaacgatttcatttccttatcatcatcttatactttcttgtgttttgcatatgatggtacaataggctgaacaagaaatgatcctgaaaagtaggcctgaaggtcaaaaaggtctatctctaaaagaaacccggaaaatggagttcttatcgcaggttagattctggtcacctatgagtttagcgcaacagagattttgtatgcgatttgtttttggtgattttgaaagagctatttcttcactaggttgtcgatgagacacttcgagtcataacattctcactcactgcttttcgagaggcaaagactgacgtcgaaatgaatggttagtatacatgtaaacagtaaacacatgacttatatgaaatacaaaacaccttcttaagtgcacctaaatatttagcatgatttgataaatcttgcaggctatttgatcccaaaaggttggaaggttttgacatggtttagggatgtccacagcgaccctgaagtatttccagatcc

SEQ ID NO: 4412 - DNA, 761 bp, Arabidopsis thaliana landsberg
caagctctttgaagctacaagagcttctttaacaactgatgctcatataaaaccctaccaatagccatatgtccatcaaaagcttcttctctagacctagctccatcagctttacttctcaaaacacctaattccttcacaaacactccataatcatgactcgattcttcccaatagattctcttctcagagatctcagaagacggacctaactctctagaccatccagcatcagaaaacgcatcaacattgttattgttattattgttattatcagctttcaatttcccatctttctcctgtttcgacttcaatctcttcaccagaatctccaaatcatcaactaacttccacgtctcgtcaaaaacgattccgtgattcggcgaaacagcccaagcagctgttctctgtttcttctgcgcttcaacagctctctcatcagtaatcgaagaagacgaagccgcctcagaccctttaatcgtcgtctcatcagcgtttaactcaagccccaatgcgtcgaaatctctgtcaacatctccggcaccgtcgtcgtaagtacgtaggagaccgtcgtacgtcaaacctttgctcggatcgatgaattcagcgtaggttcgaaaaacttcatcgagaatggcgttgatctgttcgtcactgaatttaaccctagggttaacagctacgacaagagccgccatctcttcacggttagcccaccatcatgattcccgtcgaattgctggaaaattctcttaactttc

SEQ ID NO: 4413 - DNA, 695 bp, Arabidopsis thaliana landsberg
attctctcgtttatagccttgatggctccttgaaaagtgtcaggtttcaaggagctgagcagacgccgtagaatctcctctaaattaggtttccgaatagatttcgtcggtccaccactaccggaatacgatacaggaacatcattgtctctcatctcctttcgtacagcctccacatcgcatttcccaagccttgtaaccctctgaaaggctctaatttgaagggctgtggctaaatccggcctcaaagtcgtcttctcacccacagtcttgaacttggaaggttccacgacgatgaacggaccttctccaccattaccatttccattgtttttaccctttttcttctgcaaatgtttcaaatgagatattgcatcatgcaattcaacccggtttgtcagtttgagcgcttccttaagcgctcgtttagcttcttcggtctctccagcacctaacaaagaaaccgccttgttgagctgagcacgccaatggttaggccataccgttaaaactctagtgtacatctctgaagctctctgaaacctacctaaatccatgtaaagcccaccaagattatacagagcatcaacatggccaggtttcaagtctatagctctctgaaagacctcgatagctctctcatcttcacccattgaatgcaaagacgaagctaaatcacaatgagcatccgcgtt

SEQ ID NO: 4414 - DNA, 1611 bp, Arabidopsis thaliana landsberg
ttccaggagtgctccaggtcctcgccgttcggcgttgtgagccggtaggcgctgggggaagctcttgtcttgactataaaggggccctcccacttgggctccagcttgcacctggactccgtccgagctgtacggacgagtacgaggtccccttcgctgaactccctcgggatgactgcgtggtcgcgccatgctttggtctgggcttggtatttgtttagggcctgtagggcgaagacccggtctccgtcaatgagatctttggaagttggttcgtccacgtcggggacagctgacgggactgtccgtggggacccatgttttatttcttgcggagtcatggcctctgatccatatagaaggcggaaaggggtgaacccagtcgccctgcactcagtcgtgtttagcgcccagacctcttcaggtaacaaatcggcccacctgccctttttctcgtcgaggagcatcttcttgacagctgtgaaaattttgccattggcgcgttccacgactccgttggactgcgggtggtatactgaggcgaaggcaagcttggtgccaatggagaagcagaaatctttgaagtcttggctgtcaaactgcttgtcgttgtcaactgtgagttcagacggtactccgaagtggcaaacaatgttttgccagaagaatttctgtgcagtctttgatgttattgtggatacagccctcgcctcgatccatttagtaaaatactcgacagcgacgaaagtgaacttgaggttcccctgagccgtggcaggggccgacgatgtccaggccccagcgctggagaggccatgtgtgggcgatcagttttgtgaattgcgaagggctgcctgatcgaggagaaaacttctggcaggcttcgcaggaccttgtgacccgatttgcggcgcagatcattgcgggccagtagaaaccttggcagatcacctttgcggctagggcccttggcctgacgtgagagccgcaagtaccactgtggacttcacgcaggatttggacgccttcgatctcggtgacacatttaagcattggctgactgaccccttcttgtagagttggccctcaatcagtgcgaagtcctgacttcgatgtttgaggcgcttggcctcgttgatgtcggttggatgatagtacccctgtaggaacagagttattggtgctcgccagtcctcggtcatgattaggttgactatgcggtggccctcgctgtcattagttatttggagcccttcggggctccggacggctggcgtgccgatgatatgaaagaacacgtcggagggcaaggactcgcccttggcggcggccttggccaatgcgtcggcctcctcgttcttggccctatccacatgctgcaaggtgaatcccttgaattgtctctcgagacttcgatggccgcgaggtattgcataagtgcggggtcctttgctgcgtagtctttctcgacctggccggcaactatcttggagtctgttttgatgatacaggtggtgactccgagggcccttagcttgcggaggccgaggatgactgcttcatattctgctatattgtttgtgcaggggatcctctagagtcgacctgcac

SEQ ID NO: 4415 - DNA, 2108 bp, Arabidopsis thaliana landsberg
agacaggtggataaggtatttatgattgaaaggtgtatcatttttccttgagtattcatctccatcttttgttttgagtacattaatttatgaactgtctttttttttccagcaggaacaactaatgatcctgaaaagggaaagcagaaaatgaaaatggagatagacgaaggtacagacatacattttcttaatctattcatgttacttagttaaaggtgaatataaaatcatccaccttgttggcttgttcaactatatagataatgatgaagcaaatgaagaaaaggctacttcatcaagaatcaagactgaacaatgattcgagtgagaagctgaaactgaaagaactctttgaagttgttctttttcctgaggcgactcaggactcggtctcaaagctttctaactaaccacttcatcaagactgaacaatgattctgtcattcgaaggggccaattttggtaagtatttcatatactcgaggtccagatttcactcttggtatatatagtgactaaactggaccttaccacagctagtttggacttttgactaatcagactttaaacttaatgcaatgtagaaaaagtgatgtgacaatatgtttcaactttgctaccaaaatttgcagaaatagttgctaaaacgtctccacttacatacctaccaaaatttcagacatagcacaatgatgctatagagaaacagaaggtggtcatgataggaggctttttatgtgtgtttttcactcagaacttaattcaaaaacactctgactcagttatctttaccacaagaagttaaccttcctctgtttttacaatcttacacagtagagtttgtcatgatcttaaaacgcctcaatgtattggtgtttacgcaaaacataaagtcaaaatttgtatctttctttaattcttctgagattttatgcatatatttcattaaatctgtcttgaggaccaagtatggaacttaaaatggtttaacaagcatatttccttgttttattttgtattagaggctaatgaagaaactttacattattctggtgttactattagatataaacacaactcaataaagtttacatgctctgtaagattattatcatgcggccgtgttacagcctggttctgtctgcaatgcggctgatacgaccgtccaaccgccgtctaagttcgatcgcaagctccgactctgagttcatttcatacatgaacaataaggctaagtccatcaacaaagcactagacaattcaattccactttgcaacaattctgttcctctttgggagccagtactcgaggttcacaaagctatgaggtacacgcttctctcaggcggcaaacgagtaaggccaatgctctgtttggtcgcttgcgagctcgtaggtggccaagagtcaaccgcaatgcctgcagcctgtgcggttgagatgattcacgcagcgtcgctcatcctagacgaccttccttgtatggatgacgacagcctccgccgtggaatacccaccaaccataaagtttttggcgagaaaacatccatcttggcctctaatgcgctcatgtctttggccgtcaagcagacattggcatcgacctcattgggggtgacttcagagagggttcttcgggctgttcaggagatggcgagagctgttgggacagagggacttgtggcaggccaagcagcggatttggccggagaaaggatgagttttaagaacgaagacgacgaattgagatatcttgagttgatgcatgttcataaaaccgcggttttggttgaagctgcggctgttgtgggagctataatgggaggtgggtctgatgaagagattgagaggcttaagagctacgcgaggtgcgttggactgatgtttcaggtgatggatgatgtactcgatgagaccaagtcttccgaggagcttgggaaaactgccggtaaagatttgatcaccggaaagctgacgtatccgaaggtgatgggtgtggacaatgcgagagaatatgcaaagaggttgaacagagaagcgcaggaacatcttcaggggtttgattctgacaaggtggttcctttgttgtctctcgctgattatat

SEQ ID NO: 4416 - DNA, 551 bp, Arabidopsis thaliana landsberg
ctattttattacagaagttacacgaaatacatgtaggggaaagataaatctacagaaagcacagacaaaaacaaacagtaatagtggttaacgttaactaaaagcggaaacaagagaaaaaacaccgattccgagaagctaaactcagaaatttgcgtgatttccacaactcgaagataccaaagagttggagtcccatcgtagttgccacgagcaaactttagcagaagcccgtccacaaaacctcttaataaagcgcctacagcttctccgcaaactaacgcaaaaacgcaaagacaacagaggactaaaacacaaatccgacggttacaggggtaaccaaagaaactaccttcagtcaccattcttatcaaaacaataggaaccatttcccacggataaatgatgcctcgaagaccaacgcgccacctctattcttcccttaagactccactccgacatgacgcacaacatcactgttgtctaagttcaaaacaaacacaacaaaagacaccacatgctccaacttcgagcataaacgatgaagaatc

SEQ ID NO: 4417 - DNA, 5080 bp, Arabidopsis thaliana landsberg
ggaaagcaaggttgttgttgggttagtgagattgtacggtcgcggaagaatgcgtcgccgtagagagttaagttttgtagcggcggcgagaaacggtgagaaagtgtgggaaaatctagggaaaggaagagaattaggtggaagatgacgagagagtaatgatgatgattcatcttggttcccgttgtgtcatgtggtttgtgttattttcttgaactgtgatctttggttaagagaggcagagaaaattataaatcgggtattattaactccaagatggttttgtaatgaaatgtaaaggaagataattttataagcgcttggttatagagacaaaaatgagaatgaataaatctagaatgagagtgaagcaaatgattaaagatcgtcttacacaaatggagcaatgtaattgtgacaaaatcaaaactatggagacactaaacccaacagaaaagaagcaaatctacctctcagaatctggctagtaacaacctcttagaatccaagcttggttctggataaaacttgatgcttcttttgagaaacaagcaaaaactctccctctgttcatctgactataccaaaaaccgaactcaagaatcagcagcaacgttagcttcagactcttctttccttttcaaatattcattcaagattgtaagcctagcagtctcaaaggcaaaataaccgatcgcagagaaacaagcgctgtgaacaactcgaggtcccatgccgcgggtaaaaccaacccaaccttcctctgtcaatatctgcttcactgtcccagcaacaccagtatacatagcaccaccgagtttatccacagcctccacatgaatctgtgtcatcagcctagtcttcacaacatctaacggcgtagttatcgaagccgatatcgcaccagccaacgcaccgcaacaaacactctgcaaaggctcaagatggctctgcttcgttttctccaaaaccgcggctttcagatactcaaacgacgaataactgagtacaccagcgggtaaattcctcaacaatgtagccgaataaccggcgtaaagccccaagattccatctttctcaagtatcttaagtaaaacttgataagatctcccactagctccagcttgcattctctgtgtaatgagctctttaggaaccattatagctgaagagattatgtttcccatagcaccagcagtaggcgggattaaaaccgtcggaaaatcagggaacttagagagcagagacttaccaaactcacaagtaccgaaatacacggcggaggaaaacgtagagccaacaatcacggcggagacaccactatagaaacctaatatacctttagcttgaaaggttttcactatagcatcaaatgtgttactataaacctgagaagcgcctttggtttgaagcttggttttgattgcgtcaagtgggagaagagtaacgtatgtgaaagctccggcgagtccaccggctcctgcaccgatgatggcacgttcccagacggagagttgtttgatgagtgtttgaattcttggactgcttcgtgatgcgggtttgatccatttcaggaattcgggtccgggtttttcgtgggttggatccgagattgatgttgatgcaaatggtgggtcggatcttctgaaatttgctgaaaattttgggggtttttgagaggatttggttttgagtttagggtttctgacgatagggctttggacggaggtgagatcggagaaatgagtgaagagagaattgaactcgttgggaaaatggcagtgattaagatttggagatgggaggccaagagtttcggagagtctagcttccatggttgatttgggtggaagcttgaggaaggagaaccaaacataaagatgatgacagactgatacttaaaaaaaaagaacatggcgcagtgtagtaaggaaaatactaaacggcatgaagttgaagacggagaacaaaactcgttattcgcagtgtagtaagtaaaaagctaaacggcatgaagttgatgacagagaaccatgcaattgcaagccctgggtcttcggtttataatctcggtttgattcggttatggttaaccgaagtgaatataaaacttgccgtttagctttttacttttgaccgctcggttatttattgcctgggactttgaaccgcagtgttcggttcaggtcggggtagtcggttcttcgggtaattttgattaaggggaaaggttaccgaatataccaaaccaataatttggttcggttcggttcagagatcgatcgtagaggaaatgatgatactcagagaaacagaagctgaccgcagtgtagtaaagaaaaaaaaactaaacggcatgaagttggctaaccattttcatattaaaatagttatcatcagatttaaatcaattagtttaaacaatcatgaaattcatgacaaactatttgcaaataaggcgagagattcgctatatacagtgcaatgccggagaatgaagctctacattcatcaaaataaggctaactgcttcctatgctttttgctttcgtcgttgttttcggttcatgtctagaattgtgattgagatataggtgatgttgccacacttgatctatcggtaccgcgaatgttgtacttctcgtatactctttcgcgattctctgaccaccatgtttctgcttgttgctccctgaatcgtcgccggctacaaaaacaaccaaacgtttgtattagtttacatgtctagaatgtaaaaggataagaagtagatagattcgacaacgttacctaaagcgcacacgtttgagatctctagttccatcgcctagagccaaaagtgttatataaacaccaggttcatattgttcaatccactctgcctccacttgagaagcatttgaagctgatgctgctgagcttcttgagtttcgtccatcttctgagaaaccattactgattcggaccccctcacttagaagttcgcccatgcttgcatctgtgtttcttggcgactgcgaattccgccaaagtccgttcattgaacgagcgggcatagccaaaggagaagcaagtgaggtgtcgcttattgaatcagatcttgattgacgttgtccatttgcattcgtaaagtgaaatccgttttgctcaaacccgttcaataaattcgctgtccgtgtggtctcagcttcgtaagcacccggtggtagcagcgcagctatatccttgacctggaaagaccaaatagaaatatttagggaagaaataagaaaacttaagagggaatcatatttcaagaatggatagatcacaccgagacttgtctctgtcgaatacaacagggtgcttaggagagatatataagagaatcaagtctaaacctgtgctgttagagattttataacttcttttgcggcttctgatttggtagattcctctgctgccaggctcattgcttcttgtacttttttcacagatttctggacttcgaattcttggacctcgcatcggtgcctcagactctcggcctgaacacaatatcacagattcattttagaaaacaaaccacgagaatgtgtggaaacaaattcagatgaatgaattgaggaaacgttagagtaaccgccgagtttacctgggcgcgcaatctgactacttcctgattcagaagctcatttgtcttcttcaaactctcagctatacttgttgaaaaaccaagaccaacgtttaaaggaatgggagtgactgaacgaggaggactagatctccttgagaaaggtgacacaggtctggagctagacggagttactgctggttttggtggcccacggcgtaagtcagccacattagtcaaagcatctttaagttgtgttaaaggtgtttgggaagtacggacaagagagaatgtgtctgccttctttccttgtctagctgccctgttatccaactgcttgatcaaatctatatttgacggtattcctgatttagccaatcttatctcagttttatccaatctgtccttgttctcaccggaaagtcgtggcataacattcttcctgctatcaatattagcttctgacactttacttagtttagagtgacatgaatcgcagacacggtaaggcttgcctggattaggggccaaagcagctttcagtgatttctttgaactgcatgaatggcagtggacaagtccacagttgtaacaattgtgtctttttcgtgtgaatccgaaagcctgtctacaagctgaacattgagattgctccgtaccagaaacccatttatgaagacatattgctgctgtgaagtttgaaccgcatgcaatattttttacatgtctctctttcaaagcatcaacaagagttggtgccttacggtcctcaacatctccatgacctaatctcccattggcacccttgccccatgtaaacacttcatttcgagatgttaaaactgctacatgataagctccacatgctatttcttcaacacaatcctttgttagtttatcctctactaagcaaggaagtttcccatcagcattgggattccctagttgaccatatactgtactacccattgtgtaaacttttcccgatgttgtcaaaccaactgttaaactatgtccacatgcaactctgtgaaaagtatggtcaattagagctgatacacatgttggtttaagccgaggctctttatctccatgaccaagacggctcttgtcaccatcaccccatgtgagcagctttcctgatgaaacacttgaacttgagtgagtgacaatgacttctactattgcagcagcatgccatacaccgcatgcaacagcaatggtcctcaaaccagataaagattcaacttctctcgggtaaaatacagtttccttgtcaccatgccctaaaacaccaaaacgtcccattctccaaaagtaaaaagctgtccagttgacgttatcaaagcggtgtgccatggtccccaggatacggaagcaatttgaccacccccaaggggacctgatattctcttaggtatccaaaaactttcatcggtaacatggacgagaagtcctgcattgtgt

SEQ ID NO: 4418 - DNA, 1197 bp, Arabidopsis thaliana landsberg
agtagtgtgtttttagagcctacagatgtcaaaatcagtgatagaaaagaacagctatttgtttcacagacatgtgagacataaagcttgctctaggatcaatcacgtcctacgagcaagtacaaacatttgtaaatcaataagagtacaaaaggttatatcagagctttcgtagaacagccatttcccccaaaatcttacaacaggaaatttcgttgtaagaaatgttgacttcttgagtgtagaagtgtcaaacttgggaacgtgaccaataaaaaattgacgtttcgctacaagactaaaaatcatgggccttgggccgaaacatgaaacctaaaaagactgttatcacataaaaagcccaataaagaagactttactagggtttcatcgttttaacttcttaaaaaggttagtcgcctcttcttcgtattttttgcctcgctgagcagctgcgaatctcacgacttcaagatggttagtctcgctctctcgcaaatttttaatctttgttacaatcgtttgttagtttcgcctgtttggattgattaaagagtttgatttgttgttagttagatatcgaaacgaaattagtgattttgatttgtgttggaaaaatgaaatgtaacagccgtcgcacaagtcgtttatgattaagaagaagttgggaaagaagatgagacagaacaggcctattcctcactggattcgtcttcgtaccgacaacaccatcaggttcgactattcttgtttttttttgtctattgtttattccctgatctatcaaattgaagatatatttagttgtgttagttgatcgatttagttctaaaactgatttcattgtgtggttaatttcaggtacaatgccaagcgcaggcactggcgtagaaccaagctcggattctaagtgataagccttctaaaagagtcttctttatctgtttggtttagcatttcctcaagtcttctttttgttttaagttatgacattttcatatttctgtaagacttttactctattatgattcatgttaccaaattttcttcgtattgggagttgtttcttaacatttgtgtgatttgactattgaagtatctcttggattgcttccatgtagagttgcttcttaagaattttttctcgcaacctagaatctggattgggtttaaatttaatcatctacttgcgaacta

SEQ ID NO: 4419 - DNA, 772 bp, Arabidopsis thaliana landsberg
gggccctctaaatcgagaaatgaaaatctgggtctctgctggggaataagggtggcttttaccagctgatgctgaatggtggaggtgtacccagactcttgacttgaaaagttcaaccgagccacgagctgaagaggcattttttaaccaagtcatagcattatctgaagcaggcttgcttttacttgcaaatgcaaaaaggaacgccttatatgctgtgcatttggactatggttcttctccagttggtacgcggatggattacctatcagagtttacagtcactatgcccatattgagtttcattgggacaaatgatcctccagaagaacccattgttaaggtttattgtgttcagactctagcaatccagcagtatacattagacttgtgcttatgcttgccaccacctatagaaaatatgggtttggagaagtcaaattctagtgtatcacgagaggcaaatcttgttgaaggcatgtcagaaccatctggacttaaacctactgacttaccttcagttgattcagtgccaaaaccttcgattatagtgaatagatcagaaagtgctaataagttgagttttccatcagcggaagccacatcacaagcaattgttccacccaacggtgaacctaaaacttctggcctgccatctcaaaccagtggtgcaggttctgcgtatgctactttaccccaacttcctctcagtcccagactatcaagtaaactttctggctatcacactcctgtagaggcgattaaaccagta

SEQ ID NO: 4420 - DNA, 470 bp, Arabidopsis thaliana landsberg
ctgattactctgttgataggcaaatggatgctgttggagaaagaaatttggacgtgtcatccgtagaagaaatctcaagaagcaaggactcaaatgttacgcctgatgatgatgtgtctgggatgcgaagcccatcagcttttttcaaacaccccactcatcttgtaactccttcagagatattgatgggcgtttcttccgctgaagcctccattactactgaagacaggagagatagggatgcaaatattcaggacgtgaataatgatccaagagacaccgaagtagaggtgaaagaaataagtgaagcaaggtcaacacagaatggtgaaatcaatgatcatgacgaaactgagaattgcacttcagaaaatagagaaaaagtcttctgctcacaggtttcaaatctcagcactgagatggcaagagactgttatcctagtactgagggaacttcattcaggggaatc

SEQ ID NO: 4421 - DNA, 557 bp, Arabidopsis thaliana landsberg
  unsure (1)..(557): unsure at all n locations
atgacgaaattgagaattgcactccagaaaatagagaaaaagtcttctgctcacaggtttcaaatcttatctttgtgatggcaagagactgttatcctagtactgagggaacnnnnnnnnnnnnnnnnnnnnnnnnnnnnnnnnnnnnnnnnnnnnnnnnnnnnnnnnnnnnnnnnnnnnnnnnnnnnnnnnnnnnnaagcttccagagtcgggttcatcaagtggccttccacagttgccaggtacaactagcaaaggaaagaagcagaaggccaaaacttcacagggtcccggtttgtcatctacatcctcaaatgttgctaatctggctgactccttcaatgagcaaagtcagagtttaagtcatcccatgacagatttacttcctcagttgttagcaatgcaagaaacgatgaatcaggtgacatatttggtctagaagaaactaattagaaccctatttcttaacaaaatctgttattatactcttgcatcatttcactgacacactactaaactngttgttaccttgattntgcacataggagttccaatc

SEQ ID NO: 4422 - DNA, 564 bp, Arabidopsis thaliana landsberg
gacattattttgacctaattgatactgacataccgctaccgtaatcaagaatataaactaaaataactatatgtcacgtttttaatttgattataataacctcttatatgtctttggtaacccggttcgtatttgtaaggaagctgcttatttatttgttgtatttttttttttgtctttttgcacggaataaataaaagtaatgagaagtactggagaaaagttttaatcaagatagttttgttttaaatataaaaagacaggaaggagagttgacgaaaacaaatgacgaaacaaaaaataggtgagttgtcgcgtcaatgatagaaacatttaggttttgacagcgacccaaattccatgatacatgtgttgtacttgtatactaaaaacttttacattagctatctgctattatatcttacactgctatttacagttgtatttatcaaggagcgctctactaaaataccacttatgaagttgttattcctaaggatatatcataattataaaaaatcctagatatagacaaagtttttgaaatgtttttaaagaaatgaa

SEQ ID NO: 4423 - DNA, 3391 bp, Arabidopsis thaliana landsberg
accactagtatgaagaataactccagaaagaaatgcacaaagcgcaaatgatttataggcttacatcttagatacagatttatggcatggcttaagaatccacttcctggaactccattaagcaaagacgtaattggaataaaagacatggagataacatcaggctccatctgaactgtttgcagccattcattatgcattagatttctgttatcgtttccacctcgcctcttgcacatgaagacatagtcctacaaaaaacatgtaactcctgagaaaagaagctaacacacagattacatgtctttatgataagctatggtaccaatagaaattacctccttatttgcataagagcccaaagaactggtatctgcaaatctcaggcgaaaatcctttgtaaccacctgaaaccaggaataaaagacaggaattacagacttgagagtcgaaacactagattgttagtagaaattcttctatatgtcaaatagccaaaacatttatgacatgcacaaacaagaaagttttgatgatgggaaacaaaaataataataactatttcacagaccttactacttgcttgtactctttctgaacccgtattatgcactacgctagcttccacgaacctcttatctgccacctcttttaaccttttctgcagatcctcaggctgaagttttgaggagtgttgttgttttgcataaatcacatcttttcctcccatcttaacactaacaattatatgcgtcccataaatatctataaacctggtaaagaaacatttgactaagtgttagtcataaaccctccaattactgaagaaatattactaatgaaacaacgcctacaacaagtaagacgtaattcttaagtcatacaaaaacaatttcatccagtgaaaagacattgggccaaggaaacgaccatcgaacaatttcacagaaaaatatgcagatgtaagtaactttccatagactttacatacatacaatcctattatgaagacagaacatcaccttgccaatgcagcagggtcccatgttgatggaacagcctgcttaacatgctcacggagtaacacttgagatttgtccaaagccaccgagtataatgagatgaaaaccccatcaaaagcaaggtttttggtgtaggctgcgtctttctgccaacagctcgagaattcaaacatggcattgaagagacctgacgggattttaccagccaaagatagttcctggttgaactgctctgccatctagcaaaccataagaaaaatgttaacaaaatgttaataactaaggcatccaaaatgctatgaaggaaatttactctctagaacaatgtacaaggaaactagataaaggcttcaacagatggcgatcttatccactcaaaacctacaacaacacaaaccaatacttttcaacgaaaagttacctgttggaaaggaagaatatcggacctaaaccgcatacgctcccctttatcgcatttgatagacttggaaacattaggaatggagattccaccaggtaaaacaatctcacaattatcatcaccttctttaatgtcaagtaatctagaatctttggaacctcctttgcaatacttcaaccgtaaatcaatagcaagatcataaccacagccaatagatccaatcgcaacttcagctgctttagaagctggtagccgaagagccatgcttcagtacaagacttctctgttggccagaccaaaatcaaagaaagagaattagagcccagaatcaacaacacacaaaaacaatcaaaagtcaccactttagatatttctgagaattgctgacacaaagtgtgaatctgaccaataagatctcaatcgaaatcatagtttctaaatatagaccaaaaactgaagctagatgacctaggaatcttgaacagaagaccaagtccaaaatgtcaccatataaaatcaattcaataaaagcgcaaaagtcaaatagaaagactgcaaaataacccttaaagactttgaaagaagaatatgaaagtaataaaggaatattgtaaatagacgaagttggagcttaaagtacgttttcaagcatatgtcttcaccaaccgagctcaaaaaccgcgatctaaacgaatcctaaatcgaagaactatgattgcagatccatggagctcaatcatagcagcaaagaggatgaagaagaaggaagaagaaaaccctcaatggtaaattagttttgttaatcaaaagtgattaagagagtaagtaataataatgtaagaaggtagatggtaacaggtgaagcgagttaaaaagactcgaggaagaaaagtcaactattggtcaaagaattgggaattgtgtgtgggcccattgatcttcttccccactttactcttcctccgttgttatttgtttatcattttgacagcctgttgttacttttttattttattacattttattgttgttacattattacatatgcttcgctgggatttaatttatgtttttttcttctgtctgaagggattttagtagaaaacaaagaacccataacaacgacaaaaaatatttttcttgctcgaaacaaaacttcgagcatttcaaagagagatctcttcactaacacgatgtgacaattttaactattggccagaatttagaaaagataaataagcaatcaacgcattttgataaacattccaaaatcatataagatttggtagataaagcatacgtcgttgtgcattggatactaaaattgcgttggatagtctcagattgattgagtcgctataattggataccaaaaaaagtacaaagttaatgaccaaaagcattttaaggtttgagtcactataattgcggaggattgcttcaaaagcccccactttgtagattttgtgtgtatccgcaagtaccgagtaagagaaggcttgcatattattatgtattaaacatcatcctctgtaaccacactgcttgcttctaacgacaaataaatgttggccacaagcatcgcttaaatgcatttgtgttctcaaatgcaacctacaaaatcatttgtctctcccatcgcatgccatgtatgaattccaaagccttcctagtttgctttctcattggctgtctgagaagtcagcatcgatcacatcatcaccatcttctcctttacttgaagatgaatctcctgatgaagcaccttcgcctcccggggaaggacctgcacctggacctccagctccaggctggttgtatagagactgaccaatctgcatcacttcttggttaagagcagccatggcgtctttgatttcttgggttgatccacttcctatcttgtctttcagctcttgtagcttagcctccaccttctctttcactt

SEQ ID NO: 4424 - DNA, 2660 bp, Arabidopsis thaliana landsberg
gttggggcgtttggagggggagccgttccagcaattgatcatcatagttctcaggatttgagggcattcatacggatttttcggcctcaggccacaagccgctatcccaactgccgcctgcacgggcgagcaagatgcataagccgcctctcccgtcaccatctcccacagtaccatcccaaaactataagcattgctcatccaagtctctgtcgtattttccgggtcaccagctatgatctgctttcaagcatttcatacaaaaataggtttaattacgtaaattaaattctagtaacttcgtgttcagatccaagaattgaactaaaggctggccatgtagaaccaaatacaattatataagtgtgctctagtaggaatgattggaccatttgcaagcacatggcttgacaaagctaggaggcgtaacatacggttcaaaacatttggaattactaatgtataaccaaaaaaagataagtatagctcaactaaagaagtgatgaaattggagttgttagctagtctaaggtgcttttgtgacgattagacagaacctaattagatccacacttgtctacgatatatgtatccaaaagtgaggatccaataactgcccagacaaacaaaaaatggtaaatcagatatggccaaaacaaaaagcaaaggaacttatttggttcaaaaggaaaaaaaatcaaaacaagatgctgtgggtcatatggggacaatagagatgaagcacatagggcatccgatttgtttctatgagaattatgatatgggccagagaaatttcttagcaagctttcaggtacctagttttctgtatcatttggcttagaggtaacaaaggatcagaatatggcaaacatgattatgtttcacaatctaacttttcaagtaaactgttgaacaaagacaagagtaaaagaatactgacctcaggtgcaagccatcgataaccatcagtttcatattccacggcctcaccaaagctcttacaagcggtgactatcccaatatttcccaaacatgcattgccatgcttatctagtaatattctttgtgtgttaaggtcccgataagcaacaccatggtcattcacgaacttcagcccttcggctatgtctattgcaattcgcagtatctgcttggtttgaagcttcttattcttcaacatcagttcatggagtgacccaccttccatcagttttgtaacaacgcataatccatggttctcatcgatgcaaacaccgtaaaattgcagaatgctcttgtgtccacaagccatcagctccaagtaatcttttcggagctcaaactcataggaattccccttatcacaaccttttagtttcttgattcccacttttttacctcggaaaatttctttgagagaagttggtccaatctgatcaccgaactcaaaactatcagaattcaatagccattttccaatctcattgccacccgattggatggtctgccattcatctactgatacagcaaatgaagaactcggaagtggaacctgaatctggatcgtactattcaagttttctatccctagcctactactatgctgaatggactcttcttcaacacctccaagttcccctacaccaccgttctgttcttgacagccacaaagcccgaaagggagcttaacagatgtcggttttggctttttggttgcaaccttgagggtgttttctacccgggttttaaacaaactatgttgcccagattgatccagaagaagaacaaccccgagagtcaaccccttcttctcaaagatttgtatcttcttgcaacaaatcgaagcactatcaagaacgcctgacatagttgaccatgatagaaaagagttacaggcgaatgtgagtctgagcacggaacctcgaggttcctcagtagacacttcttgaatcataaacacaggattgtcatctccagcagcttgttctatcaacttgacgtgtagaaatacttctttcatatcgaaatcagcctgactataactgttgaaacaacaaacaccaagcacaaaaccaattaacctaagattgctccatgatttgctaactcacacacacacactatatgtaactgtccataattagaaactcaggtttacctgaatggcaaggaatcgtaatgcttcttgagatttgatatgagcttctccggtaattgactcccaggatacatcttagcaaggttcttcactacagtagcccaaacgagctttttacctcctacggtagctgcattttggttgtctcgactcgaatggaggttgagagagttcttgagagacgcgatcgcgtcggagacgttgcggccgagacgctgaaaccgcttttgcatagcggaagaggtttgatcggaaggtggaggagcagtgagggactcagacctgtcttcggaggacattaggacttggtcaacaaaatcgtcgtcggcgcaaccaccggcggcattacgtgttgtccagcattcgagtgcggaggccatggcggcgaaggtaacgatgtttgtgtctcttctacttgtgctcagtccgatttaactgaacgaaactacaagcattattatatgtttggtaatataagtgtattttcctcttgggacatacaagcgccagtggtctagtg

SEQ ID NO: 4425 - DNA, 2968 bp, Arabidopsis thaliana landsberg
ttcttctccatatccgtgaatcccgagaggtaatatacaatgtttgggtgtgaaagagatagcaatggatgtttctgaggaagcaaagcatcaatatccccaaagaaatgcctaagcgcaaagctctcgcctaaccaggtaatctccttgtactgacttccattccctaatctttttttcacttggtaatcttttgtgttatccagaagagaagaaggaaatagcttggggctctcatttccatctcccaaatgcttcaaaaggaaatcagccatcttccgttcatgtttgctcgaaccggactgctttttctcctgaagctccttgatcagaatccaacggtcctctgtccaagcactctcgaaccggttgcagaaatcctcggtcaccaaatactctctcccaaacttccaggtaaacatctgagagtcattccattgcttcatatacttgttagaatgcaccaacctcttcttgctcatctcttcttcatcccaccctgaaacctcactcgctgtctcaatagcctcgacgatgatcggtagacaagagagcaagttatgtatgtgaagctctgtgcaatctctattgctatgcaacacaatagccttagcccaaaacccaagtttaggctctaaagacattctaacataagcctctccttctctaaccacccatagaagctccgttaagggctgttctagtatcttccatttagtgttcttctctttgaagcgtagattggatcgcatcgacacagaaattgactcgtaggctgcggtgaagaggtcgagtaatagagagcattgacgctggttgatttgaatgctgtccttgaacaccattaacgctcttatgcttcctaatacctctcctatctctcgaaattgatccatttcacacctcttcaattgtacacaaggccttcggaatttgtattataaattattgtactcataagaaatcgtatcacaggaatggatttgtgaaagaaattctctacttgagatgtacggacacatcatacggataataagttatatttggcaattgtagcctttgtttgttttatttactgaagtttgttttttataacaaacgcgcatgatagcgttctcatctccgagacaaatcacaaacgacgcaacgtccaaagtagcattaatatcgtacatgaaacaaatgctgttgcgtttaacgctactggtttcgataccgcttctcccacctacaaagatcatataatatggtcttgttaaagtagctgaattaacaacttttgttatttgattaatttgataattctgctatcttttggaaatttctgtgagcactagacattgaagtacagtttggaactttatccttgaagaaaaaggcaaaaacgaattgtatattttaaatgccaaagacacataacacaaaaccatctaacaatgatcacacgcatgtatgtgtaacatataggagtatataatgtgtggatgaaaactagaacaatggctgcattaatatctgatcccaagttaaataaaaaaggtacaaattcctcgtgtacgtagctcttagctctatatggttttggtttgtctttgaacctttgaggctcatcatgaccgcaatttgatcctgcaatcaaatcaaatggcttcgttaatattttgctaattacacgacggttacgctttatataaatacctttttgtaatatgatttatttagtttactatcgaccaaatcatctaatttcgaccaggtagtttctacgtaccatttgagcattttgatggtgcattgggccatttttgagtcaagcgtctgtaatataacgcctccgcatctgagactaacgcccacagtaacaatcttacgactgcccacagccaatcctaccttcgtcttagctgtcactgtcaccaacagcttcttactcttcagctctacctgtagcctctttgccgtcggatcatccacctgtcgtttcctcaccgtcgtcgggacaatcacagccgtccgattccctggcttctcaataaagcctttgactttcgttgactctaggttggtctcaaagtctttctctccgagaatcacagccacgtcagtatctccgtaataaaacgttagctttccgttagggtttctaaaatcgagcaccgacgttgtatccgccgacaaaaaagaccatccgtcgtcggattttccgtcggaaaagttgaagttgctgattttgaacgaggctaggcggacgacgggtagtttcgggctgtaccaaaggaagaaaacagcgacggcgatgaggatgaggaggagaatcacggcgaataagatacaaacgcagcagcagaaaacgcggcagaaactacaccgccttttcttatcggccggatggataggcctcggacggcgacgtggaagcgttgccgtcccagaaggcggagctgatggttgattctgttgatcacggaaaccaggtggtttttggagtgccggttgtaacggtttctcggccgccatttcttcatcgccggcgatggttggccgcttttgatccatgtttagccctaactaaaacactttagggttttcagaattagaactttttgagaagtttccaaaaatgacagatttatatgtgtggggttttagattctttcaccaaaatataacttgattcttctacgtaacagcaacaaagacagaatcgatatgattcattcgaaactgggcccacgtcgttactacaacatgcgtgccgtttggatttatggaatgcaaactgctcagcgttttacatccccgtttgctttcttgtgctgtacgtaagtgtctttgtgatgacaatatatggatcgggacttagtttaagatagtgaccaccatgtatatatgaaagtatacagctcgtatgtttgacctctactttttttttatctaacgatatctatctaaatgaaaaagatcatct

SEQ ID NO: 4426 - DNA, 3830 bp, Arabidopsis thaliana landsberg
  unsure (1)..(3830): unsure at all n locations
actcgatatcacactttcgaatttccaatagcacagaacttgagcaaatttagattattaagagatcctccttcacgttgtgacccatcttctctagatttggctgcaacgcaaactgaatcataggcggtggtccgcatgcgagtgctagcgattcgccttccaaaccttcagggatatgttccctaagcacagcttcagttataaacccggtactgtaactccaaccttcctttgcgatttcaacgacgtaccaaatctttagcctctccttatgcttactagcccatccttctagctcttccctcacaagaatgtcatcctcggttctgtttgcgtaaaccacatacatctcggtttcgtcctctggatcactcaatatagattgaatgatctggtagataggagtgatgcctgttcctccggcgagcattgctagtttcttggcaaacttaggtttgccgctgaccaggaagttgcctttgcctttgtactcgatgtgccctagtggacctttgatatctatcattgacccgattggtaacgagtctaagtgttgagacatgagtccaccattgggaaaccttggatgaacgtctttgaagtaaactttgacgacgaggtcgatatgaccaaccgcgtcgatggcgctggtgggagtataagctctgagacagagtttgtcgtttatgttggcgcaaacgaaaacgtgcttccccacgggtaaaccaagctgttgatcttctgatggtaatgcgaatcggaacttacgaacgtcgtgcgagatcgaagtcttctcaatgagcctaaccgggattttctcacgtgggttgaccaaagcaatgttcttttgaggagttagctctttgattggagctaacaaaggaccaaagtttgaggcaccatgaactgagacgttaggggaagagtcgtagccagtggtgatgagttcaccgatacggtaatcttccaaaagcttcttggctttgtcagagtgaatggcttcaaactcttcggnnnnnnnnnnnnnnnnnnnnnnnnnnnnnnnnnctgtgcctcctggatgatctttcaagaaacgtgtacagtcatagatgtgaccgtggacgatgatccatgcagagtcagcagtgttgtgttttctaacttcagagattgaatacatcttcgaggcagtgttcatgaaaggagatgagacagatttcttcaaggtattgttggattctgaggaaatctcaagctgacgctcctttgccatccacccacccgactggtttccgggtctggtcgggtgttcgaaaactatccctatctctcctctatgaggcttgcacacgttggtcctaatcctgaaccagcaattgttcatcatcccctgtttacacaaagtaaacgtcgttattgctttagtcaacatcgttaaaaaaataacaattagctggagaccctagacttagacttatgtaaattttatataatttcgattttaatctacataattgccccgcatgaagggagattataatacttaaacgcactactaaaatgaactgtacaacagagacacttaaagaattggtctttagttccatgttgattagtgctctattaaaagattccgtaagattagtattggtaggtatcacgttcaaaagaaaatatcatcagtagttccaactttgtaggacgaatacaaatatcaaaatcgaatagtttactcaaaaacaagattaaactatttaaatcatatagtaaagaataaagtaaactaattaattctataatttaaaaatatcaagagagaggattattaccatgaggttccagatgagtttatcaggctgagtattgaaagactcgtcccaggctcgaaccgcgacgtctttagcactgagcagatcaagaacctcaacgtcaagtgaccagaaacaccagcaccagaatttaccgtacttgttcggtttctcctggtggtcaagctcacaaacactccacgtgtctcctccgtctagagtcacctcaaccctcgttaccttcttacctcctcctgtttatttcatcaatacaccgatcaggattttaattacatagtaaagaatccttttaacttttaactaaagcaaagttaaaataaattaccagaataagcgtagccttttaatgtgtacggcttctgagtagtgaatgcattaatcggtaaaatctctgcgtgaccaggtgttgtaatcaccgagtttatattaagctcgttgattatgtattcaggcttataccaccaagctgtaacaaaaacaagtaaataatattagcatcggtaactaaaatgtaaaagaagacaagggtaagttaatagtttaccttcggaatttgccagctcagcatcaacgagagaaggaaggactcgattgtctttatagtgatagtaactgtcagattcttgaggcgtgacgatgattctctttaaccatttaaccatccgaccaccgatgaaacccggtacaatgacccgaaccggaaacccatgatccggcgttaaaagctcgccgttttgcatataagctaagataatatctctagccggatccatcgccatctccttcttaatacttgttccgtatttagatccgccgccgccgggaagatcctccgctccttcgaagcaaacgtttaacgcgcctcctctccggctatagatcccgcatcgacggaggatttcgcttaacggaatacctttccatagagaagtagatactccggcggatccccaattgaatccgatcgtttgtttcaccatgttctgttccttgcggcgattaccggcgcagacgagtgtcaccgggaattcgcggctggggaactcggagattagctcttccatggtgaatttagccggacgtttaacgagtccggtaatttcgattgaccagtctgaccaattcgctttgggaactgcaccgtggttgcggacgtaatggagtggaactggagtgatgaatccatggtgcataagacgaggaagaggtgcttcggcgttgaatggatgttttccggtgagacggagcatggatgagttacgttgaatccaactatcagccgttgattcatctctcggatctaaaatcgacggttctaaatcgctgtttgattttttaaccagctctttgtagtaagggacgttacggttatggctctcgtcttcgtcgtcgcttgaggagtcgtcgtaactgtctacgacggtggtgatgacttcggtttctttgacgattttagtttcggtgaggatgacgtcgagagtttggttttggtgacggtggcggtcgaatgagcgaggagaaggaacgagaggaggtttgaaggcgtgagagacgccgttcatggtgggataatggcggttatcgacggaggtcgccatggtttagtgattgaaccggtgataagagagagataagctatttttttggttttggtttggtttgtgaaattttttggtttctgaatgagtaaatgagaggttgtatttatagggggcgttacagagatgagtaaataaaataattaataaattaagagagaggagaaattgacaaatgtgagtttgtgtggtcgctgagtagagggacccacctacctagatcctaaggtttggcctttaaggcgggagatttttatttcataggatatatatatttgcttttaaatactaatgcgatatgaagttaaaaataaaatgcgggtctaaggattcgatccgtgggcaatatcgtgggagggtactatgattatgatacctctctcactcaacacttaactttaatacaaagaaagaaaaa

SEQ ID NO: 4427 - DNA, 2538 bp, Arabidopsis thaliana landsberg
  unsure (1)..(2538): unsure at all n locations
ccgccgctaccttgatcagtttcatcgttttcatcgccggggttagattctacttgcatgacaaacccttgggaagtcctggtacgagcctgatccgtgttttagttgctgctacaatgaaaagaaaggcagtgatttcatcaaaagacgaagactatcatcaatatggtctcgggaaagaggccaagacttatactacaatgccctccaagagctttaggttannnnnnnnnnnnnnnnnnnnnnntgaaagtttaaccagaactaaaaagagctttacattttcaggttcttgaaccgtgcagcattaaagaacaaagaagatttaaacacgagtggtgactcaagtaataacatgtggaggctatgctctgttcaggaagtagaagacttcaaagccattctccgacttgtacctctctgggcagccgtcatgttcctcagcactcccgtggcagtacaaatgagcatgacggttctccaagctttggtcatggaccgcaaacttagcccgcacttcgaagtctctgccgggtctctacaagtcatagtactcgtctttggttgtgtctttatcatgctcaacaactggatcatctatcccatgtaccaaaagctaatcggcaaaccactgacaccacttcaacaagttgggatcggtcacgttttcaccatcctaagcatggcgatatcagctgttgtggaagcaaagagactgaaaacagttgaaaatggaggccatcccatgtcagtgctatggctagttcctgctcttgtgatggttggaataggcgaggcgtttcattttcccgcgaatgttgcagtattctatggagaattccctgagtctctgaagaacaccgcaacttcattgacctcagtggtgattggaatctctttctatctgagcacagctgttatcgacgtgatccaaagaaccacctcgtggttaccaaatgacataaaccatggaagagttgacaatgtttactgggttgtagtcataggaggagtcttgaatctcggctatttccttgtctgctcttggttttacaaatacagaaacctcaaggatgatgatcatgaacaagatcctaaagatgttaaaacctaggacacaacatgttgttttcctagttttctttgcattgtagtagtcttgataatcaacctaagacacaacatgttcttgtaaaaattacaatgaaaataatgaaggaaccagtttcatgacttccacagatctttcggtttgtgaaacttcaccaaatacaaattcagtgtcaagattatattgtacattatgtgaaattgacaacatgattcttaaaacgtatttttatgtttaataataactagtggatgaaactgttgaagaataatgcatgtgatgacaatcgatgatctggtaaactctttttaatattcactagctgtcagaaactaattttcatggataaagaaagactaatgacacattattcctcattatttacattaaaatcatttctcagcttacacagagttactctgttctctatcatggctggtttagtattatctaatgacacagaagcaaagatctccggtgattgcaaacgcggtggctgcatcacttttccgttcatgataggttagttttgtgtttaggatttttatttttattttagatgcaacatagggtcatcacaaagtgtttttgggttctatttggtgcagctacattgttaggtatttcagtgacttcttatggatgggtactgaacttgattgtcttcttgatcgaggaatataacatcaagagtatagctgctgctcagatttcaaacattgtcaatggatgtctcagcatgttgcctgttgttactgccattctcgctgattctttctttggaaacatttccgtaatctcagcttctgctttcatttctctgcttgtaagtccaagactctttctgttgcatcaattctcttttgtggtctgataagctcaccagtatatgaaaacgtttgtttaggggatcgttctcttgactcttattgcatctttggactacttaagacctcgaccgtgtgaaacggggtcaatcctatgcacaccgccgtcaaaactccagctcgggatcttgtacacagccttagctttagtgaccactggagcaggtgggacacggttcaccatggcatccgcgggtgcaaaccaatatgagaaacctaaagaacaaggaagcttcttcaactggtacttcctcacactatacgctggagctattactggtgcaacagcaattgtatatatacaagacaatgctagctggaaacttgggtttggtctctgcgcggcccctaatttgatcagtttcatagtttttgtctctgggaagagatactacaagcatgacaaaccaatgggaagtcccttcacgagtctaatccgcgttgtagtcgctgctacaagaaaaggaaggctgntacttcatgcaacgaagaagactatcatcactatggtctcgaaaaggaggtcaagacttctgcttg

SEQ ID NO: 4428 - DNA, 1239 bp, Arabidopsis thaliana landsberg
cttgttttagaacatatagtacctcatttcaacccggaaatgaacattaaactatttttttcaagcaatgatataactgttccgatctctcacacacggacacgcacacacatactattggattccttaaaagaagtattactagttttgacatattttaatagctaggttttataaatatatgtatcaattattgaaagggttacaaattagtagtttgcttcaatggagtcattgactttataagggatagataccataattctgtggtatatactcttgtccttacgtattcaacattagcaatccaaagtctacaccaatcatgtatttactctcttttttatccatacaaaatttcatttatttattctttcatctaatatttatacatacctcaggtatcagatcctatcagctccagctaatcaaccaagttttattttttgatcacaacaaatttaaattatcctcacacgtactcttccacttattacaacatacactaacagaaagtcaaaagcaacaaaaaaatcgatttcctaacacttatgttttattaattagtactaatgcatgcagatacacagcacttgtagaaaacaatatcgtccaagcagcaaaagacatgcaaagagtcatgtcaagatctcatatctccgacgaagccacgacggatccacctcctcctccgccgccaccttcctacaaactcttctcccgctgcttcttccgcctccatggtcgcgacctcttcgcagcctcctttaattggttcctagtagacattgtcttctacacaagcaacctcctcctgtcccatatcttcagtcattactccaagaaaccttccactgcagaaaacgtctacgacgcagcctttgaagtggcggaattaggagccatcatcgctgcttgctccaccattcccggttattggttcacagtttacttcatcgacaagataggtcgtgtcaaaatccagattatggggtttttcttcatggccgttatttatttagtcgctggtattccgtacagttggtattggtcaaagcacgagcataataataaaggcttcatggttctctacggtttggttttcttcttttgcaattttggtcccaacactacaacttttattattcccgcagagcatttcccggctaggtttaggtctacttgtcacgggatctctggtgccgcgggtaagcttggggctattgtgggcactgttgg

SEQ ID NO: 4429 - DNA, 1195 bp, Arabidopsis thaliana landsberg
ccatgtattatacactagaataaactgattgtggaatttcgcctgtgagtaactctttaagtagggagatttataccttctgaattggccaacacagccagaaccaccaaagaaacagcaacgaagaaccacagccgcagatccgctcgccatctgcgaactggacttggaaaactttgattaacagccataagtcagggtttttaaaacaaagagtatcaaggcgtattagcttgtgagacttcaaaatgcttggatagacatgtatatactgtcaacagaatatggttttctagaaggttacaatcttttttaaactagataagattccaaggtacataaaagggccagataaggcaataaaacagaagggcggccagatgaaacgagaccggtctgtacatttatgaggcagtggaagtaaaaaaagtaactaagtttgtagctaaaaggaagcctatgtgaagagacttaaggttaagggtaaggagcttcactagctttcacaaatctgcctctgacacgcaacctagtgtcagctcttgccttcctcgattcataccttatggtcttatcatatctgttggcacccgagatccaagacaaagggagaaacgaaatatggtatcagattctttaagggagatgggcaataaaaaattattaaaggggaaagaaaaaagcagcatttacctccgtgtcttcctcttttccttgtaacgctgcattgcatctcctctgttctgagccagccgctccagatcagccttagttgcaactagtcttgtggtcttacaactagttccagcaatatgctctgtgaaatgcaagtcactggaggagttcgaacctttctcggagccaaaggtaattggaagattgttgctctcagattttgttggttgtacctggcctgaagttgatcgcttgtagtcatcctgcaaaagaatcctaatcagcatcacagttaagttgcatagcagtctagcaaatatatatcataagccaaaatgttagaattggtggcttggtgatgaggtaaaacaaagaaaagcaaaccagcttgtaacttttttctgactaggtttcatgttctgaattctatcattcactaaaagaagcaactgtctacaacaatttttgaggatgaacgggagatgacaacggagggagaaacaaacactacgctacttaa

SEQ ID NO: 4430 - DNA, 2494 bp, Arabidopsis thaliana landsberg
  unsure (1)..(2494): unsure at all n locations
tcagaagcaccagcttcgtagccgaagatgcttcgacttggttgctgaacgaagccatcaactcaagagtggaagtgagttcaccggaggtgggcgccaatgttagagacttgttctcaaatgctatgaattaagaacaaggcaacataaaatgttaaaggttaagaccttcgtccttcgaagcattatttcccttaggatataatgatcttcagacgaaggtcatgaaggacataccttcatcatcgcagtatacattaatgaaagaagaagcatgtaaaacataaaagatagtatgaataatcatataacattatcaatttaactttattatatcatcatagagaaatagaaacaatatcaaattataaatgtaccttcggcttggaaggagatgaaaatacaagtgtgacgcaaaagcaaatgccaagtcaacgtgaacagtacgggggtactgttcatctatttataggcacggggcgcagcctgtgtgaaattacattcatgccccttataaaaacttacaacattgactcagacctttatggactaaaaggtcattctatctttaagtcggtttgtaatgccgaagctttacgaagagaaaccttcggctatcttgtacaagcagcttcattcgaggattacttataagaccttcggcgacgaagcatagacccaacaaattgcatagtaagtgttgggggcctttgtcttccgaaggtcctcaaaaacatgatttaacaatgtcttccaagtgtgacatatgaacaggtaccttcggactcgggttaaaagtatatacaatgtgaagagcatggtcacgacgaaggttgatgttgctccgaagctacacgcaaggaagcttcggctgaatggcagaaaaaggaannnnnnnnnnnnnnnnnnnnnnnnctagtcctcatagatttttctataagtcaatagtaaatgtaaagggcataactgtaatttctcacaggctctatcctgtgcctataaatagatgaacagtacccctgtactattcacgctcacttgtatttgctcgtgcgtcacgcttgtacttttaccttctatcaagccgaaggtacatttgtaattcactatcatttctatttttccatgataataaaatgggaatgaattgataacgctatataattgctcgtgttatctcttacatttcatatgcttctccttttattaacatacactgtgatgatgaaggtatgtccttcatgaccttcgtctgaagatcattatatcctaagggaaataatgtttcgaaggacgaagggcattaacatttaacatcttgtgttgccttattcttaattcatagtatttgaaaacaagtccccaacattggcgcccacctctggtgaaccctttttcgatcaccttcggcaagcactgatcttcgtcatgccgccgaagaaagtttcagcgccaggggctgccgcactgtagccactggacccaaatcaggagaccctctctcttcgagaggcccaaagccagaaaaggaaggccaccagtccaacactctaggaggaggagttggaccaagagatcagaaacatggagataatccatcagcaagtacaaaggaagaaggagaagatggcccgactggctgatcttcaaaggcagattgacgaagccactgaagaagtacgccatcttgctcaagacgaacaagatcgaaggccccaacacagggagcttcatcaagaaggcttattcaacgaggatggatggtatgatgattttaatgatgatacctttacctttgatgatgcttctcccttggcagcagaactgcaggctatcccatggcctccatcatacaagccacctcagcttcccatgtatgatgggcattcagacccgaacagtttttgatgagtatgaagcaccatatcttcatatggaggaatgcagctgtcatggccaagtccttcgtcatggcagttaagaatgtggcccagacatggtattcttcacttcggccaggaactatcacttcatggcagaagctcaaagacatgctggtgacaagtttctagggcttccagacgaagacagtcacagctcaggctctgtttcaatgcacgcaagatcatgaggagtatctccaggcatacgtccaaaggttcttgcgtctgagagcacaagcgcctacagtgcccaatgaaattgtcattgaggccatgatcaaggggcttcgtccaggacctactgccgagtattttgctagaaaacctccacagactttggagaagctgcttcaaaagatggatgaatacatccacgctgacaatgacattcgtcaaagaagggaggaagcctacaggttctctaagatgaccaggggcttcagagggagaatccacccaaggcatgtcaggtcaatccactccacccagaatgacgatagaggaagtcaacaacaaaggccacaatattcctcgcaagcttcggggcagca

SEQ ID NO: 4431 - DNA, 705 bp, Arabidopsis thaliana landsberg
tgctgtctgttttcgtggaaagcttcaactccaagaaatctttaggttttacgtgttccaagtactattttacccattaagcaagaatcggaaaatcatagttggaaggaactaaatttgaccattgattatttaattgcgttttaagaaaatatcaaatccaatatttcccctcaactatataaggaagtattctcaatatctcattccacacgctataatcaaaatggcgaattacatactttgtttttaagtggttaaactgactcctcaaacattaattggcttggcaggtcatttaagcagggcagtagtagcagtacttatatgtttgtccataataggagcagtcatcctctttgttacttgtatcgctatccggattcacaacacaccgagacgacgacattgggcagtaccagcggcagccgcaaccgtaatgcagcaaccaagagaggttatggccacgaggggtcttgaccaatctacaatagaaaaatacaagacaatggagttgggagaaagtagaaggcctcccgggactaatggtattgtatgtcccatttgtttatcagagtatgtgagcaaagagaccgtacggtttatacctgaatgtgaccattgcttccacgcgaaatgtatagatgtgtggctcaagattcatggttcatgtcctctttgtcggaactcacgtgcgtgaagggt

SEQ ID NO: 4432 - DNA, 4578 bp, Arabidopsis thaliana landsberg
  unsure (1)..(4578): unsure at all n locations
tggggcctgaaatctgtgggaaactcactttccctgtttcctttaaacaggttcggtttgccctctactgtttggctaatttggtgttgtttaaggtcgtcagactactgatgaagatgtttttgttttgtgttgtaaatttttccagccagggcctcgtgatgcaatgattcagtgtttcatcaaaagggataaatcaaagctaacatttcacctttttctttgtttaagtcccggtaagctgtttttaggacttagcctgcttctttatgatgttacttagtttatgtctaaatcaagttgaataatgttttttcagctctattagtggagaatgggaaatttcttctttcagctaaaagaactcgtagaactactcgaaccgagtacattatctccatggatgctgataacatctcaagatccagcaactcttacctcggaaagctcaggttcgttttcagtcctagacatagtagtttgctactgttgaattttatggtcgtttatctattgttcaaataatcttttgtgattcccatttaatcaagcttaatgaggtttctttatctctctctcagatcaaacttccttgggacaaagttcttggtgtacgacacgcaaccaccaccaaacacatcttcgagcgcacttatcactgatcgaacaagccgaagcaggtttcactccagacgagtttctcctaaagtaccatccggaagctacaacattgctcaaatcacctatgagctcaacgtgttgggcacacgcgggccacgacgaatgcactgcatcatgaactccatcccaatttcatcgctcgaaccaggcggttcagtccctaaccaacccgagaaactcgtccctgcaccatactctctcgacgactcattccgcagtaacatctccttctccaaatcatcatttgaccaccgctccctcgatttcagcagttctagattctccgaaatgggaatatcctgcgacgacaacgaagaagaagcgagtttcagaccgttgattctaaagaacaagcagccaaggtggcacgagcagttgcaatgctggtgtttgaatttccgcggacgtgtgacagttgcatcggttaagaatttccagcttgtagcagcaagacagccgcagcctcaagggacaggtgcagcagcagcaccaacaagtgcacctgctcaccctgagcaagacaaggtgattctccagtttggtaaagtagggaaagatatgttcacaatggactataggtatccattatcggcgtttcaggcgtttgcgatatgcttaagcagctttgacaccaagcttgcttgtgaatagaagaaaccactcgtctnnnnnnnnnnnnnnnnnnatcccttgtctctctctctcttttatctatgcttttggttttttttaggcaaatcaaaatttgtctcaatactcagttgctgtactgtgagagtcagacgtctactattaacatcctcttctctattctaaatcaattgaacatttaataggtagtctttaactaatcttacatgttactaacttctaagaaatcacattgaacaacaatgtatgatggaaacaagaaagaacacacaatcatgtgtctgaaacccgacatggggttcttcttgaagtctcaatcttgtactaacattggcaaaccaatacggcaatacaatggaaaaaattcatagaaatgaacaaagagaggaaggatttaagctcgagtctgaaaagtaaaatccccaaacaaaacacattcaaactaaatagtgtgttaaagagtaggacataaaatgtaagagaagggtaaaaaatgatcctaaaataaaaggtccatttgttgggaaattagaaacgtgaaggggaagatggtatcagtgtcattatctcatcataatctctggccaccggaatctggatctacggcgtttcgtggtttcgcaaccgccgcttccgtacacgcctgccaccatgttagccgtcacctccgccttgatttccatcttcgctcttcccttaaggttcacctactcatcttcgctcgtttgtagtataattcctggaatcacaaagcttaaattgcttcgtcaggcgcttctgatttctgggttaatctcattttatttgactatgctctgcttctacagaaactgcagcatttttctgatgatgcaagaatgaagtttgcaagataccaaagagtgattgtattcaatggggctaattttctcaagtctagagttgatatccggttgtcccaatcttcgccatttgtatgtttctttaatggtggagagagtagattaaaccctagaggtggtgaggaaggatcatcgaacccggagacttccaagagaaacacagttaacggacggagatggaccaatgtccttcttgccattaacgttatgtatgtgttctgttctctattacatgtaaaaagattatgtcttttggtttggtatgtgttgcattagaagaatgcttttataatcaagcttgagacttgagagttgtgagctaagaaggcttatggatttcattttgtgtttatgatgctagaatgtatattgcacaaattgcatccgatgggaaggtcctgacatggggagccaaggtactgtagacttagttaaatgagaggcagttttttcttgctgcaaattgatgtatgtggatgattgcagataaacagtttaatcgaaagaggtcagctatggagactggctacagcttctgttcttcatgcgaatcctatgcatctcatggtctgtttctaaccaatccttcaccctttgtaatatctaatcattgctctgtatggctaaactgtttctcctttgttttagataaattgctattctttgaattctattggaccaactgctgagagtttaggtggcccaaagagatttcttgctgtttacttgacatccgcagttgcaagtaattgacgactcatagactttctttgatcttgatgcttatatatctctgtttcgagtttcctgactcacagaacccatcttaagagttctaggttcagcaatgagctactggttcaacaaagcgccatcagttggtgcttcaggtgcaatattcggattggtaagtctcgtgtagccataagcctttgttttagacacgtctcaaagactcatacaaatgaagttctttaaacgaatgtcccttttgtttgagtaggttggctcggtagctgtatttgttataagacacaaacagatggtcagaggtggcaatgaggatctaatgcagatagctcaaattattgccctaaacatggtaagtaatacaacagagaaaattgtataatctctcttaagttctaacaagctcttatcactatgcaggcaatgggtctaatgtccagacgtatagataactggggacatgtaagtaacccaattatgccttcaaatgtattaaccagtctccgattttttctcggatcagtggtctgataacatctccggtgaattcagattggtggcttgcttggtggaaccgcaatgacatggcttcttggaccacagtggaagtatgagtatacaacaagagacggtcgaagagtcttcaaggaaagtgctcctattccgatacttttgcggtggagaaatgaatggcaacgacgttgatgcaagaccaacgaagctgaacactttctctctcaatgccgtgtgaatatagggatcgaatgtacttaagtaaatcattcttttggttaatattttttttgtgactaaaatatcaacaattaaaaaactgatttatgtgaaatatgtagatgcaatctttaatcagacaactacacaaaatgtataaatgagtaaatgtttgtatgatttgcaatgaaatgacaatgaattatttgggaactagtgaaagaagtaaaaaaacgattgtaaatcgtacttgtatccttaaaacattgaaaaagaagttggtaaaaaaagaagatatgaatatgtataatgtcttagaattaagttgagaaagaaatatcctagcaaaatccgagaaaattaagattgtacttttggcatccaaaaacaagagcgaaatccaacaccagatagtatagaagaaattaaaaacaaccgatgcccccaaaggagtgtttcatatgacttgatagttctgggcaatcagctgcgtcctctgcacaaacctaggagtcgcaccaccacctcctctcagaggaatcattccagtcacctgcaccgttttgaacaagcctctcatttgtaatccaatataaaatgccttcaaaattctcatataaaccaaaatatggaacttgggttttctccagaggaccaagattcataccttcaagccactgtaggtacttgtcgctgcaaactgaacagagatggggaagaacaccgatgaatccactggaggcacaacaaactccattgacccactgcaacaagattttttcatgtattatttatatacgcatgtcaaaacaaaactctgaagtatagttttaaactgatgatatcatcattagttacctgcggttggagttgtcaataagta

SEQ ID NO: 4433 - DNA, 1004 bp, Arabidopsis thaliana landsberg
ccgaacctggcgaaatgcttctttgtgagctgtgtccggttgttacggttttaaaacatgtgaagatctagcaatagaagctcaccggttccaaaactttcttctccgcatacagagcacatcccagcatccattagattgccaaagaatttccagcctgttggaacctaaaatatagaagtattagagcaatagactatgttacgtgattgcaatgaatagaagctagagaaaagcttcacaatgacatctacctcaaagaacttcaaacccaagttttttgcaacgacatcaagtgcagctgaggtcggcatgctcctgcaatacgaatgtgaaagttgagaatttaatgagaaaagattgttactatctataataaacaaaaacgtatgacaccaaagtccagcgttttcaatctatgaactggagtaaacaaacaagaaccgggatgcatacctagcaacaccttttaaaccagagctgaagtatggtatggccccaacagcatttgcagcaattatagcaactgaatccgaaggagttacgaaaaacctgcggagaagagatatttttggttaacggggagagtggtatatccgctccacatctctgtgatctcacttaaaagagaattagtctctgctaccttttaccgaggatcatgtttcggtctgcatcaccatcagcagcggcgccaaactctggaggctcgccaccagcatcatcagttttactcaatcccatgcgtgccacgagctccttagcataggtaagattgggatccgggtggccccctccaaagtcctcctgtacattgtccgattgtcgtgttgttataaatcataaaagacactgttcaacgtgtatttataatcctttcaggaaatgatatttcttggttatacaaaataagaaagaagaaaaaaatgataccttgggtacacagttcaacaacgaactttctggtgcacctagttcttcgacaaagatgcgatgtgcatatg

SEQ ID NO: 4434 - DNA, 3292 bp, Arabidopsis thaliana landsberg
caacaagctttgatacaagcagattttgtgcaaccaaatttgataaaaaaaatttcagctcatcacaaattatttttgatctctctccctattttactatttttccgagtaggatagtgtttgaaggttatttacaagtttgtggctcagagacgcaacgttactttctagtttcaactttcaacccttaaaatgtctctttttcccatcattgtgtgtatagcctatatatgttcagggattccttatatactatgtcaagcacaataagataagatattattatgaaagaatcaacgtattctcttgccttcactattggtattaaaaactcacagaggaagaatgtgatctcttttgagtaactccggccacattacatgcaatatattaataattagacctttaatatgaaaacactcgtgatcctaaaaacattaaataattttttggtcaaagttacataacagcaatatgatgaaattttgatacagtaaatacctgatcagtcatgatcataacttttgcttttcaacataaaaaatggggagagagatcaaaaactatccccccattttttggtcaacgttatgttttcgagtaggatagtgtttgcagttgatttacaagtctccccatttttttttagccagacgcaacgttactttctagtttcaacacttaaaattttaaaataagcaagatcttagaaaaccgcactacataaccctgcctggctggctgcctcaaagtcatgggcctaaattggacttaataacgagtaagcccaactggcatcatatcttgcttgtgtctattagatacatctaacatagcagattcagtcagagcttgtaacactttaaaatctttacactcccataaatagacttttgttacaatcatctcacaagaagttagatggtttataccgatctcacgattctttttaatgctacaacggatgaaacaaacagacaaagaaatttcaaattcaccaacagaacaatcttaatattgactgcataaaacttgagtgaaattatcgattaaaattataaagaaaatccaagacaaaaacattgtaccataatgggagtttcaaagaaataccacaagctaatccaaaaacatagtttctcagacaattgaaactgaaaactcaaaacatgttgtaagacaaaagctcaaggcagataagaagagactctaagcagcacccttgcccttcttcttctggatcttcttcatgtagaactccaactctttaccttccaagatgtatctgcacatcatttgcaaaacgtatgagcaaaacgtaattaaggacgtttcaacaaaaataatgagtgaaggcacataatgaatacccatcagcacgcccgcactggccaggccttgaagagatacaagccaacaaacgtccacttgcaaattggtcctcaatgtgtgaatcaagactgcgaccctcttgacggcttgcaatctttctcaggaggtggttgctcttcttgacctcctcaggagctgcaacagctgcctcttcaccttcctatatagttaacattatataatatcgatcataagtttcaaattactgctacaaaaacatgaacagactcaaacataacaagcaaatgaatcaattgttaaatggtctaacctctccgtccttcttggtggaagaagcactcttcttcttccgcccaagctcaacaccatagtgcgagaggtaccactgcttgaaaggagcagcatcaacctgaacaatagcactcttgacaagtgtcttagtacgtacaagctcattgttggaggcattgtagaccacatcaaggactctggtcttgcgggtagttgcttcacttccccacgagtagttaccagtatcgagcctcaacgcacgccacttaacatttccaccacgaactcttattcttctgaccgtcttgttgcttgagagcttggtgttggctggctgccttcccatctcataccttcacaaacccaaacataaaactcacaaatcagaacaacaaaatgaatccaagctagtaacatatcatgaatccgtgacacccagaaatgtgacaattactatgttttaacaattaaacgatagcatatgaagaatcacatactatgatacggcaaaatatttctagtaatctacagattctgaatctactaaaggcaaacactcagatttaacagttcacaacagcggacaaaactcttaagcgttttaaaacggagattcacaaactctaatctacgacgagcggagcataaaatgaatcggaagagatctaaaaatgagaaaaacgaaagactcactttcgcttcttcctccattgcttctgcttgcctccagtggcacgcctcttgtggatagagtcacgagaaatacctaagagaaaccagaatccatatatcagaatctaaacaacaatagcataacacagaaacgagatcgaaggagtggagaaatcaaagagaaagcgaggagagattgttcgtacccattgtcgccgattagggtttctccaataaagtttagctgcgcggagttgagaggagtgaatgaagagcttaaatataaatatatagggagtataaaccctaggttatcatctggcccatccagagccggcctttgggccaagcccatgaagcatcagcttccggccgttttatgttataaataaaatttggtctagtgataataattttgtgtgttatttcattgttttggttgaagaaaatcgtaaaaaaaaaagagatagatcctggcagattgaactagggttgggtgaatctaaccgtgcatattttattgaaaacgtgttgggtttgagagccaaaatctgttctaacaacataaacatttcacactgaccaacgagagactcttgcacataagttatcaacaggacaagagtataacatattgaacaattgaaggaaatgtgcatatgttctgtcttccaaacatctcttacatcagttatcatctattcatatgtgtccaaaatatcttttctttacctaatttttttaggaaacgagaaaactcacaatcttttcttcttcattttcctctgtcatttcagtcttactccgccgtactaaagccttgaacatcgttaacgctgatatcaaagcaatctcccagtgctcagagctgttaagtttcacatttatcttccccattttcctattgttcatgtttatgttgacgtctatgttcgtgccccgggctggtctaaactgagtctgtaaaccatagttc

SEQ ID NO: 4435 - DNA, 1800 bp, Arabidopsis thaliana landsberg
  unsure (1)..(1800): unsure at all n locations
atagaataggtcaggcctgttgaaatccccaatagtacgacgtggttccgcaactggaggaataactgcaggaatctggtgttggtgtcgatcgatacctctgttgtgtcgttcgacaccatctgcatcgtcattctgctcccgatggtgtcgatcgacacctctgttgtgtcgatcgacagcgagccctgctgcgtctctggcagctatttgcgcgttgaggcgcgcctgattctcatcgacatcctcaggtaggatgagtccatgatcatccaatctctgaccagcctcattgtaggcttgcccatcctcatctctcaaaactccttctgcatcagctttgatgactctgtcagccattgctaatttttgagtttttcggttggtgcgttcaagtgttcccaagtccagaacagacaagttgataagctccttctgttttgtgctccttttttgcctaggcatacacctcaaatacagaaaagaagaaaacaagaaacgcatatgtaacaaaatagaagtaaaaactagactaaatctctaaacaaaactcaatgataattcccaagaacttcggcaacggcgcaaaatttgatatggttcaaattacctagaactactctctcaaataagagatcaattgcagtattttaggatcgaattcacggagttcttttgttcaaacagtgagttacatgtcgagattaagctagcagggtatgagtaaaatagtaagaaaacaaagtaagaaaacagcgagatgattgtgttgtgaacgacttaataaagagctaggaacagggtattctcagaaaactattggttaatagatctaatgaaagctagattgttatcgaaccattcttaaactcaaactctaattatggaataaccggtgggcatgccgcgaaactccctatatctatagctaatactaaccggagaagccaagaaattatccacctaaagtgttgagacaacacttacacccatttctcccaaaagagattaaaacgcacaaaacattcctgagaagcagttaatagccttgttaagatttctttggttaaaatgtatcagaatccaatgcatttgactaattaaaagagttaaagacggattacgagtgtttagacaacacttatacccatttcctcccgaaagatactaaaaccaacaaaaaattgcttagtagcaataaatagctttgtgtttctatggtcaaaatgtgtcacaatccaatgcatatgactaattatatgagttagagatgaattaggagtgtttagacaacacttgatgatcggttttttagtcaattaaacctaaagcactatcatgtcgttgtnnnnnnnnnnnnnnnnnnnnnnnnnnnnnnnnnnnnnaacaatcaagatgtgatctgaaatcactaagtcaagccaagcaataacaggttttggtgtgttctagcagtcctaagtgaacatgcagaaaatagaaattcaagcagaaacaataaaacactcgaccaacacagctccttgcagagcactgggtgaggtcgagtgacaggtcgagtaaaagacagaaaataaaacacagatactcgactgcacagtctgttgcgagacaactgagtggtcgagtatgaggtcgagtaacaagaaagaactgcagaaattaagcgacagataacaagatgcagtaaacaacagtagagtaaacaaagaattcaatcagataaagaattctcgaggatggggtaattgaatagttttcgtttcctcagtttacaggtgattgacatgcttaataaat

SEQ ID NO: 4436 - DNA, 1736 bp, Arabidopsis thaliana landsberg
ggaagagtcgagagcaaggaatgatgctttgaagcttgatattgctcgtcagttactttatttgggaaatgctgagactaataggttgggggctttgaagaatgtcagagagatttgtaggaatatacgtaaaattaggcaacgtgtgtgcaatcctcagcttgttcggttgattaccgatatgctaaagagtagtagtcatgaagtgcggtgtaaggctctacaaactcttcaagtagtcgttgaaggagatgaagagagcaaggttatctctctgtttgtgtttttgtttgtctctctgtttgtctttgattcctttgtaagtgatttttagtgtgtttcaggcaatagtagctgaaggagacactgtgcgtactatagttaagttcttgtctcaagagccatcaaaggggagggaagcagctgtttccgtgttgtttgagctctctaaatctgaagcattatgcgagaagattggatcaatccatggagcaatcatcttattggttggtctgacaagcagcaaatcagagaatgtttcaactgttgagaaagctgataaaactttgacaaatttggagaggtcagaggaaaatgttcgacagatggctatcaatggtagactgcagcctcttcttgctaaacttcttgaaggtgattatttcaccaaaccactaacctttcattaccaataaactgattttcactgattggtttgaatgaaactataactatgtaacatgatctgcatctacaggttcaccggaaacaaaagtttccatggctttctatcttggggttcttgctttaaataacgatgtgaaagttattgtggctcagactgtgggttcttctcttatcgatcttatgagaactcgcgacatgagccaacgggaagctgctttgggagctcttaacaacatctcatcctttgaagggagtgctaaactcttaatcaacaccggaattctcccaccgcttatcaaagacttgttctatgttgggccaaaccagcttccaatccgacttaaagaagtctctgcaactattcttgccaatatagtgaacattgggtacgacttcgacaaagttcctgttggacctcatcaccaaactcttgtttcagaggaaatagtggagaaccttctccaactaacaagcaacactggtccagaaatccaaggaaagctgttggcggttcttgttggactcactagctgtccaaactcggttattaatgtcgtttctgccatcagaaactcagctgccatcataagcttggttcagtttgttgagatacatgagaacgatgatttgcggttagcttctatcaagcttcttcataacatttccccacacatgagtgaagaactagccaatgcgttgcgtagcactgttggacagctcggaagccttgtttcgatcatatcagagaatacaccaacaatcactgaggaacaagctgcagctgctggacttttagctgaacttcctgagagagatttggttctgacaatgagattgttaagagaaggtgcttttgagaaaatcatctccaagatagttggtattcgccaaggagaaatcagaggaatccggttcgagagaacatttctcgaaggacttgttagtattctcgctcggatcaccttcgcactcaccaaggagactgacgccactttggtctgctgtgagaaaaatcttccttcacttttccttgatctccttcaatccac

SEQ ID NO: 4437 - DNA, 834 bp, Arabidopsis thaliana landsberg
agtgatactcaactccttagaagttataggatatagatagattttgaccgttttcacgacattctggaaaccatttctcaatagcttcacgctcaaatgtctgaccattctctaaagtgacaggattatgcataacttgctttgtcaatggacagataaaagcttcgtatatgttatcaatccctggctcgaattgtgagctgttatccgattggcttccatcccaacttccacttccagccatctgatgaattgattcttctacaccataataagactataatgtaatcaaagatcttatataccaaattaagctaagttcttctaccttttatgaggaacaacattcagtagctaaaatcaaaactataccctaataataaaggcaactaatttgcttctaacaatcatcattcgtttaaccctaatataggaaatattaccaaatatagaattttgtttattctcaggatagtaattactaattagtactagtatataacaaacacacgaaaaaggaagattaacacacgtaccagttcaaaacaaaagaagccctgaagaagctgtcttaaccaagaacaaaggtctttagcttcttcttctgctagcttgagaaattgagaacgatctctggttaaattcaaaacctttgaaaagaaaacgggtgaaatcgagtcaaatccatgtaacacaaacatcggtgtagtcaagtatgaatccgccagagatatttttgtgcatgaatcgagaccggaggaagaaagatgtcaactagaagagagtttcagtcctataagcaaaagatgggaaacgacggtccctctccgtctg

SEQ ID NO: 4438 - DNA, 2306 bp, Arabidopsis thaliana landsberg
atcgaatacacagtgattattgattagagtgattcttgtgaggccggtccttaagggtgggatgcgcaagaaaacttcttattttttgcccataggccataaatataaaaatgtagcgaaatgtttgtaatgaggttcgaaccaaggccaatgaagcatttaaaacctgatttcaagtattcaaccgctcaactacaagttatgatgcctcttaaatcaatattagatttattttggtgtccaaggtctttgcttattgtaaaaaggacagcttatcgtaaacatgttgagtggggaattcagtctttgtttccctatacttacatgcatagaaactaggagaatttgtaagtatatcaattatgaggattttaattcacataataatatagtgaaaacactaactatctagtttgttaaaaaaaaaactcttttagctttctagagttgtgtggtgtggtgtggatggacagtggagtgaagatttctagaaactctctgcgttttgtgttgagttctccccattttctcaactccagccccttcaagtaccttgacacgtacaattcttgaaacaacaacacaaaaatctatgtgcattcaattcatctctcacgatcatctatcaaatcactttatcagtaatttacattttaaagttatatcatgttctggactaacaatgaaaaccattttatttgaatccatatgctggcggcaaagaagaacagagcatttgtattatgtcacacaaattcagcaatcaagtgaatggagagtttataagggaggtaagatgagattttacctcaggcaaagaggtttcactattgtgcagcttggctacttcccataagtcttcactgcctcgtagttactcaatgtccttcacgttcctaggaatcacaaggtcgttgtaagacggcaagaaagaaaaaagagtggaatcgactgatggtgtattatgtttttattattattattaggtcattggtgcaatatctgaagcaaacctgcacaaaccaattcagctaaaagaagcaccagagaaattagctttcacatcctaaatgtgacaatgactagctcacttgagctcagggtcgtggtggaggtcggtgagtgggacgggtggaagctggtttgtatgtatggggctgtggtggtggtgcgttatgttttaatcactgtttttttactgtgagtgtaggaaacgccacggtagcagtgatgcaattgttgctgatgaggttgctatttaaaaatttagttccaacacttttttgctgttgataattctcttgtgaaatacatttttctttaccaaatttattcattgatttaaagagagaaaaataacctttggtaacatacacgtagagagatatgtgtgtttcaaaagacaagtgtggagaaagtttgaacctttaacttgtttcttgcggaatctctcactatcactcaaagaaatttggatctctcgtgtgttgacttagaaaaacgaatgaagaagaaatagaaagagcacacacacaccatttaacgagttcacgttccaaaccggaacgctacatctcgccggagaaacctctccggaaatccactagaacttggaaacttagtctctgttacaatgctttcaagctttctctcactacactcctatctctctttgatctcaacaaactcttatcccgatctaacggaattacagagaagaagaagaagatatagttacatagctcatgcgaacagaccaaaacgccctcaagcttgttatgactttagtcagctcgcctcacgtgttatgactttagtcagctcgcctcacgtgttatgactttagtcagctcgcctcacgggttacgcttgaatcacaacagacttcgaaccctctctttcaccgagtttctcccacacttagacccgaagattaaaatctgagtcacttcttacaattctccaccttgactctgattgtcttccttgtctcaacttgttctagttcttggatctcccctccggtacctgagattcactctcagttctcagtaactcggagcatatgcaatgctccttcaaacttctccacgggcaatacctttgaaaaaatatctgcaggattgcattcacttgcaatcttcaccactttaaccagacctgcatttatgatatcccgaatgaaatgtaacctgatatcaatatgctttgttctttcgtgatgtacagagttctttgccaaagcaatagcactctctgaatcacaattcacctctacactttcctgtgcaaaacaagtcttcaga

SEQ ID NO: 4439 - DNA, 2436 bp, Arabidopsis thaliana landsberg
aaggttgattgggaaatttggaataacaccgtcacaagttaagtttcgtttgagactcacatttatatcaactttactctatctacaaaacgtttcgtatgaattcttttaatagcctagtcaacatatctcttgcacatgcaagtatacaacaaacccttgatggatagatttatgggaaatatctcattcaacaacaaacctaacaaaagattgttgatgatgccagttaaataacagagtactactatcttaaatgtaaattatcactttacaaaatagactgtataatgaaatcacattgcaacctatcgaaagtcacgcttaccaatctaactatcttcttcttcctcctcagatgcttccttgagccactttatgaatgactcacatttattcagataaactttgtcacaatcgtctgctcctgctttctcttccccccatctcaagatcgcatcttcttgcaccacgtctttgtcatacagaaaaggcagaagtttagcaaacaaagggctcaactcttcagattcctgacacatctcttcgaatttcattatcacttctatctgtgcatcagtttgctttaaatagaacccaagaactcccttccatttagttatgacacccatcgcgtttctgtacaattcagtagcagaaattatgtggactctttactgccagtctcatcatagagtagaatactgctccagcacaatctgcagagtccatgttgtacgccaaccggtgtgagttaatcaaaggaattacaatgtccgctttgttatccttttcaacggcacttaagaattcttcttcaacctctctctcaaagtcgccataggaatcatttgcatcagtgttaataatatcagtatcagatttcaactctccagaaggtgggacaacaatgtcatcctctatgtcatcatcgtccatggccccagtgatatcggcaagtttatccatggggattggtacaacagaatgtttccactcctcatcatgagcgctgtcacatatttcccatatgtaacctgctccatcaggaccaagctcagatgctttggactccatttgcaaattatttaggcctgacaaatgatccgcagtcccgctgctactatcagcatattccagctcttcatcactgtcttctgtcgttggctgttgaagtagggaaacctttgagtatgcaggcacaacaaagtcccgtccaactacaacattgaaagacaaaacaacaccaggctgcagaacagctcctgctctgattttcaccccatcacacacaatagcgttccttatctcacacccatcttcaatagtaacattgttccatatgtatgagccttcaatcaccacatctgatccaatagagcatccattcccaataaccgagttcatgattttatccccatgaccaattttcgtaccgtatccaatgacagtagaagctccaacatcagcagatcgtgattgaactacatcagaagccttgtatatcccttgtctcccgagctttagaggccgatttccactgaaattaatatctggtacataaggatatgtccacctctgaattatatccttgctaacagtgtcatagcttcggaaattatcaatcctaccagcatagctcgagtgaatctcatgagtgaagattttataacccataatatcatccacaagcacacctttgacaaaatgacgacgcagatgttgataatcaaagttatcctcaaagagactaagcacttcaggagaacatatgtcaatgtagcaatcctgcatatcattgcatactaaaacagaaggattagtatccaacaatgacttctctaagcaaactgacccacttggatgatcaatcttatcttcctcgtaatgaagaagctgctttgtcaaaggatcaacagcaatgaaaagctgatctgttcctaatcttgactgatgcgtaagtggagaagatttagactgcttaataaccatagtcataatagctttctcatctttcttcttcctatctctatgttgttgaatcaaatcagcaagtggcatattactaacagtatcaccactaacaagaacaaaatcaccttgaatctgagacgtctctgtctgttgttcatagatataacgcagagcatctccaacactggtggaattgtgagacactatcgttctcaccaacaagtttgggtttgggcgtgtgtaccattccgatttcttcaggtaatcgatgatctgcgacgaatgagcacaacagaacacaaaaatctcttcgatcccagctgattcgagccatgctaaagtgtaatcaatcatcgggatgttcactatcggcaatagtacctttggtcgttctaaggttatgggacggaattgagtggtgaagctgtcggctagaagaatggcttgtaatcgtaaacgact

SEQ ID NO: 4440 - DNA, 1850 bp, Arabidopsis thaliana landsberg
aaatttgcactcaagcatgtgtttgtcaggaacaatttctacatgaacaaatgtttcttctgtcaatttatggtaaaaacaaaaaaagctatccagtgtggaagagaatgacttttggtgaaacaactcaggactcggtggtgacttaagcagatgaagctttcttacaatgggcttcaagccagtccatggtaacactctttggcctctcaagtgcaagtccaagagctcggtcccatataagctgtgaattaaacacaaatgagaatggagagcatatgagttctgttttaaatgttatgtagtaacaaaggcgtaatgtgtaaatatatatatgttacctgagagcagatgccaagactccttgaaacaccaaagagcacggtgtagtacctataaaacgcacagatattatatttgagtgctatcctaaggctcaatgatacttgaaggaggtgtctacttcttaccttgcttcggttagaccatagtggttcagcaagaccccactgtgagcatcaacatttggccacgggttcttcacctgtaacaagccatcatcggattcgcaagtaaataaaaaattgattcgcaagagattcataagcccctagcatgtaggtaaggtgttgtggagttgttggtggaatattgaaggatcaccatggtaaacgaaggatagagatactacctttccaagctcagtgagaacaggaggcacaacttcataaagctttgacacctacagagttggaaggattttgttagctactgaacattgatagaattttgagaaccgaacagaaaagagaaaagagaaagaaaaaaagtaccagctggaaaagagggtcgtcaggtagatgcttcaaggcaaattctctttggcatacatatcttggatcagtattgcgcagaacaccgtgaccatatcccggaataacctagagacaaaacaagactcgtcaatagatcatcattagactatccttgtaacattacatccacaaggtaaactaggatagggaaaaacaggatccaaagctcttatggcagtattacttactaggattctgttagagcaactgaccaaactatgaggtcgtaaataagaggacccataacagtatcacacaataaattgaaatattagcctattatgatgactagtagacaagatgttaattcattttcgcatgctccatcagtcttgttggctggcttcaaaagtgggattcaggtacaagaccagaaagtaaagaatgtcaaggcagaggaatttcctgtttttaccttgccactgtttaatgttttccaaacatattctttcaactgttcttttgatatgtcttctccacattcctctacgactgatttgatccaaagcaaaacttcctgttgaaacaataataaaaaaagactaagaatttgttctctccaatttatggttgtatcatcaaactatcacaacctacctagataaaatacaaaaagccacttacgaagctctattgtagattgaagatttaagacttattcaagatatagacaagggaggatacctgattagccaaaccatggagtggcccagctaaaccatttaatgcagctgcaaatgacagatatgggtctgaaagtgcactaccaacctacatgaacaagaatttttagcaaaagaaccattagaaacttcaggtaggtcaatcctttaaaattgacacatggagagtatatacataccaggtgaccagtgtgagcactaacatttgcaccttcatgatcactagagcaaaaaatagcagaaaagcaaaatgttatacaaaggtctatgtaaagtcttaaaaagaacaaac

SEQ ID NO: 4441 - DNA, 1457 bp, Arabidopsis thaliana landsberg
agctatgaatttgttgactccatctgttgttgctcggaagaaaaccaaatcgtgtgttcagagcatccaagttccgcgttgccaaattgatggctgtgagctggatctctcatcttctaaggattatcatcgcaagcatagagtctgcgaaacgcattcaaagtgcccaaaagttgttgtgagtggcctggaacgtcgtttctgccaacagtgtagcaggtaaaccatgattattgttctgactgcattctctttactgcaaaatgctagttctgtttagtcgtccagcaataactttaacatgccctaatgttatggtagagaattgatttcttttctaatgttcgggttccatgctgtctccgaatttgatgaaaagaaacgaagctgccgcaaacgtctttctcatcataatgcaaggcgtcgcaagccacaaggagtatttccactgaattcagagagggtgttcggtaagaacctacactacacaagttgatattagcaatgtctcttcaggatctttccatctgtcaattctctctttctctatcacacacaccaacaacgaattttttgcttttacagatcgaagacagcatacaagtatgttgtggaatgggttgtcccttaacacgagatctgaagaaaagtatacatggggtaccacttatgagacaaagcctacacagatggaaagcggctttactctgagcttccagagaggtaatggctctgaggaccaactgtttactggtagcaccctctctttctctgcgtttcaaacatctggtgggttctcagcagggaaatccaacattcaacttccagacaaaggttgatatcttcacttctttaccacatcttgtatttgttgtgcatatttgctgatggattggccttttttagatctctggttttgaaactgagtaatatgttttggcaggtgtgggagaatgctcaggaggcctccatgaatctcatgatttctacagtgctctctctcttctgtcaactacttcggattcacaagggatcaaacacactcccgtggccgaaccaccgccaatatttggcactttccctagtcatttcatctgaaagagttaaaaaatgcgaagtcactccataaaaagtcgggttgcatcatccgatggagtttgacagtttgttttcaaataaaataaaaatgtgcaacatccattgctcaagctaaaccagtcactcggttagctcagcttttcttatacatttccaaacatattgtcaatttccttctggattctgttggtatgacaactttgttactctgtcaaacatgtctacgactattttaaaaccatttcagagattattgatgttgtaagtttttgatattatttttaacttctttgcatagtgaaagtgagaattatgaaagacaacttctgctttttaaaaggcacaaaatctgaaaaaag

SEQ ID NO: 4442 - DNA, 903 bp, Arabidopsis thaliana landsberg
cggagaagatccgtttattggcttagcttggtgccgttttttttgacatatacttaattcaatatgtgtgtatctgtagactcaatagtaagctttagattaaccctttatttcatttaaaccttagctaagaactttctgcaagtacaaagaaggaatgggtagggaagggtttgcaattatgatggctatagggttttaattgacttgttgaagtcgtgttctttaacaagttgttgattttctgggcaatctgatttgaggagtgtgggaccagttggaataaatgccacttagtttttgtgtgatggagagcacaagagggagctaagaaaagtaataccctttctcttgccctttttgttggtctgggtgaaacatagcaaggtttctcttgctgaggttattgataaacgggtgagttaaataaaaacgttgatcagcagtgtgtggtgcttggaattcataaggtttttcttctttcttatgcatttggtagttaatggtattgtctattaggtatctgtttgggttgccagcgttatttataggcttgacaagttttctcttattttatgatgacctggcttacattaacgatgactagttctgcaaacttatggttgccatcattcttcagttactatgactatagacgataggtctatgaaattatcccacatttcgtatggactgcaacatgttatcttcactcccgtggtactgggagaatgtgatcatgttcaatcagtcgaagactgaaaatgaaaaaaaacagcaatctactgagtgggaatttgaaaaaggtgaaggaattgaatctatagttccagatttcttaggctttgagaaagtcagtagtggctgtgctactagtttttggctcactgccgtatcaaaaag

SEQ ID NO: 4443 - DNA, 594 bp, Arabidopsis thaliana landsberg
  unsure (1)..(594): unsure at all n locations
ccatnnnnnnnnnnnnnnnnnnnnnnnnnnnnnnnnnnnnnnnnnnnnnnnnnnnnnnnnnnnnnnnnnnnnnnnnnnnnnnnnnnnnnnnnnnnnnnnnnnnnnnnnnnnacaaagaattttcaataaaagggggacaaagaagaaattctggaaaccaatgtctaaatttggacttaaaatcaaggagcacaaagaagaagaggttactcacatgatccaatgacaacaaagacaaagaagccgaggaggatgggaccaacagggtaatccttacccttcttggtggtggtctcaggaacaaatcctcttttcaatatgttcttgtcgaatttctcaatcttcctgtctgctagtctttttgaggttgtctgcaacaatttttaaaatcaaccctattcagtaatacacattggtaatggttctctccagatcaaccatattactaaaatcagaatctctttcgtttacactcaccaaagtatttaatctgggcaaagccagggtaagatttggccatgcattttaaatcangaaacaatacttactatcaagacaaaactcagctatttgaaaactacatttcgaaacaga

SEQ ID NO: 4444 - DNA, 5882 bp, Arabidopsis thaliana landsberg
cattaaagacccatttgttaattaagagtttatatgtgttaattaaatgttaaacgcataattacatacaaggtgaagtgcaccatttcgccctcccatgccactagagataatctctgtggttgaagttcttgagaccatactaggaaacatttccgcccaccgttcctataaaaaacattgtatcaaaagattagtactttctagaacttttgctggattaagctcattaataaaattaagtgttttagtaactactcaccgagtccattaaggtttcaacgagcgctaagctattgatgataacagttccagcttctttagaagcttctgagacaaacccatcttgttttggtccaacacaccgagagaaacttgtgtcgtactcttcctggttcagcacttcaaaaccagaatccgagcttcgaacccagagcggctcacgtgtctgagccatcttcacaagctcatccatagccgcaagagctaaatccaaatacctcgatctctgatcaaaatcactaacactaaccggttgttgacggttaaccgtagccaccaaaccagaaccggttccattagaaatctcaaatctaggagaagcttgaggcaacagcggagaagagagagtgaaaccaccaccaacattacatccaccagaaccaacaccaacgccgagaacaagtgctgagtccggtatatgatgtgaaccattagaccggccaagaaacttaccggttaaggcacagactcggtctaactcatctttgagacgagagttttcaattctcagatgttgctcttccattgagatctcaccgataacggcaggtccgccgcaattaccacacatagggtttctcatagcttcgcgtacagacatattctcagctcgaagcttatcgttctcttgcctcaacaaagcattctcatgtcgttcgatttgagtctgtaaaaacaaatcaaaaatcaaaacaaagaaaccagaaaacaaagattagcgattcgaagctaaaaaccttcatctgagtacgacgattctggaaccagaacttgacttgacgaggatctaagttaagtcgacggctaagatcaagacgttgcttctcgtctggatgtgcacactctttaaaaaccctaaaaatggaggattcatcaaaatcaaaaatcaaaacgattcgtagaagtgtaaatggagattttgtgtatagtgagtttacgattcgaggtcttgaatttgtttaggagtgtgacgatggtaacgtttcttcttctttaaaggtctatcggaggtatctaaatcgtcaccggagacagcttcagcgttatcactttcagatctgctttctacatcttctcctctactactcttacgacttacgtttgactccataatctctccgtttctactcatttctccatttgtttgctgccaaatttacagagattatcataagtagtagaagaagaagaaatcgaagattaaaagaggagataatgagcttacgagtccgagagagaggcctgaagaagagaaaggaagagactgagaaggagcaatggcggcgcttccgagcatggtgtctacggcggagaaagagaagtggttgttgtacggagcatcagagagtagctttgaggctccagcaccgtcgtcgagaaaaccgttgaaattcatgagattttaataaagagggaaatatttaatgaagatagaagaaatccgccatggatgagagaaaagccctaagctttgtcgcttcggtgcatgtccatgaatagaagatagagatagagatagagatagagagagaaagagagagaacagtaaatgaaaaaggtaaaggacgatagtaacgacgaaaaagggagatataaaaggttctctgatttgtttcgtgaaattaatttacttcaaaagaaaaaataaaagagagagaagagaaaaggataaaaagggaaaagaagaagatgtggagtcatggaaagccttacacaacctttgaaaagttgggtttgactcttttgacgttactcaactttttttgctataaaagtccacttcaagtggtgaatcaacgctgtctttcttttaaaattactgttctacccccttcttcttgtgctactttttatttgtaaatcccaatttcatcatgggatgtgagattcttcgtttgttgagcgtttcatttgtcaattcatttgttgagcgtttcatttgttaattcatgtatttcggacatgtttatgcacgatgactattgtttttgcatcgtgaatcgtacctaaagagttatgttttattttccatagcgaacaagaagttgtttatatttgtattactcacagtttagaaagatggttattagtctccaaaaataactaatgcaaagatcacaaataatgagatccggtttatgatacacaacctatcaattatacaaattactttcatcaatgcaacccaaaataaatggagtattggggtgagtaaatttagagttggcctatcttccaaatttggcggattcttaacttcatggtttgtgagttttgagtaaacatggagttattgcgatgctgcctaagactcatttaaaaggcaatatcattcaatagttgattaataatggactgtccatcttagaataaaacctttacttactctaaatgtcatcgactcattgaaacacttggttcttacaaaaaagtaatcttgcccaatttctcgtttggttcgaatcttgaaaaaacacccttgaatattcctggcaaacacaaacatatagaaaaatattatataagatacctcaaactacatagagaacagcttcaaagaaatgcatagaaaagacctacttgcaatagtaaaaataatagtaccagataatgtgaactatcccattcagtgataaaaattctatagaagaaactaataatgatgaaacgtagctatcgagtgattaatatcaaaagttctttgacacaagaaaatcaaaagttcacacttagtctacatgatgcgtttgccgacatcaaatcttggttttgcaattttcgagattctacttataaaaaaaagacctaaccgttttgattattatttcttgtagataagaaaaaaagaagtcttcaactatagagtgacaactgtgcacaaagccacaaactatcatataatatacgacgtttagttgacaaaatgaaatggatattagttgggagatgagatttttgatcccaccacccacatgcatacaaagatcataaatcatatcggcccatgaaaccaagtgtgtgtacttatgtctgtactctttgaccatttcactttcagtgtgattcatgcgtctatagattcacactcgggatttcattcaaagtccatagataatttaaagaatcttaaactaaaagttgacaaaacaaagcgataactagagaacagagaaggtcagatagaaagctaaccagtaactaaaccaaattaaattttaacagatatcttatgatcttggaataggccactacctctcagtttagcaaagcagatgtcatcaaagtttccttgccgatctggcatgatactcatgtttcaggaggttggctcttaacagcatcgccctgacatctctatcgaattcgtttcccatctgaagtaccttttggaaagttgcattcctctgatccgcgtgtcttgcatagaggattttgttgtgtgaatcaatccttgcctgtccgggatggaaaaaagattatgcctctattaaggtttttaaaatgacagtaacataaaacaaagttatttcgggaaacactacggacctgaatctggttgtctgtgatcaaggcttcaagttctttctctagaccagagacgctagtcttgaatgcatcggccatcctgctcaaatcaacagagacaaatggcaatgtgtactggatcagtgccttcttccttatctgatcatatagtgtgtcaacgtgatcatgaagatggatgtccagcagcagattcgatttgagacttgcaagatattccaggcaggaagcatagcggctgcaacaagcaaacttaataattagattcaatgagaatacagtctaaaagggtcgagtttgcatgtcttacgcattgttaacatagataagaatttggagggcaacattggaagccttcataatcgatacaggattagagtctaacgtcacaacagctacttcagtttatcagagtcagtgattagaataaatagtggattcaagggacataataattatgagggacttcgttgggtaaatctggtcttagtgggtattcacactaataatccttagttcaaggttagtaatttggtgctatgcaagaaatagacgagagtcttggtaagaatatgctaccttgaatagaaatcgttgataagttccctcacatcaggcactagctccaagaaattccggaagttgatattgtcaatgactttttgctgcaaaattagactaagttatagaccaagtgttggagaaaaatggcagagttgaaagaaatgctaaataggatacatgccttcaattctgatcgatcaaagcttgccagggcacagagtccaccataggtggcaatatcttgaggagcaatgacttcattataggaatttccaagttctgggttaacatctaagaactgcacaagacaatattcaagttcaatgattagatttcagttaggctatgaataggatccataaacacatgagcaaatatgggaaaacaacagaccttacgagcagctagcttgtacttcttcagctccaaatgagccaatccagatgcacatcgcagttttgcattaaccataggttcaagggtttcaggattctgctctgccttgttcacatagcttgtaacatgagtaaactgacccatttcgatgctgacaagaatcgcattcatacacatgtgaatgatgtgctttgtcgtagtgcagtagtcgcgtgttcggatatagttcttgaaagcatctccgagcataccacatgcgtaatagaaatctccaaagtcattgtaacccattctgatgctttccttgatcaaatttgtctgtatacacatatcaatacacatatcaagaagaagaatcaacattaatgcaatttaagaatcaagcaagctattaccatgaaagagctatgcataatgcacacgctgaacaacacaaaaagaacagcacatacttcagtctctaagaaattaattattaaacagagagttaacattatacagctaaccatgagagccaattatgatgctttccttgatcagatttggtcgtatactcataccaagaagatgcatcaacaaggatgcaattattcaagtaagtgattaactagaaaagagctaagcacacactgagcaacacataaacagcaccacatacttcactctttaagcaattaattgagaaagaacatcatcaaaatcagcagtaaaaaatcagcagtaaagagtcaatagagcagatttggctgtatactcacatcaaggagataaatcaacattaatgcaattacagaatcaagcaagccagtgtaacgagctatacgcacagtaagtaacacaaacaacactacatacttgattctctaagaacctacttgagaaaaagcatcaccaaatcctagtagagagtcaataagcaaggaatagagataatgaaaattaggccaaaaatgtaattacccgataagaactgagctcattctccaggtttactttcttctgctcagcacgacgatcgacggccttacaccaagcaagatccatcccatacttttccccaagcctgttgcaaatcttattgaccaacttttctgaac

SEQ ID NO: 4445 - DNA, 5002 bp, Arabidopsis thaliana landsberg
  unsure (1)..(5002): unsure at all n locations
caaatctcgtattatatataattagtaaagtcatggtatatagaatgtatataattgaaatattcttttgaaaaataccgattactatttagaatttttatatcatcactacatttctcacaccagcatatttggatgagtcttatctaataaaattataaaccactctcagattttgtgttacactacaagaaaacagtcaatttgcgaggaagggttgcgagggaaggcattcctcgcaattattgcgagggtattgcgtgaaacttgctacgtaccgcacgcgagtagcaattccgtcgcaaaacttgcgagggaagacttcctcgcaaatttgcgagggaagtacgatggtttcgcaagaaagatattatccgtcgcaaatcccaagcagatacgtcgcaaatctttaccctaaaccctaaaatacataaaagtgtattgcaatctttgattttcatttatagatatgaattcaagtagattatatggtttgaacaaaaaaatattgtattggtttcaatattaacatttcattttgaaaaatgttaaacattcatgattcatatttaatgaaaaccataagatcatcattgatgtatttggggaaaaaacacattcgaattatatgatgataaaataggttcaaatgtagataattaacgttctaatgattcaaaaaaatgaatccgaatgattttgagtaatgattgttgtattttcgaaattgattctactttgcgaggactttgcgaggtgtttgctattgtgcgtagcacttcccacgcaatatttaccctaaaccctaaaatatttagaattttagtcatgttcttattttgctgagggtcttactagaaataggagaaactgaatcaaatatgattattgaatcagatatgatttaattggttcaaacactgcgagggatttgctaggcgctctagcagttccctcgcaatatatgatgcattttgattggtttaaaggacggttcctcgcaatttcctagcaaggtttgcgagggatttgcgaggatatatattcttatatatactcgataacctagtttgagcggagctcaaacctgccgcatcaaaccctaaacctaattttttttcttcgattctcttcttctccgatctgttttcctcgtcgccggcttctcttcttctccgatctattttcttcgccgccgcctctcttcttcttcgatctgattacgtcgccgcctcttattctccagcagccgccgcaactcttcttctccaggttcagccgcgagtcgatctgtttcttctccaaggtaacgtcttcttctccgatataacttcttctttccattccaacttccaccgtccgatctaacttcttcttcttctccgttgcggttcgtcttctcctgcagtcgtcgcgactcttcttctccagcagccgtcgcgactcttcttctccagcagccgtcgcgactcttcttctccagcagcagtcgcgactcgatctcttttgcctccaaggtaacgtcttcttctccgatctaactgcttcactccgatctaacttcttcttcatctccgatctgacattgttttctagatctaatctgttctagtttacggatctaaactctgtcaatcatttgttctgcttctgcttttgcttctctccgatctaacttcttcttcatcgcttctaggttttgtttgttttgcaagatgcagtcgtcggagaatacttatgcacgatataggtcacagcagggagacccgttgcatgtcaattctcctgtcagtgctgggaatatttcaggggttcaaggttcacgccatccaccatcgcctccaacgccaaccactcagccttctgtcaatgattctgattctcaagctgagcgtctcaacaatctcacactggaggagcttcttgatagtcctggtcgtgctggcttgacaaggctagacccaaagcgtcctccgggaactctctggtaaggttaaattcattgtcctagaacagcttaggttgtagtgccttagaactttgtagtgccttggagcgtaatggaattaggttgtagtgccttaggttgtagtgccttggagcgtaatggaattaggttgtagtgccttaggttgtagtgccttagaagtttcaacaaatagaacagcttggttgtacttagcattgtgatgtcttagaagtataaagacatagaaatccttatgtgtgggctggttggtcttcttgtaggtttgacgatgaccctgcatttgcagcaacagtccgcagcatctttgaaagagatttcaaagaacctcatgccaattggtcacagacatcaaaggctacaatcgatcgatggtatgaaacgtttgtggtaagttttgtgctcttttgatgtttatgcttattttgtttgctttgtctgttttgtttgctttgctttgtctgttttgtagtctgatgtttgatgtttgctttgtctgttttgtagcaagtatataactgggaccgttcaattaacaaaagagtaagggttgagtttgaagcaaagctaaagtctaggatgtctgatcaagtgtcaaggtggaagggaaattggaaggagaagggtgatgaagccaagccaaaatggattgatcctgatgtgtggaaaggtctagtacagttttggcaagatccaaagtcagagaaaaaaagtaacaacagcagaaatgctagatatcatgatccggatggcaaaggcatctataaacaccgttcaggccagacctcttacaaagctcgtgcaaaaaaacgggtagataagtattcttctctccttaccattacttaaactacaatgttatgaatctaacttgtttatctctttgtgtttcagtgtgagaagactggagaaacaactcctgatttcctagagctgctagatgagacacacagaaaagcggatggaactttcatcgatgggaagtcagaggaaatttacaagcaagtgacatctaggattgaagaggaagagtctcatatgtgctcactggacaatccggagagcactggatcaggtgggttgacagttcatgccaaaaacaagatttttactgaggtaaatcttctgtgctttttctttgcagcttgttgtgttgtgtacttgtctgaattttgttgtgtacttgtctgaattatgttgtgtacttggcaacttgttgtgttgtgtacttgtctgaattctgttgtgtacttgtctgaattatgttgtgtacttggcagcttgttgtgttgtgtacttgtctgaattctgttgtgtacttgtctgaattatgttgtgtacttggcagcttaattctgntatgttgtgtacttgtaaacttgtctgattctgttgtgtatggtgtctgaaatgtttatgttgtgcgtctctagtttttggtataaggttctcgtcatcttggcagcttattcattatactttgtgtagtgttctgtttgaattgctttctattgtctgttttctcatgcgctttgtattgtgtacttgtgtctgattagctttgtcattttattggttatgtggttgtgttgtgtacttgatagtcccggttagctttgtcactctattggttctgttgttgtgttgtgtcttaattactttgtgtagttttgtgtctgaattaaaatattgtgtacttgtgtctgatttgccttgtcattctattggttgtctagttgtgtctgaattcttttgtattgttttgaacttgttttctcatagtttttctgttgtgtccttgagagtttttgtgatctttgcaggctgctccacgaaagaaaggaaggatttatggggttggttctctgcagtttgaagcatcctcagcccatagtggtccaacgcttcctagtgatgatcccggttatactttctcagaagctgcgtgccgctgaagcatgcattcaatctcaggctgagaggatcaatagctnnnnnnnnnnnnnnnnnnnnnnnnnnnnnnnngatcctgctttagctgcaattcttcgacgtggttcctcgacacagacaggacaggccaacgcaaatgctccacctgtggctactgctccagaacagcaggtggctaatgaggagacaacagttgctgccctagctaaccttgcaataggatcctctcctccatcaactgtattttgaaaacattgtcttgcttttttgccttgttatctctttctttagaacaagttcttatggtttcaaacaatttagtatacatttttgacttatgcaatttcagcttcaattgtgttaatatatcaattgactcgcaatcactaattagacactaatcaagtcttaatatatcagaaaaaacgttgcagaacgcttgcaaatccatcgcaaattctgctagagatttgctaggcggtaaaaaagaatcgcaaatccgtcgcagttattgcgagggaagtactaggcaacaattgcgtgtgatttgcgaggaaaacagttcctcgcaaaaattgcgagggaattgctacatataaccatttgcgagaagcgatttgcgaggaactcgttttcctcgcaaatcccttgcgtatagctgtttgcgagggattagcgagtaattcttccctcgcaaaacgactgttttcttgtagagtctcttcatcctcgtcttcagctccctcgatcttgatcccttgaagaaaaataacataagagatcctaaaatcaaagtccccatttatctcgaaatatgtaccaggactaaagtcaaaagagtttggtgatgagttacttctcatcctcagaagtctcgaacagcttcaatcagattctcgaggagcacaaacggtttcaaatagatgaataaaaccatttgacaagtaaacgtcaatttgttgctaggtccattttgatcttcagttctcatgtttgtttcttcgctaataacataaaagagctttatttgcgaaattgattaatttagatggaaatttgagt

SEQ ID NO: 4446 - DNA, 1917 bp, Arabidopsis thaliana landsberg
  unsure (1)..(1917): unsure at all n locations
ttttcagtaatttttatcaatagattggatcaaactatgtggagttcaaaagtttgtcttctgaagttttccaaaaagtcacaaaagagtcgctctttgcaacttatttgcgatgaaaaaagaatacaatcgcactttgcaaccaattacctacgtattactaactctcgatttttgcgtttcaaaattttaaagtttggtatgtttatatgttttcttagacattgatactttaatttgatagatattagatataaaaacataaccaaacacttcaattcggaaatttacaaactaaacattcaaaaaaacctaatctatataataagttccatgttctttcattgtcatgattgatattcttaaacaagttctaaaataagttacgaaaccgatgatttatatacgtaaagttctgtatgtattctatannnnnnnnnnnnnnnnntttcagtaatttttatcaatagattggatcaacctatgtggattttaaaagtgtatttccaaaacgtcacaaaccagtcgctctttgcaacttatttgcgacgacaaaagaaaacaggcgcactttgcaaccaattacctacgtcgtaccaactcttgatttttgcgtttcgaaattttaaagtttggtgtgtttatatgttttcttagatattgatactttaatttgatcgatattagatataaaaacatagccaaacacttcaattcggaaatttacaaactaaaaattcaaaaaataactaatctatataataagttccatgttgtgtcattgtcatgattgatatttttaaacaagttctaaaataagttacgaaaccgatgttttatatacctaaagttctatatgtactctatatcactaaagtgggtgcttttcagtaatttttatcaatatattggatcaaactatgtggagttcaaaagtttgtcttctgaagttttccaaaaagtcacaaaagagtcgctctttgcaacttatttgcgatgaaaaaagaaaacagctgcactttgcaaccaattacttacgtattactaactctcgatttttgcgtttcaaaattttaaagtttggtctgtttatatgttttcttagacattgatactttaatttgatcgatattagatataaaaacataaccaaacacttcaattcggaaatttacaaactaagcattcaaaaaaacctaatctatataataagttccatgttctttcattgtcatgattgatatttttaaacaagttctaaagtaagttacgaaaccgatgatttatatacctaaagttctgtatgtactctatataactaaaatgagtgctttcagtaatttttatcaatagaatggatcaaactatgtggatttcaaaagtttgtgttctgaagttttccaaaacgtcacataccagtcggtctttgcaacttattcgcgacgacaaaagaaaacagtcgcactttgcaatcaattacctacgtattaccaactctcgatttttgcatttcgaaattttaaagttctggtgtgtttatatgttttcttatacgttgacactttaatttggtcgatattatatataaaaacataaccaaacacttcaaatctgaatattacaaaccaaacattcaaaaaaaaactaatctacatgataaggttcatatgaattcattttcatgattgatcttttcaaacaagttctcaaataagtttgaaaccaatcatttgtatacctacagttctttatgtaataaaatggttgtttttcagtaatgtttatctatagaatggatcaaactatgtggatttcaaaagtttgtcttgtgacctattccaaaatatcacaaaacagtcgctttgtgcaacttttttgcgacgacagcagaacacagtcgcacgttgcaacgtttgt

SEQ ID NO: 4447 - DNA, 610 bp, Arabidopsis thaliana landsberg
gggcatacagagaatttctattctggttcttatcagattctttgtcatgactcatgacagtgtatttgtcacttattgatatatatttttcaattttagggagttttcatctcaagttcaggagaccaagctcattctactggtggcaatggtgggttgtttcttctctgttagttttgagattgatccttttgattttaaatttctatgtgagataagtgcatatatacatatatgttgatgaattggtgatagcataagtcatctcatggcaatatgcttacacttgttagagttaatggtttcaagagtcagtgatgatctggatgggaaattaaagtcatggtgatgtcaaaactgaagtttcttatagtttgcgctggtgttagcttaggtctgcaagggtttgttcttgatctagtatacttgcctttctgcaggggctttggcatttgatgcagaacactcacgatggcttgaagaaaagaacaggcaaatgaacgagctgagatctgccctgaatgctcatgcaggtgatactgagctccggataattgtggatggagtgatggctcactatgaggagcttttcaggataaagagaaatgca

SEQ ID NO: 4448 - DNA, 872 bp, Arabidopsis thaliana landsberg
acaaagagcacggcaacaggttttaactttgttcagctatatttgtgtagatatttgctctgttgcatacataacatttttctcttaatcttagggtgtctttatctcaagctctggagaccaagcccattctaccgctggagatggtgagttagctgaatcataattcataaccatttattgatgatgtggttgaaaattttagctttgttggttataaagtagagcaagcactagtttggttgatggtgtcgatcactttcttgtgagataattttttatgaatgcttctcttttacaggggcaatggcatttgatgtagaatacagacgatggcaggaagataaaaacagacagatgaaggagctgagttctgctatagaatctcacgcgactgattctgagcttcggataattgtagatggagtaatagctcactatgaggagctttacaggataaaaggcaacgcagctaagagtgatgtcttccatttattatcagggatgtggaaaaccccagctgagagatgtttcttgtggctcggcggtttccgttcatcagaacttctcaaggtaaaaaacacacgaccaggttcggtttatttggtctcttcactagcaagtttccaaactttttacttctctactacagcttatagcgagtcagttggagcccttgacagaacaacaatcgctagacataaataacttgcaacagtcttctcagcaagcagaagatgctttgtctcaagggatggacaacttacagcaatcactcgctgatactttatcgagtgggactctcggttcaagttcatcagggaatgtagctagctacatgggtcagatggccatggcgatggggaagttag

SEQ ID NO: 4449 - DNA, 772 bp, Arabidopsis thaliana landsberg
ccaacacgttgaatcacaagatcccatgaataaaccgatctaggagcacacataagagcagctagaatagcatcagtagcaaaaacagtagctttatcttctttagcaagacgtctgatcacaagatcatcacttgtagtaaccttaaagcttctgttcttgaaacgctcaagtctacgatcagctttaggagtaatacgatcaaaactccgatcataagactcaagtccaccacaaagaagaagatcttcaggttcagaaactgtaaacgaaagcttagagaaagtcgaaaacggaatctgctcaagcatattccattccggttgaatatcaactgatgatttaaacgcggcggcttcacggcgttgctgatgaatattgttacgattgttattgtagagacgatcacgacgagctcgatctttctcagcttcacgtttcttagcttcaacttcttcatcacgacgttgaggaagctgatttcggttatggtattgattgaatctccatttaggtccgaatttaggacgcggcggtggttttccgtcgactaatcggaaagcggcgtcttcgtcggcgtttccacctgagtttgttagaccaaatccttcatctactgcaaaagctgagaaatcgaagatcgctgatggatctgatttggatccggtgtgaggacgagctgatggatttgagagagctcgagtccaatcagcaacgcgtccgagtttttctgatcgtgagaaggaagcgaaggggacgtttgggaggagat

SEQ ID NO: 4450 - DNA, 615 bp, Arabidopsis thaliana landsberg
tccctcactagaacatactttccttcacttaacttcatacacagatcaattttcgacttcacaattccccacatattgttagggggcagattgatctgcccagcgaaatctttcggcttataccccaaaaccgataatataacatggttaaaatgatcacgaggatgaaccctcgaaacaaacccaatcttcatcatatccgcattagccaagagagcctgcgcagtccatttagctaacttattaccattgttcttcaactcattagctaaaaccgcacctctctgagtctcaagcttctgtctccaatcaacaccagagtacttaggatcaaactcgttaagagcattcaaagttaaaaacgatctctggttattcaaatcaacagtgctctgtaactcacacctagcaactagatacatactatcatcaagcttccatctcctatacctataagcaatagaagcattctcttcaccttcattaacattaggaattggctcatcaaaagtttccctcttcccattcttaaccaaaacctgctgagcaaaattctgattaatataagcagcctccagacctagagaatgagcagagttaatatcatctttaccc

SEQ ID NO: 4451 - DNA, 663 bp, Arabidopsis thaliana landsberg
aagaacagtgatgaaacatggagccatgaggcttgtgttttttctgaatctttttcattacctgttgttggggttcttttaaatctgtgactaaccagcaataccagcttgttttaggtggttatatcagttaaacccctgaaagtagaaaactggatacttccagaaatgccggggcttatcaccgacttcttgatctccctcgatgaccgatttatttactttgtgaactggctccatggagacattcgtcagtacaacatcgaggatcctaagaaccctgtcttaacaggacaaatttgggttggaggattactacaaaagggcagtcctgttaatgcggttggagaagacggcaacactttccaattcgaggttcctcagatcaaggtttgcaccaaaatgtactcttttggggtttagttaagtttcaaattttgcattctatagataagctgtttttggtgatgtcaggggaactctctacgaggtggacctcaaatgattcagctgagcctcgatgggaaaagattgtatgcaacaaactcgctgtttagcgcatgggatcgtcagttttatcctgaaatcatggagaaaggctcacacataattcaaataaatgttgatacagaaaaaggtggtctcacaatcaaccctgatttc

SEQ ID NO: 4452 - DNA, 3653 bp, Arabidopsis thaliana landsberg
tatctctgtacgtctgcagcacactgaaatatcttttgcaaactcaggtaaaatatcttttgcaaacgcaggtctatgtatattacttttaccatgcactaggtttatattctagttttcaccgcttaagataccaatatctttcctttaaattcaatattgtaggtagattccaaattactctcatgtttgatccagtcagttttatctgaggtggttgatgaatcgaaggattctttatgcgaatggaggccattgagaatgttactttgtttctcacaatccctgtcaaacgaaaaacctatcatcttgcattccagaaggacaacgggtctacctgctgacagttcttttgcagagactcttgatgagatcaaaagactagttagaagcatttctccggatgaaattgcaggaatagttaaagcgttttcttctgcattgatatgtgcaacacctgaatcgatcttgcaaaattttgcttctgtgatggatgtttcttgggccttttatggaacaccattctcatttttacagtccatcacctttctagaggaaaatttccttggaaacctttcaaagctatcgcctgacttgtttgcttcaggttcagaatttactgggtcagggaatctgtgtgaaggaacagtagatagtgagattgatttttctggccactcatccgtaactgaagaaatcagaagtaagatggacaatcgtgatatggaatcttcagccttctctatattcttaaagcaggctccttttcctgtattacttaacgcaattatgagcatggatatatcttgcttaccagagtttccaagaatatcagagctattgctgctaaaagtttcacagcctaaaagtggtagtattgactccaatattcaattaatactgttctggctctttcaaatacgatcatcttacaaggttcaaccagctccagtacttcatcaactctctgagatctgcttacgtctcatgaagaacttgttctctcaaatatcagaaccggagcttgtttctggaccctcttcaaataagttgcctgcttcttttgcaaagtggaagcatcaagtggccgagacagttctttgccacccagttgtgatggcactgttagagagtcccttggattgtggcacattacctccagtgcagaatgttgagattttttcagaaacatcgctgacaatgggcaggctagtatttagtgaaatagatcaacacatccttaatctattggtttctacttgtgaacactttttgtttgatgagaaaccccccaatctgtggaaagaggacctcaggaaaaataagtcaattatagcgtttaaggacttggttgaaaggcttctcttggaatttagggtcaagtttgagctttgtgttggttctcaaagttacgtttctcttctccaaccagcacaattgattcatgctttgttgagatttatatcaccttttaaactttttaatattgctcattccatgttgagtaaaattgatgaggaaggattaacaagcccaaattcaagtattattctcagtttgggattgggtattgcaggtggagcttttgaaatgcttgtattatattcacaccagccgactgctaagagaggggtatatgatttgctgtgggaattagaagaaaagaattatgccagtaacatcattgagaaagtatatagcatggcatgcaagttttctacctctcttgatttggattcagcagatatttgtttgcttaaagtttgtggtggtattttcaggggaaaacataatcaaaattatgctgttgacccgttggtcttgaaaatttcactgattgttggaagaacccctgaagacttgattatccattgcattaaccgggcaagcataaccagagccaagatattattctaccttgtggagtccagtcccttgcatctgttagtctttggacactttttctttagtatgctaagtaagaaacaggatgactctgctcttacagatgatcagtttatcatgcttctgcctgctgtgctatcgtatctgacatcagttattgcaaaactcgagaagccttgtaatagatgtttggatataacttcagtttattcaaatatactaataaatggttttcttcagtggccgaggtttttggctaggtgcatctttgaagagaagcatgaagagattcttctgtcaacgactgaggatatggaaactatgtttaatgcgagtcttattgggaaggcagtacgtatgtttcaataccacttttccttgactgaaagtccaactaaagaagatgatctctttaaggtatttaattccatgtttcctctcagtagtactggcaaggagatgttggattacgagataaaggaagtggacgttcagtcagtagaccaaatattaaatgttgctatccgtgtggttgcaaaagtaacagtttcaaggatttgtttgtttcctgaggatagcagtatgtgtcatctcaaacgtgcagcaggtacttgtgtgaaggaaagttcttcaaaaattggatgcaatagagcaattttatcaaagccgttgctagatgctttagttaatagttggcaatgtgttgtcaagaaatctgatggatcttttaaagggaattatgaaggaaaacaagacagatgttggtccttgtgcaaaagtcttgaaaacttcattttgagaagtattctacagtttttggaaagcatgtgtgaggagcttgttcaattggattctcttcccttcctggacagattgatgaaatcagttcttctctatagatttgaggactcgaagacactgaagatactgagagaaattttctccttattgtctagagggaagtactcatatgcaccatatatccaacgcttaatatatcactctcggtttacaccaactatcagttctctctccatatcatcctcaaatactggtgaattattcaggcctgtctccagcatcctaaatcatcttatcatcttaagtccggattctgtcagagttaaaaggtgttgtcttgaagcacctaagtatgcaaagcagttagaaattgtcaaaattctcagagtgctgctctccaattgtggaaaagattcaggaatgaaagagctgctttcagatctacactttcttcttttgtgttcttatggtgcaactctgagagaaatcgacttggagatctacaagctgatgcatgatatcaagttgattgaggccgaacagacactgaatgtttctgaaacagattatttgtggggtaaagctgccttgaaaataagagagggactctctcaggatgcatctgatgtttgtcaagttgatttagtggaagatgtccggcagggtcttattaaagagaatctttgtgttgatcccaaaatctgtgctctaactgttttgttttttccttatcaacgtactacagagaaatcggagaatttttacctatatgatgatccaataaatgaggtacccgtctttagttttaattttcagttagaagttcttatacttgcttttttaacatcgatcaaattaatccctcctccctgtgtagaaatgctcacctgttattgaagaaatggaacgatatgatccggcattcatcctgcacttctcgatagagt

SEQ ID NO: 4453 - DNA, 746 bp, Arabidopsis thaliana landsberg
cttttagtgaaaaacttcctagaaacctttaaagctatcacctgacttatttatgcgagggttggaacttactgtgtcaaggaatctccgtgaaggaacagtagatagtgagattgattttgctgaccactcatccacaactgaaaaaatcaagagtaagatggacattcctgatattgaatctcttgcattctctgtattcttagagcagactccttttccagtattacttaacgaaattatgagcatggatatatcttgcttatcagagtttccaagattaacagagctactactgcttaaagtttcgcaacctaaaagtgatagtattgaatcagatatccgattaatactattctggctcttccaaatacgatcattgtacaaggttcaaccacacccagtactctgtcaacaatctgagatctgcttacgtctaatgaggcacttgttctctcaaatatcaaagcttgaccttgtttctggaccttctgcagataagttgaagcatcaagtgccccagacagttctttcccacccagttgtgatggcactgttggagagtcccgctgattgtgacacattacctcgagtgcagaatgttgaggttttttcagaaacgttgctgacagcgggcaggctaggtattagtgaaatagatcaacacatccttgatcttttggcttctacttgtgagaactttttgtttgaggagagtcatattgagcggaaaggggacccgcagg

SEQ ID NO: 4454 - DNA, 1287 bp, Arabidopsis thaliana landsberg
tacggcatactgtttatggatcggatcgtcgtcgttcatgccccaccgagatcaccaccagttcctgatttcgatttcactcccttcgactacattttggataaatctgcttacaaaaacgttttagtcggtgaggaggaataactctgacgcttcatttattacatttttgaaaatgtttgtttattatctttgtttctccatcatctagatgtcattggagcgttggttgatgttggcgcattgactacagactattacggtctcaaactgagtttcaagttaaaagatagatagtaagtgttcttttcatttgttttatttacaatgtcactctaaacgctaacagtccttatttctaacgtagcaatgaagtcttggagtgcgaagcccgcaatcaacaggcggagtacttggatggttactttcagagtttgggtaagagaaatcttgttgtcgcactcagcttttggcgtctaaccgaactgtctaacccgaagcttgagagccatggtgctatttcaaaggtggttgccaatccggacagagcagaagttgcggatatctcgatggtggttttttagctagagggaatgaaccattattctccgttttaatataatataagactacatttcaattaagttttctttcccagttgttgttgttgtttccataagaaccaaactacatttcagtcgttgttgtttcctgtttccgtttaaatgttaatctaatttgttgttttatgtacgtgccttgttttattgttcaaatcctctcgcaatgtacgtatagtttctggtgtacgctatcgtgtacgtatattaattttggtgccttcaacatcaaaaactattagatttatacttatgttgtgtacgcaatttcccaatgtacgataaaccaagtttaatgtactatatagtgtacgtacacgaagacatctagtaatacttaatgttgtaattcattgaacagccagaaacataaaaaggacaggcagtttatataaagggaaattcataagataaataaactggaacgattcaaaaaacataattttttcaacgaagcatacacatgtgttgcaaaatatgtgtgcatccgtcataccaaaagacttgagagtagagccgagtagaagagcttaaaccttagcagctttgcttctagtagaatatagcaatcttcctggcgtaccaatagaaaaaacaaaccctgcagccatgatggaacgtgcattgccctacgcaactcggtgggtggacaaaccttcaagacctt

SEQ ID NO: 4455 - DNA, 3632 bp, Arabidopsis thaliana landsberg
ccccgctgaactaactgcaggttattacaacacctccctcagggatggttatgatcctgtagcttccgtcttgtctcgtcatggtgctgctctcaacatcccgtgagagcctttttctgaagttttcttttactatgtacataattctcagaagctgcatggtccagtttcactaacgagagaatctatcatatcttttcagctgcttggatatggcagatagtgaaatacctgagaaatatctttgcagccctgaaggattacgtagacaggtactttctttcgtaaacccttgatccagaattcaattatgttcatatgaagtatgtatgttacttgtatttagaccggtcactgttgaagcactatttacttccgtagagacacttcaaactagtctagtctctgtgttcttactgcgctgctacattagacaattaagcatgccttataagaacatgaacaaatcagcattatcacattttcttttgctagatacatgatgtttcgaagaagtggacaatacatgtgactggtagaaacacaagcgaaagatttgatgaggtgagttatttgcacatgctttagtcttatacgtctgaggtcaaagtggtggttattaaccattttctatatgaattctgcaacagatgggactaaggcaaatacgagagaactgtgtgcaaccgaatggcgacactctaagatcatttacgttttgcagaatgaatgagaagatctttagggtcgagaactggaacaactttgtccctttcattagacagatgagtgcagatatgtaaacacactcaccacccattggtgtgtttgtcttttgttacagaatcgatctttcctcaccatattgctttttcagatatgtgatgaggagaactaatcaaatcaaaaattgttatatgataaaatctctctctgtttctattcttcattttgttctatctctattgcaaaagtcttgcagaaacctttttcattggatcaaaaagttacattgtatgttttgattatcagaaagcgatccaatacagaaggtttaatcacagcaaatgtgttacatacaaagatattattgaatcaaaggacttgcctatcagcagcctcggcaacaagaggcaacctcggggtcagaccaaacaagcaagcagagaatccatagatcaaagagacaagcaagaagaggaacactgtgctgtccaaactcatcaccacatctaaaccaaacccatctctaggattaaagctcctctcaagcaaatccgggaaaatcaacaacacatcaagcacaatcgcctgcatcgtgttgaacctgacgtacctgctgaaattagggttcctcacaacgacgaagtagagagtgatgaagataagaaacccattgaaagggaagctcttgaaagctctgatggcgggaaacaaaggttggatgagaatctgaaaaggttggtactgtgtgatgatgaatttgccgtattgaatcccatcgaagaatgggtagaagtaacagacggctgagattatccgatccgatgcatcgacggaatcatcacccttggattggagtacgagtgtggcggctctgtccctggaaagtctaggttttgggaattgggtatcaaggtttagagggagaaaagaacgaccggttagggttagggttccggtgagagatggtaatggagcaaaaaactgagatattattgccattttgctctgtttttgtttcacttcacacaaaactgaaagactgcttaacacatgatgagaggataataaactaaactccactctgttttaaaagtttagcttaaaacattgtgtcgtcttcttatctttctaatatgataaaacggtacgtagttatttgaagtaaggtaacaattaaatagcctctgttattgtctttgtttttttgtgtatatttaaatatcaaaatccaccggtataaaacggcgtaatgcctttgtattggacccaattctttcaatttccacctaatttaattacctccgtatttattttttagtgcacttcaatgtctcttgcatatatatattggagcaaattataaacataatgttcatagtgaaattgttagttggttttaatctctttttaagacaacatataatgtcaattgtatgtacgtttttcttgtttctcttaaacacttcttttgcgtttgcatttgcgattcctaaaccgccaatagtaaggagactatcaacgacagtgacatcaaattcaacagcgtcttcttgctcagccaatggaaatccaatcgatgagtgttggagatgcgacgaaaactggaaggacaaccgcaaaaacctcgcggattgcgcggttggattcggacgcgactcaattggcggtagagccggggagttctacacggtgactgattcaggagacgacaatcctctaaatccaactccaggtacattacggtacgctgcgacacaagatcaacctctatggatcatttttgatcgagacatggtaatacaactaaaacaagatcttcaagtagcttcatacaaaaccattgatggtagaggaaataacgtacaaatagcttatgggccgtgtttaactttatataaagttagtaacattattataaacaatctttatattcacgattgtgttcccgcgaaacggaatgctttatcgtcgttgggaggatactcggatggagatggaatatcgatattcgagtctcgagatatttggattgatcattgtacgttagagaaatgttacgatgggcttattgatgcggtgaatggatccacggatataacgatttcgaatagttacatgttgaatcataatgaagtcatgcttttgggccatagtgatgagtattccggtgatcgggatatgcgagttacgatcgcgtttaactattttggtgaaggacttgtccaaagaatgccaaggttagtacaatcttatatttctttttcttctttttttaatgtcaaatttataagctaaccaaaatattcgtgcttaaaataccaatgtgtaggtgtaggcatggatattttcacatagtgaataacatttatagagactggaagatgtatgctattggtggaagtgctaatccaacgatctttagccaaggaaatgttttcatagcttccaataatcagttcaccaaggaggtacgttcgtgacatgtgctccacaaaactaagagcgtgttaacctcacaattagtacaatataattcatagacaattaataatttataaatttgatcatgatgtgtcttactatatggattagattcttaacggaaatgttggctccatacttgtaaactcacatgccctatactcaggttacaaagctagagagtgcagatggagaccaagaatgtaaggaatgcaactggatatcacaaggagacgaattggctaacggagctttgtttacaccgtcagggaaagaggattctgctagctacacgaaattttcgagtatggtagctagaccagcttcacttgtcaagaccacacatgcatcactatgtgttcttagttgcaaaattgaccaagcttgctgaaaacacatacataagcttgtgaccaaatctagcg

SEQ ID NO: 4456 - DNA, 699 bp, Arabidopsis thaliana landsberg
  unsure (1)..(699): unsure at all n locations
tataagggtctctattgatcaataagaaagaaacctccaacaattaacctaattctctagaaagaggtttgggttaaacgaaaggttttgcttaagtctctctcattctacttcaatcaatgccactggtctagttactagatcaaagtcggctcatatcaaagtatagtcccaaaagacaaaaatctagattagtgcctaattagggtttgacattttttcttcaaaatttccatttcagaccttaaaagttattcagaggacatattttatctatcctctcttttcaaacagcctcatctttacatcttgcttcgatgagagtttctagtttgagtgnnnnnnnnnnnnnnnnnnnnnnnnnnnnatttatggtaacaccatatttggtgcatgctctaaaacagattttgtgtttgtagagaaatagattgacaacggcaaagattaattagagtatgagaacgtgactgaagactgtgatttgtgaacatgagagaatcgagtatgtgacgaatttagaagtatggagaagatgaatacacttattagagctcttaggctctcttagagctattattttcttataagttaagtgattacaatgcctaatataaatagaaaaaatatagaaaaatttaaagttgcaaatacattaaatgataagccctccatgaaggagagtgtcaatttcgttca

SEQ ID NO: 4457 - DNA, 3950 bp, Arabidopsis thaliana landsberg
  unsure (1)..(3950): unsure at all n locations
tgtcgatacatggtttgcagaatgcactgattcatcactttcatgtttcaagaaagcatcatcagaagcacagtaccaaactgcgtgtttgttcagacaaagttctcaagctcgtggctgcttgacatcttcttggtactttgaaatcataatttctgcgcaaaacatgaaaacagagatatgagaagaaatcaaagtagaagaagaaactggcacaaaaggaggtttatcaggaaacagtagagtaatggttatatactttctgaaattttgatattttggtgacttgtcatgggctaagaacaagaaagatcttaaagtgagaaaaaggggacaatgaagaagacaagggctaagagggatggagaataatgggcactgacaaaggagcctgcttaggtaggtatataataatctttttcgttgggatcagacaaagacatttcctttagaatctagaagattttttcactgacacttctttcttatgtcagtagggactagaaatgactttttagctcaagtttccttgagtcttgttctatacatgtttaatattcttgaatcttaacattaagggttagtgaacatacttatatagagtagattagtcttaagaaaaggtagtaaaatttgagatgagtaaacacttggtgtattattgaagtttggccatacccatttttggttgggttgtacttggaaaaaagacactgtagtgatgatttggcatcatgtaccgaagttgatccatatctttgcgatcttattggttagacttggattatgtttttgggtcttttatggcttcttttccttacccatctctaagttttatctttttgtttgttagtcttttgttttctgactcattttgtctgtggtccttacctgtctttgtcaccatttaacatatggtaatagactccgtagaagtttgaactactacttaaaggttaataaaaatttcatgaactatttcagaaatgaatccatttagacaacactaaagaagtaaagatgttcctacagttttgaaataaagggaacgtatgatgtttttagagttaactctttcttagttttatcagataaagtcttaaaaacatatactaaattgcaagcatgcaaaaaggtacttgggaatttcattatttcgacaaacagggacgcaatgtacaacaagccaaaaatatatataaatcatttgaaaaaccaagctgagcttaaccaattggaagtcctaagtccaattagtaatatatgttttacgaaacagaaaagcataaatcaagtaacaaccttgatgtggagcattaacttgcaacagagactccattcatgtatggtaatcaaagctctcactcacctgtgtcattggagcaagaagaaacctttaaaatctttgaaccaaatacaaaaatcatcaatccaatttgaacttgagattttgactatatgccttaaccctattggaactattgtttaaaccaatcaaaacctaaatgttggagctctatccttcttcatagagtccacaacatctcatatctcaaataattcatcaatgaaattctgtgactaggtttagctctgttgcagattaaagatggatgcgattgcaagcagattggtatctataatatcgggccatatgtccccaaaattgagtcagtacaagatctctatcaatttcatttctatacagtccaaaccatgtcctgtttctaaaaccaccaaagaaaatccatgactaagtataacctttgtgattgcactcagattgatatcaataattaaccagtgtatccacaacttccgcaaaactaagtcactctaagacctgatcaattcatacatataaatatccaaacatccatattccaattctctcctaacagtaaatattacaaacagattcacatcacaggtccagttataagatagtctacacaacgaatgctaaaagttctaacctttatcctcttcaacatattaaaaagaaaagtattgatcaagtgcttctaagcaatacacaccatataactaatcaacaccagttacttacctaagatcaatcacgcacacaacatcattcaacttcttcaacggctactggcttaggacctggtttgacagaatcattacaataaaaaagttcaatacatatatgattatatctaaaggaagaatcaatttcacaaagaggtactaatgaagaatctgagaccaatctgcatcaaattcaaatccaattcaatcaaagacactaaagagtaactgaattcaaaattcaaaggttaaggaaaaaaaaacgaaaccctaagaatttcaatcgaagcattttcaccagtgtgagagagaaagccgggaaaaaaactcaccgtgaagagagataggacggtggtctttgccccaaccaacgccgcgagtggcgtcgagatactgctgaacaagatgacgacacttctggtaatggttaacgccttcgacgcggtaacaccatttgaccttctcacgtaagatcttagccttctcgatatggatccatttctcacgaacaatgtgttctctcatctccaccatcgcaaccggatccttgtacggattctcaggatcgaatccatccggcgccgactcttcgaactccggcaatcccttcttcctccccatcggatttttgatttcttttgtttccgtctgattttccgacaatcaggtaatgttttgttgttattttgggcttttaattcaattaatgggcctcacctcggcccagataaagcttgcttagttgaaaaaatgaacaacgggaaaagtaaataaaacaaaaggaaaggactcttgtgccccaagccagaatataaaagactcttataaatacctttcttcctaagcagctgattaggggtttttgccgatctccaatttctctcttttaacctagctctagtgcgttgttctactaatcatcttctccatggacaataaatccgcaaccaaagctgaagcatctccttctgtgattaaggacacgacgcctacagacaatttggagaaagataagaaagacatgacgactgagatgaaaatatctgatgcgatggagatgttggaaggatttggtattcgtcttcataaaatggaagagaagatggatctgttgatctcattgtttaggtcaaataatgaagttaaaattggctctgtgaagcccgaggcagagagcatgtctgtggatggatcatcttctgatgaggaaccttatagccgttttggtactcctgtctttggtcctggtggtggtcgtggtcttttcgtcggtggtcgtttttccggtggtcgttgtggcggtcaaggcttttgtagacgttcctgttgaggttttggtggcggaagaagagacctatttttgctactcagcttgagctttggtgttttaaacttgtgatataatgcaacctcttcaatagttaggtttttcttatgttctatagttacggtttgtctgaatgttaagcctcaattttgagtgcttttggtgttaaataaacacaatgaaaacaggtttatttcttatgaatagaggcaagaaaattgtgtattcactttcttgttttatctcgagaatagttttacatatatacctgatgaatggttttatctcagcaattagtgctttatataatgtaaatcccaattaccattagaaaatactttctattttttttatggaggaaactttctacacttgcaatgaaacaagtaaacaacaaaagcttttttctctttgaccaaaactaaaataataaaacatggaaaaacagaaaagcggggcagaggaatccaaaaccagagtgttgaactgctctttactttactcaacttgttgcatcttcaaaaaaaaaatcnatattaagtctccattgttgcttcaactcttttccccg

SEQ ID NO: 4458 - DNA, 3462 bp, Arabidopsis thaliana landsberg
ttacgtgaccgcatactaaaataaatcttctttgccaccataagtctaaggagatttaggttgacttccagggtcgttcctgttctgcatgatgtcgacctccatgttaacttctaactcttttgtagatgtggaatcatctatcattcagaaacaaatgacaaaaatatatcaccaaagacaaaaacttttgtttacaacattattaacccaggaaaatttataaaagagaaagaaagaaaaattgctattgctcatctacagttgtctgtgttttgaaaagagataatacattggagcccatgcgtgtatgcgattttgctagcttgtttcatcaatcacccatcataaccaagaacttgctatattctacaccagccacacaagatcaaagcagaaacgttgcctccctcggcatgttgttcttacatagcgaaactgctgtatcgatctgaagtagatccttaaagttaggcttatgattgtatccgccaatcatccttttgaccttcttcttctcagcattgcgtcgcatacttttgctgcgtcggcgttatgtctaacattatgaactctgatgatattggcacctcctagaatgcctgcagtgacagaagcaacagttgcagcatctctgtcagtggcctcaggtcgcccacaaatatctcccagaaatcttttccttgaaggtcctacgagtataggcgcatgagaaactgctatacttctcttagccatctcttctcggatttttggaagatccataataatatctagattatgatctacgctcttggaaaacccaatccctggatcgatcataaccctccaagctggaatcccagagagttctgcatctcttactctcaagtagagttcagaagcaacatccttgcagacatcatcatactgcaaattctctttgttctgcattgtacatggatctcctctcatgtgcatggccatataaggaaccccagattctgcaacaaccttatgcatattcgggtctaaggttcccgcagatacatcatttagaatgtcagctccattgcttattgcttctgaagcaacctcagagttgaaagtgtccacagatatgagcttttcctccatctctggcataccacgaacagcctctaaaactggtagtagtctatctaactcttcttgactagaaattcttgaggccattgggcgtgtggactgtgctccaatatcaattatatctgcaccctcagagatcattgagcgaacccgagaaactgcagaatctattgattgaaatttccctccatcactaaagctgtcaggtgtaagattaagtatacccatcacatgagttttgttagaaaaatcccacagcttatctcctattggtaaaaccctttgtataccatcttgtccaatcagtgactcgccacccagtctctcccacgcttggaaaattccaccaggatgtatcgcgagcgaatgccaatgagcaactgtatcattatcaacagctgatccaagcaaatcaaccaaaggtgctaacacaaatgacctttcccagagtctctcatgtggtatgatcagcttatcagaactaattctcatcttcccatagaacaatatgtccaagtcaagcggtcttggtccatacctaataccatccttacgtcccatgtctctctcaatagtcttgagaacacttaatagctcatgaggtccaagcttagtgacacctctcactgcagcattgagaaacctgggttggtcagtcacatgagccggagccgtttcgtacaaacaactgtgcctggttacacaaatgccaccacgcttcatcaatcgcaaagcctctctgaaattattcatccggtttccaatgttacttcctaaagcaatcacaacttcatgctctgtagattgtactaaaaaagttgtacttgttgccgaagatgagaaagctgagttacataatgctgcaacaacaagtcacaaatcacacacctttaagaacttttctaattggcaaaatcaaatctgcagtggaatcaaatcatctagcaactctcaaagaattgaatcgttcacaagcttccacattcaagaactagctgagacttttatttctaaatcaagtcatgtacaatgaagtgaagaggaagctgaatttgtcaattgcagatacctggaggactgaataaagaggaacagtgcaagccaagtggagacacgagagaaagagacttcgacgaatagtatcgatggaagcagacgcgactcgcagccacagcagagattactgccggaggtggttctaagaagcgacggagaaggaatctgccggtgtgtattaaggtttgtgacagcaaaggagccatcttgggaaatagaaagtagagagagatagagatagatgcaatctgaaggttgtgctgatgatgactgtcgactgaggaagacgatgctggtgaaacgggtaccaactgagatccgtatttctaactcggactagatccgacccgtagaatgcaaatgcaataaccaaaaaaaccataattatttaaaatagcggttctcgatccgttccgacccgaattaaaactgtaccgaatggtcgattattaattgaaaccagtcccgataaaccgggaaatattttgattaaacttgaattatgaaaataaaccgaatctaaagcaacgcaaaatcaaccgaatatcattaaaccaaactggataagacaacccttatttaaccgaaatcaaaccaacgattcctttattggcaattctacccttctctgttgttttttatcttcggaaagtctcatttctcgatccccaattcgtggattagggttaaaagaaccatttttattctcgtcgcgcaacaacaaatccagatcgaaaaaggaagaagagatcgaaatggcgttgagaagggtttacagtgaaatcagagggaagaaggtgacggagcttccaggctatatcaaatcgactttttcaatggagaccgtgaagacctctgtgaagagaggactcgataactacaacgaaaaatacattcagaccagctccgttgatcctatccttcatatctgcttctacggcatggctttctcttaccttgtcgctctccctaatgagcgtcgccatcttgagcatcagcagcatgctaaggagcacggtggtcattgatctcgtgggaatcgtttcgatctcgagatgattttaggtacttctgaatttcgatccttttggtttatcaaaatttcggttttttggataaatgtgtatcattttgtgtattgagatttggggattttgcatatgtgaagtgatagatttctaaggatgtagtagtatctgcaggttccatgaatgtcaaatttgctatctttgtttcgatttcgatgttatccattgtaaaggattcatcttttgttcttatatgagttgatgaatagcc

SEQ ID NO: 4459 - DNA, 1458 bp, Arabidopsis thaliana landsberg
  unsure (1)..(1458): unsure at all n locations
gtatctaccgtttgaaacttacctccatcactaaagctatcaggagtaagattaagtttacccatcacatttgttttcttagaaaaatcccataaatgatctcctattggtataaccctttgtataataccgtcttttccaagcaatgactcaccacctaaccgctcccacgcttggaaaattccacctgaatgcattgagagtgaatgccaatatgcaactattttatcattatcaatatcttccgttccaagcaaatctaccaaaggtgctaaaacaaatggtctttcccagattctctcatggggaatgataagtttatcagaaattatcttgtgctttccatagaacaatatgtccaagtcaagtggtcttggtccataccttaaaccattttcttcacgacccatctctttctcaattttcttgagaacgttcaagagttcatgaggtttgagctttgtgacacctcttattgcagcgttgagaaatcttggttggtcggtcacatgaacaggttctgtttcgtacaaacaactgtgtctggttacactgatcccatagtctttcatcaatcgtaaagcttctttgaaattattcattctgtttccaacattgcttcccaaagctatcacgacttcttcgaaagttgttgtttccaaagatgtgaaatctgagtcatatacaaaacatgtttcgaaggtgaaatatgattcaatacttaacagaaattagtgtatcaaaacgtaaacgctgtttttttcaacgaaaatgaaatggatgaaaaagatacgaacccattttagaataggttcctccaaaatatcagtattgtctgcttcgatctgaccttaaagtatacaaaactatgagtttagtcttagataacaacgaaacaattattagaaacacaaaaaatgggttctaatattttaagaaccaaggaagtaaacaatacttatgtatgagagaggcaaggtggtagccaattttcacctactttttttctgaacttgttgtgttatccaagtaccttctgtctttcacgctcgtcaaaagtgagcttctcttttgaattagatatgaagatctagaaaagaaaagaaaaaagagaagaaaactttgtttttagagagattttgaaattggtaatgaatctctcataattttgaaattggtagtgaatctctcataattcttttcattatctattctatcttttaccatttaaacatatatttggatagatgatggaaaattgtgtgttagtctccagctatttcattccatttttaaaaaatatcaaaattttcatagatttgttctgactacatcaattttctttcattgcactcaaggcactcatggttacattaccaatagaaattaattaaccatacaaaattctaattattataactccagacgatattattttcactatatagcanaaaatag

SEQ ID NO: 4460 - DNA, 843 bp, Arabidopsis thaliana landsberg
cgtttcttctatatattttaaatattagtaagaaattttcctaacctcgatcggttgtcatttatttgattattcccaaaatactcaaatgttgttaataccgatatgacaggtaaaatgaaatctaaaaatatcacaaatgagtactttttatgtgtactttgtgagttaagtcccaatacgaaaatgaatcataatgtacagtatcgggctttttatgacaagagatcctactaaactcttgtgggctgaatacaaaggctagcaaataagacttaaaagaaactttacaactgcgaatagacaaagggattttaaaactgccaataaactttataaaatgaactaaattcttctgaatttcatacggaaaaacaaaataaacttatttttaacacatctcaagtcttaaaaccatacaacaaatcatatcaactaatcaacatttttgaaccttttcgtcatcattgcatcgcatagccttgccgcgtctacattatctctaacattatgaactctaatgatattagcaccttttagtatcccagcagtaacacaagcaacagttgcagcatctctttcacttgcctcaggacgaccacaaatatctcccaaaaatctcttccttgaaggtcctataagtataggtgcatgagacaatcctatactcttcttagccatctcttccctgatttttggtagctccatgacaatatctaaattatgatctattcccttagaaaatccaattcctggatcaatcataatcctccaagctggaatcccagagagttctgcttttcttactctctcataaagctctgtggcacatctttgcatatt

SEQ ID NO: 4461 - DNA, 729 bp, Arabidopsis thaliana landsberg
tgcatgcatgcaggttcgactctcagatggatccccatgattatctcctccttgttgataataatggctatgcatgccgtatctcatcttttgttttagaaacgtcacctttttgtatttgtgaaggagattaaagagacaaataaaacataaaaatatgttaaaaatgatcaatctttttattcattgataaataataataattaatgaataataaaggcgatttttgcctaagaacagaaactgatctcataattagcattagtacaagtaaaagtactggaagcatcatcgtatgcatagctatacgcactcggacaagcttgtttaaatatcttcgagtaattcgtgggcggacaagtcgccggtgtactatacgcgccggtgcaacaatactccggcttgttaaaagcctcacaagcactcttacacgctgcaacacccgatgggcccgtaacttgtagctcttttggacaaatcgcgttcacgtccgaaacgcatcccgcggttttacaatcccctgagccaccttgcggtgtgattttcatctgaacgttataaccatctacgaggctgacgtcgtaaaaatcttgcacggcgtttttctttccggaggagccgattgtgaattcggcgagtgtggctggtggagctcctcctgcgccggcgcattttaacttgctgccgcagtccccggtaccgcatttacctgagccttcggcgtcgaag

SEQ ID NO: 4462 - DNA, 1628 bp, Arabidopsis thaliana landsberg
tatatgggcctggggttatatggattaagcccaatagaaaaatatacactacaactattcccgcccgtttatttaccggaccaatggattttaagttttgatggaagcattttttttacttacaagactaatttgaaatttgaactattacttctatataacgctacttaacaaaactatcaaagtatgtaacaataaatctgtggatggaagatagaatcccatcactgagattcgaagaacgatatatagcagtccagaagaagaatgatcacttcaaggaacatagatttgattatggaagttgatgatgaacaagatagtgaggaagagaatataatttgtgtttttttttattaattgcccaaatggcttataaatactgatgatcgtaccaactaccaaaccaacaaataggcttttacatcaactaccaaattaaagaaaaattaaaaatacttaaaccgagctgttggataaaaagagaggatgaacttaaaccggagaaaagaagttggctgagatgataatgcctgtaagtatagtatatatgttcactgcacgtactgcaaaaattaaccattgtccaccaagaaagataattcaaaagtaagataaggtaagtgacaagtatgaaggatcatcatatgatgtgattcagtgatcctaatcgaattaataactttcttccaaacatcatataaacgcattgttggcaattcaagattttttttttttttttttttggtaaaaggttaaatttgcaattcaagattttgaagtcaacaatgtgacaagatcgatgttggtaagtaattagggatgtgacatcatcttaggttattgacttatatccttgcgaaataaaagagtagtttgacccggtagattatggtacggttatttataaattatgatacttaagtatagatattcagttatgtgattacaagttaaaaagaaaagattacaagttaatctttaggcaatacatacaatctgcaatttaggcagaaagattacaagttaaaaagaaaagaaagagacaatatataatccattcagagatctcatgagtttgagacaacaaagaaattcttacacatatacctttaaataaactttaaattaatatagatttagattcctggtttaggacttgctctgcagagaactgggaaaggacgttcctcatcccctaagaagactattaccttggcttggtactcaacaagaggcccatcaggaaactctcgagccataaaagtgatgtacaacctccatgtagctgctcccctttcagtaactctcgcaacatttaccaactctaaagtcgttccctgtgaaaaatatataaaactcaaaaataaatccaaaaaccaaaattcatatcttaagaaaaaaacaaaacaaaacttctcactcaccttggtctcgttgtgtttcttaacacacacattagcaagctctgccatgaactcccgagtagtgttgtagccatccatttttccgtctagatcaacatcgtcgattccgtttagaggatcagggagaaaaccctggaacatacaaaaagaggtttgttttcataattttttttttctggatttaataaaaagcccaacttg

SEQ ID NO: 4463 - DNA, 2313 bp, Arabidopsis thaliana landsberg
ctttccagaacgtctccttgaggatacaaacaatttcgagttatatggtttaccataatttcgtaatctttttacccaatgtaataatgctattcgttcttgcagaactacccaaccgaggaggaactttgctgtgtatacgttcccacgaaccacctttacattggagatatactacttgtcaacagtaatgacgttatcaggccaaacctctcggtccgggaaggaattggtgagatttcagaatctaattgtctatactagatacatttatcgtttgttatatagcattcaaattattttgtggaaagatactgaacactgtatactcattcttcatctgcagagattgttgtttccgggggaatgtcaatgccgcagattctatcgactcttgataaacctttggcctcgattggaaatgaatcttaaagtgactattcaaaaacctttggccgatcgataggaaaaaatcaaaaatcagaagagacgtttcacaaaatctgagcgaatagagaaaccaaaaaacacagaaaaatttgtcgagaagtgtaatttgtcaatattatttgaataaccttgttttcttttagcccttttaaaaataattttttttcttttcttatagattataatttgtatccgcgtccttgtgtctttcatattactgtcgcattgactttataacaaaaagataatcaaagataatcccaccctaataataatcacatgacaaatggcaatatcgttttacatattagggaatagtataaaatgtggtatatatagagagacattgttgatcgaagaaaaaaatggtctaacatttctctgtctagctcttcttttgatctcaggtacgttttgtttccaacatgttactaattcttatggtgaaataaaatactgcagctaaaaatgtatcgaccaaaattttcttagaggaggattgtgcttagcacctgacctaattatgaatcttcatttctctgcctttgtaaactttaatttattttagaactttatctcatatagaaatctcaaatatatatattatagtttttgcttaacttttatatttaaaataaatctgaaagttgtaagaaaattattttccatatcagatttaacattgggtgcagtcttgggaaaatatataatcgttagaataattttctcttttaatgtgataattcgaagacgtatgtaacaaacaaaaatgacaataataatattacaggataaatcatttaaaacatatactataattagttattttttgcttaaatatgatggaattgttttgatattgcttaagaatcaaaaatgttttactctagataataaaatatttattgtaaagtttatttttacgatgaatgtatatgatttcaagtagaacaaatatatttttgatatattaattcacaacaataaaattaatcttttcatcttttgaaaataatttgtatacagtaatttgaaacaaaaattaatcatgttttaattaagaaaaggataaataaaagaagacagatataaaaagaaaaatccaaaaacgacagagagctcaagttggagttagctaagcttagctacaaaagaacagtcgccggcaaaagtctcagcctttttcctctccgccgttcacagttcaccggcatttctctcttctttctttttctccgactagatttcctgtctctttggtttcttggcgatgggagacgagaagccggtgattgttatggccaatcgagaaagagatcgagagcttctgattcccgtcgctgattccggcgacaaagacgacggttcttcttcgaagccttcttcttcttcctctgcttcttcttcttcgcatcaatccagccacgaggtctagtttttgtcacctgatctaaaaatcttgttcttcgttttctcatttcaagattcatgcgcaattaacagttgaattggattggttttaagctcttaggtcttttcaagatttagtcttcagagatttggcccattctgagaaaccccttagtgcaaaatcttggaacatggtttagccctagattcagtatattacaagaacacttgcttagataagtttggtagtgtgttaacactgatcttaattcttaagatgcttatagaaatttgacctttcctcactgagtagagtattaatttgcattagatcttaagtgtttttattgggatctgtcagattcttgagtctctatgtcatgctaattcatgttttcaagcatatataacacataggagcattgtgatctgatgctttatggattttgtgca

SEQ ID NO: 4464 - DNA, 1792 bp, Arabidopsis thaliana landsberg
gagacagattcttgaaacctgcagatttaatgaaaaccaacttcaacattcttttcttgacaaatggatggatttcgttgaaactgtaaggtttgaagaactcaacggtttctccgatcaccggaaaccccattgaacctggaggtagtttgccggagcagttagggttagcccatctatagagccagagactgatcttgacgaccactaaagctataacaaaactcagtgcaacaccccacatttctttcataatatctaaactaatgattgttcatatgtataaatagctacatattttgaggaagcaatatgcaagaaaaccaaatcttacaagttactactgtaattctattattattatatcttcaaattacaagattaactatattatatactaatacaatataaataagagaaatacataacttaaactgttaagattttaactctgtgtttcttttgatatttgtatataaattttaattcaagttagttggccaactatgcgatctcgaccaccaccaaagatataacaacacacaatgtacgtaacagctcacatttcttgtgatattattattagctattagtaaacactgactgattctaaaacacacaaactaaaaaagcatacattcattagtagagatagtaaagaagataggattaaattcaagactccaagtagatgacgctctcactgtgatccatgaacatgacgtcaaaacgtctaatctaatttgtgtttacgaaaccagttgtccggtatacctttgatttcaatctttctcatatcgtttctttgtagatcataacaaagaatgtgaaagggagaaaccaaaacctgtggtatcaagacaagcttgccactttgacttgtaccgtctacgttgaatataatgtctacttggactaaatgcagctgataaggatgcaaaaccatagtctttttggaccattccttgttgatcccggcatcttccagaacccttaaaaccaacatccccttgtctctaagatggttagagtcaagaagagtaacttttccaccatactctataagactcacattcttcctggatccatctccgtcgtccctccgaggtatttggctcattgtgagctcttccgatcttatgtcgaaactcacaagcacagaattatacatgtcaatccaagctaggtaatatataaccccattgatacactgtcctcgtcggaccggtatgaaaggacaaaagtctgatggaacctttttccatgaacctacttcatgaggttttgggacaaagacccaatgctctggcattgtcgttaggtttggcgcaattgagcagattactctgtattggtcgttaagagggtgatgtccgaaagaccattaatttctcagtagctggaggtataatgctggatctgacggcattgtgtgtaaggtgaaaagttaatatatattaaatcaaaacctaaaaaaactcgaacaaaccaaaatattaaatgtgttatcctataaatttttgtagtttacataacataacttctagtggtaacaaaactgatttgtctaatcttaattaaatggtaaatgtaattttatatagcaaaaaccttaattttagaaattgcaaatcgaattgaaaaaataaatcagaaattaaaagaaattttattgctgtttttaatataatgatttgtttgaatttaagtttagtttattaataataggtgagagtttaaaaaaaaaaagttgagagtttttaatatgtttggaggaaaggtgggggttttc

SEQ ID NO: 4465 - DNA, 763 bp, Arabidopsis thaliana landsberg
taaaatacccaagcttgtgttgggttttctgtcaaacagttaatacattaatataaaatctgtatctaatataaatcatgttaaggtgatcgtctcgaagcaattggagatgaattcttcttcaaatctgtggatggcatcagtcaaaacagagtttcaagccaaacatcgtttctctgttttaactccattctcttactttaactcaatctcaggtccaatacaattaccacacttacttttatgaattctgagaaaataacatcggcatcatcgtctccagatttgcatgtgattgggtcagcttctcgatctgaaactttagagcttccgtgctttgtttatgctcttcaagtttttcacttcgtccatgggttctggttacgaaagatgatgatgaatgatggtgataaggacgatgaatagagaaagaggtagagaagacgatgaaattgatttttgactaggtttcccattttcccaaatggcaaaagttccttacatgtactgatgatcgtaccaactaccaaaccaacgaattagtttttacaaagcttaaccgaatttatatataattaaaccgttttattggattcaacagagagaatggagttaaaccatattaatgatgttgaagattatctatagaaattttggatagtaacttatagaagccaaataatacaatatagatttttttggtaggatatacaatatcgattttaaatataatggataaacaattatacacattaaacattgt

SEQ ID NO: 4466 - DNA, 585 bp, Arabidopsis thaliana landsberg
caaaatttttttaaactgattcaacctaagctattatctggtttagttcaataactcggtttaattatctttaatttcggtttaagttttgtaaaagtcaattcgttggtttggtagttggtacggtcaatcggtacaggtaaggaacttttcttttgccatttggggaaatcgaatcaaaaatcaatttcatcgtcttctctatctgtcattcatcatcatcacaatcatcatcatcaaatctcaggatcttcgaggtggttcttctgtttcgcaactagcttctagattgtgatttacaatcttcgaactctcggtgagtttctaggtttagggttttatctctctttacacgacaattgttatggccaatcgagaaagagatcgagagcttctgattcccgtcgctgatttcggcgacaaagacgatggttcttcttcgaagccttcttcttcttcctctgcttcttcttcgcatcaatccggccacgaggtctagtttttgtcacctgatctaaaaacgtgttcttcgttttctcatttcaaaattcatgcgaaactaacagtagaattggatgatagtat

SEQ ID NO: 4467 - DNA, 4443 bp, Arabidopsis thaliana landsberg
  unsure (1)..(4443): unsure at all n locations
catcgtaatctgatcctgaacaccatggctcagctttttccatcaagtaatcatccagctccttacctgcttgttcttttctcatttcattaatcatctctttgtacaagtagtcactacttatatacccatcacactcacctgattgctcagaacccctatgatcgctttgtattgcagcatcatcactttgagactgtttatccagcattatagtatactcttcatatagatgacgcatcacacttgtaatcgacaatgtaagattcttactttccaaactatctttaccatggagcctgtcaaagcaaagtgaagtaaacttcattttctttcttggatcaaacacactagcaacaatcacaagtggatttatattgatcaatccatcccaatacttctcaaacttgtcctttatacttgttgcttctttccttacttcttcatcaacgttgttacttaatttgattagattccagtcaatagtggcaatctcactgtaaccttttgaagaagctgctgctttacgttctgaagattccacagtacaattgaaaaagattccgagaaatgttaccaacctttccacttcatcccaagtagctgaaactggcggtccaacacgtttttctccagtctcctcctctatttcaagaaaatatttaccataaagcttgtcctcacccaacatcttatcgaaagctacccgtaacttaagtgcagctaccaacataagatacgtcgaattccactcagtaacgctatccaatgacaagttgcctttaggaacctttcccgtctctatacgaaactcgaatgactttattcttgataaggatgactgcacatacttcaccgcattccgaacagcaacgatactatcactcacatgctccatactgtcttttacaagcagattcacaatgtgaccacaacaacgcatacgcaagaaatcaccatctttaactaacgcattagctcccttcaacctcatagcatcctggaataaggttagagcctcatcatcattaccctcagcattattaaccgtgactgtgaagactttctcaatcccccattcatctaaacattcaataagacgtcttgcaatcgtttctcctttcttatctaaaacaggcttaaagctaatgattctcttctgcaattcccaatttgcatcaatccagtaagctgttacaaccatgtaactagatgaggtagtaggagcttcccatatatcagtagtcagagagactctcatcttattaacactaaacatcaccttcaaaaaagacttctcttgcaaatacatcacagcaatatctttagcaactgtctgtcgtgatacatcctcgtacatagggattacattatgacagaatctcctaaagccttccgattcaacgaaggaaaacggcagcccactaagaacaatcatctcactgactgttcttataaactcatcttgatcacatttcaaggatgtgggattaccactagtcaaagctttatcttcactactctcttgataagccttaaacagctcacatcttccaatgtcattccttgtacgattagtgctctcttantcatcgtcctttggaacaaagtattgtcgtatatcagaactttgagaaagtttcttccttggttttagttgatgatcagaacttgatctttgtgtttctgtccttttctttcccacactagtctgaactttaacttcttcactaagcaagtcattgttgttggcatgagaagaaggcgaagacatatctacaaaacacacagttctcagtgtcaagtgtcaacatcaagcagattcacaagcacatttatacttgaaggaactgagaaagaacaaaactttgaagcagattgggtttcacgtttagacaaatatagaagaaacatgaaaacaaacaaaccttgtactattacattacgtgaatcaaatcgatggtgaagaaacataacatttggaatcgaataaacatcaacgagaaagcagacctttacctggagatattaatgtcggttggtcagaatccaaggctcggagaactgtcactgtcgaagatagtttcgatggagatggtctcgacggagatgagacgccgccgcaagtttcgaagttagacgagaagaaaggaaaacccaagtgtcctaaagatcaggtttagacattttagttgtttcatttcggttagttcggttataaaccgaaccaaaccgaaaactgaactaaaaagtttacagttgcggataagttctcttccagaacccgaagtaaacccgaacttcaacttcgggttcggtccggttcggttcggttaaattcataatgatcatgatcaaagaaggagaaaagaaccgaacccgaagtaaaaaatcactttccttttgcatcaattggaagtccagtaactcttctagacgtttgtgcatgcatgtcttctttttttttattattttttttttgggcagcaacatttgtctctgtttttaaagcagagtattatcacaaacaaaacaagaaatctgtgatcgttccaaattccaatggtcttcctcaccggaaccacggtcgtgattatcaatttcaaactaactaaattagtccaagtgtactctaatactattattagtatagaaagtcgagtagttaattagttagctgtcgtaatattatagtattgttgagatatgtaactctaaatgaatcgttgacttcatatacggacagcctgtaagtttgagattgtctctatgattatctctgctttaaaaaacatattaaggcaagacccggaagctacgggaaaaaagagagaaaatcaaatagagaacgtgggagagattacatatcaatatgtaaagagcactcaaaatctctcatacgactcaaaactacttagaaattatctctctatctctctctctcgctcgctctttttcttggcagctctatggattcggaggtggaggagaacgtcatatcagtcatcactgacacaacctttctcatctccacaaatttaaaggtggatccgagggtaatatcactcttttctcaactattctatgattggcgctctgtttatatggaaataaagtccctttacccgaagatggagttccatttactccttcgtcaaatactcaagttctggacctctacggacatgggtagacagtggaagtttgtatccctcatttgtaaaataatgtttctggttagctctatggatttggattcggagtcagagctcacatctctcatcaagaaaataatttctctcttcaactctaaacccgatacgggttcagagctcgtttccctcattacacagttgatgcgtatcgatacctctgtggattcggattcagagccaacacaagaatctgagcttctatcactcattagccaactagtctctgccaagccggagccggagctcacatcactcaccaggcggatcatctctaccttcatatctatgaattgggagcctatgcagtttatttccgtatgccctcaagttatggtggaacttgtacatggaaaactgacgacagaagttgtccggccgagaaaggctaaagagcgggaatgtgagttgtatgcttacgaaatttggaaatctacaagacaaatccattttcactgtatactatgcaatggcgagaaccatgaagagtatgacaaggttcctatagaggtcaaacaccctcttcacccaagacattctcttcagcttgccgttagacaatggtcggaggaggaaacgatgattgaatgttattgttgtgatgaatatctcatggattattattactattgctcctcttgcgattttgctatgaatgtaagctgtttggagaaaccaccaccagtcttatctatagaccatcccaagtggcatcagcatccccttattttgtttccaagtcaggcttcctttccttgtaacctttgtgccctcacacatgcaagttgtcctttctatatttgtcccccctgtgacttcgtggtccatcaaaagtgtctcagcttaccacatgtcataaggatatcccgccaccatcatcgtatctccttcactccttcatttgagaaaggaaattggtattgtggtatttgtcgcaaaaagatggataatgattactgtggttatacttgcctcaagaacggttgttcgtatgtggcacattcaagatgtgcaacacaaaagaatgtgtgggatggtctagaccttgagggagagccagaagaagttgaagaagaagaagttgagccatttgtgataataagtgacggaacaatacaccattttagtcatccacatcatttgagaatagataagaataccggcagagactacgacgagaataatcagtgtcaagcctgcatcacaccaatctattttggtaacatcactc

SEQ ID NO: 4468 - DNA, 476 bp, Arabidopsis thaliana landsberg
ccccccgatctagaggatccctcactcacaacccctgattagggtatgggttcctattctaacatggtatcagcttagggtttcatcctctcctcctgctacagccgccagcctccaggggacgtcttccccctgcagccgccgccagcctccctcccgccgccggccacagcccccagccgtcggcctcccctctacctccctccctccccttcccactcgtccccagccgccggcctccatccgtctgcacagggcctgccgaccccgcactcgcggctcgtcgcgccgccatgggcagctaccgcgcccggccagtctcgctgcccatcgtccaggcgcgccttggacgtgcgccgccaggacgctcccctgccgcactcgcgcctgggagccgtgctgctctggcgccgaagccgacgccgctctgtgcccgtccctagccgccgtccgcctgcacgccctgtcctgtgcca

SEQ ID NO: 4469 - DNA, 528 bp, Arabidopsis thaliana landsberg
ggagcaaaagctgattataaatgtttcactatacttggcttttgtgtgttttcgacacatatgttggatggagaggtcataaacaataactaaggaaggtaagaagaaatcttactttgccttcgtatagattatacactatagttcagttctgtgcataccattaaataacaccattgtgaaggttctaaacagggttagtaaattttgtaccttctatacataacgggaatgataccggatttgtagagagcaattttctcgtagatcggctgagaaagatcgaaatggtggttgggagggtcgcatgcaccaccaggaggacaaaagttagtggcagtgaccacaatggatcggccttttatgcaccattgaggatcgttgacacacatcagctcaaaacatgcgccacaactaagtccttggtcgaataacgctgtgctcagcgctgccgtcttcagtccataaccttggctatacagattgccgtacccgcatgctccacctatttagttcattaggcagatc

SEQ ID NO: 4470 - DNA, 4904 bp, Arabidopsis thaliana landsberg
gatctcagatcggaaccctgattcgagacgagagcttctctatgttggactctatcttctcatttggggagaggctgcgaatcttcggttcatgcctgaatgtatctgttacatcttccataacatggcctctgagctcaacaaaatcttagaggattgcctcgatgagaacaccggccaaccttacttgccttctctctcaggcgaaaacgctttcttaaccggcgtcgttaaacctatttacgatactatccaagctgagattgatgagagcaagaacggtacagttgcgcattgtaagtggaggaactacgacgatatcaatgagtacttctggactgatcggtgtttcagcaaattgaaatggccgcttgatttgggaagcaatttctttaagagtagaggcaaaagtgtagggaaaactggtttcgtggagcgcaggacgttcttctacctttacaggagttttgatcgactttgggtgatgctagctttgttccttcaagccgccattatagtagcttgggaggaaaagccagatacctcgtcggtaacaaggcagctgtggaatgctctgaaggcaagagatgttcaggtgagacttttgaccgtgttcttgacatggagtggtatgcgactcttgcaggctgtgctggacgcggcttcacaatatcccctcgtttccagagagaccaaaaggcattttttcagaatgctgatgaaggttatagctgccgcagtttggattgtagctttcactgtcctctacactaacatctggaagcagaagaggcaagacaggcagtggtccaatgccgcgacgactaagatataccaattcctttacgctgtgggggccttcttggtgcccgaaatcctggctttggctttgtttattatcccatggatgagaaacttcctggaagagaccaattggaaaatattctttgctctaacttggtggtttcaaggcaaaagctttgtgggtcgaggtttgagagagggtttagtggacaacatcaagtactcgactttctggatctttgtcctagctacaaagtttacatttagttacttcctgcaggttaagccaatgattaaaccctcaaagctgctatggaacttaaaggatgtcgattatgagtggcatcagttttatggagacagcaataggttttctgtcgcattgttatggttgccagttgtgttgatatatctgatggatatccaaatttggtacgcaatctattcttcgattgttggtgctgttgttgggctgtttgatcatctgggggagatcagggacatgggacagctgaggctaaggtttcaattctttgctagtgctattcaattcaacctaatgcctgaggaacaactcctgaatgctagaggctttggtaacaagttcaaggacggcattcataggtagtccgtggaagcatgctactaatattcctaaataattttctgtacaacgcttgacttgactgtacaagctgtgaaattttacttttgttaacgcagatgctgcatataattaaatttttcaatattgtaataacttgaggttgtgtactgtatgcagattgaagctaaggtatggatttgggagcccgtttaagaaacttgagtcgaatcaggtcaaggccaacaagtttgcgttgatctggaacgaaatcatcttagctttcagagaagaggatatagtttctgatcgtgaagtagagctactggagctgccaaagaattcctgggatgtgacggttattcgctggccgtgtttcttgttgtgcaatgagcttttgcttgcactgagccaggccagagagctgatagacgcacctgataaatggctgtggcacaaaatatgcaagaatgaatacaggcgttgtgctgtagttgaggcatatgacagcatcaaacatctattgctctcaatcatcaaagttgacactgaagaacattcgataattacggtcttctttcagataattaatcagtccattcagtcagagcagttcaccaagacctttagagtggacctgctgccaaaaatttatgaaacactgcagaaattggttgggctggtaaatgatgaggaaacagatagtgggcgggtggtgaatgttctgcagtctctttatgagattgcaactcgacagttctttatagagaagaagacaactgaacagctatctaatgaaggtttaactcctcgagacccagcctcaaagttgctgtttcaaaatgctattaggcttcctgatgcaagcaatgaagacttctaccggcaggttaggcgtttacacacgattctcacctctagggactctatgcacagcgtccctgtgaatctagaggcgagacggcggattgctttcttcagtaattcgcttttcatgaacatgcctcatgcccctcaggttgagaaaatgatggcgttcagtgttctgactccatattacagtgaggaagttgtatacagcaaagaacagctccgaaatgagactgaggatgggatttccaccctatactacctgcagacaatttatgctgatgaatggaaaaatttcaaggaacggatgcatagggaaggaatcaagacagatagtgagttgtggacaaccaagctgagagacctcaggctttgggcttcctacagaggtcagacattggcacgtacagttcgtgggatgatgtactactaccgggctcttaagatgctcgcttttcttgactctgcgtctgaaatggacattcgggagggtgctcaggagcttggttcagtgaggaatttgcagggagaactgggtggtcaatctgatgggtttgtctctgaaaacgaccgatcttccttaagcagagcaagtagttccgtgagtacgctgtataaaggccatgagtatgggactgcattgatgaaattcacatatgttgtggcgtgtcagatctacgggtctcaaaaagcaaagaaagagcctcaggcagaggaaattctgtatctgatgaagcagaacgaagctctccgtattgcatatgtggatgaggtgcctgcgggaagaggagagactgattattactccgttctggtgaaatacgatcaccagttggagaaggaagtggaaatattccgtgtgaagctacctggtccagtgaagctgggcgagggaaagccagagaaccagaatcatgcaatgatctttacccgtggtgatgctgttcagaccattgatatgaaccaagacagttattttgaggaagctctcaagatgagaaatttgctccaggagtacaaccattatcatggtatcagaaaaccaactattcttggtgtcagggagcatatcttcacgggatcagtctcgtcactggcgtggttcatgtctgctcaggagacaagttttgtcactcttggtcagcgtgttcttgcaaacccactgaaggtcagaatgcattatggccaccctgatgtatttgacagattctggttcttgagtcgaggcggcatcagtaaggcttccagagttataaatatcagtgaggacatctttgccgggtttaactgcacgttaagggggggaaacgtcacccaccacgagtacattcaggttgggaagggtccacaatttggattatttctaactaactatactgctacaacgtttttttaacgtttttaacgtttattaattatgcaatctacttttgttataattatgtaatttaacgttttttaatcttctaaattcaaaaaatttgagtaacctttgtctttatgcatttttcaggtcgggaagggacgggatgttggattgaatcagatatcaatgtttgaggctaaggtagccagtgggaacggagagcaggttctcagccgagatgtgtaccggctcgggcacaggcttgatttcttcagaatgttatcatttttctacacaactgtagggtttttcttcaacacaatgatggtcattcttactgtttacgctttcctctggggacgggtttatctggctctcagcggggttgagaagtccgctctagcagacagtacggacaccaacgccgcgcttggggtgatcctgaaccagcagttcatcattcagctcggtctgttcactgccctgccaatgattgttgaatggtctctcgaggagggtttccttctagcgatatggaatttcattcgaatgcagattcagctttcagctgtcttctacacattctcaatggggaccagagctcactatttcggtcgaactattctccatggtggggccaagtatagagccactggacgtggatttgttgtcgagcacaagggattcactgagaactaccgactgtatgcacgcagtcactttgtgaaggccatcgagcttgggctgatcctcatagtgtacgcttcgcacagtccgattgccaaagactcgttaatttacatagccatgactatcaccagctggtttcttgtgatttcatggataatggccccatttgtgtttaacccatcaggattcgactggcttaagacagtctatgactttgaagacttcatgaactggatctggtaccaaggcagaatctcaacgaaatctgaacaaagctgggaaaaatggtggtacgaggaacaggaccacctgagaaacaccgggaaggcaggattatttgtggagatcatcttggtcctccggtttttcttcttccagtatgggattgtataccagcttaaaattgcaaacggatccaccagcctttttgtctacttgttctcatggatatacatctttgctatatttgtgctcttcctagtcatccaatacgcccgtgacaagtactcggcaaaagctaaaaaacggcacaggcttgtcccattcctcctgatcgtgcttgcgatactg

SEQ ID NO: 4471 - DNA, 804 bp, Arabidopsis thaliana landsberg
  unsure (1)..(804): unsure at all n locations
tcctcagcattttcttcattatcacagtccatttcagatttttgttttttcatagcaggttctttagggctcgggcccggtgcatttcgtttcctcttaacatttagaatagaccagttgctgctattaattggttttcttctgggtgcaataacaaaaaaatttgaatacaccctttatacttacctatctcttcttgttgtggtgggcgcacctgctttggtactctagcatagcctccaacccattcatcctcctgccactggtgcccatctatcaacagtgcctcaatgtaatcaacccttggatcatcaacttcatcatcccatgaaagagatggaggacaaacattatcagctggtttcacaatatagttgacctcaacctacacaaataagtttgttaaccatagagaatgtacatttacttattatgtacgtacatacacaatttaacacacctcatcagcagcctcacactccaannnnnnnnnnnnnnnnnnnnnnnnnnnnnnnnnnnnnnnntggatagacctctcagcaaatgtcctgttagcttcatcatcaggtcctagcttagcaatggatgagagtgtttcgaatgctaaaagctggagtgctaatgggaagccatgaagtgcataagacccttccagtaaaccccttattagtagttgagcttcgtaaggagtttagaattttgctatcctccccaaagtacgggtaaaggacacccttccccatgagtatttgcagaagaactccaggttcttcgtcatctaagcagtgttcgaagaagcgatgt

SEQ ID NO: 4472 - DNA, 596 bp, Arabidopsis thaliana landsberg
  unsure (1)..(596): unsure at all n locations
taattttaacataccttcttcattgattgccgcaaacactctagctctctcttcatcgcagttgactcatctatcaagcaggcaacttgagctttcttctcggttaagcttacccttaaagattccacctcaccctacataaaaggtcagttataatcaacttcaatatgaaggattcaagcatatgctaaggtatgattgatgccacaatcaagtatataagtgtgtaagaaaataaacattttagaaactcaacctctcctaaatgaagagtgcacaagggacactatggccctagaagaatgttttagggtagaactaacctcaaagctcaacattcactatttgatacaagtcatgcaccctgtgcatagcagtctaaatttgagtaaatagaaacatattacttaccagtttccgatcaattttattttgacaagttggcactcgttctttgaatttcacgatcttctcattctgctccttgagctgcctatccacatcatatacccatgaccaagctagtttctttntcaatgcagaacctgttgagttatttcttcacatgttcatattcttatttttcagcactcatg

SEQ ID NO: 4473 - DNA, 2492 bp, Arabidopsis thaliana landsberg
ataggctttggtggttggtccttttcatgttcagtttttttatcagactcatcatcagattccattgagctatcttcctcttcatgtttcttcttatactcattcttactcacactctccttttcgctctccaaagatgattcttcgcctgatgaggtactagatttgtcatcttccgtagctagctcaggaggaggagatacaagatttgaatcatgtcggcttaaggctatagacatgctcttgtctttgaaggataagataggaactgttgtgggaataccatcttctgtaggcatcgaaaggaagctaagcgcaaccattacatcgcttataagaggacgagctgatgcttcctcttgcacacacattgaagctattgccactgcttggtttaatcctctctctgagaatttattctccaaaactggatctgccatatcgggatacctcttcggatctctaaatatcggttgtgcctgcgataacatgaattgttcagcaagataaaaacttcttgttttaacttggttgaaaaagtgcaataatattagggtttgttatttattacccaagaaactaagttctgttcatcattaggcctagtagtatcaagagctcttcgacccgtgataagctcaagcaacacaacaccaaagctatagacatctgatttcaaagtgagatttccgcctcgtgtatactcaggtgcagagtaaccataagttcccattactcgtgaagataaagccatcatcttatcacctgtcccgggtcctagcttatgtagaccaaaaccagaaagcttaggagaaaagtcatcatctaacaaaatgtttgaagctttcaaatctctgtatatcacgggtggattcgctttatcgtgcaagtaatcaagcccttgcgctgcagcatacgctatctgcatcctagttgtccaatccatcggatcactgtctgcttttggttctgcaaaattcaaattgtcatttctttcaaagtaaaaaaaatgtgttgaatgagaatctctcaatttagtaccatgaagatggtcttgaagtgaacctccagagatataatcatagaccaaaagcctttgatctccatccgcgcagtaacgcaataagcttaacaagattcggatgatcaagttggcctaaagacaaaacctcagcttgaaactctttgtttccatgtaatccatgcttgtctagttgctttacagccaccacctacaagacaaattcttctgattctgatgatggctcattgaaaaatacctaactttggtgatggtctcatgaatgtatcctaaattccaaattctagagatttaaggaagaacctggccagtagatttgagggttcctttgtaaaccctaccaaatccaccttctcctagcaaacactcttgccggaaattctttgtggctgtagctaattcccggaaagtgaatatcttcaacgatgttccttccgattgctctatttcctctgtttcttctgcacgtctcctatctttaaaaacaaacaaaaaatgatcattttttgttttctttcattttactgatcgtatgaacaaggaaaactaagaaatggtacatcgataggagataaataccatttggtttgggttcgttgttgtcgttggtctcattcgtagttgaagatttcttgttctttggcgaagagaaacacgggaaacagtgcatgatgatgatcaaaatcggttttagcaatcaaagagtattattattagaagataaaacagatcgaaaagaattagatttttggagttttgtttaggattaagcaatggtcgggtccttcatggagattgaaggacccacgtaaaagaagaaacacaagaaaaaaaatgaaaggagaaagagaagaagaagatgaagttgacaatccaaaccaccggaaaatcgatgaagaagagtaacttttccgagaaaaaatggacaaaaaaaaagtttagattttttgtaataatctcaatctctcataaactcttaccttttcccaaaagcatggagaaccatccttcttctttcgaatttctgtataacctaattttaaaaatcctgtaaataaattcccaagtaatgatcttgaagtggattaatctgtcccacaacacactaaaattaataatttttgccagtattgatagatcatcccgctaaaaaacgctatttctggactataataatactatttctggacattatttgcaactctctgtcttctctactacgttactaatatattctactgggctttaaggcctcaaattacaatatgtttggttccaaaatttgtatttaatgggcttctctttctttaggtttttataataaaccgggtcaaacagtacccgactcgtctaattttcccgctaaagaaaaagtgaaaaccgcccaaataattttcgatggtggaatgataaaagacctaagagggagaaagatagatcgaagagtgaa

SEQ ID NO: 4474 - DNA, 2409 bp, Arabidopsis thaliana landsberg
aatcaggcttcaaccctggatttggggaatatggaaaagagcaagccttccgctctggcagatgagaatgagcaatcagagcacaagtcagccgtcaacttggatttagggaatatgaaagagaacacgccttcggatgtggctaatgagaatgagcaggcagagcttaggctacctaacaactcggattatggtaacatggaagagagcttgcctttgaatcttgctaatggggatgaacaacctgacccaaccactgctccaatggaagctgctaagcaaccaaaaaagaagcgatcaaggtccaaaaagtgcaaatcagtcaacaacctggacttggggaacatggaagaaaacaagccttctgatctggcaaacggaaatgagcaaaaagatcctgagtcagtcaacaggttggatccgggtaaggagaaagagagcattccttcgaatcttgtcagtgggaatgagcaacctgactcaaacactgctccagctaagaaaccaaaaaagaaaaagcgcaaattagctaacaactttgattcggttaacaatatggaagagaaaatgccttccactaatgtattgagccagggaaacaagtcaggtttgattgaggaaaaaccgagcataccttccgatcaatgagcagtgtggctcaaatactgcaccaacctaagcaaaaccgaaagaagaagagaagtatgatgcccattccactttggtgttttaatgagcatttcggtgtttgtcatgaaaccaagttttgaaatggcacttgtctacataagtgtaacagattcttaatttcaacaattttgttagataatttgtattcattctcacttagtgcttccgttgttctatcgttataaacgttttaagatatacgcatgtaactgaaagaagaaaagccattattgatccagtactgtagtgtcttagtgtgagcagaaaaaagatttgatcatggaatggctttagagtaaaatactaaaatagatggaatcgaaggcttatgaatctgacgtggaacaagaagaaagcgtatctgccacgtggcacaatacaacacctcaacagccttatctggacatcaacagagagatcctccaatatccgaaaccaaccaatcagcttcactcttggtttcacctccatacattaacacaccaacaatcctcaaaaaacactttcataacttaatcacacacaaggagagaagagagaaagagagacagagataatggcgtacagtgcgtgtttcctacaccagagcgcattggcttcatcagccgcacgatcatcatcttcctcctcatcccagcgtcacgtgtcgctctccaaacctgttcagatcatctgtaaagctcaacagtctcatgaagacgataactccgccgtctcccgccgtcttgctctcactctcctcgtcggcgccgctgctgttggttccaaagtatctcctgctgatgccgcctacggtgaagctggtgcgtttataaaataaaataaccttggatcatttcattttcttgaagaagaatcttgaagaacatattgtgtttttttcatcctatttttattttttggtttgttgcagcaaacgtgtttgggaagccaaagacgaacacagacttcttgccatacaatggagatgggttcaaagtgcaggttccagcaaaatggaacccaagcaaagagattgagtatccaggacaagtccttaggttcgaagacaacttcgatgctactagcaatctcaatgtcatggtcactcctaccgacaagaagtccatcactgattacggttctcccgaagagttcctctctcaggtctttgctttactccatcatctgtaaaggtattgatgttacaaaatctaatgaagtgtgagactgagtggtgatttgggctttatgcaggttaattacctcctagggaaacaagcttacttcggtgagactgcctctgaggtaaacttcccattgttatttgttataagtaaaccagaagctgatagaatagaataagagaatcaaacactaaagagagaacacattgtctccctcgttgttaactgataaaacaaaactcaaaagcttttttcaactgataaccttcaaagacctctctagtagtcgatgattattacaagaaagattcttaccttaggtggagtgagttatcaagttctaactctgtgtgtgtgtgaatctgatgttcttacagggaggctttgacaacaatgcagtggcaacagcaaacattctggagtcatcatctcaggaagttggggggaaaccctactattacttgtctgtgttgacaagaacggctgatggagacgaaggtgggaagcatcagctgatcacagcaaccgtgaatggagggaagctttacaactg

SEQ ID NO: 4475 - DNA, 1078 bp, Arabidopsis thaliana landsberg
gtgagaggtggatcgaaaactcgagacttgacgaggttgaaagaccagattcatcacaaacttaattgaaagaagcttaagggtggaggaaagaagttcctcctattggttttggatgatgtaggaagcatcactaacgaagaaaacgtgatggaagatttggaacttggagcttttcttgcaccttgccgacctctcaagtttcttctcacaagaagaaaaggagaagaagacgttatggagaagatgaaaccccatcccacggatgagttacatgctaagtctgatggggagatcgagtcccatgcaacggatgaggcatgtgatgtacttgacccccataccattgatgcgtcactgactttactcaaactctttaccgatgattatttggtggttctgttcgagtccctcatcaaatatggattacttgaatcccttgagaaagcttgttgggggagaaataacaggttcttgaacttgaagcatcgtattgtggaaatgagcatgtgtttgccagctgcagtcgttgtgctagtcaagtctctaaattgcattgctacgaagcttccattctctattcctcctaagcaggagaaggttttcaaaacagcagttctctcctatgatctacctatttattatggccgtagttgtattctacatctcgcatatgagttactaaaaacagatgataccgtcaagagttctattgttgactgcttctggcatagcttgagcttctttgagcactgtgggtgtgtttattaccaggagttgatcgcacattggattcttgaaggctacttcgatcctgttagatcggttacgaaggcatatatggacggacatgaagttatgatggagcttatagaacgtggtttcttgaagatacatgaggacaatgtagttatgcccgaggttgcaatgaagaatttaatagatcttcggcgtagtgggctgtcaggcagatcacgaattgcacttgctaaagtttttggtcgtgccaagacacaaggtctagggaaaatcaaaaagatggatgacatcatagaagcagtgcagactacgaggaaag

SEQ ID NO: 4476 - DNA, 622 bp, Arabidopsis thaliana landsberg
  unsure (1)..(622): unsure at all n locations
gcacatccaaatccaaatnnnnnnnnnnnnnnnnnnnnnnnnnnnnnnnnnnnnnnnnnnnnnnnnnnnnnnnnnnnnnnnngcgtgtctcctccactccacatagtctttgtgcatctgataaggtagccatcattctctctgacagtaattgacctgactttttggtcaaaaccctttttccttcaaaccaatctgtttctgaaagagaagagggaaggcctgcttgtttgaacttaggctcattcattcctttgtccactnnnnnnnnnnnnnnnnnnnnnnnnnctgcatccatgaaagaagtttttcctgtctgagaagaaccacacccaactttctcatgcgtaagtctttggcaaaggaaacaccttttcctaattctttcataatcaaaagtcacagagactatttcacccgttggtagctgaacttccttgaaatttctcagagggttcctaacatcaagtataacatgaactatgatataatcttgcgcttgagacttctctaagtctagcttaacctttaaaacatgtccaacacaagatgcaatctctttaatggtctcctctgtgtaatagttaacaggaatattcctcagccgaatccaaacccgaag

SEQ ID NO: 4477 - DNA, 1729 bp, Arabidopsis thaliana landsberg
gatgacactcctttagacgacctaccatcagtttcactcactatcgttttgtagaagtcgtcatcatccccttctcgctccttcaactcttcgatcttctccacagcctgtcctatgtccaaccttttcttcacgtcgggttcacaacagttcaatccgatcgtcaagagtttgagaatctgtccttcacaatggcttgtcttccccatacccttatcaaacaaacttggtgcccataccccatggaaacccgagttcacccaactcgctaaatcctcttcactactttgtgagaaattagccgggaattttcccgttaggatctccaagattagtatgccaagcccccatacatcggttttcttggtgatacgtcgatgttgcaaatactctggagatctataggccgccatgtgcatttgtgccttctcttggttgatcaacggaattaatccatagtctgtgagaagtggttcaaatgttttggtgagaagaacgttggaggatttgaggtgaccatgtggagccattaggctaggtaggtcttggtggagatagaacaacccctttgcaactcccttcacgatcttcaatcttgttggccagtccaaacttggttttcctaacgattgattacctacaaacatttgactcgtaagcatcgataaatctaacgacttataagtgtagaaatatcgaaaacttactatgaagattaatagccaagcttcctctctcagcaaaatcacatactaaaagcttttcctccttcctatagtaataagccacaatggaaagcagattatggtgcattaacctccctaatcttttcatgtgctcttgaaactcatccctccctgcattgttcatctgcttgaacctcttcacgaccatcatttgtccgcttgatagcactgctttataagatgctccaaaatatccacttccaagtatctcggccgaagccttcaacagatcttgcaggtcaaatttttccctatcttccctcaagaatgaaagctttgtgttctccactccagctgctgcacccatcctcttagtagtgcctgagcctttccagtggtcggctttctttctgtctctacgactttggtctgcttctcggatgccggttttcttctgtagacttgatggtccggttttcaccgccaaacgcggttgtttattcttatagctgcggttaagcaagaagatcactccaaggattatgagtattgtcaaggccgcaactattgctgttataacgagaggtccccttgatgatgatttgggtcgtgcctcagactgtggaggatgttctatataaggagaatcacattctgtttccagcggttttccacataagcctttgttaccttcaaacacctttggatctgtcatgctgagactctctggtattggacctgttaatgcattgtttgaaaggtttaacaagtgtagctgatgttcaaactctggtatctctccagtgaattggttcccgtcaagtctcagttctaaaagcttgggcaatttggccacagatgacgggatttgaccggtaaacttgttttgcgccaaatggaccttcttcaaccaccccataccttcaaaagcatcccctggtatatctcctccgaattgattgtttgacaggtagagtgacttgagagcagcgagtttcttgaagttagggaatggcccttcaaacttgctgttcatgaagctt

SEQ ID NO: 4478 - DNA, 614 bp, Arabidopsis thaliana landsberg
agatcctgttgttcttgatctggaaagtatgggaaaggggcaagcttgggtcaatggacaacatattggaaggtattggaatatcatttcccaaaaggatggatgtgacagaacctgtgattatcgtggagcctacaattcagataagtgcacaacaaattgtggaaagcctacacaaaccaggtaatgtgcatgtaataactccgcaatgactattgaatgccatggtactgacataatatcattgtacaggtaccatgtaccgcgttcgtggttaaagccgtcaagtaatctacttgtgctctttgaagagactgggggaaacccatttaagatatcggttaagacagttactgctgggattctgtgcggtcaagtctcggaatcgcattatccacctctgcggaaatggtccacaccagattacataaacggaacaatgtcgataaacagtgtggcaccagaagtgcatctgcattgtgaagatggacatgtcatatcctccatagaatttgctagctatgggactccaagaggtagctgcgacgggttttctatcgggaaatgtcatgcatccaactcattatcaatcgtctctgaggtaaaattatatt

SEQ ID NO: 4479 - DNA, 1614 bp, Arabidopsis thaliana landsberg
aaaaagacttgctcaataattctatagttgctattacaagttagtaaacgtagtgccggacgaaatattaatgttataagacataatgtagaaaaaatatgttgtgttctattgtaatgcattttttgtttgtcaacgttcgaattaggccatcttatataaagaaattggacgggatgaaaattttcattttgttccacttactaaaaaaactatataattgaactaatattagatttaaattttagattcttatcacaaaaaaaagatttaaaatgataactaaatttgctctagctttatttatatgcacggtagtattttccttgtttactcttcttaaagtaataaagattgtgtaatattgtacactcttattattatacaattttgtcctacgtgaagtcatgatgttccggttcccgttcccatcccatatcaagatggaatccgaaggcttgtttccaacttccaaccggagtgcattttcatataaaaacaattctttagaaacaggatccggaagggacggtctcctcccaaataaaaattgaatagaaatcaatatattatatttaaaaaaggtactccgaaaaagaccaagcttagttatattcacaagtagcgattcgagatcaatactgaacatcaagcatataaaaagaccaagcttagctgtattcacaagtttgtatcataaatggctggctaatatatgagaagaagaagatcacacaaaagaaatccaaatctccatcgtagcaactatgaattctgttggtgtatttcgtaaggaggaaattgatggaaaattgtttttggtgttcacattaacacaaacagacaacccaacctcctccagtaaagcattagccatggattctggtggccacaacctccctctacaacctcaacctcttccagaaaattttcgtttgttccatttagaaaagattacatggttaaactaacccataacatattaaatttagtcttttaccaccaaaaaaaatcaaattaaatttagatgataactgttaatacgaaacctagttcttttttaatctaacgttatatgaattgtagtattttccttggttactctttcagtagtaataatattatgtatagtacacggtaataattttacagttttgtcctatgtgaactcatgacatgtttccgttccatatgggatcctaaggccacctccattgcacaaataatagaagtgtctttagatattaaataaataaaataatatggtaaatgtctttaaattggtggagagaagggaattgtgtgtttgggaagacattaaagacatgtttttagagacatctttgcttaggtggcaatatatcattggtttttcttttattcttttattttaatcacaaccaaagacatttacttaaatttgtgcaatgtagatactctaaggcttgctcgagagtgtattttcatgtgaaactaatctttggaaacaagatccggaagagacggtctcatcactgatatttcatattaaaaaagattgtccagcaagaaatcaataacaaataactttttcttcttataaaactatataaatatgttaaccaaaaaaaatac

SEQ ID NO: 4480 - DNA, 2451 bp, Arabidopsis thaliana landsberg
aattttaaggtgtttttgggtgaatatatatacctggacattgatgtaagagtgcgtccattttcaatagctttgttattgtgggtaaaggtttctctgatgtacttgagcctacggagttcgacctccatgtacaagcaatctttctgatctcctctgaagagaaggaagaagtaacttctgtgtgacaaggaaacgttgcaagcatgccatagctctattatctccatctcgagtcttttgaactccaacggccagttcaatggcatggttaaatagtcttgtattgggtcaaccgcagcgtccttgaaactctttgacgatcttagagccaagaatttttgctctatctcctccatctgccatgatagaggtggttctcaaaataatgacgatatctaaaggtcgtaccaagtataggtaaacgaaaagcaagctctgcttgaccaagttagtaaaactaaccgataggtgaatgattcgcttgtccctctgaggaacagtctcttcaccttcgtcttggctgattaaagctctaccacttgtctggcgtgcatacacatgagatttagaggtagaaacctgtgatccattcggtgatgactttatcatattaacaccatctaaaccagctggcattctttgggtgtggttgaagtctttctcgaaccaagttgctggcatgctcatccggctaatatgctttggcaatggtggcctcttgctgttggacggtttcaggttgctctcagctctttcattctgataccagcatggtggtgtgttagcatctctctcagacagagaaaaggaagagcttgatacaaagcttgctccgcagcttcggcttctagtaatccccgtgcctcccgccgtttgcccattactctcaagatgccaagcataaagcttttcaggagacggagtgacaaaatcttgatgtgttgggtctcttttgaggttagaagactcatccggaaatgattcgtcagtaagtgacaaaacacagcgtggagagactttgatcggtccacttttctcctttgtttggatagagacactactgacttccttaactctttcttcttcttcttcctctttttcttctgtttcttctttttcaactttttcttctgcagtttctgttggtggtcttgagttctttgactctggttcacataatggtagtgcactcacagccttacaccggtctggaagtatatttggctctggatacatgatgataccaggactctctgtttctatgcattgaagttccgtgcaggtatcttcagaatccacctcacttggttcgtccatttcatgcaatcgttccccctgaacacgagactgatctacatattcccccttgtgaatgtgcagttggtttttactttctaccccacgaatattaagtcgaactttagtgaatttaccaggagttacaaacgcaaggtgttgagctggactacttgcacccgaattcaacctcaagtctgaaagctggaaaacattctcgtcagaaccatgctcggtgattgtgggaaatcataatggacgcttgcgctgataggggactctctggtgttatatttagagactcccatgaactacgcacccgtaacttggggtctgacgtcccagaaccacctggaggatacaaaaacaggattataaatcgggcagttgaaaggcttatcatccggtgaaactaaaaaaaaatgatattaacgtacatttgtgtttgtctgttctgagtctgttgataatatctcttgttgtggtgcttctccaataatctgttgaagatcctcaatccgagaataagccctctctaattcttgtgctagttggaatacctctttatttagctgtaaataatgaaatgaacgtaaagtctctagagtgaatgaatcatgaaaaagatttacatattaagacagatcatgaaaaatatttactggtatgaatgaactaccggtaatacaaaagttggttgtcacaaaaaaaataataggtaagtgagctctcatactgcaactggtttttacataacttaatatgttgatgaagtaaataatcgcattaccttttcaatatggaggtctttctccttcagtaatgcagttgtgtcagacacaacaagagcttgacgagggctgctcaactcgctctccagtttagccaattctctctgtaaatgtctaaccagagctttatcagacatgacgacgttgacttgtgcatttgttgtcacctcctttgcacaacttgcgaataacaatgtgtttcttgattgctcaacgtgtactcttgcaggactcagtgtgcagattatggaagttctggcgtttcctcccaaggaagtctgaagtatgcgtgtaaactttaaatctctgaatggaatgtgcccattttttcctttactgcattaagctagccacataattc

SEQ ID NO: 4481 - DNA, 2293 bp, Arabidopsis thaliana landsberg
  unsure (1)..(2293): unsure at all n locations
ttcaactttgtaaatcatgaaatgtatgtgtttgttgatgttgtataagagcattgtaccacgatgactgtgattgagtaataaaccaattgtgattgtgaacaagtaaatttatgttggaagatgtataccaaaggaaaagaaaacgaaaaaaggttgatttcaaactagtaaatgttgggccttaaatacccaaaagggccgaannnnnnnnnnnnnnnnnnnnnnnnnnnnnnnnnnnnnnnncccacatcggaagactgagagcatttgatagtggagacttcaatataaatagacttcaatctccttaataaaattcacgcagccatgtagtgagcacaaagcgaactattctttcgccttttactaaagaataccgtgtgctctccacgctaagtggcatacgcctatttttggagggatctgccttcgggtagacccaacaatttactagtcttaactttttttgtcactcgataatgagagatatctctttcgcctgtatgaaagttaattgaatcctcaaatttttactccaaatcacctcgcttttagcaaaattcaaacattaattatctttttatattgagagagaatcttatgaaataatcaatttggaattattttttcgtgccaaaaacttactgctttgtctgaagtaattatagaagtagcaaagaagattatgctgatttagctttggaaggttgttaagccccttgtgattagtgttcagaaacctaacacaaacctaataagctttgatacttggacaatttcctctagttatatccctttagatctctatattcaaactccaaattgttcaaagggtcgtcattagcttcgattaatgagttcatctcggtctataaacctctccaacagctctttgtcattcagaaccaagcaatcctcagcttttccaaaccagtcatagcgattcttcgccacatagtcatacaccgagtctctcagaggagtgggaactatggagaacgcgttcaatgcggaataaggcagaggtaagtatgataccactctgagtgcagctgcagagtcaaaagatgcagaatcagaaggtataataacatgttaattacgaaacaactacatacttagttatacttaactctagcttaaagttaaaactgatatcatttggaatccatctaccataactaaccagtggggcatacttaaactaggcagactcatcaataacttaaaatacttacttctcagtgcagcagatgttttcagctaaatcttaccaaactcttaactgtgaaacttgaaagcatttttgtaaaaagaagatgtacataccggttgatgcctgatggtaaaagccgagaccttcaatgaagagaaatcgtttctgaacatcctctctagtgacaccactcacttctagataaggctcagctgctttagactgaagacaacagaactttatctttctgtacttatcagctttgattatccacttcacacctacattgaacacaattactcagatacaaattaacaacaattcaacctagaaacacaatccttcttagaagacctcaaattctctagcacaatgactccaacaaaggacaattacgaaaagcaattcccacattttctcttccacaatctctggttcatgacttcaagtcaaatcaatgtgacaagaacaacgaattacaaaaactgcataatcttcttcttcttccagaactagaaataacaatcatttcaattgaatcgcaaacatccccaaatttcgcagaacaagactaagaatcgactagaaccaaatcatttcatcatacatagccagatcaatagacagaatcgatcaataaaccactaaaggatccttttgaaaacggagttgttctaagctaaagagagaaatagaaaagcattgtacctccatggcaaagatgacagactccgtcgtacacgacgacacgtggctgaaggttaccaggcattatcaccggaatcttagtcaccggttcagctggatccaagcacgcagtaacttcatcggcgtcaatctcagccgtcgtacgggaaatagctccggtagaaaacgccggcgacggagctgagaaacaaaccgatcgacgctgtagcaaacttcccagaaataacctgggtttcaaaatccgaagcgctctcgtcaacattctagaaatcttcttcgcattttgtttaaaaaaagaagtatcaattgctttttttttctggggaaaagagacgagagactttcaacgaagaactgtactttgct

SEQ ID NO: 4482 - DNA, 2324 bp, Arabidopsis thaliana landsberg
aatgtattttattaaagtcatgacaataaagttaacagttaatttgttcactttggtttaagttcggttattaaacctgaaccgatcaacacgattttcaaatgagtttgttttggtttggttaactaaacttaatgattatccaaattttttaagaaaagtttttgtaatctaataaaccagattgtacccaaaatataccaaaagtcttctaaaattcataaccaaaccgaatcatatatttttctctcaattccagaaaaaaaaaagaatcaaaatcataaaaccgatatgatcgatgactaataatatactcgagtcgatgactaagtccaatcattcattaagattataagccaacatgggtaacatgtaagcccaacaatagcggaataaaaagtttttgttaatcggacagatatataattaaacaatatatattcgaaaatattgaatataactaaattttcaaaaccataatcgtagcactagttaagtttgctaaatactaatatattaaaaaaaaaaaaaaaaagaaattctaatattacaaaaggaagaaaaccaaagaaacgtgtaagagttgaaggaaacaaaaatataactaaaaacaattcacaacatgctatcagctcttgaaggcaatctcctaaagaagttttgtggaacggaaggaatatcaaaaaccctaagcctagggtgtctcatgacgtagaacgcaagcaaagtcattagcagtttcatggagactaagaagattactccacaagccactaaacaaaacatcgaaaacagaaacgttgccctaggatctctccaactcaacaaattcttcactctctctccttgtgttgccaaatcacataaaccatcatcatcctccctgcaattcctcttaacctatcgtacctgttcctaaccaaatccgcagatcttgcgcttggaaacccatcgaattcctcgtctagctcatcgggtaaagccgaatctgctttagatagctttatatccatgtgaggaggatgtctcggtctcaaatgatatcgaaaccatacaaaaggagactggtgactcagtgcttagggagaaaaatgacgaacaagaagataaagtgaacgagaattgttgttaccggactcttccatttgcataccgaatcaaaccaaatccaagaatcaataaacgttgtgaagaaactcacaattctttcgaaatgagctctgcctcttcgtaaacaccaaatgttagatccgaaatcgagcatatactcaattacatctcttcctagaggcggctcactccgacctagcttcaaacagagtatgtgtgttgcttgatgcctaagactgtctagttggtatatagacaacggagttaggtaatgcatttcaggtagcaacggttctgagtatttctgaagcatatctatagtcgaaatacatgagaatcgaatcgcgagctgaatctctcccattttcttcacaccgtccggttttaaaacaatgagcggatacgaatgcgtgtagatcctctccgtttcgagtgtggacaaacgtatcctgattttaccaattctcgagtcttttgcatcatttgagtttccaggtacttatagatgtagattgtcgaacacggcaacggttattacggtataaggatcataaacctcccaagtatactgctcgctccattttgggcttaaactatctacaatcgtccttgttctcacccatttttgcccatatttcgccacgcaatatgcatcggtggtgcctcgaccatctcgggacttcatcggaatcgaaccagatgcactgatgactccgagcaccaatacaccaatagttggagtccatagaagcttagcagaagctctgtactcactgctatactgaatcgactcatcaagcacatggtatcctccgtccaatgaaacccgcaaatgaatcctccctgcgaatcccgagtccccaacgcgctccaggttgtaccatagagccggtacaggtcccggcaatacccgtctctcaacctgagacaactttatctcacatatacctaaacactcttctttttgacctaccttattttccaagctaagtaacaaactatcttcaaacggctcaaccgcaacaaacatcatatcctcgttccaaaactggactcattgttggactctgcgaaacccgactcctcacaacaacatttcctacaaacccttttactaaaacctccggatttgttctgtttccttgcaacagaaccaaaacttgagcctctataacattgactcgcaaataccataaccctggagatagatacac

SEQ ID NO: 4483 - DNA, 3245 bp, Arabidopsis thaliana landsberg
aaaataactagctctgtccatgtgtacatagtgtggaacaatgtaaatggtacaacgaagaaccattaacgtacgtcttcgtgtgcattcacatgtcaatatctatgaataaggatcttgtctatattctagttttgaatttgtcgtgcattttaaatatttgatcattgtaattatcggtaggactctagtcactatacgaagatgtgacgacatatgtatctcttagcttcatttctggatttaatacttgtagcatatggtcagtcgtctcaaattaagaatggattattagtctgttcgtttcgtcgccgcaggtagttgcggctgcggcagacgcatatgaaattgttcgtttcactaccgcagatagatgcggcaaaacgctgcggccgacgcaatgttatgcggcgaaaaaaattaaacgctgattaaattcagcgttaaaattaaaaaactgcgattaatatgccaaatgacagaaatacccttaacatatttagaaacccacgataaaacctaactctaaaacctaacacattcacgatctgaaacttttcttctcttttacacgatttcgatctgaaaaagtaaagctcagcgatttcgaattaaactcggcgatttcgaagtaatgggttttgttttagaagttctctggttgaccctgaagaacaagagatctgttcgcgagaccattcaggaagaagggttatattccactctccacttacctcataaccttcaaggtcggcgattacgtagatgtcaaggttaatggagctattcacaagggtattcctcataagttctaccatagtcgtattggtcgtatctggaatctcactaagcgtgccgttggtgttgaagtcaacaaacaggtttcgattactcaaaattctcatctgtttggaagagttctgattgttgaaattaggatttgaacgttattttgattctttgatttggggtttaattcgtctttgtgtgagctatctgttttgaattttgtgatgtgtgattagtattggtttgaaagcttcaagcttttcttcttgggtccttcttttgctacttgtataatttgcaatcaatctactatgattcttagtgatgttttcattttgactttgatgtttatcatttagttgaatctcttggagagctaattttgagttttgggttaggttttagattaagcacagaatcataaggaagaggatacatgtacgtgtggagcatgtgcaacagtcaaggtgtgatgaggagtttaatctcaggaagaagcagaacgatgtgcttaaggctgcaacagtcaaggtgtgatgatgagtttagtctcaggaagaagcaaaacgatgtgtttaagactgctgctaaagctagatgtgagactattagcactaagagacaacctaaaggtcctaaaccttgtttcatggttgaaggtatgaccttggagactgtcactcccattcccaatgttgtcaacgatctcaaaggtggctattgagttgtttccatttttttcattctcttctaagaatttttgcacttgctttgttctttttatgatgtttttgtatcacacaagactgaattctatattgtacgagttcagattttgttaggaaagatggtttatcccaatcctttacctgttccatttgtatttaaatcgtttctgcatttttcagaaaactaatatttaaaattattactccttaccaaaaaaagctaaaaactattacatgctaaacaaatattttttatggatgtaaatatatttaaattacatttttttatattcagaatataactagaaaagtaaataaaagaattacatgaaaattatcgtagcggcgtcgaaacgaacaaataaacttgcggttgcggcagcggttgcggcagcgtctgcggcaataaaacgaacaacaacattattttatgacaagaagattattagtgtgcgaccactaacgataaacactatgcacacgtggctttctacactttgaacgaatagattttgccgcgctacagtcaaacctagcaagttagcttactgcgccagatgcgtaggttagcgaaggattcgttactttagatgatacaaaattcgaagccctaggctcggtaactccgaagactaaatattttagtcactttccttaaatgatctctcatccgaacctaacggatagggaccccatcctccaggtttcattttcactgtcactttcctcctctggagaaatcacgaactcgaacaaatctgcaaattgattcttcttcctaccaaacccagaaacctaatatttccaaccgttcgatggagactggtgggtcgcgagaaagtttggatttttagggtttgaagattcaaaaaatcctgtaagagtttttgaatttttaaaaaggtcacgtttttttggctgtatacttgtaaagtattcgtctttatcagagtttatttattgatgtgaaagggacgacacaagtttctttgtctcttttgcgtattccctacctcgataatggctgttatttataagaaattgattgttacaaacaagatttagaggatttaattcttgtggacatatttgaatgatttcacattctttaactatactgagattggacatttatgtgtttcattcgtttatgtacagggtcacgtgaagaacatgaatagctgcttccttttacgtttttgaattttggggttttctggagaagttatctgtctagattaaagaacagagcggtgatattccagtttcagaaaatgccaacttctgttagtctaagagaggatgatcctttgttgaaggatttgagtgagaagaagcacagtttcaggagaaatgtggtgtctttggccactgagttgaaagaagcgaggactcgtcttgcggaacaggagcggtcgtgttcaaaagaagctatgtccaggcaggttagcaaagttctgaatttatcagctattacttttttttgtgatttagtcttttggtttggatgttgagacttttgttgagctgttttcaatatgagcaggaggcagaaacaagagttaagagaatggaagatgaaatgcatgaacttgccaaggaactaaacgagaaagttgagcagattcgtgcttcggatgttgctactgagaaggttagggattggtttctttcacatttcttggttgtccaggttctctagttttgcttgattctgcttgaacacat

SEQ ID NO: 4484 - DNA, 1881 bp, Arabidopsis thaliana landsberg
gaagaagaagacagaggttaatgatgaagagagagatgtgagtttcgtgaagttgaagttaccaaagtgggaaattgagaaactgaggaaagagagtgagagtggctctgatttctccaacaagatcacacaactttgtctccttcacataccaagtggtttgattcatcaaagacagcatttgcttcgtaatggaggaagaaactttgggattgaagaaaaagaagaaggtaccaaaatcacatgaggtgatcaatacttttgaagggctttgatcctattttatttctgatgaaacatcgatccgtttctcaagccacgtttctcgcttctttaattacactaggaaacaaatgtactccaacttgtgttactaatgtcacaacttacatcttcttctagtctattctaaatcaagaaaaaaaaatatacaaactaacaacaagtggaagaataacttgtgtcattcagataatctttgaatattttattttttaaagtcttctttgatcattttggttgcagaaaagggttagatttcttgaaaagagcaaagcagaagacctgtgattttcagtgttttcctccatcttattcttattgttagtttagtttaacacaattcttaagaggaatactaagacgaaagagaaacagaaagagatatgagaaaaaggcaaatcattagtattctttttctttaaatttggggggctttagtttggccgataattacaatatacaattctccagaactcagagaaaccaacacaccaaaaaaaaaaaaaagataaatcaatcagtcaggttcgaacctgtattatattatatgtgtctgttaaccaatttccctttttatttgagaagaacaaattggaatcagtgaacaaaagaatgatgaaaaatggtttcttttctttcactcaagaggtccatggctcaggaacagtgagaaaataagtggtcatggcctttctaaacctcctcttgtactgttttggtgagactatagttggagaagcattcttgggtccacccaaaatgcctgaagctttaacccaagtctctaggtgcttgtcccatgtgtactgtctcatgaagtcgatgatcccgagaactagttctttccgctcttcgtcgaatccaaccagcaatgagtagtccattacatccacagactaaccacaagaggataatggggaaacagattaatcaaaacacttaagaacaaaatatgaattgggggtaatgaaaacacttacagccaagaagttggtgtcgttccatatcgctctttccaagcttctcttggccttgcttcctaggaatatcggttctgtgcgcagtgtctctagcagattcatgtctaacaaaactttgtctgctccggatgtgtttggattgtaccttgaccgtgcagatcccttgagatcatagatcctagatattcttctgttgtagaagagattctccatcaccatcaaatccatctttgtctcttttccacctttcggatgtttaattgagacctacaacaaatatcattccaaatcaatcattcacatgctcacttatttcatttcagagtcctacaagttcacattccctcctatattgtcactaacctggtagataccgagaatcttagcaagacaagtagggctcccggaactgagtgattccttcaaatatttgaagtactcaggtgcaaaatcctcgaaagaatccagctcggttttgacgacttgttttatgatgaacctctcgtccaatgacttggcaaagtaaacattgcttttccctccctgtgcagaccatctctgacaacggctcaaggatctcacaaagtccacttcactcggacagcaagtctttctcaga

SEQ ID NO: 4485 - DNA, 1484 bp, Arabidopsis thaliana landsberg
actcatctactggtaatgtatttccacttattcatgacattctctttttgtattggtggttaggcgttttaataactatagcttatctggagaaattccaaggtctttgactgctgtcctgacgctacaagttctgtgagtgtaactttatctctctcaaattcctctgtgttcatgtttctgattattgtttggccgatcttggcattaagtcagaaaatgatatcatcttataatgcagggatctctcaaacaatcctctcaccggagatattcctgttaatggttccttttcacttttcactccaatcaggttttgcatcctgctcctagtttaaatcttggtggacaggtcagaatgtttgattaattatttgaaattttgcagttttgccaacaccaagttgactccccttcctgcatctccaccgcctcctatctctcctacaccgccatcacctgcaggtttttttttgtatatgtctttgtctttgaaatgttattcaactgaataagtaaacattttaagcagatccattaagtattaagaaagagattgttcatttcattcttgcagggagtaatagaattactggagcgattgcgggaggagttgctgcaggtgctgcacttctatttgctgttccggccattgcactagcttggtggcgaaggaaaaagccgcaggaccacttctttgatgtaccaggttagctaaacttgctttacctgtttcctcattaacacttctcttgctgatttttttttattaccgtctttttgcagctgaagaggacccagaagttcatttaggacaactgaagaggttttcattgcgtgaactacaagttgcttcggataattttagcaacaagaacatattgggtagaggtggttttggtaaagtttataaaggacggttagctgatggtactttagtggccgttaaaaggctaaaagaggagcgcacccaaggtggcgaactgcagttccagacagaggttgagatgattagtatggcggttcacagaaacttgcttcggcttcgtggattttgcatgactccaaccgaaagattgcttgtttatccctacatggctaatggaagtgttgcctcctgtttaagaggtatctctcatcttgtgcctttttctttgactgcaatatttccgtccaatggttgcctttttatccgtagtaatcttatattttattttctccttagaacgtcccgagtcccagccaccacttgattggccaaagagacagcgtattgcgttgggatctgcaagagggcttgcgtatttacatgatcattgcgacccaaagattattcatcgagatgtgaaagctgcaaatattttgttggatgaagagtttgaagccgtggttggggattttggacttgcaaaactcatggactacaaagacacacatgtgacaaccgcagtgcgtgggacaattggtcatatagcccctgagta

SEQ ID NO: 4486 - DNA, 1315 bp, Arabidopsis thaliana landsberg
  unsure (1)..(1315): unsure at all n locations
tagggtaattacaaagacgaagaagtggagcagctaattcaagttgctttactctgcactcagagttcaccaggggggggacccaaaatgtctgaagttgtaagaatgcttgaaggagatggtttagctgagagatgggaagagtggcaaaaggaggaaatgttcagacaagatttcaactacccaacccaccatccagccgtgtctggctggatcattggcgattccacttcccagatcgaaaacgaatacccctcgggtccaagataagattcgaaacacgaatgttttttctgtattttgtttttctctgtatttattgagggttttagcttctgctgctccatattattggttcttaagtgaatacatgaggatcagattgggtttgtaagtgttatatgatgaaaaaggatttgaatgttgttgaaagctaaaacccaaacatgtcttaagctcaccacttgaggattgttgcgcacttgattcacaaatatgtatcccatcaattattctttttcaccgtgcgtcaggtttcttttcttaccggtttctgtgttatcatgtgatttctagatccggagattgttcagaagaaaaggagacttttgcctttaaatagcaattggacaagaaaatgcaaccaaagtatattactttttgatggatatctgaaccacacaagcaataagtatacaactgcatattacgagagtacacaatttttacatagtagcctagaagattcatgattcttcatataacaagagtagagaacttattataaatacaaaaatcgtaagtagatgtggtctagcctaattaatactccgacaattttgacggacttcaccttgagagccaagtttaacatcaagattgctcatcttgcgcatggcctgttggaaatcaaagaagaacttggcttggttaagtgcatagccgttaacaagattcctggtccttggtgtgttgaataaagtttggtctgaaaagaggactcctgatttcatctgaagcgcattgaagtaagcattgtcgaaatcgttgcgcgtagcatcaaagggttgctctgcattgnnnnnnnnnnnnnnnnnnttagagagagtgtttgcaaaagtcgagtctaatgaagagtctgggacggtaagtctagccttgaaggaggagcatcgtgcaactcctagggtatgtgctcctatatatatatatccccacaaattattaagctaaaaccaaattagattatcacacacaatacacatatattagttctttaaagaactgaccagagagagcaacaacatcttgtgga

SEQ ID NO: 4487 - DNA, 560 bp, Arabidopsis thaliana landsberg
agatgatgattcctacaatgtattggtggtgtgggtagtcaagatcatcatttttaaattaggggttataaagctacattaccatttctgcttctatgaatctctatattctacaaagatgcatacaaagatttaagaatagtttttattgcttgatggaagtggagagaaagtatcgtaaagctgattagtactggagtagtgacaaacaaaggtgaatgtgggtttttgcttcttacaacttcaccaatctatatatatacttgttgagaacccacaagagatgaccctttctaaaaggttatcttggacccgaggggtaatcgttttcgataagggaattggaataggggatgagccagtcagtgccagcatgaggataggcttgatagttaaaatcatgtattggcatctcctccttttgccattcttcccatctctcagctaaaccatctccttccagcattctcactacttctgacatctttggacgttccattgcagaactttgagtgcagagcagagccatttgtatcagctgctccactttctgttccacg

SEQ ID NO: 4488 - DNA, 1383 bp, Arabidopsis thaliana landsberg
taaagctaaaggtcaaaagaggattaattctttacattgagaaagagtcatataaggacaaaacagaacacaacctgaaactggaaacttaaaatcgtattaatatcaatcctaacaaaagtctatgatcatgttctctatgtttatattctcttgactattgctatttctctcatcctatatattttctaacaaccctaaaacattaacaaaagaagcaaaccagaagcaacagaaacagaccagactaagctcaagatatcaaaatgtgaaatcagatgatgggaggaggaagagtctcccacacatcaaacacattctcctcactgtgcaatgcaaacaacctatccccaccaatagagaaatcacaaatggagccgccatagcttcttttcaacctagaagtcaaaacccagtctgatccacaaaacacagagatggaatcattcatagacgagaagagctggccttcatgcaaagcaagtttggggtaacaaggctcatcaggcatcttgcttttcatcaacctgctcctagaactccacctcacactactccctcctccatccatcctcagatcaataaaccctagatcttcaaactcattcaccacacatatcgaattgctctcttccattgctatcgcgtctctcactctcttctcttcgggcattgtaagaaatccgatatcagaccaagaccagaccatgttcttctctcggaaatccaacaagctaatataacagttatctttccttggaaacaaagtagctacaagaagacaattcttaccactcaaccattgcaacttatcagcatctcctaaagaccaaccaggactctcgtaaaagaaatctacttgctttccagtactttgatcccaaactccaatcccatactcattacttcttcctttacagctcgtaaagatcttagaatcaggactaaaactcaaagctccagcactataactcttaacctgattatcatgactaacctgaaacttatacctaagctcaccagaagatgagctaaacaatcccattcctccatctcctcttcctaatctctcacaagcagagagtacaatgttaccagaatcaatccaaccaacatcgttcactctctggtaatcaagattaatcgttggatgctcctcaagcatccaatcaaagacatggacgacactcccatgagctatgcagcatccaccatccggaccagctcttatcgccgttccgtctccaggagctatgccggtgacggaacgagataggtggagtctgttaccgtcgaaaggtccccactttgcggttcgtaagtggtctattaagccgtagaacattgcttctttgtgaaggagacgctccgggatattaggcg

SEQ ID NO: 4489 - DNA, 4218 bp, Arabidopsis thaliana landsberg
tactcactacaaaccaaaataagtgaatcaactatatataattcatcattatcatcaccttcctaatagttgtcttccaatatccattagctcagccacgcttttctcaccatcacgaataaactcaagaatctacacaaccatgagaaccataacttcgacttaagaaatagcagaccataaaaagagtaaatgaaattgaagaatagtgaagtacctgagtagcaataagtgctacagcttcagtgtaattgagtctaataccacgagcaagacgtttctgtgcaaggaaaccagcttgatgtagctctaacttctcgatctctcgcggcaacaacttcatttctccacctcccaatccaatcttacccacgtctccggcaaacagagcaacgattccgttaccgagaagtcgtactggtaagagactaaatttgaagttgaaggagaagagacgttgaccatcggtgattcgcagactcgcacagtacaatctatctaatggcttacctcatgcatgcgtcatagattctgtttccttttttattttattttaaaaaagattcccaacgtttggttttaaaaatgttttcaaaaaacccatttttggcaacccagtttcgaatcttctccagtggacttcaaaaaaaaaaagcgtaaccgctcgttctaaaaaatgctcagctgaaatcaagactaaccgctcgcttacccttgactaacgtataaaatcctgaaaccgaactaattttctcaaagtttctcgatcattttccgggaaaatttacagacgagaaaataaaacatttggaatctgctacattcctcataaatggtatgcaattctctttgttcttactctttgataacctcaaataatctggacatgtttggttattttttgtgattttggattttgacaggagcaaccggcgagaaggaggccgcgacgtcgtcctcttgagacttgtggtggtgtaatactctccatggctcgtgttctttacacaagaagccagactctgatgaagaagaagaaaaatctatcctcttggctattgaggaaactctttgaattcgttatcttctttgtttcgatgacaagtccgtttcatcgtcattttctcgcggttctctctgtagctgacgatcatatactcgcgttacaagacgcaatcgagacttacttcccttcttcaagcaatgtgtttgttaagatctttgatttgttgatcattgtagagactctgccagagaaacttgatggagtgctcaagaaacttccgagtttgatgagccgagtggcgtggctagattggttgttggttcatgttatttcttggcttggtttgttggtgaacgtgttgggacgttggagagataagaacaaagggacgaatgagaaagagatcacagttgataggagctttagcagatcagggtcagtttcagaagaggaggaagagaagaggaatttggggacggagaagaaagtgtcgtacaaggaggcattacagagaggaagtagtggagaagatggcggtggaagcactggtcgaagcagcagtagccgcagagatccgatcttggaactctttgagaccggatggattcagaatcccatcaaacgaagtagtagaagcgcggattcgctcaccttctcgcgttctgaatcctattcgacctgatttctttcgagatttgaacccgaggggtgacacaatagcttacatgttttggtctctttcaagtacttcttgtattcattactttgtaaatgtcatattctaagtaacctaagtttaagatttgttttaaaactttggatacttatcatagaaacataataaaccagaagaatgacaataagtgaatacgatgttaaaactggggttttgttttacttgtatttaccttgattgatatacatctttttttggctaaccaaaagaacaacaaaaatcgagtgtactaatcacaatgagacctgtacaacatatcttcttctctatgaaatgacttttgtaacttgtaagaaagaaaaacaaagctttacatataaaaggttgtacttgtatgtacatgtgatattttcttctttctcactcgcgaaccgagtagcttttcttccagaagaagctgaatggtcttgccatcgactttcttctcgacattgatttcgacaggactcttggttcatagtcttgaactgaagctgaagcaggagttgatccatggacagacagcggtgctgagagagattttcgggcaggttccttttggggtggctcatctctgtttgaagatggctggtcccgttgctgtctttcttccctaaacagcattagaagcttctgagacttctctctgcctcgaggtgttccgtttacagagattgacactaatgatggtatcacaccttcttgtagcaccatttggatacaagactctcttccattgcatagaatcaaaaggcatgaaacagcttgctcctgctctgttgtgtcacccatgtctagcactgttgctagactgctgatcatgccctgtgatgataccgcttcatctttgccctccaggcttgaagctagatttagcaatacggctagtgacttctctatccacaaattttcacctgttgatgcgagaaggccttggaggctcttgatgatgttagatgaaaggagagcagggatattgggggaatatgtggaaaggttgtagagggcgtgaagagcatcgagcttgcattgggtttcgatttccttctgaagaagttggacaaggaaaggtactgcttggcttgaacctatcacggactttgcttcatcgagacaggaaaggttcagataaagcgcggttgctgaaccatgggactcagcagaagaaatcattttctccagcagccgaatccccccagaagttaacatcaactctttgttcctgcagaacacaaaaagtaatgagaaagtcccgatctattattgtattaccaacatcaccaagaggtactaacctgttgtagttgaaagctaaattgaacagagccatagctccactatcctgagctgcagcattgttatcatctacagctgatcctaagaaccgcaacaaggcttcaacaaacccgttggctcccatgaagatcctggccttttcatcatccttcagcaatagcctgattttttctacaaccttgcattttttctccaaaccctcctcttcgtttaagacagccaataaatcttgatacctctcaagtacatttatatcagaatcctcctcatcatcatcatcagacacaaaactttcttctgtgttttgtcgttcaacaacagtagtaccattctcctccaacggaacaatttttacgcccttcaatttatacgaccctatactgttgactgactgtgatttggtggactcggagtcagagagagctagtctccagtagtcgaggtcttgagattccggcggcccactaggaatttgagttccattctgttcacaccagctcgcaataagacctttaacacagttattgggagtcaaagagatatgtgggagctgttgttgagtctttgggcaagtattatgcccatcactgaaccatttctcaatacagacccgttcataagtaagccctgaagcaataatgacaggatcacacataagttgcaaagatatctgttcttctggtggaatgaaaatctgtcctgatttcctactgttcataagcttatagttgatagaaccaaacttcgatagttggcgcccaaacgcatgaacacgatgttcattacaaccttaaccagagtcatttgtcatccacaatttcacttctgaatagcttggagtactttttcatgagatgcaagatgtaagccacaatggaatccttccccttgtcttcttccacactttcccagtcaatgagtttctttaaagcatgtcgcctccaccatagctgatctagaagaagttctactacgttccaccagagctgtcacaggagttgtcaaatagttcaattacccgatcaccaacactgaatctgaagaaatcacaaatcaaaattagaattcgcaactaggaactagcagataccaagttttaccaatccgaactctaatttcaagaaacaaataaacacgagggtatgcttgtgtaatcaaaaaaacaaaagacaagcaagtagctagcaagagatacataagc

SEQ ID NO: 4490 - DNA, 996 bp, Arabidopsis thaliana landsberg
  unsure (1)..(996): unsure at all n locations
ttggatagccaaaacaggagatgtgttgaggatcatcacacgattctcccttgtggctctccaacaattgagatcatcgtccgcgcttctagtatgtaggccatatttataggcaaaagttggctcattggtgaacaaaattgagttcccactaagaccacaaccatcaggaagttccttagcggagcaagagacatttccaaagtatccaataaagaacacacggtttcccaaatcggtgacctcaacccatttaccacccttttcatctagcctactcactatacatgtgaaccggctaaaatctattacatcagaatttgggatggttacctcaaccagaaagagttcatcattaccagatgcaaccaggtagtttagtggcttgtgaggcgagggtatcaagagagttacctccagcgaataaggatcaataacgaaagtatttctgctaagaaaggatgcataaaatcatcctctaaaagtgactaaatccgagcatatagcatatgggacgttctcaagccgcttccacttcatttccgcacttgttaacaccatcaaaacgtaagtgtaattgagaatcacaacgaattctccttctcttcccttgttgtttagcggaagaaaagccacgcctctgtaatctttaggttcccaaccgatcaatctatattgatggcccnnnnnnnnnnnnnnnnnnnnnnnnnnnnnnnnnnnngccgggtcgtatcctcggatctccacttttactgaacattgaagcttcctacgatcctcagactcatctcggcctatgcctcatagaaaatactcaaaaggcgaggcagatgtagcagaagattggactctaaagacgaacaaagggaccttctcgagggtgcaccagtctgatatagtaaaagaagggttaagaactgacccacccgtggagggtagagattagaagttgaaaacaacggtggagatcatttggagctccaagatagaatcatg

SEQ ID NO: 4491 - DNA, 1035 bp, Arabidopsis thaliana landsberg
cattgcataagtaaagagatagagagtagagaaacaagatgacagatgaaatcaaacgcggaatctgtataacttggaaaaatctcgaattataggttgcagaagcaaaagcagcgcacgaaagtataacagaaaataaaactgaagcaaaaactcaatgtccactagatgtctcaggacagaaccctaagacatctatttatacaaaacgaaataaaatgatagtagacgggccaataacctaatcgctcggcccatagagagataatgggccgacatgggcttcgtgatccgatggaggtccatgccgcttccaaacactttgtcttctcctcctcttctcttccttttgctcagcttgtctggttgagtgccgaattgagtagactgtgaagacgtgatcgagtgtctggtcgagtgatggtgatggtagtgagtgatgatactcgaccagggggtcgagtaacggggtagagtgaatggtcgagtgtggtaaggtggtgtggcgaagtgatactcgaccagggggtcgagtaatgtcatcgagtggcctgagctgaggatactcgaccagggggtcaagtaggtgggaagaatggctccaaagttactcgacttgggggtcgagtatggtgctggatgcacacgacctggtggtcgagtatgtcttctagttctggctcgtttcttccaatttgctcgcaaacagctccaaatcacctgaaaacaactcagaaatgcaatatgtatgcaaagctatcctaatcatgcaaagtatgcaagaatgatgagaaatgatataaaacagtgatgaatgatacgaaactggactcaaaacgatgatgaatggacactgaaaacatgcaaattataaacatatcaagcactgaataaggtcgagtgactggtcgagtaacagatagtaaatgaaacaaagatattcgagtgcacagtctgttgtcagacaacagggtggtcgagtatcaggtcgagtaacaagaaagaattgtagaaactaagcaacatatgacaaga

SEQ ID NO: 4492 - DNA, 3005 bp, Arabidopsis thaliana landsberg
ttgattttatagaaccagaaaccaaatcaaaatcaaattaatttcggcttttgttggaagacacttttcataacattgatacatgtcaatatgtcatagaactgaaagatcatgccttgcctacttgaggacgctattaaacttggacaaagataatgaaaggtctttatgggctctctatctcaaggcccatataagccctagaaaaaggttgttttttttagcgaagatgatacaactatcaaaataacatcaaccaaacacacacacacatacacattctagtacaccattctactctcaaatgtctttttgtcttctttcaggtgtttcatagagccttttcttcctaaaccaactcaaacactgaaaattacacatctttttcatttttttattcatcatggtgaagctggaacttgatgatctgcagcaccagaaactggagatgaagcagcttcctctttcgaaatggcaacgtagtttgtaggagcagccggcctgttgagagtctcccttctccctgcttcttttgcagtagacctgcttccattctggtttgcattcaaagataaacgccggttatgtgttccattggctcctccgttgttagctcgtggccccaccgttttcttagcactgaccggtcttgcagggcttggcctggtgctaaaggcagattcttgctctacgtgtggctgttcttgaaccttcttttgttcctgctcattaagacaaagaggagtttagggagtgactgacattttcgccttatcattaatcgagtagaaatgatgaacttaccctcagcctccgtttctcctcttctcgttcttgcctaagcataccgtactcgtctagcatagctagcagaggaacaccatcgtaggcaaaggacatgctgtgttcttcttcccaagcccgggtcttggcaactaatgtgtcaaccatggctttatacataacaaaagatccaatctttataagatgtgaatacatgagagaagtttgcaagtatatgatatatcttagttattctacacataccaggaatcttgctaaccagaatccgagctttctcagctctcttgagattcaagtgtgcacctctgcttgcgctgtacctgttctgatcctgctctcagaaaacaaaaccatgaaaaagctcaagatccaatttaaagttaatgtcttatgatgtatcatagtgagtgactgagagaaattatgcattacccgattgtagtcttctagccagctctcttcctcacaagctgacatccatttctcgactcggtccaatatatcttttctactaaatgcttcttccttagcctttgatatctggctatccatgtctgccaataattcagtaggctcaacgtttccagaatcaatcagcgacatgattctctcacgagcagattccgggttaacttctacatgggcacgagcatatatctcttcaagctcagattgcttcttgaacgcaatttctttcattcggctagctttcagctggtcaagcctatcaacttccacctcagccttcacaaattttacatgaatattagcaagcagtaactggtttctaagagaggacataggaagattgatcaatgcaatataaattacctgctcaatcaaatcacgtgcaagagcacctggcacagtgacctcatcgactgaagatgaaatgttacaggtaacatgatcaaaaagctctctttcctcatcaggagtatccatcagattccacaggtcaattagctgagtagccagctcttgaagctgcaacaacaaaagacaaagattcattaatccaaaagcgtaatttatcagaaacaattttaagcaaattaacgatgcagagtgtctttaccttttgaagtctttgcttcttatcatctttaagagtcaagacggttttagccaaccttgaaagagtctcattgctaatgctcttagactggacactggtatcttcatctaagctcggatgaacttcggtgacggtgcttaagaaatccaaaccaagaacagcacatagatcatgaacagtactcacaaactctaacaccttgcgcagcctgtcactctgccaaaacagagcagttggtaaggaaaacataagcaacatatcatatacggagatttctaactcaatgtttaccttctctttctggagctcttggagttggctctggaaatcgtctaatttcttcagtgacaaatcagactcatcgactataggaacctcattgctcaaacctccagcaatatctccacatatcttctgaatctgtgattgtacatcagagaactctcggactctctcctctttctgttgccacagttgttcaagagccggtgctattgcagcaagttgttctttaatcgttcctgaagacttatccggctgcaacaacagaagaatcaagacttacatcacttaaaaaacaaaaaacacttcacttagattttctactactaaacttgagacaaaacttacaatgccaactaagcttttgtctccaagagacattgtgaggctggaaagttcagcattagcatctgacaaggtttgaagaagctcagctcgggatttcgcagcctgctcgacttttctcttgtaaacgtcaagacactcttgctctatctgaagaagcagtttgtctcgttcatcatcactctcaccaacttcatcccagatttcctttagtaaaaataagttggcgttacacaagattgagagtaaagccctaatacttaggtggagatggtagcaagatttacctgcaacttctcaagtaaggtaccacaagtaatttccccaagatgaggactttcagtattctgaactgccattgttgcggaatcagaaggtttcctgcagaaaagatcaaaaacaaaaaccaatcagagactaaaactaaactaagaatgaattatacatcgctcaaatcagatctttcttttgcatcagattataatgaaactgaact

SEQ ID NO: 4493 - DNA, 2734 bp, Arabidopsis thaliana landsberg
cgaagtggataggcttgatcaactgaaatctagcagaatgaagggaattggatttaaaaaggcattcaaagtttgtggagatatatgctcgtgctcacatagaaataaaaccagaggttgttcgtgagaggatcatgtcgttgattgatgctgggaatactgaacctactgagttactggctgacatggatagccagatcgcaaaggccaaggaagaagcctttagtagaaaagaaattttagaccgtgtagagaaatggatgtcagcttgtgaggaagagagctggctcgaagattacaatcgagtatgctaacattggctatgttaataaacacattacttattaagcatagagttcaattgatgattcttttgggttttttgttctggaaaaacaggatcagaacaggtatagtgcaagccgaggtgcgcatttgaatctcaagagagctgagaaagctcggattctggtcagcaagattactggtaagaacttccaaaagtctctcttagttattactacacatagaattaaactgagactgaagaatatatcatactttgtttgtgcaagctatggttgacacgttgattgctaaaacccgggcatgggaagaggagaacagtatgtcctttgagtacgatggagttcctttactcgccatgctagatgaatacactatgcttaggcaagaacgagaagatgagaagcggaggctgaaagtaagttgtttcatcctgtgttaaaccgattgttgaaactaacttcttttaaaataatcttgccttttcattaacaggaacagaagaagcagcaagaacagccacacacagatcaagaatccgcctttgggtctaaaccaagccctgcaagacccgttagtgccaagaaaccggtgggaacacgagtcaatggaggagggctcaacgaaactcctatgaggcgtttgtctatgaactcaaaccagaacggaagcaagtccaagagagacagtctgaacaagatagcttcaccttcgaacattgtagccaacacaaaagatgatgctgcatctccagtctctcgtgctgacccagtgatggcttcaccgtgacaatatcaaaagaaagagagttataatgcttacttacacttttgttagttgctaatagtgctgtttaagaaacaaacacttagaaacaaagacaatgagagtagaatgttacttagatgtttctgtttctgtattcattcactcaaatttgtttggtacttgttagcatgactaatgtgaagtgaccggtttagtgaatgaaagtcaaggttctaattggaattacgaaataatatttgggcaaaattgtaatatactgaaagatcttttgggcatgatttaaaagtttaaaaagtttccaagaaggtttgggattttagaggtcctttctgcgacgtcgtttctagtttgcaatcagaagcgcgttaaatacaggaaaatttcttgagctgttttgtcttaacaaatcaatcggagaaaaagctacggagctcgagagaagagagaatctatgtcgaacccaaacgaaccagccagggctcttctgccttacctgcaacgtgccgatgagctgcagaagcatgaaccacttgttgcttattactgtgagtttcgttttcttatctatatctaacctagatgatcgcctcctgcgattgtgtgtattcatggaattttgtgattgattaggtcggctatatgcaatggaacgaggattgaagattccgcagagcgagagaactaagaccaccaattcgattctcatgtctctcattaatcaactcgaaaaggtattacctttgaagttttaaattgtgagtttttctgatttatttcagcttgtttgattttttacttgtttagatttgaaaggaccggttcttagtaattctcatgatgtgtttgactttgattattatatgttgttacttgttacaaagctggagtttttttatttatgtttgtgtttggtaaggaggcttatatctaaatttagcttaggtttgttcatgtgattgacagagttcatgaggcaatttcttgattagttccagtttcttatggcgatttcttttttgtgtaactccaggataaaaaatcattgactctgtccccagatgacaatatgcatgtggaggggtttgcacttagtgtctttgctaaggcagacaagcaggatcgtgcaggaagagcagacttgtaagaattttttttgctcttatgtttgattatatatagaatggcattttttttgccctcaagtttctaataattttagggtcaccgtcaacactagctcaatgagtcgaattagcatgattctatagattcattgtctgtctagtattattgtgtttgccaatactggaaatagcgtgcaagtacacatacatttacaatgagtatgcatgtccggcagacatgtttttaggtgataccttcctctaccatcgtttaagatagcgggttaagtaattagttggatgcatccaaggcttatctcgacctgttgtcttctacctgttctgcttttgcgaaatacctgtatctccagcattgatgtgtttctatgcatggtaggatactgatattagttcgattactgtctgtatccttattttataagtgctcacctgcattcatttgactcaattacataggcttccgagttgcgatggattatccaaattaaacttgt

SEQ ID NO: 4494 - DNA, 1988 bp, Arabidopsis thaliana landsberg
tgtattacggttgctacaaggatttcggacccgacccacccgcttggatacccgacccgtacgaattgtttgtttaccataaattgatttttctccgtttgtttcagattcttatgattttggctttgttgtatattataggaaggttgcttctttaactaacgtaggcaagttattagaaaagcgaggcaaagagtttttaggtggaaattacaagaatccagtttcgagtttctccagttttcaagagttctctgtatcaaatcctgaggtaactaacattggtgttattattattgttatgccttaagttttcgtgattatgtgttttgtaattctatggtgattatcttgatcaggtgtattggaaaactgtattggatgagttaaacatattgttctctgtacctcctaagtgtatattagagaaggatacttctggagataatcctggaggtaaatggcttcctggagcttacttgaatcctgcaagaaattgtttgactaatggtttcaagagaagattggatgatattgtgattcgatggcgtgatgaaggaagcgatgatcttcctgtgaataccatgacacttttggagttaagatcgcaggtctggtatgaaattcccatccttgtggcctttctttggtgaataacgctttaaagttgtttcctttactgactattgttatctattgtgtaggttagctgcacatgctcttagtgctttgggtttggaggaagagtcagcaatcgcggttgatatgccaatgaatgttgagtctgtgatcatataccttgctattgttttagctggccacgtagttgtttcaatagctgatagtttctctccccgtgaaatatcaacacggcttaaaatatcaaaagcaaaagccatttttactcaggtaactttctcatgattctttgatggatggaacatgaaggtgtaagctttgctgttaagttatactagagtgtgatgcgacggttttagtaaagagctgattgctttttgcctgttgaatttagttcaagttgtggccaaattctgaacggttgttatgtgatctctggattttaaaacatagccctagtttaaagcctagatggaaaaagcaattttgtttgatttattggaatggtcactctataaaagccagcatataacatggcttctactcattttcttgaattattgtaatcgtcactgtataaagcgacttttcttgtttgcaggatgtgattattcgtggtgataaaagtattcctctctataggtgaagttctagtaatccgacagggctggtttgatctcaagatgcaggctgtaacaatggtctcacattatatgttccattctgcagaagagtcgttgatgcagaagcacctctggcaattgttgtcccagctagaggctctagctgcagaatgaagctgcgcgagaaggatttgtcttggaacaactttttgggaaacgcaagaaatttgaggtacacccagtgaattcaatactgttgtatcaaacagagttatgaaatgtaattacaacgattttgtttgagaaacacttagagcttgctattccaaattcccggagaatgatatatgctatacttgtttcttcagaggcgtggaatatgttgctgcagagaaaccagcaggagcttacacgaacatccttttctcatcaggaaccactggtattccaatgaaaagaaaaaggcatcatggtatgtagatgaggatgtcgtgttgaattaccaagttttggttttctggtgtaggtgagccaaaggctattccatggacgaacatttctcctctgaaatctgctgctgatgcttggtgccatttggatgttcagcggggggatgttgttgcttggccgaccaaccttgggtggatgatgggaccgtggcttgtttatgcttccttgatcaatggggcttgcatgggattatacaatggatcacctcttggtcct

SEQ ID NO: 4495 - DNA, 885 bp, Arabidopsis thaliana landsberg
tcataaatttccgcaaccttcaatatctctaaaaccttcaccggacttgatgataggcaagtatgaatattctccggaggtttgcacgggcacatgtctccacatctatccgtagctttgtggaggagtccctgaaacaacaaatgaaacgttatgtatagttgtttctcacgactgaaaaatgtgtcacatgatgtcttaaaagggtttgatttgtacttggaagacgagggcttttagatttggacaattcttgagcagattcggcaatgaatcccatccaacttttgtgttactttcaatggttaaacgagtcaggttgttgaatatcggtattgctttgcagcagaatgtaagtacctgaaacaaaaccaaatcaattattggaacatcatcactcatttgcaatcattgactcgaacccttaagcaataagccactaacaaaaccattgtttgtcttctttaattttctaagtagctaaaaatactaaaagagtgtgagaagagatgggattaatatacagacctcaacagtgctcgcatataagtaaagaacctgaacattgcgtattcccgtaagtagatcagttgcatcaccgaccatagcatattctataagtgggaaggggaagccaaaagggacttctattggattttctgactcttcatatcccactcgaagaccgagcctagcttcaacaagcgaatcgaaattcactttttcatactttaatgcaacagtatcggtatattcaaagtagacaagagccggattatcaaatgtgacactcgggtgggggtttgttccaaccctcctcggtaaagaacgttagtctcttgagggttgggatagacgcagagcaagactcccaaaaattccaca

SEQ ID NO: 4496 - DNA, 1079 bp, Arabidopsis thaliana landsberg
tttcttctctctatgcacctctactctacaagtaaagagttttaaaactccgagttttgtctctttgcttttaccataaaagtaagtagtaaaaccccgagtccgttgttgttactgtttgcaggcacatcgatgggcttagcgaaggaaaatctctcatattttattttgtgacccgagagagcaagactgccaatgggttgatggtcaggactatggttactagttttttgaaaagcattaaacagaccaactcatttctttggttagtcaataaaacccttacttgcacgttacattacataaattcagtctttccacaagtatttaaccaaagtgcctaacaaacaagccccttggtactactagtggttctttactatgtttgttctattacttgcagggatagattgtacgtaagcccgcatgcgattactacttgtgcagacactactcagagcatgtactgccaattgctttgtgggcttcttgaaagagataatgttgctcgcctcggtgcaccctttgcttcatcattcctcaaagtaatcaagttcttggaagatcattggcctgagttatgctcaaacataaggactggacgtctcagcgactggatcacagtcccacaatgtatttcagggattgataagttcctcactgcaccaaatccggaactagcgagcctgatcgagcaagaatgcagtaaaacatcatgggaggcaatattgaagagactatggccaaaagcaaaatgcatcgaatccatcattacaggcaccatggcacagtacattccattgctggaattctatagcggtggtctccctttgacttcatcgttttacggcagctctgaatgtttcatgggtgtcaactttaatcctctgtgtaagcctagtgaagtgtcgtacaccatcattccatgtatggggtacttcgagttcttagaggtcgagaaagaccatcaagaagctggtcatgatcccacagagaaacctgtggttgtcgatcttgtcgatgttaaaatcggccatgattatgaacctgttgtcacaacgttttcaggtaaactcttt

SEQ ID NO: 4497 - DNA, 815 bp, Arabidopsis thaliana landsberg
acgattcgattaacagggaaatttctgagaggtttcgagtttcatacaaaggcaaggaagatatacacactaggttaatgaagagatataaagacataccttcatggtggttttactcaatgttggctgcgacactacttatctctcttgcgttatgtgttttcttgaacgatgaggttcaaatgccttggtggggacttgtgttcgcaagcgcgatggctttcgtcttcacactcccgataagcatcataaccgcaacaactaaccaagtaagcaatattgaccatatattaatccatggttggtttatattgcaaagaacgagctaatcattgtttacttgttttgcagacaccgggattgaatataataacagagtacgcaatgggactcatttacccgggacgacctatcgcaaacgtatgcttcaaagtctatggatacatgagtatggcacaagcagtctctttcctaaatgacttcaaacttggtcattacatgaagatcccacctagatccatgttcttggttcaattcatcggtacaattcttgccggaacaatcaacataacggtcgcatggtggcaattaaactctatcaaaaacatatgtcaagaggaacttctacctcccaacagtccatggacatgtccgggtgaccgtgttttcttcgatgcatcggtcatttggggattggtcggaccaaaacggatatttggttctcagggaaactatgcggccatgaactggtttttcctcggaggtgcgttaggaccagtcatagtgtggtcattgcacaaagcgttcccaaaacg

SEQ ID NO: 4498 - DNA, 1833 bp, Arabidopsis thaliana landsberg
caaaagctgattggttcccacaatgaacttaggaagaatcctcttgagtctgttcgccaaaatcttttaaatttccttgtataagacattgcaacaggatatgggtctatagtcctttatttcccgtgcttccttcttcttggggattagagctaagatagttgagtttacaccctttggcaaaaaaacctttgcaaaaaaagactgaattgctatgataacctcatcaccaataatctcccatgaagctttatagaactcacttgtataaccgtccggtcccggggatttgtcctttggcattgagaatatgacttttttaatttcttcccctgttaccacccttgtaagcaacctatgatcatcctctgaacaacgaaaaggtagcaaatcttctagctcctctacacacatcccttcataatctgcagggattgtttgtaaaaaatcctgaaaatagttcactgcctccgtttggatatcttgttgactagttacaaccaacccgtcacgtgtaactatttctcttatggaattcactgcctctcgagtagttattgctcgatgaaatgttttattgtttctgtccccaacatctaaccagtgtagtttagacctctgcttcaaaaatttctcctcgattttcaaattttaattcaactagtgttctgctcatgaaattttcgattagcatgtaactatgttgacacaaattgatagacaaatccattttacatatccactgttttacacgatgtgacgcaacacctgtttaacacttgagtgagaatttcttgatgggagaatctccttgcaaagccaatactctatccacaaaatctataaagctctgtcgatttcctttccttttcccgtttaccctcttggggatgaagaaaatcagagtcatcaaactcgagataagggacaaaagcaatgagatagcgccacctcttggagagaatagaagtcaaagcagcctcctttgtggtaagtaaggacaatatatgaccaaggagatcatctggtagactgctaacaagatccaccatctctgcagtagaaagtacatttaacacaaactcctaagcaatccgaacatgaacataaattacaaaaaagaagttgcacttggggatcttatacagacgaagatctgtaaacactgatgcttaaactttgagtcaaattatagatccccaaggaaaattagaaaatatgaattcgcttaggcatttaccgctgtacattcgcggagtcctacacatatttaacttgtagagacaggggtcaaaggttgggagggaagcaaagaaggcgaaaaagtagatttagggtttgcccaaagtgaaggagtcacggagaaaaggttttaattttccttttacgtgcccctacatagcgttttataaagttttaagttataataaaattcgtttagaagtttagatgagataataagatatatcatgattgatgatgattaaaaaatcaaagctaaacacaaaaattagcacaaatgacccaattataaatgatacttctatagaaattatttttaaaaaattattatgcagattgaaattgtaacctctgatttcagttgtataacttgtgttgttttttgggctccctaaagttagatcaagttggtatctctgatatgttgtcattatagtcaagatctaggtagtttttttcttgctaattaacctttaaattaattagtcagtttgagtaaagcattgttaaagacatcaacaagaataaatcaaagcaaattacttgtgagaatattatcaaaacaatccaattgctagaaattcaagagtg

SEQ ID NO: 4499 - DNA, 3795 bp, Arabidopsis thaliana landsberg
ctcccaaataaagcaaaacctagatccgacattgaaggaaaaaccttttagatccatctctgaaaaaaacccaaccatgaagagagatcatcatcatcatcatcaagataagaagactatgatgatgaatgaagaagacgacggtaacggcatggatgagcttctagctgttcttggttacaaggttaggtcatcggaaatggctgatgttgctcagaaactcgagcagcttgaagttatgatgtctaatgttcaagaagacgatctttctcaactcgctactgagactgttcactataatccggcggagctttacacgtggcttgattctatgctcaccgaccttaatcctccgtcgtctaacgccgagtacgatcttaaagctattcccggtgacgcgattctcaatcagttcgctatcgattcggcttcttcgtctaaccaaggcggcggaggagatacgtatactacaaacaagcggttgaaatgctcaaacggcgtcgtggaaaccaccacagcgacggctgagtcaactcggcatgttgtcctggttgactcgcaggagaacggtgtgcgtctcgttcacgcgcttttggcttgcgctgaagctgctcagaaggagaatctgactgtggcggaagctctggtgaagcaaatcggattcttagctgtttctcaaatcggagctatgagaaaagtcgctacttacttcgccgaagctctcgcgcggcggatttaccgtctctctccgtcgcagagtccaatcgaccactctctctccgatactcttcagatgcacttctacgagacttgtccttatctcaagttcgctcacttcacggcgaatcaagcgattctcgaagcttttcaagggaagaaaagagttcatgtcattgatttctctatgagtcaaggtcttcaatggccggcgcttatgcaggctcttgcgcttcgacctggtggtcctcctgttttccggttaaccggaattggtccaccggcaccggataatttcgattatcttcatgaagttgggtgtaagctggctcatttagctgaggcgattcacgttgagtttgagtacagaggatttgtggctaacactttagctgatcttgatgcttcgatgcttgagcttagaccaagtgagattgaatctgttgcggttaactctgttttcgagcttcacaagctcttgggacgacctggtgcgatcgataaggttcttggtgtggtgaatcagattaaaccggagattttcactgtggttgagcaggaatcgaaccataatagtccgattttcttagatcggtttactgagtcgttgcattattactcgacgttgtttgactcgttggaaggtgtaccgagtggtcaagacaaggtcatgtcggaggtttacttgggtaaacagatctgcaacgttgtggcttgtgatggacctgaccgagttgagcgtcatgaaacgttgagtcagtggaggaaccggttcgggtctgctgggtttgcggctgcacatattggttcgaatgcgtttaagcaagcgagtatgcttttggctctgttcaacggcggtgagggttatcgggtggaggagagtgacggctgtctcatgttgggttggcacacacgaccgctcatagccacctcggcttggaaactctccaccaattagatggtggctcaatgaattgatctgttgaaccggttatgatgatagatttccgaccgaagccaaactaaatcctactgtttttccctttgtcacttgttaagatcttatctttcattatattaggtaattgaaaaattttaatctcgctttggagagttttttttttttgcatgtgacattggagggtaaattggataggcagaaatagaagtatgtagttaccaagtatgtgcaattggttgaaataaaatcatcttgagtgtcaccatctataaaattcattgtaatgactaatgagcctgattaaactgtctcttatgataatgtgctgattctcatgaatatgctcttttaatgtgcatggtattataggtggaccagattattttaacaatgctaagtcgttttcaatttgaaagaagaaaagtaaacaaaagaaaccgaaaagatacaaatgtccacctttaatacatgtatctgaaagatatagtaggcgattatatatgtcacctaaaaaaaaaaagagtaggcggattatattgttcaacattaactgcacataaataattccacatatgtaaaaatgggagatgttgatgttcttcgtattttttttttttgacagcaattgaagttggtttacgaacttgtttaagagataaaaaaaacattcgacagtggtggtagtagactagacttcactcgtgaccctttggtattatatagttgagtgactgtgacatttgatcctttgtgatgtataaaaagggcacgagggcggtttgatggttgatcatagtcaacttttgctaccccacatatatgggccgaataagtgctaatgggccttattaaaatcccaaagcaagtagaaatggttcagaaaaaaagatagcaactttgaggtgggagttggtcaattggcaaaacagagggttctaaaatatagggagaggaggagacgtgagagtctttaggcgaaaaaatatatttgcatgtttacgtgtgctatgtgtttgactttgtttcagaatgatggatattttggattttggttaatcaatctctctcccctcgtgaaaaactttctttatctattttgatgaaatttttattaggagatggataatgagagtcatgagactaaatgactaacatacatccactttatatcttacacaaaatcgtataactaacacacttattttattacgaacacgcataataacatcacagacagagatggtatacataagcatacaatacaattgcttaacaagaccgccattattattagcataacatgtaaaggcggatgataaaggcacttacgagacaagtacaaaagacacatgcatgaggatgatttacgacgatgaccatggagggttattaagctttgttctggcccttgaggatgtggtcatccatatcagcaactaagctcttgacaaacttcatgtagttgatgggttcgggggagtcttcgttgcgattctcccatatcagagtgactttgcagacgcagccttcgttcgacttgggaatgaactgtaagataacctcatacttcttgtacttctccatcacatgaccctctagtcctctgaacgtcaacgccatcttctcgtcgtctatctctcttttctccttgatgacttccggcttcccatcttcatacacacacacacatttttagtccacattagaatatatagatatcatccaatcctcgcgtgttaccaaacacagaaagagatagagtaaagtatggaccaagtgtgtagttccaggatttgatggagccgtgggagtcccagtcgccatcgtggacggtgacgccttggacatggtggccgatggcgtccgggaagagattgttttggctcctccatcgcctgtagtgtttctccgccgaccctttcagcggtacttccgccacgtattttcctgacatcgccatttcttgattgattgttttcttttgaaatgtgtcaagtgttttattcgatggaaaaacccaagtgttgcgcttcctttatatacaaattaagactcaccacaacactaacaagaaacgaaattatggcgataaagatttaattataggtggtttatat

SEQ ID NO: 4500 - DNA, 1828 bp, Arabidopsis thaliana landsberg
aaatgaagagagatcatcaccaattccaaggtcgattgttttacctcgggacttcttcttcttcatcatcaatctctaaagataagatgatgatggtgaaaaaagaagaagacggtggaggtaacatggacgacgagcttctcgctgttttaggttacaaagttaggtcatcggagatggcggaggttgctttgaaactcgaacaattagagacgatgatgagtaatgttcaagaagatggtttatctcatctcgcgacggatactgttcattataatccgtcggagctttattcttggcttgataatatgctctctgagcttaatcctcctcctcttccggcgagttctaacggtttagatccggttcttccttcgccggagatttgtggttttccggcttcggattatgaccttaaagtcattcccggaaacgcgatttatcagtttccggcgattgattcttcgtcttcgtcgaataatcagaacaagcgtttgaaatcatgctcgagtcctgattctatggttacatcgacttcgacgggtacgcagattggtggagtcataggaacgacggtgacgacaaccaccacgacaacgacggcggcggctgagtcaactcgttctgttatcctggttgactcgcaagagaacggtgttcgtttagtccacgcgcttatggcttgtgcagaagcaatccagcagaacaatttgactctagcggaagctcttgtgaagcaaatcggatgcttagctgtgtctcaagccggagctatgagaaaagtggctacttacttcgccgaagctttagcgcggcggatctaccgtctctctccgccgcagaatcagatcgatcattgtctctccgatactcttcagatgcacttttacgagacttgtccttatcttaaattcgctcacttcacggcgaaccaagcgattctcgaagcttttgaaggtaagaagagagtacacgtcattgatttctcgatgaaccaaggtcttcaatggcctgcgcttatgcaagctcttgcgcttcgagaaggaggtcctccaactttccggttaaccggaattggtccaccggcgccggataattctgatcatcttcatgaagttggttgtaaattagctcagcttgcggaggcgattcacgtagaattcgaataccgtggattcgttgctaacagcttagccgatctcgatgcttcgatgcttgagcttagaccgagcgatacggaagctgttgcggtgaactctgtttttgagctacataagctcttaggtcgtcccggtgggatagagaaagttctcggcgttgtgaaacagattaaaccggtgattttcacggtggttgagcaagaatcgaaccataacggaccggttttcttagaccggtttactgaatcgttacattattattcgactctgtttgattcgttggaaggagttccgaatagtcaagacaaagtcatgtctgaagtttacttagggaaacagatttgtaatctggtggcttgtgaaggtcctgacagagtcgagagacacgaaacgttgagtcaatggggaaaccggtttggttcgtccggtttagcgccggcacatcttgggtctaacgcgtttaagcaagcgagtatgcttttgtctgtgtttaatagtggccaaggttatcgtgtggaggagagtaatgaatgtttgatgttgggttggcacactcgcccactcattaccacctccgcttggaaactctcgacgacggcacactgagtttgactcgaagcatacgacggtggtggagtcgagtcgagtgaatttgagattgctgagag

SEQ ID NO: 4501 - DNA, 788 bp, Arabidopsis thaliana landsberg
agatgatacataggcttccatgaccgccattattattagtttaacttgtataaagggggaaagaggcggatgataagtcacgtacgtacgtaaagatacacaaaagatacacacacataaagatgaagaccattcgacgatgaccatagaggggattcaagctttgttctggccattgaggacgtggtcgtccatgtcagcaactaagctcttgacaaacttcatgtagttgatgggttcgggggagttttcgttgcgcttttcccatatgagagtgattttgcagacgcagccttccttcgacttgggaatgaactggtagataacctcatacttcttgtacttctccatcgcttgaccctctagccctttcaacgtcaacgccatcttttcgtcgtctatctctctcttctccttgaagacttccggctttccatcttcatacaaacacacacacacacaatgctagaccaaattagccgatcgtcaatcctcgtattaccaaacatgattaaagagagtggacacccggtgtcggtagccctactttgaaactcttggaggagagtttgagaaggttcgaggcctagctaccaacatctgggagaggacttatctaccttattccttggccccaaaaaatatatggaccaaaaatctaaaactaccaaaatactacaaaaaaagagagaaggtaaagtagagaccgcatgtgatattccatgatctgatggagccgtgggagtcccagtcaccgtcatgcatagtgcaaccttggatgtggtggc

SEQ ID NO: 4502 - DNA, 946 bp, Arabidopsis thaliana landsberg
aggaaagagccagtggatttatatgaagcccatgtaactaaggttttagcaagtagactgatggacttctcatgttgggcttcatataattcactacctctttccttttctttactttatttgcaccttaataaagctctaatgggctattacatttttaatttcattcatttcatatattttctatctagctttgattcaatcataaaatatataaaaaaaagagttgcctcttcacaactctctatgttgctttacattgatgttccaaatacaaaattatatgaatctctactaggtaaaactcttgttacatgggctaatggacttctcatcttggacttcatatgaatccaaaaataaaaagtccacaaagagttcactcacaaagctataggaagctccataaccatccctctggtccgcgtgatgaggggactcagtgtttgtcctcaagatttaaggcttgccttcttctttctcctaccaagaactattgtttttttctgtaactagtcgtctaagaaactaaggaggtgcggtcattattgaacttgaatatgagtcatggacaatggctcctcggtttctaacggaatactcgtttataaatcatggtgacctgtttgattaaaaaaacaaaagccatgaactggatgtgacaacaagtgagattacatttgaaactttgctataaacatgattggattatggatatgtggtgtatggatcttcaatgaggaagctgagagttctttatcttactctactaagtagtcgaatattaatagctcaatggttaaatatctcaagtaaagtgcaaagatcgcgggtttcaatggttattaaaaggaaaccatattaaatggtttggtatttggtctgaggttttaagtccaaaccctttagtaattaacatatataccaaattttggtttaatttttg

SEQ ID NO: 4503 - DNA, 1282 bp, Arabidopsis thaliana landsberg
atggaattggagtttatacgttttatacagcagatgtgtatgctggtgaatggtctaatgggcagtgccatggttgtggtgtatatacctctgaggatggaagtagatatgacggagagttcaagtggggtgtcaaacatggccttggtagttaccatttcaggtcagcattgttcttttttactctgcatagtcatttgagtttctggaatatggttgtgctttgacctgtaatggtggtgcattagatccctgtatatgttgctcgtctaagtgtgtttgctatcttgagttccattgtttttgaagggtcgtgtagttgtctttctctttattgttgcccttgttcacttgggtgtgtgaatctggaggacctctgaaaggttttcaatttcgatttctgacatcagatggataactgggttttgtttcctgcttcttgtggttatcctcaccttataagctagtctagtgaacatcaaagtttaggcttttgtgttactctcagttagcattgatcttaagcaattgcatgaagcactggtggtccagtatgctttagcggtaccatggctttaaaactacatttaacttggagttatgctgctgttgcagaaatggtgatgcgtatgctggggagtattttgcagacaagatgcatggttttggagtgtatcactttgcgaacgggcataagtatgaaggagcttggcacgagggaagaaggcaagggcttggtatgtatactttcaggaatggtgatacacaagccggtcattgggaagacggtgtactcagttgtcctaccgagcagactatccgtcctggatcatcttttaccataagccattccaaagttgttgatgctgttgaggtaaaagttaactagtagtttatctttagtactgcaaacaccatatatgtattaaactaagcttgttctctctttctccttcagcaagcaaggaaagcagctgagaaagcacatgaagttgtgaaagtggaagagaggatcaagagagcggtgatggctgcaaatagagcagcgaatgcagctagagtagcagccgtgaaggctgtccaatcccagacctttcacaggaatgatggcgatcttgaaaccaattgttgagcataggttagaagagatcttccttaacaggttttcttgttcctttatgagcaaagctagtttgaaactgtagataataaactagagatgatctttgtatatcaacaagaaaaaaattgggtctgcttcatagaatgcaactgacataca

SEQ ID NO: 4504 - DNA, 3695 bp, Arabidopsis thaliana landsberg
aacgagtcgtaagtttacgatattaataagtttcatattttttttattttttaggacttgaccaaaagtataccacatgacagtgttttattttctattcattaattttgtattaaaattatataatttaaattttcgatgcttttagatttaactcgtagaacatacgtagggtttagggtttagggtttagggtttagagttaatttagtaactttgtattacaaatacacatttagatgtgtcaaaaaaaattagcatttattttgatatactataatattgaattttattgagatgtctcatagtaatattgatccaaactcatcccgccatataaacctgtctccttcttccagccgtggggtggtcttgtccaacagcttgttctctgatcatcatgttgtcgccggtgggatggtgctgatagttgggggtgatccgcaatgtcctgccattcagaagcgtctctctttgctaatcgaagattatcgtcccatggaatgcaccttttctgaaaagttagaatatttcgactctttcataagcgccaaaagatccatagcgggagttgttgaagatagtttgttaagttgttgctgtactatgatggatcgaaccatcggtatatgccaagtaaggctgcatgggtaattcgagatgagtcgggccaatttgtaggtgcaggtcaagcgacagggaaccacacttctaatgctctagaaagcgagtttcaagctcttcttatcgcaatgcaaagctgttggagccacggtcatagaaaaatctggtttgaatgaaataccagggaggggatggaaatcctcaaataggaaaaaatcacgttttgatacctttaattggatacgagatgttcaagcttggaagcaacggtttcaggcaatgcagattcacatggatcaaccgaaaacagaacaaatcagcggatattcttgccaagagtcacttaccccagaatgaacaatttaaattttatgattacattccgattgtaatttcttcagccttacagctggaaaactcttgatcataataacaatggcaaagaagatgttaaaaaaaaaaaaaaaacctgtctcatctaaatccatcccgtcttaaaaacatgtctcatctaaacctatctcacaataataacccatcccataataactaaacatcattttgttcttttttttttaataatatttttatttaaaatatacgtaattcgagtcaatttaaaaatttattctaactgattaaaacttattgaaagacaaactaaatattacactttgattttgaactatcattaatttatagtaagtatcttctgtttttgtagaaattaggcaagatccaactcacccgattggattccttaaaatgtatttctaaaatgttaatatagatcattagaaactatctccaaacaaccaaaaaatcttgctttcactactactcgtcatggaggttaattgtagatccactttgattttagaaagcttttgtggattttggattctcagtacttgcttgagccatcaaccttggtttctcccacaattcgcttcctcctaatcggatcggagaaaaagaggataaatctgagttcgtctggttgctaggaacgagattggaagacggacacgtcggttgtcgaatagctactccttttcggaggtttgtactggattggtgggtcagagtgttggtcgataattgagtttctgatttaaaattttatgtattaaggtagttatttgtcaagagacacaagtaggaagagacacaagtatgaagagacacaactcattctgttgttgagtctacttgtttcctatatatactcattgtatcgtcatgtaaataactaataagtttcaggttcattaaaagttttctattttcgttcttgtcttcttcacaagagaagagatatttatctcttactcaattttttctttttctctcaatattccaacatggtatcaaagcttatcttggtcttggagcatgtccaagtaaaaaatggataagaagaattccgctgtgagaagaagagaaagaaggagacaacaaatcaacggtgagaaaccgaagagaaaaaaagaaaaataaaaagtagaagaagaagaaacaaaaaaaggaagaaaagaataggagagagtacaatcaattacaaacagtttcacatatcgtaccttcaagaggaaggctccaaaaagggatgaagaagataggaaaacttctctaaaggcaagggagaaatggatgaggatttggagttgtggaaggagaattctgaaactttgttcaacaatgtcttggtgaagttcaagcatgcaaagaagcatcacttgatgaagttgagaatccaactgaaacaagacggagaaggaagtcgcctgttgtaagaaacagagcaaggcttatgataagaatgaaactatgaatctctctttcttatccttaaaatcccattacaatgaatcaaaaccctaaattgataagcttggagttacagttctccactcttatctccaaagaacagagcacacaaagctttaatcctctttacacatcaatgatcacgcaggatacttttctctctactctctcttactatttataagtttcttcacacgtgactccaatctctcacgtgtgttctcacgtgccaactcattactccagcttcttcccatgaacgtatcaatactccccccatttagacaagcttgtcctcaagcttgaaaaggaatgaagaatctctgtgataggttctagtaccaccatgatggcttcccttatgtatccgcctatggttcctctactaattcatcccaagctgacattgtcccgttgtacgttgtctctaacatctcgagtataccacattgacgaactgcaagcttttgacaattcttgtgaagaatgtggtgaccccttctctgaagttaggtaggtctccaagcaccgattgacaacctcagtctgtccatcactttgaggatgatacgcactagagaaattttaactccacgccttgcaaagcaaacaattcagtccaaaaattactgagaaacacagtatctctgtcactcacaatggactttggacagccatataatttaaagacgttatccatgaagacttgagcaacatacattgctgtataaggatgtgctaacgccataaagtgagctgcctttattagacgatccaccaccacgaaaataacatatttgccaaaagaaaggggaagaccatcaatgaagtccatagaaatgtcagtccaaatggtttctggaataggaagtggttgtaaaagacccggagacgttgttgtatcatacttgcattgttgacaaacactacaactgcgaatataagtctgaatatccaccgccatacccttccagtagaacaaccctttaactttctgatatgtagcatctctgcctgagtgacctccagacccagaacaatgcatccacagtaaaattgaattccttaaacccacatcattcggcaccacgatcttacttttacgtcttagcacagattgtacccatgaaaaatgcttcttagatgcaggatcagcttgtaatgccttaatcaaggagctcaactcagaatctgtctcataatgcttctgaatatcttttaaaagatcacacttcaatact

SEQ ID NO: 4505 - DNA, 1612 bp, Arabidopsis thaliana landsberg
tacaagccttcaatgactttttactagtgcacgagtggcaaaatactagtccgcaattatagcaattgtgcctctttcttttaaaactgaagggctgacggcaacctgaacacatggactggtccatccctgatgcccacctgtgaatgcagacagctgctgtgaagttagtgccacaggcaatacttttcacctgtttatccttaagtgactcaaccaatgtcggggaatttctatcatctacatctccatgaccaagtctaccatttgatccctttccccaagtgtaaacctcagtcctcgaagttaaaactgcaacatgataagcaccacaggctatctcttcgacaaaactcttgtgaagtttaccttcgacacggtttggagtttttccgtctgcatgtgagtttccaagctgaccatagacaggactgcccatagtatagacatggcctgatgttgtaagtgcaaccgttagactgtgcccacatgcaacttggcaaaaattgggttcaaccagagcagcaacacaggtaggcacaagttttggttctttattaccatgaccaagacgacccttatcaccatcaccccatgtaaagagctttccagaagagcaattacttgagcttgagctcccaaccattacttccacaactgctgctgtgtgccatacaccacaagctgcccggacagtgcgaagacctttcaaagagtctacctcccgaggaatgaaaacacttttcttgtctccgtggcctaaaacaccaaaggtcccatcaccaaaagtaaacaactgcccagcagaggtaacgactgctgtgtggtaaggtccacaagcaatagatgatacatgtatcccttccagcagaaaattaaccctcttagggacccagtgacttacttcatttccatgtccaagaacaccaaaatctcctttaccccaggtatacaaatcccctgatagggtaactgcacaactatgaaattcaccacatgctacaagctcaatatttgtggtgttgagtgcatcgatgagctttggttgttgaatattggaatcaacaccgtggccaagcctgccttcagattcctctccccaagaaaaactttccccttgttttgtcacgaggacagcgtgctgtccaccacaagcaatattttggacgtccagtactattgtagattctaaagcttttggcaataaggaatccatttttatatcaaatgaactaccaactctacggtttccaccacccaaaacaccttctcctatgccttctccccagatgaaaacatctcctaatgcatctccatcatcatgaccagaaccatggctcgaggaactaacagcacttgacatactaactctaaaggcatccatgcccatacccctcatatgtccatgcatgctatccgagcctccagaatgaacagaaatagttgcagaatctgaggggtaaaatccttttggaggaactgcatataaagccatgtccgaaaatgccttgtcgaggccattcttaggcgggctctcaaatggactatgaatacgaaggtgattagaaccatcctggaaggtaaacgaaaaatgtaagttgatgttcacatg

SEQ ID NO: 4506 - DNA, 2730 bp, Arabidopsis thaliana landsberg
ttcagttttatttcaaattcattgactacgcaacagacaactagcaacgagggcactgtttttatccggtgaaccaaagtgcttacaaggctatctcatcattatcccctatgcatatgcaataatcctaaatgaaacactctagactcgatcctaaatgtaatgcaactacatgaacactctttttttttttttgtgaaatcattttctgaaatttttcaattttttttggtttttttatgtcttagatgaatgcagactcaagaatatatacaatgcaacacacacttcctgagcccacccccaaacttaaatcacacagtcaactgtgtgaataaacttggaagagagtactcaggacaaatccaatgacagaaacaaaatgaagaaacaaatcacaacagatgatataatacaatggtgaagtgaggcgcttatctcagttgaagaatgagcgtaattgctcgtcaatggctgcctgtatttctcccaggccatagacgaaccgacttgttccgtatcagctccagcaggtggttactcgacctcatcagctctatggtggccagcaccgctctggggatactcgacctcccttcttttgttgtggccagcaccgcggtcgagtgatctcctcgactgaatgaggcgtgatctgctgctagatcgagtgagtgtagccttccttcttctcttgtgctctcgggactcgaatgacgaatgcctagccgggacatgtgaaactctctgctcgctaagctcaggcctgtgctaaggctcatcaaatctcctcgatggcatctccataggaggttgtccctgtggaatagcagtagtggaggaggaacaactcagcttatctgtcaggaacttgatagtcttaaaacacttggcaagcaacttgtcttgcttcttgcaccacttttgcagtttactgttgttcctatgagcttcactcaagctcttgctctctcttgctggaggcacatgttcaccaaagtgatacatgctagtgtcgaactccactgctctgtcttcatccatcccatcctcagcagcctcttctagaagatcctcctcatctaatggcggagcgttctcatagtagaggcgtccaacctcaggtcgaaaatcaatattatctccctctattattcgtgtaacctcagggctagggagaaggatgttagctctcctgtttgtagagtgctcaaacctgaacctgtggaagtcgtcaaccattgcaaactccaggaattcacagtgacgtaggtgctcgatatccattgctcgcggctcgagtccgacagatatgattgggactccacaagctatcagaatcggtgtcacaacaccacctatgcacagagcgcctcctgctctcttgcggttattgctgacagcccaactcttgtatccacacagatggatcagaagaagtacagagagaggtgtgtcattgatttcaccttggagagacataccattcttagtttggcgaagagttcccttgagggccattgcgatcatctccatatcagagttagtaacagtccctgtgatctctcgggagtagagtacattggctatagaatgctggaagtacctgatgacagggctgcttttctgattgctctttgacctggaagcattcaacggtacagagctgccaatggtgatccacaagtctttcaactcttctctttcatactttggcttagatcccgttccactggggaagccaaacaatccttccaatcgcttgattgataacctatactcatgaccatacacagaaaatcacaagaatcccaatccttcacaatccaactcatcagaggtcataccttggtagagctctacttgcagcgtggagaggaattgtattgtctcatcttcatatgctacatacggataagccatcagagtgtccagatgacaactttggtacaggtgctgaacatcttccaacaatccgagttgtgcaagtgaggtcgagcaaggatacctcgtgctatagaactcattcagcttgaaaagcctaacatattcctcaacaggcaatacgtcgggcttgtgcagaagtttggtagctctgcgagtctgttcaagcatgtacttgtcttccagatcttcgtctataagctcaaacctctctgtcatcgctctctttcctcgggctatctcagctttccttctgaagctttcatattctctctgatctctctctagccttgaagatgacgactctgtctcatccatgttgtagtcaggatcaacagaagaactgccactgtaattgctcatgattctcctgtagagatttagaactcaaagctcaaatgtcaataggttagtctcaaagatagcaatgaaaccacaattattgtcaataggcaatgaaatagattgaattggtcgagtacaattctgtactcgagtaacctgagctgttcctgagcttagatgaactggatcgagtatcttctcagtggtcgagttggaatgctacagtaggtcgagtaaatcgtggaggtagagtgagtcgtgaaacctagaggtcgagtaacttctctgaagttggaaggctctcctgaattcacgaacaagaagccgagtagattttgcagcggtcgagtgctttctcgaggtcgagtgatagtatgcggtcgagtagcttcgtcgtaaccgagtggtcctgagacttgcggcggcgcagaggtgtcctag

SEQ ID NO: 4507 - DNA, 2272 bp, Arabidopsis thaliana landsberg
  unsure (1)..(2272): unsure at all n locations
tcgggatgattgtcatctgagtatgagctgtacgctagtgatggttgtaaattacattatgaggaagtcttttatcctgaattattgatctattaggaaaattcatgactaattgctcagattcttatggaattaggggttgtgacaaggcagccgtacaatggaagggaagggaagctgcttccttaattgagcctcatgcatcccgaatgattcccgaggcaggtaatgtaattgatgttccttgcttgttaaactggtcgatgctatgcagcttttgctgtcatcattgatatctctgctcaatatttgaaaagctacgactaacttgttttcctgatcttattatttagctaatgttaagctcgacctcaacttgggaatctctctttcactaggagatggtccgaagcaaaaagatagggccctccggcttcaccatgtccctaacaattccgtatgtggaaggaacaccatggtgcaattttttcttcagtgcaccaaatatgatttactttactttcatatgcgttttgctgcaactgtttgtcaaatgtttctttgtcgatatgtcatagcaatctggaactcaaagatactgtctcatttgctagctcgagccctcgtggtttttcatttattcatgaatttcttgctcttcatttgatctattcacagatagagaactacatggctgcagtggcatgtgatacgcctttcaatttcttgaaccacatgacaattttaaatttatcgaactttaccctacctatgagtaatttgtttgataagaaattcagctagatgttcatcaagtggttactgtttatatgatcagttaagtacttgagctcaactctttgatatcctttgagaaggagtgtatgttgttgcttgttagttcttcttctatgttgtgatattcttgaagatttgaatgaacaatcttctgtccaaaaagttcaattcttgtctccaggaaagaacaccagagaaagggcttaatggcttatgttacgttctcatcaaagcttcccagccaggacatggcaagggcatgatcagtccagtgttgggaccgccgtagcagctacagcaccgccactgttttcaaatgcagcatcatcaggattctcactctcagctacacgccctccttcatcatcagcccttcgtcaatttgaatcagcccggtctctatgttatccacccatctgattacatatcttagcaccaacacagtctcatgaaccgcccacaaccaccaccatagcttcctccttcctccgcataactcaaggtaagactttcttggaaacaacaacattcaactcatcgtttggctcaacacacaagctgtagtttccccttcctgttatacgttacgtttacaatccaaaagaaaaattccaattttgatagaagacccctagagtttgagatgtttgtattcatatgaatcttgatggaaacatgaaaagtatgataaatgcttagtgaataggacatcctaaggaagagttccaagttgaggcaaacacatattagacctcctgttttctgcttctctgtaaatctcaaacacatgtttgaggcaaagttttcctaagatcatacaaaactacaagtaacaacatactttgtatgtgaacgtgcaggttctacacagccctgaggttggaataagttggaaggccagccaaaacgacgctgaattctcccaagatctgttgtacttattgtcattgtgtgatttatctttctgcttttgatttgtaacataaactgagggataataccaaaacagaacccaaacccatttgccattttactataatgtctctgatattaatatgaacagcgtaaagtacaatgcattctatatgtatgaatgaagaaagctattgagacttgagagactataaatttgtatagatctgataagttttagaaattaaaaactcttacattaattcaatacaccacaatagtcttgatttaactccaaaacacgtaactaaagacagagagatggagagagagagagagagagagagagagagagagagagagatataaataatcatccactgataatgtgaatcttgattgtttgaaccaggttattatcaccaggcttgttgagcataaagatcatcatatccggtgggttcactttattccttctgatgatactggcaaatcccttggcaaacacactaccattngtctgaatcttgatctgcttctccaatgtcccgaattttttcac

SEQ ID NO: 4508 - DNA, 1887 bp, Arabidopsis thaliana landsberg
ttccttgttttgctttaagctcaaggatcgtgagttagggtttcgtttaatctcgtaagcaaatcatcgaatttaagatggtgtttctctcgattcccaacgtgaagaccatgtcgattaatctgccttcgaatcgaacaattggtccgtcaacgcacgcatcttccccaacctctcctttgttactcgctctgtctccgaaaccctagtcttgattccgattctgccctggtgtcggatctaggttttggccctttctctacggtagttgttaatgtccctctaatcggtggagcggctccgcctcagccccgcttcaatttaatgcctccgtcaaactatatcgctggtttgggtcgtggggctgcagggtttactacccgctccgatattggtcctgctcgtgctaatggcgatggagacgctgacgtgaatcacaagtttgatgattttgaagggcatgatgccggattgttcgctaatgccgagagtgatgaccaagacaaagaggctgatgctatttgggacgcaattgataggaggatggattcgaggaggaaagacagaagagaagcgaagctcaagcaagaaatcgagaattacagagcctccaaccctaaagtttctgggcagtttgtggatttgacgagaaagttgcatactttgtctgaggatgaatgggatagtattccagagattgggaattactcgcatagattgtattaggtaggcgtctgatgaataaaacgaaatcacaattctgcaatatcataatatttatttatagcattaaattacacaagtagattaagacaaatatgtgacttgtgatgtaataagagagcttatataatgaagctaaactatatatgtaactcattgttaaacatattcaaagtgccgtccatattctagttttctgagacggatcgaacttgagtttccatagttttgaccgaccaaatgaaatgatcgatcttttacatagagggaatctaagaaacgaagaagaagaagaaaaaaaaaaaaaaggaaggaaaagataagcctatcatctttctttatctacacaataatggcggcgccttctgcagagcctgcaaagacaaaatttacatcacaagacacaaccctatatcccctccattacaaagtctccgggagaacaacagtagtcacctggattttggggtatcttcggctttgtcagatcataaaaacccaaaaaagcagagaaatcaaaaccagtcttccgatgtaatgtacaagagaggggaggaagaaacacagccatatgttgcttatgagaggtcgaacgatccttgcccttcgttgatggcgtagagcagtttcttgtacatgatttcctgtttcaataacatacaactcctcaggctcaccaacaaccacactaacatggactcaagaagaatagaagacatgactcacctttgtagaataaggagggagtttaaggtagtttgcgcaagtcatgacactgggcaaatcatcatctgctgtctccgaagcccctgctccgttggctgctgcacttgaggtcgatgagtgctgcaccagccaaagacacatgcaattttagaatcccatgcaaaaccaataattaacaacttcacgacagtaagacataattcatctgaataactcttgccaatgcaaacaaacaccacaatacgtgtctgctcttagaaaaaaagagcaaaagcccttgcccacacatagatgccttctaacatgtccttggtggctaaattacaaaaatgacttgcaaatgatttaaagtttttttacctttctcacaatcgtaagctttgggttcagaacagctaagccacaggaggaagctaggagatcagttcagggtacgag

SEQ ID NO: 4509 - DNA, 3188 bp, Arabidopsis thaliana landsberg
atacactgatctaaaacctagcaaattcatatgaatcacataatgacaaaacacgattctaccaaaacccaatcgattcaccatttcacatttagaaatggtaaaattgaaaactggctatgttgaaatcaatggcgttcacacacaaaaaccttgatcgacataatttgaaatcttatgaacacagatttaagcaaaaacacggttctaccaaaaatgaatcgatttctaagaattcgaattgagattgttggtaagaaaagaagattgacttacttcgtcccatcgtgttggatccgttcggtgttggttttgcaaaaccctagaatttacaaatgagaagctgtgaagttattttacaggtgcggcaaaaacaaaccctaaatttagcatacgtaattgcttacccaaaaaaggcccatttagatattattattagatgctcggtccaggccttaatgtttgactttgcattatagctttccaatgtgaacacgctggctaatgttttttatttatttatagtcaaagtcaaagaagaacaaaagatcaatatgttaacaaactttgtagccaaattttgggtgttcttcccgtgttcttctagagagttaacaattccatccacatcaaaaagaaatatgttatcagtttgttctcttatagacagtaatgagtaatctttgtttcataaagaatgttgttatgtgtcatgtgtgtgttaaaaaaacagagaaccaaataattggtctgcaaaatatcaatggaatctacaagaaccacattcagaaactcagatcatggcctccaaattttgaagtctagggactcatcataatccatattacaaaacacaagatcacatatgcacgacactaaaagaatgggatcagaacaaggcaaaatcacaatagtctcaaatgatttaaaacagatatactcaaacagtttaaaacacagtcttgttgtctattctaccgcttctcgccgcacaaacaagtagcagcttgaagagcgaagtacgtgaggatgatgtccgctccagctctgcgtaaacacatcagtgactccatcatcactttctcttcatcgatcattttcaggactccccctgctttgatcatcgagtactctccagaaacctgaaaattcataaagagtttgaaatcaacaaaaacatcctgggaatgttattcaataagttttagaagtagagtataaggaaagtacttggtatgcagcaatcggtaatggagacttgtccctcaaaagccgtatgatgtccaaatatggaagacctggcttcacctgtaacaaaacactccagttatattaccaaactctataatatgttttgctaaaggatgataaaagacttaccaggagaatgtctgctccttcagcctcgtcttcacgtgcctcaatcaatgcctctctgtagtttgctgggttcatctgatacctgtagttcaaaacgtcagtttgtaactgttagtgttagcagaagaaatgcaaattcagtatcgatgagggttgatgggatttacgttttcttgtctccgaaacgcgggtttgagtccagggcttcacggaaaggaccgtaaaacgaacttgcatacctgttggccgaagattcattcaattagacagaacaaacaagaacatgcttccagaaaataaatgtatgattacttacttggctgtgtatgacatgatggagacgttttgaaatccttcagcatcaagagctgagcggattgcacctactcgcccatccatcatgtcactcggactaactacgtcagcaccagctcgagcctggaaagagagagagaagaagaaatcaacctcattggtaagaaaaagtttcagacattttaactctttgatatcgaaaaaaattacctgggaaacagcttgtttacagagctggtgtactgtttcgtcattcataattacacctacagagataaaattgtatcaaagctccagttaaaacgttatagatggaagttgggtataaatacttaccatcctctctaactatcccatcgtgaccatcagatgagtaaggatccaaagccacatcagtgtagataatctagcaacagaggagaacattagtcacaattgcaaattaaccaatttttcatctcctggtataattaacaaaactgggattacggatcttacaagatcaggatatttgtctttaagaagacgaattgttcgaggcaccaaaccattgtcattgtatgcctcatcccctgttgaattctacaaaatgaaaaccaaaacaaagcgttaaatatacaactcaagaacatatgtacacaaatagaagagaagtgtgaaacaccttcaaagcctcaggaactttagggaacaaaacgatactgtttaccccaacagctcgagcctttgcaacctgtttgcatataaaatcatgttattgtaacacagcggcaacagatacaggaatcatcatatcaaaacataaagccaaacctcttgtacaagaccatgcctccagccaagtctgtagcaaccgggcatagctccaataggcgtgtctttctcacctggcacactccaaaaccttataatgtttcttaaagacaagagagagagccattgaatgtcagaatacaaaagaaaataacaaccttcatgaatgaaaagtggatatacaaaatttgcaggggagatatcagtttcctgaaaggcagctctagtaacaggggaagcgcggttacgacgtgggcgtcggcttagattctgaaagcattcagtaacaataagccacttataagcttcaaccttacagctaaacattagattctgaaagcatgaagtaacagtaagccatttaaaagtttcaaccttgcagctaaacatcagattatgaaagcataagtaacagtaagccatttaaaagttttaaccttgcagctaaatattagattatgaaagcataagtaacagtatgccacttaaaagattgaaccttgcagctacttattgttcactatacggagatacagagatagctaatacacaagagtgatgaaatcaattaaagaagtgtagattgactcagattatgttcttagataatagcaaaatcatctatacaatgcaactagagcaaattcacaatgaatagtagagacttggatactcacaag

SEQ ID NO: 4510 - DNA, 1156 bp, Arabidopsis thaliana landsberg
gttcataaatgctagggttcgtttatggaaaccaatggtggaagaaatgtaccaacaagaatcaaaagaaagagaaagagaagaggaattagaagagaacgaagaagatcaagaaacaaaaaacagcaacgacgacaagagcacaaaatccaacaacaatgaaagcaacttcactgccgttcggaccacttcacaaactccaacgacaaccgcaccagacgcatcagacgcagacgcagcagtagcgacaggccaccgtctaagatccaacattaatgcttacgaaaacgacgcttcatcacttctactcccttcctcttattccaacgccgccgctcctgccgctgtttctgacgacttgaattctcgttacggtggctcagacgcgttttccgccgttgccacgtgtcaacaaagtgtaggtgggttcgatgatgctgacatggatggtgttaacgttataaggtttgggacaaaccctactggtgacgtgtctctcacgcttggtttacgccacgctggaaacatgcctgacaaagacgcttctttctgcgttagagagtttgggggtttttagtttgcttttgtcactccatttaattaattaattatagttttccattcttacttattttaattgaaaatctatttttgtctcttaaaagtcaaaacaatacattagtctagccctcctctgctttttttttctatctcgtgaagagaagaaaacgatacgtaaatcccttcgaaaactaatgtacgttgtacgacttattgttttcatatatctgtattcttggttatttaatttctcgagatttctttaattgttcaaaatgaaaaccttcactttataacataacagtcccaaatcgttcgaaatcactgatttacaatcatatagattcacttaccatgaatccatgatacaagcttgaagaggtgacccaattgtttgggccatcaataaggaaagtgataggcccaaaattcttttattgggctttagcgtatctgtttttgtatagatatcacacaagtttctatagatgtgttcagtgttcatgcagttttttataaatttctcaccgacatttctagatatgactaatatgaatttatgaacatgcggcttaaaccttattttgcagatcac

SEQ ID NO: 4511 - DNA, 1042 bp, Arabidopsis thaliana landsberg
  unsure (1)..(1042): unsure at all n locations
atatatggaactttgggagctagatctcacttgatatatgtatatctctcttcttcttacgacagaaaagacagaaaaaaaaactaaagaagaaaggaaattttaaaagtatgtgaagaaactaaaaacatatatcgataaaccaaaaaaataaaattcactataataaattttgatgaataaattgagaaacaaagaagactaaaaatctccaaagtctctaacggagaaagaagtgttcttatcaggaatattgccagagtggcgtagaccaagcgtaagagacacgtcaccagtctgtttggtcccgaatcttatgacgttcacaccatctccgtcgacgtggaagtcactgacgtcttgctgacacgtggcgacggtgaacgcgtctgaaccgccgtgagaagcggcggcgacggaagagaggaatgaagagtcgttttcgtgatgtgtcgatgtcatcgtcgttggagtttgtgcggttatgacagtgaagttgttttcattgttgttgggtttcgtgtcgatgttgtttgtttgttgctgtcttctttgttgttgttgattttcattttcttcttctgcttcttctctttcttttgcttcttgttgatacatctcttccaccattggtttccataggcgaaccctagcatttatgaaccaatttgacacctgaaaaaacgagacatatgaactaatattaatcacaatttactcttaacaagtttataatattaaaagaaacttaacttttagaaggaaaaaaaaacttttcaatgaaatgtgaaatactcctttttacattaaatatggctttgattgtttttgtatatacttcatttgttttatattaagtaaagttaaaataataagtcatttactgtgaagaaaattagtttaaacaaatgaaacanaaaaataggatagctaaaaccttaagttaaaatgataggaaaggagtaaaaattatgatacatgtgtttcctttgagacatctattaaaaagacgatatatattacacttttcattatattctta

SEQ ID NO: 4512 - DNA, 508 bp, Arabidopsis thaliana landsberg
aaaatcctgtgaatgccactagattaacccttccttgtgttttccaagtttatagagatgtatccataacataaaaggggggatctttgtaattattgaataaaatgtttatacaataaagtggtttctggtggtagagtctcaagaaaccttctggcggaaaatgcaattctttcttggtaaactcacaaaaacagagccactctgtttttaatttattcttatggaaattgcgaaatctgaatttttttgcatctctttgtgtgtttgcaaaaaaattctagagttgtgagtattaatgggtatgaagatgttcctagaaaagacgagacggcgttgaagagagtaattttcataccaaccggttagcgtagcttcaagcaaagcctattgttctcatcatcatgaagtgaattcttctcatcttctcttttctttccattccaagccaaaagcgattcctttgcttcagtcccaattctctcagcctctaaagctctgtttccaa

SEQ ID NO: 4513 - DNA, 4786 bp, Arabidopsis thaliana landsberg
aataagagattaagtagagagcgtctagagtttgcatttgttcatctgaacttcgtagtttccagaaacatgaatatacaatagacccgtcacaatcggtcagcattatatgtttgtttaattcggttactcgtaatttacttcgtaaagtgacaattaaggctggtcaattgtcctttcaagcttaccatgttctttactttgatcttttaaacatgtgtctggtctttttggttatattttctatgtttgtcttttaattaagggaatggagaattcatctaattgattgtgtacttgctttgcttagtttctatacatatattaattaggtctaattggtatatctaaactagacctaatctcactaatgtaagtgctgcggcacatgcttgtgctgcaaccaagtgacacctcaccaaaataatctaaaaagactctcagtggtcattggagataacgaagaaacctggagtcttagacatttggagtaatttttagccaaattgtagcattgtaattcgacagcttaacatgtatctttttcttttccttttttggcaaccacacaattaaagtatcaaatcactgcaacatatttgaatttaattcatccctgaaattgacgtggctgagaagacttgtcacaagcctaagagcccttcttcatctataaatatactcttgttcagtgatgaaaacttaatataatttggtttctccccaaattctccacttgttcacttaatctttctcactacctgatcgtggaaatggcgattggaccatcaagtgtgatcgttattgttgggataatcttggcgttgacttatcagtcaatcttgaaacctcctccgccgaagctatgtggctcccccggtggtccaccgatcacagcaccgcgtataaagctgcgagacgggagacatttggcatacaaggagtatggacttccaagagagaaagctaaacacaaaatagtcttcatccatggatccgatagttgtagacacgacgccgttttcgccactcttctttctccggtacgttcttaccaactcttggaactaaggttcataataatttcttgatctgttttcactttataggatttagttcaagaacgaggcgtgtatatggtttcgtttgacaaaccgggttatggagagagtgatccggatccaatccgtacaccaaaaagcttggctttggatattgaagagctagctgatcaactgagtctaggatcaaagttctacgtgattgggaaatcaatgggaggacaagcggcgtggggatgccttaagtacacccctcaccggttagccggagtaacactagttgctcctgtggttaactactattggaggaacttacctttgaacatttccactgaaggatttaacttgcagcaaaagagagatcaatgggcggttcgtgttgctcactacgctccttggcttatttactggtggaacacacaaaactggttcccgggttcgagtgttgcgaaccgagatggcggtgtcttgtcacagcccgataaagatatcattttgaagctgggatcttcgaggaaaccgcatttggcagaagtaaggcagcaaggaatacatgagagtattaaccgtgatatgattgtgggttttggaaattgggaatttgatcctttagaactcgagaatccgtttttaaacagagaaggctctgttcatttgtggcaaggagacgaggacatgttagtgcctgtgacgctgcaacgttacattgcagataagcttccttggcttcactatcatgaggttgccggaggtggccacttcttccccctcgctaaaggtgtcgttgatgagattgttaagacagctcttaaccactgatgcgtagcattaagtaagataagatcccaaaggtatgaaaaaaacccaaaagattatgggacgtacaatggatttcttatgtaaaatgatttacatatacgaaaacataataaagtagacttttttacagttccacaccattatagtctaccaaaagagtcaaaaccaaaacagaacatgaaagctcaagtcatacaatcacaacacctcaaaagaactcaaacgttggaggtcaagactttaatcctcgatcatttcctcattatcgtcatcttctatttcctcgatcctcatcttcttcaccgcctgagctgcatcacttctctttggcccgttagcaatatgaatcagcacatctgacttcttgcctgttgaagcgtccactagacctccactttctactcggtacacaagatcaccagcgcctgcatctatgtaaacagtggagttttcatcgatttcctcacgcacaaccatctttgacagttctgtcaccaccttcttctccatccatctccttataggcctagcaccatacacctaaccaacaaaacaagaaagcaaccacaagagtcagtcaacagaacaaaccagcctgagagatcaacaatgatatgcattctgcatcatgtgaagagacttaccgggtcataactctctgccaagatatagtccaaagcagcatcagtgactgccaaagcaactcctctttcagcaagccggacagcaacgtctttcatttgaagccgagctactttcctcaactggtcatgtgaaagggggtcgaacaccacaatctcgtcaagcctgttcaagagctctggtctgaagtgtttcctcacctcccgcatcacacagtcccgggccacttccattgttactttcccagttagccctgcaaggaggtgttcagcaccaaggtttgatgtcatgattatcaccgagttcctgaaatcgactgtcctgccttgcccgtctgtcaatcgaccatcatccaaaacttggagcagagtgttgaagacagcaacatgagccttctccacttcatcaaagagtatgacacaataaggtcgcctcctcacagcctcagttagttgtccaccttcctcgtgaccaacatacctgagaaagtgtagtaatcatgtaagtaagaaaaaatattttcataatcagaagatattgaaaactaaaagataagttacttaccctggtggtgccccaatgaggcgagagacagagtgttgttccatatattccgacatatcaatccgaactaataggttttcatcatcaaacagctgctcagcaagagccttggcgagctcagttttgccaacaccagatggtccaaggaataagaatgatccagttggctgttgtggccttccaagtcctgcccttgaccttagaattgcctcagaaactgcatttaccgcttgattctgtcccacaacccgcttatgcaacctatcagcaagaccaatcaacctctccttctcattttggccaagtctcgtcactggaatccctgtccaacggctcacaacctcagcaatgtgttcaggcccaacgttttctgtgagcatcacattctcttcagaagaagttccttcaagttgggcaattgcagattccacttcttgaattgcgccatatcttagatcagcagctcttgcaaggtcatatcttcgttctgcctcctgcaaagaaaacatgagctcttctcttttctgtttaagccttcgaatctcatcaattctctctttctcctttctgtatttcatcgtgagaggctgaagcttatctctcaggtcatcaagctctttccgcacctacagattcatagtttgagaaaattatatcaaagactcatcgcaaaaacagatgctaacaatcaagaattccagaacaagcacaatagtcttatattttgaagcgctatctactgatgagaaaagaaagctgtatcatacctctataagtcgagctttgctggctttatccttctccctttccaaagcgtgaagttcaatttccagctgcatcctcttcctttcaaggttatcaatctcttcaggttgactatcaagctggactctcacattcgcacaagcctcatcaaccaaatcaattgctttatccggtaaatgccgacctaaatcaccacaaaaatgtcatgtcaagaacaacactatatgaaaccataaacatcagcttaggattaagaatcttaacataccagttatgtaacgagcagacagctgagcagcatttataagagctctgtcttggattcgcacaccatgatgtccctcatacttctccttgagtcctctaaggatactaatggtgtcaggcacacttggctccgcaacatagacttgttggaacctcctctcaaaggcagcatctttctcaacatatttcctgtattcttcaagcgttgtagcaccaatgcatcgaagctgccctctagctaacatgggcttgaacagattagctgcgatccattgacccttcagatttgccagcaccaagaaccaaatgagtctcatcaattgagagaatcactttgccttcagcgttctcaacttctttcaaaacagatttcaacctttcttcaaactctcctcggtatttagcaccagcaactaacgcacccatgtccaacgaaattaatctcacatcaactagactgtggggcacatgtcctttgacaatcctttgagctaaaccgtcaaccacagccgtgttaccaactcctggctctacaataagcacaggattgttcttcgttctactcgaaagaatcctcactactcttctaatatactcatgccgaccaatcacaggatcaagctaccctgcttgctctaccaaatctgtaccataagtctttaaagctt

SEQ ID NO: 4514 - DNA, 1675 bp, Arabidopsis thaliana landsberg
acttaatctcttaggaaagtttcaatacctcagctctgtaaacacttgatagaaatgtagaatcgattaagaaaccacaacgagaagataagaatcgtatacttagatcaagatagatctaagtaaccgatattgatctcttgctctggcacatcaccaggccaagtctctctcgagagtcgagaatctcacaacatcaaaagcataaaactcaaagatagatcacagtagctatatatagaagaaaactccgtaacagaagtctttattcttctttgctgactcatctgcctgtgccaactcgactgccacctcatcttcttactgacgaatcgtatcagtatcggtggttaagagcgtcgttacaatgttatcaaccacacctttagtgtagtggaagaagtggccacttctcggaacctcatgatagtgaacccatggaagctgatgagcaaggtaacgctgcagcttcgcaggtactaacatgtcctcatctccttgccacaaatgcacagagccttccttattcaaaaacggattctcgaggtctaaaggatcaaattcccagttcccaaaaccaacgatcatgtcacggctaatactctcatgtattccttgctgccttacctctgcccaatgtggtttcctcgaagaaccaagcttcgaaatgatatctttatccggctgtgccaagagactgtgatctcggtttgcaatactcgaaccagggaaccatttttgtgtgttccaccaatagataagccaaggagtatagtgagcaacacgaactgccaattgatctctcttttgttgaaagttaaaaccttcagtggaaacgttcaaaggtaagttcttccaataatagttaaccactggagcaactagtgttactccggctaacctatgaggaatgtatttaagacatccccatgctgcttgtcctcccatcgagtacccgagcacataaaatttcgatcctagactcaactgatcagctagctcttcaatatccgaaaccaagcttcgcggtgtacgacttggatgcggatcactctcacaatagcccggtctgtcgaatgaaaccatatatacacctagttcctctactaaatcctataaaatgtattgacacactgttagaggtcccaataaaaaaccgaaaacgtcactctcaaataactttctcactaaacttctctatactacaaggatttttaacaacactacttgctacaaattaacatgccactaactaaataaatgattaaaacatagtgatcaaagtattattacataacaactatctatcaaatcaacgatagaagcatatagacatgcataatcttgattgtgtaaaacttgccggagaaagcagagtggcgaaaacggcatcgtgtctacaacaatcggatccatggatgaagacgattttgcggttagctttctctattggaagtccatgctctttgtaagccaaatacctcccatcttgaagctttatccgcggcgctgtgatcggtggaccaccggaggagccacatagcttcggcggaggtggtttcaacttcgactgataagtaaacgccacgattatcccaacaatgacaatcacaacagaaggaaaaagaaatttttttcgaggccatggctttaatgagctgttccttgatgaatc

SEQ ID NO: 4515 - DNA, 707 bp, Arabidopsis thaliana landsberg
gatggaaagttcttccaccaatagttcaccactggagcaacaagcgttactccagccaacctaaagaagaatcaaacagagacattcacacatatcatcaaaatcatcccttcaagaaatatgttagttctaaaagtaatacctgtgaggaatgtatttaaggcatgcccatgtagcttgtcctcccatcgagtaaccgatgacatagaacttcgatcctagactcaactgatcagcaagctcttcaatgtccaaagccaagcttttaggagtacggtttgggtcaggatcactctctgcataaccaggtctatcaaatgaaaccatatacacacctagtccttccttaatatcctacaaacattgatatcaaaagtttttacatctttaaaactgtaagcaattagtgaagctttcatcacaagagggttttttaaagtaccggtgatagtagagctgcgaaagcattatcatgtctgcaactatcagatccatggacaacgatgattttatgagtagcttcatctctaggaactccatgctctttgtaagctaactgccttccgtctcttagcttaatccttggtcctgtgatggatggaccatcaggagagccacatagctttgatggaggaggctggattgctttataagttgaagcagctatacagacagagaatagtaataacagcttttggagaacacct

SEQ ID NO: 4516 - DNA, 3179 bp, Arabidopsis thaliana landsberg
ctttcttgtatgcaatatgaatatgagataaatgacggaaagtctatattacataaaactagattcttgacatctcgcaggatgaagattcacactttgttgaggctgatttacttgcaaatcttggtattccaacaataaatctggctgacgatattgacagctcaaaaagtctcagtggagaaggtgctgacgaaaatatcagagtagagacaattaaagagtgtaattattttgggccatctggaaccgagaaagatggaccattacgcgtacactttgatctccatgtgccgctgcaggaggctctagaggacatgtgtcaaaacttccagttttttaaccgggatgctacaccaaccctagatgaacaaggcgaagaaggtaaaagtcgttctatcttataaaaaaaacaagcatatatttttttaaaaaaccagatgttgtgttaatttccatgctatatttactaaatacaaagcaagcatgtaagtttacatattagtaagatagatcgttagtaggatatatactctgaattaagtttgacatgtcaactttatatatgcagttttatataaaaccctgttattgctccggaatacataatgccgtgttgggatggagttagctatccgcaatgttcagtatgaaggcgacgaactttttgtgggtcttgttttcaaaaacaaacaagactgtaacgtgaaattagttgtgcagcactaaatcgcctattccatttccgtcgtgatcgctctaccaagaaaataataacgctcacttgcgtttccgactcttgctcgtggcgtttccacattgtgagattggaagattctaacaattaccaaattcaaagtgccacacttgatcacacttgctccgtcgaagaaagaagcaactaccacaaggtagccactactcgcatgattggtagcataatgaaagcaaagtatgaggggaacaccagaggtccacgggcaatagacctacaacgactccttctggctgatcattcggtgagaatttcttattggaaggcatggaaatcccgggaacttgctctggagggagcaaaaggatcatcagcaaatagcttttctcttctcccgacatacctacatgtactgcgagaggctaaccttggatcccttgttgaacttaaaacagaagttgatgcaaaaggtgtctataggtttaaatacatgttcatagcatatgcagcatccctggaaggatttgcgaccaagaggggagtcattgtcatcgacggagcccatctgaaagggaaatacttaggctgcctactcaccgcaagctgtcaaggcacaaatttccaagttttcccactagcctttggtgttgttgatagcgaaaatgatgctgcttgggaacagtttttttggatgttgaacacagcaatacccgactcatcaaaaattttgtttgtgttagaccgacattctccaatatacataggactgcaaaaggtaagcctcaagtatacaatgttactttataatatacatgcattgttactacgtagcatgcattacataacagcacactgtgcttttaagaaaaagtgtgctatacttagcctttctttccctctaggtgtatctgaaggttagacatggagcttgcgtggtgcatctccagcgaaacattgcggtttcgtacaagtaaaaacacctactgttccacgtttccaaagctgcaagagcatataggatttgagatttccatacctacttcaatgaggttataaggatagatccggtatgtgcagcctacctggagtcagttggctttagtcactcgacaagggcatactttttaggggaacgctataacgttatgaccatcaatgttgcggagtcattgaacgtcgtgttgaaggaagctcgtgaactaccaatcatttcccttctagagttcatccgcacaactctaatgacctcgtttgcgattaggcgagacgccgccaactctgaaacttcatcaatgccaccaaagatgagagaagtggtgcatcagaactttgaaaagtcggtgcgatattctgttaggcgcattgaccggtatgaatatgagatccgagcagatggtacgagcggtttccatgtttaacttttggaacgcacgtgctcgtgtagagcatttgatttaatacatcacccgtgctcgcacgcaatagctgcagcagttgcagaaggtgtgcctattcaagggttaatggcgccagagtactctgttgagagttggagaatgtcgtacccagggaaaataaaacatatgcctgatgtaggagatgtgtttcttttgcctgaacaaatagcaattctacaattatttccacctgaaacgcgcaggccaccgagtagaccaaagaagaagaggataacatcaagtggagaatttaaggtacattatctgaaatagattttttgaaataatgtttcaggtccctcagatttaacaatgtatggtttcaggggaaaaaacgttaggccacacgatgttcccgttgcacaggcgtaagacataatcgcgccacatgcaaaatgtccatttaaaggttggggattttgtagaaacgatatataaactacgaggcacgttataggatttaatattggtttgttggtttgagagagaaccttggtgtctcgtgttctaaaagggaaatgggttttatgtatgtcacggttaataaaggggaagtacatcaagtttgaagttaaatcgtaatgggaagctacttgactttatgtatatattcgcatagagacctatctctaagggtggcgcctaaagatatgtactgaatgcactcaagtagatcaagttccaggttgtgggtttttttttttttttttttgtaatgtttctgtgtcatttaagttgaaaaccccttgtgatcatgaatccatgctattaagtaaaaacgtgagtgtttcagtaagaaatcatgtgttaaaggaaagttacatgtttattggctagtaagatagtagatttcctttcgcattggttcttaccaagggacaaaaaaatcatggtttacatattaaaaacaaactgttattataacatgtaaaatatgggatacgccggatccaatcatataccttttgtaatacaccatggggtgtactataaacacttgcttattt

SEQ ID NO: 4517 - DNA, 969 bp, Arabidopsis thaliana landsberg
gattttattaaacatgttcttacacaatctaaagctgtgataaaagtgattagaactgacaatgctcctgaacttgctttcaaatctatagttagagaacatggaatgatacatcagttttcttgtgcttacacgccacaacaaaattcagtagtagaacgtaagcatcagcatttattgaatgttgcaagatcattgttatttcaatctaatgttcctattgcatattggagtgattgtttactaacagctgtgttcctcattaatcgaattccatctgttttgttgaagaatgtttcaccctatgagttacttactaaaagaaaacctacatatgatttcttgcgttcttttggttgtctctgttatgtttctacattacagaaagataggacaaaattcacacctaggtttgaaaaatgtgttttcttaggttactcatctggttataagggatataaagttctgcatattgaatctaattgtgtttcggtctctaggaatgtagtctttcatgagaacatttttccatttcatgataatcccatttcatctgcttctgatgtctttagtaacaccatcttaccattacctgctcatattaatgatgaaatgcatacatcatcatcacatcatgatacaactgatcattctcatgcatcatcatctgcatcacaatcatctacacactctagtgtcataccggttttgccagagacagttccaacagagactgcagtggtttcactacctattgctaggccaaaacgcaacggtaaggcacctgcttacttatctgattatcactgttctttcacaaaaattactgagcctttaccaccacattcttttccacatctcaaagtctattcaacaccatatcccatatcttcagttctttcttattccaatttaaaatcacctttcttgtcatgggttcaatcaaatggggttaaaacaaaccaaaga

SEQ ID NO: 4518 - DNA, 728 bp, Arabidopsis thaliana landsberg
aacgtcatgcaaaatgagtgattgtgataattgcacagtgccacagtgtgtgatgtccactctagcttcattaggtaaagagactgtgacacctgaaactgtgaatgtttcattgaacattgccaaatcagaacacacatggctagttgctccactatcaattatccaactaccatgaggaatttttgtggataatgatgagagacattgatgttgaaatgtgagatgattattttcaaaacgaagagaagatgatggaaaagtagatggaaaagaagaattaggtaatgataatgtacccgatgttgattgattggccataactccattttctgtaatggaagcagcttgtgaaataggagctgaattctctgaaatattaactcgatcatgaagttgttgaactattttctgaacttgatccatggtcaactgattaacgtccataaggccagtacttgtagcaggaggcatggatgaccctgtaataacattcgccactgcatgagactggaactttggagtaggagtctgtcctctaggctggaactgagtaggagcttgaaattgagggttattggattgctgttgataagcaccactactcttgaatccagggatatagccaggaggatagccatgtttcttgaaacatttttgtattacgtgaccagactgaccacagtaagtacacaaaggtcttgacgggcgaggtttataccattatg

SEQ ID NO: 4519 - DNA, 697 bp, Arabidopsis thaliana landsberg
  unsure (1)..(697): unsure at all n locations
accgatgatggaataggtcctgaagcttgaaacaccacagtttctgatgaaggtgatttgatagttctttgtgtttcatcttgagataccatattaaaagcatcctcaatagtcggaattggcttcagcatcaatatatgtcttcttgtagattcaaaagactcattcagtcccataagaaacttagtgacacgacttctctgttgcaatctctcccacaacaatgcagcattacattcacatcggccacaagtgcaaacaagcaactctacatagtttctgtattcttcccataatgtcacaagttctgtataataggcactaaaatccattacaccttgttgaatgatactcaaacgctgttcaatttcatagactctaggtgcatcatcttgcttaaacctagctaacatattgttccaaattccatcagcagtggagataaacaataggctttgaccaatcttcttacacacaaaattcattagccacgttgctaccatatcattgcaacgtgaccaagctccaaaatcacgatgatcagaaggaggtttagtgatattaccatcaataaaacccagcttgttacgcacattgagtgccattcgaacggatcttctccaagaatgaaaatctgctccagtagtgagacgatcggagacgagaaccaatccngcatgatctgagctgtgaagat

SEQ ID NO: 4520 - DNA, 636 bp, Arabidopsis thaliana landsberg
ctttgtaaggtcatattcaaaaacaaccgctacaagttttcttctaatgctgctgagaggtagctttggctgaatcccgcgttggagagtatcaactctagtgagataatatgaattctcattaatgaagaaagtatagtacatgttccttatatacaatagagcaatctaaaggagactttactctaatcataaacattatactcatatatgttaatagcccccctcaaaccgaatcagtcttttggaataaagaggtttgaaactccaagacgatcgagaagtgacttgaaaggacctggatgcaacggcttcgtcaatatgtctgccaactgattctctgttccaatgtgatgtacttgcaagaatccaaatttcacttgatcccttgtaacgtgacaatcaattttaacatgtttagtcctctcgtgaaaaactggattctgagctatatgcattgcagatttgttatcacagaaaagttttgccttcgtctctacttcaatatgcaaatctctcaacatatagctgaaccacaaaagatcctttgtagccactgccatggttcgatactcagcctctgtgctactattactacagacatcctgcttcttagatttccaggaaatcaaagaa

SEQ ID NO: 4521 - DNA, 3862 bp, Arabidopsis thaliana landsberg
  unsure (1)..(3862): unsure at all n locations
agcctcgaccacttccctgagaacccgtcgctcatttgctcctctcgcaaagcgaataacaagtttgtggtggttggacatagaggacacggcatgaacatgtcgcagtcgccggatctaaggttctctgctctcaaggagaactccatcctctcctttaatgccgcttcaaaattccctctcgactttatcgaattcgatgttcaggtatttacttatttctttcaatcctctcttcgctctcggttcgccgcattcgagtttcgatcggcttctttttttttttttaatttggttcagccacgtgaccgccggcaataccacgtggggtgcctaattcgttgacattttcttattttgcgccaaaaaaaaaaaaaactgttaatgaaatgtaaaaaaaaaagatctgatctgatctctttatttttttaattgatcgcgcaggtcaccagagatggctgcccaatcatattccacgacgacttcatctactccgaggaacagggagtggtgtacgagaagagggtcacggaggtttgcttgtcggagttcatgtcctacgggccacagagggatacaggcaagacaggaaagcctttgctgagaaagtcaaaggaagggaagatccataagtggagcgtcgcaaccgacgactctttctgtactctccaagaggcttttgagaaagtagagaatccaaacctcggtttcaacatcgaactcaagcttgacgacaacctcttctattcctccgatcacctctcccgtcttctcctcccaatcttgcaggtcgtgtctgatatcggaaacgacagacctatcatcttctccagcttccatcctgatgcagcccttcttgtcaggaagttgcagaccacctaccccgtaagttgatggaatcccaaaagctacgtacactctttccactttaatccatcaacttaatttatgatccaaattcaattacaggtattcttcttgaccaacggaggaactgagatgtaccacgacacgagaaggaattcgcttgaggaagcaatcaaagtatgtttagaaggaggcctccaagggattgtctcggaggtgaagggagtattccgcaaccccgctcttgtcaacaagataaaagaatccaagctctctctgatgacatacggaaagctaatcaatgtagccgaggcggtttacatgcagcatttgatggggatagagggagtgatagttgatcatgtggaggagataacagaggcggtgagggagatgatgaagccatccaacagagatgctgatggtactaagccaaagcctaacttctctgacagagagctctcctttcttctcaagctcattcccgagttgatacaacactaaaactatctcttttagttaggatctctagtttcccaaaatgtgatagtgttttgtatcgggaaaatttgacaatgtgggtgctgctatcatgattcatgaggtgaaagcccaaatgttatggaatatatctgtttgcagacgggttatgacttatgaggtatcaaagcaccatcagcaaattatgtaaatgtattcaaaagtggaaagtggcaccttgggagaggaggccgtgctgcaggtgatatttgagacggggcaagagaggtctgtaaggatcctcctcccttctctgcttcacaaactttatgcatctctcgacctccttcttcacgtctgcgtacacctcctttgccttgtctctgtctctcaactcttctgctcccgtctttatctccttcccaaagtaataatagtatctccctggacactttggtatcactcctggcatgtggaagtcttggttcccctcttctccttccaggcttcccctttagatcaccaaccatgtcaaaatgtcatcacccaccctcatccagttctacaatttatattctctactaaattctattcacattacctcacctccgggccttccgctgtcactctttttagcacctctttcaccaacggaacctttatctggtcattgtagtctacgaccacctgcattcgttagacagagttacaccgattatatattacacatgacatggctgcaaaatgtgctcacttttaaaaaatcatcttccccaaccccacaaaaggggactattttggctccaaatttggctgcagctctaacaaactctgctttctctggccacatcaacttgtattcttctccctgttaatgagtaaatcgtgattcagtaccacatctaaccatgagaggagcaatacaacacaagggtgatatcctgatatatataaacaccaatattcacatgtccaaagtatctgctgccatatatgataccccactcaggaaaaccaacgagtatttaactactcgccttacggtgtagagcttcgcggatgcctcctggaaacaacagaatatgggatttagcagacaagagattatggaggtgagtgcccgagatggggaccgaccccatcatcctgagcatgtcataaacagacacatcaggtaacaatccatctctcagtctcgaaaacatcatggggtgcacaagaggccgcaaattgatgttcctctcgtgaacaaattgtcctgggagtgatattttgtcactcgccagtagcatgtgattgcccaccaacagtacaggtccttctgatggtattcccccaagacccctcaccactttcccatcttctgtcgtcgacagaaatacagggcccatgatcacctcaagaagcctatatcgtcgcaaaaatattatcaagatcaatcaaactgtatcttttctacttttagtaatgatacaagccattttagaacataatttgtatgtgtattaacctgttgatcccataacttttgttaaactcagagatggttggtgggatgtagtcggagacgtaatcctgacgagacccacgccggtaaaaagaagtggcttttatgatactgaccagatcaatgccgtcctcctgtcatatccgaaagcaaaaggagatgtaatatgaagcatctcacattacatctttgaatgagatgaaatttagtgcatgggagttgtattcgcacaaaagacagcagagtgagaaganccgagacagatataccagaagaaggcaatggccgttgtctttgaatgagcggacttcacatttaagcagttttttccgaagtcgtttgccttcatatttactgggtagtattcggtcatttccgctgtaattgataaacaagttaacttagtactccggtggaattttcaaggattattagaagaacccgtgctgtgagagacaccacgaacctggacagaattagagtctgagcttgtactagatgtagatgtgcattggcaaaaatagcagcggcatcaagcaacttgagcttccacagaagagtttctctccgaaatgtatcagctaggatctgcatagtcagattcttaaccatatttgacaacactggaaagctaacgacctacctacgataaatgagtttgtcacctacagaggttaatgtggatgttatcaccaaatcttgaaaaatgtttgcagctgtttccgtctccggaagtcctcttacccagtgagcaaccatcctttttaaagggccaccttaaaattccaatagagcttttatgcagctaggaaattaaaaaccatgtcttatatcaccaaaactcacatgttaatgcatagtagtagtaaacacttgagcttgaccagagttttgaaagatgcttttaccattgtgcggcgtgattttaaataaaggggaggggccattggcttgtcagagttccaaaatcagcgaaaagatatatcaaagctaacctggaatcaactt

SEQ ID NO: 4522 - DNA, 2320 bp, Arabidopsis thaliana landsberg
caatattttacaagtttctgccttgggtcttcttgaggttttccctcggaaactccatcaatgttcggtaatcgtttgagagtagctttcggatattccgcagtgttatggctcgagtgcggtgacgactgcatgtagcaaactatctcccaaggcgatgtaggctttccccgtagcgttctcataatcggcttgggttactgatatatccttattttcactgattttatcttaagttataggtataggattttgagtctttatgttgtttatcgagtatttttagtgtattttcaggtattctatgcagtgggacaacatatggagatgaggagacattttggagcaaaagctaaggaaaaggaagctaatgatgattttggactcatgaatcaagaggagtgtcgatcgacaccagtttcggcccaacaaagtccatgacgctttcaagtttacagaagaggaaatttgccccagaagacttccctatttgcattattagtccctggacgtttttagggtctatatatattgtttttagacctaagtttcttttatcaagcttttgcaaaacccttttactgagagacataagctattcatcgattgttttcagagtttcattcagatcttaatacagtgaagatatcccttctttccccttctctatttactgtgtttatgctttcaaactcgaatatgttgtttgcttcattcaatatgtctgagtcgtctgcttgttaggaatagggtttctcgttcgggattcatatggtttagtagattgccccctctgctaggttatctgtagaattcttcatctttaattatgcctaatgctagatctggagtaattaactagatcttgaatctagacaatagatatgcccgccataggtatctgtagttggatctattatttgatgagtctggtttataggtgtgtaataagaatcggcctatttactaagatgaataattgaactcgttaaaaatgcatatttaggttgatagtttctcgacttctccggttattattagctatagatatagggagtttcgcggcacgcccaccgcttattccatatttagagtttgagtttaagaatggttcgataacaacctagctttcattagatctactaaccaatagtttcctgagaataccctgttcctagctctttattaaatcgtttacaacacaatcaatctgctgtctttttactttgttctcttttattttcacttataccctgctagcttaatctcgacatttaactcactgtttgaacaaaagaactccgtgaattcgatcctaaaatactgcaattgatcccttatttgaggaagtagttttaggtaatttgaaccatatcaaatttggtgacgttgccgaagttcttgggaatcatcattgacgtttagtttagagatttcgtctagttttaacttttattttgttactaacgcgtttcttgtttcttcttttctgtgtttcaggtgtatgcctaggcaaacaaagagcacacaacagaaggagcttatcaacttgtctgttctggacttgggaaaactggaacgcaccaaccaaaaaactcagagattagcaatggttgacagagtcatcagagctgatgcagaaggagttttgagagatgaggatgggcaagcctacaatgaggctggtcagagattggatgatcatggactcatcctacctgaggacgccaatgaggatcaggtgcgcctcaatgcgcaattagctgccagagacgtagcagagctcggtgttagcgacaccaattgggtgtcgatcgacacctttgggagcagaatgcagacgcgattggtgtcgagcgacacaacagagatgtcgatcgacaccaaccccagattcctgcagctattcctccagctgcagaaccacgtcgtactcttcgggatttcaacagttttgacatgttatatgctaaatgatcagcaatcgtacccccacccttccagaggaacgattatgagctaaagcctgactactttgctttagtaggccaacatcctttccatggcttgtctcatgagcagccaatggaccatatcgagcgttttgaggacctcgttctgagcatcaaagctaatggagtcttagaggactacctactgtgcaagctcttcccttattcacttaccggggaagccgcttcttggctgaaaccacttcaagcacgttctctcgagacttggagaaacatcaagttaggtttcttgaacaattttttatgatgattctaagtctgaggagctgagaaacaagctatctacc

SEQ ID NO: 4523 - DNA, 1036 bp, Arabidopsis thaliana landsberg
gtccgggccacaaaaccgacactatgcatctacaaaagtgaatcccacaacttattatcttgcatgaaaaagtaataatcagggacaataaatataaactgtttcagttttcataaacagccaggcacagaattcttctgaaatgagtaatgacatagtgcagtcatggaagcgtatttggggttgaaactttcaacaagctatggttgtatcgtttctctataccaagactgtgttaatacaatatgcatatgtagttcagtgatttagagagatctatatcagttatctacatattctgcaaccaattgacaagaccagaggttttcaagttacagaatacacaaacaaatcaacctgtcaacatgattactcataccaaagagaatataaactagagaatacagacttggagcctgcagtatcagtgatcatagagaacttacaacggaattcacattaatgattcggctaggagagcctcggatcagagacggcaaaagaagtactgaaagcagcgctggagctaaatgattcacttgcatgtgctgctcatatccttcctctgagaatttttgcgcctctgcacaaatcagagaacagagcattttaaggttacttttcctcaacacatactgcagaaaatgtagcatctgacaaccaatcatttaaaaaggagacccattggacagagttgctatgaaagaacatgccagttctcaccaattgggtccatcaagttggaatattgatgatgatgatgattggttcacaagtatgactttgagatcataacaaagagatgatgaaaatagatacaggaaacaacagaaggggaaactcaatgcttatagctaaaacggcaataaaaccaacctcccatagcaaacatcccagcattgttaatcagaacatgcaaaggtcctaaccgagcgttgaaagcctcagcaaatctcgcgacagaatccagtgagagtagatcaatctccattgcctttacaaaataaaacagagtattattatcaactatctagac

SEQ ID NO: 4524 - DNA, 1873 bp, Arabidopsis thaliana landsberg
gatcagctaaactaatcttgaactgttcaacattatatttctttggaattgactgtcttaaagaagtttaacaaatggtcgagattttttctttcttttcatgaagcctatatatgagagaacaattcagacaagcaacttcacacagatcaacaaaacagacttttatttcttctttttagttgctcatcaatggcaattactttcatatcaatagctctattcatagtcacccaattatgcttcgtttcttgcgtgctaagtcaacaaaacgaaaccaaatttctctaccacggatttttcgaagccaatctactcaagtatggatcctccaagatcctccctagtggcatcttggagctaacaaacagctcacgaagacaaatgggtcaagccttctatggcttccccatagccttcaaaaacagtactaactcatcaaactcgttttctttctccacaagtttcgttttctcaatcgacgcaccaggtcatggcctaaccttcctcatctcgccgtccatggatttcacgcaagccatgccgagccagtatctcggtctcttcaacactacaaacaatggaaactccactaaccgaattctcgcggtagaatttgacacagtaaagtccaacgagtttcttgacatcgacgataaccatgtaggcatcgatgtgaacggtttggtctccgttgaatctgcaccagctgcatttttttccaacaagcaaagcaagaatataagcttgaagttatcgagcaaagacccaattcgggcttggatcgaatacaatggagtagaaaggcttctcaatgtcacattggctacccttgacacttctaagcctaactttcctcttttgtcaagacagatgaatctttctgagattttcatggagaaaatgtatgtaggattctcggcatccacaggaaacattacgagtaatcatgatgttcttggatggagctttagcagagaaggaaaaccacaagactttgatcttaaactacttccttcgctttcaaccccgtcgccatctgactttgatgaccttgatcccattccagatcctccttcagattcagcaaccgtaaagcctaatcacaccaagacgatgatcataatctgcacacttgcaataatgatctttatgatatgattgaaggaagaggcaaacacattggtcttatgataaagttggatgagtactctatttatgtagttacatatatcgcctctaaacctttggcaattacattgtttggtctgcttttttttccaaccacgcgtaaattggtttgttgttgttacacaagttaattaatttttgattgccaaagaaaaagttgtaatttcattctcaaactctttgcttgtcataagtttttagatgatttagtttttaacagaatggatcaggtgaagtcaacgaggtgtcatataaaaacgtaaataacaaactttttgtattcattaaattttttaaaatcaattttccttttgtattttttgcatcttttttgtctgaaaaagagagaaaggaaataaaatctcaatcgtggagatgatagcacgtgtcaatgttgcgacacgatctgatccaaacctatttatattcttcgctgctttttctgtcttgaccgctcttcttctatcgatctctgatctcctcttctctctgtcttctgagttctgtctacgcttcgtcgccgatcccggccagactccgtcttaccggcacaaaccctaggtgagcctcaagagtttggattggtttgttgtttttgttctgggggaattttattgcgtaaactcacctataatggtgttactgaagaaattcatttttccggaggacgaatttcaatttt

SEQ ID NO: 4525 - DNA, 542 bp, Arabidopsis thaliana landsberg
aaggcgaagggccagtgcctgacccgtatgatgaaatgttgtccacacttaatgtttgaatgctacagcttttcattgaggggccagggttactgtggttatatacttcttcgacaagcttagaaatcaataactagaaactcttactaactaaatcccttctcaccacctctcatagatattgaactatatataaacacgtgtgacttcttagattacatgagtgatgaaaggaatgataatcctctcgttttaaactacatgctccatttggataattgaatttgccctcaaacatgcaacaattacttttgctagtaattccatgaatttcatttactgggttgcagatatacagttatcaaggacccaatgaagagtttaatgaggccagaactcctgctccaaacggtaagagaagccaaacaaaaatgtctgacagtgttatagagcaagtaaatgcatgccatctgctaaattccctctttttttttgttagaaatccaaacgagcacttctgttgctgtaccaaacgatatcat

SEQ ID NO: 4526 - DNA, 947 bp, Arabidopsis thaliana landsberg
tttccagattccgttagaattttatgcttacttgtgctatagttttgtttgcttgtggttcaggaaatgtaaaaagtttgcagttttgagttaagtctggttttaagtaatttcttagttgtgttgtgtgtttaagtgttttcgagattgaagacaagggaccaagaatggtacttctacagtgcattagataagaagtatggaaacggtgctaggatgaaccgagcaactaacagagggtactggaaagctactggaaaagacagagaaatccgccgtgacattctgcttctcggtatgaaaaagacacttgttttccacagtgggcgtgcaccagacgggcttcggactaattgggttatgcatgagtatcgccttgtggaatatgaaaccgagaaaaacggaaacctggtggtactgtattgtccaaattactttcgaatttggtttatctgataatttccaaaagatctcaattctttgtttgggtgcagcaagatgcatatgtgttgtgtagagtcttccacaagaataacattgggccaccaagtgggaacagatatgctccgttcatggaagaggaatgggctgatgatgaaggagctctgattccaggaatagacgttaagctcaggctagagccgccgccagtagccaatggaaacgaccagatggaccaggtttgtgatttcttcttactctggcttcattacccaaaccttattagtttcattcaatatttcttggatgccaaaaactctgttgaaatactctctttcttatgttttccatgtggaatatgccagtttactaatcgactaaggtctataaaattagccatcatatggttccctgcgtcctatagtgcgcagcaatcacttaacagtcagcatcatttctcttgtttcacaagatattatatttattatctgcaccctgctgtgttg

SEQ ID NO: 4527 - DNA, 1995 bp, Arabidopsis thaliana landsberg
ataaattgtacctctaagtcctctttattttccacataacctatctttccttttctgcagctatggagttcaacctttaatgttcgtagtttatgccagattttttaagagtcggaatgatggacaaggatatcccaaacgtgccgggaagggggccttctccacctcgtggcttcttcaggtcccaaatccgagctccatgtgcgctgatcaaggggcttccggacagagatgaagaaatcgcgatgtcattcatcaaagctcttgcggttcagcaccagaagcattcgttagaaaagaagaaactccagaataagatcaatcaaatgctacgaagggtcaccgtgatatagggagcttcacaccctcaactctcatcccggggattggatcgagctcagagtctccgagtttgctcgcatacaggactgtatgttgccaatttttgacctcgctggtcaaggagtccaagtgttctgtaagacgagaagagtttcctaattcgaagtgcgcgcatgttgagacttcgtcttctttacttactactgtgaataaatgtagttgtgtttcctatttttgtatgttcgcacagtcgaactcctttcttttttaatgaataaaacaaattgtattagtagctaaactatatcctagctgcctacgtacccatttcgggatcaaaccacaccgtagtttatgtacataaaaaacgcgtgttactttaaacataaaatttcttaaagttcaccacattcgaaggacgttggactagcctgtcttttaatcctttaatctgtaaacaccattccgatccacttcgataacaatataaggaccttcccaattaataccgagtttacctgctccttcttccttcttattatcaaaaacatgctttagcatgaaatcccctacaaagaaaggcctgcttttgactttggtattgtaataccgagctgccgcttgctgataattttgaatccggattaaggcctgatctcgcctttcattgatagtatctaacgaatcatcgagcatcgctgagttttccttttcgtttagtggagcctctgttcggcgaagtccgggcacgttaagttcggccgaaaccactgcttccatcccgtttaccaaagaaaacggagtttcccctagaacgcctaggagttgtacgataagcccacaaaatgggttggagctcgtcgtaccatccccccccttcaaatgatttaagcgcttttttagattgctaaggattgtcttgtttgcaccttcggcttggccatttccttgtgggtaccgtggggtggaataactaactttgattctccaatctgagtagaaagcttcgagttcgtgcaaaatgaactgtggtctgttgtccgtaactatctcgtacgggatgccgtgtcaacatatgatgttgttccaaataaaagtttttaccgccgagtccttgatgctcatgtatgcttcggcttcaatccacttcgaaaagtaatctattaaaaccaaaagataatgtacgcaaagggctgaactgtgcaatggtccaacgatatccatcgaccacctcataaacgggtatggggcagagatggaagagaataactctgaaggctgatggataagaggcgcatggaattggcaacgtatacaccggtgggcatacttaacacaatccgtgatcatagtgggccaataatatcccattcttttaatctggaaagccatgacccttcctaaagaatgactgccacacaaaccttcgtatactttcgctcaaggcgatctcgacttcgggtccaaaaatgacaattgatcaggatcgctgacacctcgcctatacaaagcaacctttgatacacaaaatttcgcgctaacgtttctcacttttctagcttgccacttattttttgggagctcacctgtcacgatgtaatgctttattggctctctccaagcaccctcccaatctttagccagaatttggtc

SEQ ID NO: 4528 - DNA, 2810 bp, Arabidopsis thaliana landsberg
caacgactgaggttaaggttgaagaagagaaaccggcggttccagcggcggcggaggagaaatcatcagaggctgctccggttgagaccaaatctgaggagaaacctgaagagaaagcagaggtaacaaccgagaaagcatccagtgccgaagaagatggaaccaagaccgtggaagcaatcgaagaatctatcgtctctgtttcaccacctgaatccgccgtagcacctgtcgtggtagagactgtcgccgttgctgaggcagagccagtggagccggaagaagtctcgatctggggagttccactactccaagacgagagatctgacgtgatcctcacgaaattcctccgtgcaagagactttaaggtcaaagaagctttaaccatgcttaaaaacaccgtccagtggcgtaaagaaaacaaaatcgacgaactcgttgaatccggagaagaagtgagtgagttcgagaagatggtgtttgctcacggtgttgacaaagaaggacacgtcgtgatctacagttcttacggtgagtttcagaacaaggagcttttctccgacaaggagaagcttaacaagttcctcagctggaggattcagctacaagagaagtgtgtgagagctattgatttcagcaaccctgaagcgaagtcttcgtttgtgttcgtcagcgacttcaggaacgctccaggacttggtaaaagagccttgtggcaattcatcagacgcgctgttaaacaattcgaggacaattatcctgaattcgccgctaaagaggtattaaactttatacgacgatactaacacaaaccactagtctagttaataatgttcaaagataattattctcttaaacttagaattagaactacaattaaatattattataatccacttaaagatgatttcttctttaattacattttttattttttttataaatcttctttttttactttttttgcagctattcatcaatgtcccatggtggtacattccatactacaaaacattcggatctatcatcacatcgccaaggactaggagcaagatggtccttgctggtccatccaaatctgccgatactattttcaagtaattaaccattacatcactttaaccatttcataattgtatatttgtatgtttgcatgtttctcactaaggcttattatataatcagatacatagctcctgaacaagttcccgttaaatacggtggacttagcaaagatactcctttgaccgaagaaaccataacggaagccatcgttaaaccggcagcaaactacactattgaattgcctgcttctgaggtataaatacatttaaatctcgatggctaataagctcatattgtaacaatgttgttgatcaagaaggttaatgttgattgtgttgatttgtggtaggcttgcacgctttcatgggagcttagggttttgggtgctgatgtgagctacggagctcagtttgagccaaccaccgaaggaagctatgctgtgatcgtctctaagacacggaagattggatcaaccgatgaaccggtgataaccgattcttttaaggtgggtgaaccgggaaagattgtgatcacaatcgacaaccagacttccaagaagaagaaagtgctctacaggttcaaaactcaataaaaggtctgatctttgaaatccaaatccaaggaagaagcaaaaaaaatgttattttgttatttgggggaaacaaattttaattaattaatttagtttgttatttattatgtaattttgaaatctcaagatgtggttgtgtttttgctttgttttggtattgggggttgttttcgtgtgtggagaatatgtgattaaaattcaaaagaaagtaaagaacactttatttcatgatttcttacctttaacttttttttgttcctacttttttttgtaaaattgtgtaaatcttattgtatttattacttatacttgtctttatgtttctattatctttacttcttgttcatgaacttgattctgaaacaaatgttttcttagtaaagcatttggaaaaatagagttgaaagttacactagatagtgatcataccaagtgttataagtctaatgtattatcatcatcaaagatataaagataatgttcagtggctatttatagttttaagagataaggagaagagacgtgtcaaggctgattgtaaatttgttgttatatcaatattgatagagagatatgaatttaaatatgaaaaaggtccatctgtatataatagattgaagtggataacactgaatgagacattaaggacgagatattatgagaatggaccctatttgttgattgatatatggactaataagtcgtggataagagaaggatcacggaatcaagcaacgattatatttgacattaagagaagaattaaattcggcagagaaaaaaagaagatatttaaccgcaaactcgattttgcgaaatctaattctcttgggagggtcaagaccaaatgacaatgtctttgaagtgttatttgatttttggattctaagctatcgtagtaaagattggaataggttgaaatttgcggattaacccataaaatcggattagaatgaataattagtctattagtaattagactcattttttgaacatatactctgttcagaaaattcacctttagattgacttcaacatgtttatatggattagctcaacataaacaatggtccgtattctgacaattatagacttttagtttacgttcgtaataaatgaatatcttgatttattgtcgagttgacataaacat

SEQ ID NO: 4529 - DNA, 1449 bp, Arabidopsis thaliana landsberg
gcttgatctttgagcacggtgagcttggcgaatttggggttctgtcatgtcactcatgtcaaatgcctcaacttcctcattatcaatagaggatcttcttgcccgagatgaacacttccttcttgaatccatggagattggtggtgagcttcggcaaggcgaacaagaactacttctctaagaggtatcaaaggagaagggaatcggtttctttggtgatgaaatttagagcttgaaaccgattgaatgcttgaggatagactttggagtgatcgaataactttggtgaagtattggtgaaggagaacggattcttaaagagtgataaggagcgttttaggggaagggttggaatgaagacttcaaagctttgtgagggggttgcgaaaacgagatgatgaaagagagagttttattgaaggtttgtcgaaattaaagggtggagaagaatggtgtttggtttctttgggataggatagaaaagttgattggaaatggtgaggggtatgggtaatagctttgtccgtcgagtaaaggagtgtttggggagcaagtggggtcacgaaattatgccttggtcttcaaataatgagagctcgagtgtgaggcccaagcccaagaggggcccaaccaacccaagtaacacacaaaaccctaagagtgtgtatgtatatatgctacaagtcatgggccgacgggttacatgctggtcaagaaaggctgacaagcccggaatgcatgggagtgtctgagccacgagggccagcctccactcatgaggttctagtcgtcacgaggatgactggacctaacgatatataatgggtatgttattatgaataagatggttattatgaatgtgctattagaaattaaagcatgttaggttgattgtttgtgtctaagtttatatgttatgatgatgattgtataactttagaaagtgttctatgtttcattggcagatttgattcccctcactaagtattctttactcacccttttttccctttttcctcaggttagtaagcgtgaggagttatgtgcaatattttgttcgtgtgtgaagtttaaagaaaacattttagcaagatcagatgaataacatgccgttttggcctatatggcgggataggtgttacaaggtgcaatacccggatttggtggcagacaccgtcgtggtcaaaaagaagaatggaaaagacagggtgtggatcgacttcacataccttaataaagcttgcccgaatgacagtttcccgcttccgcatatagattgtctcgtggagtctaccgctgggaacgagttactaactttcatggacgccttctctgggtataatccaataatgatgaatcccgaaggtccagagaaggcctcctttatccaccatagagatatttaatgttattaggtaatgcattttggttttaaaatgcaggagctac

SEQ ID NO: 4530 - DNA, 1438 bp, Arabidopsis thaliana landsberg
tttgggtttaaatcttgagagtactcttgctactgcttcttgttccttctcttcatcttgtgaatccaagcttgacactgcacagtagagaaacagaaaaatggtttcaattagaaaagtgagaagcttttttggggttgatggaacaatttggaagatagttatatatacttttcttcaaagaggaccaagctgcaatggctgcgtttttctcagcttgtttctttgtctttgctgattctcctgtaaacgtcatcccagcaagttcaacagtacaagagaaacctgggaagtgacaagatcctgatctcacacttgtgtacattggtagatcaagaccagctctatgtgctgtctcttgaagcaggttcttgtaaatccctgtctcatccttgtataaagagtgacatgaagatatacgatgttactcttttgcatttttttgtgtatgatcaaaaccaagtagaaaagacagagaacttacaagaatcttagcagttagagactttgaagggactctagacgaaaggacattaagggaaacttcagcagctgcatgctcagcttgtctgagagtagaacagtaagtgggactctcaaatatctcaccattgaagttaacagaagctttgaatcttggagcatgatctggtccttctcttatgcaagtatatgatggtaagttgaaacaacttctctgtgcaagctcttgaagctgattcttatacattttttcccctgtaaatacaccaaaatcaaccaaagtcaactccagaaaccacaaatctcttttggtaaagtcttaagagaagacaaacgaaaaagccgacctgttgaaatttggtatcttaagttttggctatttagtgtttgaaagtaagtttaaagaagagagagagataaaaaagaaagtttttgcagaggtttttgaactcttcactcacatggtaaggtactaaaggttctaaataaagagtagaagaggatgctaaaacagtaatagtgacatctcaattgaaataaggttagtctttttatataatttataacatgtgcatacaaataacaattatgaacaatgctattgactctctttattgtctttgtctatgatgtttgactggtcagttaccttcgtcctcagttaataacagttattttttcataaatgttagtgaaaatgatttagtctgatactttgaggcacttattaatgtttagtttgaccaatttgttgattatgttcattgtgttttgtctttgttcaatgccaaaaaaactttatattattgctaatcttcaatttcctaaaccaaaaatgttggcttgtgatgttaaatctctaacctttagactttagagctttgaagaacaaagaagaagcctttagagaaaaaaagcatttattacagagccgtgcttcaatgaagactataat

SEQ ID NO: 4531 - DNA, 455 bp, Arabidopsis thaliana landsberg
aaagttccatgttttagctggtgatgatagtcttttttatctgtaatgattgagagattgcttcaaaggtcttcaggtcaaggtagattcgaaaaagccataatctttaagctatatgtattggagaaagagaaggaagatatactgaaaaaaaggtttctttatttggttcttgttcttatgttttgcagtaactacagttgattcaggctctaaagctctggaatttctgggtttaagagtagatgacaacgacccaaatgcactctctacatcgccacaaattcatcaggttcagtttttgatcttttacatgattcaaagttggttactttcgaaatttgcaatgaatggttatattgagatttgtttgtaatttgtggcttttgagcaggaagttgaaataaatctaataattacagattactgtatgcctggcatgactggctatgatt

SEQ ID NO: 4532 - DNA, 5407 bp, Arabidopsis thaliana landsberg
acttctacttcaggacttgcccacctattttcaacatcattggggataccatcgtcaatgagctgcggactgatcctcgtattgccgcgagcctccttcggcttcacttccatgactgctttgttcgtgtaaggacttactcaacgtatcttttttgttagtaaaaaaactacgtcgtctacttttacatatatatattgaatggaggctaacatccatttttaatgataaataatgtcttcatgttatgtaacatatatggttttatagggttgtgatgcatcgatcttgcttgacaattccacatcattccggaccgagaaagatgctgctccaaacaaaaattcggttcgagggttcgatgtcatagatagaatgaaagcagccattgagagagcttgcccaagaacagtttcttgcgcagatattatcaccatcgcctctcagatatcagttcttttggtatgtacatatatatacctacatgacttatgatattgatcgggtgaagttaatccaaatatattatgaatttgacatcaatgctttatatgttatagtctggcggtccatggtggccggttccgttggggagaagagacagcgtagaagctttcttcgctctggctaatacagctcttccctctccattttccactcttactcaactgaaaacagctttttctgacgttggcctaaaccgctcttcggatttagtcgctctctccggtaatatatattttcgttcttgatctaggtagatacaattcattttatctatttatagctagctaattacaagatgattcatagaattattttgtatttataattagaatgatcaacttcaattaatctatatttagtattaaaaggcgtttttgaggcatatgaattagttaacatgagtttagttagaaaaccctcttgcttcatcttgagaaaaaaagactttgtagaaaaccatatctcaaacaaatatcttctacgtaccacttgagtttggattataaaaggacttggtagaatgaaaaagcatgactcataattaaataaaacatacaatgtatctaatccttcatttgtcaaaatggtaggtggtcacacatttggaaaagcacaatgccaattcgtgacacctcgtctttacaacttcaacggtaccaacagaccagacccaagtctgaacccaacttacctcgttgaactccgtcgattgtgtcctcaaaacggaaacggcaccgttttggttaacttcgattccgtgactccaactactttcgatagacaatattacaccaatcttcttaatgggaaaggtttgattcagagtgaccaagtgcttttctcgactccaggagctgacacgattccactagtaaaccaatacagcagcaacacgttcgtgttctttggagcattcgttgatgcaatgattaggatgggaaatcttaaacctttgactggaactcaaggagagataagacagaattgtagggttgtgaatccaagaattagggttgtggagaacgaccatggtgttgtgagttctatctgattatgcatgttggggatatatggatatgtaagaacgtataaaatgtgtggaattgtgggaacatttcgactaaataaagttctcatcacaagttgtgtgatttatgaaatttggtcttaattaacacttttgattcgattttccgagtactaaaaaagtggatgaatttcattatgaaatgatacgtggtgtttgtataacacttaactttcaattgacatagtttcatgttattggagaagttaaattgtgtgtaaaaatataattcgaacatgcatccatttctataaataaatatcgaggttatcggattaaacaaagcttgtaggacctaaatatagtcatgaaactacaaccctaatagaagtttcaaacataatcaaactttagtcttgagcccagaaatagaaaatatataaaagttatactcttgtaagcaaagaaaagcccaaacgaagcaaaacaagacaaaaagcccagtttaaagtagatgtaagcagatttacttgctacatcatcaactccccattttacatcgtcccaatgagatatatccactcttttcatagaatttgatgttttcacacgaatacgaaatcccaaatatataatctatcccttataattcataattatatacaaaaaatatgcaatcacacaactagccattaaatactatatagaaatatcaccacttgtcatttcaaaacaatacgctaattaatgtctataattcaatccttgtcagatggagataagagagacacaatccataattttgttgctcattcatatagttcaagtgcgttggctcacggcaaacattttaaatttagacccacgccggagaaaatctaattagacgcatagtttattatagtggatttcattgggacaaacaatattagccgcattttatgtaatatctttcacttggaacacgtgccccatacacacatggtccctccatgctttgtacttatgtagttttttgtatgctacgatttggtattattgtatcgcaacgcgtaaaaaaggagagccaagtgtgtctccaatctttgggattgatttaagaataaaagataggaaagacaattatatgtccaatctttaagattgatgatttaaaattttgtagttatcatgaaaaacaaatttttatagtgttgtagggacgtaggtgatcattctcatgactcatgacacccattccatttaccaaatgcattacttatttacttgttttggtacaataccaaacacactaacaatgatttaacatttacttaattataatataaatttgcttacgaaacaacttgcattaaacaatttgcttctactatacttatattgatctatcgtgggcggtgagtaaaatgagttgggacatggatttgtcatttaggtcatttttagtaaatgtgaaacttgtaaccaaaatatgcataaaaactttagcctttctaaaagctaaaaatggtttgaggaacaccaagacgtaagctcttttaagctatttgatgtttgatgtgataaaataactaaaaactatttgttatgttttttcctccccttaaagatataagagaagagaaggtaaagaagttgtgtaagttagtcacaatcaattgttggaaataaatttgaaaactctgttaaaagtcacccaaatgagtttcaaacaagagttaaaagataaaaaaaaaaaaaaaagtaactgatataaagaatggtagtttacttttttttaaaagaatggtagttttttaaaaactatttaggttgatggtatttttgtaaagaaatccaaaaattgtagttgatacaagaaaattttgatttgtgttgatttatttctcttttggcatgtgaatgtaagtaatctttttccacatgatttctaattctggacttgcatgtcttgttacgccagtcaacattcgttggataagttacaatgtcatttacaacttgcagattaattcagaaatcaagaaggaaaaaatctgaattagaaatagtaggttggatttttcacaaaaaaaaaaaaagtacaatattttgagatatgaccattagattcttaaattttacgattctaacttgtaagatttcaaattaaaccatgtataattcaatttagggttaatttaatatactttagggtagtaacgataaaatagataattaaattgaagtttaaggaccatcctgtaaattcaagttcggtaccggaaacacgtcagcattgatctaatagatacgagtcctcctttctctataaataacgtaatctctctcccgtcttcgttaccatcgaaacagtgtcgtcgtagtctctctctctctccgcgaaatatcatcggagaaaagaaacagagacacgaaacagagaaaaccatgcagagattcgcggcgaaaagatcggtgcaaaaaatttccgtctctctatggcgtcgatgtatctcatcgacgtctcaggcagcgacagcttccgttaaggattccgacgagtttcaggcgaggcttcctccttttgcttacactcctccgccgtatactggtccttccgccgatgttatccttagcaaaaggaaggagtttctcagtccttccatgttctgtctctatcggaaaccggtacgtgatccatttcaaaactctcgattcaaatgtttggttttgaaattgtttttgattcgtatagtctctgatccggtgttgatgatctctgtatgtaataatgacgaaaaagattgaaactttattgatgggctcatcgaaaacagctaaatttttatcatttttaaattggtttcagactacgatgttcttatccgaatattcttgaccaataataatggaatctatcaaatatataatatataaatgttgaatctttataatcaatatcatgtgcaggctttaaagttcaatactttattgactattctattttgtatttatgtgtggtattttgggagttgttgcagttaaacattgtggatgggaaaatgcagtatctatttgatgagagtggtcggagatatttagatgcatttgctgggattgctgttgtgaattgtggacattgtcatccagatgtggttgagccagtgattaatcaaatcaagaggcttcagcatcctactgttctttaccttaaccatgccattgctgatttctctgaggctcttgcttctaaacttcccggtgatctaaaggtggtgtttttcactaactcagggacagaggctaatgaattggcgcttatgatggctaagttgtatactggatgtcaagatattgtggcggttcgaaacgggtatcatggtaatgcagctgcaactatgggggctactggtcagagtatgtggaagtttaatgtggttcagaatagtgttcatcatgctttgaaccctgatccttatagaggtgtgtttggttctgatggagagaagtatgcaaaggatttgcaagatcttattcaatatggtacgactggtcacattgccggttttatttgtgaagctattcaggtaatcaacctttgactattgttggaagtcatttataaagtgttgttagattagaattaagagcgaatgcaaatgtgaatagggagttggagggatcgtggaactagcaccgggatatttgtcagcggcttacgatactgttaagaaagctggtggattgttcattgcggatgaagttcagtctggtttcgcacgtactggtaacttttggggatttgaggcacacaatgttgtccctgacatagtaaccatggcaaaggtaagagatgtgccaagttgtttgttttgtttctaacctaactcc

SEQ ID NO: 4533 - DNA, 744 bp, Arabidopsis thaliana landsberg
accttcgtaatgggaaaggtcttattcagagtgaccaggaactcttttcgactccaggagccgatacgatccctttagtaaaccaatacagcagcgacatgtccgcgttctttcgagcattcattgacgcaatgattaggatgggaaatcttagacctttgactggaactcaaggagagattagacaaaattgtagggttgtgaatccacgaattagggttgtggagaacgacgatggtgttgtgagttctatctgattatgcatgttgccatgttggggatatatatatggatatgtaagaaagtataaaatgcgcacgtgagaacaatttcgactaataaaagttctcacgagttatgagatttatgaaattggtattaagtacacttacaatgcatatatacgtggtgtttataacacttcaaattctgacatgtattcaagtagcttttgatttaacatcacgtcgaaatttataatatatattcaagcaaattgttgaaataaaatgtcctagtttttgtcagctttcattacttataaatgagaagaaaagacaaggagctaaactgctaaagtattagattaggttaacttttgttaaccacaaaatctagcacatggacgcgtatgaagttgataaatcatatatgtattaggtaacattgttatttcagattaaattgttttgagcaagaattgtataaaaagtttatcgatttgtgaaggtggcttctgaggct

SEQ ID NO: 4534 - DNA, 864 bp, Arabidopsis thaliana landsberg
agacaatttcaaagctcaaaccaaatcatatctataagaaagaaaaattatacataaaaagtaaattttgtagatcactctgacaaaataatctaaaacattgagttaacattgtaattttattacttacaaattactatgtaaattctagacttagtctaggaatgtgtctgtctagcttagctagctatcaatatataaaaaggaattgcattttaaacacatgcatatcttaattagagttagatgatgtaacatgaatttttttaccggaaagagcaactagatcggaagtgcggtttaggccaacgtcagcaaaggctgttttaagttgagtaagattgaaaaacggagagggcagagctgtattagccagagcgaagaaagcttctacactgtctctcctccccaacggaaccggccaccatggacctcccgactatataaaacatagacttttaattgataacattttcgattagtttaataaaagatacgtcatgtatgtatatttatataccaaaagcactgatatttgagaggcgatggtgagaatatctgcacaagagactcttcctgggcaagctctctcaagggctactttcattctatctatgacattaaaccctcgagccgaatttgcgttcggagcagcatctttctcagtccggaatgatgtggaattgtcaagcaagatcgatgcatcacaaccctacaaaaaccatatattttacatttaaaaaaaaaaaaggcttttagcaaattctatatgtaaatggtatataaagtagttttgtccattgaacacgttctgaattttttactaataaaagatgagttgagaaatccttacacgaacaaagc

SEQ ID NO: 4535 - DNA, 975 bp, Arabidopsis thaliana landsberg
ccgactgtgacactgaacaaagcccatttggtttctgttcatgggatgtacttattttctctggagaacagttcttgtctacaccagtgttggaatttaacccgcttggttcaatctctgtcgtttcttgaatctcaacaagcaaagatgatggcccagttccagtcttttttgattgatcagactttaatttcatatgctcaaccaacggcacagactctttatcctgattcatctcttcacaagtgctagtttgttgttggaccacacatatactttgctgctctgattcaagacaaacagtcatttttgtgtcatcatcacctggtatatgtttggacactggactttctctggaaatgcaagcactgagccgtctgcgtttcaaatatggtgcagaatttacagcatgataattagtttctgctcgaggggtagaccgatgcttaataaccctctttgatggatccttaaccttctccaaagtcttctcttcctttataccagaatcagcccctacatgacccctttttgtttcatcacttggtaaatatctccatctcctaaacccagatgatttttcgcagtggtctacactcgtatcaataatcgtgaatcgcattgggtcatccacttggttcttggcatccagaggcctcacttgcgacttttccacattctgactgtccagagaattttgaagcacaggagaatctttaacttctagacgaacgtttggctcagaaactactagacactctgcattcagattccgtaaatcacacaactttcctccagtagccaaactagtgtccacaacagtgaatttcattcccagagttccacggttagaacatgggagacctgaagtaacggtgtcttagactattagacgggacagacttttcatctgacttgggaaaagaaagctctgcaacaactcctccttgtttattcttaaaaagttaaggcttt

SEQ ID NO: 4536 - DNA, 570 bp, Arabidopsis thaliana landsberg
atattcataacaatcattatttcaacttcatatttttgaatattagaccatatgaaaagctacttgagataactccaaagcaaaccaataatagaaacattacttctgcctaattatggaaataataagcataaaagaggaataaaaaatcctttgtgtaaaacatttctcttctgtacacatttatgcttcaggaagaccaatcttctcacatccagcgatcaaaactttcagacttaagtccgttgagctccttagccacgcctgaacggaagcttcaatacaatcgggggaagcttacggtattcagttaggaccggccttgactcctgtattctatctagagtcttactctcagttcttgcttcattgagaagatagcgaggctttgtatcctctatttgatccaagggcttacttgttggtgctttccatataaaaatgtttctatcttctcttctgtgctccaagtctgcactcccatttctgttacacgctttagctgagcgttttttcttcgttgaactttcacgctttctcggttctggtttagtcgtgcttttcattctc

SEQ ID NO: 4537 - DNA, 3096 bp, Arabidopsis thaliana landsberg
  unsure (1)..(3096): unsure at all n locations
tgatctcttcttcggctttttcccatgaaataccatattgcttcatgtaacaatcaatggatgttcctacgtgctttctcttatgttcaaactgcattagatagatctcagattttaaaattatctttacaccaacgtggtgacaaaaattgtatttgtatgtagagtgtcaactacagcttaagttcttaggtctgatattataattcgaattctacaagaaattggatctcaatctctcttggaatgtccaacgtcaaatatcatgttctttttctaatgtagtaatgtgtgtcattttcttttgtaacatgttgctttctcatagtacatgttatatactacgatcacatgctattccttccgaaagcatggagacaaaattttacacatgacattgtttttttctttcagtatgacatgtttttttttaaatgacattgatttctttctcattctttcggatatctctctttcactgacaaaactcctgtcttaatttttttctcctttcagattttgtgttattattatttgtttcatgtttttccccaaactacatatgctactgaatttttgtcttttgtttgtggaaatctataaattttctcctatctttcctaaattttctgattcatggctactctggtcaaaatctagttaataatataatcttttagaagcaatatctttgtcatttaggatccgataggtcaaactagactggttattaacttattggcatcactacaataatgtgagttaattacctcgcaactagcaatgtcaccacagagacggcctattagtgcagaagtcacaagaaggggtgggaaagtgcttaaccattcaaacacatcaagggtgccttcatccaccatccctagaaaggatcctgttaacagagctaagtagctcgatgaataaactccgttctctttgtactcgtcaaatgttgccacaaagtcttcactcaaccattttgcctcttgaagataggctttagcagttacaatcatctgatttattaacatataaccaacaaatttttcatttagattcaacacacatgaacatagacttagtacttaattactaattagttttgtgcttttgaagtagttgtgtatataagtatttagtaataccgattttttagcgaaaaggccgcatcctgaccttccttccctctccatatcctcctcaagttttccgtagaaatctaacaccacatgatgaagatacctcatgctctccgggagcccttctatgccgctaggattccacataatcaatgaaatggttcgagttcctcaatcgtgccaaatgcatcgtacgtatcatcaacaagagtcaataagataacaacaatggccaatctaatccttgcttgagaatatcggggctcaaagtatgctccaacagcccacaagtagctttcgacagtcctattccttgcatatggtactttcaagtcgagctctagatttgagtaccacctacaaaaaaagaagaatcgacaatcattatggtagtctctccatatataagagttttaaaatgtatatataatctatcttgctagctcataatggcacctgaagacttggcaaagctctttgcggtgcaaaatttgcagaagattgaaatctatcttagcaaattctagcaaggtttggtcgtgcagatcttcttcttcatagtatgagatatattgtcgtgtctctatccttgatatacccctagggtatgcatgtttgagggcatttttaatgcggatggacataggtggactagattgatcagccagtccttccaaatgagacctagagaaagcaagagcttcatcgagaatgtcttcaccatgggtgctccaatgtgcagcttcataaaggcataaaagacctcttgcatcctcagctaggtgctccttgaactttccatccttattcttgaagttgttaaacacatcttacacatataattttttggtagtaatcaagtttaataattaacattgacttggtagatatactaatcattatgcacagagagtacaaagtgaatataccttgcgctttcacagtattaatatgatcgaattaggtgaagttgaaaaagaagaaaaaatacgctcgctatacttatgtcagttttcacattaaccaaaatgtaatatagttcttagaccaaaaacaaaatactactaacaattagcaacattctctttcatgacttttttcttagtaatatcaattcaaattttttttaacccaaaaaatatggaaacataaataagaaacttattcatactgataaattaattaacatattacgctcgataattctaacattagagtgacttaccgacaccaagtttatagccaaattgtctaaaaatttggaagacgagagagacggtgtataaatcgaactcattgcctcttatcatctgcataaaaccatgacaccaaacatcgtctgtaactgcgtgaagatgtgtacttcaaagcggtaggaaacaccaaggcgacaaagagcatcaatgaatttgatgttctctatcggctcttcttttgaagccattaacaatcctcttacggttttctttagtgaactcagcttctcttcgtttatcttactctcctatatacatcaaaataatggcacgagagaagacatcataatatagtatattcatagtgttttgtgaacaaatttgcctaattgtgacttcaagtcgtgtgggtacgtacccaatccaaaacagaaaaagagnccaagggatcttcccaatatatacactgaaaaaaccgntaatccgcgagaactttctccaatcgccagccgnnacaaagtatttatcagctcctgcatgcttaagttctttttctgaataaaagtgtatctataatcacacttcaaggttttctaaagctttggctgcacttgatacatatagaggccatatatagggagatgagcctccctctcttcctttggtgtttctttttttagtaacccttatcttaattctgtttatttctatggtattctctcttaggcgtgtaccaatcagtcattgattgggactct

SEQ ID NO: 4538 - DNA, 1699 bp, Arabidopsis thaliana landsberg
cagttggaaatccataacttaaaatctacaactccaaaattaataattctttttcctgtgatcttattttaatatgtagattattaatatgtattttgcatatatgtttgttgtgatgttaattttgcctatacactgtttgtttgtattgctacgactagcagtgaggtcacgagaatctgaagatcatcctggtacctggaatctcaagtcccaggcaagttgtgcccttgatcacttctttttacctactcatgttctgattaatcataatgatctgcataggttaattttgatgggacccaataggttaccctagtttgtctatctttataccttgtttaccactgaactttttgggtagtacttgctagtgctttatgtggttttgggtatgaagatacattattcatgatcacacttttattatctgtttattatcactgttcatgataagatcattatgttaattggaacatggatcgaccacccgggaaaacagtgctaccacaagggtttatggacgcccttggctgattaattaggaaagctagtggatgactaccttacccgaaagggcaagggcagtagggatgtggtcagtgtagggaggtccttggttgattttgctgtgatggcggtcaggcaagaaccctgcattggagcttcctataaactgtagcgggttttctgaagctagtggaactttgtaaaggcctcgtagtgttaccctgcctcgcctcctcagtagaggtgtatgggaagtcgcgatcccttggcagatgggtaacatgacttgtgggtaaagatgcgcaacctctgcagagtgtaaaactggtatactagccgtgctcacggtcatgagcagctcggaccctcacatgattaccttatggaactaaattcaatttgtcatatgcattgcatcgcaggtgattttgttacttttgttctactatttaattgggttggtatttacttatacttagtaactgctaataaaattttgaccaactttaaaagcaatgctcagctctaaccatcctctttggtaagccttacacttcacgtgagctcccacctttggcaagttcatgcacattattccccacaacttgttgagtgatgaacgtatgtgagctcacttttgctgtctcacaccccccacaggtcaagaacaggtaccacaggatgaggcgcatggaggatgttgtgatgagttcgtgagtggtctaggccgtcgtctctcaatcaactttgggttgctggaccgttgtctccttataatgtaattatttatttatgtattttgtatagaactcctgttatttagtaaagatgtgacattcgatcctgtgccatgattcatcatatgtgtgagacttggtaccagcacacctggtgattatgttcgcgctcgggtcttggtgccccgaaatccgggtgtgacagaagtggtatcagaggaatgttgactgtaggatgaaacctagatagaaatggacaaaacccttacttacttacctttgctactctgattctttctaaacttttcttaatcttttattatctaattccgctttactctgattattcttaccttttccttctaaagacaaatgtggatttcacactttgaaatcctgtgcctaaagtgacttttaggaataggagacccattcttaggaacaaaaacaaa

SEQ ID NO: 4539 - DNA, 502 bp, Arabidopsis thaliana landsberg
  unsure (1)..(502): unsure at all n locations
ctatttcccaccataatacaaaacagaattcaaattttatcattggttcctatacaatatcgatcaaatgatcagcatattgaagaactgacctgggagatcccaaggctcagatttgtatacatcggtaacagagatagcatcgaacttaaaaggtttattgcagatctttcgtttcagatagtaacgaacgagttcttcgtctgtgggatgaaaacgaaacccaggagcgagcgatgttactgagccacgacccatatactcgatggaccaaaactcaaacacaaggtttatgaataacttaaaagagctgttctgtcgaattcgaatcaaaagaaagagcaaaacaatgatttcgaaataaggggtttagaaattgaggaaaatgggactaaatagagagaaaaaaaaaagaagcaannnnnnnnnnnnnnnnnnnnnnnnnnnnnnnncaatcggagctaagcgaccgtagctagataatgtgcgaaagaagtttcac

SEQ ID NO: 4540 - DNA, 660 bp, Arabidopsis thaliana landsberg
taaaactgaatctttcagacataacatcaaagcaaacaatggtatattttctgatatcgagcctagctggataatacaaaacaccattgatgcatataccactatcttctagtagataatgaactacgcaacattgagtatttctccatgaaatatttccaaaccctaatgtcagaacttgatactcactagaccactcgtgtgagcctctatgcaaccatgtgatacgcaataccttgaattgtttgtcaatcggatcatacccaaaagaatatcttactttttcaattatcgtctctgaattcatctcctccattctctgtttgggtaaggctatatactctcctgtcgtgggattagaaatcaaggcaaataaataattctcttcgatatgctgactacatatcagtccatggacaggacgacataattgagagaatcttgtgctagaagtcttctgaagagaagtggcgacaagagacgagttattcggattgaaatgctgaggtgaagagttgaaaaacaactctcgtgcaactttgaagacgaaaagaagacgcggtgtagccgaagacttgaccgggaacaactggttgtaatttggacggcgaattatggacgaccacagtttcgatacacaacgacaccttgctatacact

SEQ ID NO: 4541 - DNA, 487 bp, Arabidopsis thaliana landsberg
  unsure (1)..(487): unsure at all n locations
cctatccaaccttcatttcaagctcattttgttccattgttggctcagagtattatccatgctaaaagtctacctaatcnnnnnnnnnnnnnnnnnnnnnnnnnnnnnnngaaattttacacgggtcatagtcatgtccgaagaggaaaagttcttattactgcagtggccactcttgaaaccaagtatccggctcaaaaagaaaacgaacggagctcttctttgtcttctgcttcttcgaaatcctcaaatggaagtgctgatgatggcgaagaacaagtggatgacagagaaaagttgagaaggatgaggatttctaaggcaaatagagggaacactccttggaacaaaggcaggaagcatagtccaggtgagtagtttttgcttattcgtatcttcagcaatctatcttcagttgcttctaattggaaacatttcataatctgttttctttgcgtttatgcagagaccctacangagatagaga

SEQ ID NO: 4542 - DNA, 512 bp, Arabidopsis thaliana landsberg
cgggtcgaataacccgtcagaggatgttatcatatatgtcttctttttgcgacaaaggggatgttttttctggaatcaaattcgctgactatggtcagcccggtggttcatcatgtgaaacgcttaaacgtggaaactgcggtgcgccggctactttgagactcgtcaaagaggttaacaaagttactcaacattagtaatcttgtttgacgataaatcttcttatcgattactattttttgtttatgcagaattgtcttggaaaagaacggtgtaggatttatattacagacgagatgtttgggccgacgcattgtaaaggacctgttagcttcgttttttctgctatttgtaaaaaaacttgagctttcttatttcatacgttaagggaaagtaatttttataacctttttttcttccctttaatgttttgatggatcgcatcatttttgctgttaatttacgtaatccacggaatttaattatgattttgtttactatatcaacttttt

SEQ ID NO: 4543 - DNA, 2169 bp, Arabidopsis thaliana landsberg
ggaactgaaacatcgtcttattctttttttttctgttttaggatcaacttgggattgtctatgactatagtgataatgccacaagcccatttttttctgcagatgatggagagctctcggagaaccaaaatccgtttaatcatccaactccggagcctgaaagtgtttgtaatttcttctttatctgaatgcagaaacactcttgtgtttcctttgaacattttgcctgcctttttttgaaacatagatctcaacgtgtatgttagcacaggttgtttttctctttattagcaatgaattaaaaaatcagactttgggtaaaaaaaatgtatatggcaaattcacaagagaattggcaacaataatgtgttggaactttggaactaattttaaatagcaagatcctcgtcaatagccaaaaggcagaagcttttttggcttaacttcggccaaagatatgaccagcataaggaacaagccttcaggtgaaggaacgagctctgcaggagacaatgtctggtccacttccaaaccatgaagtatcatccagctatcctacgtcgatgagaaaacatgtcgctgctgttcccccatgccgctgcactctttaattatatcataaagagttaaagttgtaggcctgaactactcactggaacatctaggatgggaagctaattctctggggctgttcttgactgaattgttttgcttcagatctttgcatcaagggcctaaaataggcgtgtggtctgatggggacgacacctttcactgctgaccctgcacaattaaagatctgccttgactgaatacacaccatcacattgttaaattcctttcctggatccttagccgtctccacagcttatcacattgttaaggtaaccaggtgccggtccaacgttttcaagggccctactcgagattcatttttttctccttttaaattactacttaaaatcacacataattaataccaagtgttttgagaactataagagttagagatagactaaatgactcaaaatcaatctccacatatgaagaacaatatactaaccttaacaaacacatcctgcacatacctttaacgttacctcttttatttaatcacttattcctcacgaatcacaaaaaaataagtctctcgtagagtaattaaaagtgactctgcactaaactaaagaattataaagagttgatggttttataaagccataataataataataaaaacataatacaccatcagtcgattccactcttttttctttcttgccgtcttacaacgaccttgtgattcctaggaacatgaaggacattgagtaactacgaggcagtgaagacttatgggaagtagccaagctgcaatcgtgaaacctctttgcctgaggtaaaatctcatcttacatcccttataaactctccattcacttgattgctgaatttgtgtgacataatacaaatgctctgttcttctttgccaccagcatatggattcaaatatcacataaaatggttttcattgttagtccagaacatgatataactttaaaatgtaaattactgataaagtgatttgatagatgatcgtgagagatgaattcacatagatttttgtgttgttgtttcaggaattgtacgtgtcaaggtacttgaaggggatggagttgagaaaatggggagaactcaacacaaaacgcagagagtttctagaaatcttcactccactgtccatccacaccacaccacacaactctagaaagctaaaagagttttttttttaacaaactagatagttagtgttttcactatattattatgtgaattaaaatcctcataattgatatacttacaaattctcctagtttctatgcatgtaagtatagggaaacaaagactgaattccccactcaacatgtttacgataagctgtcctttttacaataagcaaagaccttggacaccaaaataaatctaatattgatttaagaggcatcataacttgtagttgagcggttgaatacttgaaatcaggttttaaatgcttcattggccttggttcgaacctcattacaaacatttcgctacatttttatatttatggcctatgggcaaaaaataagaagttccttgcgcatccacccttaaggaccggctcacagt

SEQ ID NO: 4544 - DNA, 2756 bp, Arabidopsis thaliana landsberg
tttagaaggaagaaaagaaaaatggttagagttaagttggtaagatttgggtatttattacatatgatctcttttgtgtttttgtctaataatactttgggacaacaacaagacgatgatgatgattctgctgtgtacattgtcacacttaaacaacctcctactgttcatcgttttgaagaacaagagcttaaacacaaaaattcaaagtttacaccaaaattgaaaccaaggtactgataaatttgattatttttgttgtcactagatgatagctttagttaaacctttttgtatcggtttttctttttataggaacaatgcaaggaaacgtcatgggaagtcaaagataccatctgttgttcaatctcatgactctttcttgagaaagactttaaaaggagagaagtatataaagctttatagttaccattatcttatcaatggatttgctctgtttattaactcacaacaggtaaaaatcttgagttattgataattgtagaaataatcttgagttcttgatcttgatttttttgtgttatggtttttattttctaaggctgagaagctttcaatgacaagtgaagtagcaaacatagtgttggataactctgttaggacagcaacaacttatactccacagtttatgggtttaccacaaggagcatgggtcaaagaaggtggatttgagattgctggagaaggagttataatcggttttatcgatactgggatcgatccgaatcatcctagtttcaatgacaatgactctaagcgttcatatccaatccctaagcatttctcaggtgtttgtgaagttacaccggactttccatcaggatcttgcaataagaagcttattggagcacggcatttcgcgcaatccgctgtaaccagaggaatctttaactcatctgaagattacgcttctcctttcgatggagatggacatggaacgtaagtgtaactgttgaatgtatcatataaaaacagagtttgaagcttatagattgttgctttggatatatatgcagacacacagcttcggttgcagcgggtaaccacggagttccagtgatagtttctaaccataactttggatacgctagtggaatcgctcctcgtgcattgtaagtaaaataataagacttagatcaatgtcgaaatctatacaaaactaacttaaacttttatgtttttgaactttgttttcagtatttctgtttacaaggcattgtataagagttttggaggttttgctgcagatgttgtagcagctatagatcaggtttacaaatcaagaaactaaatgtgaataaacattttagcttttctttcaaatatgaagactttaatataatggttgtgattttttttcaggcagctcaagatggagtagatatattaagcctatcaattacaccgaatcggaaacctcccggtgttgccactttctttaatcctatcgacatggcattactttccgctgtaaaagccggaatcttcgtagtccaagctgcgggaaatacctgtccagcgcctaaaaccatgtcttcttttagtccttggatattcaccgttggtgcttcttctcatgatagagtttactctaattctttaaccttaggaaacaatgtaactattccaggcatgggattcgcaagtaagtcattaccatctcaaactataactttcaacgattcaagtcgaagattatggatttataacttgtgtactttgtttctttatagttcctacggatagtggaaaaatgtacaagatgatatctgcttttcatgccttgaacaatagtacttctgtagataaagatatgtatgtaggtgaatgtcaagattatgaaaacttcgatcaagatcgtgtctcagggaaacttttgatatgtagctactctgctcgttttgttctcggtctttcgactataaaacaagctttagatgttgccaagaatctatccgcgactggtgtgatattctatatagacccgtatgttcttggttttgagatcaatccaacaccgatggatatgcccgggatcataattccatctgtagaagattccaaggtgagaaaactaaagcatttgtttaaaggtttatacaaagtttctaatgatctaaagatatggttttcttgcagactttactcaagtactataactcttctattcaaagagatgtaaccactaaagaaattgttagttttggagcggttgcaaccattgaaggcggtttaaatgctaactttagtaacagagctcctaaggtaatgtattactcagcaagaggacctgatccagaagacaactcttttaacgacgcagacatattaaaaccgaacctcgtagctcctggaaactctatttggggtgcctggagttctgtttcaacggattcaactgagtttgaaggtaaactatatacaagtgatcaaaacagaggatttttctactgactttttgttctgttttgctctgtttaggtgagaaatttgcgatgatgtccggtacaagtatggctgctcctcatgtagctggtgtggctgcattaatcaaacaaagttacccacagtttgctccttcaacaatcgcatctgcgctttcaacaacggctctcctaaatgataataaaggcggtccgataatggctcagcgaacttattccaatcccgatcaaagcctctataccgcaacaccgtttgatatgggaagcggttttgttaacgcaacggcagct

SEQ ID NO: 4545 - DNA, 3497 bp, Arabidopsis thaliana landsberg
aactaaactactaaaccgtacaatgaaagcaaatctgttactttcatgcctggtggtatccaataatttctacgctagtttgtcataaatattagcaagtctttacgtgcgatatctttttcccccatgcagttacagataattattaatgtgaattttaccatatatattttgacgtgtaatcttcaactgtattcgaaggattaaagtactaaaccgtgtgtaccatgaaagcaaatctgtcactctcaggcttggtatccaacaatctctttggccagtaatttaagtaaagtttttaacgtgcgtgtggaaccgaaatttctcctttcgttttttagatctaagcatgaatggttaaacaaaataaaagaaacgtaaagattgatggtgttacaaaactcaacaagttaaacttaaaagtcaactactcacaatgttggtaacaacaaactcttgagattttatagaaatatattacatatctgtgctataatttggtctccaacacatattatcattagaggagaacaaaaaaaatggacaacctccctatcaacaatattatgttcaatgaattaaagtgaaaactgaaaaccttttaaaaagtaaatcgtgtttgtataactaaaatgattttctggattgacgactaagatgtatacgatgaaagaaacgtttttaagtcatccgatccctttcataaatatcagcaagttttgacgtatgacaattttttattgttcatgtaattacaaacaattaaagtgggatcgttttaccaaattttgtttttactaaaacgtgtatgctgacagaaaatctgtcaatgtaatacttgtattcgaataattaaactactaaaacgtgtacattgaaagagaatatgttttactttcatgctggtatccaataatctctatggtaattggtcggtaattttagtaagtttttaacgtgtggaactaatttaacatttcttcctttggttttagaagtaaagcatgaattataagttaaagatataggcgttttgcgactcaacaagtaatcacccactcacagcattagtaacaaactctgagattcttctctataaatatcacttgtgtgtgttcaagttaaagaagaagaaaatggagaataagaaagaaaagaaaagaaaaagaaaaatggagaattcaagttccgaaacacttcatgttgaagatttacaaacggagataatgtcatggctgcctctgaaaagcttgttgagattcgtcatcgtctcaaagaaatgggcatctattatccgtggagaacaattcaaagctctttacttgcgtcgatcgatgacaaggcctcggctgatgttcatggtccgacgaattgcaaccctaccacccgaacctgagatggtgtggtttcagtctttttgtaaagaggaaagatgtattcccggccaactcgaagttgagttcttgtttcactctgtttatcaagaaaagataccgtatttttcatctggtcaacagcagttgcgtgttcctcctaatacaaactatacgtctgtttctcaacccatcggaggtttgatctgtcttcagtcagaaactaagtttgcgctttgcaatccgggtacgaaaaagtctcgggctttacctgatatccaagcacatgaaaaagcttttataacaagttttttaggatacgatgaagctacgaacgtattcaaggtgttatgtttgacgatggtatgggcccatgaaccatcaaaacgagtttatgagtatcaagtcttgacggtggaatccggtgtagagtcttgttcttggagagggatcacatgtaaggagaaggatcacacaccagaaactcaaggactatgtaaaggaggggttttgtactatggagctcggtccactagtgaccatcgacctctggtaatgagctttaatgtgaggtctcaagagtttaccgccattgaacttcctgatcaactacatattagttatttttggaattttgtgatttacaatggggatattgccttagtgaacgaatctgactttgaccctagagttgtgaatgaaccgaatgggaataaagtttttcacatatgggttagggatgcaactgcacaagaatggcagagaacccgcatcgagattcctcgttgggaacaaaatgttggacatgtggactatgttttcagaggtaccactggaacaaaagaacttgttttcgcccaagactctcgccattgcgaagatgatttctttgtgttgtattacgatacattcacaaaagatctcagaagatttcagattggagtgactggccctaaaatttctgttcgaacctgcttggatcatgttgatagcctttggcttatgtgaagaccaagatctcagtctctcttcttgatttatgctaaatattaatgttgtctctatagtagtaatatcttattttagttttcatttcattaatctttatttatgctaaataataatgttgtttctcaagtagtgctatcttattgccattgggatggtttgttttcatttctactgtcgtttatctttatttatgctaaaataataatatgtttgttctattcagattataacttcaataacatttctaatttctatatatatatactcactatttctcaagctctgagagccttttcatgaaaccaagggggttccattccaaaaataaaaaagaattgagtacagaacaacgttgtaagatatgcaagaataaagcatggaagcaaatattagccagaaagatcaacccagagtcgagatgaaaaaaatgttccaagtaagaaatcaaacattcatatataatacttgttcagataatcaatagaaacaatggtaagaaaaagtaccatataaagtctctcaatcttcgctataacagagttaagacgattaggatgaggtttaattcaccatttcattctctgtttgtgccccctgcatttgatatatagcaaaatcattagacaatgataaatatccacattgaaatcactatacagctttagttttgtttcattttcaagagttagtttattgaaaccctagctctaaactcaatgtcaaggagaaatttcccaattcagctcccggaatgatgatacaatacaaaaattggtctaacagagacagagaaatgtatacatgagaatatgcatgtaggcagctaagaactcaccggtgcaaggcgaaactcgaggttagggttggcattaagaggccgttcgggagccgaagcgaacaagccgccgttttctttgctagcctcatccataagcttcttccacgatacgagcgtggtctcctctttgaggagttcaactttaagtaatttccgatcaccggcggtcaatatctcagacgagattttacacgattcgtcgaaagttggaccgtcatcggttgggagctttggttcgtcctccatttagtgaattgggtcgggtggggtcagag

SEQ ID NO: 4546 - DNA, 560 bp, Arabidopsis thaliana landsberg
tgaaatggtaaacatattagattcgccttaattattatatatttatatatgtaataaaagggtcaccttttctgtgtggaaacatgggctctattctgtaccagtcctctcttttccataggtcatcaaagacgatcaaagctttttttgattccaacaactgaaagagtgtcttctgaatatcgtcttccggcccggctgagtctttatattgaggactaagattccccaagatggctgtccacacatctttccgtgtaaactcttgtgatacacacacccacgcaagtccatcaaaatgacttcttaccctatcatgattaaaaacctgcctcgcaagtgttgttttgccaagaccacccaaaccagtgatagataccccatgactgctatcgtttcccaccaattcttcaaccaatttctcaacatttttctccaaaccaacaagattgctctcagattcactagaaaatgtatgacagcactgccttttcctttccagatgagcatgccaatccacaccgggcataatgcctgattttatgcctacttttgcataa

SEQ ID NO: 4547 - DNA, 2956 bp, Arabidopsis thaliana landsberg
  unsure (1)..(2956): unsure at all n locations
cctggccaaaccaatttggcacctgcggatggtccccctacaaggtcagacggcccgcacaataatacagggactgtgccgagagcaaccttctctggtcaggactacggacggttgggacccaaggcccggacggtccacagtacaaatgaacaggaccagtccgaagtaaacatacttcggaccccactggaggatcgtggacggtccgcccacatggcccggacggtccgcacatcccaagacttagcaaattttcaaacatgcttttgaaaagatttttaactcttgaaattggaagcattgttagtcctcatgcaaatgcaaccactagatgctctatgaggcactaagtttgacatagacaaacgtcattgacccctcttaatagtacggctatctaacctactaatccggtcaagtatcttctctaaactcctcaagaccggcaaaaacgaaacctatgttatacctttgccttcacttgatccacaaccaatgcttatgaatctccaagatttcctgttctatgtggtccaaccctgcattcttatttctccaagaaccgttagcccacaagcagttgtcattaattaccaaaacatcactaaggggcctagatgattcacagggccttcttcctccgaaggtcctcaaaaacacgactaaccatatgtttctagtgtgacatgggttattttagagtggagcttcgtcttcggatgaaggttttctctcatgacaagatggaaatacaatctgaaggtgattaaaatggacgacgaagcaatagccaaaaagcttcgtcttgaagtgatgacgaagaccaaatatgatgatgaccgaaagaggaaaagactacttagtccttaataacttgtattacgatcatgtgtaaatgttgtagacataaatgtacttttactcgggctgtgtcctatgcctataaatagatgaacagtaacaccgtactgttcacgctggattgtattcactctctcgcgtcctcaccttcgagcaagccaaaggtatcaatgtaatattaacattgttgatatccatacgtgtttgataggatgcaaatataaatgaattaacgagatgcacttatcatatttatccttttgcattcctattcacatattggatgatgaaggtatgtcctttttgaccttcgtctgatgagcattatatccatgagaagataatgctttggaagacgaaggtctgcaataactaacaattgtgttgccttatttttgatacacaacagttgagaacaagtccccaacattggcgcccacctccggtgaactcacttccaccctgagttttttgaacaccttcggcgatcataaaccttcgttatggcgccgaagaaggnnnnnnnnnnnnnnnnnnnnnnnntgcaaccactggaccacaatcaggagacagtctccctgcgggaggcccgaagccagaaaaggaaggctgtcagtccgacaccaccagaggacgagatagatcaagaaatcagagatatggagatgcttcatcaacaagtacagaggaagaaagaaaagatggccaggctagctgaactgcagaggcagatagacgaagcctctgaagaagttcgtcatcttgctcaggatgagcaacaccgaaggcctcagcatcaagaccttcatcaggagggtttcccaacgaagatgactggtatgacaatttccatcatgggaattttgtttttgatgatgcttctcccttgtccgctgagctgcaggctacaccttggcctccgtcctacaagccgcctcagctccccgtatttgatggccattctgatccgaagcagtttttgatgagctacgaagcaacagtgtcttcgtacggtggcaatgcttcagtcatggccaaatctttcgttatggctgtcagaagtgttgctcaaacctggtattcctcccttcgaccaggaacgatcacttcatggcagaagctgaaggacttgttgttaaccagctttcaaggatttcagacgaagccggtcactgctcaggctttgttccagtgcacccaagatcacgaagaataccttcaggcgtatgtccggaggttcttgcgtttgagggcacaggcaccaacggtacccaatgaaattgtcattgaggccatgatcaaggggcttcggccaggaccgtcagctcagtacttcgctaggaagcctcctcaaactttggagaagctgctccagaagatggacgagtacattcgggccgataatgattttcgccaaagaagggaggaggctttcaggttttctgaaatgaccaggggcttcggagtaaggttctacccgaggcacgtgagatcaattcataactctacacaaaatgatgatagaggaagccaacagcaaaggccacaaagctcctcacaggcttcggggcaacagcaaagctccttccgaccaccagctccaagaggcagaggcgcgaggggctttggaggaagatttggagatcaaccgagaagaatcttttgcttattttgcggagagaacaaaggccatactaccaggatgtgtcacgttaccatccagaagcaaaaggaaatagccgaagccgcagcacaacaagctcagccgaagcaggtcatgcatacagcttcgtatcactcgccctacattccagagtatgtgggcaaccaccctgcagtttccgttgcttcggcgagtcaatctcaagcttcttggcaacaacctccgcctccacctccattacagcaaggacagcagccagaagggagccagtatgctccacaccaaagggacttccgagagcagtccgatagctcgtacagtcaacagcaccgtgctagaatcaaagcacatctattgacaaatatcctaccctaatagcaatcttttctatccagttttgtttggggatcctctagagtcgacctgcag

SEQ ID NO: 4548 - DNA, 1000 bp, Arabidopsis thaliana landsberg
attttttgaatcaaatcaaagcccgaatcgaagcagatcgaatgaatattttgccaagccctactggctagtaaaacaaagcttagaaacttgatagtagtagtactactcataataatttataaagtttcagataggtaacgaagtaattatagcaacgatttttttcaagaattattgtaaactgaaattaaatgcgttgaaaattgaaactagtgaagaaattttagatatataaacttattaatagaaaaaggaagattttgattcgggtatgaaaatggtgaaacaagttaaaagtttgttatcggtgatctctttttcgcctaaccattttccttacttttggcactttttttttacttcacaatttttggtactgatttgacctaatacttacgtgactaatattttggcagcactatttagctgaataagttggtgtttggcaataataattaggtgaaattaagttacacataacagtcgtggacgctattaattatattcttcatacaccataattttaagccggtcattttcaacaattaatatttgtcaaggacgaaattaacggtaacgtgcaattaatgactcgacaggttcttgaatgccggaatatttggcaccggcgccggggacacgtcacacacgttgccaaagccgacaacaagagcggcaatgctcgtccgtgtcaacactctcctccaaggctactccggtatacgcttcgagattctcgaagcaattacaaagcttctcaaccacgaaatcactccgtgcctccctctccgtggcaccatcaccgcctccggtgaccttgttcctctctcttacatcgccggacttctcactggccgtcccaactccaaagccgtgggtccctctggtgagactctcactgcctctgaggcctttaagctcgccggagtatcgtcctttttcgagctgcagcctaaggaaggactagcacttgtgaacgggacagcggttggatcgg

SEQ ID NO: 4549 - DNA, 577 bp, Arabidopsis thaliana landsberg
  unsure (1)..(577): unsure at all n locations
catctcaacgacatcacatcctaacgcccacacgtcattttgtttattcatattcgtttccattaacatatatcggtgccatatataacggcgtctttataatctcaacaccaacccgatcggcaattttaatattgctgtaagaatcggtcgactttgtggccatataagagccgagaagtcgctggagtctctagcatttgtctatacatgtagtagagagagttcttaatacgagtctttctcctcgaacccacttcaatatgcttccctgtactatatcacatgtctatttaaaatctatacataaaatcaatactttaattatggaagttttaaatttcattattagccttttccttctcattttaacccaaagctttttgtggttgactttaacttattttatttgttttgcaaattttcttttcaataacatttttcttttaatttaataactttcttaggtaaacattaactnttttttttttttgttgttaatattcatttgctgacaaaaaaggaaatattatttaaattcaaattatgattaaaaataaattagtgatgactgaag

SEQ ID NO: 4550 - DNA, 1430 bp, Arabidopsis thaliana landsberg
gcacatactcgacggaaagctcatacataaaatagctcaaaaggttcacgagatggatccattgcagaaaccaaaacaagatcgttacgctcttcgtacatctcctcaatggctaggtcctcaaattgaagtaatccgtcaagctacgaaatcgatagagcgtgaaatcaactccgttaacgataatccgttgatcgatgtttcgaggaacaaggcgattcacggtggtaacttccaaggaacaccaatcggtgtttctatggataacacgagattagcgattgctgcgattgggaagctaatgtttgctcaattctctgagcttgttaatgatttctacaacaatggacttccttcgaatctaactgcttcgagtaatccaagtttggattatggattcaaaggagcagagattgctatggcttcttattgttctgagcttcaatacttggctaatccagtcacaagccatgttcaatcagctgagcaacataatcaagatgtgaactctcttggtttgatctcgtctcgtaaaacatctgaagctgtggatattcttaagctaatgtcaacaacattccttgttgggatatgtcaagctgttgatttgagacatttggaggagaatctgagacaaactgtgaagaacactgtttctcaagttgctaagaaagtgttaaccactggaatcaacggtgagttacatccgtcaaggttctgtgagaaagacttgcttaaggttgttgatcgtgagcaagtgttcacgtatgtggatgatccttgtagcgctacgtacccgttgatgcagagactgagacaagttattgttgatcacgctttgtctaacggtgagactgagaagaatgcagtgacttcgatctttcaaaagattggagcttttgaagaggagcttaaggctgtgcttccaaaggaagttgaagcggctagagcagcttatgggagtggaactgcgccgattcctaaccggattaaggaatgtaggtcgtatccgttgtataggtttgtgagggaagagcttggaacgaagttgttgactggagaaaaggttgtgtctccgggagaggagtttgataaggtcttcactgcaatgtgtgaaggtaaacttattgatccgttgatggattgtctcaaggaatggaacggagctccgattccgatttgctaagagagcattcctctgtttctgttctgtgtttttgtgttttgtttcaattttaattttgctgtgttaatgtttgaattgagtttttgattgtaatgtgaatggtgtcacaccttgtatgatataaatgatataaaaacttacgtgtaaaactcgctgttaacttgttactttttatgatggcatttgtggatttgacactgttgacaaatgagatagatcgactttatgatttattttggtccgg

SEQ ID NO: 4551 - DNA, 1270 bp, Arabidopsis thaliana landsberg
acacgaaatttgaatgtttttgttcgttacagattccttaacgccggaatattcggaagcacgaaagaaacaagccacacattgccacactccgccacaagagccgccatgcttgtacgaatcaacactctcctccaaggattttccggtatccgatttgagattctcgaagcaattaccagtttcctcaacaacaacatcactccatctctccccctccgtggtacaatcaccgcctccggagatctcgttcctctctcctacatcgccggacttctcaccggtcgtcccaattccaaagctactggtcccaacggtgaagctttaacagcagaggaagctttcaaattagcaggaatcagctccggattctttgatctccagcctaaggaaggtctcgcgctagtcaatggcacggcggttggatctggaatggcgtcaatggtgttattcgaaacgaatgttctctctgttttggctgagattttgtcggcggttttcgcagaggtgatgagtggtaagcctgagttcaccgatcatctcactcacagacttaaacatcatcccggtcaaatcgaagcggcggcgataatggagcatatcctcgacggaagctcgtacatgaaattagctcagaagcttcacgagatggatccgttacagaaacctaaacaagatcgttacgctcttcgtacttctcctcaatggttaggtcctcaaatcgaagtgatccgttacgcaacgaaatcgatcgagcgtgagattaactccgtcaacgataatccgttgatcgatgtttcgaggaacaaggcgattcacggtggtaacttccaaggaacaccaatcggagtttcaatggataacacgagattggcgatagcagcgattggtaaactcatgtttgctcaattctcagagcttgtgaatgatttctacaacaatggtttaccctcgaatctaaccgcttcgaggaatccaagtttggattatggattcaagggagctgagattgcaatggcttcttattgctcagagcttcaatacttagctcatcctgtgactagccatgttcaatcagcagagcaacataaccaagatgtcaactctttgggactaatctcgtctcgcaaaacttctgaagctgttgatatgctcaagcttatgtcaacaacgttcctcgatgcgatttgacaagctgtggatttgagacatttggaggagaatctgagacagactgtgaagaacactgtctctcaagcggcgaagaaag

SEQ ID NO: 4552 - DNA, 726 bp, Arabidopsis thaliana landsberg
atctatatacttattcaatattcaataatctatttataaaagatatctcattgttaatggccaaattttagtgtatatacacataccaaagggaaaccgatgtggtagagtcccaatccggtaaatgttgccaaaggagcaatggagagtggacttagaaatctaatgagcacaaaccaaaaatacattcatgtttaacgttagagacataataaggtatgcctcctttggcaaaatgataatgaagtaatttacctaacaatatttctccatacgcctagaatacagataagaacttggaaacatccggttataatcaaagctccttgtatgcttctcattgttcgcacaaacctctgattaattatattatatcaaacaatttattattagtacaatgtagtttgtaaaattcatgataagaataatgttaagacgacttacttcaaaaggatcagtgtagtaagtgaatcgggtcgaataaatgatggaagtgataggtatgatataggcataagaagctacagctatcacaggcaatcgagttccaaagaatgactggaacaatgttgttaatccagacacaaacagtaatgtttgtatgactttaaccttttctgcctgaaattgtcgaaacaaatatagaaaaaaataaatcaaaatgtatgcatagaaaattaaaatattttcacgatttaaaattattttttaaatttctgaaaaaac

SEQ ID NO: 4553 - DNA, 1452 bp, Arabidopsis thaliana landsberg
  unsure (1)..(1452): unsure at all n locations
gatgagtactcatttgatttttcttaaaataagcttctttttgatcagcagagtattcttcttcttttgaaccaggctcctttgaccaatcctcaagttcaaaactggggtagcctttaaccatttcttgaagttccagaatggtgctatttaactcttccatcttatgaattaactttccaattgtatcctcctgagctttatacccaatccaaagctccaggagttcttcagcaatagaatcaagaatcaagtgttcttcttcagaagagggtttagtgggcggtttaggtacctctggagaataagtcggaataatttcctcctcactcaacaacttgctctccaagcttctttcctctaagtgaactcctttctgatcttctggtacaaaccattctgttgcgaaatcttttgtcctctttgatagctagtgtagtttccatcttctctggatcaatactcattgaaaacttattaaatcttttttcaaacatccatagttgatctttcagcttcatcactgttggagctggattttcctccaggaatccacctgcaaaaataccaggccaacccaccaagcccaccaagtagaagacctgtgcaactgatgagcccacgtatgcaaatcggtacttgggcctgataagcccggtcacctgatgaagggagataagcgaataacaacctaggaactaacagggagatattcgcagaatggacctgatatcttggaattgacctgccgaatatctaggagaatctccgcagatcccagacgaagctaccacgtgcgtagatctatataagaaagcaaggacgacttggaagacattaaattcagctttacattcacagcttacacttttacacttgtaatctcattccacattgtaaaacctttgttattatcaatacaaaagttcattcgttcttagcaatataaatctcaaagttcttgtgaagatctagccctcctttcttataaacctaattacaaatctctagtgtggatttcagaacccacatttggcgccgtctgtggggacggaaatagatccttccaacaccgaaactaacacatcaattgtgaccaacgatcatggatcccaattcatccgattcaacgagatccgacgtacctgctcagatctcaaacgctacttttacggacgaacgcctgnnnnnnnnnnnnnnnnnnnnnnnnnnnnnnnatgctatccgtgacgctaatgcggagaacctctcccaaaacttgaattcttctgaatcagaacaaactctcccccccctgccccgcaaactaaggacagggagcagcatgtcacgatacaacctcccaacggatgactgtcctacgctcaacctggcttacccctccaagcaggtccttctgagatctngccagcgagtggccaagctccgcacaatgatcataaacctgatcac

SEQ ID NO: 4554 - DNA, 1315 bp, Arabidopsis thaliana landsberg
  unsure (1)..(1315): unsure at all n locations
tggtgctttcttttgaggatttaagggaaacatggaacccaacaaggatgataatgtttcattagcagcaactatgctcaaatttcagcacctccagttctacaagatgcctcgtctctgccaggtaattaattagcattcaagtaaattgttacatcaaagattatagtgcagttgaattccttaaatctgtttcactttttcctggttgagtttgtttttgtatttttctcgcaatgcatctagattagagcttaaggatttggtctgtagagtccagatactgtttcgttcttccaattattaaagaagtgcattgggttttctttggtttcgtgatcctttaactctagtaatttatgtttcacttttactgtaacttcaggtttctctgccattccacctgtggttcctccttcttttcccccaccaatggctccaatacctatgatgccacatcctccagttgcccgcccacctacttttaggccacctgtttcacaaaatggtggagtgaaaaccagtgactcggattcggaatcagatgatgaacatattgagatatctgaagagagtaagcaggtcagagaaagacaggaaaaggcattgcaagatttgttggtaaagcgtcgtgctgctgctatggcagttccaacaaatgacaaagctgttagggaccgacttagacgacttggggagcccattactctatttggagaacaggaaatggagagacgagctaggctgactcagctgttgactaggtatgatatcaatgggcaattggataaactggttaaagatcacgaagaagatgtgactccaaaagaggaagtagatgatgaagttcttgaataccccttttttaccgagggtccaaaggaacttagagaggctagaatagaaattgccaagttttctgtcaagagagctgctgtcaggattcagcgtgcaaagcggcggagggatgatccagatgaagatatggatgcagagactaagtgggctttaaagcatgctaaacacatggcccttgattgcagtaattttggagatgatcgtcctcttaccggctgctccttctcacgcgatggaaagatacttgccacatggtatgtctctcttctatctccttctcactctcaacacaaattcacatattctccacatattgtttcttaggcttgaaactatttttcctcgtctctatttgattagagttacctggactagaatgcattctacctgcatattcattttcattgatatatcagnagagaagtatcttaataattctgttcttaacactgaactt

SEQ ID NO: 4555 - DNA, 2032 bp, Arabidopsis thaliana landsberg
  unsure (1)..(2032): unsure at all n locations
gaagaggtacaggagatgaagaggtacaggagatgaataatttatggaaccaggttcatgatcataactttctcagtgttattcatatttttttaaaagattataatgtttcttatctagttgtttttgataacatcaattacatatggaattagatttatgtactgatattggtaatctgctattttgcaaaagagtttctaagtttgcctataaccagattggctactggttagtataccaatgggaattacaaacatggttattgatgatttataaaaattctttcaaatcattattaatgaagcaaagcattattaatgaagcaacaaagaggtagttttttttttcttacaaacaaaagaaatacatgtgaatttgtaatatcagcggccagcttcaatgtccaatattgctacattcttgacgctgtcataaccacggctattggtatcgccttgggaagacacgatgttgctaccaagcaagtgtgaattctcctctcgatactgatccgaccaattatgtttggttgttttgacgctcaaagtttctagctctacagctacttctttcatccttggcctttcttttcccatcagtcttgtacattcaacagcaattcttgcagcttcctcgatttccttctgattgtcctcgttaaacacttaatcgtcaataatctcatgcaacctattctctttcatggcagaaacaaagtaactcactagatgttttgagctttgtggccgttcaaagcatannnnnnnnnnnnnnnnnnnnnnntccatgaggactaccccaaagctataaacatcgctcttttcgttcagaagccctgtgttgtagtattctgggtctaaatagccaagagttccttgaaccatagttgtgagctgctcttggtccatgggtatcagccttgatgcaccaaagtcagctacttttgcagttaagttttcatcgaggagaatgttagcagtcttgacatctcggtggatgattggaatagaagcagaggagtgaagatatgcaagagttccagcgacttctatggctatcctcagacggtgttcccatgtgagcgaagaatcaaacatagaaccgtgcaagtgatcaaaaagagtgccactggaaatgaactcatagaccaacaagggaacttcagtctctagacaacagcccaagagtttgaccacgttcctgtggtttatttgtgaaagcactagcacttcgttgatgaactgctctacttggctacggtctccaagccgagctttttttatagcaactgtggagttatctggcaatatccctttgtagactgttccttgtcctccctggcccaagattcttgtctcatcataaccatcagttgcttccttcatgccttcttcagttaatattttgacatccacatttgatggccctgctcctgagagtcgctgcatcaacatgccgccaccattttgctcgaagaattgttgtcggagctcggtgtccttggtgttcttcattttatgttctatacagctaatggcaagcagaatgaccaagaagccgatagtggttcctggttatatcacaatgattagagtaagttgtttcagaaaagaaagaatagagaatcagtgagagaggtgcttaccaagaacaattgtagtccattcaacgtattcaggattgcctttaggtttgcaggtattagtggtggtatttaattcgtaacgagatcgacaattacaacggaagtgtcccaacttgttttcacaggtgctgtcacccgagcagttatgtttatggataggattatcaggagtacactcattgatgtctggcccacgttaatataaaagactcaagatccaaccagatatgtatgaggaaaacacttaactgaagtgattgaaagaaaacatgttgtgaagttccttgacatccagtttgaagatatggatacccctggaaacctcctttgcatgtgcatgtctacgcgatcccactagcagaattggtacatatgccattcaca

SEQ ID NO: 4556 - DNA, 1530 bp, Arabidopsis thaliana landsberg
caagaacaggtgtggggtggcaatctgctatcattcggacacggttctgcttaaacaagaaccttgacgcttgaggaatatcagtagcaggataatgcagtccaatataaggctctaaatcatctcgtttactctcagctacaacttctccatgctcatcttcatgaaacttataaaccataacacgatcataaccagtcaagtccctcacactttccacgacagtgtcacacaaaagcttaatatctccaccaggaagagcctgtaactgagaaatcgcacgaaccgcgagtttctgcgattgaacagcaccagcaatagaaagcgcaggatcttcagttctagctggctctaaatcaataacaacaccaacatcaatcctatgaagaatggcgtaaaacggtttaccagtattcttggaatggatccaaaccggatttaacaaggtaatctctcgagcaacgaaagcacgctcgagtagaatcgagctcgaagaagtgaacaaagatctcacatcagttcccatagctagaatctcaggtttctcaagagtaggaacagattgaggcataatccctaacatttctctggcgttttcactgtaaccgatgatccggaaactggattcatcgacggcgatcatacatccgaaaggctgaatgtaaccacctcgctggattcgagagagataagctgtgatctgttgctcaggtacagaggaaccgtacgtcgtcgttttgagtgattgtgagtagtcgaatgatttccctgattcgccggattgttcgaaaacggcgtggagtcttgcgtcgacggtgtactgttgaattgctttgctcattgattcagtgttgcttcttggtctgagagatttcgttcccgacgattgagcttgttctcctcctcttcggttattaggagtgtgacttgacgacggttcttcttctccgccacggccaccgccacggccaccgccactacccccgactccggaaaccatgccgtttgattttgaatttgagaaatttctcagaattacctcgagacaaggaaggatttagggtgaatcatcatccactagttatcggagacgaattctggtagagctaaattctcaagaattttgaacttgaggaagaagaaaatggggagaattgagatcggagataagtggagaaaccaataaaataaattgaagaagacgaagcaaaatgtgtgcctctcagatagagagagataacacaaaaaaatcagagttttttattttttatgtcgtcttcgctttttgtttcctcatatattttctgcgactttttttgtgtggcgattttagcaaattacctttaaagttttgatatttatcaatttaacccagaagagcttttgttttgtcgtttaatgtgagggagagattgattgggcccaagatcacgtgggctaatggtttattctctctagtggccacacgtggttgctgggcccattgcgcgtgggagggagccccggactgtcgaatcgcatcatcaatta

SEQ ID NO: 4557 - DNA, 4732 bp, Arabidopsis thaliana landsberg
tatgattgaggaattggaattttagtgatgttattaatgtataacaagtgagagggagagatttttgagtaggagatgaaagaagaaatgggatgagtgacttcattgtttaaagaatagcaatgatagtcatttaagtgagcaggaagtttgcgtgctcgatgggaagaaatttgtgttgatggagaaatttgtgatggagagggagaaatggaattgggattacctcagggcaaagaatccattggtgtgacaagggatggagagtcagcagagtgtggtgatgccattggaaagactgtctcatgaaaggtaacatttctggaaatgaagactttattgctttccaaatccatgatcttgtaccctttgtagctagacggttaacccagaaagatgcatgcccgagctctaggctgaaacttgtgacgttgagtaggagaagtagaaccataacatagacatccaaaggtgcgaatctgctcataatcaggtttcttacctgtaagaacctcaaatggagttttattagaaagcaattgagatggtgttctattaataagaaacacagctgtcaatatgcagtctccccaataaggtaaagcaaccttggattgaaacatcaaagctctagcaacgttgagtatatgttgatgtttcctttcaaccactgagttctgttcaggtgtctcaggacatgaatgataagaaactatccctttagccttgtaaaactcagtaaatttcaattcctgtgcattatcagatcgaactgccttaactttgacgttgtactgattctctacacgggtgacaaaagccggaaacacactaagaacctcagatttagtcttgagtaagtaaacccaggtagctcgtgaatgatcatcaacaatggtcaaaaaatatttaaaaccatcaatagtctccactgaaaagggtctccaaaggtctatatgtaataactcaaaagttgaattacaaatattgtttgaagactgaaaagacaacttcttctgcttagccaaatgacaaatgtgacaataagcagatcctttattcttgtgtttagtagtcctcaaaatgtctgaaatagcatccagtcttgagtaagctggatgtcccattctcatgtgccataaactaacatccaccaccgcattaacagagactgaatccaatggaggtgtagtatccaacacatagaggttgccaatgcgtctacctctgccaattctcaggtccttggtaagatcctgtatttcacaacatgacggatcaaagatcactcttgaaccaatatctgaagtcaaactactgatgctgatcagattcaaacgaaactcacggagaaataaaacatttcgaagaagaatgttttcatttatctgtactgaacccactccactgattttaacacgtgatcctgttgggagattcacataactcaccacagaatgatccaaagaaacaaataggctcttatcatggcaaacatgatgagttgcaccagagtctatcacccaagtttcagtggaaagagtatgttgggatacattcaatataccaacaaagtagtatgtagagttagagaatgagataccagtgtaatgaataggagaacgtgaaattccagcatctgaagaagaagcagttggttgtgacttcagttgagaactgaacaaggctatgaagttctgaagttgatcattggagagattaccaagcggaccatctagagtagcctgagttggaaccatcggaggcaataaagagacctgagcagcaaccggttgaggtttggtacccttctctggtagtttgcctttaaaaccaggagggtaaccatgctttttgtaacatttctctgcaatatgtcccaccttgttgcagaatgaacagattggacgccctttattaggtccattctgaacatagcaaatcttaggagtcaaagcagtagaagatatctcagagacctgaaaagcagcaggaggagtaacattggtagagaaacctttctgactgtaatcctggtcaagaatattgtaaacttcaaccagagaaggcaaggctttctttgcaatgatctgtctcctgactatatagtaggactcattcaaacctgccaagaatttgacagttttagctctctctgccttctgttgcagacgaagaactttaccacaagtacaaggatcatcaggttcctctgtactgtccaacaaatcccaaagaatacgcaactgagtatagtactcagatagagaaagagaaccctggcgaaaatcctggatctcctgtgtcagattgtacgtacgaggaagattagtcatatgaaaacgtccataaatgtcacgccagatatctgtagcatcattcatgcgtagaatgctacgataaatctgcggagacacagagttcaacaaccatgatttcaccatactattacatctggaccaaaggcgaaagttcccatccgattcaagtggacgaggcaaagaaccatcaacaaaaccaatcttattcttagcatctaacgagatccgcatcgctgcactccaatcatcatagttagtctcatctaagcagatagagacgagattcaaacctggatgatcaccactgtgcataaaaaacggagactgagtcggatccatggaatctgaagtcacaacagctcgcgatgcgccagcagagagcagatctacagctggaggagagatcggaggagagactgtgagaccagtggatcgcgacgatttccgtggaacggagcttatcgacgcctttgaacgagtggatttccgagttactcgagcaacagccaccatcgttacagaaaaacgagtagtgaacaagaaaaaaacgagatcggagaagaagaaatctgatcggaaacaacaaaaacttagctcgttggctctgataccatattacaagataaggattgagctgagctagggagaaaacttgttaagattttcgattcttatttcttaaagagcaaagtgtacaacaatttccttatatacaattgttctaacttaaccagtcaattaaaccggagaataatctattctaactaaactggatggtatatatactccaagagagttgttattatacctcaagagcgtaaaggtttagaacgaacacaagattcttgagctgcgaaggctgaatgaagaggtggacaaagagattgctctgagtaagtcatgtgcagcgaagattgttcaacagcttgaaaatgtgaagcatcacagctgcagataagtaagcagttgtctcagagataggcaagcaaagaaaatggtgtaacttgaaggtgctgagaaagtgactacagaaaaagagagcacaaagagttaacggcgattccattatttgcaacattaaacagagataaaaaaaaaagaaattttcacagaagtggacgaaaaaagatttgccctcaccgtttgtcaaagtgagaactggttttcacggtttctcttttcattcaatttcggaccaaattaccctgggaaaacttaataatggcacaaaccaaaccgtgcagcagttcgtatcggttcagttgacggcgtaaaccaaaccctacagcagttggttttggtttagttgatgcggttcagttttgaaaaagacaaaaaaaaaaaaaaaaactgaaacgaagaaacccgagaaaacgaaaaagagaagagagtaacggacagatttgagagagaatcagaaagcgaaacgaaattcagtatccattgcttcaaaattcgacataacttcgaattgttgggtagttgaattgagccactgaactcccacatcaggggaagtgaaagttactatttttcccggcgatgccaagagaaagttactttttattccggcgaaatttgaacctccggcaagatagcatctttagctatggctgggaataaagctaacgacgaagtcccgaggaagcagcatggtcaaaggaaggagaagcgggtattaagagtttccccgcggagaaaacgctctgcgacaaaggcaacggaggaactgggttagaatctctaatttaccgtttgttgtctttgggtgtatcagaatggtaaagcttgtttgattaaagggttagaatttgtcggaatttagcatatctttaggatgaaaaattgagaagtagaattggaaatctctgtttccgccaaaaatatgattttgagttataatctggaaaatttctgtgtacgtacactacttcggtttgcttaacagtatatcacgtttaattgcaggtagtccaagtgttgctccgattgaagatcttacagttgaagagttaccaccaagactctttgctatagaccggtacccttccgagacaaagatgaacgcgtactctaaaccggagtacatttctaacatagcaaatgtactaaaggggaaaccagagatgcagtttcttctcgattctccatttggggaactttttaaaatacccaaaaacaaggcatctttcaatgctaagcttgtccttggactaatatgccgtcagttagtgacaaagaaggtgaatgagatgtggattgtattcggtggtcatccaatcagatttggattaagagaatttagtatcctaactgggctggaatgtgggtatcccaagaagaaagacgtggaggatgttatcagtgtgaaacctgagtgtgagagtgtttggaagactctgtttgatgag

SEQ ID NO: 4558 - DNA, 2169 bp, Arabidopsis thaliana landsberg
cttgtggaactcttgaactagtcctttcaaaaccaccaagtaacaactctgtttattctctgttttctacctctaatctaaaacatttactgacttttttcttcttcaataccgcaaaaatcagatatgcgatacaatgcgcttagctttatctttcttcaagtgagggaactatcttggctacaatggcatccatttagtgtttcttcaagccctctagatgggaaccatcatgttgcggttctcataaaggttcttggtggatggactgcaaagcttagagaccagttgtcaaatctatacgaggcagagaaccaagatcagctcatttctcctcagtcatatcctaaaatcacaacttgtgtggagggaccttatggccatgaatctccataccatttagcgtaatgcatttcgtctacttgaaattttttcaatgccataagctttagcttaactcaagaaagatttattgcgggtgcaggtatgagaacctggtcttagtagcaggaggaatcgggattacgccttttttcgccatcttaagcgatatcctacaccgtaaaagagatgggaaagcttgtttacctagtaaggttttagttgtatgggccattaaaaactcagacgagctctctctgctctcagcaattgacataccttccatttgccctttcttctctaagaaactaaaccttgagattcacatatatatcactcgacaatccgagcctcgcttggtacgtcttaaataagtcttttgggagctgcaataggccttactaagcttgttgaactctttaatgtttcatggttatacaggaagatgggatggttcacaaggtggtgcatccttctgtcaagctaccacggaccaacggatgttctatgtcggtactagttggtacaggggataacatatggtctggactctatctaattatatccaccattggatttatttcaatgatcacattgttggacatcttttacataaaaagatacaacataacaacgtggtggtacaagggacttctatttgttggttgtatggttgcaagtgtcttgatttttggaggtcttgtggttgttttctggcatcgctgggaacacaaaaccggtgaagtggaagcaaatggcaacgacaaggtagatttgaatggagaagaaacccataatccatctgcagcagagcttaagggcttggcaatagaagaagatgtccagaattacaccactattcgttatggcaccagaccggcctttagaggtatacactacaaaattagcggtgtcaagtccagttatctcgtttttttatttataaaattatagaaactgaaatcattcggaacggtttgacacggtttcgttcggttcttgaatccgacttttggtgtagatatttggctcgattcggttaagttaaatctttgattggttcatgtaatatttttattttgtaattgcagagatatttgagtcattgaatgggaaatgggggagtgtggatgttggagtgatagtatgcggtccagcgactcttcagacgaccgtagccaaagaaatacggtcacatagcatctggcgatcggcgaatcatcctcttttccacttcaacagccacagtttcgatctctaacgatgctttcaaggccaaagaacattatggaaggaaattcgaagacaaattgatgcatatattttaggtaatctctgtcagtatgtactatggaaacagctatggttgatatgtgtatgtttatctttcagttttcgatgtataaagtagaaatcaaatgtatgagcatctatggtttctagttctacacttgttggtgtttctacattggacatttaatattaattaaatgcaagctgataagtcctataattacatagctgcccatatattttcggaattttttaaagtagagatatattcatatatatatgagggattagattctataattacgaatgtatttaatttcaaattaaaagttagattctcataattctccttacttactctgtgagggattagagtcgtaaaaatgaccacaagatgtaatttttttttaggtcattgatctaccatcaatttgtcggacacacttatcttataagttttaaattttaacaaatgtaagtgaaattttgtggtag

SEQ ID NO: 4559 - DNA, 540 bp, Arabidopsis thaliana landsberg
aaaaaaaattattttttaaaaaaattgtgtactaggattaatgtttaaaagaatattttttattaatgagaccgttagaaaccccactggtccagaaattttcttccttttactctcctcctaagaatatcttcttcttaatttatctctagctagtaacgcctccttaaaagccgatgctgcttctgagccagctctcatcacaacactaagcagtagaagaaattcaaaaaacaacatggatgatcatgaaacccctcttttgtccaaggacttatcatcatcatcatcatcatcatcatcatcatcatctgtggtggtttcatctttgaaatggatattgaaagttgtaatgtctgtgatttttgtgacttgggttgtgtaccttatgatgtatcctggatcactcggtgatcaaatcctcacaaactggagagcaatctcctccaacactttctttggccttacaggtaccatcacttgctttggtttttccgaaattttccaaaagcattgctaaattcactctctgaatatctt

SEQ ID NO: 4560 - DNA, 609 bp, Arabidopsis thaliana landsberg
  unsure (1)..(609): unsure at all n locations
accttgctggaagataataattaacgctgttattattaccttttgtcttgtgactagcctcttctttaggaaccgaaggtgggtttattgacctgattagtgcccagttaacaccttcaaaaaactcatgtcttttgatctcaatagagcctttgagactccctaacctcttcttagggttcttcaccagtaattttataataagatcttgagcattcaccatatcttcgtactctttggggctattcactataacctttgggaatgtcaagggtgctttcagaatgtttactaacgtcttctcgttgttatcgcctttaaacggtgtcctaccaaatatcatctcgtatagaaatatcccgtaagtccaccaatctactgcactcccatgcccttgccctgacaaatcaataagactaactagttagcaatatgaggcaatttcatatagtttatatgggttagaaaattagctatcatcttcttcttcgngtcttagttaacgacccattttctattactttatttttataagaggntttcgtatttgactatttgttaacttaaaaaatcactgattattcacgtagattaattggaagttttagc

SEQ ID NO: 4561 - DNA, 2706 bp, Arabidopsis thaliana landsberg
ttgttctcaaaactaggaaaatttcccataagacttacctgaatcctgggatataaacgctccatcgaaccagataaaaaagacgcatcatacgctcctgcaattcaaagattcctttcccttcttccacgctgttcccaaaagctgttcttgataacatttctgcagacaaattgtgcatctctttgtgtacctctaactcaatctcttctgctccgtttctcatatcttcccacttctccatcaacatcatagaacttgttaccatttgtggcacccacctctataaaagaaaaaaagatcttagctttagccacaatcctataaagtactccggatttggtcatttttaaactaaactagactgagataccaaatagcacaatgttgcctgaattacagatcttagcttctacattgatgtgtgttagtgttaccttgagtttctccattgtaaaagcttgtttggcgattcttctatggaaagcccattgatcacctctaagaccaggaagaccttgagcataaagcagcttagacaaagggttatgcccaattcggtcaaacgacccacccgtcgtcaaagcttcccggattagtcttggatccgacgtagccaccacaggtttcgacccgaaccagtagaggaacgtcttcccgtagacacgtgaccattcgtggtagtgaggcgccacacggtggacgaactcatgaggatttctcccggaaggaatcggctttgacttcgcctccgccgttagtcggctaacctcgccggagtttccactgaatatccggtaactaggacccgtcacgctctgcttcttgaagtgagattggattctccacggaacccatatattactgtagatgaatctgaagacaaggaagaaaaagaccaagaccaagatgaagaacactgccatatcttgacgtgttaacctcaagtctctctctggttcagtttcatttatttgatcttgaattttttttaatctgttcttaatcttgagattgtgaaaactacagttaagaagcattaaactaacaaaaagtgaccggagaagaaacaaagcaaccggtaaaaattttatttcttcgccggagttttacacattagaaaattttcaagcgttgaccggtaaaaaaagaacataacgaactatgaaaaaaaaaggaactaactttcgtcgtctaaagctttgttattaccaaacaaactctctcttcttttaccaaatccgccagaatcaagacctgacccaccacgatacttcatctcctgtgcggttgttctgtagttagtagtttccactggagctcttgagctcgggtcgttagaccctactgaacggtaagcacctgttgctgctccaggaggataccgagatggcgaaacgtatcttctccgaagatccatgtggtcgtcgtttctcctagttgattcagagaatgcggaactattttgtgcagttgttgtagaagaagaagacattgtcgtggaggagaaaggatcgtcaggtccccaagctgtgagagattctttcttcttagagaaaaaatgccaagcgccgaataagaaaagtatgaagaagaagacaggactgctccaaagcattgtgttgaattctgctttggagattggaagctttgatttgtatgtagctacgtatccgtctcctaaacccatcacaagcagcttttcgcggtcgcttgctattaaaggagttaccttttctagcttctggtgatctgtggttttagttgattctcgatggctcaagaacgttgacctgatatcttctaatgcagccggaaaaagaagccgaggacccgtggttcggacgtagtgttgagtcgatacattgtatacaaagactttctcttggttgactataagtagatagcctttgatggcttgtaacgctacaggctcctccatttgtaccttcttctttgatctcactctacatttgaagttcataatgtctccgagaagcaacacgtgaatgatttcgccttcggatgtgaatccataagctttagcccgttcggacgcatcaaaaacataacttcttgctagagaatggttaagaccttcacactcagattccctgatcttcatgcttcttaagtccaatgaaccagcaccagtctcagtgagaaacaaaagcctctgcttcaagaacacaagcggtctactcgttgggctaacagagccataaaccgttctgttctcagtgaaaaccgtaagctttccgctaagatctgtcgccaatatatacctaacccgacccacatgatgcacttccaatagagtcacttgcaaaccatcctccgtgccatcaaacttgccaacattttccatcacagcggaattcaaatcttccccgatcgagccctctcggagtctatgcaacaagatgactccgctttggtgtcccgtcaccacaaagctctcattcttatacacagacatgtaagacaccattgccgtgattggtgaatcgcaggtggtgaaaaactcaaccaaaacatcgccatttctcaagaagacaaaaaccctaccacttgaatctccaactgcgaaatacttgcttaaaccttcgtgatctcgaaacggcaacacgttgatacaagtcgcttcagagtctaatttcacagctgatgtgaattcgaatctctcagaccagaaaggactatact

SEQ ID NO: 4562 - DNA, 3819 bp, Arabidopsis thaliana landsberg
attgtacccatatacgatactaaatgttcgaagaatttccaatgtaataatatgactaatgactacatgggcgtgggaattgaagaaaatcatcgtcattacttactttactttactactgttacgttcaaaaaaagtcatacaagaaagctagaaaatgtataagtgcaattatgtttctactttctagattactacggttacgttcccatcaaagtcaatttgattaagacgcattactatactttttaataacgtgaccattagtatacatttgtatggtatcaatatttaaaaacatttgattggatcatagttgccatatgggacgtgggagatgagtgggtaataagacagtcacacgcgcctctctataacacatgatctccacgcgctcttcctcttcagcaggaaagcttttaccaattcagcaaatcaagaagctatataaatgccgcacttaacgtattgaaacttacgatcaaatatcaatctctctctctttcgaccaatggactaaatcaaaacttttgattttccggcgatgtcaacgtcacaaactctcggcggcgccacacgttgtggccggatcataggtccatcattagacaagatcataaaaaacgctgcgtggcgtaaacacacgtaccttgtctcttcatgtaaatccgttctcgacaagctcgaatctcttcccgacgacttccacgatccttcctccgtcgtctctggcctcgccgcatcagatgcagattccgttctccaaccttttctcttatctctcgaaacagcttattcaaaagtcgtcgagccttctctagattgcgcttttaaactcttctctctctcaatcctccgcggtgagatccaatcatcaaaacaagattcaatcctcttcaaactcgtcaacgccgtctccaaagtcggtgctatagccgaagaaccgattcaactcgctgttcttagagttcttctcgctgccgttagatctccatgtatcttgatccgtggtgattgcttgttacacgttgtcaagacttgttataatatttaccttggtggcttgagcggcacgacacagatctgtgctaaatctgtcttagctcagatgatgcttgtgatcttcacaagatctgaagaagattcgcttgatgtttctgtcaaaacgatttacgtcaacgagttattaactttcacggacaagagtgttaatgaaggaagctctgtttatttctgtcaagggtttgtgaatgaagtcatggctgcaggacaaggaagtcctcttcctcctcctgatgtgattcagattctgttgcaaaatcccgagactgaaaccgttatgactccggattcaccgtctttccgaggatacgtggcaaacggagaaggtgattctgagaccggtgacatgagtaaggtgagacaagacgcttttcttctgttcaagaacttgtgtaaattgtccatgaggttttcgtccaaggagaacaatgatgatcagatcatggtgagaggtaagactctgtctttggagttgcttaaagtcattattgacaatggtggttctgtttggcggactaatgaaagcttcatcaatgccgttaagcaatacttatgcttatcactactaaagaacagtgcggtatcaatcatgtcaatatttcaattgcaatgtgctatcttcatgagcttgttatcaaagcttagatcagtcttgaaagcagaaatcggcattttctttccgatgattgttcttcgcgtgcttgagaatgttcttcaacctagttacttgcagaagatgactgttctcaacttgctagacaaaatgtcgcaagatccgcagttgatagtcgatatctttgtgaactatgactgcgatgtggagtcttcaaacatacttgaaaggtattattagattagtctaagaaactgtcacaaaattgttgcatgactcgttaagagtaaatgtaatgtattaaagctcttataattccatcagatacttgcaggattgtcaacggtcttctcaaaactgctctaggaccacccaccggatcatcaacaacgttgtctccagcgcaagatagtacattcaggaatgattctgtcaagtgtttggttaacttagccaaggcaatgggaaattggatggaccagcagttgaaagtgaacgagacggtctggcctaagggctcacaagtttatgcttctatggacagtaatgcaagccagattagtgagttagaaggaactatatctgactgtgattcacagccagatactagtaatccagaagcttatgatgcttctatgcttgagcaacgaagggcttacaaaattgaattgcaggtccagtatttacaagtccttaaatctttttttatgatatatcagtttttatgttcactgacatatagttcttggtgatttgcagaaaggtatctctctgttcaataggaagccgtcgaaaggtgtcgaatttctcataagtaccaagaaaataggtagctcccctgaggaagttgcttcgtttctgatgaagaccgcagggctaaatggaactgtgattggtgattatcttggtgaaagagatgaacttccactaaaagttatgcatgcatatgttgattcgtttaactttgaaaagaaggattttgtcgaagcaatacggttctttctacgtgggtttaggctaccaggagaagcacagaagattgatcgaatcatggagaagtttgcagaacattactggaaatgcaaccctggttcttttactagtgcagacactgcttatgttcttgcatactctgtgataatgctcaacacagatgcacacaacaacatggttaaggataaggtatgcttcctttcttctgatatttatcaagcatatctactgagtagaataacttattgccttgaaattcacgtttgatgacatatgaagtgtaacaaatctggtcatttcctctgtttctgatcttgtacatacatgtacagaaatggtctgaatcgttctgatgtttgtgttcaaattcaatgtttgtttagatgacgaaagctgacttcgtccgcaacaatagggggatagacgatggaaaggacttgcctgaagagtatttaggttctctatatgatcgagttgtgaaagaagaaatcaggatgaactcggacactttagccccacaaaacaaacaggtgaatggcttgaataaactgttgggcctagacggaattctcaatctggtttcttggatgcaaccagatgagaaacctcatggtgccaatggacgtcttataagggatattcaggaacagttccaagctaagccagagaaatcagagtaagcattattgctagaccagcttctatgtgtcatatatattattctctgtgtctcactttgtaagcaagattctgaaatatgttttgcgatgttattcgtctgcaggtcagtttatcatactgttacagatatttcgatcttgagattcatactagaggtctcttggggaccgatgcttgctgcattcagtgtcactattgaccagagtgatgatagactagcaacttctctttgcttacaaggcttcagatatgcggttcatgtcactgcagttatgggaatgcaaactcaaagagatgcttttgtaacttccatggccaagttcactaatcttcattgtgctgcagatatgaagcagaaaaatgttgatgctgttaaagtaagtcctttgttttatatctcagcctagctaaaaatatgttctatatatatcaccaactgatggaataaacaatatgtcccagtgtttgca

SEQ ID NO: 4563 - DNA, 2264 bp, Arabidopsis thaliana landsberg
aatctttcttctttgcctaattgcttggttttggtcttagattgctctcaatcgcagaggagactttggcagagttcctatccaaggctacaggaactgctgttgattgggttcagatgcctgggatgaaggttatacgcatctcgtatcattacttaagtgttattttatctgttgatatctatggcaatatgtgaaatattgaaatgttgtgtgttgtagcctggtccggattcggttggcatctttgccatttcgcaaagatgcaatggagtggcagctcgagcctgtggtcttgttagcttagaacctatgaaggtaagaaagggacactcttttcgttgctaaagattcaagtcataatgtttcattttcaaccagtttgggtttattgtgttcttacagattgcagagatcctcaaagatcggccatcttggttccgtgactgtaggagccttgaagttttcactatgttcccggctggtaatggtggcacaatcgagcttgtttatatgcaggtgaatcctttagcctcttctggtttagttttctatctctaacacttgaagatgaatgaataaagttgtgacatttgttcagacgtatgcaccaacgactctggctcctgcccgcgatttctggaccctgagatacacaacgagcctcgacaatgggagttttgtggtatgcagctctcataatgtctagtgtttacagaaaaactctgggatcttgatgtttttcatatgtctttaaaaggtttgtgagaggtcgctatctggctctggagctgggcctaatgctgcttcagcttctcagtttgtgagagcagaaatgctttctagtgggtatttaataaggccttgtgatggtggtggttctattattcacattgtcgatcaccttaatcttgaggtacttaaatcttcacatgtggcattttgtgtgtgttttcaggaatttctagaagaattgattataaacatttgttcttgcattgtaggcttggagtgttccggatgtgcttcgacccctttatgagtcatccaaagtcgttgcacaaaaaatgaccatttccgtgagtgtatacatataataaccttaagctttgattgattcatataacatatctaacggttggaggttgcttcatgttttaggcgttgcggtatatcaggcaattagcccaagagtctaatggtgaagtagtgtatggattaggaaggcagcctgctgttcttagaacctttagccaaagattaagcaggtacttcgatcttgagctaaaacctaattgttctttgctctgtttgctcattgtcattttttctgttcttggttttcttgaaggggcttcaatgatgcggttaatgggtttggtgacgacgggtggtctacgatgcattgtgatggagcggaagatattatcgttgctattaactctacaaagcatttgaataatatttctaattctctttcgttccttggaggcgtgctctgtgccaaggcttcaatgcttctccaagtaagttagtgtgtccagtattggtactttgtgttcttttgacagttttctatggctgaaatttgtgttatctattgtcttctgtagaatgttcctcctgcggttttgatccggttccttagagagcatcgatctgagtgggctgatttcaatgttgatgcatattccgctgctacacttaaagctggtagctttgcttatccgggaatgagaccaacaagattcactgggagtcagatcataatgccactaggacatacaattgaacacgaagaagtaaggcttcaaagtctttacctgccgacaaaacatcatttttatgtctctctcttacatatatatttggttttgttatgtttagatgctagaagttgttagactggaaggtcattctcttgctcaagaagatgcatttatgtcacgggatgtccatctccttcaggtatatcacttctaagttctaacccaatggatcttgaaatttttaccatttcaaagttaaaattgaccttaatgatttatggtagatttgtaccgggattgacgagaatgccgttggagcttgttctgaactgatatttgctccgattaatgagatgttcccggatgatgctccacttgttccctctggattccgagtcatacccgttgatgctaaaacggtactcttctttgctgtaccactgatttttcttttacttagagatggtttgtttcaaggctcattttgtcttctcg

SEQ ID NO: 4564 - DNA, 6123 bp, Arabidopsis thaliana landsberg
ggttatgttacaaacaaacaaacaaagataagagtgctcagcattttccgtgaacgaattctttttcaataaacaaatggtctaatacatacagcttgctgatccataacagccattttcacagcttccaaatgtgatgtatgaactgaaaaccaacaaaatgatgtataaagacacataatttacaaccatagagagcagaaacacacacttaatatccataaaccatgaactacatttgaataaagatgaatctatgtgcatagattgagaaagagatgttctaagaaaaaaaccttgaatgttagtcttatcaggaaactcaaaacattcaaggaatggatcatcaggaagagatcgacaatacggttggcaagttcccctaaagattcgcataataaaccgatatcaaaaaccaccataactattaccaacaaaaacaaaaatttcagttatctttcaactacacacaattgagatacacatgacaaggccaacgttacctggtatgcataaatatcacagcatatccagccttgacgaaattccttatgcaccaaatcaaaaccaatttacatcatagagtgatcataaaaacagagaaaaaccacaactttattagggtttatataagagaaacaaaacttactcagtagaagcagcacctctgtttccggagctgaaattatcgatatacctaacacatcgttgctccaatggaaccgttgttccccctgaagtcacacatacaatcctccttccccctgaaatttaaaaaccctttgaatcattttcaataattcaataatgtcacgtatataatcaacagctatgatcttgccttgtgacgatgaattcagtttgatgaactcattaagattctctagaatctcctccatgttcttcagaggtggggatgattcgaaaaacgaactaatttcatcttccataacttttccaaatccagagaaagtgattcagattgacgaagcttgcttcagaggagtgtcagagcgaggaagaagaacaaaacttgttgggcttttgatgatcaagctattctaattgggccttagaaacggcccatataatcacaaagtttatatttttgcaactatggacatctgtttctgataaactcacacttgtacgcttttagttttatttgtatcaagaaagtacctgagatagtgagttttggattgctgttttgccagattgtgtcgatgtcttttgtgtcacttatgcattatctttttctttttgtcaagtgttatcaaccaacacttgtgcattcttttttaacctacgaagttgattccgagaatctataactgattttatgcgatcatgatgattacagcttttgttgacctgaaaattgatataactatataagtatagatgaaatagttgagaagtgtgaacaataataatcattcgtgattttttcttaagaaaatggcgatactatttctatctaaacacaagttcaatatcatatacttcacatttctatgtaatttgacgtatgcaattacctttaattgacaagtatatagctataggggtaattaaggggttattgtggctttccagtggtgtgggaagtgggaacggtatcttaaacttggttacataactccgtaatgggaccggacgcttctcgtgttaaagtttgtaacaacgaatacaaacaaaataaaatatgtgatgaacttaaaatctttgcatgtgcaaaactttggatcttgaatacattgttcatgccttataattcttcttcttcttcttcttctttttttgttccttagtgtttgttaaagttcgtaatatatcttggaagatgtatacgattacggaaaaaaaaccttataatagatttactaaaaacatgttctagaaaactctatactgtcacacgactcccatttaaattcttaagtttttgtatctatacggataaatagtgaaagatgtgatacaacaattactaaaattctttttacaaatcagaaaatctaccagaattttttctgaataggcaattactcgtcctcaaccaaaatgaataagagatgtagtgaaaattatacttgtcgaaaacggtccagtctaaattgataacgcaaaatcgagtaaaaaatgaacagtcaataatacttgtcgttgaatagtaaagaaaagtagaaaacttaggaaacatgaaaatgtcgggatgatcatgacagacaatgaatctgcacaatcttccttagaaaatacaaacatgattttgagaaaatccaaaccaatcctcacattttctcgtttcaaaacaactcgggaattgcttttgtttactttactaagatatacgtaacaaatgtataaccacagcaataacataaataataatgacctttcattagtacataaacctaaacctttactcacatcttttgatcactaattgtccacactcttaattagttatacaacaaaatggagaagaagcgatcatactacgccttattgatacctactctcttgaccgtatggctagcatgcgcgggtcattcttgtgcccgacatgctaaggcaaaaccccccatagctggaccaccacggtgtccaaactgcggacctatggttgtaccttatcctctaagcacgggtccaacctgcggggatcaagcctataggataaattgtgttggtggtaagctttatttcggtgccctccatgggtcatcttatgtcattacgtccatcaactcggtgacccagaggatcgttctacgcccgcccggtcttgctagctcggtatcttgtatctcagctgatgtctctaaacagggcctcgagcttgacccgcatctccctttcagcatcactagcagcaacactatcttgctccttaattgctctcaggctatgctgcaggtaaggcaaaaaagtttagtttgttaggtgtgaagattgtagaacaatattggtttacgataaaatttgagatcagttttagtttggttattaggtttgggttcaatgaaagtagatttcgattaaaatgtaatggaacccggttttcaggactgaccaagagattttggggtctgcaggcgccaatagattgtagtcctactagcttatgctacagctacatcaagaacaatgcatcaccttgttctaaggctcccttgtgttgcaccttcagaaccgacgggtctcaaaccgcttacacgataaggatcaacggtgggggatgcctcgcgtaccaaagcttcgtggggctgaatccaaacaaagaggttcctcctcccgggaaaaaatggcctgacacggggctcgagttgcaatgggcattgcctaaagaaccagtttgcaaaactgatgtagattgtaacctcttgttgggtaaatcaaaatgcttgcctgatccaacgagtctcggcctgaaacgatgctcctgcaaaaaaggtttggaatgggatccggttaacgcaatatgtaagtaaactgcatagcaagtgaactattcagaacaaatttcttgaatcagatcattgtgtttgattagttcttggcatacatgtaataggtggtaaatgtcgccatgggaaacactgcaaaaagaagaagaagaccgttgttttcgcaggtacagaggatgaacattcgaaccagaacttctattcaaatgcctacaagaattgtaaaccatcttaacttctttgttcttgaaggtgcggctgttgcggttgtgggagttacgctagcgattgcggtagcggttattgcaaccaaacatagccaccaaaaggttaaaaaggatatccacaagaacattgttaaggagcgagaagagatgcttagcgcaaattccactggaaaatcatcaagaatcttcactggcagagaaatcacgaaagcaaccaacaatttctcaaaagacaatctcataggcactggaggttttggagaagtgtttaaagctgttcttgaggatggaaccataaccgcgatcaaacgagcaaagcttaacaacaccaaaggcactgatcagatcctaaacgaagtccggattctctgccaagtcaatcatagaagcttagttaggcttctcggttgctgtgttgatcttgaattgcctctcttgatctacgagtttattcccaacggaacgctgttcgaacatctccatggcagttcagaccgtacttggaaaccgctgacttggcggcgcagactgcagattgcataccaaaccgctgaaggattagcttatctccactccgcagcacagccacccatttaccaccgcgacgtaaagtcaagcaatattttgcttgacgagaagctaaacgccaaggtttcagactttgggctgtcaagacttgtggatttgacagaaaccgctaataacgagagccatatcttcacgggtgcgcaaggtacattgggatacctcgatccagaatactaccggaatttccagctaactgataagagcgatgtgtacagcttcggggttgtgcttctggagatggttacatcgaagaaggcgatagatttcactagagaagaggaagatgtgaacctggtgatgtatattaacaagatgatggatcaagagagattgactgaatgcatcgatccactgctgaagaagacagctaacaagattgacatgcagacgatacagcagctcgggaatttagcatctgcgtgccttaacgaacggagacaaaaccgaccttcgatgaaagaggttgctgatgagattgaatacatcatcaatattctgtcacaagaggttactgagacatagctgtcttagaaaattaccaaaatgacttgtacccttgccctgtttccggttatggattggagaaaaacaattcatagaaatggatttttgtaaaatcattgagatgggttttgtttgatatcatatcaagatccaaaacatggtatgagacgatatagcagctaaaaaccaattaaagaaagataaaccaacagaaatctgaaacctatcgcaagagagagcgggttgctgcctgcaaaactcagtgtctttagtgaataaaacagtaactcctgcagaggaacacgcggctgcaagagcgagaagtgcagtgacctgcagaattccaaaagaaacctatcaaacacataacctttaaaacaacaagacaccaacagtgaatgagcattactagctataatgaaatggagataagtttattacccaatcaccaacagtgaaaaggctcaataagatagggcttcgtaaatcactttttctccttatcgcatatacatcaatacacgcaagtccaaagctccatatcaattgaagacccatagatgcgactaagaagctgaaatcattagcaaaagccttcatcatcttgtatcttttgagataaccgtatccagtagtcaaaatatataaacaatcccatttacacatatttttaccaaacaaaaacagaataattgtcaaagatccatgcaaatgtcaaacggctacaaatcatacgcgataactagttctcttagctctttcttcaaacaggtatacaagacaaagttaagatagatttttggtatatcttcaactaaacaaaaccaaaacaccaatgagattgaagatagacaattaccagaaagcagtgtaattagagaagtcgtaagaagaaaccataacaccaatggaagcagcagcagttgcacattgccctaatctcagaaacaacccactcattgttccaggactcccaatcatcttcttcattgatcagaacccaaaaacaaacacaataaacagaacaaaaccaagactttctatcctgttcctcaccaaaatccccgggggaaaaaaatcaggaaaaattgatcataaaaaccctaaacccataattttattcaggaaaatttcacgaacccaaatctcaaaagttgacttatgatcataaatcgtacggaattgggtaattaagagcatatatcaccaccagaaaaccaatattaaaaacgacaacttttttgagctatatgaattttaaaaagaagtatctaccacaaatttaattctgcttttggaggaacaattatgtttcccttagacttcac

SEQ ID NO: 4565 - DNA, 1148 bp, Arabidopsis thaliana landsberg
tcagacttaagttattgatggaaggatctgttgttaagcggcaagctgcaaatactctaaaatgtatgcagactctctctcgtgtacagtcgcagatccgagctaggagaatcaggatgtcagaagagaatcaggctcgccagaaacaactccttcagaaacatgctaaagagctagctggcttgaaggtctgtctctcatattcatctgattcagtttttttcttgttattcaaagtttcttccgttgtttttggtgagaggattgctaagaagtaagaactgttgatttcttcctagcagttgctattatgtgtaggatggtttctgcttattagtctggaaagggttaatagtagcattaccattcatatcaaatagatgtttacttacactatcaatttactgtctctttttttatctgaaaatggaatctttgggcctttgcttataaaagtactatttttcctgttgctgctcacagaacggggataactggaatgatagcattcaatcaaaggagaaagttgaagcgaatttgctaagcaagtacgaggcaacaatgagaagggaaagggcattggcttattcatactctcatcaggtactccagtcgttacctataatgctgaatgtgtggaaagatacaattaaaaagtgaacacatccattgaagttgaatctgtggttcatttgaatgttgtaatgatcctatatgttcatgtttgcagcaaaactggaagaacaactctaaatctggaaacccgatgttcatggatccaagcaacccgacatggggttggagctggttggagagatggatggctggtaggccactagagagttccgagaaagaacaaagcaacagcaacaatgacaatgctgcctcggtcaagggctctattaaccgcaacgaagctgcaaaatctctaacccgcaatggctcaactcaaccaaacacaccatcatccgcaagagggaccccaagaaacaaaaacagtttcttctcacctccaactccctcaaggctaaaccaatcctcgaggaaatccaatgacgacgactccaaaagcacaatctcggtcctgtccgagaggaaccgcagacacagcattgctggttcatcagtcagagaccatgaaagccttg

SEQ ID NO: 4566 - DNA, 488 bp, Arabidopsis thaliana landsberg
tttttggtttgattatgggttccattagttgatttaagcacaaagaggttgcagagacactttgtttgttttctctaatatatacatcacatttgtttgtttgtatacgtacattcataacaacaagcaatgaaagtatatatatagttttattggggttcgtatcaaacagatgtcaaaaagcagaactagtgttgtgttgaattttccaagcatcatctctttggcttcattgatcttagaagcacgatagtgactttctccagcgttcgggtggtttgcaacaatcactctacatgtctactctctactatcctaaactagacgaaccacagactaagtacaaattatgaggtttgatctcaagtgtgttgaaccaaatacctctgacatatagtaacctgcaatgcaacactacatccagatttccaaacccaacaaacaacatcggatgtgtgatttgcaataaccactacactattagtttc

SEQ ID NO: 4567 - DNA, 1150 bp, Arabidopsis thaliana landsberg
gttttggcgttggagaagaactttgatagaaaagccttcttgcaatcatcccaggtggtgattgagtcatggggcagattcttctcccagatgtgtgctttgtcgcccaaggagaatggaaacaaacggagcttgaatctgtcttcactgacaccattgatttttgttaggttgtagagcctatcaaatttattaaggtggtcgagtggatccttcattggcagaccatggaatttgttcccctgaatcatcgagatgagaccgctcttaatctcgaagttgttgttctggatagcaagaggtgcaattccttcccgctgacggtgatcacgtggtgcgtctccagcaccaatgttggcagggccattttgttgattctgttcgtcagccatttcgagtggttgttgtggtattaggttgactgtgtttctcctttctctgagttcgcgagttatgcggtcgatgttgtcattaaaaaggaggttctggttacctgttgatctagtttgcatacagtagaggtgtacctggatcaagaagacaacaagaaaaacacacagttagcaaccgaattgaatattcaaaaagaacttgatctaagcaagtctgaaatctcaaatgtaacaatcaaacacccaattggcaacggcgccaaattgataataggtttttagtcaagtatcctaaaacaccaatcatatcgttgtagtattttaggttgtcaatccaaatgggtttgatgataacaatcaagatgtgatcagaagtcactaattcaagccaagcaaaaacaagttttagtgtgttctagcagtcctaagtgaacatgcagaaaacagaaaatcaagtagaaacaagaaaacactcgaccaacacagctcgttgtagagcactgggtgtggtcgagtgacaggtcgagtaacagacaaaaaatataacagggatactcgactgcacagtctgttgccagacaaacttcttaacagacacaaaatacaacaagtcgagtaacaagaaagaattgcagaaactacgcaacagatgacaagatgcagtaaacagcagtagagtaaacaataaattcaatcagataaagaattcccgaggatggggtaattgagtagttttatttcctcagttacgaggtgat

SEQ ID NO: 4568 - DNA, 1252 bp, Arabidopsis thaliana landsberg
tacttcttccagttaccttccatgttagaaaaacaatatcagaaggcaaaccatgttcttgctggagttaagtccaagcttcgtctattaggccctcaagaagctggatttgtgttacttagccaggtatactctttgagtccaaacaaaaacatgccttgtgttgcattgaattaatgattgatatagtaactgtctagtactctttgtaaatgaaattttgcttgatttttgaaaccaagcttcgttcctttattcttcaactttttcaccccttaatgtattttgctaccttctacaggagttgattgcagctcttcttgcatgttccttcttttgcttgttccctgaagttgacagaagcttaaagaatcttcaaggaatcaaatttggtggattgttttcgtatgtgtcttcgtcatatatcttaaaagttacaaccatattaatatattattatatttcccaaagtcccaaatctttcttgtgttttttaaggtttccgtatatgaagcaagaaaacaaaataaagtgccttatccattactttggaagaaaatgtcgatgtatgcccaccggctttgtttcatttgagaggaaattcttccactcgaataccatcctcactttgtttcttatcccaaggctgattcgtgggctaattctgtcaccccactttgctccattgcggtatcatataaatactcctagttaagccttcttcgccgttgaatccatttctttcagatgattcatgagtatgctttaggttattctccttttgatccattttttactggagcaggttcacacctcgggagctatagaagatcaacctagtgaagctcttgaagtagattttgaagatgagtattttggaggccttactccgagttatgatactctacaggtctgacttgtacttccttttcttccatctcttcttaaaaactctactatctccttctgtttctacatagaggttaacaaggcttttatcggatacatgcatcagtgtaaatataaaatcgatgttcagcatcatcctgatgcatcatcttctgtaagaccacaattttgctcctagcttacatgttaagttttttttttacttaaatttgttttcgcatagcagcatgttactggtacatcagattcagcgaaccaagttgtagaaagctctcaaggatggtgtatcaagcatgaagagaaaaagattggtatcgctacagggaaactagggtgtggtgtg

SEQ ID NO: 4569 - DNA, 241 bp, Arabidopsis thaliana landsberg
agacattatatattataactttagttaattacctgagcatcaaacatgttcatgtacttgattccagtgttggagtctacccgtccagggttaggctggaaaagacaaaacgccagcgtttcgggtctcgggtcgctctgatatgcaaagaacgggtacgggttgatggcaaaaggcgacccggtatcgctaaggaactgtagaatgccctttaaaccggcctgataactaggagcaaacg

SEQ ID NO: 4570 - DNA, 3774 bp, Arabidopsis thaliana landsberg
caatcagattcattgttgatgcgccaccgtttgcgtttccctctggttttctaaatagtggggtgagtccagatctaacgggatctttggcagggtcaatggtggaacaaagaagaatgttttcaggttttaagtcggagtgaatcataccgagctcacggtgcaaataatctaaaccagtcagtatacatctgcaaatctcccggactttattcagtttcagacctttgtactggttgtatctgattaaacggagcaagctatcgccgagaaactcaagcaccatgcataaatgctgcccatttggaccactatgcttgaaatggtcaataagacgaacaacacatttcgtcttgtcgagatccccatcagcagcagctgaaagaaattcgatttcgtgaagtgcagcttgagcaaattgttgtgcactcttctgaatcttcaaagcaacataagtctacaacaagagacataaaaacatacaaagcaaaacattcttaggatatactttatagggtgacagttaccttcctatgattaaagattctataaccatttaatacgcaatccattttgagctaacaaatctggtaaactagaggagactactagtacagtgccaaatctagggctataatccaacaatatcaaaatcagaatcatcatcacatgaagcaatgatcttgcactaaaatctattggacttctaagagtaacagatgcgtattgtatataaaggacgagtctttagcttgcaacagtgccattgaaatgtgattcaatctcgatatgtcagagatcagaggccagatgaaaaatgaaaccaatgaatggttgatgtcaaaatgaagaattacgatcaaagcaacaaaacaatcgaagaaatgggaaaagaagagagatgcgtacagaggtgagcgtatcgtaggcaagccaaacggtggagaattgaccccaaccaagctttctctgagcgatgtaacgaccaccggaaaaaggatcgccgatcctgacggcgtgataaccacctttacggtaagcatcgaaaccctcttcttctccttctgatccggaagaagatgaacaagacatatctctatctaaaagacgtgtctgaattccaccgggtcgatttcgatcgtaaaaattggatcttggcaaggacccaaacaaagacaaagagcttccctttcttagaacagagaaagagagagagaaagacaaagagaggaatggcactcagattgcgtgtggccctgaaacgtaagaccctctccactttttgctcttttctgtgatttttttaatcaatctcgttgcttcagattttcccgatttaaactttttttccctatttctctattttgccctttgctccggtcaggtgtctctgtcttattgtttcccaagggccaagtcaatgtcttgcttgaccaaaaacattcgatatggtaccaaaatttcaaaaacttccatagacagacggcaaattttaaagatccggtcacaaaagcaactagttcgagctggacatttcatcgagcttgatagtcataactcataagcttggggctcgattacagactccaaactaatctccaatgaaacacaggaaaaggtctagtttctccaaacatacaactacaaacaaagctgtgacacttgaaaacatattgcagaagaagattcaagcaactcaattcaaaagctttcagttttgttaatttgagattgttgtttccttaagatcctacttatgtcttgccatttcagaccacccccattgttccttcaaatcactgagctatgaacacacaattctctgaaaaaatcgaatttacagaggaaaacttcttccatggaatctgatatatcaagttaaaggaccaaactttagaatactttgctcatacgaacaatttctacatccacaacaacaacaatgcaatgtctttactgtccaaattattcaaacgatcaaagttaaacaaactcaatatctattttgattttggaaagcttttggagctcaattatccattgaaacaaacaacacaatggaagtaacaccaaaacacagaacaatctgtgaaattcattcatcgattatactttactactcaaagcaaagacgtttaccagaagcaaattgattccactctttcatcagaaaccctaaaatcactccaaatcctgaacgatcttgatacccatagaattagcagtaccaatgatggatttgcaaatcgattccaacggcatatactgacaaaacggatccgtctgcttcaccttcgcgatctcgtacacgtgtctcaccgatagcgtcgtcaccgacaaatgacccgggcgtgtgcttcctttatcgactccagctgctttcttgatgtaccacgacaccgtcggagacttgacggtgaattcgaaagagttgtccttgaacgccgttatcgtcacggccatcggagtgtctggtttgtacttttgagtcctagcgttgaagtctttgcagaaagccatcaggttaagcctgtactgacctagcgccggacctaccggtggggctggcctcgctcctcccgccggaacggttagccttattgttgccgccactggtcgccgtaggatctccttcgcagcagccgccattgttgcgatcgtgatgagagcttcactgttctttgagggtttttgtgacagtatatattgggcctttgctttttatttgggccttatttttagcccattagattctaaataataatttcctatttcgttgttttggacgtgttggtaccttggtgggattatcatgtcatgggacggtgactgaataatcaatagttagtacatgacaaaacaatttcaatgaattaacaaacagtgttaagtgtaattaactaggaacaaatataaataaagaagatggttgacttttaacattgccttgtttgaccctatactacagaaaaactaatcaaataaacgaacaaagaactttaattatccaattttaatctatagttataaaattctaccttgaggaaaaaaaaaagttgcaaaattctattatattaaaatggcatagcgattgaatggaacgtttatgacgtcatgtatatgtatattgaaactgatgttttagtttaatgaccccaaaaagtcaaaacaagttagcgcaccgacatgatattgctattgcgttataatcatggacacatatagaacacgtaacacacaagcatgactttgactcgttgttgctgtacattattcaactcttttaagtctctcaaactgattgtatgggctttttgaaattgtcaaccttcgttacttcgaaactaccatttctctatcaattatatattggattcataaccacactactatatgaataaagttatatctggctagctccactaaagtatgaattagttatatgtggttagctggaatcgcatggactatatcatatattgattatatgtcaagatataaacttacttgcttgtaattggtgcaagtatttgcctatttggccgtagaccgaaagatgtatagagattttgaacataaccaatatagcatctttatttgagtaaaaaacacacaaaattgttgttggatccaaaatatggattattgatgctccaaccccagtacaatcgatgcttccaaagccataatttgtcgtgtttttcccgttattacatgtcataataatgcttccgtctcaatatggtgatttctctattaatccgaggctaagat

SEQ ID NO: 4571 - DNA, 5734 bp, Arabidopsis thaliana landsberg
tataaaggagattccttggagttgctatgtgttgatgaagaagaagatgattcgacgtcgttttgccttgggctcgatgatggtttctggaaattgataagacttacttcttcagctgcaaaagacttctttttaccgaaacaagtcagtgacaattatataagttatgtcaaatggaagtttttgcacagagttttcagctctgctttacaggttcttgccactcaggtaacattgacacagttctagacttgaaattggacttttgtttgttacaaattttgagttgtttttgttgcttcaggcaatgtttagagcaataggaatcggacaatctcggtcacttgcttcatctgctgcttttaattggattttgaaagatggacttggaaggttaagtagatgtatatacactgctagtcttgcttctgcttttgacactaatttgaaggtattttacttcattatattgtaattctcgaaactttggagattttttgttacttatactcttagaactttgctaaatcaagagagttaggttctcgacgtctgtactcttcagtctgagcattggagttgagttaatgactccagtattcccacaatactttcttttgctagcttccatcgctaacatcgctaaacagattagcctgtcgtgctacttagcaactggtgtaaggtttcctgtttgttatttttcattgtgacttaagtgttttatgtttagtgttttggtttgacagccaatgtttcgacattgtgcagtcagctgtacatcgaagctttgctgtagcggataaccttggtgaagtctctgcaaaggcacaggtttctttaacgaacctactcgagcttttctatcatttgtatcacacacatggcttgattttatttgtgacttttcagattcaaactgtttgttttgataaccttggtctcctactggcggttcttctaaatatgctattccaacacaaccaaaggttagctcaatctagtaccgttgagagttactttatctgtgagatttgtctctgaatcctctgacttgctttatgtactagactgcaggcatgtctaccttttgttctatatccgattttctccacgtttgatctccttggcatttatcaagggctcaagcatatcaatctgcaaactttgaccaaggtagttttttgttatctcggtaactagactcgaacaatggagactactttatattgttataagtttttcttttccttatcagcataggcttgaaattattctggaaagatggattgaatttaggcaagtaccttcccctgccgaagtgagtaaagaggaaggaattggccttttagggagtagaggtgaaaaacaagaaacgtcttcaggctattcactttccagacattgttaataagctgaatccttcatatgttctttgtaggtagcaaaagggtttggcccatcagaatcggatgcttagatcctaaggctcagattcctacactattgatgatggccatgcaatcactctgcagtgatgatggttacttcataaccatggaactttcctcccaaggtttcagaagaataccaaaagtgagtttcatgtttgctactaatatgtcctcatgattctgtggtttgatcctcaacacttgtaaaatatttagtcgggcatcgttatttgtctgcgcgaagaagccaacagtgtagacgttatcacgagtttgttacaggtaagggactcaactgaatatcatcagtttagtaagttcatagtagtcaactgataacacattttggtgatatgttcagacatgttacatacgtaaatcccttggagccaatagaaccaagagaagttacttatcgttttcagacttgacgctacaagattggaccttgctcacaagagagagtaagcgagctgctcgagatgattttatcgcactgaacaaacaaatgcaagaacaaggttggatcgtaaagaatgtcttgttgagtgcagaagagcagattagatacatttttgacaaaaaccaattgtaacattaaagaagaatcggttaaattgtaactgttttagtacaccgagattggtttgtaaattgatgcttgagtactctgttaatacaatctacgtggcaatctatacacaagaaagttgttaccatatacattagactcttttgttgactgtgaaaaacatcaatttgagaaggaacttggctcagtgctatacatagagtattcactcatgcagatgtttgttctctcctcgctccatttcaatatctccatagctaacttgagcgatgaatcgacactgtttgggtccaaactcttgcttgaagaaacaaacagctttttcccggtcaaggaagagtaaaaccgcttaaacttaaccgccatgaagtggaaggcaagctgacccaaagtggggttaccgttgttcgaacctcggtgacgactgaccacgggattgaagtcttggaaccactcgcagcgtgccaaaggaacgcgttctactttttcttccaagagatcgtacttgttgagaatcaagaggaagtccatgttctcaaagatgggatgagtgataatgctttcaaagagtttctttgtgagtaacatcttgttggttccatcttctgacacctggtcatagtcactcatggaaacaacaaacacaaccattccgacgtcttcaaacatatctatccacttgcagttttccccgaggcctctcgagggtactctaattaactggtacctgaaagcatacaagaagatgtctttaaatgtttttgaactgacttgaataatacaaaacaaaaaggagaatcagaacttacctgagcaaggaatcatggtgatcagaaggatcaagattctcttcagatgcagtctgtggaaatgagaaatcgagacaagctagaccactggatgaagtgactccttctgcatataatatatccaaatccgatggctcgtagtctggtgtcaacacgtcaatagcctgaagaacgggaaagtagcttcaagattaataacttgctgtaacgattaacgaacaatgcaatggaaaattgagagcacaagagatagtgaagcacttatttacccgctccaagaagtaattagcgacactgggaaggagtcctagctcacttcttcgcttgtatgtagcttggatagctgcatccctccataactcctcaactaatggcgcatactcacgagaggctgcagggaaaatgaccccaagatttccagcagccatagtctttaatagccaatcagaaaatgctttaagcctcgggccaatggagtacatggtgacggttttgtcgttgcttttcgcatctcctgctcatacacataaatcaagttaagactcaaatgggatacatgtatataaattcatgattgatctggtccataaacaaatttctctcaggaaactgaaattcaagaatgagtaggagttgaaatatctatgcaccttcatctgcaggtatattttcaaggacacactgcttcgtgttcctgagagcaagagcttcttcttcaaaccgctcccggccctcaagaagcataccgagataaccatacacattggtctggataatcacctttatgttttcacgctcatcttccaagaatggtacgtccttataaaggatctttgcctaaacgagaaagtaattcagttgtgtagattttaaggcttacgctaacgagcagtacaacatacagcaaagagactcatacctgcttgaatattgtgctagttccagaaccactgtttccaaccaaaagaattttttgcaaagtcctatgctcaagatggtccagaatgcttctgctatttgcgctatagagttgttccccagaagcattcgcggtagattttgacggtacaggaagtgacaatacagcacaaagtaacttagtcccagcctgcaaagcagcaaaaagtttgcaatctttaaatcaaaggggaaaacacaatcgaatggaatataaatttcagacgaaaacaacgaaccttgccccatatgtatcccttggtattcttctgtccttcttcttgatacgatccatcctcgttaacccaaaaatgtgggttacccgcacattgaactcctgccaactgcagcattcgtagctccacttttgtaatctcccgaccgtttatgaaaacttgagtgtttccgttgctagcttccggactaataggacctccaacattcagatgaggactaattatctgataaggcttctctccttcctgtagaaccccaacatcatatatatatataagaaacaatagaaactaagacacaaaactcaaaagaacagtaaatatgactcacctttccccaaagaccagacactttatcataccaatagtccccaggtttcagcttcttaggaggattaggacaagtctgaagtgtaacaagctcttcagggtaaagaggttgtccattaacatacacatactcagctggtaactgattagcttcacaaaacctctcagtcttcataatctgtttaacctccaaatcattaagcaacctcttaagcatcctagagcatttccctaaactccctcgcttcgattcatcaataggaaagccaatacaagtaacacatttccttccttcgggcatagaacccatagctctaagcacacagctactacaatacttagcatcacaaactaaacacacttccttctccgtaaacctactccctttaaaacaccgataacaagaacccttcttacctttcgtctgcggctgtttcttaaccggtacaacccgaacccgcctctggttactacaactctcctcttcctcaaatccatcatcagaagcaatacccaagaaagtaacaactggttgcttcttaccatcaccattagtctcactaacacaatctccagtaacacgagacgacgggtaatccatacttaaaactgactcattcgattcccaatccggtactaacggattcgaagacgactcattcaagtctaaactctctttcactgaacaagacctcaacaataactctccagagctactcaattcacaatcctcaccatcaccaccttcttcttcttcttcttcctcagtatgttcaataaccgaagtaggagaaacagtgattgaatcagaaaccaattcaagctgattagatccacaattagctataacagaagtaggagaaaccgaatctatcagaaactttttactctctactgataaaatcggttgaatcacagggaaagacatgttatcggaaatacgaaccggagaaacaacggcggcgactgggattttctcgacgttaataggaacagcacaagggatattgtatgataatggtggaccatcgtattcttcagcgaataaacaacaatcatcttctttcaatggcattttcaagaagaagaagaaaaaccctagcttttgcttcagaactaagcaaacaaacaccaacaagaacaggtaaaaatacacaaaatcaaagaagaatcatttttttagggttcttcttgaggagcttcttcacaagtgagagagagaaccaaaagaaaaggagaatggagaagaagaaagtgattgagaaaaagatgaagaagaaagaaagaaccactagtagctggaatcttgtccgataatatttttttggttttaagtttgctttttgggaggaagag

SEQ ID NO: 4572 - DNA, 1768 bp, Arabidopsis thaliana landsberg
atcttgctgttcacaaagcaatgaagggctctcaggagtgcggaagccattaaggaaagccgaatcgagggaggtggacataaccgttgtctagacctgaaatggtaaagatagaaaatgttactaaggttgggatctttttggccatttttcaagaaggatttgaaagaggtatagtctctgtagctttgggttttatatgtatagtttctacgctgatattgtaaattgatttagatttttgttttttgttaggtttatgttttgatttttgttcatactaccgtaagatgatgctccatccttccttttttcgtttttcttccgaccaatataattttgaagaaatgtgaaaaaaagaaagttaaaggagatatatggaaatgtgctatggactgtggtagtattggtcatgtgtattgtgtagatttgggtactttaatgtttataagcaaacacaccttacaataatctcaatattcttaacaaaaaaacaataaaagactaaatccttggtttgaccatagctctcaacggattcttcatcaccaccgtaaactccaattttccggcgaaatcaatctcacttcctggtggatgagcacaccactcgaactcctgaaccatccgcgcaagcatcaaatggacgtgtacggttgccattgcaagtcctggacagatcctacggcccacaccaaacggaatcatttttactccactaatcccggttatgtcagcatcttccttacccaacataaaccggtccggatcaaactttttcgggttattccaaattctcggatcctcactaatacccggaagataaacctcgacgttaacgccggcgggaatatcgtaaccagcaagcgtcgtcgtctccataacggcatgcgtcagagaaaaataagtcggcggatgtttccggagaagctccttaacaaaagcttgtaaaaagaccattttgtccacatctttctcatcgaccctacgatcatctcccaccgttgatttaatctcatcgtagagccgagattgaatctcaggattcgcaatcagctgcgctatcccccactcgatcgccgtccccgtcgtatccgtaccaccgttaagaaactcagagcagagcgtcacgagctcttcgttagacggcgtcgttttacgaccttcgatttttaaatcaaagagtgtatctaagtatgaaaaagacgacgccgttttatcagatcctggattctgaatcgctctccgtcgtctctcgataactccgacgacgtaatcgacttgttcacggcgaacttcgagagctcgtttcctctctttagagaagaacggagcaagaatcggaagataatcgtcgattcgtggatcaacagtcattaacaccgtcttcaaaatctcatccatcttctcgattgtctcttcatccatctcgattccgaaacacatttccaagagaatacaaaacgcagcgaatcttgcgtttttaagaacccagattagcccgtcgttgtctctagcttccgatttgatcctctcgatgagtttatccatggcggattgtctcagtttcccgaattccttgagacgtgttgagctaagcatgttctgaaccatgtttcttctcagagatcgccacactggaccgtatttagcggcgttgacggtgaatttgttgcagctgaagattgttcgggtcggattctcggcgggtcgtgaagcgaagagagctccgcgttggatcaaagcttcgtggactagagttgcgtcg

SEQ ID NO: 4573 - DNA, 1522 bp, Arabidopsis thaliana landsberg
tgatattgtcagtgaaagaatcacttgaagtacagttctcatttctttgattggcgtaatccccactttgcaatgtactataacatctagatttttccttgggccaacaaagcaaaagcccaattgataaaaagtatcacaagcccaaacggaaacttagcgcgggaaaaagagaaatctcatgtgtgtcccagggtttgtatcttttgcaactactctaaaatatacaccgtatttgtttgaaatggtaatcaatcccatgatcccatctaaaagaaatatcaacctaataccatatgagtggagaaagtattattagaataagatttttatgcaaaaccatatatttagaaatttcgcatacgttatgctatgttttctattaacataaacaaataaagaatgaatttcaaattttaaacaagaacatatttttagaaattagagatacacatattcatacgttacactctaagctttctaataactagcatgcttatatgttgatccaaataatatcataaaacagtttcaaaattgcttcttcttcttgttcatcattgcttcaaattcttagcttcaagaccaaaaatgttagacatctccaattatgtcttcttcttcttcacccttgtcacaattctcctatcatgtttggtttacatactcacgcgccacagtcacaatccaaagtgcgcgaacctccctccaggcccaaaaggttggccggtagttgggaatctgttacagttcgcgcgctccggtaaacagtttttcgaatatgtcgatgagatgagaaacatctacggcccaattttcacacttaagatgggaattcgaacgatgatcatcatctccgacgctaatctcgcacaccaagccttgatcgaacgtggagcccaattcgcaacccgacccgtcgaaactccgacccggaaaatcttcagttctagcgatatcaccgttcattccgctatgtacggtcccgtgtggcgatcactgagacggaacatggttcaaaacatgctctgctctaaccggttaaaggaatttggttcaattagaaaatccgccattgatatgctcgtggagaagatcagatctgaagctaagtaaacgctcgggctcgtctgggttctaagcaacgctagattcgctgctttttgtatcttgctagatatgtgtttcggagttaaaatggaagaagaatcgattgagaagatggatcagatgatgacggagattttaaccgccgttgatccacgaattcacgactatcttccgattctaacgccgtttcacttcaaggagaggaaaaattctctggaacttcgccggaaacttgtccaattcgtcgttggattcatcgagaaacgacgattagcgattcgaaatcgccggtccgatcaatcggcgtcgtctttcgcgtatcgtgatactttattcgatctcagagttgatggacgtaaaacgtcaccgtcagatcaagatctcgtgacgctgtgttcagagtttctcaacg

SEQ ID NO: 4574 - DNA, 5119 bp, Arabidopsis thaliana landsberg
gagtgaattaaatcgacaaagctcaatgatgaaattaaatttgtcgaaagataggatcttttgttttaggagacacgaatctagagaccttagagaagaaattatggaacagaaaagaagagaattcaagaattagacgagacctgaagcatgcagagtcactgtaatgaaagtagacaagacaagagccagctcaagagaaagagaaacagaggagaagagaggaagagtttttgtttgctttgcatgaaaggaagacaaaactgatattagttttttatagccacgaataatttccataaactgctgatccattgaaaccaaaacgaaacgaaacctaataacagatattttagttgaatcgggtaacataatcagataagaaaaataaaataaaatcataaagtaataaaaagcaaaaaatctttagaaaagttagtagtgactcgtgtcctactcctatgtcaaatactttagaaggttgacaaaaactaaataaatcaaataatcatgctttgaaattttggattcttcgacctaatacgagacaattttatttattttttatagagagaagtcttattaaaagaaaagaacaattccatgttttgcgttcttccattatttttaaccattacttcattgagacaggagtgtctctatatagtggttgactccttacgcaactccgaaacccaataagttaaaaaccatttttttttgttcttattcttgatttctgcaaccaatgcgacttgctaatacacactgtctggctccatccgaattcgtgtttacgttttttttttctttcttttgtttatagatctttcgtttttagatctttttccagtttagattcacttctctattaaaatatttttttctttagaagatctttttttgtttggttggatgtatctgaatatttactagtttagatccaacaacattttgcactaaccggttgagctaatgtaaaaagttgagaaaccccaaaacggcaaatgggataaaacgttaagactaaaacttatgaaacgtgaaagtgttagtataatttttaggtagtttgcaagtttttcattgatatttagatggttaacaggtgatctcatcatagaagccatgtaagaaattgaagaaatcccgaaataatgaacaaggtaagaataatcttttcgaattaccaaaagtggaagagtttaaaagtttatacaagtaattgaatcttagaagaatgtgcaacgctatgtgtggaaaatgacactatacaatagacaataagtcaataacagctattggttcggttagaactaccgctttgtctattacaaaatgatattgtagacaaaataagaaagactacacaaaggcacatcagttaggaattaaatcaatatgagttgcagttccacggaacaacaacaaaccaagaattgaagctacgtaggccaaaaaaatgatttacaacaaccattagtttccagaatatatagttcgatcccacagcaagagactctgcctttctctctgatatataaaccttagtgagattggactcgagagacacaagacgcttctttgcaacgtacattacaacaacttgtggaccgcttgtatgatcaattcttggttttgcttgccgctatggttcttgaagaactaggtttagttcttgagcctttcttgttattagaccgcctcttctatattcatagcaaaaagaaaagagagccaaaacaagggaaatatgtgaagaattcgatttccaaaagttactcttctatcgcttaaagtcattaggaatgtgatgaaagtagcatgcttaggatgtttaccttgcgagaactggaagaattctttgaatcttgtgcagtcccgcagaacaaatttggcaaatttctagcctgcattgtggtttatttacttttattggtgaatgagaatcagcgtagcaaactaaatgagattccagagagtggtgttagctcaaatacctttcatttgcatgaagatcaacgccgacaatccgtggagctgaaacagttgagcgtataactgtaccgaacactgctacaagcttcaagagcatatccaaggagacatttaccggcctgcacagtcgttactctcatttagaaaccaagtcatgaaatcgttatagctcagaagcaaaaaaatatggtctaaggtggaaatttggtatgatatgtttacctctctgtcctgctacccaataagcttgtgaggacagggaccaattgagaaacatatccatgtgagaattctattttttcagttagaatactgatcacatctgcttgaacctgtcccaacatctatgagttagcttatctaaacatacaaacatcaaaaacaaaagtaatctaccgagaatctgagatacccacagactgatctgtcagttttcttaatgccccaattgcgcctttaacatcgctacgctcccaaaaatgtcttacaatctgcatgtttagaagtcaaccacttgcaaactaatactaaaacaaataatggtcagggaaaagaacagaaaagaagcaagaatgcttacttgtaactttgtcaacctcgattgaagagtgcttaagaactcgttatgggttagcataagattttcagttatgtcactatcatcttccctatcagatatattcggctcttccttctgcacaaagccacaaaccaaacaatcaattacgtttgtcatgtatacagtactctttcaaagtaaaaaataagttgcctaggctaatcattgcaaagtacctgaggcatgttatcgcaagctggttgaatttgtgttgcatgtgtctcatccaatgtcatatcagccacttgatcaatcacagtgggtgtagccaacatttgtgttggactaactcggtgcatggatgctatatgagatgtatcagatgtcatgttaacagattgatttagtttcgtgggcattacacgggctggagaagtccttaatggacgtactgatgttacaggacactcatgagatgttgcctgactgagtgacacaggccttactcgtgctgcagaattcctgcgttggcgccttaatgttacagaagcctcctcagatgtaatatttgtcgcctgattgaatgtcacaggcaatatacgggcatgagaagttctagattcttgtgttaacgctacagaaggctcatcatatgtgacattagaagcttgattgagtatcacaggcatcactggaaatgaagaagtcctagctggttgtgttaaaggaggctcatcagatgtcacgttactatcccgattgagaacaataggcatcactctggctggagtactcctagctcgtcgtgttgatatgacaggagtttcacctgtctgtcttgatgtcttacgcggatcttcctgcactgcattattgttctgttctattgttgtactggctccttcagtatgagtagttttttctcctctctcaaacttctcaactaaggagcgtgtcctccccgagacaacatttactgtagacatatcaatttataaggaaactgtagccagccaacttaaatgctaagaagaaaaaacagaaacagcaaaagttttaatttcctaacctccttcaacaatcttcacagggttcaattctctgctgccgctagggtactcagtgtctacagaacagaaattttataccggtcaattactaattgatcattgtctcaaaaccaagtacgtgaaccacagactacggatgatgaagaattcgaagcaagttctaacagtagctaaagatttagatagtagcaatctatagtaactagatatagtctagtagctcttcctaatagatgtcttttggcatcgtgggctgtctttttgttcactcatatttgacacaaagccagtcacattaaggttgcataagatttggcgtttgctttaatagaaaaaatggccatatattagtcagttttaatttttgaatcaagaacttacttttctgttcatcgccaggtttttctcgtgaaagaactctttcagttttgctgggaatatcctctacgtctcctgagttctccatcccacctttgccaaaagttgccggatcagcagacattgctcgtcttgtgtcattgtacttgctatttgatgacctatggatacgaggtggtttaaggaacatacctgaggcaaggttgcagagatattcaaaagatagattaaaatatctgaaagctacatgaaactaaagtctgagaacagggaacctacgattcgcttcatcagttggtggttccgatgataaagctttttcaaacttgttagtaatacccttgatgatagaatcttcagcatcaaaaggtttactagcattctgttctgaaagaaacgcgttttgagtttgtggttcctcctcaacagccaatccgcttttctttcgagttgcagattgaacaaccgctgactgttttgattcttcaaactttgctagcgtctttcttacatgtgctggtcttagcaacatgcccgatttcgttcttgagaaagggatagattccctttctgaataagaagattcctctccactatcactatcccgcgatgtactagaatacttgtctcctgctggtccaaaatatgctgcattctgcttctcgctcaccatagtagctacttttcctgattccaaaggcaatgtcgctttcagagatcctggattttgcgctacattcaaatttccacctgtggctttaaacaaagagagttcaaatcagaccaaacataaggaattagcccacataagtgaatgacatagaaatattatgttgatctggccaagaaacagacatcaaagccaaaaaatcacatgtcagctcccccaactattgtctaaagactactttgttccatacaataacgaatactgcgatttgcattttggactcattcatttcaattcctacaaaatttttaagtataaacaaaagagttcacagcactatattgtgacaacatgcttaaagtctagatacctttttgtgttgctgatcacaagagttcctactacagttgcaatggtttacattaaaaacacttctgactaagt

SEQ ID NO: 4575 - DNA, 2319 bp, Arabidopsis thaliana landsberg
gacgaactaagagtactccagtcagagcaaggcctgtaggactcggtcgggacactagcatggcaactgatatgcttcatgtaacatcaaccggtcctgatagatcttcggcttctaatctgacatatgatgtgtctggcgtaacatcaaaacgcctaactaggacttctccagccccagtcatgccaatgatactcgatcagacaacaaaaatgaaatatgatgagccttctataacatcaacatggcctgataggtcttcggctactgatttgacatctgatgtgtctggtgtaatatcatctcgacaaactaggacttctccagcaccggtcatgccaatgatactcaatcagacaacaaaaataaaatctgatgagcctcctataacatcaacacggcctgataggccttcagctactaatttgacatctgatgagtctcctgtaacatcaacacgacaagcaaagacttctccagccccagttacgcctatgatactaaatcagcgtcaaacaactaatatgaaatctgatgagcctcctgtaatatcaacaagaccacttaggacctcttcggcacgagtaatgcctgtgatactcaatcaagcatctaccacgtatgatgagcgtcctttattatcttcacgatcggctagaacttctcctgcccgtataatgcctatgaaactcaatcaagcagataatatgccatcgtatgagcctccagttgcattaacacgaccagctaggaactctcccgcccgtgtaattcctgtgaaacttaatcaagcaacaaatgtgacagctgatgcatctcatataagatccaggcaaagatttagtccaactcaaacgctggcaccacctgcagtatttgatcaggtgactgatatgacactggatgagactacacaaactcaacaatcttttgatatcttgacccaggtaagcttcaattaataagttttggaaactaatagacagcgtactttctccagcttcgaaatgtagtttgttgtataattgaatgtagtcgctgatgctatacataaaatatgaaattgcaaggattacaaagttggaagagctctgaatacataacaagtatttgatttgtttggcttttgtagaaggaagagcctcagatatctgggagagaggatgatggtgacatttgggagactttaatgcgaactcatagtgaggtcttaaacactcttcaatcacggttgacaaaattacaggtaaattttgtctctgctattattctttttaatatcgttttctcttgttctcttgtcctatttctgtttggtttttcctttacgtgtctttttttcctgcttgtgaggataaactaaatggctgatttatcacaaacatgcagattgtaagacatttctgggaacgtagtgatattaaaggcgcgattgcggccttaagaaaactgtcagatcactctgtaagtaccccagtagatatacttttacctgtcctttgttatgcttagatgtttggaaaaagctgactcgcttaaactggaacaggttcaagcagatgtgatcagtattctaacagacaaaacagagattttaacattagatttattttctcaattagcacccgtcctcacaggcttattgggcagcaagactgagaggtaaattattttatcacatattcaaccttctttggtttgcttttagtttgagatatatagtcgtctccatcatttggcttgtgaatgagggaatatggcaagaaaattcatttgtttattacagtcactgtttatatgttaatatgatcttttgacttaacagaggaaagcaatatgtgatttcaattttgtataggcctgtaaatgtctccttggaaatgctcttgaagcttgtagcagtgtttggcacagttatacaatcaactgtttcagcacgacgagttgtcggcgttgatcttcatgcagaggaaaggtacttatactttcggctcctcttatatcttcatgtcacacatatctctctttttcggaaagtaaaacaaatcgagaactgcaggttacagatctgccaaagctgttctgcggaattgcaaaaggttcagaagattcttccactactgacaaggtaaaagaatatttttacacatcttattatggaccattgcgagcatgacagctcttgttgatcggtatttgctttcggttgtgtaattgtttccgtcctcttccatttattacagaagaggtggtattatagcaagaaaggcacaagaactaaacctagttcttcaaacaccatagctcctggttcaaagt

SEQ ID NO: 4576 - DNA, 2014 bp, Arabidopsis thaliana landsberg
atatttatttgtccaattccattgatctatttcgtccaaacggctaagattgaaggagtcttcgtgaaatatttgttgtccaatttagtttaatgttttatcaccacacacattgacaccgcattaaactctaacaagtttttcaaacacgtttgttcatcaccaggtttttctttaaaattattgtgtattacttatcatatacaatgaaaattattgttataccgtataacacataaaaatttcttaaactacattgactactttaataaataaataaaacacattacatctcatattataagaatactttttttagttgttacatttgtttttataaatcctccatagttgttttaaagtttaatatgattgagttgcgatctagtattattagtctttattaaatatgcttgacctttctcattgaagaaagatgtaagcatttgaaagcatggcttcacctaatcttcctttcaattacaggtcacatcatccaactctaaacaccaacctcccttagttttccttgcttttagcattataacattaacaagtctttgcaatgtttaattttctttgaatttgagaaatctttcacattaaacattttcattaattgataattaattatataacctttatcagtagaactgttctcatagttataaaataaacatttggaaaaccccacctcagtttcaacttgcaacctatataaatataatatcgaaattcttgaccgggactggtttgtcatcttcaaactttgtataggcttgttgatattttggccacattttctatttttgttctcaaaagtctttcgtcaagtttaagaaacaatggctatattagagcagtcgcttttggggaagtttctcggaagcttagttacattgtaaaaatgactctattcacaattcacaaactaactaccgcactaagtatcatcacattctcacatgtcttatataacaaaagaatatataaataaatatttacatatggatattcttgtatgcgatcggcactaacctcattaatcaccaaatcatgtatatacggattcaagaaataatctcattaagcttaaccaaagtatacatagtcaaattgaagaagaaaccatatagtaaaatttaagaaacaatctttaatgtatatcaaactgttaatcctaaatatctaataacaatctcgcaagtaacctctacttaaatcaaattttcatcgaacaatattaaaccgacgcgtcacctttgactttgaaaaaacaaaaccgcgtcaaattaaatcgttttatctaatacacgttatctctacagtgtatatatattacggcctcttcttcttcacttcaaatcatatttactttttcaaaatcttatcacaaaccaaaaaaaactttctttcaaaatcgttctctgaggcattttaacgaacagatggcggacttaaacggtgcgtattacggaccatcgattccaccgccgaagaaagtctctcacagccacggcagacgcggcggtggatgcggttgtttaggtgactgtcttggctgctgcggctgctgtatcttaagcgtcatcttcaacatcctcataaccatagccgtcttattaggcatagctgctctaatcatctggctcattttcagacccaacgctatcaaattccacgtcaccgacgctaaactcaccgaattcacactcgacccaaccaacaacctccgatacaatctcgatctcaatttcacaatccgtaaccctaaccgccggatcggtgtttactatgatgaaatcgaagtcagaggatactacggtgatcagcgattcggtatgagtaacaacatctcgaagttttaccagggacataagaacacgacggtggttggaactaaactcgtgggacagcaattggtgctgcttgacggcggagagagaaaggatttgaacgaggatgtgaattctcagatctataggatcgatgccaagctgagacttaagattag

SEQ ID NO: 4577 - DNA, 1154 bp, Arabidopsis thaliana landsberg
cttctcccataagactgcagcattgcattcacacttcccacaagtgcacacatggagttctacataattgcgatactcttcccacaatgtaacaagttcagtataataggaactaacatcaagagctccttgttgaatattacccaaacgttgttcaatttcataaacacgaggtgcatcatcttgtttgaatcttgacatcaaactattccaaatcccttcagctgtggggataaacaatagactctgacctattttcttcgatacagaattcataatccaagtcgctaccatgtcattgcaacgagaccaagaaccaaaatccgtatgagtatcagatggtttaagaattgtaccgtcaatgaaaccaagtttattacgcacgttgagagccatacgagtcgatttgcgccatgaatgaaagtcggcaccagtcgttagacgatcggaaacaagaatcaacccagcgtggtccgagctatgtagaaagtacggattgtcgtattgatccgttgattgagtcgaattagccatgattgagctaatcggagaatgaatagagttgcgaatggtgaagaaatgattgattgatgattcaattcttgattttgtgaagaatcgttaagaaaagaagcggaagataagaatgatgaattgatggttcgtcgaggaagaatcgagtctccaatgtgaatattcgaagctcaatgaagaagaatagctcgaattgatgaaggatttgagaaaattttcccagaaattgatgattttcccgagaaaatatgattgagaaaaggagagaaagtttgttattcactttgctctgataccatattaactttcataatgtgaaagtaattctcattaatgaatcaaagtatctacaaaaagtatttatagttacatgtacatagcataatactaagttaaaggagatttagtatacaaactatatactgagataatataagctaatatggtgttagactgttgatataattatatgaggcagtggatcgagatttgagaactacttaagtcaagattatcataccaagaattcaagatttaggtgacacatattttgggaacctcattggcccatacactaaagaggcggtcattctttcttataactctaaaccatattttcc

SEQ ID NO: 4578 - DNA, 1411 bp, Arabidopsis thaliana landsberg
  unsure (1)..(1411): unsure at all n locations
ccttcttagctaccaatcctagaatcagtttcacactagctaacttagccacaggagaaaatgtatcaaagtaatcaacaccctcctgctgtgtgaagccttttgccactaatctagccttataacgttctatggagccatctgcattatacttaatagtaaaaacccatttgcaccccactacattcttatttggtggtaaagaaactacactccatgtcttattcaattccatagcacctagttccacattcatagccttagtccactgaacagaagctatagcttctttaaaattctttggctctgtctcaaccgatattgatagaataaaattttgatatgcaggttttatgtttgcataagaaagaaaagaagaaagaggatagggagtcgtgatgacctttggtttagtcgtgaggacttctggtgaggtagtggattgaagaagagcacaatggtagtcagataagtaacccggaaccttagtcgatcgttttggtctagcatcttgcaatgaaaccgtggttgtccctgtagttacagtctcaagaaaagaatttgtgacactaggttgtgatgatgatgatgatgcattatgagatgatgatgaagatgatggagtatcatgagatgaatgtattcctaaatctttagtatttacagagtttggttccatatgcaagtgtgaatctattggtaatggtagaatagaatcactgaaaagatcattatcctgcatgtaactcttatcagttttaaaagggaaaacattttcatgaaacactacattgcgagaaactaaaactatatttgtatccaagtgtaaacccttgtatcctttaaatcctgaagagtatcctaagaaaacacacttatcagctcttagactaaacttatgcctatctttttgcaatgtagaagtataacacaaacaaccaaatgagcgaagaaacaaatattgtggcttttctgtgttaacttttcataaggactcatgttatctaacaaaacatatggtattctatttatcagaaaagcagctgtatgaatgcaatcagtccaataagctaatggaatattagactgaaaaagtaatgaccgtgctacatttaacagatgttgatgttttcttttaactacagagttctgttgaggtgtataaggacatgagaattgatgtaacatatcatgttttgcaactaaatcatgaaaggctaactcaggggcattatcagttctaatagcttttatgactgcattatattgagttctaacatgactaataaaatcaggaaacttcgatgaagctgcacttttataccttaacagataaatccntgttcctcgagtacagtactctaaaatagtaagcaagaatctatatccttcaacagactctaggaaaaag

SEQ ID NO: 4579 - DNA, 1368 bp, Arabidopsis thaliana landsberg
  unsure (1)..(1368): unsure at all n locations
cgagcagagaaacatcatggttgcgtcaactagaactaggttcactaaccaattggactgatacaaagaatcactacttcgatgaatccgtgacagaggcacttcgtttgcaaatttcttcattcactcaagctccacccgaatcccttagagcagcttggctccgtatcagatcttattagcgtgaatgtccccaacatggttttcaagagagccaactcattaatatattctacagaggggtagccaagccataccggactcaacttgatgcagcgagctactgtaacttcatgacaagaactactagtgaagcattactcctcattaccaatgctttaactagtctttcgacacaggaagttgacacaaaacaaagaatttcagctgagaatgccaccgcaagcaaagagactcttgtttcagtaatttctgctcctatccaagcccccccctccaccttccttagacagcagacttgattccatgcttgcccagattttcgcgtgccaaacaaagctcgaggataagtttgatagcaaatatgattctctctatacagatctaaatagcacgattgacaatctacgctctcatagtaacggaaccctcacctacatcagcctctatcaatgcagtcacattacgcaatggaaagcaactgaatccaatactttagcgcgaacgttcagctcagccttcatctttaccagttgcagaaaaagactcagttcgattgacaccaatcactcttgacgactctgttttgcctttgtcgagtgaaatcgacaatttcgtggaggaggaggaaattattcccgatggtgtcgatcgacacccagctcgttcagacaatgtgcaaattcaagctaaaaccaagtcagcaaatcggcaaattcctttccccaagagtcctaaaaaaacaagataagccttagatgatgtcagatgcaaggctatgattgataaggttattattgagatggctctagttgaagctattcatctctctcccacaataagaaggtatgtcaagacaatggtcactaagaatttaacgaaagaatacagtgttatgatgttttcagagcatggaagcgatatcatttaggaacgaattccaagaaagctacctgaccctggaacctttgtactaagtgtcaccatcaaccacgattccttcccaagagccttatgtgatctcggttctagtgtgaatctgatgcctcgttcaattgctatgcgtcttgggtattccaatcttgagcctacctttatcactcttgtgttggcagatcgttctacccgaattccagatgggattcttagcgatattcttgtgatgattgngaagagtatgattcctac

SEQ ID NO: 4580 - DNA, 557 bp, Arabidopsis thaliana landsberg
  unsure (1)..(557): unsure at all n locations
aaagaccttgtccaggattgttctttaggtactttaagacattcataccagcatgaagatgagcatcagtagggcaagataggaactgactcaaacgattcactgcaaaggtaatgtctggcctagtgatacagagatacagtaatctgccaattaactcacggaaaggcttagcatcttgtaaaagaagtcctgtatctttggttaaaggaaccttcggatccatgggaacagatttaggtttgcatcctaatagaccatagtcagcaagaatatctaagcaatacttcctctggcaaaccgatatcccatcagaattcctagctatttccagacctaaaaagaatctagcagggcctagatctttagtcttaaactgtcgtgcaagagtttctttaacagctaatactgcattatcatcattactagctatncataatgtcgtctacataaaccaataaggctatgaaagacatacctctgactttgacaaacaaagtgttatctgcgtaagactcaacgaatccatcatcaagaagagccttagataaacactt

SEQ ID NO: 4581 - DNA, 3699 bp, Arabidopsis thaliana landsberg
  unsure (1)..(3699): unsure at all n locations
tatgaaatcttgaatcaagcattatacaaatttcactagtctgctcctagttcatactttgtaatggtccagtttcacagactttaacattgatcaccaataatcatttctcctataatcttcattaatctcagatttcagatccataaatcaacaaaatcttactctaaatcaaacacgttatatccaaattgatcagaaacagcgagattaagatctaaatgtaccatagaagtcacgacggaagctccgtacaccattgaggtggtaccaaaccacgatttcccagcgagaattgcgtagacgttgacgatcgagagcggccaaagaagcaaaagctcatgccagacgagtccgactaggaaatgcggcttctctttgactagataatctccaaattcatcaatgtaccagcgattcagatcgacgataaacgccgggaagatatcgccgggaagactcgtttgaccgtcgataagcggcgcaattaccgccatgagagcaaagtataagaagagaaccgcatcgatcaacttgcaaaatgctcccattttttttcttcttctccttcttcaatggattttgtttttctctctgctttaatctgtcgttgaccgcggaaacgaagagccggctacttaataattggccaaatctaaattaaagcgaaccggtttaaacggctaccatttttccggtttgattcagtggtaaattcgaacactaccgggccttaggcccataatcttcctcggaggatgtatatagtatccagaaaaaatagtcacccgaaggactacactaattaagagagcccatgatctgttacaaaatcttaagttctaaacatttgaataagtttcacatcctctacatagtctagaaaaatgtgaactctacggttctaataactttcgactcttgaatttgcagttgttttattttttatttttcagggagtctaaagacatgatcatttcaaaattccttatctctcacgccttggaggaatcatattcgtaaacacacttgcaagttacaaccttgcattgccttaagcaaattctttagcaaggtacatttcttagtgttacgttttagatcttttaaaatgttgagactacttggtattgaaaccatgactcagttcacttgttcgtcttgcaagatggtagggaaattgttttgcatttttatctctggatatgtaataaatctatgtacctttctaagtgtaatgttatatctgcagtcattaaacaaattgtgtaactcgttattatatatctcactgtggagtttcgtgatctttcgactgcgaattctcagctgaactttggccatctttgagtttcttactgctcttctccttaagcatctccttaatctctgcttctctcttatcaacaactttgatcaaatccttgaaactcactgctctcaaacttttccctctagaagaaccagcctcctcgctcctcgcctgtacttcatcactctcttctggtcttaaccgatggtattgccagaaaactttccagcagaagagtgtgagtgcaatgaaccaaacgacgccacatattaggaagagtccccagaaactctgtaccgatatttgatagtnnnnnnnnnnnnnnnnnnnnattgtacattcgtggtcgtaggtaagccatttcttgcggattttctcgagttttccttcttcagccagttgcaggatcgctgtcgacatgtccacagctagaggagagtctctctggaacgcctgcaagaatcgagatccattaagcaaagttttaacagagactgatcttaaaaaattgaagttggttttcacatacaaatccccagcctgtccgagtgaattcctgtccaactgttcgaaacttgcagttgctgtttgacaagagagctttaatgtaaggaagctcgtcgacaatggctgccacgccaccgcctctgggaccacgttgaagagcagagagatattcttcttcgtctttaagcggaatgattcttgatggagctatgttaagttcattgaccagaaatttccacgcaaaggtaccatcttggactccaatgggttcgttgcttgctattaaagtgtccattccttctatccgagatgttagctgttgaacggtgaggattgaagtcagactggctgtgtagcttgagttgatgattagaaccacaaataaccatacgagtagcacaaaccttcccaacgtgctcaccgtattctcccctgaagatcaccaaaggaagaagaataaaacaccttgcgaaaaaggtaacaaaagaaaagaaccgagagtttcttctctttgatgttttcgtatgatcttanatgtaattgtgtgcatactgtgagagaagaacattgttgagaagctaaacctgcaatattgaagacgagaaaggaagggggtaaagcaaagctttagcacttgagcttaaactaatacatatgagttttgtgtcgattcaataattgtatggaactaaccagaagactgtaatgatttgacgcctaggaggtccgcggaattcttcgttaaatcgatgttcaagaatccagatgacggctccaacaaagagaaaaagggcaccggtcacagcccacatctctatagtgaatggcttcaagaaggaccaaggactagacttggcccccttcactggagctaccaccacaagccctgattctataaatggctgcgtgaaatctacaaacttggttctgtttgtaatgatggtaacatccccaacagctacatcgaaaatctagagacataaatagaacaaaacataagtatactgtttcgtgtaattgattgagtaaaatagaagaagaagtaggactcacatttgcagcaacttcacttatgagattgtcatatgaaggatttttcttcccgtccccatatagtatataagtacgtggaacgggatatggaagcaattgaatcgcagcttcaaagatgtcgatgcaaaagcctttaacaccaagcgggttcttgtccttagaagcatagtttttgtagcttacacggttaggcaccccgattttcagcggctttccattttcagggaaaacccaaccccgaggtggctttattacttcccctggccatatgatctcattaagacgttggttttttgcagatgtgtttgaaggcttagagtataatgtctctggaggcacgactgagaaacctgtatgattcgaccagtatccaactctcagtggacctgtactttttatgttcagaatgtcgtaggctggattaatccggtttttctctgaattaaactcgatttgtccagtcagacctgtataattcatctcaannnnnnnnnnnnnnnnnnnnnnnnnnnnnnnnnnnntgtgaagttttgatagcttaatgccgctatcgttggtattcctcagacttggatcattagagaaagtcactgtattgccttggctgaagaaaacatcgagagcgcgagctaccaaccaaacagaatcgtaagcatacagcgcgtaagaattgaagccatcatcactttttagactctccttgaatctaaggtttttccatcttcctttaaactgtctcttgttgtcactctcaggtgtgtaatgacgaaatgcaaccactccttgcaagagatccacagctctgggatccaacggttccatggaat

SEQ ID NO: 4582 - DNA, 811 bp, Arabidopsis thaliana landsberg
ttgcaagcttctctctgaatgtgaactctgatgaagatgcttttttcattacgactcagaaaaaagatttacaatttagctttgctttgtggttccttgaactttcctattacaaaatcttctgacaagtttatttaccctctaagtatgttaatagtcatttaaactcttatctgattaagtaatttcgccatgttgtgattgtgaagtcccagctgcactttgggtacttttgagtttcttgctactcttctgcttaagtatctccttgatctctgcttccctcttatccacaacttttatcaattccttgaaactcggtgctcgtgaacctctccctgatcgagatggctcagacacttcgcctgccctttcctcgtccgcactttctggtagcaacctctggtattgccagaaaaccctccagaagaagacagtgagtgccatgaagcaagtgatgccacagataaggaagagtccccagaaactctttagtgaaagctgagagtcctcactgtttgagatctgcatcgagcattcatgcttgtagttaagccatttcctatggattttctcgagctcgccttcttcagatagttgcaagatagccgttgacatgtctacagctaaaggggaatctctctggaatgcctgcaacatcggttttaagattctaagaaaagttgtagagaaggagcaaagataatatatttgaaggtaagtttctcaaaaccgattttacatacgaaaccccagcctgtgcgtgtgaactcttgccctactgtacggaatttgcagttgctatttgtca

SEQ ID NO: 4583 - DNA, 1182 bp, Arabidopsis thaliana landsberg
  unsure (1)..(1182): unsure at all n locations
ggtactgttcttcgtctttcagaggaacaatccttgaaggtagtatgttaagctcgttgattagatagttccgagcaaaggtaccgtcttgaactccaattggttcattgctcgttaccaagctatctattccttcaatccgagatgtcagctgtcgaatggttaggatcgaagtgagactggccgtgtagctcgagttgatgatcagaaccacgaataaccaaatgatcagcacaaacctccccagtgaactcaccgtgttctcccctgaaagattcaaaagttataaagtaaaaacactttacttccctccaacattctgtaagccctggtgtgaaaatctaccaggttactcgaattatagcgtacttactatgagagaagaacattgttgagaagctaaacctgtaacagtgaagaggagaaggaaaataaagtttaaaaggtaaactcgggctctagtgttaagaactgggaaactaaccagaagatggtaatgagttgacgcctaggagggccacggaattcttggttgaagcggtgttcgagaatccagaccatggctcccacaaagagaaagaagcctccagtgacagcccacatctctatagtgaatggtttcaggaatgaccaaggactagacttggcctccttaaccggagccaccaccacaagccctgattctataaacggttgtgtgaaatctacatatcttgttctgtttgtgacgattgtgatatctcctacagctacatcaaaattctgaagaggaaacatgagaaaagacaggttagcatcttctgaaagttgtgaacttgattgagtaatgtagctactcacatccgcaacaacttcattgacgaggttatcataagaaggatttctcttcccgtctccatatagtatataagtacgtggaacaggatatggaagcaattcaatagcggcttcaaagacatcaatgcagtagcctctaacgccaggcgggtttttatccttagaaacgtannnnnnnnnnnnnnnnnnnnnnngcaccccgattctgagcggttttccattattaggaaacacccaaccacgaggaggcttagttacttctcctggatatatgattcctttaagacgctggtttgctgtagatgtgtttggaggcctagagtacaaggtctctggatggaccac

SEQ ID NO: 4584 - DNA, 186 bp, Arabidopsis thaliana landsberg
  unsure (1)..(186): unsure at all n locations
atccacaggagctttcccttttgtcttccatatgatacaaaatgggaatttgncaaatgcttgaagtagattttaccaacgtaacagggcacaccctccactaacttgttacgcgcagctgaataacgggtaccagttggatttgaatctggattggtatctggatcaagtcctttcattcctttt

SEQ ID NO: 4585 - DNA, 4435 bp, Arabidopsis thaliana landsberg
tttggctaaagcttttgcgttggacgtgaacatagtgcgtcatgttcagagggtgttttcttcgaagtcacatagttcactagttctataggatatcaataaaccatatttctcatatttgaacaagaatctaaagtatgtaagtattgaaaatacatggatttacataattcactactactgattacatacgaaattgtttttgtctattacatgcgaaatagattttggtctaaacctggatagggaaaaggaaactaactggatttagatttacgagttatcccaataacaaaaaacgtaaataatatttccacacttcaataaaaaccaatgatcaatttttagttcacttttcttacgtttatatgaagttaatgtaacccatgagggttaggttacgtgtgacaaaagaaaattatgtatttcaagaagaaaccaaagacgacatcactcgtttgaaactctggggacgatgaccagagccattactgatcatctcagaagaaccatcaatggctagtcctttaccaccaaaacacaagtatctgttcattaatgatccctgtttcttcatggcaggtgttcttcgccctaattccgaagaaaacgtctgaaacggcgtcgaacaagccgacgacggagctcgagagtaatcggatacagccggaggagaaaacacgaacctcggagattcctgaaccaccactcctttcattaacccttgtgtgaatttaagtctcaccgataaactcggaagatcaccactctctgttctcatcggaaatgcttttcctctgctacaagacgacggagaatacatctctctgagaggaacacgacggttgttaacatctccggataaacggcgattttcttctgattcttccctcttcgcccaccgtaaaagaagcttaagacgcgctcctgtaccgccgccaccgcggcgtttgcgtttcgaatgcgtcgaaatttcagttgaacactcactaattccatcaaaactctctctgtctggacttaattcagcgtttgcagcggttttatctgttctcgccgccgtaaatagaaagatctcagaatcagatatctcaaacgacgttcctggactaccgcagaatccataacgctcttctctcaaccgcgaaactttctcaccgcagtttgatcttccaccggcggatacaagccgtttgatcaacaaatcagaaaccaccgttttaggcgtttgtcgtttaagcaaatcaacggctgtcattccataagaatcaacgacgttaagatcaacgccagggattctcatcagaatctcaacgacgtcaggtctaacggcgttaagattatccatcacagctaaatgaatcacagttcttccgttacaatttctaacgttgacaatctcagaaaagtcaacggaccagcttcttgagactaacatcttcaaaagctccatctgccgatctaaccgcttaaacccagacgcagcaaaaccagacacgaccgtgtgaagaaacgtgtcaccatctccattaacaatggaaatcaacggtggagattcgtttataagagcttccactacatctaaatgacccttgtaagctgctatatgcaacgctgtgtttccatggctgtctttaacctccatgattgaatcatacttcgatataagatacttcaccacctacattatattcataaatcaatatatgtatatgtaagtaagtatttgattatgtgtgctctgtgttctttacttggatttgagctctgctagaagcagagtgtaacagagtagaaccataagcatctctgagttttgcaacggcgtcgtatttgttagcgagtaagagttcatcgaggattgccacgtgtccgcctctcgccgcactgtggacccctcttttaaccatctcttctttgactattaactgtttctctgttaatttttcgccgtcgatttcttcgacgccggcgatatcagccggtaacaacgcgaaatcgaggagaagacggaaaacgtcgtcgcttcgtcctcgtgccgccgcgtagaggatatcagtgacgccgtactctccttctccgaacacgagaagcggatctctctctaaaagctttttaacgaattctaaatctccagctgaagcggctgtgtacagcagccagccaccgtagccagctctgatgagggaattgtctccgtttccgatttcgcactcttccaatagccttctcgcgacgcgggagcggtttagagccacatggaagttatttccgtctccgtcgtcccagacggtttcgaggcggcggatacggcggagggaggtgagttttacgagaaggtttgtatcttgatgaagcagctcgatgacgacgtcgtataaaccatttgcggcggcgcaatcgattggtgaagcgtaccaccactggtctccggtactttcccaccggagaggaaatatcggcggtggcatttccggtctagaaaattatccgggtcttcttcggttttagtgaaccaaaccaatgaatctcaaaggaaacagagctaacgagaaaacagaggaagtggattataaagatgaatttgagtggtttgaaatcaaagaagtttttttaacgacgaacacaaagtgatgaagcagaagtcatcaaaaaggagaaacctttgaagattgtgttgttgtggcgaagacggaacttgtgtgtgtgtttcaccagaaaaagaaaaaaatagtatttttgggagcatcgacaatatgcagattccatccccgtgagtggaccatatctgacgggatttatcctttttttctaatcaattaagcatgttattatgatcctgaaaaagttttgtattagtctgatttctgaaaggctgttgatttttcagcaagaaagaagaatgtgtaagtatattaaaatctagcaagaattttggttatggttcccttttgcagtaaaaaagtaaaaataatctgttattcagtaaagtttaaaatgtttaagaagtgtgtaagcaataattgaatgatgcttcatcaaattagacgcatccctggtttggttggaaacagacgtggatgtattattattgatactagtagttttgttatttcgtgcataataaatcgacatgtaaattgctctgcctctaaattaatacataaattcgaacaatgtagaccaaagaaaaagtgcccacttgttgcagctaacatttgagggcccttaataataatatctaatcaataattcgtagttaaagcttaaccatcttatgaagttgaagaagactactcaaatttattttctattaataatttcaaaaatatcccaaaaaatatattttgttttgtttggggtaatatggatctacctttctgtcggtgtgaactgtgaagtgtggacgcatccaaatgcacatgtatttgtccataaactcaatgctcattacaaaaaaaaatatgctcttggatcccacacttgtgtaaactctcccataaattagtcttgatgtgaataagcctgccataactctagatcttgagatgtctcgagacctttgcaaagatcgagtcaaaacagacaacaaacaaaacttgcctaacctcttatcatcaagaatgtgtcagatcaatcaactccagagttccaatcttaacaacttttcatgaatacgaagtccaagtttcttgtccatatccattgaccaacgaacttgaaatctacactacaatgtggttgaataaacaacacaatgaacatctatatgcatgatctggtcttgtcttctttcgcaagcatgaagagaccacttctcatcccaatctgcgaagtaacagtcaagtcgtcataataactaataaacctcactttacaggtgcagtaagtttcacagtcttcataatgtgttcgattctctcagctgattcatgcatattcttcttcttgacctcttccaagagcagcaaacaagtgcggtgcctcggcgtgatatcttggctaatcatctcttcgaatagacaatacgcccactcacacatattagctctgcataacctctgtatcagaaaagtataagtcgactcatcgaggctgagatgatgtttagtcaccatctctttcaatagtttcccaacctcaacaacatctcctctcttaaaacaagatctcagcaggggttgatacgtatgaacatcgggattacaaaggtttgaactttccatttccttgagaagctcaatcgccttatcttcctcatcgtgatgacaatacatagcaatcatagagttataggtagatgtattaatggaaacaccaagctctggcatctcgactctgaaaacccgctcagcttcttctaaccgaccagctcgagcaagcgtgtgaagcaaacagttgtagaaaagaagaatcggtttacagcccgatcttt

SEQ ID NO: 4586 - DNA, 2256 bp, Arabidopsis thaliana landsberg
taaaaaaaatattccactagggttattagtgcttcaaattttattaaaattttacatttattcggtaggtttttgtattttgattttaggaatagaaatattatatcgataaatacaatttttatgcaattaaattaatattgaattatttatattgctatttttgaatttcaatattaattgtaattggttaatatcaatgctaaatttaaaaaaaaaaaaaatttgatacatctcaaaatctaattgaccaataactcacgtaaaattaagacatgtaattttttattatttttttgttgttttttttttttttggtaaaggaaataaaagtaaaaaaaaaaaacagttttagatataacatgtacttaatctttcaaaaatgaaattaataagagaatttgtttttgacaaaaatgagcaaaacataagtaaaaaataaataataggcaaaaattaagattacagaaatgaacttaaaacaaaaacacctatcatcgatatgcctcttacgtgtgaattcatacataaatcatttgagatttatatgatactccatgaaagaagaactattgggagttatctcaataaaaactcaacgaaacaatttctccgattccatcaatcgaagtttcctctgcttcttgactcctcggacttttcgacaaagacatttgtgacgcaagcaactcaagtactcaaccaaggtatgatttaatcaacaattcaaaaaatcaaagaatcagacttgcattatgtttaggtcacaatttgattggtctttctctatttctcaaacttatcatcttgtatcaaagatcgaatgacaccaaaagttgttcaaaactaaaagaaattatatcaaacctagcagatcaaattttgatttcaaatataccttatagtcaagttacgatttctgaaatttgagattcttcgagttcatcatatcctaaaataagatcaaaatcttcgttagaatcaagataaacacaactgaattagaaatatatatcagaaattctaaagagaacacaggaaaagatgatcgcaatttgagatttctcgccaaacaaccgaaatatcatctaataaaccgtcattaaacatcaaagggctaatcccattagcctaatattaactttttgtatatgtttttgtagatgggcggactagatgttacagatcctatcccacgaggacaattctacctgatcttgttggcatccttgccctacttgtggttggttgcttcctcttcacgctcttctggtgcgtgaagaggaagctagcagcaaaaacaaatcatcaagatttcaccggagctcgagctggcctgaagattgcaatcttctgtctcacacttactcgtcaaatcgtttatagaagaaggacaagcaaacaagaactcactcaacaattccgcatctcctattcgagccacatgatgcaaaggagtaatcattcctcttcccttgatgctaactaagctgctgttgattgccactaaccctctcaccgttcgaatgtggttgtttcgtaaggctaaatgcagtgggctgaaacctaacacgtttagcttcaaagcaagagacggcttaagagtcattagttccatggcgaaatgagtttgccctttttcagctggaatgtgtagtggcgtctcacaaaaagatacttgatcaaagtggtctaaaatgtttggatcttccgctatcaactcgtagagtctttctatatctccaacttgagccaccttcttcaatcttgcaaagatattttcatcttgagtgctcgtacccgaactccgactcaaatttgcattttgagctaccgaatctgatactctactaatatccacaacaatcgacatagctacactaggcatccaagcttctgctgcctccactattaacaccggcgaagttccggtgaaacggaaaagaagagagaagatcggagattgaactgaatctttattaacagaattaagtgtttgttacaacgttcatcaacaaaataaactaaggtttagtttatatatacacaagataaatgatattaaaccagtatctagataaccggagttaaccagattaaaccaatcaccaatacacccccctcaaatcttatcttccttgctcttgaagagggagataaagatttgataatggcatgcgtttgagtaaactatggaaaggacctgggtgaagtggcttggttagaatgtctgcagctgggtttcctgtagaacat

SEQ ID NO: 4587 - DNA, 2246 bp, Arabidopsis thaliana landsberg
ttagattgatccccatggatttaagaacctgcggcaatcgccagtcccttctccaattagacccaacagtatttgctcagtcccaacaaagttatggccaagtcttcgagcttcctcttgagacagcattatgaccttaattgctttctcggtaaaacgctcaaccattgctttgggtacacatcggctagctttttctctccgagatgattttgcaagtttatacttaacaaggaaacctggactaggccttcccaaataatctaatgcactgggggcccttaaccctgagaagctctgaattgtcagaagaggtgcttgtaaactggacatcatcttcacacgccctcttggttctctgtattctgtggcctgaattctcagaacaggtgcttttaaactgctcatcttcatcacacaccctcttggttccctgtattctttggcctgcacatgccttccgggaccaaaaaaaggaggtgtaagaagagctatcgaccaagccatgatgcaatgttggaggctgcattgggtaatggtagaacatcagtatagctaattctcttaaacacgtatacagaaagagctcaggcacaaaaatacacaatttcaattcaccaactaagagcagaacaatgtcacaaaagcttgagctatgtttcttatctccaaactctccaaagcaaaacaagcaatcatctttgaacaaatcgaaacgcgaatacacaaccctaatctcaaagtaagcatttttgcatatcaataaaaccaaataaagagtacccagattcagaaaactcaaaatgaaaccaccaaaagaaacgaaaccaaacgccatgagaaatagaagaaaagacaaactcaacctttaaaacagctcacacaacagagaagcagaaacctaaaagcttcttcaatgaaacacaacaacaacaaatgaaaaataaaaacagactgagaaagagagtgagtgtagcaaagaaaagggttttatgtgtagcaaagaaaagggttttgtaccgtcgacgcctttggatagcgaagttggagaaagcgagagactccttttattgggaaagagataggaaagtgaagaagaagatacccaagagacaagagatttcactattctctctctctttatcttctctcgcatcgccgcccttcatagattaaacacactcacctaccaaagttgcataccagccgttagattactcataagtgtattccaccgtcggatttaactactttttaaagagtcaacctcaataagaatcttgttcccaaagataagggtttgtgttgagtttaagaccggtttaatctgaaaactccgtcaaaccaaaaccaaaccgatttatcataaaaaaattcatatcatctacttccattggctagagacagattgtaacggtgtcgtcgtcgccaaacgatttgcctcttcctaaaggtaggttcttcatttctctcagtgcccctttgcgtgtttcagcttcttctttatgatctaattcatgtctatgtttcgtttgattctttgttcgattctgaattgagaaaatggcgattcgagatctgtctcttcggttttttagttcgactgatttgggaatgtgaagagatcagattgatttgttgacagagtcttgggggttttcaatcttattcctctagattttcgaaattcgattcctttacatcagatttcgcttaattctctgtcctagtgagttttacgatctttagtcttctggtttgtcaaattctatgtcttttcatgttcttctgagttttaatggttgatcttcaattacttggccacaatctctagagtttgagactcttgacttgtcttgcatatattcctctgtagattggttttatgtttggtttcaattccttgttgaactattctgatacggaagttttcctttctaaggtttggtgtttcctttttctgataaatagtgatgaagattgatgatcatgtaagaatataatctagctttggtgtttgtattggtttacctgagggaagaaaagtctttctctttgggactttaaactttgattacttaactccaacattatcatagttgggttctgtagttcatttcacttatagcagtaataactcattgattgatgcaatcaatcaatcctgtgaccgaaacggaatcatggaaattgagggattcaggaaggaaagattgattagaatttcatattactgagagaataag

SEQ ID NO: 4588 - DNA, 4967 bp, Arabidopsis thaliana landsberg
  unsure (1)..(4967): unsure at all n locations
tacgataataccagattccaactcctttttggtttttttattaataaggacttctctgtggtaattatgggtggaatggtggagaaaattaaaaggaagggcaatattgggtttaactgacaatttgatattaaaaaaagcctgaaacatggcgcaacacgcagcttcagagagtcagtggtggtggagagatccggcgttgtcggatccgaagaaaaaaatgaaggttttaagctgcgtggtcgattatgtcattgccgtctccaccgctgctctctcttcttcctccattcttcctccagtctccccaaaggtttttctttcttttttaagatctgcgatttcgacgatttcaattgttctgtggtttgaaactgagatgtggatatgaattgatcaggtttgggaatcgaggaaaacgaatgggtcggacaatttcgagccgaggtttgatgggttaaggttcatagagacgctggtcacagcacacagatgataagattacaaataccattcttcttcttcttctcttgggtgatgcaaaagctttgttttttccattcaaagcgtgagtgcgtcacttaggtctttaatcttatcattctcatcttctcttttgttgtcttctattatctctgtaatgagaatttattaacattcttttgctttcaagggatatgctagaatgaactcattcttgttgtgagctaaactttattcatatgttggtgtgcttttctgttatatagacaaagcaatgtgtggcgatggctctaattggtgttttgaatcattgggttgtatctggttaaactttaaagagccgttcaaggtcatcaacctagttggatttagtcaaattctggtgtattggaaaaaagactagttgaagcaaacaggctgttgaaatgcatgagtggtagatgttctagttggtgttctgtctccatgtacctgtctcagatatctagcaagtgttgtaatgagagcaccgagagagaagaggacaaggatgatctgtcatgacacaagtcagaatccgagaggaagcaaaacaagaaagatgctctctcctctactgcttgctccagagacactgacttccagctcatccaaaccaacattactctgtctctttcttcttttcaattatttctttattactattacactttgaaatttagtgaatcctaacgctctggtcccatcactgcctcctatatcatcttgctcacaaccactcactacgctctctctctctctctctcacttcatctatggcttcttcttctctgcagtctctcttctctctgttttgccttgctctgttctctcttcctctcatcgtctcctccatcggcatcaactatggccaggtcgctaacaaccttcctccccctaaaaacgtcatccctctcctcaagtctgtgggagctacaaaagtcaagctctatgacgccgatccacaagccctacgtgccttctccggctccggcttcgagctcaccgtggccctcggtaacgagtacctggctcagatgagcgaccctattaaagcccaaggctgggtgaaggagaacgtccaagcttacctcccaaacaccaagatcgtggccatcgtagtgggaaacgaagtcctcacctcaaaccagtcagccctcacggcagccctcttcccggctatgcaaagcatccacggtgctctggtggattgtggcctaaacaagcagatctttgtgacgacggctcactcactagccatcttggatgtatcctaccctccctcggccacttccttccgccgcgacctcctcggctccctcactcccatcttggacttccacgtcaagactggctcaccaatcctcatcaacgcctaccctttcttcgcctacgaagaaaaccccaaacacgtttctctcgacttcgtactcttccaaccaaatcaaggcttcaccgatcctggctctaatttccactacgacaacatgctcttcgctcaggtcgacgcagtctatcacgctcttgacgctgtcggcatcagctacaagaaagttcccattgtcgtctccgagaccggatggccttccaacggtgacccgcaagaagtcggagccacctgcgacaatgctcgcaagtacaatgggaatctgatcaagatgatgatgagcaagaagatgaggacgcctattcgacctgagtgcgatctcaccatcttcgtctttgctctctttaacgagaacatgaagcctggaccaacctccgagaggaactacggtctcttcaaccctgacggaactccggtttactcacttgggatcaagacctcttccactcatagtagtggtagtggtagcagcaactccactggtggtagtagcagtggcggtggcggtaacactggtggctcttccagcggtggtggcatctatcagccagtcacgggtaacccatcaccggattacatgtccatttcctccgccggggtaaagttttcgactttacacttcatttgttgttttactttgacaattttcttagacatttaggactagaaggtcgttactgttaagttgcatatttagacatattttgtcactctatttatctgttttgtttcatttaaacaataaatttagtggtaaaagaaaaaaaaatcacaaagctcgaataaggaaggattaacattgtggtaaagttagtgacttttggttaaaaagttggaatctttattataaactcgacaaactgtgacaatgtgttttggattggttatcacgtggagatgactcttgttttgttacttttgtctgaaaatataattgatttagagtgcctcactttttgacttgttgacctcttgaataaacgaattaaaggagtgtgacataggcaatgcttgttgacgtttttgcagggaaaaggcagattcgttgagtgtgtgttgttcttcttcttgctttgcatcatcaagcttcggttgtaaaagcttctccactagatctcgtcggctttgtacttttactcggttgatgacgtgatatagcccccaaatttaatttaattagttttgtgttggtgttttggtcggaggatgatttaggagacataccatctttgttgtgccgacctcctctccaactcttttcttttttccattccatcctcctttttcttgtttaagcatagattatttaaataatgaatcttagttgattagatttttctaaagaagatgatgattttcgataattgtataacttgaagacatttgaggccagagtagtggcagacagaatcttggcacaagcaacaagtgctaatttttcaaggtccaaaatatgtattcccttcaataaatcacctccgcattcgtacacctaatttccgccaaactttttgtatttatgtgaccaatcaatctctatggtccaccaaacattcaatgttaatctcttccacctccacacactataccaattctttcgtctgtcacttcagacaaagatataaatacagatccaacaaggcaaatagtagtgaacaaagtttgcttccttaagcaacttttctaatcagccattttgtctatcaaatgaaaagcagagactcagattaagtataacgagcagcaccaagcgttttatgttaccagtaatacacatactatgcattgggggacaagacattcatagagtctatataagtatcctaacaattcaagtaaaaacaaaacaggtattgcattctaagaaagataacaagaggaaaaaaccaaagaagagaaggcggtttagcaggcagctgatgatccggtttactctcaatcatcctgtcaaacaaagtatgtttctttttactgactcacacgtgacacgattattccagtgatgacttacaattcaaactcgtcttcaagcttcagagcctcagcagcagcctcttcttcctcatcgtcaacaacaaagtatgggttnnnnnnnnnnnnnnnnnnnttgtagccagtaaacagatagaaggcaagtgtggctaactcgctggcaacaacactagtccacatatacttgtaagaggtaatggtctccagtgcatacacaacaacacgagtgaagtagatgtagcagataaccacaatgtagtactgcctaaacagagttaacttaacgaggttcacagcagccttcccgtcagtcttagccgcctcacgcaagtttttgatggaccagacaatgggaaacagaacagcacagcaacagacgacatcaacaagcagaaatatctgcttccatgtgacccaatcttggccatacggtccagtctcatcgataaccacctgagcaaagttagcgacaacctggagaggaatgacgatcatcaagaccttcttttccttgtcctgcaagtagggcttcaagaaagaccaaccggtgccgatcaagacgatcaaagtgaaaagagtgatacccttaaggaaattgaaaatgtagaacaagacatcccaaccatgagcagttccagttttcttaatgtacgacttatcctcagcctcacaaagaaggttcaaagctttcaagacaacaactcccaacatgaagaaatggattgcgaaaacagtgagacgtttcttatagagaacgtagatccacgtggcggcgagagagaaatagataacagagaataagaaatagaccttaggaagaacagttcttccagcagagagataatcacgacttccctttttaccttcaaggttatacatnnnnnnnnnnnnnnnnnnnnnnnnnnnnncctgttggagacaattagcgaagacgagagagtactgatccgcatcgttctcggtgaatacggtggagaatctgctcttatctcctcccttgagattgttgaaggtgaacacatgcttaacgagatctgattgtagagcgcacgtgatctcttcttcttcaagccgttggatcacatga

SEQ ID NO: 4589 - DNA, 3374 bp, Arabidopsis thaliana landsberg
gaaaaaagtgacaaagaataagtattgcttatacgtgcagctttttctctacttatgcattgtttattgctgtaggccccctgaattgttacttggtgcaactaaatatggaccagcgattgacatgtggtcagttggatgcatatttgctgaacttttgaatggaaaaccaatcttgcctgggaaaactgaggtcaggatttcatcttatgattatcgtggtgtgtgttattacagtgttctttgatgatgtttccacttagcgttttagtcatatttttttctttccagaatgaacaattgaataagatttatgagctttgtggatcacctgatgaaagcaactggcctggagtttccaagatgccttggtataaccaaatgaaatcatctcggcccttaaagagacgcgtaagggagatctacagacagtaagtataaaccattatgtagttgcgactcttttatgcaacagttactttgatccaggagatctcatttggtccttttctcttctgctatagctttgatcgccatgcccttgaactacttgagaaaatgttggtacttgacccatctcaggtaccaaagaatttttaatacagagaattaagagccttggtctagacatttaagtcctttcattttcctgtctgttggtacagagaatatgcgcaaaggatgctcttgatgctgagtacttttggactgatccgctgccatgtgatccaaagaggtaatcaaattctcttaactttcttgttatgaaaacccatttggttcatcatacatcaacaaatgacgatcaagaacaattagtgagtgattcagcttgtactgaaactgtgttatgtcaacagtctaccgacatatgaatcatcacatgagttccagacaaagaaaaaacggcaacagatgcgtcataatgaggaagcagccaaaaaacagaaactgcagcatccacagcagcaacattctcgtttacctccacagcaacacggtgttggccagtctcatgccgctccactttggcctgctggaccaaaccaccctatgaacaacaacgcaccaccaccccaaatacctgctggtggccattactatggaggaaagccccgtggtggtgcacctgttccaaaccggtaccctcctagcggaaaccagactggtggttataataatcagagccgtggaggttacagcagcggagcatatcctccacaaggtcgtggtgcaccatatggcgccggtcctagaggacctagcggtggctatggtgttggaccacccaactactcacaaggtggtggtcagtatggtggatctggtggctctggaagaggtcagaaccctatgggtggtgctagaaaccaacaatatggatggcaaccgtaaagagaactcaaagagactcgtatggtgtggtcttggcttgatgtctttaaggcagttgtgattttagatatgaagacttatcttcgcgaaagagaatctattttcatttgatttcttgtcttaatggcattcttccaaacattctgtgattgttgtatgtttaaatcaaggtttatatatcagaacacaggaaaccaaattggatttttacccaaatcttattatttcttgcaaaaaaacgtttcacaacctcttatctgttttcgatgaagtgtggaaaaactacacgaatcagtgtaaaccccaaaaagaaaacgaaaaaactctcctctgaagcagctccagcagtaattgtgtcatttctcattgcttattgtcttatgcggatgattctactttcagaacaactttcatgaactcgtaaacaaagtaactgattgccgcggaaggcaaaacctgcaatagtgagataattcacaaagctgtaaaacctgcaataagctggttcaagagattaatttatgactagtattaaggaatcaaacctgcaataagctgggaatcaagccagcatatagagcaggaacacctccttgttcaatgatcttcacacaagtagccactgcgcttaaccttttagcatgtgactgcatttgtaaacgccttctcacaacttcaaacggatatgttgctgcttctgagcaagcccctgcgattgctccatataacaaagttctcatgggaccaagctcgagttgatcgaaagcattaagttcttcaccttcttgcttcatgtgttcaagccgtttcttaccttccggtgtatgaaggtaagctgattttaaaatatcatagacaccgtagaacacagctcccgatggagccatactaacaagtgaaggtacaagacctttgtatagggaaaagaaaccttcagtttgaatcatgtgacggaatgcaccaactacaccacctaatgcttctccaccgggtgccaccataaccgttcttatctgcaattcaaaaccaaagtaatgctaaagaacctccagagaatggtaaaagaagctcaatgaagtttttgttgtgattccacttacagtatcaagtggtagacaaagcaaactagctgttactccggcagctgcaccagcaacaaacctctcgaaatttgtcgtttcttcattcccggacaatttcagaagctgacctctatatgtatcatatgcatagaagttgatggacttaaagggagcagttctgagaatattaaccaaattccctttccaaaatcctctaatcccttcatttgttgcaatcctctgaatgagttcaagaagattcccttgctctccgcgaacaatgtattctagcttcatccgttcaagaggtgcaatgcaagttctgctcaaaccaaaacccaatgagccaccaaactacaacaaaccaaatcaatacaaaatctcaaataagcatatcagtaagtaaccccaacacttaaagtctacaactttatactgacactcaatctcatttgacctcaagagtttcgtagaataagtaaagaagaaggagagaccttgaaaccatggctgcaaaagctccagcccataaatgcttggttgtgttgagagctcctgctccattttccttaaccctacgcttctccttagattcttgaccaccaccgatcaacaccgaacctttctccgatttaaagccgttttgaccattatacccttcaccttcttcttcctcaccattactctcgtaatcgataaactaacagacagaaacagatgttcccgtgggccggttcgtctgctaaacttcataaagctcgacttttgactgaacgcgacacgaattgacggatcaatccttctacgaaagaaaagtgacggacgaggaaggaagagatttttcgagaaacaacccaccgcacatgatctgaccattgtgagcgaatgactctgatc

SEQ ID NO: 4590 - DNA, 2945 bp, Arabidopsis thaliana landsberg
aatgcaagagtaagatggtagatcaacaaatcattagagttttttactgttgccatccgtattgctggtgggtctgattgtgccctcttcccgagctaccagagccaccatactgaccaccttgtgtgtagttaggaggtccaaccccgtacgggccaccactaggccctctaggaccagccacataaggagctccacgtccttgtggaggatatgatccactgctgtaacctcctcggctttgattataacccccgctctggtttccgctaggagggtagcggtttggaccaggtggaccacgcggcttcccatagaagttgtggctgggtcccgcaggtacttgtggtggtgcgttgttagtgggatggtttggacctgcaggccaatgtggagcagcatgagactgtccaccatgttgtaatgggggtaagcgagagtgctgcagcggtggatgctgcagtttctgtctttttgctgcttcctcgttttggcgctgctgttgccgctttttctttgtctggaactcatgtgatgattcatatgtgggcagactgttgaaatgaaaccttgatttagtcagaaaaaattccccacgatcgcctgtctaataagctagatgatgatgcaccagatgagtttcatgaactttgtcagagaaaatcagaatatacaaatacctctttgggtcacatggcaacggatcagtccaaaagtactcggcatcaagagcatcctttgccgatattctctacacaggggaaagaaaaaaaggagacattaaatatctaaatggtgttaacaatgtcctgacttgaagaggtatgtttcatccaagaaacagtaaaagacagtttttaagaaagataattcgctgggaataagaataaaggtctctgatacctgtgctggatcaagcaccaacattttctccagtaattcaagagcatgccgatcaaagctgtacagaagagaaagtaaagccaaatgaaatcttctgatcaaagtaaagcggagatatataatggtttactttacttactgtctgaagaactctcttacacgcctcttcaagggccgtgcaggcttgaaattgttgaaccaaggcatcttggaaaccccaggccaaagtttttcatcaggtgatccacaaagctcaaatatcttgttcaattgttcttgctgaaacaatgtaggagatggcacatatttttttgagattatcaataacatgtatacataactgcgtctataccattttgtatacatgatataatgcaaagaacctaaccagcctcccacggtcccaaaataaaagtgccgataaatctaattctagttaatcccttaggttttcttctccaatgatatcacaatgcaaccaggagaccatgtagattcttatattattagtggcatgaaagcacactgtcttaacatctgaaattttcaaaagaactgcgctttcagcaaagatgaaacgctgacctcatttttcccaggtaagattggttttgcatgcaaaagttcggcaaatatgcaaccaaccgaccacatgtcaattgctgggccatattttgtagccccaagtagtaattcagggggcctgccgcaatatatgtaagtcagcaaagtagtaataacaatgaattagcaaagaccataatattaagactatctatgtatatcatgtaaactttgaatgacgatttttaggcttacctataccacaatgtgatgacacgatttgtaagatttccagtatgatcatgagaatacgaccgtgcaagcccaaaatcagccagctttaaatttccctcattgtcgataaggagatttgagcctggatcaaaatctaggttaatatgcaagtaaaggtgataaccaaacatcaacattgtattaaggaaaattaccttttatatcacggtgaagcacttgattcacatgacaatagtgaagcccggtaagcaattgcttcatgtaacacttttaaatggattgagtgttagaataaagttgaacaataagtatgaaaaaggctaatagaagtaacgagctatttagccgtgcaataccttaatttgaggaacagtaaatctcagtccaggacgatctgctagtccagtcaaatcatgatccatgtactcaaaaaccatgtagatgccacccttgtatttgttattatctataggtgaaaaagccacaacctttagttaagaagaaatcctcaataagcagaaaataagacagtagttgaaatcactttttttcacaaacctggctttccttggtcatccctgtcccgaccttttaagagacagaaccattcaaaacacaaaatgtttagacctctttatatagaaatagctaacttaattcagtgcaacatatgtgttccttaaacaaacctggtgaagtcacaatctctttcagctgaatgacattttcatgatgaagcttcttcagaatctttatctctctaatagctgttataggaaactgcatcataccagttgtaaacaatgggttacaattcctatcgtaaacaaaaacttgcatctgttctaaacatagtgagcatcataaaaaaaacgtatagtccatataaagtgaagaattcacataccccttctctttcattgtccatacgtatctttttgagagccacaatttcaccagttttgatttctttagccatgtaaacttgactgcaacagcaaaacaacaacaatcaaatctcctacaagcatcacaacataggcattgtaatagcctaatcatacaatcaaaaatcgcttcaaaggccaataatttatcaatcccaagtaaaaattaagccttttgaataaccaaagagtgaaattgaattaaagagaaagttgaataacccgtagtgccttcaccaatttgttcgagcttctcaaagcaatcaacgctgcgag

SEQ ID NO: 4591 - DNA, 2379 bp, Arabidopsis thaliana landsberg
ttacaccttcactgtccatttctcaattctatttcttacttttgatcaatgttatatttctagaagcaaataaaagcatggatactactaattctagccgctggtcagagcttcctatagacatcttgagatctctcctcgaacgtttgagatttgtcgattttcaccgcgctaagatcgtgtgttcgtattggtattcgtgttcaaaacaatcgttgctacgaaaaacctgatctccatggctaattctctttccagaaaaaggtggttgtgctatatacaacccggacgaagctaaagattacaaaacaaaaagagactcctcagggattcgattcttggcaaactcagttaactggttcttggtgctagattctcgttccaatctctatatcatagatgtgtttagcgagaaaaagatcgatcttccacccctagaatcaatcaagaatggcctttatagtcttgagcaagtaggaggtaaagcatttaaggcgagattcaataatggtagttcatatatattccatacataatgcggaagatctatgaggtcttttatgggtagacgagaagaagaaagaatacattgtagtgtggtttttcgacaaaggtaccgaatataaagccttttgcaagaacggggaagatcattaccgcgacattccgatacgaaaaaatgtttgtaaagagttacaaggcttatatgatatgttactccatggtggtgacaatctttatatctcaaagactcgtcaatctattcggaagcttagattttttgaacaagaaggtttcattgatgtcgacaatagtgagatattaccatttcgtaaaatctccttttacattgatggagcaagatttagtaataacattgccgttacaacatcaagagaggttttgttggttcagaacttcttttacgagacaacaagatataggagcttccgtttgtacaagaaagatcctaatccggacttgaatgctactatcaacaacccctacccgatggttgagttatgttctctaggtgatgtctctgcttctggatttgggtatcaccgtacatgcggacggtacacttggtatcgaaccaaactccatctacttcactcgtcatgaccgtgtctgtagtgaccggaaacgttcttgtctggacatgtgtatgttcaatcttgtgacaaagaaacttaaacgattcccggatctttccaacttaaagctcacggatgctcgatggtttctcccgtcttgatttgtttctttctgtattttggggttcttgagaatctccatatgtttctcctactgattatacattctctttttatttctatatctagtcggctccaaagtttacaactaccctatagcaccaaactagaagacaagtcaaattgggttaacgtgttagcaagtttacaactaccctatagcaccaaaaacattactcgaacatacgtaaagcattatactaaccatctctttcaaaactttattgtttcttcttccggtatcaccattttgttatgggggggtatatattggtggaaattagaacctggaccttaagtatggtctaaaacctttggatcaaatcggtccactttatcggggaccaaaatattgggcccgtggacccactttaatcctaccggtttaaaaaagccgtaatgggcctgccccgttggttttaagtggaggccgttttaaggtccacttaattcctccaacaggcaggggcaccattgggaaattttcgattattgtttccgaggttagttcttctcccagcacgtgtttcgattgaaggaattggggttctaggttttctacgtctcactaaaaaattcgtgttttttgatattttagggtttgtttcgatcggaattatatacgagtcccttgctagaacatgttagtagcttacacataggcacatagcgatttgtgtcacattatttgataaaactcaactatataggcacattgcgtttctttaatctattagaagaaatcatacatgtagttgtgattgatggagacagcttctagttttcatcttctgctgaaatgattacataagcttaaccatattcaacagtgttagtataacttacattctcttgcttgttttgatcaatgtatcgatctagttttgtgatttcttctacccattaactatataatttgctttgtttacgtcattgattctaaatttttggaacttcgatttgcagatcttgattctgaatctcaacaacaaacaaaactgaagttctcaatgctcaagagtgaatttgttgatatgaataaggaagattcttaaattgcgatcaatgagaaagagactaaaatcaaccaagaccatgatca

SEQ ID NO: 4592 - DNA, 678 bp, Arabidopsis thaliana landsberg
  unsure (1)..(678): unsure at all n locations
gggttgtacagcacacaaccaccgtctttcggtaaaagcatcagtcatggagatccggtgaacgtttccttaaacgtcgaacttactccgttaaaaccttgaagatccgacgagctccgggatcgttggagtgaagaagaagatacattcattatcaagagctaaggttcttgcgtttgagggtactgcttagggttttttcggagatcaaagatgtcttcctatcgaagattttatattgaacatgaaaattaaaactactttacaatgattgcaagctactttacaaaaaaaaaactgctaatttaccatgatctgtcttttaggtgattagtcaactattaaggggtgtgttgaaactaaacatttggagggattttattaagatttaaggatattctaggtgatttatatatgattacaaaataaattctaaatgatttgataagatttatacataaaactttagatgattatggaaagttgggaaaaatgggttaaaagatccaaactttttctaaaaacatgaaaaagacactcaatttgtgggtttttaaaccctcacattttgtaaaatggtaaaataacacttaaggctattaaaatccatttaaaataagataaaaaattatncaaaaatataaataaagaaaagtaatttggattaagattggtttt

SEQ ID NO: 4593 - DNA, 501 bp, Arabidopsis thaliana landsberg
tggggttcctattgctggatgatgctgtctttcaatcacaaataacacctaaaatcacaaataacccggtgctttgattttctagacaagctcttaaccttcgaaatccaaagctggtgccttttctcgagggcgaaattatgagctgtttttgctttccaaaactcactggattttcgaagctggctatatatagttggaggtagaagttgaaccaatatgccaagtcacctaatcaggattatatcaacaagtcaagtatttaaactgttcatagttgtgtttcttttgtctgttaatgctctgtttcgaaacagatcatttcctggtcccaaaacacaaaatacacaatgttaacatacaaaagcatcataaactagaaaaacttgaaatagataataacataaagaatatatcaaaataccaagagttatccttcacaaaaacctacttctaacccgagtgactcaaaagaataccgactgatttcttactcaatta

SEQ ID NO: 4594 - DNA, 4694 bp, Arabidopsis thaliana landsberg
  unsure (1)..(4694): unsure at all n locations
caccggagatcgaagtcttcgatgtcaagtacacgaccaaagctcgtgaggcgcgtgagcttgtgtcggcggttaaagaagcggcgaggaacgagtgtcgtccagtgcagaatcttctcttttcagattgtaaattaggactcaatgatttgccgaatcatgtatacgatgttgattgggatgtgatcttagttgatggaccacgtggcgacggtgaagatgtaccggggaggatgtcgtcgattttcacggcggcggttcttgctcggagtaaaaaaggcgggaatccgaagacgcatgtgtttgttcatgattattacagagatgttgagagactttgtggggatgagtttctttgccgggagaatcttgtggaatctaatgatctgcttgcgcactacgtgttggagaagatggataaaaacagcacgcagttctgtcgtggtcgtaagaagaaacgctctgtttcttctccatcggcttgagttaaatgtgcgctaaaatcttgtggactgtggagagtcaaaccaaccgacacgacggtggtcattgacaccgtcaatcgcggaaggagtttgtgtaaaataatacgtttttctacctttaaatattttttcctgctttttaaactatgtgaaaattcaatcagatcaattaaaatttcaaaatatctcttcgaggtacaacaattcgtttaaaataccactatagtatttggatactgatgatttggtgttacaacataaatgataaaacccaatgaatcaagaacgtatagtttcaactctctaaaccctttgtggagagtcttgtggagtcagagtatctatcttctttttcttgtagagtggaactcttcctccaagctctcttagctgatccacaagtccgtatagaaactcaaacgtcaatatgttttgagcattaagttgctctctaacttgtggatgaattctaaaccattctcccaacatcttatgaacgtgagatcgaatcatcctccatggaaccggatgcttctcacacagctttaaatactcaacaactaaatctccctggtctaaccctccatcgacgaatccctcttcttnnnnnnnnnnnnnnnnnnnnnnnnnnnnnnnnccagcaaaggccgccgggttttcaagaagcgtctccgcagagagaacaccttcaacacccgtctctttgatgcagttatcgacatcttcgatgcatcttacattcccattcgctaagacagggattctcatagcgtttttcacttccttgattgcgctccaatcagctctaaatttcttcccgtctttctcatctcttgttcgcccgtgaacagctaggagcgagcaaccagcatcttctagcatcttggcgtacttgagtgtatcttccaggttcgggaagatccggattttacaggagacaggaacattgaggttctgagctaacttttcaacaagtgatttcaccaaaggaagattatccatcaagaatgcaccataatttcctcgcctcgctatacgctgaggacacctgaaaccaaaatcccccaaacattcttactcaatcaccaaattacaagcggtcactgtgctcattcggtacccaaatcactaaatccaaactatgatttcatatgaatattatagcccatgtgtcaaactactaaagctcattgaactctatcgttcccagaaacttggaactcaaatcattgcattctatcttagttatcagagttcacgaacttaaaacagtgaannnnnnnnnnnnnnnnnnnnnnnnnnnnnnnnnnacatacaagatgtgaaaagagggaaatgtacttaccctaaattgatatcaacatagtcgcagtaaggttcgactctctttgcagcttccaataacgtatcaggatcattagcacagaactgcacaaacaatggcctgtcctcctacaattttaaaatctaatcaaaaccttaaattcaaaactgataaatctctgagaaacgccaaaatcaaatgaaatcttaccttacaggtggtgaactcctgatttctatacttctcagtctcggtgaagatcctagaatgcaacatcggagtataagcagcctgagctccgtatttctggcagagcaatctaaacggaagctcagagttatccaccattggagcaacgatatacttgggtctacccagttttttccagtgtgcccaagctctctctactctagtatcaatgcttaagacccgacttggagagcccaagctcgccggcgctgtgtcgactgtttcctcaatctgcccatcacgctgctccgaacagaggatatcgtctagaacctgcgatggatcaggttttggatccggattttgagtcattgctcgcgtctgggagattaacgattttcgggtacgtagaaatctgagattcgagagatttagtttcatgagctgacgacggaagacgaaatcatcgccgccgccataaattaggggtcgaagtgagtcgcttcaaagttatgtaattttccttgacagtttttgggctttagtgggcttaatgtatttaagttaaaggatgggctttatatgcatttgtataaagttgtgtgcttgcttattaaagcctttgcttagaaataaagagaagatggtaacccaaatcgtacgactattattcttgcgttgactgctgacgtaaataagcaccaatcattagttaatgtcacgtcttactctattatacacgtgctttacccaaatctcctccttaatcatcactccagtccaaattcacgacataataaacgcctcaacctctcacttatatctcgccacgtgtaactcctaacgctatttcttttcgatttccaatatgtccgttgtaccagcagaagggtggtaaccatattaaattatttattaaaccgtaattgttaagtaattaatttatcttaacagacatttttttccctcttttatggtttcgttcgctcactgttgagaagaaggaagaagaagaagacgatgaagctctctgtgtttcgattgagctattggaaccgtcgaggaagtagtttcagatcatcgccgtcgttggatccatcattcgatggcaaatctccgtcgtctgtgttttggttcgtgattcatggtctctgctgcttgatcagcttgattctagggttccgattcagccatttagtactcttcttccttttctcgacttccgtcaccaatctatacacaacgccatttctctttgccggaaacggcggtgtaagccagcttctccggctaaaacctctggaaacagcgactaacagcacggtgaagaagaactctcgagtggtggttggaagacacgggatccggatccgtccatggcctcacccgaatccgattgaggtattgagagctcatcagttgcttgtgagagtacagaaagagcagaaatcgatgtacggtgtgaggagccctaggactgtgattgtggtgacgccgacttatgtacggacttttcaggcgcttcatttgaccggagttatgcactcgcttatgcttgttccgtacgatttggtttggatcgttgtggaagctggtggaatcactaacgagactgcttcgtttatcgcaaaatcaggattaaagacgattcacttaggattcgatcagaaaatgcctaatacatgggaagatcgtcacaaattggagaccaaaatgagacttcacgccttgaggttaaatctttgattcacattttgttttgctgttttgattgattgattcttatttgacttgaaatttattgttcttgtgttgatgtttgctcatcagagttgtgagagagaagaagttagatgggattgttatgtttgctgatgatagcaatatgcatagtatggagctttttgatgagattcaaactgtgaaatggtttggtgctctatctgttggtatacttgctcattctggtaatgcagatgaattatcatcggtcttgaagaatgaacaagggaagaacaaagagaaaccttcaatgccaatccaaggtcctagttgtaattcctctgagaaattagtgggttggcacattttcaacacacagccttatgccaagaagactgcagtgtatatcgatgagaaagcgcctgtgatgcctagtaagatggaatggtcagggtttgtgttgaattctagattgctctggaaggaatctttagatgataaaccagcatgggttaaagatctcagcttgttggatgatggttatgcggaaattgagagtcctttgtctttggtgaaggatccttccatggtggagccacttggaagctgtggccgtcgtgtcttgctttggtggcttcgagttgaagctcgagctgatagcaaattcccacctgggttagttttctttaatcattctctctgatggaaagcaaatttctcatcacattatcacttgctgagttgcagtcttctaacttgtattgtatgaacgcagctggatcataaagtcacctttagaaatcacagtgccatcaaagcggacaccctggccagactcttcctcagagctcccagcggcggcgatcaaagaggcaaaaagcaactctaagccaagagtgtagaagagcaagagctataaggagaaacaagaacctaaagctttcgatggtgtcaaagtgtcagcaactagctaa

SEQ ID NO: 4595 - DNA, 197 bp, Arabidopsis thaliana landsberg
gaaccccacaagcacggaggtaaacctactaaccaatatataaatcctggcaatgcaaattgggctctcatgttgatcccaatgaatcatattttacgcggagcgaaaagtttacctgctaagcaacacagatatgaacacacgaaacaaaatatgtaacagtagaacaaagatcgctattactatgaaatcataaa

SEQ ID NO: 4596 - DNA, 744 bp, Arabidopsis thaliana landsberg
tcggtacccagagattaaattaaagtcttcaataaatccaagatcgaaaatttacaccagcacaaaaagcaaaacttcaaggaaaaaactttatttcttacaataagcaaatgtacgtatgaagtcttctggcatcacttttaagacaaagacgaaaccgaacgtttcttacgaccattgcaaaactttgtgctgtttttatccatcttatccaacacgtagtgtgcaagcaaatcattagactcaacaagattctctcggcacaagaactcatcaccacaaagcctctcaacgtctctataatagtcatgcacaaacacatgcgtcttcggagtcccgccctttttgctccgagcaagaaccgccgccgtgaaaatcgacgacatcctccccggtccttcgtgagcatcgccacgtggcccgtccacaaagattacatcccaatcaacatcgtagacatgattaggcaaatcattgagacctaatttacaatctgagaagagaagattttgcacaggacgacactcgtttcccgcggcttctttagccgcggtgacgagctctccagcttcgtgagcttttgtcgtgtattgaacgtcgaaaacgtcgatctccgggtggatttcttcgaagtaagccgcgtagtaacgattctcctcgatgaacactgttctaccgttgtggtttaacgacttccaaaggagagtctcgtgtgtgagtccgaaacgagaagattcacggtgg

SEQ ID NO: 4597 - DNA, 3915 bp, Arabidopsis thaliana landsberg
tctcaaaatccagtcaaggaatctgaagaaatttatttgcaaactactgtcagtttccagcttcaaatcagtccagttttcatggtatgataagcaaactaattcacagttttcaaaaacgttaggggaagcaatttcttataaatgtgcaggaagcagcttaggtttggaaaaccagtattttgattccaaagaagcaatgacatgcccagaattaaaaagaccgctcaccttaatagtggctgattcagatttcacaacttgccggtcaaatatctgcatatagacagatataagaaggtaaaaaataagctgaaggagtgagagaccactaaaaacaaatatctttatttcttaaaataagcatggagggctacattctactacatggtaagtatatcaccaaatgaaattaaaaaaaaatatgtatagacaagaacagaaattaaaccttcacatcaccagctagaacctctagattgtaacagcatccacggggttgaatcaatccatctaactgaacttcattattcctataaaatagatcagagataaaataaaaggttacttaaaatattctagtgattcttttgaacaatgagtacttaaaataatctcaattcattaaaatttgtacctttccccgcaatgcggacattcaaatgcagatattaagacctgtacccacaagtaagttaacaataagcttgtaagctcacacaaggtatggacatgtataaatacaacaaagaaaacatgtttctttaaaccaactagaaatctatagcccaagaatgtggtcaattcatagggaattaagtatgaaaaatttgaatctggaaaatgaacagaattggttatcttcaaaacagagtatgacatacctttctgaagtgaggaattaaggtcaatagaaatctggttgttccctggaaaaaaattattattagctatttgtgcatagaagaaggatcaggagaaagacaagacaatttcatacaacagcttataactaaaagaattcggtaaaaatacactagtaactgaaagttcacaatatacagatcctccaattaattgccacagaaccataaatatcacttatatcacctcaaatttctcagcccatcaccaagacatgccaataagttgtgtttcatccttactacagttcataggagtctaaagaacagaaagaactaatgataatgctgaagtacacaacagctatgtgcatgtacacaattggaaacaagctgcaactaaagatcaaaggctacagagaaactagcctgtttcctagaccttatattagttaagaaaggttgcaaactctataattctgcctatgaaaaaggataaggactacataaccaccaacatcaggaatctcaaagaaactatataagtatgtgcgtgagagggagacatacattttcttggcagcgcatgcacatgctctcaaccacatagaggggagcaccaaaggaaagatcggcggaaacagcttcaaccactgatctaacatcaatatcctgatcatttttgttgtccatcacctccaaagtttctccaaacaatcccaagaaatccgattgaccgcaaagtcagctgattccaagaagatgcacacctaaatggtttgtgagcaaacacatcaggaaacaaaaaagaagctaaaagattgaaacttttttgcccatcaacagctaactctataagggtctctactgaattcatatttgaaactaaagaagaacaaaattttcgaagacgattagtatttgcaatttcctggaaaagcttatagaagtttaaaccatatagcattatctgttggttcccaacctaaacactaatggcaaggttccaaggattcgtaaagattaaaccatataatacaaagtagagagagataagagagtctcgagacagaagagagctaagagcagatacgaaacagagagctttgtacctcgagcaggcaaggaacagaacagagacagagaggttacgtcgccggtagagaaacgagcagaggagcaaggaattaaaaatcgaagagagggaatcaaatctagctttggctctgctgctcgagattttagggttcgttcgtacgacgtcgtttttgttgaaaacgagggaaaataggtcaaattatacacgaactaaaaattgaccatatccgatttcgacgatatagactatagtctattgtaaaatgatgttcgtagtttttactatcttttaaaaaaaaaaaattgttactatctttactacattaatagttttctcaaaatctccatctccaacataagcaaatcaaagaaacatggaagactatatttggttatggttgagaatgatctttagttccttaccaatatcgacatgagttttcgaatctcacatttctcaaagcagattcccattttcaaacactattaaaagccctcaaaacccggcttcagcaagcatttgggctcgaggccgactaatacgcccatctcttaggtatcatttgttttattttgattagtaatttcttgagattttcatcgtcgaatctgcataataaatagcttcttagaacctagatgatttgtttcgttaagatcagttttaaacaatgttttcatgcccgactcggaccgtccggtccgactggttgatcgtgatccgaacattttttcggtttggataaagtgttaaaacccgacaagttcaaaaacgaaaaaaccccacaaaaactcaccattaacccatgacctggtgaaccggttgaaccagtcgggtgtgggttttaaaaaactctcttcattttgaaataaaatataagattttatactttatttaatcatttttaaaaaaaatttcagttgttaaactcatttgatattttaaatttcgacgaagacttcacagtgccgtcttaaaaaataaatcgaatggtgagtgaaacacccggtattaattgtgtgaattcacaatattttattagtttatttccggcattggtaatctcctactatatttgttacagtattaaacatttagttggatttaaaaagtttaatcacattattattgtttgatattatatattatatatatatatatatatattattttttttggcgtaaatgattttactttttattaaacataatctgattttatattttataaacatgatatgattatttttgtttttaaatgtataaaaattctaaaactctaaaatctctataaaaaaaaaaaaaaaaaaattgattcgtggttcaacctggttgacccaatgacccagtaatcaagaaggtagtccggttcattgtccgggtcgggtttaaaaacattggacttcaaggtaaatctctaatagttctgatatatgtgacattaatggttctaatatatgtgacattcaattttgaagaagaaagtctctaaggtttgtgctttgacggaagagtatggagcttcaaaaaattaaccttctaatcggattagatctcaagatctaaaaattcaatagagatatggaagtttaagaaagcgcatgaagatctattaaagcatggtattgtggaaaagattataacaaaaagaactgaatcatttattctcagtagaaatcaaaagagatttggttgcttatttgagaatcgttaatttttccacatgattaccaggtcaagaaagaatcattcgactgttctctctttgccggcgaatattccaatccggcgatagacaaaacggagatgacgagttggacgcgtgtaaacaagtcaatgaaattcatttgtacggcaccacgtttagagatgacagagtgtgttgctttgcctaagagttttcttgttgggcttggttttcatttttaggccttgttataaatatggcccgtgt

SEQ ID NO: 4598 - DNA, 700 bp, Arabidopsis thaliana landsberg
tcagagatcttgctgttggttctggtttctcataagcctaattaacttgtttcagatggggagccactcttatgaactcttttctctttaatgtcggtctcattctcctctgttctatcaggtaggcttcttagttctcatatttcccgtcagctgatagcatcaaaagtatgtattaacttttattcttacaatcgactattgtggctcactgaaattccagtgtgattcaattctgcgccactgcatttggatattatgctcaagccaccgccgctcaggagatatttggccacactttgcagtcccttcgcggtattaagtacctctacaagtaagtaatatcgggtttttgcaaataaaggtctcacttgtgtacataagactgatgataatcttccctttcttatcggtatctttcaggtacaatgtgttccagatcgggtttgttgtcctcgctggattgacctttttatattacattgcctttgtaagtcccttaaatcctctcggttttctgttccattatatagttctgtgtcattagtcagagatctttaaactcatgcttttggtgggtattttttggcagggatggagaagaaaaaagccgagcggcagattccagctctctacctaatgtaatctcttcttttgattttatcgtttatgtttcctcgttctgggatgggtcgggtgc

SEQ ID NO: 4599 - DNA, 5002 bp, Arabidopsis thaliana landsberg
  unsure (1)..(5002): unsure at all n locations
tcacctgcatgacctagtaccatttcaaacttatacactacagctaatccggttacaagtacttcttctgtacctgttgctaaacaaaaacgagctactagagctccatcttatttgtctgactatcactgttcccttgttccatccatatcatctttaccacctacaaatactttaccatctataatatcgcctcctattactttgtctgctattgatactcctacacagcctaaaagaacaagtcctcatcctctttcaaacactatttcctatgataagctaactcctcttttcaattcatatatctgtgcttataatctggaaactgagccaaagacttttgttcaagccattaaatctgaaaagtggactaaagcagctaatgaggagcttcaggctcttgaggataataagacttgggttgtgaaaactcttcctgagggtaagaatgttgttggttgtaagtgggtatttaccattaagtataaccctgatggaagtgtagaaagatacaaggcacggttggttgctcagggttttactcaacaagagggtatcgattacatggatactttttctccggttgctaagcttactagtgtgaagtttttgctaggctgtgcttctgcaaagggatggagtttgacgcaaatggacgtatccaatgcttttcttcatggtgaactggatgaagagatctttatgcgtttgcctcaaggttatactccacctgtagatactgttttgccacctcaaccggtatgtagacttctgaaatctctctatggtcttaaacaagcttctagacagtggtacaagaggttatcatcagtgttattaggcgcaaattatattcaatctcctgcggataacacattatttgtgaaagttgattcacatataatggttgttgttctagtctatgtagatgacttgatgatagcaagcaatgatgatagtgcagttgaacatttaaaggctttgttgagatcagagtttaagatcaaggatttaggacctgctagatttttcctaggattggaaattgctaggtcatctgaaggaatttcgttgtgtcagagaaaatatgctcaaaatctcttggaagatgcaggtttgactgaatgtaaaccaagctctattcctatggatcctactgtgcatttaactaaagagatgggtactttgttgcctaatgcaacgaaatatagagaacttattggacgtttgctgtatctctgtatcacaagaccggatatcacatttgctgtgaatcacttgagtcaatttctttcagcacccacagacattcatcttcaggctgcttacaaagtgttacgttacattaagagtaatcctggtcaaggattgttctatccagctgataatgagttgtgtttaaatggttttgcggatgctgattggggtacttgtaaggatacacggaggtctgttacaggtttctgtgtttatcttggtaactcattgatttcatggaaatcgaagaagcagaatgttgtaagtaggagtagtactgaggctgaatatcgtgctcttgctcaggctacttgtgagcttatttggttacaacagcttttgagggatttacacattacagtcacttgtactgccaagttcttttgtgacaataaatcggctctgcatttggcgacaaatcctgttttccacgagcgtactaaacacatcgaaattgattgccacactgttcgggatcagataaaggcgggcaaactcaagactatacatgtccctactggtaatcagctagcagacatcttaaccaaacctcttcatccaggacccttccatggtttgataaagaaaatgtccttatcaagcctctatcttcctaaccagacattacggagataaaggcttgaggggggtatattggatacatggttagatccggttaacaccggttattaaggtgttggtttaatgttggttatttgttgtatatataagtttaagatcacattagattgttgattaagttgtaacaaacatttttcagttgttaataagaagtcgttatatctccgatcttcttctccgttacaccggaacttcaccggtgttaataatttatttttgattcaacttccatttttatcaaccttgatgatcttgacaatgggtttgctgatggttttcaagtttattctcaatttcaatagagccattgaacacaccgttttatacccatcaaagtacaatgtcatgtattctataactctagaatacaccgttactacggtataatcgttgagtacacccgtcttgcacatcctgtaccccacggagtacaacgtatgtactgtacggagtacaccgtctcataccacgtaaagtacatcgtcacgtatcccgcgaaatacaccttcatgatattttaaggttatatcaaatattgagtcatagatatgtcatacatatatagtaaccatattatcaaattaatgtgatcaaattgtggaaaaagactgaaaagtgaaaacaacgcatcaaggtttgtgtggtcgcagatctagactaccgttaaccttttactcgactcctaggccaagagacatttattccaatggaatgacttatacttatttatacagttaaaatatatctttaaaacagttagttagttacatcaaatattaatttaatgttttaaattaaattaatagatttttcaggttatatataaaaagtagcttttgacagaaaaaagtattctcaaacaaaaactcataaaggaggcatttttccaaatctactcttaaagaaaataattttgtaaatttataagatactaagataataatttttataagatctaagataacaaaaaattataagatactacgataaaaaaaattagaattaattatagagaaatataaacccaataatatcataaatgaataatgattaatattaagatatacaattaagaaatttagtacattctagtgtttttttaatcttttttaaatttgaagttataatctcgatagaactcctctataatttttcttattgcgccagaaaacagagttttaaacagatcaaatgagcccttgtcaaaaaaaaaaaaaaaaaaacagatcaagtgagaaaagaagcaaaatgaggaaccgtggaaatgatgaaaaatgtctttcttctttaatcactaaacaacgaatctgaacttaaagaaaagttctaatgttaaaatcaaattatgttttaagcgattacagactggatttattcaaaaaaaaaaagattatagactgaatataatatcttttcaattttttttattgaatgaaaataattaaataaagtaatatcatgtaaatttataaacttttaaagtcccaatatattaatatatagaggttttactgtatacttttacatattttgatataacataataaaatttaattaacacgagcgatgtcaatcaaaatacttggtcatctctctagactccttaacacgaatacaagaagttgaacaagatattaatccaaaacattggaaaactattttgtgttgacaacgcttctcacaaaatgagcaaataggtcttgacatatgatgattgttgggtagaacgcctaccttgctactgcggtagaaccaaaatgaaccaggcttcatatataagtccactccaagcatacattctatgtgaagggtgacacaacaatactcatcacacatataaaaccgctcctttgattttatttttttctcgcaaacttcacaccaatttggtatggtacttgtttcctctccataagaaagagtaagcatatgcttatcatgcttatacctcaccttatgaggtaaagtagcacacttgaaacacaaagcaaagtcnnnnnnnnnnnnnnnnnnnnnttcatttgtggaacaatgtcctaactctaaacaaacacaacatcttctttcctctcctggtttcgatgttaagaacaaaggatccatatgactttcatggactaatggctcagaaattgtagcgcactgcacatgaatcttaaaataacatccttctttatcacacacatagaagaaacctgctatgcacgaccaaggacaagctgaacacttatcctcatactttctaacatcgtgatatcctcccactagggagagcatatgtggatgtatcgggtgatgtattttgcgagataaattcgcacattcttcgtgaagaatgaagctgcattgcatacaagagtagaggttaccaaaatagattggtgtgatgcatgcatcacactgcttactgtcatcgtaatctctgtctttgttctcatcaagtctcaaatgatgttgttgatgactaaaatgttgtatgattccatcacttatcgtcacaaacggctcaacttcttcttcaatctcttctaacaccccttcaagctctatgccatcccacacatttctttgtgtggcacatcttgaatgtgctccgtacgaacaatcatccttgatgcaagaataacccccaaaatcgttgtcgatagtttcgcgacaaacaccacaagatctatctcgttggtcgaacaaaggggtaaaagagatgcgatgggggtggcgagatatccttatgacacgtggtaagttgatacatcttagatggaccacaaaatcacaagggggacacatatagataggagagcttgcatcggccaaggcgcacacattgcaagttaagaaagcttgtctaggaaagagagcaagtgtatgctgatgccaattcggatggtctatatacaagactggtggtttttccgcacaaactatattcatagcataatcacaatccgagcaatagtagaatatcttttcgagatcctcctcacaacagaaacactttctggtttgaattctcgacgacttttgcgagacaagctgaagaaaatgttttggatgaagagggtgttttacctcaacgggagtcttttcacattcttca

SEQ ID NO: 4600 - DNA, 1567 bp, Arabidopsis thaliana landsberg
caaagcccgacagtgaacagtagtttaagagcttctatattcataataattttgaaagaaaaatgtaaaaaaaaaaaatgaatgtaattaaaatcagaaaattcagctagaaaaaataagatgctgtgcttaaaaaacataccttgatttgaaagagtctccacagtgtacccaagattctaggacttccaaagcatcatcgagggaaactttggtcttaaaaccaatatcactaagtaacttgacacttgtaacctgttacacagttgccccaatagagaggatgaaaaaagagaggttaaacaaataggtgaaagaactcctccgctgagtaagacattgtagcgaagtttaagatattaagacaacaccccgacccacaaagaacccacacctctaaataaatttcaagaccatccatgtaattttataagtccataggaaaatactcaaaagccaattattcactgcgtatattagaactaatagttgtagtaccaagcacattataacataagtaagcaaaaccaaactaaccgtaggaactgcatagggagcattcatgccaagtattgactgcacatcatcacaatcatgatagaggtcttttgaaagatgcaatttgctgtccatgcttgaaactatccatagagaatcacaaattaccctcataaatgaagattctgatgatctgatgataccatgcgtacccgagttatagttaacagttgttttgtcatagtaacaatcgtcccacagtctatcaaggacttccaaaagatacttgcaacctttacggccattacttttgtgcaagagagacaagagatcaactagttccggggattcccagtctttaacagttaaatcaggagataacaagttgatatcatacttttcacagtgtgaaacagaatagaattcagcaatgctcttttcaacttgaactacttgaacaaaatcagctattccaatctcttgaaaaaattcccgccactccttcaatccgcatgcataaaattttgatgctggctgtttcaagtaggtaccatcaaccacatgccatgatatatccaggtttttggtaagcttcttcatgttgacctggtttccatattcttcaccgaaatgaattgacccttcacctagctgtttcaacccataatttgataataccagagctttgcttctcaactcagaaataatgtacttcctctccttcagacaaatatgacagccagatcgtagatgtgtcatcacaaagcataagtaatcaaccattaaaccgtccactgcacctgtactccttgcctcaaaggctggtaatatatgagctttaacgatttcatgtgctgacagcttttgaacgccaattgcacaaagcatgtttacaaggtcatccacagaggatttttcatcaacagaagacgccaaaagaagggaatgatcaatggttcggagatttccatataacacaggaaatgcttcaaatacatcaacaagatctaacccagtggtgtcatggtgcaaccacactgcgccttcatctaaagaggatgaacttacc

SEQ ID NO: 4601 - DNA, 2373 bp, Arabidopsis thaliana landsberg
tgctttcttactcaaatatttgcttgtttcaatctccatgtctgcgtaatttgcttgttagggttagagtttctaattagggattcatatggtttagtagatccccccttctaggttatctgtagaattctgaatctttaattgttcttaatgctaaactagaatttgaatcaagacaatagatatatccgccataggtatctatagttggatctattatttgatgagcctggtttataggtgtgtaataagaatcggcctatctactaaggtaaacaattgaactcgtttagaatgcatgtctaggtataagatctctcggcttctctggttattcttagctatagacatagggagttttgcggaacaccaccggttactcgaaaattagagtttgaatttaagaatggttcgataacaatctagctatcattagatctactaaccaatagtttcctaagaataccctaagcctaactttttattttatcatttcacaaccaatcaatctactttcttattactttatttaccttttattttactatttatcttctattttaatcttgacattcaatttattttgtgaacaaaagagctttgtcgaattcgacccttaaaagctaacgatctctttatttgagggagtaagcttaaggtcaatttgatccatatcatcttcgtataaaatgacgtactaaataatggttggtagtagtgaaagactatccaagaagaatacttgaagaaatcatcacacaacaagcagcaatgcaggaagataacaatgatcttcaaaattccgccatagtcattccattgaatgtaagttcactaattttacatagaggacatcttgaagacattcccaaaaatccaccatgtgaagattctgaagatcatgataccgatcttgagatgacagattcaaaaagtttcaaagaagaataagaccattacagagaagattattctcttgggaatttatgttttactagattgataacccgtgctacgctcgggtgttggtaccggatcccgcaccgatagtccaggaccaaccaaagattgccacgtaagaagaaaagggacccacatgaagcacaacttggaatgagtcccgaagttgggtgaagaatgttgtgaggtgatcacgtcgcgagatagagacgaggccgatatgagagcagtttggtttagatatgttggggcgagtgttaaagcccatgaacgtcaaagtcaattcaaattcaaacattgaggcattaagtctgaagcagaagcattaagattagataccacattcttgtataaataatgaaggtcttgaaccatgtaatatacacacgcaattctcctagcaattatactatagccattttatatatcaatccaaaagctctttacatccgatttttgtcctcaagattaacccttctcaaaaattaagtaaatatttgagtgtgtgaatccgacatccatttttttattacaagtaaacatgcaatttgagactctttttgtgactctttttatggtcgcaactatttgcgacgttgtaaatactactttgtgactatataacgaccgacacgacatcaacgcaaaatcgtcgcaaatgtacgactccattatatagtcgaagaatggtcataaataagcgacgtttgtacgattcatttgcaacgtagtagaaatacaatttgtttttttttgaagtttcacaattgtcacaaaagagttttaaagttgcggctgttttgcctcgttttagccactctttgagaaattgcaatataagaatctagaatgattaatatgttaagtgaccatattttaccaattatttgaggtaatatacgtatagattctttctatttattttttattttacatattttaaagcaaatctttttgaacaccaaatcatatacaagatatgttacataagcttttcaaagaaaggttaataccttatatatgttggaaaacaaacttatgaaataatctttgtatctcctacaaagaatgatatacatcataattggactgtaactgattcaaaatactcattattaatgtaattagatcttaaaattaagaaatcttacatcttggcttgtgactcctatgcttacgtcgcaacgaagaggctcttttgcgacgactttgccattctttagcgactcctcgagatttaaactttacaattcgataatttagaatgattaatgataactagcaaccatttcggcattgatttgagctaataaattgatagattcttctttaatatattagtttacatgttttagactaaatctttgtaaaagccaaatcatgtagaagatgtacataagtacttacataaat

SEQ ID NO: 4602 - DNA, 834 bp, Arabidopsis thaliana landsberg
acaataaaactcaaattcttccaaaacctaatttgttgacttatcacattttgtatctaaagtcttatacattatgtattattttttccaaatattacacatttttattattattttcgcttaaaacattgtaccattcaaacttagaacgtatggtcgcttggacaaaaaaaaaagaacatttgatcgtaaattgtatgtatgtaacacaaacacatgagatctatctaaaccccacatagatagtattaatatcattactatgtatattacaaagttcccagagataacataatataatatccaacaggaccaacactcattacgcttgctgaaaaaagacataacatccaatacttagaaaggctaactaagtattctgcttaaagaactactaaagctatatagatatttgcttaaagaactattaggtatcgccgaatttatttcttcccacctcctttttgagaacatcatggagaggagaatccttttcaattcatgtcattgttgaacagagagttcatgaagtcgtcatcaaccaattcctatataagaaacaattcaccaaaacttgtttcaaagactcataaacttcaaagttaaactatatacaaataatttatgtaagttcttgtaaacattatatcgtttacctgtggatccaaaaacgaccaatcgttaaactctggaacatcttgtccctaaaaaaaccgagtccaggtttcagaatagatttaaacaaatatttcttttatatattaagtatcatagtttcatataaatattctgactgatatgaattagaggtacctgattctgattatggttaat

SEQ ID NO: 4603 - DNA, 2144 bp, Arabidopsis thaliana landsberg
accgcatctgattagcgtcgtcatagcgcgtgtaatgacaatttgaacaaaaattcattaaaatatggttatagtataatttttggaaatgttttgatttacctctattattaccaaatcaaattcagccagtgaagacgttgtagttctcaacaaaaatcacgtgggagtgtaaatacgacaataatgttccatctttctatattttaaattcgcgacctatcttcttctttcatccaatagttgaaaaacagaaaaagcctctccaatgactttttctcgtagcagctcgattacgttcttcatcgttgctttattcaccgtcttaattaatccggcgatctcttctcgcgccgcgtccttcatcaagctgcctcgctcttccatcgcttcatactgcgagagttggagattagccgctgagaccaacaatgttggaccctggaaggtgattccgtcccaatgcgaaaactatattaaaaactacatcaacggaggccagttcgacaaagactacgatgtagtcgctagttacgccattgactacgctaaaacggtcaaggttggcggagacggcaaggacgcgtgggtctttgacatcgatgagacgcttctctccaatattgagtactacaaggctaatggttacgggtaaatgctctctcatgttattattaccgttagattctgttttatcaacgaataatatgattgtattgtttgactaacttcgttgaccatgcattaaaccgggagatttgtggattcagatctggttcttggtttgagatttcttttgtgttatttttcgatattgtaccgagtgatttgttgatggtggatttaggtctgaaccgtacgatagtattaaatacaatgaggtggtggaaaaaggaaaagacccaggttatgatgcgagcttgaggctctacaaagctctcaagaaacttggtttcactatcattttactaactggccgagacgaaggtcatagaagtgtcaccgagaaaaatcttcgggatgccggttatttcggttggaaccgactcctcttgaggtaaaaagctataccaaaccacttctcttgttttgtttaccaatctactaactaatttactaaacttatgaaccggtaaatgcaggggtcaaaatgatcaagggaaaacagcaacacaatacaaatcagagcagcgatcacaagttgtaaaagaaggctacacaatccatggtaatactggagatcaatggagtgacttgttaggttttgccgtggcttctcgttctttcaaagtcccaaatcccatgtactatgttgcttgatcaccatctgccattgatatattgcatgataatttatcatttatgtatgaataaggatttatgaatgtatcccataattcaccgaatgtagccattcttaatgtaccacgtcctatttttttagtaggattcatacgtcactggtatgtaagaaaaggggactgattaaccaaataattttgatcataattgtgaaacaaaatccagataatgcttagatagtagttatactctaatccaattgatttgatcaacatttttctatatataaaattcttgattctgctaactaattaactaattaaagtttttggtttggtaagagttgcgaaacgataaccaataataaatgggagacatcattatctctttttctaaatctctccaatggcgtctcttcgtagcctttcgatttggttcttcttcttcttcttcttcgtcttcttaatcaatccctccatttctattcgaacttccttcatcaagcttcccggaagcgacggatctcgctactgcgacagctggagattagccgccgagaccaataacgtcggaacttgggatctgattccgtcaatctgcgtggattccgtcgccgagtatcttaacggagaccagtttttatccgattacagtgtcatcgtcgattatgctctcgcgtttgcgaaatcggttgaaattaccggcgacggcaaggacgtgtggatcttcgatatcgacgagacgctcctcacgaatattgactactacaaggctcatggttacgggtatgttctacctattattagccgttggattttattttatctacaataatcaacggt

SEQ ID NO: 4604 - DNA, 850 bp, Arabidopsis thaliana landsberg
aataatagagtgtgcatgggcattacccgtaaccatgagccttgtagtactcaatattcgagagaaaagtttcatcgatatcaaacacccacgcgtccgtaccgtttccggcaagattgatcgttttaccgtatggcgtaactagcgagtacatcgtaatataatctttgtcgaactagcctcatttgatatagtatctaacgtagttttcgcattgagacggaaccaatctccagcccttgcagtaggaaacaacggaaaagcgagattcgactgagctggggagattgatgaagcatgagacgcgtgaagagatagtaggattaatttagatggcgaataaagtgaggatgaagaaggaaatcgagctgctacgagaaaacgtcattttggagaggctttcttaattattgtcatgcgcaagatggaagaacgagattggccctgaatttacaacgttgtcttagaaatatttgatatacgattcgaagttggcaattttttctacacataaaggttagtgcttttacataaggtaaagtgttcaatttccaggctatacaatttttcccacacattaaacgttagtttttttggaggttcttgctgcgagttgacccttctaacatgatctttatgttgcggattattattgtatgttaagttgtcggtcattgtgatctatagataatagatccgtctattatataagaaatgtttctttattttattgtgaataatgttaaaatcaaatattctgacatttgttttttgttttaactattcatcatcatcattataagaagtttaagacataatgaggaacccctaaagtttttattcatactga

SEQ ID NO: 4605 - DNA, 754 bp, Arabidopsis thaliana landsberg
tgcatttagaaatcaatgcagtcaatcttacatttttcaacattcattttctttcctttatttttatttctgtttagatgtgtttatcatgtgaagtaataaagaaaagatcaatatatatatatatatatatatacaaggattacagaacaaataaacaaagaaatatcatctctaacttacaaaacattagctctcttttgttgtgatatattgatcatggccaagatatcatgttcttattttctcgtactcatgcttgtgttctcaggtaatttcatgctttccacttccaaatataaaaaagtagtttttaatctttacattacataaaatatttaagcgtgtacacatatatatagtttcatatcataacatatggtattttactattttttcagttttttcattggttgaaaagactaagggtaaaagacattgtagcacaatcattcttccagaatctccatgtgtccctcaagattgtgttgagtactgctttgaggagtacaatggaggtggaacatgtattgcatccaaaactggtagaactactaattgtatgtgtacttacaattgtcatggaaataacctttaaataatttccttaatatttatgaataaaatttttgaagttttccccccttctttgattggataattattagaaaaattcagaagatttcagtcactttgttgtcaatttaaaaaaatataaatcagtcaaacatatatagttatgtttaaaaataac

SEQ ID NO: 4606 - DNA, 543 bp, Arabidopsis thaliana landsberg
accggaatctgatagagtaggtttaagaattacgaatttagacccggttctaggtttaagacttccggttctgttgtaattgctgcgttttctgtagcgtgctgatcggttattgttttttttttcttttgtttctggtcgagtaggtctgaaccgtatgacgataataaatttagtgagtgggtggaacaaggaacagctccagcttttgatgcgagcttgagactgtacaatgctctcaagaaacttggtttcactatcattttgctaaccggtcgggacgagcatcaaaggacttccaccgagacaaatctccgggatgccggttattccggttgggaacgtctcctcttgaggtaaacacataaaaatcagaagacttgaaccaaatttcgtgtatctcaatttccaaaacattaacaataccaaatcggtatatacctatgcagaggtccaaatgatcaagggaagtcagctacaaattacaaatccgagcagcgatcgaaactgattgaggaaggttccaaaatccttggcattagc

SEQ ID NO: 4607 - DNA, 927 bp, Arabidopsis thaliana landsberg
aattttacatccaattcaaaaaaaaaaggcttactttagagatttaaatttaaacgagccttttttttttttaaggagctgggaagatatttagtctcatcaaatgattttaagaattaccagagtatattcttaaatgatatttttattcatccttgaaagttataggtgtagtttataacatacgagagatatctctaattagcttagcaattgtaaacacaagcgcaaatattgttgtcatctccgggacaaaggccattcccgttatacttttgaagacaaagtggttggcattcttgaaaagtgcatggcttgctaagtttcacgtccacaacacatttttttatagtcgctcctccctctgcacttggcaaagccaaaaaagctaacatcatataatattttaaaacgcttacaaataaaattgagtatattaaataaacaaaaaaagcatagtttttaaaaacaatattagatgccaattgatcatcccataactaatcatctactcattttcgtaactctagataattatatgtttcactagttttctaaaaagattgaagaatgaccgtctctgctcattgatctcaagagtttatatttgagttttataacgtgtttagtataatatacaaggcatacgaatttttacctgagaggataaacatcgagatgaacatataagaacacaattgtttggccatgcttgcaaaaagtttgaggataatgtaatgtttatctaatacttatttgtgtttgaaatgaatgtgggatagattagaagaacgtttttatagatacaagtgcaagaaaaacatatataaaatactcttttgcgaaataactttaatacaaatgtgaagactttgaccaaatataacaaataaatagataatgagaatagtcaaaatgacttaaatc

SEQ ID NO: 4608 - DNA, 374 bp, Arabidopsis thaliana landsberg
atgatagacgacattcaatagggtaacatggagaaagatcaatgattatactacaacgcttatctcccttagccttctcaacaactgaaaaaactgaaaaggtaaaatcccatatgttatgacctggaactatatatttgtacatgcttagatgtttgaaagtggaaaacatgaaattacctgacaaagcaagcataagtatgagtaaataagaacatgatatcttagccatgatcaatgtatatcacaacaaaagaaagctactaatgttttgtaaattagagatgataaatgaaaagctattttctttgctttattgttatgtagtgatgtgtttatatatatataagcattaggcatacatctaagaagaa

SEQ ID NO: 4609 - DNA, 2666 bp, Arabidopsis thaliana landsberg
ccctaagcgataaaaagtcaaagcttgcggtttgccaaaggagagttgaggaatagatggtgaaatactcaaaggctatataagtgacaagagccatgactttgaataatctgcagacagggttgcctggtgtgttccaatctttaacaagtttctctgctttgttcatggagtctcttcaaacggtatgcactcgctcatactctatcaaataggacattatatattatatatatatatattgatatgcttacagagtttacagtaacaattgtgaggtcagttattgtaatgttccttttttaccaagaaagtgttggatacatttctatttattacaaggagaatgtatataaacaaagttttgaaactgagggagtcgctaagatcttacggttaaacgtgatataacctctaacatgttcttatctcggcgatggtgtaggcattccttttagttgttttatagagtttgtgatttatgtattgggtttggcgagaatatgaagaaaactcggaagaaagcatagttaactgtaagcaataaactagaatctctgtagtgatgatttactaaaagctttgatatgatcttcaattccaagtgggtggggtcttggctccatcggattctctcttgagttcacatctgacaactcttcatttcttgtctgaaagtgaaaccacatggttttgtaaaatcaggatttaccggatctgctctgggtcttcttcttgccttgaatccctccccgagcctaatagacagaatctctcccatgtcccctcttgtctttatccctttactgtttgaggataaaagatccataccacggaaacaaacaaaaaatattggaaaataaatatctcttaatagctctttccatatgaaagcctagacctggctggcttccatctccaaaggtgtctattcaacttatctgatgtcaacgtaatgactattttaagcatacaaggtctgaaaccaactgattcaataagaaatatttaacaacatgattaaaagcctaaaaggcaaaacccaagtacatgtactcacaataactcacttctctggatcatactccttttgcaactctcaggggcttgggatgacgaaactcagatgccctggctaattgtgtttttgcgcataattagccaagagatctaagaaacaaatgactatttgaacatagagagcaaatcatgataatgaatctacattacccttttcagcaggaaatccggttattgttttgtggttatcaagtggaattaagagagcatggcaaaggcatcaagtggttccaaggctcaccattgaataaggcatcaagtgctttcaaggctcaccattgaattgtccacaattctctggtccagtccaggcagatcaaataatttcagttgtggagctgaaatagaaaggatgaaggtaatatgttattatgatcacaaaaaatttaacagtattatgaaaaaaaaatgcaggtcaaatgtctcatcacccatgtagagtaatatattaaacataaagctcccttgatgataacatatgatagccaccaacataaaaaactttaggctctaaacaaactagtgtactagatcatatttagcggtggcaacatattatagataaccattacactgataccaaagacattcagacatccaactcaaatttagccaagaatgttgctactttgacgactaaaccggcttatcacttatgattgtgttactgtattagaaattagaccaatcaattacaattacctgtacaccagttatatcctcataccagtcgtgcgagtgctttgaacagttcacatttgatcaccattttcccaaaaattagtgtaccaccaaatatgacacaagtcaggctatatggtgacagttacacgcgcgagaatatgcaggccaacttagcagcgatatcatcaagaactttgttaaaatgtggatcttctagtccttttactgtccattgcagcagtctgatattaatgtcacttagtattggatctccatcttgtgtacagtgaagttgtatcaggcgatctatgcatttgaccaagtacttgttggatctcagcttaaaatggttaataaacttctctgcgtcctcttcggcctcaaaacttgatacacacatactctccaaagtgtcagttaagttgaaaacaagaagtgtgccttctgtagcctcctccttggtaatttcattcgacagtaaagcagatattctagagaatttctttccttgtttgaatccggtactccgtgatttcttaaagtcaagaattttcccagttgctgcatagtgtaataccagttcatactcctcatctgttactgaatatggagaaccaaacagaacgccaaccacaactcttcttaccaacaaattgttttggaggccagagctgaaagatggatgcgttttccgagaatccaaatcataagaaactgaattggtgatattgttttcaaattctctcaataggtcttccacaatactggaagcatttattttgccagaaacgagcctatctggtttctttctcttgccagttatagtctcagtacgatatgcttctgagccgcaacttttactgatacatatctctgagactctaatgagagacttacttact

SEQ ID NO: 4610 - DNA, 1258 bp, Arabidopsis thaliana landsberg
aaatcgacaataaatctcaacaagtttctgcaagtaagtctctatctatgaacatatgcaatttagcaatgctatgtgaggctctttctgcatttatgataaaaaaatttcgatcagtcttctcataatatctccattgtgttctacatgggtatattttaggtgctttgagacattctctgcaagatagacttagcaaaggagcctcagggaagaatcgtgatgaaataaacttaaaacttcgtaccagcacaggtaagcccctttttacttgcacaatcataagtggcaagcctatatctactcttcaaatagcacatccttagctaacctaagttgggtgtatgaatttatctttgatacccgtgaactggtcagctgtaatatcttgctatccttatatactatctagtacactagtttagagcttctagctttactttggtgggtatcagattaaatatctaacggagctttaacataaacagtacacactcttttgaacatgagttatgacatatgacatatgaccgacagtttcgtagtattaaattttctttgaccatcataacctgttacgtttaccctttacattgcagctccaccattgaaattagttgataagcctggactggaccagagaattgtggacgagtcaatggtgaggcttggaactacttaatgccattgtcatatccttaacttgcctgacaaccacgaaacaaaagattttgactatttttatcggtttcctactgaagtgataatatagattcattatcatgtttatccttttgaaattgttgtttgtttcttgggtctctttgcaagattgctgaatacgcgcaacacaatgatgccatactgctggttatagtgcctgctagccaggcatctgaaatttcatcatcccgagccctgaagattgcaaaggagtatgatccagagagtgagtacatctgtatttccgatctgtcttatcttaatattgtttattatttgtatacctgataagaactgttgatttacctacctattatcacttcagtttgcttaaaatactcattagctaacatcactcctccctacttataggtactaggacaataggcattattggaaaaattgaccaggcagcagagaactcgaaagcccttgcagctgttcaggctcttctttcaaatcaaggacctccaaaaacaactgacattccatgggttgctgttattggccaatccgtttcaattgcggcagcacc

SEQ ID NO: 4611 - DNA, 996 bp, Arabidopsis thaliana landsberg
ctgggtattgcttctctccatatatgtgctttcttcatgatttttattatggtgttggcatatgacattggttgcttgaacgcatatggctttcaaattctttgtacaggctccagggtaagtctcaaatagtgcaggatgagctagcgaggcttggtgaacaactagttaacagtgctgaaggtacaagggctatagctttggagctttgccgtgagtttgaagacaagtttcttctgcacttggctggtggtgaagtaagtacattcttacaaaagttaactagatttagtcgaaaattcaagaatatagtgagagagaagaactcttcaaatattagcaatcagccatttcagatttggtactagtgtagtggaaagtctcttgctagcctacgcttggtaagagcacattatattgttgggaatctcatgaatctgatagtggatgtttataatatgtgtataagccaactgagtgtttgatatagagtttttgtacttgtctgtgttcagtttatgggctgaagtcccttttggagcttggcaaatgtttttctcaaaactttttgattcttgttcagggaagtggttggaaagttgttgcaagttttgaaggaaatttccccaaccgtatcaagcagcttccattggatagacattttgacctgaacaatgttaaaagggtgggtgtcttcttctgtcctaagtttctgcacgagacaagttttgagacttgatttgtcaaaatatctttgattttcaggttgttttggaggcagatggttatcaaccttatcttatatctccagagaaagggttgagatcgttgataaagattgtccttgagttggctaaagacccggcacgcctttgtgttgatgaggtgtgcttgtttacatgtttttttaggtacatgcagtaggattgaattttagaaatttactgcattgtgaactggctatggcttgtctcactttaattcttcgaactgtaa

SEQ ID NO: 4612 - DNA, 1473 bp, Arabidopsis thaliana landsberg
cattttcttaaagtaaccactttgagttgtcctgtctactatgattaccatggatagccgacgggtgagaatggtgcgacacgggctcctattatcattgacttgagtagagaagaatcactgagcagcaaggcaataatcttgcaaattgacaataaaaatcaacaagtttctgcaagtatgagctccctatgtgcacatatgcaatttagcaatgatttctgaagctatttctgcatgtaagatacaatgcactaaattaatatttgactaattcttccgtttgttttcgaatgtgtgtattgcaggtgcactaaggcattctctacaagataggcttagcaaaggagcctcaggaaggggtcgtgatgaaatatacctaaaacttcgtaccagcacaggtaattcctttctacttgcacaatcaaaaaaatgaatcccttgttcttgcaacatccatattatccaagcctaagtcggatagtgtcccctacttcagtgaacagctcagttgtagtgagtttttaccactaattctaatgcacattagcgcttcaacttcttttgggtaggatctgaagctaagttgtggaaattgaactatatatctaaatgaagatgtaacttaaatgttctctttggaacatgaactatcacatatcgtttgtttttgtactgttttctgtaatcatgataacatatttttcccttttaagtgcagctccaccactgaaattgattgatttgcctggactggaccagcgaattgtggacgaatctatggtaagcttaggaactgcttgatgcctttgtcatccccctaatccacctgtcaactatggagaattccacattttttattcggcattctggctgtagggcaacatagattcattatcattgtcatcttataatttttttctctcctctctttgcaagattggtgaacatgcacagcacaacgatgctatattgctggttgttgtgcctgctagccaggcatctgaaatttcgtcatctcgagccctgaagatcgcaaaggagtatgatccagatagtgagtatataggcactttcattatagagacccttcattatacttcttaacaactgttgttactacctttggattaaacctttggaactaaattttgtgtatactataaccaaaaaattaacatcactccttattaataggtaccaggacagtaggaatcatcagcaaaattgatcaggcagcagagaacccaaagtcccttgcagcagttcaggcgcttctttcaaatcaaggacctccaaagacaactgatattccatgggttgcacttattggccaatctgtctcaattgcatcagcgcagtctggaggcagtgagaactctttagaaactgcttggcgtgctgagagtgaaagccttaaatccattttgactggtgctccacaaagcaaacttggcagaattgccctggtcg

SEQ ID NO: 4613 - DNA, 847 bp, Arabidopsis thaliana landsberg
gaaaaatgaaaaggctaaagtatggttcttctaacttaggaaaatactcacttcaccaccagcgaaagggtgaagttatttatcctcaaactcacgacacagctccaaagctattgcccttgtgccttcagcactgctaaccaattgctcaccaagccttgctaattcgtcctgcactatttgagacttaccctggagtctgcatgtaacaaaggaatttgtaagttcatatcataagaaccaaaatcatgtccctgaaactaaaacaaaagacagacatcacattttaggagacaaaagaaatatatcagcttaaaagatgatgagcattgacaagggatcttgcaagcaagagttcttattttcagaactcagtgacgatggcagataaatctgccacctattcaattccagattactatttcctcttgtgcaactttcctttttgctttatctttgccttttggtttattccaattcgttaaacaccgttcctttccattcgttaaacatctattcaatcagttaaagatatgaatcttgttttccttttcagaaacttagcttcgacctgctccgtatatgttgattagtaagacacaaggacaaagatttctaaaatatctcatgagaagtgcgctaatgatgatgggagctggaaagtctagctaacaaagcctaaaggtcgacttcaacttcaaagaaacaaaacaaattggctttgatggagcaaattgcgaatcttccctaaagtaccagtacagaaaaataggcaaacaaacagtcgatttttcatataaaagcaaacacgtttggagagaggaaatacccagttaagatgtttgga

SEQ ID NO: 4614 - DNA, 3188 bp, Arabidopsis thaliana landsberg
acacttttaatcatcttctcatatgttcaactttgatgttcacaccaaagcagacttatatgttcagttctccatttagaagttttggtacgaacctgtgttttagtcgaaaaagtgatattccagttccatgaaactataatacagctatgattgcattttgcgttgaatgagaacctgtagtagcagtaattgaaatattgtgttaataaacatataagatagtggatcaaacactaccaatctatttacatatctttactgatttgcctaccttaacaattcatgttcttcgttttcgaatccacacgttattgtttcaaatacactaaatgatctgtctctgtcagtataatcaactttcgcagctagatatagaatagcacaaatgaacatttaattctgtttgagaaagccatttcaaaactaaaatcgaattatcgattaccataattgatttcatgtacagtttaattgatctataaatcatatgtcagagattgtataacacaaagacataatgaatcgagtacctcagtatcttctgggtttacgaattttgtgataatgcaaattgcaggagttttatatttgtattttgaattggttggatcatagtcgagacagtgtgagtagaagaagacacctatcggtgagatgtgatatgatttcgggaaggattcgattaaattcattcagtttttgataatcgaatgaaaggaaactcagttgtcgattgaatgttttgttatttggatgaagaacaatgcaggaaaacaaaataaagacttctttattatggtgtcattaaataattaactaatcacatgtaagcaattgtttaaccacttatcaatatttacaaagggctttaattacacttaagggcattcttaatggtagtatccataaatattagcaatatacagtactatagttacattataaattatattaaacaacctaaattatattaatctaagtattatttttggcaaaccatttaagtattatataataaatatttagtatagaaattaaattattgtagaaatttaaatacatcatatacttcatataacaatagagcacccatgtaattttaatgataattacagttacaatccaaaaattaaattttaaaccaattgaatcatatgaatttacatgtaataaaataatattgttatttaaaaagaatttacacttatgatcatgtaatcataaaattagtacaaacacacaatgtatataaatagaatattatacatgtttgcggaactttacaaaaccagaccgaaacatacaaatataatcactcatgtcaataaatataaatatatagtagaaaaatgcaaattaactataataatttaactgtcaattatattacaatgaaaccatcatattacgatcaaacgcaaatactcaacccgcggtgtaccgcgggtccgtatctagtaaactaaaaaaacttggaacctagaggatctctattagattttctcagatttcagattctaataataagttatgcatgtattgggccggacacaaatcccaggcctactaataagatccaaagtaaatagctattacggtcagataaccaaggataaaatctgcagaatcacgatttagccatggtaacaaaacccttagaaggacacacatcgagtaccagattttagctgacacatggaattatggaaaagaaagaaagagaacataatcacaagcattcaagtcttggagcaaatgattgtagaaactatactcgaagcagaggtgtttaagtaacacaagcattagcaacctccaacaataaaaagaagaataatgatacaactaacatctactttcacggtttcgactctcacatacacagcatccccaacctccactatcgatgcttgccctgaaaactggccagacacatttctgaaatcatcttctgttagatccatgtcttcctccatgtctatacttatttacccctcctcagctgataaagtcaagagcgaaaaacagaataaatcctggcgactctcgctacttttggtcgttgatccagcgacatgcaaacgaacaacttttggtcgatgtcgctggtttcagtcgccagcgacatgcaaacgtagagggccttaaacgttaaagcaaaacactctaagaaacggaaataaagaaatggaaactcgatataacttcctaaatcagtatacacaaggaatccatatcaacaaaaggattgagatcatgtttctaaccttccaaaccagagccgcttgaagctgccatttttaactaaaacgtgtaaaattattctctcctcaagtttcactaatcatccaccaaagataaaccctgcataaaaaaagcatacaccaatgagcaattccaaaaactctacacaacattcagaatctaattgtactatcaagaaaaaagaaaccatttctcagtgtaaacaaaatcaacagtaaatgtttggtgccatgtagtgaatcttcccacagtttgtatcagcaacaataggcccttcagttgcccgtgtatcagccccaagtatcacaccatcctacacaaaacagataaatgaaatcagcaatcatctaaaatagaatgtaacaaaggtttataccaaatatgataccaactgaaggtacctattgaagctgcagaagagactggagaaatagttaaagagcaaaaaacacctaagaagctcatcatgacccgcaagtccaggacattcttagaagatgactttgctttgatgaatgatttttctatagagaaggcggtcgggctttgcgagttcaagggaagagaaggcatagattcagatttcaacacagatggtttcttgttcgacgattctctatgaaaagaaaaggctttacaggttcgatacgcacgtcatagattcaccaccttctcgcgtcgtcactacagagataccaccttcccgcgatccgacgacaccaccaccaccaccgccggagtggttaatgagagagatggcgaaggaaaacggctataaccctaggctgatcatgtctaggactctgacgaagaacgatgtaagcaaaaggcaggcatgtctcttgattcttgggaaacttgaaggatcagaatttcttggaagacaaggaagctttatggggatcctctagagtcgacgg

SEQ ID NO: 4615 - DNA, 2658 bp, Arabidopsis thaliana landsberg
  unsure (1)..(2658): unsure at all n locations
ctgtagtgatgtcacagattcaagccatggctgaagatgctcaacctttgctctctgagtttcgtgatagcggcttgctcaaggaagttgagtgtcttactcgaagccttacccaagcttctgacgatttgaggtaatagctcttagtggaacaatcttggcatatcgactgtatatcattatgaatattttgaattccatagtgcaaatgcaaaactctttctgcatcatgatgaaagcagaccttacgatagatataagcacactagcttcaatttctcgtatgtggcttcaacactctatttgtggattaagtttctgaacaagagatgatggttaaaaagttaaaacacatacatatctatgcataaatgtgtcttatcttatgggttccatgttaaattaactgctttgctcatcagtgcttttcaatctttcctctattgtcttaaaatttcaataatttatcttgtgttgcctctacttatcttctgctagcctactgtttctgtcacttaatgtatgttcctggaccacatatatgcaaaagctcgtttacttacatacgtatgatcaactgagtgataactgtgattatgagaacctatattcttgcagtagacagcaaaaatataattttcattttggttacattgcagaaaggttaattcgtcaattatgactcctgagaatacagaactcatacagaagtcaatctacactctggtttatactttgaagaacgtcgaggtaaacttttttttcttcttattctatgaataccagctttgacaagttggaagaaacaatgttaacaaagacttggtttttgattttcttgattgtagagtataagctcagatattctgggattcacaggagatgaagccacaagaaaaaaccttaaactactcatcaaatccctaagcaggctactatgatcagcctgtagattttagactggataaataaaatccagaatttttatggtaagcaagttttaaaaattcaaaaatgtgttgtttctttttagagtatcttttgttttcgttttgtgttctgagttggggtttaatggagagacataattcagtttttataagaacacaaatgtttgtttctccacattaatgcgtatcctcaacacagcatttacttttaacacgggagacgacgacgacgccgataagcgcgtctcgtctcttgtagggtcccaaaggaaggagaagaaactaataataatttcgaagaggggtgtattattaaataaaatataaaaaatctggagggtgtttttggtcattacaagtggactatttggtctctaggtgcatcaatttgataacaaacaaacagtaagacataagattttattatatagattggggtcagggtcaggacagagagtgcaagtgcttaccctcttttactttcttcgcatttcgagacatctcttgtgaactcttttttaattttttgtttttttttctccacacaatatatcgaataaaaagtttaaagcaaaagaaaaaaagaatccaagttaggaaaaatgttactccataattaaatttttaaagaaacgaattggtcggtcttgtgggtcgggcgtgaaggtagagaaaaaatcgaaattaacaaccaaaaaaaaaaagaaaagaaaaagctattccaaccataaattattattttaattaatttattaaatgaaaattctttgagtaaattatttagaaaaaaaaaagagaattataataataatttccaatctctaccctttgttccttcatcttcttcctcatctttcttctctcttcaacattttcttctcttcttcacacaaacacacacagatctcttcttcatcacattacttctggctttacatcttttttcttctccatgaggaaagggagaggctcttccgtcgttggacccgcccttccagtaaccgccggtggatctgtgaaggagccgaggtatagaggcgttaggaagagaccttggggtcgattcgcagctgagatccgtgatccattaaaaaaatctcgtgtctggctcggtactttcgattccgccgtagatgctgcacgcgcttacgataccgccgctcgtaacctccgtggtccaaaggccaagaccaatttcccgatcgattgttctccttcttctcctctccaacctctcacctacctccacaatcaaaacctctgttctcctccggtgattcagaaccagatcgatccgtttatggaccatcggttatacggcggaggtaatttccaggagcagcagcagcagcagattattagtcggccggcgagtagcagcatgagcagcaccgttaaatcttgtagcggaccgagaccgatggaagccgcggcggcgtcttcgtcggtggcgaaaccgttacatgcgattaagagatatccgagaactccaccggtagctccggannnnnnnnnnnnnnnnnnngattcttcgtcgtctgtaattgacgacggagatgatatcgcatcttcgtcttcccgccggaaaacgccgtttcagtttgatcttaatttcccgccgttggatggcgttgacttattcgctggcgggatagatgatctccactgtaccgatctacgtttctgatttgctgctttacaaaaaaaa

SEQ ID NO: 4616 - DNA, 603 bp, Arabidopsis thaliana landsberg
  unsure (1)..(603): unsure at all n locations
aaacccaccatgggtctcctccaacttcctcccttaattagtatttaatttggtgaaaacacttcaaaagacaccgaggagagggtcatctccatcatcatcatttcatcatcctcatcaacatcatcatcatccataaggatgaagaagtacaagggagtgagaatgagaagttggggttcatgggtttcagagatcagagctcctaatcaaaagacaaggatctggcttggttcttactcaactgctgaagccgcggctagagcctacgacgcagcactcctatgtcttaaaggatcctcagctaataatctcaacttcccagagatctcaacttctctctaccatattatcaacaatggtgataacaacaatgacatgtcccctaagtctatacaaagagtagcagctgcagctgctgctgccaacacagatccttcctcatcatcagtctctacttcatctccattgctttcctctccatctgaagatctctatgatgttgtctccatgtcacagtatgaccaacacgtctccttgtctgaatcatcatcatggtacaactgctntgatggtgatgatcagttcatgttcattaatgga

SEQ ID NO: 4617 - DNA, 578 bp, Arabidopsis thaliana landsberg
actggtcataaataagctataaggcgtcttcagttcattaccatctggcactctttcctggggcgtattatgtgcaactccttcacctttctgcagcatctctcaatcttgatgctgccatagtctggagaaatgaataaggaagcatgacgtcgctacgattacctcgatccttgcattcaacaaacctacaatgaagatagatatatgatctgataatgatgatgcctaacacaaacaagataagaaaataatgctcaaggagcagcaacttcccaatctattggaaacacaatttcctcagcaatgcttaccatgcaagggggcttgcggttcggttaatgagcaaaagatttgtaaagtcgctagagtcatttagctcatgcctgtttgccccatatacatgcgcactcccacgttctttcaatttcatactcgtcgatagcattatgtgccatgtttccgagtcatccaagatcacaggtattttctcagagatgagatcaatattatacaatgattccattgcacaagagctcacttccaactaagaacatacaaggagagagagagagaga

SEQ ID NO: 4618 - DNA, 2309 bp, Arabidopsis thaliana landsberg
  unsure (1)..(2309): unsure at all n locations
catcacgtattaagtgtttgtttacccaatcaacccaaagtgaacctttcgctgaaagtatcctccatatcagcttcaacacacatactttgtttgcttcttctatagatctcattcccaaacatccctcacttttgggagtacatacctctgacaatgcgaccttggctttcctcgtatttaaaatcggacccgaccataaaaacgcaacgcacatcttgtcaatttcttttacccaggctttaggcagtcgaacgcagcgcacatgaaaagccttatctatctttcttgaaagcacattcatgcatatgacgaataggtaggggcttaaggagcagccttgtcgaacccctctctggctattataataacatgcgagttcaccgtttacttgaactgagaaagatgctgagctgacacaggtttgtatccaatctacatattgctctgggaaatcgagagctcgcagcgtgttgaacaaaaacccccattgaacagaatcaaatgctttagagatgtctattttcacagcacaacgtggagagactgaatctttgttgtaatctttaattacttctgtagcaagcaaaaggttctccattagcaatctgtctttgatgaaggccgattggtttggagctatgaactttggaagaatggtcttgagctagtttgcgagaatcttggatatgaccttatatagaacattgtagcaagatattggtctgtagtctttcattacttttgcttctttctttttggtattaaagctaggatagttgaatttactcttttggtagaaaccctttcttgaaaaaagattggttagctaccacgaagtccttacccacaattgaccatgattccttaaagaactcagaggtgaatccatctggccctggtgacttattaaccggcatcgcaaataatgttttccttacttcctcctctgatacttcttttatcagcatgttcttgtcttcttgatcacatttaaagctcacaatgctttctagatcttgtctcgaccattggatataatctacgcatagatagaaaatctctaaagtatctttctggttttattttaatgcgatcttgagtctatgctatggtcccatcttcacactgaatttctctgatattgtttcttacttccttaaattttgctgcagcaaagaaagccgtattgttctgatctcctattctcatccagtgaagctttgccttttgttgcaagtacctctcctcaatgtctgacaacctcctccatttctcatacacagctgcctcagctgtgaatgcttgcgatgttagatcagtcattgtcacgttctgcaggtcacaaagtctcttataggcttctttaatacgatttgatatagcactaaccatctgttttcccatctttcgtagatgaggtttcagctctttcaatttctttgacagcctaaacattgcagatgttgagtgaaaaagtggaggggatgttctccaactctcttcaagtgttgtatgatagccaaggtacgttgtcactgtattcacaaatttaaaaaggtcgttttaccctctacacttcccttgacaggtgaaatctgcaacgcatgtggtctgaacatcctaccggctcaaatatagcatatgattgactatatttttgtaaccatgacttactcactaacactctatctagcttcttgcatatggtaccctcttgtgttttattacaccaagtgaatcttgtaccttgatagcttagatccgtgagttcacagtatcagactatatcctgaaaatctcgcatccctgatggaataaaaggtgaggaatcatatagagaatgatcatcaccttccaatatttcattaaaatccccacatataagccaagctttgtctttaaacataggagaatcttgatggtttctgttatcactccaaagcgctttcctttcaactacaaagtttgatgcataaacaaaagagacaaagaattcctcatgtctaccttcgacatagactgaacaagtgataagctgtgcaatcttataaagcagtgtgagccttacattgttctccaaaccagccataacctaccaagtcgatgctcttcataatttgagagtgaagaccaatctttgaacacataattaattatccgagctgctctaactttctttacttttagtttctagtaaacaacccaaatcaaaaagtgccctgcctttaattcaattntctcaaccactcccatgcctttgtgtttaatttgaaaaaacccccaaaacctttttcccaaaaaaaaaa

SEQ ID NO: 4619 - DNA, 894 bp, Arabidopsis thaliana landsberg
  unsure (1)..(894): unsure at all n locations
gaacaagtcaacacaatccaacggtggaaaattaagatcgaattgaaacggcggattccgtcgccgtgaagacgatgcgatatcgtcgtcgtcgtcgattacagacgacgacgaatcgcaatcgctgtgacaatcctccggaacaaccggtggagttctcggatatctcttcgtcgtggccggtttcatcgtcgtaggtctcggtccgctaaacgattcaacggtgctgctcatgctgctactagtaggccggttaacaatcggaaactgttgttgatggtcggtgaataaccggtggtccataaacggatcgacttggttttgattttgattacgaatctgattaaatcggagattgggaggaggaggagaagaagaatcgatggggaaattagttttggcctttaggaccacggaggttacgagcggcggagtcgtaagcgcgagcagcttcttcggcggaatcgaaagtacctaaccaaacacgagcttttttccatggatcacggatctcagctgcgaatcgtccccaaggtctcttccttacgcctctgaatctgatttcttttacagatccgttgatggcggcaacgacggtaggtctggcgacggcggaagagcctcttcctctcctcatgatggtggatttaagagaaagccagaggtaatggtaatggagaaaggtctaatagagattgttgagaaagagagaaagagagaggaagatgaagatgagggagatggtgggaggaatggagaagataggaaactctctcttcaacacaaaaagctcttcctcttcttcttttcttttttttctttntttttggaatttcaaaatgtttttaataaataaattggtttttttggtgtgatactttgaaattttttaag

SEQ ID NO: 4620 - DNA, 1278 bp, Arabidopsis thaliana landsberg
tatattttgaatgtaatatataatcttattagtttatggatatctctttccgtgattaaattatgtctattttattgccattgaattcaactctaaatttgggagacaagttggtgttagcgaccattaatctaaaatattaacgccaaatttgtagcaatcatattcttaaagtgtacacacaatatgtaaaaatagtttgaaatagtgaaactctatgagatttatatgatatagtgaaattaacctatcattttgtgacttatgtgttttaggacaatatatcagccaagaaaaaatatctctaaatatttaaaagtcttagagcatgcccattgattgaatccttgtaaaaaatccttaacattttttaataatatattttggtaattttaaagtttagagtttttgttgagtctctaaattttttgttatccaatggtggagtccttatgaaaatttctttaaaaagcaaaaatatttttaaaataatttatttgataaaacttaaaagttattagaaaatattacaaattgtaaacatatatgatgacatacaagcaagaaaaaagagaaaaagaatacaaatcaaaaggcttacaagaggaaactaaagtccaagatgagaggtctattaatgaaattgtcaccaaaggaaaaacatagaataatctatctccagctcaagacactgtcatgaacttaaatgaaagcacgtaccgagaaccaattatttgataacatcaactaaatgagcaaacaaaagagcataaacataaacctagaaccaattattttgtgtcaccaatccgttgtaatgctaatgagaagtgaataagcagcaaaatggtcacatttttatcttaaaaaccaacagatcaaacacaaatttgaacataaaccaaagcctagaaactctatacgaaaccaagagagaggagagaaagaaaaaagaaaaaaaacttgttttgttttattggtcctccaatgatatagtgccacgtcagcgaaccttactcacccaaaaataccttattcaaggttcgcaccttggttaattagacaatttttttttttttttttgcttctttccattagaattctcttaaaaaacttgtaaggtccctgcaatggacatgctctaaggcccataagctcgcattaaccttttagagtctagtacagaacacaacaacatgtgtcgttttatagttcaacttctctcccataaatccagctgaaggaaacagaaggttttgactttgacgcaagtttgac

SEQ ID NO: 4621 - DNA, 1098 bp, Arabidopsis thaliana landsberg
cttcgggcacgttgaggacatgacccttggcagatgcgagcttgtgattaggttccataggagtagaatacgtcttggcatcaagaagaccagcttcggtgataatgtcattagcatatttgcgttgagtaaggaatataccatcaggaccacgagaaacttcaatacccaataagtacttcagcttgccaagatctttcatgtgaaagcacttatgcatatacgtcttaaaacgttctatctccgataagtcattaccagccacaacaaaatcatcgacgtagacaagaacatgtagaattataccattttgaagaaaggaaaagggcgaataatcaggataactttgcttgaatccaaatgcgcgtagggtcttagcaagtttctcaaaaccagcaacgaggagcctgtcaaagcttatcgagtgatttttgaagccgacaaaccttagtagaatcgttagagtgaaaccaagaggtagtttcatataaacctcttcgtctagatcaccgtgaagaaacgcgttatgaacatccatttgatggacttcccattttttagcagcatcaacaactaaaagaaagcgtaccgttgtcatcttagcaacatgtgctaaagtctcagtaaaatcggagccttaaacttgacaattctcgagagcaacgagacggaccttatgatgttccagcgtatcatcggaattgtatttgagtttatagacccacttgctgtcagtggctttctttcttggaggcaatgtagtgatatcccaagtgtgattttcttcaagagctgtgatttctaaccccatagaatcacaccattctttaatttgagaagcctgatggtagcttgttggttccgtgtcggatgttattgctgccataaaatcttgatgcaactccgaaattttttcgttagaaataaagtcaagtattcttaccacataccgttttagagaagctagaattggcgagagcaggagatgaagcgttgggggggggggtgtgtggtggtgatggtatagtagtagtagttgaagtagtagtaatagaaggagtaatgtagtttttgagaagaaccgatggaaatgtccgg

SEQ ID NO: 4622 - DNA, 610 bp, Arabidopsis thaliana landsberg
caggtttgagagttcagcattgaacaatgtggagaatgtggtgaaaccgagaccaaaggtgaatccttttggtgatgcaaaacctcgggaagtattgctggaggaacaagggaaagattggcgcaagattgattctgaactcgagcatcgcagggttgacaggtccttattcatttggattttctttcttttctctgagcaatgtgaatttccgtcaattctatgttgctgccatgggttgaatgttaattatgtctcaaataatccgctgttcaacatactgaatcagaaaagtttgatcttttaagtgatatgaactggtgaaccattagaggatagtaaattatattcaaagtaatagctttaggtaattttgccacttcggcttattatttcaaattcaaaatggaaactaattgaatgatttatctacttaagttttagtgtattcgtggttttcttttgatgacatgttgaatgaatgtcttcttaagcatctcggcatcagacttttatctgaaagttgcttcattaccaaatatatgcattgcccatttctttggcagattgattgatctttgttctctcaactgtgctctgtttggactta

SEQ ID NO: 4623 - DNA, 2273 bp, Arabidopsis thaliana landsberg
tggttttgaactttcgaaacttttttgttacctgagatttattagttagccctcatctaagattattccggtttgattatactttaaaaccggttagattcaattaaattattttaaaaaaaattcataacgttacgagtttttggcgggaaaattacaggtttacgcttttggcgggaaaatcatgggtttacgtttttggcggaaaaatcacgggtttatgttttttggtggaaaaatcacgagtttactttttttcaattacattgcttgtatatttaagaaatttggaaaatattgattttattaaattggtttagatgctttggttaagcttaaattagcattggtttaaagattttacttggtttaattcaattttataaaacttgatgggttaattgggtaaaccattgaaaccattaaccattacaaccaactcatttgactcatcaaaccaattgacccaataactcatttgacccatcaactcatttgagtcaaaatttttaactcattagggttcatgggttgagttgagttgagttgacccatgaattttgacccattttgacacccctagttacgacatgcttttattagtgtctgcagatttttataaaatattgtcatttgtttttcactattttaataaaattagattaaaggttaatatgtcttattacacgagatttgttagtctagttctacactttgattgagagtcatttgagtcattcttattaagttatgagtcaatctggtaaaatttcagttaaaccaaacactatatattttctaaattatgaactatgacatctcatgctgcattatttgcccactatatatctagcttgtcgataatataattatatgaatttaaattgttaagatacaattgtttactgaaccatactggctggtacatacaatcaaaaaaataatcaaaaaaatagcaactagtttgacaacccttattagctaatagatgtgttgtctattttacaattcctcttggtgaagggaaactcaatattttgaatttttttagaccgtaatgaatatcttgatgaattccactatatattttctaaattatgaactataacatctcaacttcatcattacttgtccaccactaccttttccaacataaaatagcactactagattattgaaaatattttttttatatagtattattcaactccgagattcctaaccgattaaccaattgtcaaacaaaaaagttgtaaacaatattgtgaaaaaataatttatttaataaatatactcccacttgaaaataataattgccacttaaaaaatgtagatgagtcacttggaaaacaaaatgttgattttattcaactataaacaaaatacaaagaaaaatctattaaatcaatcaagtaatttaatacttgctctatttctagataattaatttgttagaattatatgttatgttatctaatttaatattgatatgttatctaacggcgttctctaagggttattttttgtcctactcacatcgtttgatttctcttcgccggagtgtttttcctactatcggaatccgattctctcaaagacttccgatggtggttactctctgcttatccgtttctatggcagttatcgtatcccatccctttcggagggtaactacccatacaaattgccatggatccaactttacgttggaacttgttttttgacgaaatggttttgaccattgttacagtggattttcaggtgaagatcatcagtatgaccacttcttaggcacgataaaaccgttgctgtgagcactacgtgatggtgtattcaaatgtcaaaaacgaagtttgtttgaatgaaagtctaaagtgactaccttggaaagcttgaaatttgactaagggtcaaatgtaacactttgaaaattaaaaagagaaacccaaaccgcacacatttgtctaaccatgttgtgtcgggccaaatggtgtcgtgtcgttccggaccggtttggatttgggatttgggaatgggcttataactcaatgattatttgcctaatgatttgatgtagtcaacaaatatctctgataattgattgaattttgtaacaacaaaatcaatgtgcatcaactcaagactttaatgaagattgaattctcacacgttggcatgattctctctttgactaaaaacgttgaaggctttggctttataagcaaagcttcttcatctcatttcactcatcgatcaaagcatcaacaaaatcc

SEQ ID NO: 4624 - DNA, 493 bp, Arabidopsis thaliana landsberg
  unsure (1)..(493): unsure at all n locations
gggcaaggtatgggagataatcccatgaatgttatatttatttcttctcctacgcccgtggagggtctctagacaagtcgttgggatcacaaagtttgaaagttacatagaaggagcaagtggtgtaatcttctcatatagttggactcgtagatttttcgatggtgttttgaattatctcaacgaggtatgatagattaacacattgaatattatctaataacgttaatatttatattgatgaaactgtatggtaaaagtttggtttctttcattgtgtaagatgcagacaagccgtactactagtactacatctccaacactgtcgacccaatccatcacagattttttcaatcccatcaatcctctattgaatgctaccacgagagccggtttgatcctccagaanatcgcgggaccgatctcgagaggtcatttagagcttangaacacannacccgatgataatccttcagtaaggttcaactattat

SEQ ID NO: 4625 - DNA, 4830 bp, Arabidopsis thaliana landsberg
  unsure (1)..(4830): unsure at all n locations
catgtttccgcaattgccttgatgcgtatgcgataacactccccttttgcatcagtacgcatcctagtcccactatgaatgcgtccgtataaacggtatagggctcaccttcctccggtaagaccaataccggtgcattagtcaacatggcctttaactccaggaagcttttctcgcactcatccgaccagttgaatgcggtgtctttttcggtcagtcgagtcaagggttgggccatgctcgcaaaactcattacgaaccttcggtaataccccgctagtccgagaaaactcctaatctcggtggcattccttggtcgtggccactcctttatcgaccgtattttctccggatcaaccgatactccttggtccgagataacatgaccaagaaaaccaacgctcctttgccaaaatgagcatttacttaacttcgcaaatagctcatgttcccttagccgttccagcaccgcccttagatgttcttggtgagcttcccaatatttcgagtaaacaaggatatcgtcaatgaagatgataacaaactcgtctaagaaatcccggaataccccattcatcattttcatgaaggctgctggtgcattggtcaatccgaatggcatgaccacaaactcaaagtggccgaaccttgtccggaaagccgttttcctcacgtccgttggctctatgggaatttggtgatatcctgaggccaagtcgatttttgaaaaccactatgcacctccaagttgatccatcaactcatctatccggggtaaaggatatttgtttttcactgtaactttattcaatccccgatagtcgatgcatagcctaaagctaccatctttctttttcacaaatagaaccggcgcaccccatggtgagctactcggcctgatgaatcctttatccaacaactcctccaactgtttctttagctccgccatttccgccggtgccatccggtacggagctttagatatgggggttgtcccgggctcgagttctatcgtgaacgggtgtgaccggtccggtggtacaccactaacggcagcaaacacgtccgagaactcgttgacgatcggaatgtctttcaactccgcactcgcccccacttccttggttgtgatcgtggctaaatatgcctcacaacctttcccgagcatcctttcagcctggattgccgagattaccaagcttcccgaggttgttcttattccttgaaattttaacataccctcgtccctctcgaattgtatccgtccttggtgataatctatgtgagccttgtacttccccaaccagtccatccctaagataacatcatgtttctttagtggaacaatgattaggtccgcgggcatattgataccggtcactacaaccgagatgccccgaacaagtccggtcggatacattgcctgtccgccggccgctcgtaccgttccataatcggtgtttggttctttcctgaacccacctatttcaaccaattctggactaacaaaacaatgtgtagccccagaatcaaatagagtgtgcgttactacgtcacctactctcaaggtccctacacattcccttagaatgctgagtacctcccctttcccatatgcatgatgcaatgcaaatgcagttattgaaataatgaatagggagttgtgggaacgtaccagtgatcgccctgaagtttccggcatcgttagcttcctccgacaactcataaactcgcggtgccacggcttgccgctttgggggaggcggcagtccgtttcccccgcgattgtccctttgtccggcctgcttctccgcagtcaacttagggcactctcgctttagatgtccagtctttcctcaatagaaacaagtctttgtctcttcaccgagaaccttggactgtcctggttccattctcgggcaactttggatcgcatggtccttgcttccacaccggccacatgcacctatggccttccagcaagttccgctgtggctcttaccacaggtcatgcattccccggtcttagcatcggacttggtgttatccaccttgtcaaatttccttttcttatccgcgggtttggtggattgattgttccggatcggtgctttctcccggttcaagtacctctcctcctcgatcccttcctcaatcattgctgccctttcaaccaattcggaaaccgagttgaatgtccggaccaaacaatggttgcggatctctatccttagtccacggataaatcggcgcacttgaacttgttcctcctcaagttcacgtcccacataacgccttaggcggttaaattcctcatcatattcacgcaccgtgcgattcccttgaactaggtcgaggtacgcacattcaagcctatcccaagcctacggtggaaagtacttcttgttaaactcgtcttcaaaatccgcaaaggatcggacctcgtcccctctgcgtttctcgacggttaaccaccagttatgggcgtctccttcaaggaagtggaccgcaatgtccctttggtaatcctcagggcagcgggtagacgtgaagttcctcttgagtctactcctccactcatcggccacaatcgggtccgtactgcccatgaagtgtctcgtgcccagccatgagacatgttcgagaagacttagatagtctcccctttttcgcccatgattcggttgcggattcacttccacaacttccgagtcatcgtccttttagttatccactctttggaccaccggatctgctacaatggccttggttaatgtggctagttgcgccatcattcctttcatcaaatcccactgttcttgggctgttggagtattgttccggttatccgtgctgtcccttgcaccgctactctccggtgcttcctcatttatggacttcttcccggcctcgggtccggccaagtctatcccatcgagcatcgtcccgactctcgttttctcgttgatcatcgtttcctcctcaaccaaaatctcctcgacaatgcccttgtccttcttactctttcccgttttgctactcttacccatctgcgaaacctccaaagttaatccacataactcctagtaaaatcgcaaaagagtaaagagcaactaccgcgagattctcaagccgactagtggtgataccccttaacccagcacctagtcctagaaccaagcatgctccgataccaacttgaaaggccccgatccggactgcctaaagtccggacgagttctctcgacccaagccactaagtgactcggccctaaccgtttatgaggttctttcctagtctcatccgtttcatatgattccgtgattcaatatatgagacgaatagagtaaacaaacaatcggatactttattgattaagcaaaggattcgatacaacctatgagtttgcatataagctattacaagtcatataatcgatccctagactatccgaactatcaccacccatcatcccggccttgagtctctcgcacctaagccaagtccttcccacgatcaccattcgttcctgaaagtcatagagccataagtaatctcatttacttaatcatatgcaagtccatgcaatgctctatatgccatacactactcggatccgtggagagaattcagagaggggaagatcgcgcatcagtccggccgattctcggcaggtcagttaagacccgccggtcctccaccgagccgcgtccccgcctcagccgatccctacccggaccgagtcttgtgtaggatgcacatgacccggatactacccagccctctagtcgatcctttcaaggatccgactactaactcacatcctagaacccttagactcaaagtctaggatcccttaccttccttctcgaggttaggtcgatccgaccctccttctttattgccggccacagcccggcgaccgaatcctaagactatttattctcccaagagggagagagttttaatggtgagttttcttgtgttttcggtgtgttgtggtgagtggaatggtcctgggcgcccttccttacatagggggcgaatggatgcttcccaaatcaacacatccgttccttgcacctttccgaagagttgcacctttccgaagagttgcgcccttccgaagagttgcacctttccgaagagttgtatctcttcgcccataaccgcccagttcgtccgtcactcgtccagctacctcgagctcgtccgtcactcgtccagctacctcgagctcaaccgtcactcgtccagctgccttgagctcgtccatcactcgtccagctacctcgagctcaaccgtcactcgtccagctgcccgagctggactgtcactcgacctgagtaactgtccctccttccagctgagcttgagctttgggcgagctgacccagctgatttctttacgatcctagcttagcccgcatgatttcccctttgtccgagcttatggccagctccttctcacttgtccgagactccacttcttctctcggaccaagtcctagccaacgatcctattgaggatcgcgggcgttacaagaaggcccagtttgaagagtggccctcagagtttgcagacgccgaggcaaaactggtgcaagttacgtccaagctggaagaggcgcnnnnnnnnnnnnnnnnnnnnnnnnnnnnnnnnnnnnnaggcgggcataagtcggttgaagctctcgcggacgagatgggagttaccgatcaatccggttcgcatttgccggctgctgatgtccttccttccgagcctcaagaataaaatttgataattttctttttacttttgtgcctggatggctttatcccttgt

SEQ ID NO: 4626 - DNA, 3033 bp, Arabidopsis thaliana landsberg
aaggtttgcgttaagtgtttttgggtgttttgtttagaaaactatgcacacataagtacattttcttgaaacaatgattctgattttactgaaccattgtcaagaaaggtggttccgtatggccattgcctcctctgtttgcagggctttgaaacgcaatctcgaaagccgcggacttctcatcctcgtctagttcttcctcatccatttcctgatcttcctcttcctccatgttattataattgtgagactcttcaatcttttcatactcacctatcattgattcttgttgttgtagttgctgttgttgttgaatcagctctctcatcacaaggtcttctggcttcaattccaacaaatcatatttcagttatcaaagaacattaaaccaatcacattttgacaaggaaaagcaaagtttgtaccttttctgttccttgtggactttcctctataggctcttcttcctcagttgaagctgacccatgagtttgttgaacattaacaagtccttcttgtggcggtttcatcgcagtgaccggactctgtttttggtcttgaggtagaccagaagtgctagaaccaccgccactaccgagtactttgttgcggtaaagaagatcgaggcggtgaaagtaagggcaagtcttggaatcttcgggacgtttcttgttgctctctttgactttcttgaagtatttgtttatgttttcccatttctctttgcatctctttgagttcctgttgaatcctaaccttctcattcccgctgatatctcttcccacaatggtccttttggtccgttttcttgatatttcgaatcaagattcgtcctcagctttatcaatgcttctatctccactttcggccaccgcgacgagctcgctgaagctgcaggagtcatattctgatcaccaccattgtccgttttcgttgtgtctaacgtcgacacaaccgcttgaattggctgcggaagcggagcaggaggttgcggtggaggagaccgttgaggcggttgctgctgattgttgttattaagctgcattgatggtcgaacttgttgcggctgaggctgcggttgtggctgattcggttgtttctctgacagtttttgaagaaaggccataacagcagcgtcttttgcagcggacatagagcgttcttgagctaagatctcgtgctcgcggttgattctggcaatctcttgaactctccaagactcttctctaaccaatctctcgtgttctcgcttttcaacagcttccaagaatttgcgttgaagctcttcctgtttatcaactacttgtttcatcaaccgctcgaaaaacaccttccatttcctcttccttttcttccttgtagtcgcagttccaccacccatctccatgtcagaagaagtcgaataagaagacgaagacgatgtagaattatccgatagaaaatcaccggagatgtttggaaacgaaggtacattaatctgctgagtatacggaggaattgatgaagaaggaagcgtcggcataactgtcgttaccggaggaggagttgaaaatatggagctgttgttgttgttgttgttgttgttgttgttttgctgtggtcgaagaggcgtttgttgttgatgatggtggagtgaggttgtagattgagactcgagagcttctaattgatcaaagaagcgataagttttgccttcggattttccggtacgaccttctttggttcgtttgtggtatttgtaaacgttctcgaatttctctttgcatttctttgcgtttcttatgtaaccatgctccgccattttcctatcagaaccaaagaaaaaaaaaagattcacaaattcatcaaaaaattcatgaagtaaatagactaattttgttatggaaaaaaagaaaaaggataaatatggttgagaagtggatcaatcagcatgagtttgtgacaaaagagtcttgctttctcaatctcatgaatataacatgacccaacttatattatctaactgttaaataaagtttaaatttttaatgaaacccacttcaagaactgtccgaatctgaatctcactgaactatacaaaccaaaaagacaactcttacaaattcggcgaaattcaagcaaatcccaaaagacaaaattgaaccaaatctcagacaattaacacagatctttaaactaacgttcaatttttttttaaaaaacaagtttcataatcattcccaattagaaaacaaacaattcagagaagaaaaaaagagagagtggaaaaagaagtataccaaaaaaaggaaaagggaataaagaggaaagggggaagaaaacgcgaacctagaaacctcttcccataagggacctttaacgctagcgtctcgaaacgctattcccatgtcagatcgtattttcaacaacgctagcgtttcctgccgcggccaacgatttcctccgaacccacggtcgtgcatctcttccgacacctcaacacgctgtgccgctgcttctgttgccgctgaatcgttgttgtttgattgtggcggcgctgtagcggttgcgacggttgtagccgccgctgtagtggtcggagtaccaccacccagttgcatcatcgtttaataaagttttggtttttttaatctgttcctctgtttttcttttttttctactctctctgtctttgacggagaagaagttacagaaatgaaaaatctaaaagagaaaaaattataatttagagaagaaaaaaaaaatgggagagataaagagagagagagaaagagagagtttacatgaggaagaagagtgaaatctctgggcgcagggttttatggtgttagagagttttgtaaatacctaagttaattactttactttatttcatatttgtctggtgatgagatctgcttgtcaatctcaaggagccattctaacatttatatatttctttcgatttatttcttgtttacctatttgcttttcttcttattgatactctgtcctctggttgagccagaatggaatcttctcaagattctctc

SEQ ID NO: 4627 - DNA, 2317 bp, Arabidopsis thaliana landsberg
gtaaagttagccttttttgacataaaaagaaagcatttttatttgactatgtaattgttacattagttatttgaccaggtccagaagaagagatatatggtgccactatcaaacttgaaccagccttcatgtcaagctcttctcagtaaatcagaggaagtgtttgggtacgatcatccgatatgtggcttaacgatcccttgtcctgaagatgccttcatctctgtaacttctgcgctacagggaagatgatccggaaagaagatagatcaaacattatttagctcgagttaggtcaaccttttccctcgaggaaagagttgttcaagaggttacaatattcaaatgtgactgtcacgttatgtgtgagacacaatggtgttaatgctaatcgcagaaagtttttcaacgaaaaaaagcttcatcatgacttggattttgggagaatgcgtaatgcccaattggcgtcacatttacgcagatggatactacataatttagaaagtagcgcgaccaataacttctaaacacacagataaaagtctcataaaacaatcttaacttcaaacaacaaccagggtttcacaacaagcatacggttttcaagataacagaaaataagtctgttaaacattcttaaaataagaccaacatagagaggttccacaactagcagataagatctcagctcttgtttagttgacagataagcgtgggatacagaagtcaacaagcagacctgctgtctctttcacctgagactcctcaccaccaccaagctggacaaacatacggctcacaagcactttgacaaatgaagtcttcttcttgtaacagatcttcacagtagcaacagtttttccctcggacttatccactgcaactatgattacatccctaagtccaacatagcgtgattccttactagactggctagacaggccctcgtaaaatccctaccacacaaacaaaaaagttgaacaagattagatcaaaactttgtcattgatctctgaaaattcgaaatttatctaacaacacattacctctccaacattatcaagctctggactgaagacatggagtcttgctcccaccggttgtctaatcaacagcttaaacgcttcatccaaactcttagtctcaatcactttttctttcatgggcacgcgaggaatctgacaggcaaatggtggagccttgaacggacatcccacatgtgcccactgctcacttctcggtagccctttcttgaaagcacattcaaggcagactttgacagtgagtggttgctccctttctccctgcacatcttacctccttattccagacattttccaccatatactgatgcaagtgctcgatagtgaactgagagcttggttcatccatttctccctggtcgtcttccttcccagcattatccaccaaatactgagctgagtactcagtatacacagtgtcgagtttgaggataagccgtgcagagctaatcagattcactgctaccatagctgcatgttgagacgcatctgcaagacaaaaaaaaaatgaaaatgttgtagtcaattcatatgactctttcaaaggattagactatattaaaaagggagtaaactactatcagctaaaatcaatcacagtatctcttaacgatgcgaataaagtaatgttctctagaacaagatttgattcatttaccgtaatcttcttgctcactacttgcttttacgcaatctggatgacagaggccacgcgtctttgccatagattgcatgaatcgctgaatcatattcatcttcgattacttatccctggtttcaagtagaatccagcagaagaacacattcagaaatccagtagaatcaagcagataaggcaaaaggaaaaacaaaaacaagacctaactagcgaaaaccataaacatggtttcaagttttgacataaacacaaccatttctagttgcagaggaaaaatcgtcgaacaagaagctttagagtaaaccaaagtaacaatgatagcttccattaacaaagaacaactctaacgttaaaaaggattcaaatcattcatccaaaaaaaaaagttcaaaccctaaagtttatctctgttcactaatagcactgagaaaggccaagtcacggagtagaatcggtaacaaatccaaaacaagctaaaagaatccaacagagagagaaaattgagagaaattaccggagacacagagagacgagaatcagaaggagaagacattcgcaatcgccgtcgcgtcgagagaaactcagagaatgttcgcgaaacaaactctcacagtcg

SEQ ID NO: 4628 - DNA, 708 bp, Arabidopsis thaliana landsberg
ttacaaatgacatcattttttgggcttcaatatgctcctgcccttttaaaatagtaaaatactaatcctcacaattggtggcacattcaacagatagattctaaatatatctttagaaagcagtagcgatcaacttcttaaaacacagataaaagtctcataaaacaaatcttaatttcagaccacaaactgagttccacaataagcatacggttttcaagatacttaacttcttaaacataaaatataagtctgataaaacattcttaatataggaacgacaaactagcataaacttctccagatactaaccaagttctcagctcacttggttagttgatagaaaaacgtgggatacagaagtcaacaaggagacatgctggctctgtgacctgagacttgtcgtcaccattaagcgggagaatcatacttctcgtagacactttgacaaatgaagtcttcttcttgtagcatatctgcacagtaaaaacagtttctcccttgatcttctccgcttcaaccatgagcacatctctaagtccaacatatcgtgtttcattacctgacaggacatcgtaaattccctaccacacacacaaaaaaaatcaacaagattagatcaaaaaaatttcattaatctctgaaaattttgaaatttaacaaacatcactttacctctccaacaagatcaaactctggactgaacaa

SEQ ID NO: 4629 - DNA, 448 bp, Arabidopsis thaliana landsberg
ttatataacattataaaccattaatataattttactttcattttaaatttctaaactaattggctgtgggcaccatcataaaagatgatgggataattattttttgtttgtttaatatatatatctttaatttaattaaaatttagattttacgattaattaaaaaaataccatcctagactactcaccgtttgaccacatcatttttagatatttactcaccgtttgaccacaatctttttgttgcaattggtattatgagatcctaatttatccacttcatagagtgaaaacgtttttaaagaatgctccgttttcgtggtcggacagtgaataaacaaaaaatatgagttttgctttcttttctaaaggatttttattaattccaataaataacaattagtcatttttattaaataaacgaaaattaattgttccgtcattttta

SEQ ID NO: 4630 - DNA, 620 bp, Arabidopsis thaliana landsberg
agggatgaacactcaaggctcccccatttgcttgtcacataccccgcgtgcccatgaaaggagaagtgattgagactaagagtttggatgaagcgtttaagctgttgattaaacaaccggtgggtgcaagactccatgtgttcagtccagaccttgataatgttggagaggtaaagtgttgtgagataaatttcgaaattttcaaagatcaatgacaaagttttgatctaatcttattcaaccttttttttttgtgtggtagggagtttacgagggcctgtctagcctgtctagtaaggaatcacgctatgttggacttagggatgtcatcatagttgcagtgaataagtccgagggaaaaactgttgctactgtgaagatatgttacaagaagaagacttcatttgtcaaagtgtgtttgagccgtatgtttgtccagcttggtggtggcgaggagtctcaggtgaaagagccaacaggtctgcttgttgacttctgtatcccacgcttatctatcaactaaacaagagctgagatcttggaaagtatctcctagttgtggaacctctctatgttggtctcattttaagaaagttttatcagacttaatttctgtttat

SEQ ID NO: 4631 - DNA, 964 bp, Arabidopsis thaliana landsberg
ggttgagattgtcggatatatacgtacgttgacaaagaaaaaataatgattgtaaattaaactttaatgatacaaactatagtaagcatcaatatgtaaaccacatgcagcacaacaaaagacaagaaaagaacgacaatgtccgtttgtaataattaatgaatcgcacatggaattaacagaatgattagacagcatacgccgtaggagggtaatgttgagctccagcattgtaaccttgattggcttgtggtgcagccgggtaagcggttggcattgtccggccaccgccagctttagatatcccttgattttgacccatgtagaagcatcctacacaaccaccaatggctaggaacaccatgaaaatgaacaatggtagcgagaaatacacaatgaacatcgcttaaaatcttagagattaactaagcagatgttaaaccgataaaaactggtaagcagaggagaaggagatgtagagggaatgaagaagcacagaagagagtttcatggatttataagggaatgttcttgttgttactacaaggtatattgacttttaagaacatgcaaagaaactaaaatattaatgattggcaagtgttctatatttatatgcaagtacagagtaaatgaatttgtatatcaaaagtcagatcatcacatgtaaatttaaacatgtatccaaaggaattgaattatttttatttttgaattaatttgttttataaatactgttttgtcgaatttagtgactaatatcttgaaagataattagtctaatattatgttcatgtttgactgttgaattccttgttttatattttccattaatccacttgcgaactacttaggacatcactaagtacatgattctcaatccaaatgacacatacctcattaacaacaacaaagcataaaagaatctattaattacacattactgagtattatttatgtgtaa

SEQ ID NO: 4632 - DNA, 950 bp, Arabidopsis thaliana landsberg
agttttggggtgatttcaaaaactttatatccgctatatttggatggcactgcaataaaaacacttcctcaagacatggtaaagctaacaagcctcgtcaaattatacatgaaagactgcgaaatgctcgttaagcttcccgaagaatttgacaagctgaaagttctgcaagaactagtatgctctggttgtaaaagactcagtagtctcccagatgtgatgaagaacatgcaatgcttgcagattttactgcttgatggaacagcaataacaaagattcctcatatatcctcacttgagcgtctatgcttaagcagaaacgagaagatcagttgtctttctaatgatattcgtctgctttcgcaactgaaatggctggacttgaagtactgtacgaaacttgtgtctattccagagcttccaacaaatcttcagtgcttagatgcaaacggatgtgaatcattaacaacagttgcgaatccactggctactcatttgccaacggagcagattcattccacattcattttcacaaactgcgacaaattagaccgtactgcaaaggaggtaatcacagcctatgctcaaaggaaatgtcaaatgctatcagatgcactaaaacgctggaatgaggtgatctctctcactatctcctcattcatttatcgctctcaagtaaccatatgaacctttaacttttgtatgactttttctgcagggttttgttccagaggctttgttcagcacttgcttccctgggtgtgaagtaccttcatggttttgtcatgaagcagttggatccgtcttaaagctcaacctgctcccacattggaacgaaaataggtttgtcggaatagctttatgtgctgttgtgggatccttaccaaatggccaagaacaaaccaactcttgttcagtgacatgcacgtttaacatagcaagtaaagatt

SEQ ID NO: 4633 - DNA, 580 bp, Arabidopsis thaliana landsberg
  unsure (1)..(580): unsure at all n locations
tttcctgctttatcatgttttcaggaagtattctaagagggacaatcaccgtgttctccaccaagctcttcattgagaatgtctgaatgccaagaaaacaccacagatgtattgggaaagtcaagtcctgtatctgtgcttgagcctttctttacagatgatgacactagtccaaacagctccaggttctcttcaggtgtgcctagaaagaatttgcaacaccatttcagcattctagtaaaacttttgttcaaatcttagtctctgaccttcttcattgcctcatatagccgaaatgcggatgcaaccactgtgcataagattcgacgaacctgattttccaggaccggagaaagacaatgatgtcaaaacaagaatggacgacaaggaactggcacttgaatacattcaagccgtggtgaaatcatcagagttgaactgggaagagcttttggcgagatctttttattcggagaagattcttgagcaggctctaatggatgacatagatttctgttcgacanatctctgcagcgataagaaactcctttttgactgtatcaatgaagttcttatggag

SEQ ID NO: 4634 - DNA, 2412 bp, Arabidopsis thaliana landsberg
ccctttgtctcgctggacacggacctcttcgatcactccagcaccaagggtatagaatagacggtgtagatcaagctgagttacctgcaagattgacaactgtcacgaggcgccaaaaagaaaaaccacaggagctgttgcagtgtttataaagaacaattcgttaagttgacaacttacttctggagagagatttcctacatagacagttgtaaattgaggattgttttcaggggcatcttcatttgacagctctctaccatcctctgcaaaatcaagtattatatcaatgtaatctccatgaaaatctgctttgaggaagaaaataaaaattttagaagttgcacagtaaacaaaagaaaacctgaagatccgttagtaagttctacaacactttttccatcagagctatgtttgtcctcgccaaaagtagcaccttttgtcgcccagttgcatctgatctgtctgctacttacccatttacctgagaatacacaaaacaagccaaggttctagtaatgggaaaccaagtgctaggaattgagataaatagctcaattatagagataaatcataatcggcacaagcaacatgtaacttcaacagttgttcaccaaccaataagctccaaaaacacaattcctgaccaaatttcacctttctagatacaacaaatattacagagctaagtgcatcatacaatatcagtatgtagaaaccaaagttcacaataaggaaccttaaagctctaaaccacaagctggtatatgataattcttaccattcatctcatttatggcagtttgagcatcctgcaaattacagaaacatttaaaaatcaatgtaaacaatgaatggagctaaaaaaaaagtcacccatgattaaaaggatataaaacctgctgattacggaaggaaacaaaaccaaagcctcttgagcgtccagttttctggtcccacattactcttgcgtccctataataagaactatagatattaaatcaaagattctgatagactgtttaaacaaataagcttaatcattaaagaaaatcttgtaacacatagtgatatatgcgtacaccgtagttgtgtaacaagattttcatttttgtaaccagctagtaactaaaatcagaagaccaagcacaagaacttacgagcagctgttaaaagcagaaaagctatcaaacaatgctgcatcagtaacctctggactaagatctccaacaaaaatgttgaaatgacctgcatttcatgaaaccaaaaccattcagtaccatgcctcactcaaagaacaaaaagaaagtccttgacaatcaatccgtgctcataagaacttacttgatgtatcttccctttgaccagttgcatacgcccaattaactttcataggctgtccaaatctgtgaaatccaatattataatctaagagaacacatgaataaattgactaatcaaagcatgaagtatcaatgttagattcttacatatgccttccgttaagagtcattatagccatactagcacatcttcgatcaaagtagtgaacaaatccatatgatgactgcaaaagtgtaaaacattcatgtctagaagttagctttcaaagaacactaccgaaaagcttcattcgaataaaaaacagaagggcgggttccaaaactctaccttatcctttctgatgagtttacagctttcaataggaccagtacttgcaaaaatctcttgaagaagaatctctgtgacctgcgtatgaatgtttccagcatacctgcaaaacataaaagaacaattacaaattgaaactctgcattataccaaaggcgaaagaaagaaagaaaaaccaattgaaataaaaaaactcacacactacggcaagtagttggatcaaaaccaggaggaaggtttccacttggtaaaggctccatctgcaacaaaaatgcaaaaccataaacaaaacattaagagatgattgcagaaacaagtaccaaaaccactccttttctacacgaacatctaccattaccaccaaaattaaacacaaaatcagcagagaaaccgaattactaacaaaaaaacacaagcccacaatcaaaagctcaaaacttaacataataattagccagagaaagagacagagagagattcataagattaggtaacagagctcagtgaattaaaacccacaatcggaattacagaacaagccctaatttggaatcaaagcaggttacatagaaaatgaaaagagattagatcaagaaagaaaaaaaaaacctgaggaggagccataacaccaggatgataaagagaaggatgttgttgcatcatagcttgttgaatcatagcttgttgatgttgctgttgttgttgttgttgttgctggtgctgcttaataagcctttgatt

SEQ ID NO: 4635 - DNA, 4972 bp, Arabidopsis thaliana landsberg
ctctggcctaccctttggcttacccttcggcttatcatcaagcttatcatccggcttaccatccagcttatctttcaacttatcatctagcttattcgccggcttttcaatcacttttccttcttgtccatgttcatactctaaacctcggttaatataattccaagacacatcctccttacatgccagagcctttccattgcggatctcaaggcaacagctaaggcagatatcaaaactacaggacttgcaattcctatggagatcatagatagaagtcttgcagatatcactgtaagcccaaaaagttagaacaacaacgaagcatgttatcaaacagcatgaagacataagaacttgtcattttaactgaaacaaaaatatcagggtaatataccagtatagtctttcatcagggaaagctttagcgtcttggggcctcacctcttcaaacttcattcctgtaaattaaacaacattaagatatcttcaaattcctggaactaatgagcttccagtttcccacttagaaaactgaacccactcactttgagatttaatggggaattaatgcaggtatgtccaataataacgaatatccaatcattactttccagcataaataaaagcaaagaaagtaccgtatattttggcctcaacttccttctcagcaacttgttcatcatttattcctttcagatgtgggagaaggctctgcagaataaacttcgaagcttgaaacttttcttcctcgctgactatgaggttcgaatttatcccctacatagcatttgagtaatcattatggtaaggagcttaagtatatcgaaaacaaataataataagcaagcaagatatggtagatacgagaaaattttactttcaatttagtatctagacgcaagcatgctctgcaattgcaagtactagagcagaacatgcatttcttggcaacatcttcttttgctataagggggtacctgcaagaagtaaatagaccaatgtttcaggcttctggacaataaaatgaaatcagtaacaagaaacgaaattaaagttcaaggtaagaagaagatcataccaagtgtccaagcatggatgacaataacgcttactattgcaggtctgacaccgttcaacaatcctatcgctcttttgacattgatggcacatattgtcctatataatatatcccaaaattaataaattggtcgtcatgtaaggtatgaaaagagtacaaattttacagagaaatcactaaccggtctgtaaccaatgattctcgggtctactgtagtctttggcttcttgcccggcttagttggaatctcaccatcgatttctcccttccttttcccaatcctaattccctttacttccttgggcatgcttccagaagcttctcctacttcaataatggagtctttgcgattcagaatcttagtcgcggctcttttttccttcaccagaccagtgactcggtttgcttcatcaatttcgttcttttgcatctcctcgtctttcttcggtgtctttttcggagccctatttccaccccttttgccctttcgcttgggtcctccatcttcttcgtcgtcagtcggaggatctacgtaattcgccagcttcgtagaaaccctccgatgcctacggagaccaccgcgtccgttctcttcttcaaccctaacaacaccttcttcctccacagaatccatttttcgaaaatcaaaattctcaatcgtcctcggcgaaactcttgcagcccccaatcagctacgaaagaaaaccctagacacgggatttaaggctgattttttattttattttggggaaactgaatggttttctcagatagtaaaagttttggtttaatttggtcaaatctttggatttatttcccgctcttttcttttctttccaaattcttttttaaatcatgttttttttttgctaatacagggagatcacagaaaccagattgtatatgaagatgttaaaacttaaacttgattattttttatttagcaaataagattatatttatttacccgtttatctccatgagatatgatacctaattacctatgatacattggatcaaacggttgcaagttgctgatatcactgcaattggcatcatcaatgtgtaatgtgttaagaaattaaagtcaaattagcattagacaacacacattagtataaactaaaagcttattgtttcattacgttagaaaactgcaatatgattgcgaaagtacgtattgcaagtcaagcatataacatttgttaatacagatggatgacagattagtagtcaagttaatctttttttttattgagaaggaagttagagggaaacatgtactctagagaagaccaagacttttaacgcatctgttctattcattgttatgcacaactgaaaaatgagcaaacaaaacttattaatcatcataattgacatatcgactcaaaaattattaagtcttttgccatacatgtctaaaactaccaggcaacggtgtagtaaacaaatattatttgtgttgtttaccattatttaatcaatttattttgacccagtcaaataactatttcatctaattttttgactcaatcaaataaagatttttgttaggctttttaaaattaaaaaattggtaataagctcgtacgaatcggcaactagaaccaataaaacacgtaaggaccgaagatatgaacctgacaacgatattcaaactatcggattccgttgtgtgagacaacgactcatggaacaaatgaatatataaaatcgatccttatttatatttcctctaatttgtgatcgaagaagacacaaaaaagttcggagcaaactcccatcaaacaaatcacgcggattctcagaagacaataacatgaaggtatgtctcctgtgtactcaacaacaagtaataacttcgattctcttgtgaaagagagagacttctctttgtgatgttaaggagttctcttattgtactcagcaaaagatcctgataagaattgctatgactgatgacacaactcgagcaaaggcaatgaaaactgcggttcagtttaaaggtaacaatgatacaaacactagagaacttgatgattgtaattcttgttgaatctaaagatttatcgcattggtttataggcgtgaacgctgtggaaataaagggagatcacaggaaccagattgaggtgaccggtgttgaagtcgatatgattgctctaatcaacacactcaggaaaaaagttgcatttgcggagcttgttagcgtagctaaagttgaaccacccaaggatggtgacaaaaagccagaagaaaagaaacccgaagagaagaaacccgaagagaagaaacctgaagagaagaaacctgagccatgttgtcaaccatggcaaaaacctgagccatgttatcaaccatggcctcatgatggatatggtgtgccatcttcctatccctacccgtgtgatccctacaatcagatcggggaacccgtttacaatcaagatcccaattgcaggatcatgtgagataggtttcatgtggaagattaacggaggagatagcagtttttctatactaagattgtcaacatgttaatgcaatttgatagtcagatttgtaaaatgaataaaaagtcttgagctatcagtatcacacaaattctctacttgtagatgctcttataacatgtaaagccaaatcttgttatccatggaattccattacaaagtaactccttactagagcatcaatcatactatttctcaatcaaatctttcctttgccagagttgctagttacataactcgtacattctcctaaaaattaaactcacaaaccttcaacatgttccagagcgctgctacatctaacgacctctgccgcgaccacgcccacggccacgtccgcgaccgcgttcaacagctttccctaaagaagaaagaaagagagaacgaataaatggactgataaagaagtcttttagcttatgaagacgaatattacaaacaccaaaaatgaatggagcagtaccagcaacaggcttcttaggtttaactctaggagtgtcttccacaagtaaagtctcgaggttcaagctatcaggaagaatgtagtagcgaatattattacccctcaagctaagatgatcaagtgttactgggtttttccccttcaggctcatcttcactgtcttcaagtgagtgttcatgctcacatcaacacctgcccaaatcatcaagcttaaacttcaataaatatacctttatgactactgactctaactgtgtgtttactcaacctattcatgtgatcacaaggacgcgattagggccaattgaaaataagggaacagatcgcgacttgtataagacctagcaacggagaaatcgagagagaagaaaagatgagaagagctacaaagaaaccggaagctaacaataagaacttaccagagatggttccatggaccacagtcccattcttcagctcgatagacacagtttcattgtttaacttcatcaaaaacctactcgatccaatcaaaaccatataacacaaatcagctcaggctcaatattgggaatggattccatgccaggagctaactaagattaagaacaacatgaattttctaaagaaaagaagaactgagaacgaaacagtacctgacgagcttcatctttggatgcgaagaaagaacaaccaaacaaagaaattgacgaggaaacagcgaaaggtgtgaaaaccctcaaaacccttctttcgctgtgagagacctcacgatggatcgggtacagatccgattcccgatttacatccatcagctaaattacaatattgggcccaaaaatgtagtaaggcccataaagtccaatggtggaccagtacatgttacaaccacaaatctacatacagttggtttagcaaaccggacattgaaca

SEQ ID NO: 4636 - DNA, 3106 bp, Arabidopsis thaliana landsberg
  unsure (1)..(3106): unsure at all n locations
tttaggtgttgctagtttacgttttatataggagtgaagcaaagtgttaaatgctcttggtaaatgttttttcttttcaaaaagactcaaaagattatagagctcttggtacttgcaatgattatacacaagtgaactcaagtgtgtgttgtgtgtctattctctgcatatttgctttgactttcttaagatttcttctattgtaaacattgcagacaaggagttagatgttatcgagatggcggtttatggagacgtgttacgacctggaaaagaatgtcgctgcaaaaccgtagctgagctgcttggtcagtccaagtccaaagatggtaaagccgcatgcgagttaccatcatagaaagtagtaatcaaccatgtctttgtaaagctttgattcatgctcannnnnnnnnnnnnnnnnnnnaatcttttacatatactggaaaccattgtttgtaagagtagtgatgattctatatctctatatacaaatggaaataaaattcagcttacactgatacctaacttttgaagtcaacaatttgtttgtaatatatcgaccacctaattcactattatatagtcgagaaataaaagttactgttcgaatagagattttatggttggtcatggagacatgaaatatcaaaaaacgggaaaggtgcgcaattatgtgtgagctattaaagaaagatgtctgccaaaaagttaaagtcaacataaatttcctttggcttttttttttttaaaattctctctgatatttaaatgtattttttcccatctatatataaaaaaaatatagtagctttcattcattaatacctaaataaaaatttaaaaattggtagttgtatcaatgggtgttcgaatttcggctttgaacaataaatgtagctcccacgtatacacatatcggctggttgaaaaactttatctatggagagagtcacatgatatatggtatccaacaataattcaacaatttaatgtggaatatgtattgattgccgtaaggttcgaaagctcaaatcccaaagaatttatcttactctaaaaaggggctattctatttaaatctcaatatgcattttgataccactacttcggttattattaaacaaagaatttcgaatcgatcccatattatacgaataagaaaactacaacaatgtttgtgattgtatataaagtacacaaatgacaagtgtgaggttaaaaaatgttggaaacaaacaagtcaacaacaacccaccaccgtttttggccgtattagctcactctcacactggtcgccgctagtcaaactctcgttccattgcataattttttaatcctattaatttcgattttctcaacaatgttactcacttaattagaaaaaaaacactactatatcaaattgaactatacaaagaaaaaaagctgtagaaatacttaacacagaaagtaaaagagagtgatcaatcaagtcatcattattcactgtcgatccaaaaaatcttgccgtagatttcgccttaaacatttctatttttgattacacgacatttacttttgatctatctctgtttaatttttgatttcgtcttccgcaattcacgcagaaatcaaaaactctaaaagaaaaaaacaacattctctaaacttttctctctgtatatatctaacgaaaaccgcaacagcaatagtttcatcattcaccggagatccgaatcacaataaccggcgccggtttaagagatagttccggtacacatgtgttgttgacgcggaggagcgaaattctgggaatgggttgtgtcaactcgaagcagactgtttctgtaacgccagcgatcgatcactctggtgttttcagggacaatgtttgttctggttccggtagaattgtggttgaggatcttcctccggtgacggagacgaagcttttgtcgtggtggagcaagagcgggaagaagagtagtagtaaaaagagcggtagtgagttgggtagcgagttcggtgagttgagtgagtctggtcgagcgagttcgaattgtaggagtgagtcggtgagtttccgcctcggtaatttgagcaagtaccttgaagctgagcaggtcgcagctggttggcctgcgtggcttagcaacgtcgctggtgaagctattcatggttgggttccatttcgatccgacgctttcgaaaaactcgaaaaggttcctttgttatatactctctttgtatattatgtaatacttttgaaattgtgttgtctctgaaaatgatttggttttgtttccttgaagattggacaaggcacttatagtagtgtgttccgtgcaagagagactgaaacaggcagcatagtggctttgaagaaagttagatttgacaattttgagccacagagtgttaggttcatggctagagagattttgatacttaggaaactcaatcatcccaacattatcaaactagaaggtattgttacttcaaagctatcttgcagcatacatctcgtgttcgagtatatggagcatgatctcactggtcttctttctagccctgatatcgacttcactactccacaggtcattttgatttttagtgattaaaaacgactttactcttgtaatgcaagattttgtccgggtttttctaatacaatgaatgttgctctggacttgcagattaagtgttatatgaaacaattgttgtctggacttgatcactgtcacgcacgaggtgtgatgcatcgggacattaagggctcaaatcttttggtgaataatgaaggaatattgaaggttgctgattttgggctagctaatttttgcaatgcttctgggaataagcaacctcttacaagtcgagttgtgactttgtggtaccgtccacctgaacttttgctcggggcaacggaatatggagcatctgttgatttgtggagtgttggctgtgtttttgctgaacttctaactggaaaaccggttctgcaagggagaactgaggtaacccacaaactgttgtcttgtaaatatatgtaacatgtagcttcatacctctggatcctgtatattgctctgtttttacttggggaaaaaatataactcagagagct

SEQ ID NO: 4637 - DNA, 2994 bp, Arabidopsis thaliana landsberg
agggtagaccgagctagcgtacttgtgcaatgctttaactcgcatatgtcctaaccctaaccagtaccttttctgggacgatattcatccttcccaaattgcttacatagtcatcagtctcagtcttgttgaacaaattttccacgtactctcttgattttcattttgctttcatatatattaattaatctgtagtcaatctataattatttccctatgggttcacataatctttcgtatttgcttaagctaggttttacatgtatactattatgatattatactactgtatccttgtaagttgtaactctatagcacaatgctcgtaagtccgttttgaaacccaaacgaattatattttaaccttaaggaaatttcttacatcaaaaaagcaatacatgaacaaatcaatgtcgaaaaggtgattccaccgatccatgaacattattcacccaagaaagataaaaaaacacagaatgattcacaattttacaaaaaaattcaattaataagaattttttaatttcttttcatatctaatttaatcaacttgagctttccttgaacaaccgtttaattataaactccacatcttcaacagtatacggaataaacggctctccacgcctccattaatctccggtgactccttcaatcttctgatgaaattcgagtacgccggagatacaattccggcaacagagcttcttaactcctccctcaattgcccatcactaacaacccattgagattgcaccttacacacctcatgaactgtgatttgaacaatcttaggttctctactaacttgggatacggaccatcggtcctaagcaatcccaccacttggttccatgagctccttcggtaattagaatggtattgcctcagtttcgctgcgtgcttcacaatccaatcttctcctaggactaaacctagctcgttatccttagccttatcaagaatatacttgtcattgttcatcatgaacaagaaacacaaagacggatcacgataagttcttttcatgccttccaagttactctccaacaactccaaaacccatatgatttgcacagacaacggtctcgtatctgatccggtttcatttcctgtctggtcaagtatctgctccaacgattgccgcgatttacacgccgcacgcagataattcatcacgtaccgcgtgatcgggtgaatcccaccgccaggaaacgctgttttgggagggtcacgtcggattaaattctccagctccataaatatccctctaatcgcttctcctaaccgtttatgaatcgcgagcgcctcatgccttagcggcgaacaatatcgatcagaaaatagcgtttccatcttaggaataaggtcttgcatcgcttcgtataaatccacaaccttaaacaaacgttcaggtaaacggcttcctaaagcgatcgcgtctgcgaaattcagaagctgtgttgtggttccgcgacaaacttccatgaaagaaagatcggttacagaggaaacaggaagatcagagaaaacgcgatcgcagagaagacgctcgctcgggaagaaaacgtggaatatcagcgttacggctttaatccaacggtcgatttcgtcttcaagatcttgccatggactctcttgcacttcctccatacttagtcctctgagatgtaacctcgacaaactctcctctataaactctcttagtcgactgctgtacactcttgaacactcttttgcaaatccaccagcgaccatgcgcacagcgatcgcgtttagatcgccaataacgctagattgtaacgcctcgatcacgattttgtaatcagtgattggacgagcaacgattacctattcaattgtgaatcacttaaccacaatataaccgatagtaaaccgaattttctaagtctaattccaaaactaatttagtaataaatttacagatgaattaattaccccgtcgcttgtgtcgttgtcttcttcgccggggaactcatcgtccgagtcaaacgagtcaggggctcggtccattacaaatccaaactcttcttgaagcctaaacatcacctgttgaatcagctcatcggcacgggattgacagacggcgacggatttatctccggccatggatctcaagtctccggcaatcgcaagtagctcatcaacagagtcgaggaaggtgcgcgagtcaacgggatcagaccagatcggtcgatcttccacgatgtagctggagatctgtctctctaaagaggtgagggctcggtcaaagttgacgtttgagccgccgcgggatggggtgggtcgaggatctccgccgcggtttccggaagcgccataaccggagagaatctgtaagatatctccggcggcacttggatccttgccgagagctctggcgatgtctctggcggcggcgtaaagattctcgtcaccggcttcagccatatgattggatgggaattaataatgttcggggaaattacggaattggtggaattgggagaataaagacgaaaatccatagacgaagactataatgttgacaaagtcttcggagattaaacgcgggaaccatgtctgacttagttgtgtgcttctgtttgtattttaatggaatctgtaatttcttagtgccacgaccacgactttgtcttcgtttcgatttttctcttttggttctgtctggtttgatgtttacagaacgtgaacgcaatttaacaaccgcgttgtgcgtttggtcatcatggaaattggttatgggccgatgacttcgttacgttgaattttcggcgtccagtacacttgggctttagatggcccaatggacatattattcatttttgggatcgataagtttgataaggttgagaggcccaatttttgtctttgtggttatcttttattttattaaaaacagaaaaaccaaaaattgatagggaaaacctcagccagtagatagataaaagggatttgattactgagcatgca

SEQ ID NO: 4638 - DNA, 1536 bp, Arabidopsis thaliana landsberg
ccgatcttcgattcattgtttcagaaatccccaattactgtctctgtgcgtaaaatctctagagaaaccttaaaattttccgttcagagaaattgtcaacgaaggtaatggcgtctggtcctatagctggtggtggagtttcgaagacgaagcataaatggagtgatagtggcaacaaaagccaaaaacgatccaagcccacggtggcgaattcgaattcgcttgggttggaagataatcatcagatgatgaagataagtttaagctcaatttccaagcttgaagttaggaacttgaagcggaaactacaagctgagcttgaggaagttaggagcttgatcaaacggctcgaaccacaaggtaacaacttcgctcccgtgccgaacaagaagctgaaaacagcaaacggtggtaagaaaggtggagtacatggagctgctgctgataaaggtactgttcagattttgaagagctgcaacaatttgcttaccaagttaatgaagcataagtctggatggattttcaatactccagttgatgtagttacgcttggtttacatgattatcacaatattattaaggagcctatggatttaggaacagtgaagactaggttgagtaagagtttgtataagtcacctttggagtttgctgaggatgtcagacttacttttaacaatgcaatgctgtataatcctgtggggcatgatgtgtatcatatggctgagattttgttgaatctgtttgaagagaaatgggtgcctcttgaaacgcagtatgagttacttattaggaagcaacaaccagtccgtgatatcgatttccatgctcctgtttcgacaaacactcataatgtagaggcgttaccgttacccgctcctacaccttacctgtctcctcctcctcctcctaaagtagttgaaaataggactttggagagagctgaatctatgacaaacccagtgaaacctgcagttttacctgttgtccccgagaagcttgtagaagaggcgtctgcaaacagggacttgacgtttgatgagaagcggcaactaagtgaagacctccaggatttaccttatgacaagctagaggcagttgtgcagattataaagaagagaactccagaactctctcaacaagatgatgagattgagttagatattgatagtcttgatctggaaacactttgggagcttttcagattcgtgactgaatataaggagagcttaagcaagaaaaaggaggaacagggattagactcagaaagagatgctgaatcttttcacaatagtgtgcacgaatcggtgagagcaaatacctaattgttattcacttctcttacttttaccatataactcttactgggctaatgatatcatatttcttcttccgtctttacagaacacgctagtaactggccttgaatcgtcaaaagttactggattaggtgaaattttaattcttaagatagtatcaagctcttctatattggtcgtttagccccactacaataactcttcttttatggttttg

SEQ ID NO: 4639 - DNA, 778 bp, Arabidopsis thaliana landsberg
gagttggtttgaacttcctatgaagattatcatactgcatttcaatggatacccatttatcttcaaacatgttcaacaaaagctcagcaaaacgatacacatcatgcccaatcggattatacaaaatcgcattgttaaaagtaagtctaacatcttcagcgaaatccaatggcgacttatacaaacttttccccaacttagtcttcactgtacccaaatccataggctctttaacaatgttgtgataatcatgcaagccaagtcctttagcatccacagggacattgaatacccatgcactcttatgcttcatcaatttcgtaagcaaactgttacagttcttaaaaatctgaaccgtacctttatcagctccatgcccacttttcttacctcctccattccctgttttcaccttcttgcttctccctacaacaccacttttagccattgacccaccaagattagcttcgggatcgaaccgtttgatcaagctcctaacctcatcaagctcagattttagtttccgcttcaagttcctaacctcaagcttcgaaatcgagctcagacttatcttcaacatgtgatgatcgtcctccgacgcaaacgagttcgaaggagatacaagatgaacagatcgttcctgtctagacactcccattggtttgggtcggttctggcttgagctccacttatgtttcttcgtctttgaagctccaccacctgatatatgttcagaagacattcccctgacaaccaaatttgaggtttctctaggggt

SEQ ID NO: 4640 - DNA, 1796 bp, Arabidopsis thaliana landsberg
gtagtgtatcctcgttttcatgttttcttagcacaagtctatgggttgttgtaaagtgccagctcttattcaggcccaggtagaagtaagtttgttcatgatcgatcatgtattatctttgattatatggctcttcattgtcagcttaatggaaagattacaactttgaacagatggggttggttaatgatgttgagcacaaaagcctttttagacgagatactgattccccacaaagaaaagcagcttccttgatggaacaaggatcactttctgcaagttttcgagaatgctcaactaaaacacctaataacagtgtgctccagagcttcaagattgtgattttatcgaataaacttaatcttttgttgccttttggtcctctggcaatactactccattacttgacagataataaggtgagcagttgtactttttgggtactattcatagcagtttcatttcttcctgttatttcccaagaaatgattattcttgtggctcagggatggatcttcttattgagcttagtaggcatcacaccattagctgaacgtctcggatatgccaccgagtaagctgttgctcgcacttgtaactctataagttacaatgttatcattctatcagcaaggcttatctataagtaaccgtttattttgtgacaggcaattagcttgttacactggttcaactggtatgacttggtttcttctgatcgccattctattgcgggtttactttgttttctcctgatatctttttgacgctgtttacaaatttaacagttggaggtctcctaaacgctacatttggaaacgtgacagagctgatcatatcgattttcgctcttaaaagtggaatgatacgtgttgtacagctgacattgctcggctcgatactttctaacatgttacttgtacttggctgcgccttcttttgtggcgggcttgtattttcccagaaagagcaagtctttgacaaagtaggaatatcatcacttgttctcttctttttttcaatgtaattgtccctgttgttctgtaatttataccatgtttctgagcttatttattctgcaatgcagggtaatgctgttgtgaattcgggattgcttttgatggctgtcatgggactactcttccccgcagttcttcattacacgcacagtgaggttcatgctgggtcatcagagcttgctctctcaagattcaccagttgcataatgctcgttgcctatgctgcttacctctttttccagttaaagagccagccgagctcttatacccctctcaccgaggtttgttgtctttgaccttcggctgactttcgttttttcttacaaaaagccctggacacgatagactaagataattataaatagaacaattgtttcaacatttgttttttttcattttggagttttcaccagtatatccatgaccacaaaatattcgtgccagtttttcggggtctgtcgaatttctgttttataaagccgagtggttgctatctttctcttcaaattggactgatctcagctgtttggtaaacattgttaatttgtaggaagctaaccagaacgaagaaacttcagacgatgatgaagatcgtgagatctccaagtgggaagctattatctggctttcaatcttgacggcttgggtctctcttctttccggctatcttgttgatgccataaaggtgaatagcaacccgctttttcctctatcttagtatttcgaaaaaagatcttaagtgtattaacttggcctgtttattcatttccatatggt

SEQ ID NO: 4641 - DNA, 1958 bp, Arabidopsis thaliana landsberg
  unsure (1)..(1958): unsure at all n locations
cggcttgttgccggattaatgaaaaagatgtttgctgtaacagatggtgtcggcttatgaactttagaacaaaagcctatttaggcaagaagaagatgccacacaaactaaagaagcttctttaatggagcaaggatcactttctacaagtttcccccagcacacgcctaaagcaccaaagaacagcgtacttaatagcataaagatcgtgattttttgtaataaactcaatctactactacctttcggtcctctagccatattggtccactacatgatagatagtaaggtaaattgttactaattctagtagtttcattttcatgtcatgtttaagagttgaatctcaagaaatggtttttgctgtgggtcaggggtgggtgttcttgctgacgttagtaggcattacaccattggctgaacgtctaggatatgccacagagtaagccccgctagcacttgtagcactaacttaccatatttttttattttgtttgggagacttatgcttaagtatttgcttctctggaacaggcaactggcttgttacacgggtccaactggtatggctttgttcttctgaaacgggcaattccttttcctttttttgttctttttttttcttttgtagttttgttataattgttgacgtgttatacatatttcacagttggaggcctcttaaatgctacattcgggaatgtgacagagctgatcatatcaattttcgctttgaaaaatggaatgatacgtgttgttcagctgacgttactaggctcaattctgtctaacatgttacttgtacttggctgcgccttcttttgtggtgggctagtcttttaccaaaaagaccaagtctttgacaaagtagaaattcttatccgcttcatgatattctcgttcttcttcttgctattctctaccgtgtttctgagccctattcttttgcaatccagggaattgctactgtgaattcaggattgcttttgatggctgtcatggggatactcttcccggctgttcttcactacacccatagcgaggttcatgctggatcatcagagctagccctgtcaaggttcagcagttgcataatgcttatagcttatgctgcttacctcttcttccagttaaagagccaatctaattcttatagccctctcgatgaggtttgttatgtgccattaatggttgcctcctttattcaaacattggcttttctttcagtgtttttaatctgtagaaccatatgacaagagctgatatttcttgttttacagcttttcctttttctcgtatataagccaacagacataaaaccaatcggtttgtgtagttctgttcgaccttgacttaccttcttgtttgatatatgctgtaaactataggaatcaaatcagaacgaagaaacttctgccgaagatgaagatcctgagatctccaagtgggaagctatcatttggctttcaatattgtctgctttgttctctcttctttctggctatcttgttgatgccatagaggtaatcaacgattcgttgccatatgatctgtctactgctagagttatttatattgcagtagttcgaatggcaatcaccacaatatcgtaatgttgaatattttttcagggtgcctcagtctcatggaatataccaatagcttttatcagtaccatcttgcttcctatagttgggaacgcagctgaacatgcaggggctatcatgtttgccatgaaagacaagctggtaagcagagtagttcttgagctgtaacaactttaggttcttgattccgatatagccttgtccctgagacacaacttaacattatctcacttctacaggatctgtctttgggagtggctattgngtcctcgatccagatttccatgtttgcggtatgcaccacaatacattgcangaacagtgatatatcatatctggacaagaagattt

SEQ ID NO: 4642 - DNA, 511 bp, Arabidopsis thaliana landsberg
  unsure (1)..(511): unsure at all n locations
caataattgtactgataaaacttttgttagtcaatattttaccttattatattcctaccaaaataaacgtggtccgaaagatgttttctcctttctctttcttttcggagataaaagtcattcaaagtttgcttatagaatattctagactttgttgatgtgaagtgaccttgtaactaattnnnnnnnnnnnnnnnnnnnnnnnnnnnnnnnnnnnnnnnnnnnncttcacagcatctaggatataaacgagatatacttattcctaagttatttctcaactatcatatagaaaggaacgtttgttttaggaaaaaaattcaaaaaaaatctcaactattttttatttggacgtttaatactcaagtgcttttggttagaagataaatacactacgtaattaaactgtgcaatgtaatacccacacaattaaatgttgttatttttatactcacgatctcctaacaaaaataaaatttcaattatacccttaacatctcaataaactatt

SEQ ID NO: 4643 - DNA, 769 bp, Arabidopsis thaliana landsberg
ttggttggggagggaaagccaaaaaggaataaataaaccttcacttgttcgaacaaagacttttagtcagacgatcaagtaaatcaaataatacgtttagcagattcgagtttgtggataccacttgagaatcagatttacatcttcacatctcttccccaacaattcgtgttccttagatcattaattaagacccttttatgcttcacaccagactcttcttccggtttatataccatctaaccaaaacaacacaacagagaaatatgaaaatatcaccagaatgtcttgttgaatatgcaagaaagagaaaaacttctctagcagttccatttcatgaccgtatcatggaacaagcacaagccataaccagaaaatactcagtttatggtattcaaatgaactaaccttggtgaggatcttcgtgtacaaagaaactggcagctactatcaaataacaaagaatcagcatcaatcctttgaagtaattcgatgacccttcctgcgtacataacagagatcatcagttaaaaattttggaattatcttttcattatcgacagtgatttagacttaaggattttagccacctggagaaaaaatgctactactataacagtgatgaacagcatcggcgtctcaaaaagctggaagttaaggtccatctgttgacccatcattcatccaatcaccacgcagaatgggacctaatcaaatatcaaacggaaattacttcacaaatctttttggccagatatgatatataact

SEQ ID NO: 4644 - DNA, 2155 bp, Arabidopsis thaliana landsberg
atcacaagtcaatcttaataaaaaacagcaaaggtttaggtcacaccttctagcattatgacaatgatatgatcaatagataagatattgtacaccttttacacacaacaagattgacatgaccaaactgaaaacagagagatgaaaatcaaacctctaatcgccgaagctctggaagccagtattcactcaaacgttcgagagtctcaggtcgatcacaggcatatgtcaaaactactgcatctgcgcgcttcaattcctcagcaacaatgtccctatcttctggcctgaaccaacgaacaaaaacatcaaaacatacttcaagaacctcaacaaagctgccaaagcttaaaatatcctaaacccacaaacagttggcacagtgcaatcccaacaacaatattgtatataaaagcaacattcttttctctaaactagaaattattttctctcaaagtagctttatttaagagagtaattatccagcaatacagtgaacttatataaggatatatacctcgaggaagtgtcgacaatggtgacgggtataccatcagggaagaattcaataggcaacttgtaatcaggcaaaacaggagggacattgggagggaaagaatcagtggctgcagcaacaatcaagcttgattttccagtgcccttatcaccaaccacaacgattcgcacagatttgggagaaccaggacaatcaaccgcaccagcagcgtatctcgccatctgaaactgcaacacaaacactcaacaattcagaatcaagtacaaagattgacgagtctgagacacgattactgaaacttcgcagcatgattttaaaaacccagaaacatgaagatcgtgaaggatacgacgaatccagaaccatagataacaatggaaagagtaacatcaacgagaagcaaaactaacctaaagatcaaaagattcgatgaaagaaacgagagataaacctgaaacctaaaactggagaaggagagaaggtcgaagattaaaaacccttagaaaaccctagattcttagtttgggagataatgtggcggtgacgatttgccgtgaaggagcagaaaaatttggtaagctgtttttttttttttaccttgtctgtgtttagtctagtggtatttccgtaaacacaagccttgtttctttttaacatataagataatttttttgtacgaggaatttttatttttaactagataaaatataaatttatttaaatatttaataataatatttaaattttaaatagtaaatatgtcaaataataatccataatttagtatcatacatatttaattttactatatattttaaatatttattaaatcataataaagtattttgttagtctatacattatttatttttcgtaatgtgtagaggacaaaagctccctacgatatatcataacataaaaattacattcgaacacggatcccgtggaaacgatgtctcatatgtatcctctaataacgtcagacttacaacactcagacaaacatcaaataaatgcagaccaagtgataacgaatacgcacatacacacataagtaatctgcactatccagtccctatacactccatcttattaacgatatttgaattttaaatagtaagtcacatactttttcattatttaatttagtatttccttaaaccaaatttcaatcttacaaattcgatttacaatacaatttaaatatctactttactttaataaatataatttaattctatacactacatcttattgttagttttccattttagttaaaaaaattataagttaattttttagatataaacatataaattaaatatctataaatatttttattttttagtttctttaggaaaaaggtaaaaaaaaaaaatctagcagatgtcaaaatctaaaatcgttaaaattgatacgtgtcatgatattgtgagttactaacttttaaaaccgtactttatataataagattttatatgtttatagacatagagaattagtatatgtagatgtatttactttttaagttttctatttttataagaaaagaaaagttgaatctttattaacatatgtaaacatcttatcgttagacttactgcatgtcatgagctcgtgagttaggaactttttgaa

SEQ ID NO: 4645 - DNA, 1218 bp, Arabidopsis thaliana landsberg
  unsure (1)..(1218): unsure at all n locations
cccgtttgttaacaactgcagacgtggaggtggacttccacgcgggtcggagattgttgcagagcacggatttgaggaaagtggcggatattgtggtggcgaaggatggttcagggaagtatagaacgataaagagggctttacaagatgtgccagagaagagtgagaagaggacgattatatatgtgaagaaaggagtttattttgagaatgtgaaggtggagaagaagatgtggaatgttattgtggttggagatggcgagagcaagagtattgtctctggtagacttaatgtcatcgatggaactcccacttttaagaccgccacattcggtaaacctctctctgtttttgtttttcttcttgtttacttttggaaacagaggatttcgaaatagcacgacttggttgtttcattaatttaattatggcctaataatatcaaagtagactaaataatctcataaatcaaagatataatgtttagaattatgattggtaacgttattctgaaataatatcaactagaaaaccgaacataatatcattacttataacccaagaaatcggtttttgacatgctctgttttctgcagctgtgtttggaaaagggtttatggcaagagacatgggcttcatcaacacagctggtccatccaaacatcaagctgttgctctaatggtaagcgcagatctcacagcattttaccgttgcacgatgaacgcataccaagacacgctttacgttcatgcacaacgccaattctaccgtgaatgcaccattatcggaacagtagatttcatctttggtaactcagcttcagttctccaaagctgccggattctccctcgccgaccaatgaaaggacaacaaaacacaatcacggctcaaggacgtactgatccgaacatgaacacaggaatctcgattcaccgttgtaacatctctccactcggtgacctaaccgatgttatgacgtttctaggtcgaccatggaagaatttctcgacgacggttataatggactcgtatttgcatggttttattgaccggaaaggctnnnnnnnnnnnnnnnnnnnnnnnncgccggatactatattttacggtgagtataagaataccggtcctggtgcatcgacgaagatagggttaagtggaagggtttgaggtttcttagtacgaaggaagcgaataggtttacggggaaacctttcatc

SEQ ID NO: 4646 - DNA, 1664 bp, Arabidopsis thaliana landsberg
  unsure (1)..(1664): unsure at all n locations
ggctctgctgctgtggataggtggaagaagaatgcaagtgggtttgggctttgcgtttttggaccctaaaccctaaacattttgggcttctgattttctgaaatttataagtcggtttactcatttttcttataatctcgtagtcagtttttgactttctttaagagaagtgagattgtgagaaacatgattttcttacatacgattgtttacagaaataatgttcaaaatatttttttttttcttagtatagtatccaatagttgttataaaaaataaaatttggacatttttatataagtaaatatttaagaaaaaaacatttagagagacaaatgtattaaatgttttgagcttttggctaatacttttcctttttgtaaatttttaaataaaaatattatatacactaactatttttcttttctttgtaattctttttcagacttgtgtgatccattcaacggatcaaattctctctataaattgtcccaaaaagcatggaggcaaaaacttaaatgatatcataggctttacgacttgcaaagtcaacgacaaaagtcaaaaagtcaaaaccataaaccagttccgtgaagaagaaggaaaagagagaatttgttggctatggtttttagcagctcggtgatggcgacggtggcgaaattttccaccgacaagtggcagcggatgaggagggttccgtcgtcggagttgatgaatacgcaacagcttatggaggtggcttgttgcctccctcttagtcatctctttatctgnctttgggagtttctggtgttctccgtatccgattatgattctgatgatgattatgattatgttgatgatgatgatgatgatgatgatgttgatgatgacgatgtggttgcttttgatcataatagtaacggcgattttgatgatcatgggtcttcttccttggattttgatgactattaccattactcggactccgactaataaatagctgacctcttcttttttctagtttctaattcttttgggattattgttgtctttaggtgtattgtcctaattattaatctggtattcttggatactgtaaatttactcttggatattcaataacataatcagacattacgaattataacatatcctttatccattgactgtatgtttaaatttccatttttgaacaaaagtaacttgtggtgatcttaatgttctgttatgcaaaagtacatcttctttgtccaaattgttaattacttctcttgtttttgtggttggactacacatatcaagacctcaattcttgtcatccagtttatgtgtgtagcttctggagaaatttttttatttttcttttcttgaattgtttgcatcttggaagagaacaagaaaattcagatttattaaggacattaatcattctccaggcaactagataatgtccaagagacttgctgaaacagtttttgcctcttttgctacttgaaagcttggatctgctgagtataggttgtgatcacaattcagttggtttatgatctgtcaatatatatcagcttctagattttatttggtggacactgggtttggtctctctatttaaaaactaaaacagccagcataagtcatgtggatttttttatagataattctctcatatgttctttttg

SEQ ID NO: 4647 - DNA, 2049 bp, Arabidopsis thaliana landsberg
aaaatctaattgatttagtattttaaataatacattaacaaattatataatcatgattagtaggacataagaaaaaatcactttcatctcgtttagtcacgcatttttcaaatgtagagataaatttaggaacgaagaggtagccactttgtaaaagacacgtcagcataccaggtaaaaatatcaaagatttttttttataaagaaaacgaatattaggataacaataaccaggttagggataagataattcacgtttccaaacagacccctaaaatgatacgaccttcaagtaaacgcttcttcttctttgttgcatataaaagtccattattgatcaaaagagtcgttttctttcctctccccactttttcagcgtttcttagatctctctctctctgcaaatattcaccattgtcttcttcttcttcaacgacgcttttggattttcttctctaaggtaagcgtcttacgacgatcgttgacgtaatcgcaatcatctcgccttttgttcttccgttttgaatccgtttctttcgattctatctgttgatttcttcgatctatgttgatttgatacgcgaatcgtgctttgattggtcgatcatgggagaagaaactatctccgttagattcatgattcatgtttatctactatctccgttagattcatgattcaactatgtttatgaagcttttagaatcttagaatcgattccttagggtttcgttgttcgtttctgttaaagattgcgttgattgattttgatctgtacctaaaagcatcacgaagaattaggtcatcgagtttgtggcatcaattttgattagttaggttaaggtcacgtttcttcttattggaatcaatttttgaacaattagggatctgatttgtagtcaccgatttgaactcttctttcgtttgttggattgtgtcacttagcaatgaagtcaggaagttctacattgaatccttacgcagcagcttatgtaccactctcgaaaagagaaggttctttggttgatacaaagcctgtcacacaacaacacatgcagcagcagcaccaccagcaacaaccttattatgggtatggagttcaaggaatgggaagttatcaaggaactcaaatgtcacctaagaagtcaccatctgagatggtatacaatcatcagctgaaggatgaggatttggagatggacatggatattgagtatctattagctacataccctggtctttcacaagagtctatcaatgatgtttacttggctaacacttgtgatcttgatgcaactatcgaaatgctgaatcaactcgaggtaattcattcttcagtcttcctgcattaagcatagtaatgacgtttggtgtttcttttctacagatttacagtactgaagctgaggaataccttccagacacactggacattggtgatgtacctgagatcatcacagagtcttcgaaacaaaagaatgatgggagtagtgcatcgtcatcttcgggtatccgcaacgctaacgtatcctcctcctgatttgatcagtccttaaaaaaatgtgaagtttttttcttcttaagtttcttttgcaaatggatgatatgaagttcatgatatattgttaggagatctctttctacattttccccactttgtctctgggaaaagagagtacaatgtatagtttttaagaaagatttcagtttgagaatttgggaattttcttttgtggttttgagaaaagctatgaattacaacctctgctcttggtgctcgatattaatatgaatctctcttatctattaccgtatcaatgatatgttgctatgtttcattccttatttaaatgctaattatgaccgaaacttacgttagtcaaccaaaataattgtagttaatgtcaatgtaaaaagatggaatctaaacacagtttggacctattttgtctacccgtatgccaaattataaatgccataaatctatatgcaggtacttttgcgctcatatgtctctctctgggtactattatgagaatcaactaaatagt

SEQ ID NO: 4648 - DNA, 602 bp, Arabidopsis thaliana landsberg
  unsure (1)..(602): unsure at all n locations
tctattacttgttttcttgacaacacatttgagaacagaaccgtgaaggctcatcttttttcttcttcttttgtgttaaggttattgattcctacgttgctgatcagagagttggctacgcagagccagcttcaggagtggagctttacctttgcccaacacgtggggagactctagatttgctaaacaaagtcatctctcaagaacagctcgatgaggtcaagtctttggatattggattggttggagttgttgtgtggagacgagccgtcgttcccaagcccggttccggttcaaaacgtcagcattctttttcttcttctattggttctaaaacctctgttttgcctgtaaacaagaagcagagagtgcatgttacagagaaacctcttgttgttgcatcaatgagaaatcaccatcatggttatgtgaaacatgatactgctgctgatgatgatgtgccgcctggatttggtcctgtggcttcaagagacgaagatgatttaccggaatttaactttaatccctggttnnnnnnnnnnnnnnnnnnnnnnnnnnnnnnnnnnnntctaagtctttggatcaagtaagaaagctcatac

SEQ ID NO: 4649 - DNA, 3540 bp, Arabidopsis thaliana landsberg
tcttcccttgcatgcctattgaccctgagaattctcccagtgttgttgccatcaatgtaaagactcttgtgcagagagcttggttttttttttcttccttttattggtttcgctagcaaaagattaattctttattgttgtttttaacaggttagtccgatagagtatggccatgtgctgctgattcctcgtgttcttgactgcttgcctcaaaggatcgatcacaaaagccttttgcttgcagttcacatggctgctgaggctgctaatccatacttcagactcggttacaacagctcgggggcttttgccactctcaatcatctccactttcaggtatatccaaaagtgatccaagcataactttttcacccttgctcatctaagatgtttgttctgattgttttggtggtgattgtttttggaaacaggcttattacttggccatgcctttcccactggagaaagctcctaccaagaagataactaccactgttagtggtgtcaaaatctcagagcttctaagttaccctgtgagaagtcttctctttgaaggtggaagctctatgcaagaactatctgatactgtttcagacgcctgtgtttgccttcaaaacaacaacattcctttcaacattctcatctctgattgtggaaggcagatcttcttaatgccacaggtatataactacaccgttggatgaatacatgttttgaattacttaatcaaaagtgaataacagtttgaatgtaaaaattgcagtgttacgcagagaaacaggctctaggtgaagtgagcccggaggtattggaaacacaagtgaacccagccgtgtgggagataagtggtcacatggtactgaagaggaaagaggattacgaaggtgcttcagaggataacgcgtggaggctccttgcggaagcttctctgtcggaggaaaggtttaaggaggttactgctctcgcctttgaagccataggttgtagtaaccaagaggaggatcttgaaggaaccatagttcatcagcaaaactctagtggcaatgttaaccagaaaagcaacagaacccatggaggtccgatcacaaatgggacggccgccgagtgccttgtccttcagtgaacaatatggtgacttggtggtttgtatgtataattaaaagcctaaataagcaaactctctttgtagttgcatttgaagcttcttggtttatgtatgatggttgtgggcattttgtgcctagacttctggttctttgttttttgttatgagttggtgtttatgaattatatatgttcttcactaatatgattattatttgtatagatttgattattcaaaggatatgtcttaagaaggggttcaggttcagccaactaattacttgtaaccaagtctttctaccatcaacaaccatgttaagattcagacacttagtttttacagctcgagactcgagagagagtaataatactgattattgtcttgtctataaccaccacaagctctggttatgaagtcgtcctctatagactataattcactaactcgatgctagttcatgtttaagtaatattttgtttagttgactagatggattttatctttgctcgccattagctcaatgagctacgtatatgttaagagtcacactttcaataattaatagctttttatcgttaccataccaacaaactttagataattgggttaataacacctttaagccgaaatagtagtatcataggatccgataccaaacgaacaagacaaaaaatcaaccaaagggttctttaaccttcgtgaccataataacttagtttctaaagagaatggtcacgataaaaaaacaagtctgcaaatcctaatgccgattactccttaaccattcatatcacacaagccctaaacctggacgaagtgtcaggccgtagcaccaccaccgctgccaccagtctgatggagcatcgcatcgatctcatcaccatcctccatgtcaagctgtagtgtcaagaattattagtatcagaaactataaacttcaaaaggtaagaaataaagcatgtagaatgaatgttatacctcatcgggagtttgctcagcacgaagacgacgcccatcaaacaagaaagcaatggagttcatgtccacagattgccggtcacagtaagcattcatcagcttcttgagctgagtgcttctcttgatcctaaagaaaacctcgtttccatcctataaaacaaacatatagaaggaacaataaacgttagagaccgcatatgaaacaataactaaatcacatggctctcttttggtagtaacctgaaagagtcgaaaaattaaacacatatcaacaaacattcagtttaaggcttcgtctatgagaatttgaagcacaaacatcagccaaactaattgaaaacttagtacagagactacaacttcatcagaagatatataacaacttagtacagagacagcatcgttcacagtctttagaacattcaacaactaagtaaacttatcccttccaaaactataaaaccctcaaacaacaacaggaaccaaaagctcaataacaacttacacctaaacaagacttatataatttcagaaatttgataaacaattagcaaaaacaagcaaacgtgtaaacataaagcaggatactttaaacctgtaaaacaaagaggaagaagaccattaagactgagctagtagtacgaaaccctaaaattaaaccaaattggagaatgaaaaaccctaatcgcagctacacgaaatcagaaacccaaacattcacaagaacacacaaggatgagaaggagaaagagagatacctgtcccttgactttgagattgatgtgagctcctccgtctcctggcttcttgtcttcctcctggtttgcagacatcgtgaaaggttctccgtccggttacaaaaacacgaaatttgagagaacgatgagagattcacacaatcaaagaatgatgctgagagatgaatataaaaagactgactctgaaaatctctctaattggccgtggcttttgtacttggacgcatcggattcctctctatcataaatcgtagggcatctatccaacggttcatattctctctaggttctcttttaatccaacggctgctagttatgttaaaatctgtcgtttcgttataatgggcttatatttttattgggccacatctaacccactagacaatttcatttggttaggttgcagttcctgatctcacgtgacgtgagtcctcctatccaccactctccatgatttcatcatctgttgaagacttgacaatttgacatagaagaaataaataaattgttaaatctataaatcatgtcactttgtgtattaacaaaaagattagttgaaggagataaagtctgtcacacactcttcacaaaagaaagaaatgatgatgaattaacgaaatacgcgccatgcaacatataaagaacctaggtcaagactaatgtttaagagacaataaaactcaaggtttttgtaggttt

SEQ ID NO: 4650 - DNA, 1196 bp, Arabidopsis thaliana landsberg
  unsure (1)..(1196): unsure at all n locations
atggaaacaaattcaatttcacttgtgttggtcaagaagagaagcttttccagtttaaagctagcactaatgatgatgatagtgaaattcagttcttggcgagtatgcctctagacgctgataattctcctagcgtcgttgcaatcaatgtaaggagttgttgcttttaggagtctattttcctttgctgattatctgagaactgaactcagaatttttttacccaaggggagcccgattgggtttggcatgtgtggctgattcctcgtgttcttgattgcttacctcaaaggatggatcacaaaagcctttggctggctcttcaaatggcggctgaagccgataatccgtatttccgacttggatacaacagtctaggcgctttcgctaccattaaccatcttcactttcaggtaaacagaatcaaatagttcgaaatttgtttataaccaatcggttttaatttgttatgaattctcgaaatcgaataaagcaacatgaactgaaccaaataactgaatgctctcacctttatactattgtgatatttatggagattctacttggaacaggcttactatttggcaatgcaattcccgatagagaaagcttcttccttgaagatcactaccaccaataatggcgtcaaaatctctaaactcttgaattaccctgtgagaggtcttctagttgaaggtggaaacaccattaaagatctcgcagatactgtatcagacgcatccgtttgtcttcagaacaacaacattcctttcaacattctcatctctgactctggcaaacgaatcttccttctccctcaggttaaatctcacaacattataaacgaaacttgatattgactgtcaaaagaagagctttctaattaaccattgtttgatttgcagtgttacgcagagaaacaggctttaggagaagttagctcaacgctattggatacgcaagtgaatccagccgtttgggagatgagtggacacatggtgttgaagaggaaagaagactatgaaggagcgtcagaagagaaggcatggaggttactagctgaagtttctttatcagaggagagactcagagaaggtaacactatgatattcgatgccatcggctttagtngtcacgaagaagaagaagaagaggagcttgatgagcagaattcgatgaatggtggcagctttaca

SEQ ID NO: 4651 - DNA, 2126 bp, Arabidopsis thaliana landsberg
attatttgggtggtagtggaaataactaaacatgattacgtacgtataacagtgatgcaatatagtcattaccattctgaaaaaaattattatcttgttttgatcatggctcaaactctttataggtcatagatgataaacttcctccattttcatgggaaagaaagttgaacagtcaagcaaagactccttctgagttcaaattgagtaaacgagatcacatgcatctggtaatttcatcatttctttggctgaaattgattttgattatgagacatattcttaaacgaggaatcatctttcttgctggaaaagttatgtttttttaagtcaaggcgctctgttttttttctggaaatttaaaacttaaactcctctccctatctctgttttggcttttccaaagtttccattaggctacagattgtggcgtcacaccaaagacgaagccgccaaaggaagagtaagagatatatctctcataaccttcttttaatgctcacaaacatttgatgactttttgttttcatcaaatactaaatacttcccaaaacctgcaggcttcgatcttcgatatcttcagaaaacaccatattacgggagatcacggtgtccctttggaggaattgggtatgggaatatacacatttgctttagaaactgcatagaacacaaagttgcaatgctctcgagttttaagatcctctattacaatttcctaatgtacaaaaccgcggggtaaaaaaccgtgattcagttcaggaagcattggaaggagttacaagggtgagtttcagcagttcaagctgttcccaaaaatttgtgaggaagctccaatcctcacaaaccaattctctgtaagtaaacaatcatgaacattgcttggtttcttctattgtaaaccaaaacctgtgtgtttgatgtctttgtgaagtatcactctcatgcttcttgatctgttcaaattataggcttttgtttctcgtcctggaggtgtgaaacactcaactgttctatgtccatcaaagccacaagttgtcaagtaagccaaatacattattttcttgtgtctcaatcagatctatagttaaaagaaacagagtaaatgtgtgaatgatattaactatgttattgtatatgtttgtgcagagacaatggaggctatttatgccaaggccaagctccaaatatgggaattgagtcttgggactggaacatgacaggggaaaaatctacttaccatgctctttatccgaggtcttggaccgtctatgatggtataatattcgacctaaatgtctctaatcatgtttactacagattaatttactgcaaattcttgatgtatattaaggttatgaaaatgtttttacttgatgaacaggtgaacctgaccctgaactcagaatagtttcacgtcaagtctctccctttatacctcataattacgaggaaagcagtcttccggtttcggttttcaacttcacggtatgattattctacggcgcttaccctcaagattataactaattaggtcacaacttgttctaagctgatggagttttgttatgtttcaggtgactaatactggagcagaaccagcaattgtaactttgctctttacttgggaggtaattaatctcttaaaagataaattggggttcttctgcatgttttcaattaaaaaaactgacccatttgtctctgtgttataattagaattctgtgggaggtgcttctggactaactggacaacactttaactcaactatgaagtaagactcatcattttatgctgcaatagattttgctatgggtttcttattctgacatggatcttctttctattatggaaatcttatagagcaaaagatggagttcatgcagtagccttacagcacaagtaaaaaccattttctctgactctttgattggtttggtactctgttttagtgttgatcatttgttaaatttttgtgtaacttatcttgcaggacagcaaatggacacccacctgttagatacgcaattgcggcaaaagaaacaccgcatgttcgtgtctcctcatgtccttgtttcaaagtttcaaacctactcctaatcaaatcacagcaggagatatgtgg

SEQ ID NO: 4652 - DNA, 1233 bp, Arabidopsis thaliana landsberg
  unsure (1)..(1233): unsure at all n locations
caagtaaaaggtcatgtttcttatgagaagtgagtcagaaagcttcatccatgtaaatannnnnnnnnnnnnnnnnnnctggtaacttccaatcaaagtgatacaagagattagcaagaccaaactcaactgttgttatccccatgtacactgctggacaaattcttcgaccacttccaaatggtaacaactcatagtcttgtcctttaacatcaatgtcacagtccataaacctctctgggagaaactcttctggatctttccatatctcgggatcacgtccgatagcccatacgttgacatgaagccttgtcttcggttgaatcgtgtagccgttgatcttgaattcagatatcacttctcttgggactagaagaggtgctactggatgtaaccggcatgtttctttgataaccatatttaggtaactgagatgatttatctcatctaaacttatgattcttgttttgttgtttttccctatttgggctctgatttcggattgaactttcttcatcactcgtgggtttcttatgagttccgccattgcccatgtcatggttattgcagaagtattgattccccccaaaagaatgttctacatacaaaagatagataatatgttttacaatatactaatcttaaaggttttaatgagatatgtcttaccatcaagattgctttgatgtggtttcttgtgagtttgccatatccaagaacagcttcttccttttccaacctcaagagcaagtccacaaaatcatcttcactttcttctctgtttttctgtagatgtaaatcaatcatttgttcatagaaagcatcaagatctcgtacgcttctctccctccgagcgtgtaaacccgtgaaccaatcgacaatccaaccgacatacgggaagaaatccgaagcagagaagctccccaacatctcaagtgcctcgtggactaaatcttggaacttatcattgttaagcacagttccttggaaattcacaccaaatactgccttgcaaattacgttaacgtttaaagaaagaaacgtatcactcaagttaaccagagttttctgagaagcagattcagcaattgagtcaatcagtttctccatctccgcctccttgattggttgaatcgagttaattcgtttattacaaaagagttcttcaacacaaagcttccttaattcttccaataatcacaaatctagagaaagcaatgtctagatagttgt

SEQ ID NO: 4653 - DNA, 809 bp, Arabidopsis thaliana landsberg
tgtcccgaggctagattcgacgagaagacttaccataggtatgtgtgtgtgaccccattacacttcaatccagtatgaaattttcttactaacttaaaaagttctacttgtagacgatacacaagattctatggcagtttaggaaatgctgcggtagcaatggctcacgacgctcttctcagtaagcaaacaattcccatttcttgttccttgagtcttgttaaactaagagatcatcagattatgatattttctcctttctatttttgttcttgcttgttgttagactttcctgaatgggaaactcagattgaagagtggcaagctcctgttcttgctgacacaacacttcctgagtggtaataaattctgcttcaaccttttttcttctttgccaaattcaattgagcagaagaaagtaatcagaaatcattttcaggtatagagtaaccctcttcaatgaactatactatttcaactcaggaggaacaatgtggaccggtaacagacgtttgcttcgtccacaagttttatatatttctgtaacttacaattttctaaactcgatttttgggattgtttttatgtagatggtttacctccaaagcaaagcttagatagtataggaagaagaaagatctctctcggtttatcaaccatagacaaaaatgatcaagaccagaacaacgtagccttagacatcctgggaagaatcgatgcggtctgctcacagattcacgctcctttaacctcaaatgctgcgctcggaaacactatgattcagaacaccacagagaacattggacagt

SEQ ID NO: 4654 - DNA, 4373 bp, Arabidopsis thaliana landsberg
ctttgcgatcttgtaattctgtatagtgctttaataatgccgaactagtcaatatactctctttagatggaaaatttgggtttcaatagtaacaaagtacagttttgtacagctttaacaattaccaatcacaaaaactttactaaaaacgttacaaaatgttctactctcagtttttctgtacaatttttttatataactttttttaatagttttgcactattctgataaaggtaacagctccagctaacagctaaaaaacttgtacagctatcatgcctccgccactcattgttagcatataatttttatattatggtcggtcatttttgaaatggctggctactagttaactcgaacccctgtcactttttggattaaactagaaacctttgtcatttaatcttaaagagaacttttaaatttttgaaaaaaaaaaagaagagaattcgtaaatcatgaaaatcacaatacattttttttgtcaataagaataattaaaacaatcgagaaatcaatattgaagatgcactattcttatatccattaacactagatatatcagtaatatcatatcttatttatatattctgtgttttaaaagacaagttcactaccctgaattattttaaggaaacccctttggttattttgaatattagtcgttatttaatttaatataaatgaagacaacttaatctaacgcaatggtagaaaactatttcaagttaagtattttaggaaaaaccaaagtagctcaagcaaaatttaaaaatcacaatgtcgaatttaaaaatactcttgttttttatttgatttgagggtctttgttattattgaaaaaatgttagaaattatatcatttacaagttagctgtgaaaatttatttggtccagttgttgatcaaaagtttgagtttcagataacacagtttcttgcatttcaataatataaagcttaccagagtagtggtatgattattgcgggagaaatgcatttgataatcgttcttcctaaaaattgtttattgcaagtagttgaatatcatcacaataaatgacataatatatatctttaatgacgatggtgtaataaggtaaaaaaaaaaaaagagaggttaaaataaagcttacaaaattattgttagcccagcgatcgcgaagttattaaaaaataaatatatagttgtactaaatatatatgtgagatattattggaaacttgtgtaaaagaaagtgaaaaacaaagatggcgagcgaaagaaaagggagagagagtgagagatgatgatctgagaggttgacttcgctttgtaacttatttactctccggccaagaaatctgatcatggcggagacttccgaagaacaaaaacctgcttcttcttcttcttcgagagcggtcacgtttcctgatttgcctggttagtttctttgcttcgtttccctaccctcatgtttaaaaatgtcctgcaattttcttacgaaatcatataacctccgtttaactgtatctttcgttatctgtatgattatagtctagacattgaattgattgataagctgatttgtgttttctccgttgacttttaccaatatattttttttttttgtcattcatcgttgagagtgatgatgttatgtagaaggaacatgaatattgcaaaattagtgtttgattttgaatttgaatttctgagtgaatggatttacaaaaaaaagggaagtttttcaggacatgatagataaaacgttttttttttttaaattcccttcaaggaagaagctctaatgcagttttatttttcagttacggagaatgtagaatcgcgtcaagaagggaagatggaatatgcttcattgcgtcaaaaagagaaggatctggaattgtgtgaaaagattgtgcaagttctgggagcagaaggccctcagagagttttgctaactggtaaagctgggatcgggaagacgaggcttgcaaagaaagtgggcgagcgtgccactgaaaggggcttgtgctttctgaccctctgcttgcatcttaacaagatgttcaaggaggatgatgaatggtctctttatgagaacatagcctcccagttatctgtatactccgattttgaagagactgaagtggatgatagagatgaggatgaggaggagcagaagctgcaaccagtcttgttggacgagttgaagaccaagatagttgaagagatagcaacgagggagaagaatgccaaggctgccaaagaggcgaagcgggttgctgcggaaaaagcaaagctggtggctgcggaaaatgctaagcagcaggctgcggaaaatgctaagaagcaggctgcggaaaaaccaaagaagccggtcgagaaaaaagatgagaaaaatgacaagcaatcgggtgatggaccggctgacggaaagggaaaatcaactgtaacagaaaagacgccgccagctgcaggggatacaacatctgcaggagatccatatcttcttttgattcttgatgatgaagatatcaacaaaaccagtgaagacgtggtgatgaataaactacaacttgggaagtttcttgtagataagattcttggtaaagatgacacacgtctcaaaattcttgtaacaaaaagaaaacgagacgaggagcttacaaaggctggtggggaaactgagtcacaggacgcaaagagtgagaacggaagtgaagggaaagagggagcagagagtgagaatggaagtgaaggtcaagagggagcaaagaaggtcagcgaaattgagtcactggagaaagatgataagggaggcactgatacggagaacgcacatgctacaaagggtgatgggggcagtggctcgtctaatgaaaatttgccgccggttgctccaatccctttccaaaccacggatatgtcagatattttaattaaatcaatcaataaggattacctgctggatttatttataactcttatagcaaaagaagactggaaaacatacgagaatttcaaacatgaaattgtggaacagagcaagaactcgccagctgcaatcgtcgtgctagccaaatctctaacatggattaagcagagcaaaaagatttctggttcgagcgatcccgatctagtaaaaaagatgacggaattacaagaagagataaagaaaaagatagacgaggttctctcagctgttcggtctggttcatccgattcaggttcttcttctgagagtgccgtcaatccaatcctgcatcttgcatatgtgctgttggaaacctatgactcatcaaagggtgccatcatcttggattgtttttggcatagcttggacttctttgagcaatgtggctgtgtttactaccgtgacctgatcacacaatggattcttgaaggctactttgatcctgttaggtctgtcgaaaaggcgtaccaggacggtcattctatcttgatggatcttataaaccgtggaatgcttaagatacaagaaaacaatgtggtggtaccagagatggcgatgatcagtttaattgatcctcggcgtggagggcatttcgggagatctcgacttggattttctagagtctatggtggtgacaaggaaaaaggtattgggaaaatcacccagatagatgatatgattaaaacagtgcaagcaaagaaagcagaccagattaccacgattctggttggtggcgatcgtctgcgtcgcgaaactcctgcaaagttcttcgagaagctgaaaatgcttgaagtacttggtctttttgaacccacactggaaccttttgtccagtcttttacagatcatctccaactgctccgggttcttataatcagggactgcgatctactagaaagtattaaagagcttaaggctcttacaaagctaaatgctcttgaagtttctggtgctagctccctgagcgaaatctctgaagacttctttaagccatttcttgaactccgaagtcttcacctctctgggcttaagatcaagtcttcccctcccagcatttctgacctgaaggaacttcgctgtctcatcatcaaggactgccctttattgcaagatctgccaaacatacaggaactaaaaaatcttgaggttgtggatgtttctggtgctagtgggcttcgaacttgtttcgacaacgcagatggtcccaagaaaaacaagagcaaaaacaaaaacttttatcttcttacaaaacttcagcatcttgacttctcggggagccaaatagagcgactgccaatattccaggactctgcggtggcagccaagcttcactctttgaagaggctcatgttgcgcaactgtagcaaattgagaaggttgcctagtttgaagccctgtcagaactccaaatt

SEQ ID NO: 4655 - DNA, 1415 bp, Arabidopsis thaliana landsberg
cctgggagatatacaatcaaaaaggaaaaccaaaattgataattcgagcgctgttcacacatactaatttatccatcatctctagggcgcgtccctttgtacgacctctagttgattcccatcgaacacgtagtaagtcacaaaaacaccgtagctattcccatgtacgaagaacaaaagtcagtcagtttgttttacttgcatagttgtgacgaaatgaaaaaccaacagatccatacatcaatatttaaactcagtcactttgtaagaataaattaactgagagtttgaaacttacaacaaaatatgttgacttttgagaatctattgcctcaatatatggagccatatcccatcctgcagaagaaaaaagtattagaatatataaataaaactagtgagtaaaacaatttcgttcaacacaagtgagtaaaactagttgacaattgcttcttctccttcacggtctctgtagtaatttggcaacaccgtaacgatcctttctaagttttttaattgcagttacaacaaatgcctagtagcttaattgtgtaggagaagtgttaatcttcttctctatctttccacctgagctctctccataaagcattaaacttttgagaaatagacattgcaaatacacttgacttcgagttcacttactttgcatctcatcgtgccgactacccctttcaattagaaggcactgggccaaaatcaatgcctgttcaactggtttcaagggcacagaatctttgccagcttcactctcgttgttcactagtttgggagtcatatatacttcaggtgcttcacctccccaagcttcataaggtccaacatcagctttctcagaggccaacctcacatccccattggatgagctagtattggctaccaataccatctgtgcctttggatctacctataacaagatcagaggaatttagaataacatagccgaatacatcaaaaaggaaaaatttatctcatatcttacttggtgaatagtacgaaatccaagagccccggtaacagagaactctaggcttgctgctgctttagcaattcaagctgcaacctgacaattttactccgaatcaagaccaatatactaaagcagacaagtagataaaaggtcatggaatggtatgtgatagctatcagaaatgagaggagtaacaactatatacatatgtgctataccagctcaatttcgtaactacatgagtcgcaaacctctccttattttcttaaaaacggaatcaggcgaaaccaaagtaatctggtcaatatcctaggacaaaaagctataaacatgtaagtctcaatggtaacttaccgtgaaggatcaatcgttcgatatatatattgcagtacacatgcttccagatggatagttgacgtgatggatg

SEQ ID NO: 4656 - DNA, 874 bp, Arabidopsis thaliana landsberg
aggcattcgtgaagaaaacaattaattgtcagcaccaacagagcagactagtgtaactgaaatgcttacagactagcaatgttgttccaagccagccaattgtcaggatcaagatgaacagctaaagtgaatgcatccagtgctttctgaagatccctggcctattgtatcatgtcggacatgttaaattagtatatctctcagccagcatgacaagaattccaattgtttatcaagttagatttggagtggaaatatattgctactaagctattggagaagatgaagtaaaataccttcaacgcagcagcaccaagagcaaaccaaccatctaaatacagagaatttaacgccattgcagcctccctagagtaggagaaaaaaatgagacatctcacaagtaaatcagcctgaagggccaagttcataactccatttcccttgtagagaaagaaaaaattaataaggaaagaaccaaaatgttcaaacataccacagtatcttcgacttctcaaaatcaccgcgattgtatgcgcttcgagcaagagcccgctgcaagatgaagataattagagcatggactaaaagagatggacaaaaaaagatttttctgttttgtatctcaaactaccttagcacgaactgatttgtcatttgaaacttccagggctttttcataacaggaatcggaaatcgtaacatcacccaatgaacacctgaaaccaatttttatcatcaaatttactttaatgttatgatacaataataacttcctagtgatcaaagaaatatccgcacatagattaagagtacattcaaagtagataattgtggcacttcacaaccatttaataattacgatatataagcaaca

SEQ ID NO: 4657 - DNA, 789 bp, Arabidopsis thaliana landsberg
  unsure (1)..(789): unsure at all n locations
gagcaccaagagagtacctggagattagaaaacttccaagcaagtcagaaccgacagacatgagctgaatcttagcccagttctcccactcaactaattccttactctctgacattctaaggggcaacgaacatttcgttgatccttccgttgacctaacagtttaaaaacaatcaaaagcctcaatgagaatttgaatataaccagattccgaaatttgaagaacactggaagttcataaattacgaagaattaaactcggtgacttacccagtcagattgcaacgggtgaaccacaaagcagcagcgattgctaagcacatcaccagaacagcacggcgagcnnnnnnnnnnnnnnnnnnnnnnnnnntcaccacgaacgattcgaccttgtcgagaagctcggagtaaacttgctcggcggaatcaaccgtatcaaccaagtttaactcggaatctccgagtattagcttagtagcgtcggaggatagagctccaagatagtctccagcctcgattgaagacaaaagagacgttataagagagtcgtgtggatgggttccggattgagttccatcgagcggctgggattcgagaggagaacctgtctgtggaaaggatacagtgcaccggaggagacggagctcgtaaccgcgaaggatttcaacttcgccgtcgaccatggttgtactggttctggaggagacgagaacgaaagagaggttttgtgaggtttttgtgagggacagtactgtgacnaagacagtcgttgacggtgaacccggttga

SEQ ID NO: 4658 - DNA, 696 bp, Arabidopsis thaliana landsberg
tctccaggactctcttcgtgctactgcatttttcaatttcatcaattcgagctttgttgttgtcccagtctttatttgtgtttcggagagtgtttgttggacgttaatgtttgagaggaataaaccaaatgtgttatgctttagatatgtccacaccaagcttgttgttttttcttatcttatagtagaatgatcttgatatttcctgctctttggtctgcatcaagatgactttatcctggaaggctctaagctgtgttgtaggcttcttagcattcatttctgtttgctagtatgtgaattagcttatatctgtgtacattatatattagtagctatctgaagtagtaccgatctgtctttgtttgtactttgtagtgaactctatgtaacccaaactactttttttttcctgcagcatttagtttttgctagattgctcctgttcaagttgaaagatttgttgtttgagataacttcaactgaaacttttgaagtaaggagtatttcatggtggcttgtcagagttttactgattcatcaaagagttctacaagagcgatcttcatctttgtttgaaatgttgcaagtttacatggccgaagctatagaccattttggagaactggaaaaagtaaaagctcctggggtgccaattgctagaaacgaagcttatcatcacgtcactatcatctg

SEQ ID NO: 4659 - DNA, 1452 bp, Arabidopsis thaliana landsberg
ccatcgatgtgctctgtgaactacttgagaagggcaagctgacaagctacttgagacggacgagctacttgagacgggcgagctacttgagacgggcgagctactctttgtctctaagtgtcctggccgaatccccctcgtgacaggacatgctattccgtatttatagcactatgcgtgtagggcattcatcgaaggatttgacgaaactacccttcgccttaatactcctccttggtttggaacttattttgggcttttgacttgggtttgggcattgggccaagtaggcccaatccgacccctaatagttcggatttacatcggcaaggaggagtatatgattttaacccccccccccattaaatctcctgatacgtattgaaacttgagggtttatggtttaagttatttttcacttattttgatcgtgtgttgagttttgtaatgaggatattattatcatgtctgttacttttggacttgttaaattttcgtaaacgttgttgcttttgttgtatcggggcacacttatccggatttatcgattatgcaattgccctactacatcacattattatttaaatttgtcttcaagtttttatttcgcatagcacatatataaagaaaacgcttcgttcaaactcgtctgtgaactccataaaacttattaaaaaatccgtccaaaaaaatatatagtatagtttggatcgcatgaaaacatatctaaacataagtcttcgctaagggacggagaggctccttgtcacagctgctcataagaacgaaaagaaaagaaaaagatattttagaatatctcacatgtgaaatgatcatgatcaacttctctctctgtctcttccatgccttgctcgagcatcgaacctaccaagcgttgcacattaatgtgccttcgctggccaggagagctacaagagcttggcgctgtctctgcagcacatagctagtttaaagttgattcgtcaaatccagcaaacttagttatagaataaaacattttttggcgttttgccaaggaaaaaaaaggggattagttggcttcaaataaaccaaaattagctaaatgttcatagagtaaataagtgaatgatcaacagataatatcattatgcatggagtatgatcaagaatacagactgaaaatttatatttactcaaaatgaaacaataaataatactgtcgaaatgaaatttgatgctaaactaagaagtatataatgaagaaaacaagtattatcgctagttaatttttatatgattatggtgttaaaaaataaaaataaaagtatataaacacaaacattgtatgttttcgtgaaaattttaaaagaaatatgttctaaattctagatttcttagattgacttctaaaataatgttagcaggtttcttaaaaccaaaaaagaaattcataaaattacttgaaagcat

SEQ ID NO: 4660 - DNA, 769 bp, Arabidopsis thaliana landsberg
cggatcatacatcagttgtgatgtctcttatttgctgggatcagtttcttttgtcttgttcattggacaacacggttaaggttagttcgtctttctttaactttcataaatttcttaagtttcattcttcctcttgttaacgtgttttttccgctgtagatatgggctgcaattgaaggtggcaatttggaagtaacatatactcacaaagaagaacatgtatggtttcttttataaatgtgttaccttctcttatggtcctaatctatatgttatgtgactaataaattttggcaatgtttaaactggattcagggagtgctagctctatgtggtgtacatgatgcagaagccaagcctgttttgttatgcgcttgcaatgacaacaccttgcgcctctacgacttaccatcgtaagactttcaacgtttatgtatgaattcttcatctctttctctcttattggttctgatagcttaggtttgttcattagatttacggagaggggaaaaatctttgcaaagcaagagatacgggcgatccagataggtcccgggggcatatttttcacgggtgatggaactggtcaagttaaagtatggaaatggtgcactgaaccaaccgcggctttgccttgagaaagtttgatgctatcgtcaactagatgttttctacgattttcttgtaccattatatatgagtctatttttgagacttttctttcttgttgaggtcctagtagaagccacggtttgatgaaatggacagt

SEQ ID NO: 4661 - DNA, 1896 bp, Arabidopsis thaliana landsberg
tatggttctctctcgacccacaacaatggatctcagagattggctttccctgtgaaaggcatgagaagcatgcgcaaacgccccacaacactgagacttagctaccttttcccctctgaaccccgaaagcccgagaagtcaaccccgggcaaacctgaatccgagtgttacttttcttctgagcaacatgccaagaagaaacgcaagatccacctgaccacccgcacggtctcttccactctggaggcaagcaactcggatgggatagtccgcaaatgcactcattgcgagacaaccaagaccccacagtggagggaaggacccagtggaccgaagaccctctgcaatgcttgcggagtgaggttcagatctggtcgcctagttccagaataccgaccagcctcaagccccaccttcatcccagctgtgcattcaaactcacacaggaagatcattgagatgagaaggaaggacgacgaacagtttgatagcagcatgattcgggcagtgatatccagagggtaaagcagttttttttttaaagtttggtctctgatccgcagaaatgggaagtcagtggaggaagaagatggtataaaagttagggtttagtgactgttttcaaatctgatgaagagagtttagtggtttagttcaagttagggatatgaaatattttgttgttttattatgtgtttttatctttatctcttggctgacatttgtgtatcagaggaaaacaggtgaagccaaagtttgctctctttttttcgctatttcaaatctattctttttattcttcaatcccataatcttcttctttttttcatctgttttactattttgcattagttgaaaaataaacgcccatcaaatccagtcatggaggctgcttgcttatgtacgtatatgattaatgttcaacagaaggaaactgaagtgcaaaagagtttctatgtaggttaaagacggacaccttggtggtaagctaagtaacaacttcctctagctgacaacaacagaaacttaatgataacagagaaagattagaaaacaaaagcttttttcacagagacgagagactcacctacaagaaatttcaactaaaaccaagttttgtttcattacgctcatacaaaatcacactgtacaagatgctgactctaaactccaacttcatgatccactttccagtaattgttatcgttgaactctttcattcctcagtctttaggtcctcagccatctccttgttcatcttcatcgcttgctccatgcctttctctgtcacttgtgcttccactcccacaaattccacgtccttatcaaagaaggatctttctgaaccgtttggaatcaaagattcggttttgacgtcaggcattggtaatgtcgaggctcattatgttcttggtgtcatcatcatcgataaagaacattgatcttttggttggagaccttagcctcatgacttgtgaagatggataacaaaccttagcctcattatgttctctgctttagtgggttgttggtacccaaggtctaatctttttggtgggttgtgtttatataccccaacccaaagggtctctgattaataatttggaatgactaatcgcaactcatgtgttcatttctgtgtatataaatcccaaaccagttgaccattaaaagcaaaaacaaaaatgacgagacattgaaaactccatctacctttttctccctcctcttctctctccctttcccaaattcgaacgaacctgcaatccctaaacccccaatttagaccatctccaaattcgtcgtccttttctctgtgtagtctaattatatattacaaggttcttgctctcctctctctttctttctttctttagtgggttttataatgtgttc

SEQ ID NO: 4662 - DNA, 463 bp, Arabidopsis thaliana landsberg
tagacgtggaattgaataaaacctataatgccaacactagcagtagtgacgatgatgaagttgtggttggagaagaagacgatgatctaactggaaacccaaaagacaacgcgttgaacacaactgaaaccaactttcaaatggagagtccactggatttcttcgacttcaacacctcagagaaagctgaagaagcttttgctgaacagccacccgaatgggtcgggtggggagaaccatctgatatgcaagcgagtggcaccggtctgaacccatttatcgatgatgatgatgatgatgacagcaagcacataatgaacctcgacataccaatggctgaggtcaaatctgaatccatgattccaaacgggtcagaaagatcgttatttgagaaggacgtggaattttgtggagtggaaccagaaggggcagagaaagcgatggagcatgcgatgaaagaagg

SEQ ID NO: 4663 - DNA, 824 bp, Arabidopsis thaliana landsberg
tttcgaaaaatgtaggaaataaatttggttgcttgctttgttggtgtgtgaaccgacacttatctctgtgatttttttaattaaattctcagtgatgtttgaaggaattgtttcaatcttcgttaccttaaaatgatgtcgtcattgttattgtattgggtaaattttctgttttgtaattgttttagcatatgtctctgtctgattgtgtcagagttttgagtgaaacccccaaagttttattttttttatttaactggacatgaagctgtttttgaattcagcttttggtgaattttacgctgatttttgaatgtgttttatcttttcttgggtacagttagatagatagcatgaattggttacctgaagctgaagctgaggatgacttcaaaggtcttctctctggtgatttttttgatgatctcatcaatcaccttgaggtcccgcttgatgacattgataccaccaatggtgaaggagattgggttgacaggtttcaagaccttgagcctcctcccatggatatgttccccactttgccttctgacctcacctcttgcggctctggcatggccaaggcccctcgtgtggatattcaaaggaacattcctgctttggtgagttctttgtttttttatcacttttgcattttacttgttttgatttttacccaatttgagtaaaaaaagcttttctacctgaaattttcttgcttatttagttactcatataatttgagtgatgtcaatctttcactttccgctgtgtttataaccatagttagcagcattcatgtagagggtatacctaatccgagtata

SEQ ID NO: 4664 - DNA, 2855 bp, Arabidopsis thaliana landsberg
aaaaaaaataattgtgatattttgaaagaaaacgaagttgatacttgagagttgagatgaaactgcttcttcttctgtttattgttttgtcatttcttgatatgtccagtcaaaagtaaaccaaaactgattagaaaaccgaatcaacaataaatcagttatcaaaaaagaaagtaaacaacaaggtctattactgttggagtttgagtctatgatcaaatcggctaaaaggaaaagaaaaaacagtgagaagaaatgaagaaaagaaaagaagcaaaagctaagcaaaaactaagcaaaatgagaagaattctcatgattaatataagcgttatattgcgtattatttttaacttcgtatgatcaatccatatttcctggagatgcagggtaaaattgtaaaaaattagcaagttgaaagatttttatggttaggaacttgacgaaccaaaattttaagaaaaaattctaaaccctgatatttctagtatcagttgaaccaaaacaaatagatactatataatatgcaatagagttttgtcctaattcgtgagaaaacgtctagaggaaaaaaaaacatatttttatgttacaaaatctacgcaacgcaatggtaaacaaggagtgataagttcacatttttgtatacaaaagtgtagattacaagataatttagcagaagtcagatttggtgataaaagtacgagtctcccggtttcttatctccaccatcgctagttgctcctccaaatccaatggtatgggtcactccagaaacaagattagtaaccatggaggttccccaatagacccacccgttttcatctccatgtcgctcagcctcaacgccaatcctctgttgctgctctgccatgatatcaccccatctcttcctcataaactctctaacaacttcagctccttgagtagccacttcttgagatgggatctcaagcgggttctggtccaagttcagtttctctagcttcctcagcctataaaatgagtctggtatagcttggatttggttgttgcttagatcaagctccctcaggttagttagatcagtgatagtgtcagggacacccatcaagttgttgaaattgctgcttaggtttagaacctcaagtttcgttagtctcccgatcgagtttggtatcccgtggatctcgttcatgtgtgcgtcaagatactttagattatacatttcacttatcgaacctggaaagtaacggagtttgttcagctggatcgataatctctcgaggttttgtaatccgtatccaatgtttgtaggtaatgaagtcaagttgttgtagcttgcatctaactcaactaatgacctaatttatgaaaatcattgaaacctcaggacaaaagtagaaacaatatacagaacatttacaagaatagacaagaacatgaacctgcaatgcgcgacgctctcagggagtgcggatagattgttcgcattcacattaaggattctaaggttaagcaacattcctatagagtcaggaagagattccaaagaatttgaagatacatcgagctcttctagcttcttgagtttcgagattgcatccggtataaactgtaaaatgtttaaattacaaaatcagtttcacacattacatgaagcatttaaaaaacaatgataattccttgcatcacaagaagcatcaaaaacagatacagttacttgtagtccaagtttctaacaaaactatatcagtcaagtgtctttttcgatataattcatgagattctgtaagctatgttcgagattaatattatcgagctatcattagagatagttcaaaattttgggatcttagtattaccgtcaagtcattgccagagagattcaagtatactaagccaactactttccaaaaagcttcagggataagcttaagttcttggctggagagatcaatcctctcaacggttccgccggattccgcctccttgagcaccgcaagaaccttctcgttcacttcttcaccgcttctcaacatcgattccacctccgtagaataaaccctagaaagctcctcctctgtatccttcaacttcttctcgtaactatcgtgcacttcatccaaccgcacaaccccggcataaatctccgactccttcgctgcttcctccggcgagagcgaatccataatttgagcgatcttgaatcgagcagaggaaaccgctaagggatcaggtcgagagccgagagagttgaagacgaatagcgtctgtgtgatcgttgtggggatggattgagtcaacatagacatgatttctggattggagagaagaggaaaagaaggaaggagagtttcttgcgcggccatagacggcggcgcgtggagattggagtcatgttgatgaaggacgtaagagagtaaagggaatttgtcgagatcgtgatccatggtttttgtgattattagtcaaaggtaattggagattaagagaggttttagtaaaggtatgttcatggttgaacaagtcagaaacattgaagttgatgttgccatgtttgtgagcacaagtctagttgggttgaaaagtgtcgaagttgaccgaggaaattaataagattccaatgataaagtcaatcgagccatcttttttgaataatcgaatcaaagaccaatcctgtccagttaatgtaataggatatatggcattaacaacgagattatgatatcttataagttagggaaattgtccgcataggaaaaaaacaaccgtttatcgtttgaacattgatctaaaagacttggtccgtgaaaccaatgtggtttttgagctacattcttcaattacacttgatcgtttctaatatttttcgg

SEQ ID NO: 4665 - DNA, 3340 bp, Arabidopsis thaliana landsberg
tacatgatttatactattaattatgaaaaaaaaaaacttaccttaaaaaagggaacttatgtgtttaacaatgtcttaaataaactgacaaataaaaaaaacatattacaaagatgaggtattttagaagacaaataaaaaaagacagtttattttactactttttatgttgtagtttcttcttcctttagcctttatacaaaataaaacaatattacagtccaaggaatctaattattttttattttttttgggctcaacatcaactatcattaaccaatcaagttttacatcttatcatactccacaaaggatttaacccaatttggcattatagaatacaactgaggatcataattctcgagagaaagagattcctttgctatcctatctaccactccattgcctgcacgattcgtgaacacgaattttgtttcctcaaaatgctgaagcaggtgcttgatatcttgtataatcagatctagtgcaggtctgtccccattatcaacaaggagggataccaactgttgggaatcagattcaaaaattacctttcggtaactgaagcgagaaagtgacagcaccgtccaacgcaaggcttcagcctccgcaaccaaagcggattggactcttggaatagcccgaacacctatccaaagcacattcttttcggagtttctaagcacccagccaatgctactggtgcttcggtctgcagtccaagttccatctgagttgcacttaacccaaccatgtgggggttgcttccatttgaccgcaggtggctcagttttctctatgtgcttcggtatgaaactccgctgcatactcagcctccactcctcttcatcctctattgcccgccgaattacatcaggtgcatcaaattgtttccctttgaaaacaaggtcattgcgattcttccacaatctccacaggatccatggagctaccagtccatcatcacccaaccatggatgacactgagttatgttcaataatttgtgcaagttttggtagaaggaatctaaccactcacgctctggtggagctggaattttggatatagcccatacaagtctggcgaaagaacatttgaaaagaaggtggttgacagactcgacctgtgatgggcagcgaggacacgaaccatccctgacaaggtgtcgatgatatagattgcccgctacagagataatgttactcaaacatctccataaaaagtgatgtaccttaggtgagactttagctttccaaatctgctcataaagcgggttgaggctgggttgaaggacatgttgagtctgcgttctacgattcaccacctccattaggacccaataacccgatttcacagagtaatgtccatccctagagtagtcccaagcaactctatccaatgtatgcctaccccctggccgtagttgaatgatttgttttgtaatatcctcagggaataatgcagagagtaagtcccttctccactccctcccactttcatccaataaatctctaacatattggagagaagaaacggacctagcatgggatggtagaactcttttcactacattcacagcctttgctggttttgactctatccattggtgttgccaaatctcagtggacgcaccgttgtcaattatagctcgggttccttgccttaagagctcttgtgctgcgtgaatgcttttccaagcaaaagatggtctagaaccaagaggagcattcaaagggtctgatttgctaaaatatcggctcttgtaaactctggccaatagagattctttcctagtcaccattcgccacagttgtttcctaagcagcgcaagattgaatgcttcgatgtctttgaatcctatgccaccttttgattttggcctgctcaaatgctcccaagccttccaatgtaatccttttgattctcttttatttttccaccaaaattcagccattaccgaggacaattgctaacagatggtaaccggaagtttaaaacacgtcatggtgtatgtgggaagggccatggctacagccttgagaagtacttccttccctcctggagaaaggaagttattctgccagcccgtaatctttgagtgaagcctctcacgaatataagtcaatgtctccaccttggaccctttgaaagattctggaagctctagatacactccttgaccaccctcttgactaatccccagtttgttttttatttcagactttctgttttctggaatatttttgccaaaagtgatgcttgatttttggtaattgactcgctgacctgaggcaaggctgtattcctccacaattcttatgatctgatttagctcctcatccttttcttggcaatagaacatgctatcatcagcaaacaagagatgggtgataggagaagctcctctagccacacgcagacccgttatctgtcctttttgttcagctagctgcaacatcctaatgagcatctcagtacatatcacaaacagatgaggggataatgggtctccttgtcttaatcccctagatggtagaatctcaccatgtgctgtcccattgattaacacttgatagctcactgatcttacacactccattatgagattaatccatcttgcctcaaaacccaagactaacatagctgcttcaagaaatgaccattcaactcggtcatatgctttggatatgtctgttttgatagcaataaactctgaagaacatttattattggagctcaaagcatgaagaagttcatgtgccacgagaatattatcgctaataagcctccccttaataaaagcagcttgggatttagaaataatctgaggtaaaacttccttcagtctattggctaacaattttccaataatcttatagacgacgttacagaggcttatgggacggaagtcaactaacttttctgccttgagcttctttggtataagacaaatattagtcttattcatctctctcgggatgtgccctttgcagaagaagtcttgcaccatttctgtgagttgagttcccataatgtcccagaactgctggaatagatatcccgtcataccgtctggtcctggacatttgctaggattgatatcgaatgttgcctttctcacttcctctctagaaacgggagccagcagaatcgcattcatgcgtgcattaactattgggctgacttctttcatttcctcaatttgatatcccacatcctctgacgtgaacaacttcttaaagtatgcttccacaactttgcctaactgagtatccgtgtgccactcattcccatcatcatccactagcttttgtattccaatttgagctcttctgtttt

SEQ ID NO: 4666 - DNA, 3202 bp, Arabidopsis thaliana landsberg
  unsure (1)..(3202): unsure at all n locations
gcctattaactccttcctcctccacacatctcaaagccaagtctacatacttctcgaacccttttagattcccactgcttgctatgatcgttgtgtccaacaactcctgcaggtcatacaaactccgagatttattcatctttgtcttcacctctctcaccacatatttgcctctctctatcggacttctaccggttaatagctcgagtaaaaccacaccaaacccatacacatcgctcttctccgttaattgattcgtcatgtagtactctggatccaagtagccctgattacaaagatattgtaagtttaaaatgtatttgagaaaaaaagagaaaggaggataaattttctactcaccatggttcctttgacttgtgttgtgacatgagttttctcagggtctcccacaagtttggagagaccgaagtcggcaacctttgcggttagattttcatcaagtaatatgttatttgatttgatgtctctatgtataattggaggatcagcaagttcatgaagataagccaagcccttgcctgaaccaagtgctattttaagtcttcttgtccaatccaatcgaatcccactcttccctgcattactaacatattcagcatccaagaactatctgaaatcctcatgaggaagatagaagtttgatcttaccggacagactgtctttaagtgacccatttgaaatgtactcgtatacgagcatttgttcattccggtcaaagcagaagcccaagagtctgacaacattcttatgatggacccttgagagaagctcaatctcagttttgaactccaaccctccttgcaaagatccttgttgagcccttttgattgctatgagttgcccattaggaagaatccctctataaacctatttaaccatcaaaatttgggatcatgaatttcaactaaggccattagttgttacattcatttgaaggcatttgttaagacacaaaccttgccgtaacctccaccgccaacatcatttgcctctgaaaagttgtcagtgcatttcttcagctcctcaaaagtaaacgcttttgctcccattagctgcggagcatcaatactactcttacttgtatcccatttagctgcaacatgccaaagaaaatttgttcatgctattttagtcaagggagtagtaaatattgttgtcttaccaaaaggattattttgaccagttgctctttcagctctcttcttctgcctaagagcgtaaatcccagctattgttaacaatagtagaagaacaacaacaccaactactgctccaatgagaatgcttttgtttgatgactttgatgaaacttctacatctgtgacaaaaagaaaggcagagcaaatgagttatcaataacaacctttagttctagtttgattgtgtgtgtgacaagggttcatcataccagagaactgtttgtacaaatcagctttgaaaatataagggccaaatatcggaggaggcttannnnnnnnnnnnnnnnnnnnnnnnccaacaagtgacattcctgtctgattaaaactctctcttcccaatggaaagaccaatagatctattagaagctgatgatcagttggattctctcttatgttccgaacaccaacggagtctacaggataattgaacttcttaaagaaatccgcgattgccttctgtagaattgagaagttggtggagttgaacaaccctgagaaagaaggagaccggaagtagagtgttcccatgaatggatacgcacagcggcacgtgggactcgcttccatgcccggttcgcatggagaacagtttgttgggagtgtagaaaatgaggtattgtgttggattgctgaacagtaactcggcccgtttcccgcctctagacacactggattatttgccaatctgtagatatataaacacttaagcagttgattgagacaaatagaagtcatgtttgattagtgacaaggatacatacattacttggaggactttattagctgatggtttataatcagttatttcattgtattgtaaatccacaaactccaactggctgctaacgtctgtaccaaagtctaagctttccactatactatttcgctttaagatactgcaaagtccaaaaaaaaaagaatcccaatttagtacaaagttcataattcttgagttcatttccagcttcattttttttttttttttactcacacagtctgcaactgaggagggctgaaaaatgagattggtattggaccattaagttggatcccttgcatccttctgcgaagaagaaaaccctttgttcttagaaagtatacacatgggagataaatggagaacaagacagagacagagatgttcatacaatgttgatagggagggtaatgaagagatccatgatggaatgggtgagaaatccaaagtgttattgctcacatccctgttacatttacaatcacatcatggcattagattggtaaagaatgaaggtttgagattggtagtgatgataaatgtaaaaaacttacaatgtgtagagactggtcaagctggttaaatttggaagagtaccagtaaatctgttgttggccaagtacctgaaatgtattcaactacaaattcttgtacctcattttcatttattttcaacaaacaaaagaacaaatctttagttgctcacttacagttcgttaagatttgtgagattgttaagatatgaaggaatatctccaatgagtttgttcctatcaaggcgtctagaaccaagaaaaaacacataagaattatagacgttaggataaataaaaaatttgaactatatatattactacttacaacaccgtcaacgttttaacgagactgagggtctctggaatttcgcccgtgaattggtttccatcgaagaggctatcgataaaacaacgaacaatgcagtcactttgttagttacttactcacaacttatgaaatctctcagctatataatgtaatatgaagcttacacatgtattaaactcatgtttgagctgaaaagttcttttgggatattgcctgaaagcttgttttttccaaaatgactacaagaaaaaagcaaaggagagtcagatcaattactatattagaaggagtgattataataaacggaagtgaaagatttgggattatatatacaaatgcttagtttgaagaagcatgtca

SEQ ID NO: 4667 - DNA, 857 bp, Arabidopsis thaliana landsberg
actaactcaactacattcactttctcatgcagccattttgggaaaaataagctttcgggagatatcccagaaaagctcttcaactcaaacatgagtttgatacatgtgtaagtttcatggcccactagcgaaagctaaagattttgcaccacttgagagtagtaactatataagtgattgcatggtttgttgtttttcgacagactattcaataataaccaattcacaggcaaaatcccagaaagcctcagcctcgttacaacgttgttagtcttgtaagtagtaaaagattgttacaaaaaggcttattcatccgatccctaacaattttaatctcatatgatgttatttcttttgttaaagacgccttgacacgaatcgattaagtggagatattcctccaagtcttaataatctcacaagtctcaaccaactgtaagtgtaccttttgttgtgtatttgtaatattataagcgaaatgaggtaagtaagttgaattcatttcaggcacttgtgcaacaacaaatttacaggcagtcttccaaatttagccagtttgaccgatctcgacgaaatgcaagttttcaatatctatcatcctcgtttgctgctcattttaccattaatattactcttttaaaactatcattactagccaaactaatgccatgatgttattttttttgtaatagagatgtgagcaataacactttggaattctcactcgttccatcatggatcgtttcattacgcaacctgacatcaatgtatgaacctctctgatctcagtctctctcactctctctctctagatatatatggatgtgcattcttacaaagttcttctacttggcaga

SEQ ID NO: 4668 - DNA, 922 bp, Arabidopsis thaliana landsberg
  unsure (1)..(922): unsure at all n locations
gcataccacccaacccatacacatcgctcttctccgcaattgttcgcttgtagtactcaggatcaagatagccctaattaattccagagatattgttagtttttatagttaatggtttcatatattttatgatagattcttttttactcaccatggttcctttcacttgtgttgtgacatgagctttttcagggtcccccacaagtttggagagaccgaaatcagcaacctttgcggttagatgttcatcaagtaatatgttatttgatttgacgtctctatgtataattggaggatcagcaagctcatgaagataagctagacccttccctgagccaagtgctattttgagccttcttgtccaatccagtttaaccccattcttccctacatttgtttttcaagttcagcaccaaagaactaacaaagcaagatatatagagattaaatatatacctgatagaccgtctctaagggacccattaggtatgtactcgtatacgagcatttgttctttttgatcaaaacagaagcccaaaagcttaacaacatttttatgatggacccttgaaagaagctcaatctcggtcttaaactcgaacgctccttgcatggatccttgttgagctcttttgattgctatgacttgcccattgggaagggtacctnnnnnnnnnnnnnnnnnnnnnnnnttggtattataatttgaactactacctctggttgttccagttgaggacattggaaatacacagacctggccataacctccaccgacaacatcatttgcatctgaaaagttgttagtacatttgctaagctcttcgaaagaaaggcttttgttcccattagttgcggagcatccatttcattcttccccgcattccacttggctacaacagacaaacgagaagctgtcagg

SEQ ID NO: 4669 - DNA, 401 bp, Arabidopsis thaliana landsberg
aaatgactttgctacatgtgtaagtttcatagtacatgcaaaagctgttagttttcactagttgatattagaaactaacaaagtgatgattgcatttttgttcttgttttatcaataggctgtttgatggaaaccaattcaccggtagcatcccagagagcctcggcctagttcaaaatttgactgtgttgtaagtagtagaaatatattttccaaactgtatgttcacaaaatttctttaatcttataagatatttgctttgttacagacgtcttgataggaatagactaagtggagacattccttcaagtcttaataatctcacaaatcttcaagaactgtaagtgagcaaataaagatttgttctgttttcttaagatatataaatgaaaagatgtaa

SEQ ID NO: 4670 - DNA, 3295 bp, Arabidopsis thaliana landsberg
aaagctattgtagtcaattagaatatcattaatattgaggcgtcagatgctaaaattgaacgtatatttgcgccaatgggcctatttacctcttttaataaaagcccatttaactctcaaattgtcatcttcttcttacttgtgcttacaagaacaaaacataacaaaacactttggtaaccaaaatcttacaaagagtatcaaatgttgttactaaacagagtgattctacatatcaaaatcaaagcatctcaatatcacatcggtcgtgtcaggtttcgatttcacaggaacttggattcaaagcttatcgagtattgctttgagatgtggttgaagagggttagtggttgtactcatatgaaccacataagatagttttccatcaaccaattcaaattctctacttatctccttcacctattggagaaaacacaaccattaatcaccaattagaaatacaaatatgttgtgtgtagagacagagacattgaattaataataacaaagagaattaatctgaaacctttgaagcgtttcccacaagatcacttttgagtttgattgattgttcatctacattgtatgttcctttctgtgatcagagattcagcaaaacataagtaatgattttggaagcttatggtaaacacggatctaatggaaatttggattatgttaacctggacttcgacgagacctgtgctctgagcaatgacgacttcaatagaaccatctggtcttggacgaaagtaaccactctcggcgtgcatcggagctcctgattccaatttccatgtcttttgcgtatacgctatcaccggctacacaaaacaacagtgacagagtaagcgtatcgcgattttggtatgcagattggattaaggttaaaaatgaatcggagatctgatatggttaccttgccggaatgtgagaaacggatctcttcgccgtagcggaaagacggtatagtaggatattcaccttctccttgtcctctccatgttcctaatagatacgacaacggcgctacaaaagggtgcaccggcggcgattcccctgggttttggagttgctgcagctgattcatcgccggtattagcaattttctctggacagatgatacatacatacatacacgtgataattggtaaatatgctaaagcaggctacaggcccaataatagtaggctatgttctgggccattgggcctacattatattaaaaaaaaaacataaatcgatgtatgttcaattaatggtcgatctctaacaaatttaaaagttgaacttaacataaagtggattcgttgaaaaacagtaaatatattgtggactcaaaataaaaacagatagaggttttctaagattagtattttatgggtaattatgtttatgttctactatctaaacgatactgtattatgttgtgaaaactatattttattcaaggattctatttatgaaaacattgatattataccaattgatatagtttttggaagatgtattgatagtcatattatttttgtcgggtgaagaaaaatatacatagaaagaaaagagataattaaggggacttcactattttctttgtcttgaatgaaattcagaccatttcctccctccacttctccactttctttggaactcataagatactttttctccatccatttcttttcctctcttttcttaattaatcactgtccttttgtctctattttccacctgctttcttcatttcaagacaaactcctatgttcaccaaagaaacaaaatattgaacaaaaaaaagaaacacacacattaatataaaaaaaactaatcaataagctatagaagattgttttctcttcttgctcaaaatcctttatggcatccgaaaacttcagacgtggaaggtaaaaatgctgcaatcttttgctccatatcttttaatttttctctgccaaaaaacagtaaatatacatgcgtacgtacctcgacgtgcagaccaatccttttgctagattctattcacaagacatgaggaagggctttaacattcgtgacaccaagtaatgtcctcatatggatgataaatgaactcaacccatattgacccttttttcacataaaaataaagctttaatctttctacattgaaacaggtttctctgatttgggagactcgctggcgatgttaacgaagcccggaaagaagcttgactcttcagaggtatacgaggatactcttgataatgaatatggagtttgcatatctacttgtagtttgatatctttttttttttcgttattattgtgcagtcaactcatcatactacgagttcaaactatccaccattagatattgttcatcaaactccacaaccacgcaaagagatgcaacaaaagccattgttcgatcccaagaagatggataatcttataaaaccggagccagctgggttcaccaatcaccaccgtccaaaccctagtccaaaaatcccatcctcaccaggttccaacatgaccgagtcacaatcaaacttaaacaccaaaccaaacaacaacaacagtaacaacaatagcaatatgagctcaagaagcaacagcattgagagcacgtcctctaatccctctaagccacacacaggtggtgacattaggtgggatgctgtgaacacgttgacctccaaaggagtccagctcggtatcagcgatttccggcttcttaaacggctcggttatggagacattgggagtgtttacctagtcgagctcagaggaaccatcacctatttcgccatgaaagtgatggacaaggcttccttagctagcaggaacaagcttttgcgagctcaaacagagagagagatcttgtctcagcttgatcacccgttcttgcccactctatactcacactttgaaacagataagttttattgcttggtcatggagttttgagacgccccccaatctctattccttgcgacagaagcaaacaaacaagtgtttcacagaagacgcagcaaggttagggaaatcaaatttactgcactaagtaacacaatagacaattatatttgtagaattcaactgacaatttttttttcatttgttcttacagattctttgcttctgaagtgctatgggcattgaagtacatgcacatgctaggaattgtataccgtgacttgaagccagaaaatgttctagtcagagatgacggacacattatgctctccaatttcgatttatccctccgatgctccgtcagtccaactctcgtcaaatcatcctctgttcatgc

SEQ ID NO: 4671 - DNA, 1540 bp, Arabidopsis thaliana landsberg
ctaataattcctctaagcctcacacgggaggagatattaggtgggacgcagtgaattccttgaaatctagaggaatcaagcttggaatcagcgattttcgtgttttgaaacggctaggctacggagatatcggtagtgtttatcttgttgaactcaaaggggcaaatcccacgacgtatttcgcgatgaaagtgatggacaaggcttctcttgtgagcaggaacaagctgttgagagctcagactgaaagagagatcttgtctcagcttgatcatcctttcttgcctactctttactctcacttcgaaactgataaattctattgcttggtgatggagttttgtagtggtggaaatctctattccttgagacagaagcaacccaacaagtgtttcacagaagacgctgcaaggttagtatacaaacagagtctttagaaacagaggaaaagtacatcttaagggtttgtttttttggcttataggttctttgcatcagaagtgttattagcattagagtacttacatatgctcggaatcgtataccgagatttaaagccagagaacgttctggttcgagacgactggtcacattatgctctccgatttcgatttatccctccgatgttcagtcaacccaacacttgtcaaatctttcaacggcggtggaaccaccggaatcattgacgacaatgcggcggtacaaggatgttaccaaccatccgcattcttcccacgaatgctccaatcctcgaagaaaaaccgtaaatccaaatccgatttcgatggatcgttaccagaactcatggcagagccgacaaacgtgaaatcaatgtcttttgtcggaacacacgagtatttagcgccggagattatcaaaaacgaaggtcacggaagcgccgtcgattggtggacgttcgggatattcatctacgagcttcttcatggagcaacaccatttaaaggacaaggaaacaaagccacgctttataatgtaatcggacaacctcttagattcccggaatattctcaggttagctcgacggcgaaggatttgatcaaaggtttattggtaaaagagccgcaaaacagaattgcgtataagcgaggcgcgacggagatcaagcaacatccattttttgaaggtgtgaattgggcgttgattcgtggagaaacaccgccacatttgccggagccggtggatttctcgtgttatgtgaagaaggagaaggagtctttgccgccggcggcaacggaaaagaagagcaagatgtttgatgaagctaataagagcggtagtgatcctgattacattgtttttgaatatttttagccataatcaccattatatagttgtaacacgaaacgtcgtcgtgctttttctttttctttgagatataactattgggccgaagataaagcccaatatgattctgtaaggtttttttagacccaagtgtaagaaaacattttattaagagcagatcgaagctttgtttaaaaactcagcaatggcggctgggttctttcaagcagagatg

SEQ ID NO: 4672 - DNA, 599 bp, Arabidopsis thaliana landsberg
accactccttttgctagattctattcacaagacatgaggtttggcttttacattcgtgacaccaagtaatgtccgcatatggatgataaaggaattcagcatcgacctcttagaaaaaataaagcttcaattattcattgaaacaggtttctctgatttgggagactcgtaggcgatgttaacgaatcccgaaaagaagcttgactctttagaggtatacgagactacttttgataatgaattgggaaaagacaaaaaagccacggaatattaaagtcagtttaagtgagggtaaaatcgtaaaaaccttgtagaaagaagtacctaaatcaataacgcatatgagatatgcctatttcaacaaaagcatagattttaatgtgtcgatcccataattgatcctttttttgtcatgctaatcttcttagtataattggtgaaatatatctaatactaaaaatcatgacacttgtcaatccatttataaaagtactataaaaccaaaattaaaattaattgtttaaaaggttacatatacgtaacatttttttgggggtaaatattacatgtactagatgtacgcatatttaaatagtttt

SEQ ID NO: 4673 - DNA, 2502 bp, Arabidopsis thaliana landsberg
cgctcgagaatgcctctgaatcatgcggagatgataactgcatcaacacatgtttgcaagtaagttcatggtctagtgtggatactcttcagatttaagattttaaggtctctgaagtttctttcgattgtgttgtatacatgcagtgattgttatgataagctggtgggattccttctatactggttccggataacactgccgagaaatcatttgccagcggatgtagcggctagggaagattgttggtatggatacgcatgtaggacacaacaccacaacgaagatcatgctcgtaaacgtaaccatgtgtgtcgtcctaccagagggaaccatcacttttagtccgcttttcatcttttcctctgacaatcttttgattatattttgggatattctgtatgagtagttagaaactgttccttgaatagttatcaaaatggattattttatcatctgctatgcactatatagaagttgatgtcgggtcaaaaatatatactgttatgtttgacatatatcaatcagatcaaccaatttcttagcaaatttattaacaatcttatgaatagccatttttgtgtgtttcaaactttcaattgccaataaaaatttaactacaatatcaaaatgattcgttacgttaactgaaactctattaaaatgttatgtcatctcaaaaatcttgaatacttagagcatctccatcagtatgtcatctcaaaaatcttgaatactaatatgggtctatctctttttttttttttttccacacttgagtctttctctttctggtcaaaaattttgggtcttttgttatccaattttatgtataatcaaaagctaatcgtgaagttggtaaattgtagtatattacactactaagcagctgatttacggtccttttttcatatttcccatgtgtcaaaatgtaatttgggtaatcattgtcagatgtgacaagcagataagttttctaggttgctatgttaattctgtaatcatcgccaaataatcagattcatattcaagtagtaaaacataaaaaaaaaaaaaaactatcttttatctgttcatggccaaatcaatgcggctaccaaatttagttgatcaattacaaccaattctataaagaacaaaaaaaaaaggtaatttgaatcaaaacgtggctcagaagtgcttgaaaggtaatcacgagattaaaaaatctcaatcatgtgataaaaggtcattttttcttcatcatcaccacaaattttgtttttctcagaaaaaacatcaaatacaatttgaaaataccgcaaaaatattatactttaaaccaacgaactcaaggttgatcttaaaaggataacaaaacccagaaatggtaagcttgaaaccctttttcaagatcaaccttgatttttactatctcgaaaacataatttggatttctgaataacttcaccgtgtatcagttgtattatatatatagtgaaccctgaaattagggcaaaccctctgttcaaaaagaccaaaatagccctaacaacgttcaattatttcgaaaacactctcacagtttccttggtgtctccgccattactccaaaacttctgcttcttcgaaacttctaaagccttaaagtttgataatttatctccaaagacatggtttttccaattgcaacaagctctgttacgaaccccaagctccatcattaccaccatcttcgtgacttcaacagaaacagagtatctacatctctaaagataataaactcgaagaatcacacaaacccaagaaagtaaagttcctctctctttatattctctttgaggaatttaacgaacaccttacgtgcattcgttaacaatgcataacagagtatttttttttttacaggtgtgagtgttttgatctctacgatcaattaattccatacaaggaagcttggtcatggcaaaaaagcattctcaatgagaaaaaagctttgattgataaaaaccaagagtgttcagattcattgattatactacaacatccttctgtttacacaatgggaactggaagctcagagaattatctcaatttcgacataaagaatgctcctttcgatgtttatagaacagaacgtggtggtgaagttacttatcatggtcctggtcaggtaaaacacaatgagtctcctttgttttcttctcaaattcatcaatattgaagctaatggtttgtcaatgaatgtgaaatgtagctagttatgtatcctataatcaatctacggaatcacaaaatggatcttcattggtacttaaggaagcttgaggaagtagttattcgtgttctttcttcggctttcgccatcaatgcttctcgtctcgacggttttactggagtttgggttggtatgtttgttcataatcttcacttcttactgtggtttgatctgattcttgctagtgaactaatacatatgtatttatataggcaacaaaaaaatggcggcgataagtattcgtg

SEQ ID NO: 4674 - DNA, 2200 bp, Arabidopsis thaliana landsberg
tgtggccttcctctttgagttcgaaggcagtgccagcttcaagtccaaagggaggggacgtttgcttattagtcttgaacctaagcatagttatgactgagccatcactcccaaagattttatcgtaggtgccttcgactgcgatgatgtattcacttggatagtcaagtacgaactgcagttattggaaccttgaatacgtcatcatggaaatcgaaagaaaatttgaattctctgatcaaagcatatatatagctatatgtatataacattcatcaacaacaaaaaaaaaaagagaaagaaaacattatacctcttcgaatccgagtagagtactctttccatgttcttctcctgtgaccttctcagggcttttgtcgtatacaaacttaacagccgatctaccatctggggcttgtcctacgtacaccttcttaaccccaacgtaagcaccatcatcccatgctgttccatcatcactaccaagagccggtaacggtttgtcaggcgtcaatgggatagtcaacggagcatagtgagctccaagagaattaagattgtctccggcagacccatgaaagccaatgatcttcttgtcttgaacttggagaaatgatctagtaccacgatcgtatccaatgaaacgagaagtctttttgttggatatgaacctaagcccttgaataagaccatcaggtttataccaaatttcaatagaaactagatgctcctcaggatggttaatcacaaactgtagagatcaagttcaatatgtcaatacttcaacgtaaaacaatagattttctataaaaattagaagaagtcaaataagcaaggaaaatgtataggaaccggatcagttggaatggtactgcctttgataccacgaagaggagtttgttcggtttgtccgttcttgacgtaatcgaactgaatgtattgaattcccattccgcctactgcaacctgaatcttggtcacggcgtcatgatcggatccatcgtcccattggttgcctcctttccctccttttgcttcaaccttttgagccatattttgcttgctgatcaatcttactatagttactataattggaaaaaaaaacaaattgtgaattttcaattattaaccaattttgtactaatagagaggaaaagagagatgaccttcaaaagtgagtagattgtgatcgatttaagtgaatcataggtgtttatattgacttcttgcatataaccatatatccgcatataggatcattgatcgtactagcagaaataataatctattatttcgtgatccacgaggcatatttaaaacattaccggaagaaatacatgttcaaatattcatatactccttttttacttccacagcttctcaactaatcggctttatattggtgttggccaatgaaacgatggcagccaagctaattagttcttttaaaattcacagagtcgtcaattttattatatacgttattacttgtaaagggcgcaagtagcagattatataaggcagaattctacaattagtgaccccctttataggactctaattggttgacgatttgataagtcttgtatgaacatgtttccacagcattggacattattacacacagtcaaagtattattgaaatcacctaagagaaattagaaccaagagtatatatataatacaattttctgtaacgctcaatctagaaacaagaaccggttcgtattttttggccaactcatatacttttaactaataactttttatgtttggagaaggccaaaaacttcaatatggtcacacattctagataaaaactttgtgcaggatttttttactgagaaaatacgaacaactatatatttgatccaaaaaagttaacatttgcattttaaattgtacaattcatacgttgagattttagtttgaattatagcaagtaaaattagtatcagaaccaaataatggcaaaagtaagtattatagaacatatagggaaactaaagatcagattggaacaaacttcctttattaaaatagagcacaagaagaacaaagaaaaaacaacatcgcaagagacaacgcgtaaaacacttatcaaagatcaccattcaccagaggcatgaagagacctcatatgagaaatttagaagatagatttgataacttattagatgcatggaatccaagataaaga

SEQ ID NO: 4675 - DNA, 1667 bp, Arabidopsis thaliana landsberg
  unsure (1)..(1667): unsure at all n locations
caaagaagaacgcttaaaagcatttaaacatagataggcataaccatcataggtataacaagttattttcaagagatcacattaacaagttcgatggaagcgaaggaggtagctgaaatgtgatcattcggtgattggcatgacatggactccaaactgatgaagcaaatcgctggcttttccatggaagccaacgatcttgtggccttcctctttaagttcgaaggctgtgccagcttcaagtccaaagggagtagacgtttgtttattagtcttgaacctaagcatagttatgattaggccatcactcccaaagattttatcgtaggtgccttcaactgcggtgatgtattcacttggatagtcaatctcaaactgcaattaaaggatttcaaatcatatagatcaatctgctcactatcaattagttttaagaaaataaaaagatacaacatattttgaattttgatagaaaagaaaaacaaatacctcctcgaatccgagtaaagtaggctttccatgttcacctcctacgatattctccgcgcctttgttgtactcaaacttaacggctgatatcccatcttggccttgtcctacgtacaccttcttgacaccatcgtacgcaccatcgtcccatgcagttccttcatcgccaccaattgcagatagttttttggcaggagtcacaggagttgtggttgtagcaaaatatgctccaagagcatatagagcttcgccagcgcgtccatggaacccaacaagtttgccaccgtttttgtctttcagtacaaacttcttttgcgtttccaatccataggggggagatgtttttcccttgaatgtattgaaggtaatagatgtgatgatgtcagagtcttggccaaacacgttgtcgtaggtcacttgcactgctactatgtagtcgtctgcatcaacctcatactgcaatgatcgaaaagatacctctcgtgagtaagggatgttgtaatagattaactcaatctagaccgtattaggtgtgaattggtctagtcttaattggttctcattttacaaagctttaaaactgatccgaacaaggctaataagttaaactcaaagagagtggtagcaaacaccactacataccgtttcaaatccaagtaacgttttctttccgtgttcacctccttcaacatcctgagagtccttcgcatacacgactttgatagatgacacaccatcttggccttgccctacatgcacctttctaacgccatcgtggacaccatcatcccatgaagctcctccggcggcaccccctgcttccactttttgagccatctttttgaatattaattaattacctgtacgtattnnnnnnnnnnnnnnnnnnnnnnnnnnnnnnaactctacaaaactattatcagacgagagactgagaatttacctgaggagagagggaacgagttattgatatgcattacaatgaccttcatgcgtatttattgattatttttatttctggataaaatgtgtaattattgatatcattgaatgtaggccactaatataatcgatagaaatgtatatattntattaatataatctcgcgatccacgagtcattaanatatcagaatgtgtgaatatgaagcaaatgacgtgaatggagtagttgatatt

SEQ ID NO: 4676 - DNA, 1017 bp, Arabidopsis thaliana landsberg
aaataaaataaaatgaaacctcatcttatttccgacaaaatcagtcattagaagtttttcgtgcttcaagattccaatgaccacaagtaatataaatctataccaaaccaaatttgactaccatccgtttgcaattagaattcaattttcctttcatgttactatttcaaacagaaacatgccaaaaatggaacttacctcattatgtccgataactaaccgttatgctactccttaagaaacgtgtgctactatcatatcattaatacacaaattcaactcatttgcttcatattcacaacaatttaatagtttcacgtatcgtggatatatcacgagattatacaatatcttctattaattaattgctggcatgattgtaaaaaaaaaaaaaaaaaaaaactgctggcatgtattcaaaaaaatcaatatatacccccatgcagttcttcgtagatggatcactcgactctttctatctatctcttatcaggtcaaatcttattctctcatatctgatagtatttttgtaaatattggttattaaaaaattgtgttcgtaattacaggtaattcgaaagacatcaaaagcaagcaaaagatggctcaaaaggtggaagcacaaggaggtattggaggagatgtatgggatgatggtgctcacgacggcgttagaaaggtgcatgtagggcaaggccttgatggtgtttcgtttatcaatgtcgtgtacgagaatggttcacaggaagttgtaggaggtgaacatggaaagaagtcactaattggaatcgaaacggtacgtaaaaatgttttgcttcgaatccactaatcttgtctttattttgcttaagtttatattatatgttcttaaaactactaaactctcaatactagggatataacgttatgataggataatagctcgcggaccatccaattagccatgtttagaatttaggtcgtatcagttctaatgattaattatagttctaaagccaaacctaaatattaaaaata

SEQ ID NO: 4677 - DNA, 568 bp, Arabidopsis thaliana landsberg
acgggcacaaatgtttcagagaaatgtctactgcctacgttttattaagtgatattagactttgcaaggatggggggcagcgtatttctaatgttattttgaaagataatgatattttgcaacagaataaaaggactgtacagttatactattgtacagtcaagcgttatcaagaaaagtttcacagatgatgtaatgggttgaggtaaggatgtaaaattattttgaatccttttatgtatgaaattaagattatgttttttgtgtcatattatgaatattctgtttctgtataatttgggtaatattgaggtgctgaggaggtaatgtttgaactttgtttaataagggaaatgtatgaaatggttgtaatagttattttggttttatagtctaaactaagaaggaatatgatttcgtttgtaaaaatcaatgtaatgatcttggtaatgatgacttgtaagaaattgaattttcgggtaccgagttgcgttcgacaacgaagttaaattgtgggggaaaagaagatggagttttaacatttttaatgtatttagggcccagtaaa

SEQ ID NO: 4678 - DNA, 251 bp, Arabidopsis thaliana landsberg
tagcgtacacgattagttttattaaccaaactctacaaaactatgatcagacgagagactgagaatttacctgaggagagagggaacgagttattgatatgcattacaatgaccttcatgcgtatttattgattatttttatttctggataaaatgtgtaattattgatatcattgaatgtaggccactaatataatcgatagaaatgtatatattttattaatataatctcgtgatccacgagtcattaa

SEQ ID NO: 4679 - DNA, 2379 bp, Arabidopsis thaliana landsberg
caaaaaactggaaaggacactcctacattcatatcgtaaggtatgtaccacaccatgtcggtgtttctataacgttatgatctctcatcactgctttttatcccttcaatgatgatgttatctatgcttgcaggatttgatatctcaagtttccaccgaatcagaccctattgcacttctcgctaaagttgtctccctcctttttattaaggtacatacatatccacgttcgtgtaactatattctgtgctcaaaattcagattaatttatggttggaaaattgtcgacagattcacaataaagctttacaagcccctggtagagccattgctgcggctatttcacacttgaaggtataacataacaacttaggagattcacaataaccgtatcatcttttctctcgagcattcctattttttcgggtgtctggtcactctgtattatatcttagttttctttttctgtggctaacacgtctattttaaaccatgtaggaaaaacttgatgaatctgcgtacaagactctgacagattaccaaacagcaactggaactcttcttgctctaatgtcagcttcatccggcgaggttcatatccttctcttattttgtgggctacaaatgttcatttgaaatgaaaccaattaaatctgtagtgaatgatatcttaaaactattccatcaacatgaacaggaacatgattgctccgcagacagaatcttgaccaaacgggaacttctcgagagccagatgccattgcttagaaccctcgtccttggtgactcgcagccacaacaatcctaatccaacaaagtcaggtcggaaagtttctttagtgttctgctgacaagactgaggtcccttcacttaaaaacttattaggactaggagaaatgacacttaaaaacttttatattcaaaagattcgtatggttggctcgtaactatcaatggatcaaaacactcttttattacgattacttatattgatacaacgagattggtgattacaagaaaaagaagaaaggaaagtcgcaccatttatttcacactatcacatattactgtcgtaagctttccaacttcagagttcctcttaaccagagatatcaatggacttgacctccggcttactctcctgaactttcggcaccgtaaccgacaacacaccattctccatactcgcctttacttactccacctttgcattgtctggcaacctaaacctcctcatgaactttccacttgaccgctccacacggagccatgcgacactcttctcttcattctcactgctcctctcaccgcttatctgaagtatgttaccatcttcaacctccaccttcacctcttccttcttaagcccaggcacgtccgccttgaacacatgcgcttcaggtgtctccctccagtccactttagcgtttgtgaacgctgccacgtccttggcaggtgcgtttgtcaacccgggcgtcaagaatccttcgaacggatcccatacgtctagtgaaaatgggtcgaacacgtttgttcttcggcctccaaaaaagctcggaactagagacatcgtttcacttactctgtttgctctgttttgttttgttttgctagaactctcttcgaatgcaaacacttatgtgcgttggcgtatttatagggagaaatgatggtagagaagaggataagagatagaaagctctgcaagtttcttgaaatttcaggtttcttctttccgtttctttataacgtgtcttttaagagtgtcgctaccagatttctcaggtggcttcaagaagcttctatgttgatggttgagacgacatgcagttcattaggtggggtagtgaacgccatgccgtttcattttaccatggacttcgttaatgggccttaatacaccatgcaattaatcacgtgttgtataatgaacacttatcttttgttgataaattcaatcttaatcatgcatcagcaactattcttcattatctaaattttgattgttggtgttggtccctgtaagactagagttctcttctcacaaacaaattattaagttatagcaatgaaaagttacactctttattgaattttaaccaagaagtcgaagatgacacgggatttttagtggtttgatgaacaagttattaataacaattaatctaagatttttgtgtgaaaagttgcaaatccctttctcgattgaagatctagaaacggcgggaaagaagcaatgaaagcaagtggaaactggaaatttgaagaaaatcgaaggaaagttgaatgaggtgggttgctttggataagaaactaatattaatttttgggaagaagaagagtcggattaaaatccgattaagatagaaaaaataaaa

SEQ ID NO: 4680 - DNA, 513 bp, Arabidopsis thaliana landsberg
attctttttcgtctgttgaatctttcattcattctttttttatctcttgatcaatacacatgctctgggggggggaggtgaagcatccattgttcaagatgggatcgtttacatcaacgagttacgaagactagttagcgagcttaagtatttggttgagaagaaaaaatgcggtgcaaggcacaacaacattgaagtagacaataaaaacacgatttatgggactagcaagatagagcatccattctccaagatgagacttaatgatgatgatgaagaaaacatggagaagaagaagccggagagcgatgtgatagatcaatgttcatggctacagaggaaatcaaaagtcatagatgtttccgttagggttatcgatgatgaagtaacgatcaaagtcgtggtgaaaaagaagatcaactgtttgatttgtgtctccaaagtgcttgatcagtttcatcttgatcttcactatgtcgctggaggaaatttcggtgaccatcacagtttctt

SEQ ID NO: 4681 - DNA, 565 bp, Arabidopsis thaliana landsberg
  unsure (1)..(565): unsure at all n locations
cttgnnnnnnnnnnnnnnnnnnnnnnnnnnnggtttcccatatatcaagtttaagcttcaagacggggcgctgcagcacattacagagaaaacggttgacatcagcatcacgatttggtccatcacgcccgcgacgttttatagagacattctttatgcgggtactggccggaagagccagcaaaccattcaagaaatccgtcaaacttccttgattctcaagggtgttatcaaactcaagatttggtacgatggtatagatattttgccacctctttgagagaacctgtggctactgtttcgtctttctgccaagggggggaggcggggttttttattttatcactttggagtctggcgcctttatccatctctttactcaactaattggaagaaagttttcgatctacaaacatagaaacgtgataatacgactctctggaaacgaaaatactttgaaagtggagatatttaccgaagatatgaggagaagaggcaatactaactacgtgagactatatgaacccttattagaaattttagaaatactttctacgggagagcc

SEQ ID NO: 4682 - DNA, 488 bp, Arabidopsis thaliana landsberg
caccgagtagcaatcacaagaggaagtgaaacgatgtctctaatttcaagcttcttcggaggaagaagaacaaacgttttcggtgcgttctcgctggatgttttcgatccgttcgaaggtttcttgacgccgtcaggattggcaaacgcacccgctaaggatgtggcagcgttcacaaacgctaaagtggattggagggagacacctgaggcgcacgtgttcaaggcggatttaccgggactgaggaaggaagaggtgaaagtggaggttgaggatggcaacatacttcagataagtggagagaggagcaatgagaatgaagagaacaatgacacgtggcaccgtgtggagcggtcgagtgggaagttcacgaggaggtttaggctgccggagaatgctaagatggaggaaatcaaagccagtatggaaaatggtgtgttgtcggttaccgtgcccaaggtgccagagaaaaagccagaggttaagtc

SEQ ID NO: 4683 - DNA, 1181 bp, Arabidopsis thaliana landsberg
ttagctagggttttagtgtattgccttttggatgaaacatccactaataattttcactgaacctgtagcatactatgctattacatttgactctccccttccttttttgacacaggtacgatgagcagtttgtggtagcgaattttgatggtgctcctatagctgattctgaattctttggcaagttggacccttcaattcgtgatgcacatgagtcacgggtgagttatgagttaccgatatccatgagtatggtccaattatctctggtctctatcatagggatactttgttcctgagagaaaagatgactgtatcaactatatcgtttttgttgcttacataagtgtacttgaatgaggataggatatatgatatatggggctgaatcttaactatggttgattgccttattttcatattgatgacgagctctgacctcatactccacaggccattttgaaaagctatgtggtggctggatcagacactgccaatccagaaaaatttctggcgtacatggttccttccttggatgaggtagacatgcctctccataaactgatctctcttttacacaaattttgacaagtcaagaaaagttcagtttgattgatgtgttatcaatttatgttgctgtgccagttgtctaaggatatccatgatgaaaacgaagaaatctcttacacttgggttcgcgaatacctctgggatgtatgtactatagccaatgtggtttaagtgaaattttgattgtttgagttgcagattgaaataaatatgtcacctgatgttataacaggtacaacccaatgcaaacgatcctggcacatacctggtatcatttgacaatgggaccgctagctatctggtattgcatcggtttttgttacatattccagttgtgtatcttttttttcttctgtctataatactttgggatcaccgttgagaatttggcagcccctacccatgaggttgaacttgaggaagaaaagggccagggaaggaagatcttctgatgagattgaacactttccagtaccttcaagggtaactgtaaggcggagatcaactgtatcagtgatagaacataaagattcaggggtatagtaaatccatacacctagcctttaaaagagtaacacgtggaaagtactagtactctggccaattccttt

SEQ ID NO: 4684 - DNA, 4539 bp, Arabidopsis thaliana landsberg
gttgactatataacctttaatgaattaaattggttataacacttctttttccaaaggcattgtaacgtaatatcttacaaaaaccaagattgtttttaattaggtacttccctaacattaatatagagatttaagaaaaatcaaaaactgccagttaaattcaaaacatatcaacatatcaaaatgtctagagtttctttttgtatattatatgggtcgagacataagatatccagcatgccatcttatgtgtgtacgccgtttgccaaataatcaacctagacaacacttgaatcaaaagaaaatcacataatcgcaccgagtaaggacgaatgaagaggttgagaacagaggttggtgtttatgataatgagttctatcaagatagcttccacgcatgcattaatcttcctaacattttgttaaaaactttcccaaggaaaaaaacattttcgaaccatttaggaagttaagaatataatacctaatatggtagtggtttactctgtaaatgacaaaaattcttcaaaatctcttcgcaatttcttctctcaaaacccacttgttttctaaaaccacatttaactcttctgaaatttcttttactttgcaaagaaacttcccatccatgtctctcttaacaagtgaactcagctttgctagctattttctcgtccgcataatggtaaaagaatgatcctaaacacatctggccaagaatggacagtatatatacaaattgttatgtacgcttcattatgacttttcttttctttctttttgtttttgtttttgtttttctccatattcgtttgtaataatacatttaaactttcgaaatttcttttaactttgcaaagaaacttcccattctctctctctattaagtgaacactattttcccattcttatccaagacagattttgaaccactcaagatcatctctcatggcttcttcttcttcctcgcctcgcaactggagatacaatgtcttcacgagcttccatggaccagacgtccgtaaaacattactcagtaacttgcgcgaacattttcaaggcaaggggataactatgtttgatgacgaaaagattaagagaggcggagacctctctccttcactcaaaagagctataaaaacatcgaagatctcgatcgtgattctctcccagaaatatgcttcttcaagctggtgtttggatgaattgttggagatcatgaagcgcaaaaaggctatgaaacagatagtgatgaccgtcttctacggagtagagccatccgatgtgcggaaacagaccggggatttcgggatcgctttcaataaaacttgtgtgaataagacggacaaggaaagaaaggaatggagcaaagctttgactgatgtgggcaatattgctggagaagacttgctaaactggtatgtctttgatgaaattgaattatttccttatgttccaagtggtaaccacaatagaggaaacaagcacaaaaaatggttaataggaactacgttgagtagaatagattttcattgattgaagggaatgtttgttgaatgaattttcgaaaatagagtcttagcctatggcaaaagaagaatgttatatctatgattagctcttttttcacaacagtttaatggaaatgtctcctttctttcttttattagggacaatgaagcgaacttgatagagaagattgcaagtgatgtttcagataaactcaatgtcacaccgtctagggattttgatggcatgattggacttgaagctcatttgagaaaaatagagtctttgcttgatttagattatgatggagctaagattgttggaatctctggtcctgcaggcattggtaagagtaccattgccagagctttacatagtgtactatctaaacggtttcagcataattgttttatggacaaccttcatgaaagctataagattggtcttgttgagtatggtttgaggttgcggttacaagagcaacttctttcaaagattttgaacctcgatggcattaggatagcccatttaggtgtgatacgagaaaggctacatgaccagaaggttcttatcattcttgatgatgtggagagtctagatcaacttgatgctttggctaatatcgagtggtttggtcctggaagtagggtcatagtgaccactgaaaacaaagagattttacagcaacatggtatcagtgatatataccacgtgggttttccatcaagtaaagaagctttaatgatcttttgtttatccgcttttagacaaatctctccacctgatgggtttatgaatcttgctgctgaagttgcagagctttgtggttatcttccattggctctgcatgttttggggtcatcattgcggggaaagaactattctgactggatagaagaactaccaagattgcaaacttgtcttgatggaagaattgagagtgtattgaaagtgggctatgaaagtttacatgagaaagaccaagctctatttctctacattgcagtcttcttccattataaacatgctgattatgtgacatccatgctggcaaaaactaacttgaatgttagacttgggttaaaaatattagccaatagacatcttatacatataggtcatggcgctaaaggtatagtggtaatgcaccgtttgctaaaagtaatggctacacaagtcatttccaaagaagagccttggaaacgccagattcttgtagatacccaagagatttcttatgttttggaaaatgcagaagtaagctttctgtttgcgctatcatgtttattcactgctgtttaaagcagatcttgccaataacaagttttgctttggaatattttttgttagggtaatggatcaatcgtaggtatatcatttgacgtaggagagatcaacaaattaacaataagcgctaaggcgtttgaaagaatgcacaatcttttgttgctaaaagtttacgatccgtggtttactggaaaaggacaagtgcacattccagaggagatggattttcttcctcgcctaagcttacttcgttgggatgcatacacgagaaagacccttcctcgtagattctgcccagaaaatctcgtcgaactcaacatgccggatagccagctcgagaagctatgggaaggaactcaggttagttatttattatttgtgttgatatgagacgagacagctgatatttgatgttaattagcaatattcacatagaaaaatataaactaatgctgaaactgtacttaatgattatattatgatttttacgtgcagctgcttgcaaatctcaaaacgatgaggctctttaggtcatctcgtttgaaggaactcccaaatctttcaaatgctaaaaatctggagtgtctggatttgcatcaatgcgttgctctgttagagcttccatcctcaatttctaatcttcataaactaaaattcttagagacgaatcgttgcagaagtctacaagtcattccaactctcaccaacttggcatatctcgaagatatccagatgatgggatgcttacgactgaaaagttttccagatattcctgccaacatcattaggctctctgtaacggagactacgattgcagaatttcccgcgtcacttaggcatttctcgcatatgaagcgtttcgatataagtggcagtgtaaatctcaagaccttttcaacacttctccccacgagtgtaacagagctacacatagacaacagtggtattgagagtattacagattgcatcaaaggtcttcatgatctacgtgtccttgctctatcaaactgtaaaaaactcgcgtcattgccagaagcttcctggttcacttgaatggctacgggcaagccattgtgattcactagagagtttaaatggccatttaaacactccaaatgcagaccttgatttcgctaactgcttcaaattggatgcagaagcacgacgagcgataattcagcaatcgtttgttagcgggtgggctctcttaccaggattagaagtacctgcactgttcgatcatcgagccagaggaaattcattaataattccttattctgcttcctataaggttcgcattgtgatttctacagagtttgatcataaagacagagattctaccatagtttcaagactactgtgtcgttgcatagtcatcagcaactcagtaaactccactgacaaggagtttgtactaacggatgtctataaatatcgaatggaacatctatttatatttcatatggtgaacccggtgtcctttttctacccctctagcagagagatagtgctcgaattcagcagcatacacaaacatttcgacattgttgaatgtggtgtccagatcttgacggatgaaacagagcgaaacaacaatgtgggttctgcagatgaagatgatctctggtatatacatgaattcagcgaatcgttacgcaaagaagaaaaagataaagatagcgtcgctaaatctgaatcctgcggagcgtcagaaaaagaagatgaggaagcaaccaaagacaa

SEQ ID NO: 4685 - DNA, 2900 bp, Arabidopsis thaliana landsberg
tcgcttcaattcatagaattgctttcaagccatctcagagaatcagtaatcagcttaaagcgttacaaagagagtagattatcaaaatatagactcttttttatggaaaattacaatgaaactggtgattaataccaaaaactaatgaaagatctaagaaagtatcaacgcattacacaacaaatggcaccaaaggattaagcagagagatcttgtaattgccaagggttgaattgggtcaacttcacatcggttgtatcctcagagttttcagctgtggcgcggtgcaccgagtactttccattgaattggtaaacttcgagatcaccccatggtgtaggagtgacttcttctgtttcatcaaaccattttggagcaaatttttggcctttctcttctctgcttttcttctcagctctttgtctatcctctaggctgcaaaacaaaaaaaaaccggcttctattagcctttgcattactttgggattagtagtcttagggaagctaaccaaaagactatgagtagttagtaacctgctcttttcgaatccagatttggacatatcacccatctccagcgcgtatctatcaggacgtagacgtgaatcagatgacagtaggtttttaggggcagtgtcaaaactattgatcttgtcagcaaaatgtgtgtattggtatttatcgttctttggagcttcagcgaccttccacacctgtggaaataacataattagaaaggtgactagatatattatgcagagggtttgcttagagtatgacaaagagagaaattgataaaacctccttcagttcggtgcctggaagaggttcgccttccgcatcacatggctgataactcaaggactcgttccattttccggtcattagcatcttgggctcttcagctgaattatacacgtaaccgtccacttcatatcgtccagatctgtccattaggtccacatttcagctctaaatggagaagcatggagatgagatttcaattgatcagatttgtttgaaggtttttaagtttgatgaagaaagaacttacccaaaccagccacatggttgaaagtaaagcaccactttgtcaccagtggtcaggttcgtcatgaccatctctcctggcgaatcgacccatgttcgaccgaagataaggttatgaacctttgtcagtggaggtacaagatcaagaacgacaccatctcttttaagtgtcactcgtgtcctgcacacatattcattgactgaaaagttcagtgttttagtctcacaaggagactcttaaatataaatacatagttaggagatattaccttcctactgggtagacatcaattgagttgcctaggaatttcgttttcagttttgaagtgcaatcgtaagcgaaatgctcgttttcagcatgaccagcactcattggtgggtgatggcagacctgaggaacaaaacattgatatatgtcaactaagaactcataatttttcccaaagtcacattggaatatgagttgtaaagaaatcactcacctgttcagctataaaattgatcccattatgattagtcatctcataagtctcaccgagaattggattgaacggcttccaggtacgctggtaggcgtaatacacagatatagcccatgacgctattaaagatcaaatgaaattagccacaccatgaaaaaactacaaggaagaacaagaagagtggggatgtgattacatgcatataccatacgcatgtaaggatcttcagttttgtcagccatgtctagcaaatatgagtattccatcaactgcagagacaacaaatggagaaaccaaaacatgttcaatagaaaccagaagctaaaagatctttcatataatctaaaatctaagaccacaaacctcagccattttctgcaacattgtcatgggttcaaaaatgatcacaggaagagtaaccatagatgtaacatcagaccctatatacttctgcatcatcttccaatagccatcacgttcctgagaaatcaagccaacatataaatccagagtactgttttttcttccaattcttgtaacaacaacaagaacaaagagagaaattttagtaaatcagcactatacctcttgcttccatcttcctctccctgcttcttcctctgcatcgtctgtacttccttctggattaatcacttcaagcccttcatatcccatcaaactgagaaaaaacaccatcaaacaaaacaacatacacaatcttccccaactatatcactagatcttctccataattcaacaattaacacacgacttcgaatcacaaccaaatgaaatgatattaacattcccaaaacaaaatttacaccaccgtttccacatggagaccaaatcaaagattaacataacaagcttgtgaatccagctgacgattctaggattcttaaacgagaaaatgtgttggagatttgattttcttacccgttcactgatttactcatggccgatccgaaattggtgatggatgaagcaagagaggcgaagaaaccgccgccgttttttggatcgttagaagccatcaccaccggcgattacagaaaccaccagctctaccttaagaaagaatgagatcgatcagcgacggagatgacgaagaagacgacgattcttcgttggcggttctccgatttgaagtcaaaaagccactaaatgattttgtttcttatatcacatttgaaaattgaagcattaaccgaaccaaaccggattccttgatatttgaaagcaagcagatttgagaagatgtcgacataaaccacgtgaggcccaatataagctcacattctacatgttgggctttatataacggcccaaaatagaattatgttcaattttaacggctatatatgg

SEQ ID NO: 4686 - DNA, 1168 bp, Arabidopsis thaliana landsberg
gtatcgacttagggtcggtgttatcttcagagttatccgcagctgcacgatgttccgagtactttccattgaattggtaaacttccagatcaccccatggtgtagcagtgacttcttccgttacatcgaaccattttggagtaaaggcttggcctttctcttcgcgggttctcttttcagctctctgtctctcttccatgcttcatatcaaagatgaggagaagaattagaaaaatcccaatttattagcttttacttcaatttcagatcctaaggacaagtttttgctaccatacctgctcttctcatagcctgatttggacatgtcgcccatctcaagtgcgtatctatcaggtcgtaaccgtgaatcagagggcaacagctttttcggggcagtgtcgaagctattaatcttgtgagcaaagtgagtgtattgatatttgtcatcctttggcacatcagcgagtttccatacctatgaacaaaaggcagcattaaaatgtttcatcaaactgagatttttacaaaaagagaattgagtcaatgacagaggaagatttggcaaacctctttcagttcggtgcctgggagaggttcaccttcaccatcacacggctgataactcatggactcgttccatttgccagtcatgagtatcttaggctcctcagaggcgttatagacatatccatccacttcatatcgaccagatctgtagagaccataaatgcacatttcttcagctttgaatggaaaaaatataacaggaaatgaggttgcagtgaaaaaaacttacccgaaccagccacatggttgaaagtaaagcacgactttgtcaccggtggtctgatttgtcatgatcatttccccaggcgaatcgacccaagttcgtccaaagattaggttgtgaactttggtcagaggaggtaccaagtcaagaacaactccatctcttttaagtgtcacccgtgtcctacaatcatagattcatggcatttaaggttcaggataatgtacaaatgaagaatctgaaattcaggatatagagtttcagcccgtgctgtggttttgcagaagtaccttcctactgggtaaacgtcaatggaattgccccaaaatttttgttttcagttttgaaagtacaatcatacgtaaaatgctcattttc

SEQ ID NO: 4687 - DNA, 1990 bp, Arabidopsis thaliana landsberg
cctattaaaaatcttaataagtagaataatgaatgtagatacacttaccgataagtataatttattacaaacaagtgaaaatacatttaccaaggagtaatgataaacttacaaaaaagtaattacttacctatgtaaggtaaatgctcagttgctctagtcatttctaacccattccaataatttttacaaaaaaacaattactgctatacgtgtataagtaaggagtacacaagagttatgtgtgaaaatgaaactgtaacatttcacaaaatgtcttacctccctatcccaattgtgacagacatattctgacgacttggcgagcaaggtttcagatttcttggtccactcatagtagatggtccagcctataagaagcttgatttcaccggtgaggtactagcgaatgtagatatggatgagtttattttcaatggtacacttgccaacgtagagtcgagttatagagtgttcttattaaagtgcgtcaaagagggaaatatgatagcaaggtacgtagaatcgttgcagatattgactcaagatgatccatcctcagaagaagcttttcatatgctaagtttatgtgtggaacattcattgtttgcccattttgcgtatggaatactcctcatatgctgtggatgtttcagaaaaggaatggatatcacagaacgttttttaagcttggtccccgatctagaaacagcggtgatggtcgggaatgtggtagcaaaacaagtaagctcaatgggaattctagggtatcgttttcttgctacttcatgtaaattcgatatctggcctccatgctaccaacaacatcctcccgccggatctatatgcaaacattgttttgcttactcatttgctactagattttgtatgttgtattgatagtcgtaagagttgtaagaatgataagtctcggaaggctatttttattgtactataagagtaatcagccgtagtagtatgcttgatttagagtgtaatttaagttaaatggaccgtagtaagattgatttatagtgtaatataagttaaatgggccacaggcccatgtattatatgaaaacactcttccttatgctccattatatgtagtcttaaacttcaaatacttggaaatgtatgatattataaagtcttacagaattaaagtcaactaaatatgcgaatatcattcagctggttttaaaattccatataaaatacagaattaatatctattgcaacctctaacacagtagattagtttttgcatgttgttcgattttggccacctttaccatattgggaacacgcatgcaattttcttggtccttttctatctaatgcaacctctaatgcagatttcactcttgttgttataggcctaccaggttggggcctcacgtcaggcgagtgacatattttctgcaaaacgatgtcgggcaaagtgcatgattcttgtgacattactgacttgtcatatctgttgcaaaggtagtctttacggtagtaggggtggcattttgtgatccttgatactttggccatttctacagaagcgagagcatgaatgcaaggtaacttctcaaggtcaaacatacgacacgtacatttattttgggatagattgacaacatttattgttgaagagcttctcacttcgtataaatgaggatctatctcttgcacttttagaatactagctcttaacacgcggctctgatcacatataaaggagagtcattcaataacataagtagaaagattatctattatggagtgtttaaatagaatttgaacctgtaatagttttttaacactagtggtcagagttgttgtcattccacaggcttgtttacgcctagcggcaaatcaacgggttagcatcatcctcactttatcaagcaatcaacaatatgatagtttctgtagggcctaagaactttatttattgtctcaacactgttgctcgttgtgaagttgtatctatccc

SEQ ID NO: 4688 - DNA, 1097 bp, Arabidopsis thaliana landsberg
  unsure (1)..(1097): unsure at all n locations
ataatatacaaaataagattaagcatagattatacaaagaataatcattcttcaaaagcatgaccaataataatactttgggaggaaacaaaaacagagcaaaaagagattacagttaaatctctaatatttaacgaccatactcgatgcctgagaacgttacagaaactccatttgagttaactgagggagaagaagaagaagtagtagtcgagatgtaatacatagcaacaggcctcttcaatggaagatcaggcaatggtgactcaaaattcatgacttggatcccttgttttatcgaaggtctcgagtttttatcaggatgagcacaccataaccctaaaaccagaagacattcagcttctttcttgtcgaaatcctcacccaatttgtcatcaacacatgaagtgatcagttcttgttttccataaagctcccaaactttctccactagactcttctcatcatcactctctgtatcactgttatcttcttgtgtacgttccagcgattttctccctgtgacaatctctagtaaaacaattccaaagctatatatatcagattctttactcgcacttcctttcattacatattcaggtgccatgtacccaaaagttccagccaaccccgttgtatgggaaccaagttcatggttcattagccgagccaacccgaaatcacctaactttacattgaattcactgtcaagcattatattgcttgccttgatgtctctgtgcagtacacattgatcccattcttcatgaagataaagcagagcagaggctaaaccaagacctatcttgtaccttatgtcccaagaaagtaaattgggtcttttcccaaagaggtgagagttcaagctaccatttggaactaactcatatatcagcaagaactcatttttctcattacaccaaccgatgagctgcacgaggtttcgatgtctcagtttgctgatgatcttaactttcgtttaaaaactcgttctttccctgccttgaatcaccggatagtttctttaccgcaaccattgatttgatttctttcaagnttccttcataaactgctccaaatcctccttcacctagctt

SEQ ID NO: 4689 - DNA, 3348 bp, Arabidopsis thaliana landsberg
  unsure (1)..(3348): unsure at all n locations
aggtatgataaatgacaagttgacaacggaagctaatgagcattttcatcacttcacaagggtttgtcttctccatgtctgtataataaatgaagagaagaagtgaggtattcagtctcttttagttttcatgtgtggatataatcaaagaacaactagagagtgacattgaattgttgttctgttgttgaataacattcaggtccccactttaacttcttaataaatccatttcgactgcagagattagagtactataggacaaagaaccaaccacctaatcatcacagaacctgctgtctttgttcttgcaaatatagggcacgtcttatctcagaaacattgagaaagcaagcccttgtgaaatttcacatggagattatttaagtagataaatttcattaatgcatcttttccagatggtaaagacagaaccatgtgaactcttgctctagtctgtcccacgcttcaagaccacaagtttcaatgactttttcagagaagtttcaaatcgttcattgatatttctatatatacacccataaccccattatttctatcatcaaccaacaacaagcattccaataacttgaatcttttcatacatcttcagaagcttcataataattcaaacttcttttatttaaaataaaataaaaatggctttcgtgagaagtctattgggagcaaagaagattctaagccgctccaccggagcaggatctgcggcaccaaaagggtttcttgcagtgtacgtaggagagagccagaagaagagatatttagtgccactctcatacttgaaccagccttcttttcaagctctgctcagtaaatccgaagaagagtttggatttgatcatccaatgggaggcttgaccatcccttgccctgtagatacatttatcaccgtcacttctcagcttcattagatccaattcacaaggatcacatatatgtaacaatttttgaggtcattaattagatgtagaagatatttagaacccagctgtgtaattacttacatagaagataacatttatcgtctgatatttgccccatcttttctccttcaacattatatactataatttaggggaactttgacaacatgctgattaacaagtagtttttatttgctgacaagaaacagaacaagttgtgcattacaacataaaactatacccgccatccgctccatgacattgacacgagcgtctaaaatcgataaacaaactcataattctatgaattattgtcgaattttcaaaacagcctagcttacaataaacaaacgtttcaaagatgaacagagtcaaaggtcaacgcctaatggcgtgttaaatcccgttctaacaatttagacaatgatcaacagaaataactcagatgttgtctcttcttcttcctctgatctcactcttattccaaatccaatgcttcaccgttaagtcgcaacnnnnnnnnnnnnnnnnnatatgctcaaacgtcacaggcaacttaaccgttaacaccccttacgccgtcaacctcgaccgcctcatctcctctttatcatctctccgacgtaacgttaacggattttacaacatctcagtgggagactccgatgaaaaagtcaattcaatctcacagtgtagaggcgatgtcaaacttgaagtttgcatcaactgcatcgcaatggctggaaaaagacttgtcacgctgtgtccggttcagaaagaggcgattatttggtatgacaaatgtacgtttagatactcaaaccggacaatcttcaatagattaaagatttcccctcacacaagtataacgggaacaagaaacttcaccggagatcgtgatagttgggagaaatctttaaggggtttactcgaagggcttaaaaacagagcctctgttattggtcggagcaagaagaattttgttgtaggcgaaacgagcgggccttcatttcagacattgttcggtctggttcagtgcacaccggatatttcggaagaggattgttcgtattgtttgtctcagggtattgcaaagatcccaagctgttgtgatatgaaaatgggtagttatgtgatgtctcctagctgtatgttggcttatgctccctggagattctatgatccagtggacactgatgatccaagctcagtgcctgcaacgccatcacggccgccaaagaatgagacaagaagtgtcacacaaggtagggttgctacttcttatggatttgaaagttttgaactctaggattcaaatcagactgtagagatttttttatttcccaatgttacagacttacagtattaaacattttaagtgtgttttggtttttgttcaggggataaaaacagaggtgtacctaaagctttgatctttgcttctgcttcagttgctattgttgtcttatttatagtactcttagtcgttttcctaaagctgagaaggaaggagaacatcagaaattcagaaaacaaacatgaaagtaagctatcaaaatcggatatgaaaggagatttttcgtgtgttctgttttacatgttttttttccttctgtttcctctgtttcaatgatcctttgatatttgccgtgatttctaactccattttatcaatgcatggtttatctcatttctttacttacagatgaaaatattagcacggattccatgaaatttgatttcagtgtattacaagatgcaacaagtcatttttcactagaaaataaacttggagaaggtggattcggagcagtttataaggtaatctttcaaacttaagaagaatcagttgttataacgatttatcataacattcttgtatattatcattagggtgtgctttctgatggacaaaaaatagcggtgaaaaggttgtcgaaaaatgcacaacaaggtgaaaccgaattcaagaacgagttcttgttggtggctaagcttcagcatcgcaatctcgtgaagctcttaggttactcaatagaaggaactgaaaggcttcttgtctatgagttcctcccacacactagtctcgacaagttcatcttcggtacaactttcttcacattacaacgtcttcttggtaaccattcaactgttttttgtgtgtatgatgttctcaagtgtttgtatagatccgatccaaggtaatgaattggagtgggaaatacgatacaaaatcattggaggtgtagctcgaggacttctttatcttcatcaagattctcgtctgcggataatacaccgtgatcttaaagctagtaacatattattagacgaggaaatgaccccaaaaatcgcagatttcggaatggctaggcttttcgatatcgaccacacgactcaacgc

SEQ ID NO: 4690 - DNA, 1296 bp, Arabidopsis thaliana landsberg
ttccttgaagttgaagttgaagcaatgatgaatgcctgcagaaacaaaaacaaatacaaaatgtgatgaacaagaactatactaatcgacataaacaaatcaaaactagcttacggctctgtcaaagtctagcatgaaacatctcttgacatctttttttgttggtttgcagccacatcgatcacgtcttgaagtaagatctgaaaatttcgagtaagtgtagtgaagaatcgcagcttcgtctagttccttgatgctgtcacaacaaagatggaatcaatgtcagattacaaaagcaaaagaatgaatgtctatgtttaagctaagtgaggaaaagaacatactttggatacgtcttgtagttgtgccagcgatgagcaccattgggccgaagatggtcttgaatccgagcagcggatttcccatttgcataggtaagaaaatagtttggattgccacgagttgcctctttatagtttccatagtaaacttctctaggaagatgtttaaaattcttcttgaacattgatacctaaaagttcaaaaacaaacacttttgatgataaaactcatatgaagatatgtcccaagatagcaagctctagatgataatgttctgtacttcagtgaaaggttccttgatatcatctcgctcaacgctgctctcctgaaaaaggaacatttgcgagtcatcaccatcgtcaaaccaaagaaagaaaccccaattccaatgtcttcaaagacttttaactcacgtaatttgtaaagataacttcatccacatctgcaggaacatctctgagcaaatttctcaaggaatattcacgggttccagaaggatgtacaagctcatcagtatcaagatgcagtatccagtccataccagcatcctataatataccaagcaaaaggagagaatgtgaaaaaagttggcaattctataatttatctttctagtgactaactgaatgtaacaggtacccttgccatggtgatagccatttccatattcaagttttgtttgacgaataattcgtaattacacggtttgtagaaaaacttctccaaccaagtctcattccatatccggctataaaccaaagaaaatgtaataaaacttcaaatgaaatgatcttttttgaaagaacaagatgcaaagaaccatttcagttttgaagaacaagatgcaaagaagcataacacaagagcacaccaatgagacaccaatatatctaggtatgtctaaataaccagaggtggttccttcaaatcctccatttttctataaaacatggc

SEQ ID NO: 4691 - DNA, 1150 bp, Arabidopsis thaliana landsberg
  unsure (1)..(1150): unsure at all n locations
aatgtgactctggagtgcttgaaccgtcattgcctcaatttcatctctatcactatcacttccctacacatcaaaactaacaattagactagaaaacccacaaaaaaaaaaacattagctacaagtgcaagtgaactgatcaatcaaaaacttagcacaaaccatctgatgacaattctgaccatagctgctcctactatcttgagttcctttcccttgctgttgttgatagagaaaggtacagatttaactgtagcatttgacataagcccttgttgaaacttcttgttcctcctactccaaaaccaacaatagatgaaccaactcttaaactcctaagaggggccccagaagcctaggatcataatcaatcacgaaatgtgatgaacaagaactctaccaatcgacaaaaaaacaaacaaatcaaatcctagcttacgggcttatggctctgtcaaagtctagcatgaaacatatcttgacatcctcttcttttggtttgcagcaacatcgatcacgtcttgcagtaagatctgaaaatttcgagtaagtgtagtgaagaatcgcagcttcgcctagtttcatgatgctgtcacaacaaagatggaatcaatctcagattccatatgcaaaagaatggatctctatgtctaagctaagtgaggagaagaacatactttgggtacttcatgtagttgtgacagcgatgagcaccattaggccgaaagatggtcttgaatccgagcagcggatcatccgtttgcataggtaagaaaatagttcagattgccgtgaatgttccatgataaacatctcgaggaaacatcactgagaaatttgctcatctttcggctgtcatatttggattgaccgtgaaccatggttggttagatttctattaaattcgttaactatcaaaccaaatataaaaccgccaaaaacttttagtgcatgaaccgaatcggcctgttttcaaaaactttaaaacaatattacactaattataaaaagagactaattgacttatttatttctattactttatgtttggttcatctaaattggatttgcttctctaatctctttctatntggtagatgattatgcagataagttgaaagaaacatccttaaatgtatgattgcaagcg

SEQ ID NO: 4692 - DNA, 1760 bp, Arabidopsis thaliana landsberg
  unsure (1)..(1760): unsure at all n locations
tagacttatactttatctgttttgtcaattttcatgaaacttttgagttgtaataaaacatttttttgataaagaaaaataaagagttgtataacaactttactcttatttccatgaaataaaaaaaatattctatctcaaaagaaaaagaagtctaacttctgtctttttgttccaagtgttttttagtcctttgatttctaggagtctctattaatttggttttgttttgtttcttattttgttgaagcaagaactagttggacgacgacgaccacaagaacataaacactaggagtctaggatttatctcgagattaatagtacaagtttgttcatggaattttacttttatatccattttacccacaaaacactattggttgatagtaaaaaggaaaaagaaagaattatgtggagctccatgttaaaaaggtaatgtcaggcatgcgaatggtttgttgtagtgaaagctgcttaaactataacactacaaaaccctttttcgggaatgccattacaaaagtatctatctataacgtaatgcaagatggattcacttacgtcacaaggacaagagactattttactatagagttacaaatggtaaatttataatatacttaccgtgttcaaacttcaaatatcatatcaaaaataaacttagtcagtcaatttggatatagacttagactatagagtaaaagaagaaactaaaatttacaacattattgtaggggtttttgtacatatgggcatattttgacccaaaaattagaatagaagcatattctatttgggcttataagcctgggtactttttggtctgtaaaatgaccattttgccctcgaatgtgttgatgatgatcttcatcttctccgtcgtgagacaacaacctcactgtctccaaattgaaattgagaagtacaaagaagacgataactacccataacccatgatatgaaaatccaaattaaaaataaactcattatcggaacttcctataattactaaacccataactccacaaacgataaatacccagatttaattttgaatcaatcaacaatcaaatctcgtttccttctcctccgatgattcacacaacatttctatgaccaacctttttcgatgaatccaatggaactaattaaacaagttttgatgcaagaaacctaaaccctaagggatgatgtttagggaacccaaaggctttaattatagacacagatcgatccatctcaactgtaaaacaatctgattgtgaatcatgagcaactaagccatcttcatcaaactcgcatctgaatcaagagcttgaagaaggaagaaagaatgaagaaacaataaaaggataaattagtcttttagagaaaaagaaaatacccatccttataatcacttgagaatatgcctgaattcagaagagaccatactttactatggtttcctcgtaattgatcccattattgtatattatagactactttaaagttgatcttttcaagttatttatgatatgtagagcttgtaacagcattttcaccagctctaaagagattattagtaagtaaaccaaaagagaacaaagaaaaagtaaatgggacgaccaaaaagaagaaattcagcagtaaatcaagttaggttaggcacatatgggtcatgaagaaacacacacnttactataatttatatgcctgataagtcaatacttgcaggcataaatccagggtaacacaatctttttattatatctcat

SEQ ID NO: 4693 - DNA, 2456 bp, Arabidopsis thaliana landsberg
tgtgccatttttcaaaacctgccatctcgtaaaagaatatcttagaccattcttgttttttctcatcattcttcataacccaaatttccacccggttttggcaacacatgaatcctaacttcccttggtagtttatcaaagtgtatcgatgatccatcattgtctttggagcctcgacctgatcaaatttctcggatataacatcaaaacacaacaatacatacgtagaaccatattgttttgcttggtaatagatagttcccttgatgcaaactggaggtaacaatggaaagtaaagtccaaagttatattggattttcctccacttccttatggcatctcccaatgtgaaaacatgacaacaccgcctcttataattgtctaggcatattactttgtattgattcttgaaagggtcgtatcctaagaaggaagtgctcacatgggagtggccggccgtggtttccggtaaagaaagggactgcctcgtggtagggttatatatagctgcctcagtataggctgtcgaccaacaaaaaatcaagccatggacgtattgatacgatccccaaagtactgacactgattctttgtcagtatatctagggtacgtagaggaaaagatgaagaaatctgttttagggaatttgtcaatgtggtggaaaatgagatgagtatatcacgactaggctgagacaaagaacgagtcacgatcgagtctatgaagtctctactgctgcctataattgatgaccattgtttggagacgcattggaactttatgagagactttgcagggagtttcttgagtatttccaccattagatcgataggaataccgatatcttcggcgatggaaacttcccggcgctgaaaatgtttagccggcaatggtgaggtctcttctttgatctcttcgcttcctctcttcattatgtctccgttcgtttttttttttgggttttgaaaccctaaatcctaattaacatggaagatctacaacactaacataactttttgttgcattactaaaaccctcctaattaatatgggttttgtgaaaaaaaaagtttacccttgccttacaaaaaaaggtaattagccccacaaagtcttgaatgacctgggttaccactttcaatttatgataaataatatatcaaatcaaaacatttttgatgagaaacctatatctattcttataattttaaaacactaatgtatgtgaccataccttctcttcaaaatacacataatggttatgttgcacattaaattcgacttggtagggtttgttactttgtatgtattttttagaagttgaaggtaacttgcaaaagctttgacaaaaaaaacaaaaagaaggtaacttgcaaaagaaaaatcatttgaaaattagaagacgaagaaagtaacttgcagaaagccctactattagaagacgaagaattttattctatagattttataataaatggatatttgtcatcattgtttatggccatcaattaattttatttaaaaataaagaaatttcatacaagtgctaactgactttactcatctatatagggttaataccactttactctcatatagaaagtacaaattaatatttgttgagataaagagagtctagtcccaaccacttgtgaaaaaaatcttataaagcaaaacacctaggagatagaaaaaacacatgtttccgaaaacaattcgaagctcaattcattaggaaaaccttggtcataaatcagaagaaaaaagttgtaattatgtgagaactaagtactgtcgtttgaataaaagtcaaagacttcaataaacacaaaagaaggtacgagaaatttcaaatttctacccttgaagtagttcactaatggaaaaaaattatccactaaaatatgtttaacgtaccaatatgtcaataaactatctaccaaaataagcttaagtatagctttttgattcaaatacaattattcccaaaacaaattcatccaaaactcgacataccatattaccatttttttttttttttccatattaccatttcacaaacagaacaactttcagaaactgtatttgagctttaattcagcatccgaagcgttgagaataccctcttagtgttcttttagcaagctcacagtgatatgtttaaaatctattttcgaaaaaaaaattgagcaatacactcaaatgacctttaagagtacacacgcccatccttttgaggaaacatacgacgcattgagttatcaaaccagtgttaaacctgtttcataatcatgtccacgtacaaacgtacccgtttttatcagccgatgccaatggtttcccgatcccactccaagaacaacacagtataggagatgtttgctccttgagaatgctcactatattgcctttagatagcgaccatacatgaaccgaaccatctgcagatcccgcag

SEQ ID NO: 4694 - DNA, 1127 bp, Arabidopsis thaliana landsberg
catccaatatcatatgataattgatatgtgcaaccgattgcagcatgacttgggttacagtcatcaactctgaatttgtcccctacaatgataataaccgtaagtggagatgtaacagttaaaatccgaagaagaagaagaagtaaaggtgagggcttgctagaataagagcaatatagataagagttaccgtttgagaattgtaggaatggagtgccacctctgcaaggagttcgtcagagcgattacatccaatggcttttaccccacaatatccctacaaaaaagttcagatagaatcaatcaatcaagttagggttatgaaagtgattacgaagagaatagagaattacggggactttgggtttcacatcggaggaggaggatgtattgtctctgggtggatagacgacgtcaagcttccgctttttcttcggcggtttgttgagctgcacatcgtcggaggaggattctttgtctatgggagaacagaccggagtttcgagcaccatctttctgatttcgcaccaaacaaactttcgacgctggctacttaacttataggggtgttattaatttgtgatttatatgaatttttaattacttgaaatgttatgaattttttttgttatttaattaaaggtttataaaactttggtgttattagattttgatttataaaaagtaatttaaactttgcagggacaacattgttttaaattatatctgctacaactcttaactaaaatttttaaaataaagcagacatcataaatatacaacaaatttattatcattgactgaagaatatacaaagattaagaaaaagatataaagaaggtacaacttttctacccaatgaatcaattgcgatagacagtaactaacaaatcaagagtttagaaatataagagagtataagtacgaaaattatgctgggtatatacatgtccgcttatttcatcattagctccaaccaattgtaatgtgttcttcttctcatcatcagtaattcagttcacaaacattagttgacccccccagcttggaagtctaaaaaaaaatgtaagaaaagcacaagtaagtaactacatgacgcagacgctgccttccacccatataaagat

SEQ ID NO: 4695 - DNA, 1585 bp, Arabidopsis thaliana landsberg
ctcaatggttaggtacttttatatataacaacctatgtttcaaaaccattatatcgataaaaaaaattgtttgaaaactttctacctaatccaaacgcattgtattctccacatgatatggaacacccaatatatgaataagattattacgctttatttcctccgcattagtaccttcgattccaatgtgtctcatacgatcttttcgcttaggataaaaaaaagactacatataccgtgtcatgacagataaccatcttattgatgaaaacaatctcaccacttccaatggagctatctacaaccttggaccatccttgtttattatgatcctccataacccatattcccacgctcctctcataacttacgaatcctagctttccttggtaatttatcagagtcgaatccttgctatcaatcagctctttcggagcattcacatgatcaaatttctcggacctaacatcaaaactcaccaagaaaaatgtagaaccatgatcttcagtggctcggtaatagatagccccgttgatgcaaactgcgggtagccacggatagtgatgttggataccgcatttgacgttcctccattgcttcttgggatctctcaatgtgaaaacaaaacaagcattctcaaactcctccgatttagtaatcatcaagcacattactttgtatttattcttgacaggatcgtacccaaagacgaaaacgtgattgaataaatcatctatgagcatttagatctttggtaagagaagagactgcctcgtagtagggttgtatatagcgacagaaatagaactatctgaacaacataaaatcaaaccacgaatgtagccataactgtcgaccgttaatccagggattgatactaattcttggttagtgtttagaggatgagtgaagatgaaaaaagaagatttgtctgattggtagtggaagatgagaaggacatgccaccactgctgcggatgagtcatcgaacgggccacgatcgaatcaatgaagtctctacgggatccgataatggttgaccattgtttcgagacgcattggaacctcacgagagacttcgcagggagtttcttgagtatctccaccgttatatcgagagggatatcaatataacgggacttttccctagtggagatttcacggtatcgacgacgttgtgatgagatattgtagttgctctctttgcttcttctcttcatcacgttaaaccctagagatttgattatatggaagatacaacgaaggctttacatgttcatatatttatcaatataattgtgagtactaattcgaaacggataatgaaaatatattataatagaatttttacaataaattaaatttctattacaacaaactaaaatctatcttctttagcaaaaaaaaaaaagacatagaaatcttctcacatggtacgataaattttagctgaagtatcgtttggagtttggacattttttcaaaagtcaaaagtgatctggttcggtccgatttataaaccaaaccgtacataataaaccagaacggtttaactaaaatccctaatttcccgtacgatctgacc

SEQ ID NO: 4696 - DNA, 979 bp, Arabidopsis thaliana landsberg
aatttaaaacaatgttgtccctgcatagcaggggccaaatgctagtatgggtatatttggatccaaaaatttgaagaaaagcacattctacttggacttataagcctgggtatttcttgattcgagaaatgacgattttgccctcaaatgtgttgatgagaaatcaattcgtcttctccgtcgtgagaacaacaatcctcactgtctccaccttctgcaatcctctccgtcgtgataatcaaatttgtttattaacatggactccacactcaatcaaaatcattacttttgactccatcaatatcgtttccttttcctccgttgattcacacaacgtttctatgactctttttcgatgaatccaatggaattaattaaataagttttgatgcaagatatctaaaccctaagggatgatgtttaggcaacccaatggctttaattatagacacaaattcattgattgtgaataactgaaaacttattcaaaacaatcatgtacgcaataactaaaagcaatctaattgtgaatcatgagcaaatcctaagtcatcttcatcgcatctcaagacccaagatcttgaagaaggaagaatgaagaaagcataaggagagaaaaaatcgacgtatctgcttgatttttttttccaacaatgtaaaggttaatatggtaaaaagagaagagatagaagtacttaaatttgtaagtactgtgagatatttctatattcacaaaagcatagactttaatgtgccaatcctataattgatcctaaatttgtcagaaagttagtaggctaaatattaatacacatttgaattatatgtatatatatatatatttatattctgtgttcataactttttatataattttaatggaaatatgtttgtttgagcgcatccttacattttattttatataattccaatgcagtatatgtgttcatttgataccatgtcacctattaaaaccaat

SEQ ID NO: 4697 - DNA, 1441 bp, Arabidopsis thaliana landsberg
gtaagttaaaacagtgttgtccctgcatagcagggccaaatgctaatgtatataaaacttttggttccatacatattattcttccaaatttagggcaaggctttacaaaaaaacagagacctgatgaagagaggaaacgaagagaacaaccacaagacctcctcatcatcgtctacacaacgtcttagccgccgtaaaatctcagccggagaaaagtccggcaacgtcaatatccctctggatctaacggtggagatactcaagaaactaccggcaaaatctctcttgaggtttcaatgcatctcgaagcaatggttatcaatcatcagcagccgtagagacttcatagactcgatcgtgactcgatctttgactcagccaccaccgcgtgatatcaaactcatctttcaccaccaagttctttatccgggacctcacttcttcatcttctcgtctacttaccctcaaaatacagacaaagattcattaacaaccagagccagctcgtatcactatgtccgtggcttgatttgttgttggtcacactgtcctactacggtagacatatataaccctaccacgaggcagtactataccgtaccggatactaaccggtaccaatacatagaaacttgcttctttggatacgaccctgtcgaaaatcaatacaaagtaatggtcttaccaaaatactatatggaggagtcgccttgtcaagtattcacagtgggagatcccatagagaagccttggagagacatccaaggcattggagttcactttcctttgaaagatgctgtttgcatcaacggtgttatctattaccaggcaactaatgaatatggttccacatatttcttggtgagttttgatgttaggtccgagaaatttaatcatgtcaaggcaccgaaaatactgacggatcatccttgcactttgataaactatcaagggaagttaggacttataatgtgttgcaagaagggcttggaaatttgggttatggaggatgctgagaaaaaacaagattaatggtccaagattatcttttatgagatggagggtttagaaaaatggtatattgacggtgtcactcatggtggtgagattgtttttgtccattgggggttaaaatgttacaatgcattatatgttatctattttaatccaaagcgaaacagtatgagatacgttgaagtcgaaggtgcaatggtggagaatatagaggatggacataaatgttatcttcgtacatgggctgttccgaatcctgtcgagaatacaatgcgtttgtaacttcttttcacaaagtgtactttcttatacaaattaaacttatgttatttttttagtcacgattaataaagcaatgtagctcgtgatacaataaagcggctggtaatcatgtcgagaatataaatatcattgtaggattcgttga

SEQ ID NO: 4698 - DNA, 530 bp, Arabidopsis thaliana landsberg
  unsure (1)..(530): unsure at all n locations
aaagccgtttcctgcttctacgcaatattttgttggttttagtctcttttggagaaagagtgagtgatttctgacccaacatgagtgaaagacataaatatttaacctttttctattagaagaaagtatctcatttagttatatttgggtaaaaaatatcttatctttaaattggtggtagattcaaaaattgatttaacagtcgttaacggatgttaccgtattagtaaacgatgttaaattataacgagattaatatcgctttatgttaaaaactagcatttggcccctgctatgcagggacaacattgttttaaattatatctgctacaacttttaactaagatttttaaaataaagcagacagcataaatatacaacagatttattatcattgactgaagaatatacaaagattaagaaaaagatataaagaaggtacaacttttgtacccaatgaatcaattacgatagacagtagtaactaacaaatcaagagtttagatatataagagngaataagtacgaaa

SEQ ID NO: 4699 - DNA, 587 bp, Arabidopsis thaliana landsberg
  unsure (1)..(587): unsure at all n locations
gattcccaaaatttcatgcaactaacaaaattaggattaattttagaatataccataataaagtatggtctattgggaatggagccatattctcgagtgattataaagacggatatttttgttttttctaaaatattaatttgcctttattattttttcttctttaaaattttaattggggtttgagatataattttgacgaaaatgacttaagatttgctcatgattcacaatcatatacttttcagttatcgcatacatgattgttctgagttctttagacattatcttttacggttaagatgattcgatccgcatctataattagagaatttgggttccataacatcatcttttagagcttagatatcttacatcaaaacttgtttaattagttctattggattcatcgaaaaaggttggtcgtataaacgttgtgtgaatcatcgaagcataaggaaacgatattgatggagtcgaaaataatgattttgatggaatgtagagtcggtgttaataaacaaatttgattatcacgacggagagaatngcagtcgatggagacggtgagggttgtggtctcatga

SEQ ID NO: 4700 - DNA, 2540 bp, Arabidopsis thaliana landsberg
catttttatttattgattttgatttgtgtagtccattaaggaaacgtagcataaagtttacttactaaatataatacgacgtgattccatttgccaaatcttgattattttattttaatgaagatcataaacccttaaaccctcattttaatgaagaatcataaacccttaaaccctcattttgatagtcgtctcagtgcaaaatccatttgctttttccaattccttctcttctactagtgctaaagatggtctaaaaggtcagattttcactatctcttacctcattgattcattgggattaaccgaaaaactcgctgaatccatctcgaggaaagtaagcttcgatgaaaggagaaatcctgattctgttctgaatctttttagaagttatggtttcacagattctcagatctcaagtatcattacaaattatccacggttgcttatagtagatgctaagaaatcacttggtcccaagcttcaggttttgcagtctagaggagcttcaagctctgagctcactgagactgtttctaccgttcctaaaatcttgggaaaaaaagggcacaaaactatcagcgtatactatgatttcatcaaagacactttgcttgagaagagttccaagaacgaaaagttatgtcattctttgccacagggtaatctggagaacaagatcagaaatgtatcggttttaagagaattgggaatgcctcacaagttgttattctccttgctcatctccgatagccaacctgtatgtggaaaagaaaaatttgaagaaaccctcaagaaagttgttgagatgggttttgatcctaccacctcaaagtttgtcgaagctctacaagttatttacaaaatgaacgagaaaacaatcgaagaaaaagtccatctctataaaagcttaggctttgatgtgggagatgtatggtcaagttttaaaaagtggccaatctcgctgagagtatcggagaagaagatgttgaactccattgaaacatttctaggcctaggatttagcagagatgagtttgcaatgatagccaagcgctttcctcaatgccttattttatctgcagagacggtgaagaaaaagactgagtttctggtgaagaagatgaattggccactaaaggcagtggtttcaacccctgcggtacttggatacagcctggagaagaggactatcccaaggtgtaatgtaattaaagccctcatgtccaaaggattgctcgaaagtgaactccctccaatatcctctgttttgacaagtactagtgagtcgtttttatatatgtatgttagcaaacatgatgacaagcagcttgtggctgagttgatggctatcttcaccggagatcgtgtttcactcaccgatcagaagacacgcctagaacaatgagcaaagtgaaggatggatttttttttgttttctgttaggtttagattcattagtgaatcttggtgcttgacttttggaagtagagagtaaattttgtgtatgagtgtctgaaagactgaaacccatttagacttttgtaatcttcagttgacccggatccaacccgttttcttctaatgtgaaatccgtttgggacaataaccaactgtaaatttgaatctctttgtttttggagtccttttaactcttcaacattaatagtcaagaaacagcaacacaactatttactacatgacatatgtaggttattggtagaactagaatagagatctagaggttttggattgtctgaacacgattacttttaaccctaaaggatgatgaatcagtcttgtacgaaacaatcttgaaggatattactcactcttctggtccaagaaatggacatatagtatgtgaccttcagaggagttttgcaggtcagaggaagacactcttgtgtgcatacattgggagtttatttctcagtcatcctgcaacttgagtaagatttggttcatatgcctctttcaatcgttggactcattgcatggatggatcatcagaagatggaggcaacttgagatgagttttgagtcggcaataaacttatatcaagttgcattcttgagagtctcaagttgagactgctcatgtaaagaacctgaatttgtgaataaagtttctctgttgttgttacatcttgtaataatacttctgttgttgttgtgagacaaaaacaagtaaagccaaataacaacagtatgtttaattttaattctgagttaaaacaaaacgagggctttgcctaaaccctaaagagctcatttttttatttttgcctccctcaatttggataattgaatctttgcgtcttctctgattctctatggagaaaaaggtcacacttttaacaatctatgagaaggtgggtcactgattgatgaatgaatttgctcttcttcctcgctcaatcgtaagtttagtagaaattttcagagtcttcttctcgaatagaaacggatagttggggtagaatcgcttttacacttctgggatttgttggttctgctcttcttgtattcgcattttc

SEQ ID NO: 4701 - DNA, 4600 bp, Arabidopsis thaliana landsberg
tcagagtaatggatatcacacattgggtcttcttcataatgttaatggaaggtttttaggtagtaatcatgatcagctcgcgcgtaggagctattcgattgcaggtgcgagtaatgtagttaagcaacatgctcaagtctcttggggaaggcttgtacagagagtaactctgagtcgtagttggaacttacctcggatgagtcagattgctcaagcgtgtagcttgtctttagcccgttcgcacttcttgttacctggtttattggctcttacctatagacaagtggcgtatgcgcaaagggtggttccaaatcctgtggtctattctccttcacacatttctccttataggagttcgataaacttccctatcgttctctcgtctttagtgttttctgcggtcaagggtgttgttctgatcgggagagctctttatttagcaattttgttttctccaaatgttattatggcgttgttgggatttgcttgcgggcctcgttacagacagctgcagtatgaggtcctccatcgaactctggagaaagcaggtcctgcttttatcaaatttggtcaatggattgctacgcgacctgatcggtttaataaggatttgtgtttgcagctttcaaagcttcacagtaatgctcctgagcacagttttgcgttcaccaaaaagagcattgaaaatgcatttggtcgtaaactctctgagatatttgaggaatttgatgaggcgccagtggcatctgggagtatagctcaagtacaccgagcttccttgaagtttcagtatgcaggacaaaaggtgaagtcctcggaagttgctgtgaaagttagacatccttgtgttgaggaaacgatgaagcgagattttgtgataattaatttcgtggcgaggctaaccacttttattccggggttaaattggcttagattggacgagtgtgtgcaacagtttagtgtctacatgttgtcccaagttgatctctcaagggaagcttctcatttgagtcggtttatatataacttccgtggatggaaagatgtctcttttcctaagcccatctatcctctaatacatcccgctgttttagtcgagacgtatgagcacggagagagtgtggctcgttatgttgatggctccgaaggacaagaaaaacttaaggctaaagtagctcatatcggaactaatgctctcttgaaaatgctcctggttctgtctctttcttcacagtgtatctttttattcatttcggttacttatgtaacttatagttgctttgattcttgtttttcaggtcgacaacttcattcatgctgatatgcatcctgggaatattcttgtccggccaaacaatactagaagaggtctattcagatcgaggaagccacacatcgttttcctagatgtgggcatgactgcagaactttcaaaaactgaccgagataacctactcggatttttcaaggcagttgcacgtagagacggccggactgctgctgaacgaacacttaaattatctaaacaacagaattgtcctgatccacaagcctttatcaaggtaagatctctgctctgtgtttctcttagatcattcagagtttcttcatttttgtagtgtttatacatacatacacatttcgacaggaagtagaagaagcatttacattctggggaacagaggaaggggatctagtccatccagcggattgtatgcacgaactattcgagaaaatgaggagtcatagagttaatatcgacggcaatgtgtccaccgtcatgtttacaacattagttctcgaggtgagtttaaatctcttatcatcccatagaaccacgaagaacactcgccttttggattattattgacctatgaactttagctagagttgattacatcagtattttagagccagtctcttgatggtttaaagtttgcttcaaatctaacaacactgaggtttgtgcttaactttccacgttttcagggttggcaacggaaactggatccaggatacgatgtgatgcgtactctacaaacaatgctgctgaaaacggattggatgaaatcactttcttacacgatcgatggacttatggctccgtagatagaaaaggttcaatctttgattcttttacccatttaacacttgagagccacatttttgttttgttgccttaggatgtgaagaagaaccaaaacatatattttagagaaaaacaaaggaaaagtcctttactgttttgtcttcttcttatcttttgcttattctttgattattctttttgctagaaattggaatcttcatcattctaaaacagagaatttgtattttgggtatatatcagttttgaatttcatcgaagctcaaagaacaaaccagtgataaattttctaaattcattcgacctataaatatctctccttcatttgaaaaaaaatatactcaactgaacataacttgtttcatccacactagttacaatagaaataaaaataaattttagacaaaaccctgaagaattaatgtcaaaaaacacattcaaccgttaaacgtaatgagctgaattttaataattttgcgcttggcagcaaaaaaagaagaaaatagttatatgatctctaaaacgaatcgttgccaatgagccaaagccaacccaaacaaactccagcgaagatccctcccaatagaaacacacacatcaaattccctaatgcatttgcttccggtccctatacaaatttgatcgaaccaaattaacataaccgatcaaatattaaaccaaatcgaaccgaggttgagttttgtaaggagagaagtaacttacattgtagccctttggtgcagtgctgaagatacaaacggttaaataaccgttactcaatcccaagaaagaggtgaggaaaagcatccatccttgatctgcgtatttagcagtaaagtaaaaggccggaacgagcaaaagacgtgccacaacgcagaccgtgatccatttcctagactccattgctaacggtttgatcgagggaatgaacctcgatatcgcatcccacccattgtacatggctactagaaccggtgcatacctatcaacacatcaaaacataaatggtaatttttatgtaaccaatatgagcatagaatggtttttaaataaaatgttaacgttgcataccaatcgcccaatctatgttctcctgtgttctcgtaaagaaaccccgggaaaatcgatagcgtcaccacgtaaatcaaggatagattgattccaagatctatgttttcccgtagtaactgcttcttggttagtttttggatcttggactcatccatttggtgaacctggtcagcttgctcttggaggccggctgcggcaagatccgctgaaacagttttggccccttctttcccagcttttgcgcggtagtacttcacgatagggagcttagcaaagactaatgtatatagaaagacacaggctaactcgatcaatgtcgctattcctatgaacaacactgcaaaagaagattaaaattagcttaattaagataacactacaagcgcctttatatatgtaacaaaggataatttaagaaatttgtaggagaggcattacaagcgccttttcgaagaccatcaggcgaattgtcgaagattgctttagtaataagccttaataccgaggttagagctccagctatgcctaaaccggccatgaacgcctgataaaataatcaaacattttaacaactaacaacattaagctaaatggatactaccattgcaaaaaacaactagttttaacctggatgaagtcaggtgacatgaaggataaatctccaaccattgcaccttgtacaaaagcatcagcgagaccaaaaagagcaacgatcaaacataacaacacatatgctactacgcttccactgccatgtgaggcaagatccaacttcaccaaaccgaatcaaatcaagtcaaaatcacaactttatatttataaaaccgacgttacaacagaaaaatgagagtacttacaatgatgagacaaaaggtaccagcggtataaaggctatacccaaaaatgttacgaagtcgagtattgagcttagcttctttagtagcaagtgttattataaacacattcgcaaccaattggtaaactattgtcagcaccctcgatggatggtatttctgttgttaaccaagtaaacatatcaaattaaactgatttatatatccactgaaacaatttgtcttaataccgaaaagttgcttagagtcatactgggaaaagttgataatagtaatcagtgatggtcagcatcgcattccatgccacgagagaccctactccaaggaaacaacacacaagtcttgctacattcttgccctgttcatcatcaaacttatttcagaagttgcatatatcactatatataataattactatttagtgtgtcatttatgaatgattgattaatatgaaactgtacactaacctcgatcctgctagggatatcctctggattagtcatcatgcgatcacaaatcccctaaatcttcaaagtcttaaaacaactgtaatatataaaatttagta

SEQ ID NO: 4702 - DNA, 615 bp, Arabidopsis thaliana landsberg
tgcaagtataacgacccaatttatgttaagatggagaagttggagattatgattaaacttgcctctgacagaaacatagaccaggtatcctcactgagctctaccatctgctgtgtgtcttgattattattggtgcatatctttatgatttttgaaaattgctactctaggttcttctggaattcaaagagtatgccacagaagttgacgttgattttgttagaaaggctgttcgtgcaataggccgatgtgctatcaaactagagagagcagctgaacggtgcatcagtgttttgctcgagttgatcaagattaaagtaaattatgttgtccaggaggccattattgtcatcaaagatatcttcagaagatatccaaacacgtaagttgacatttctcaatcactgttgaaatggcatcttaaaactcttctttgattttggttatgctattcaaatatttcatacaggtatgagtccataattgcaacactctgtgagagtttagacactttggatgaaccagaagctaaggtattgaacttttttgattttggtttggaaaattgaaatttaccatcttcatttaatcttaaatcactgaattcggtatctt

SEQ ID NO: 4703 - DNA, 786 bp, Arabidopsis thaliana landsberg
aactacgttgtgcaggaggccattatagtcatcaaagatatctttagaagatatccaaatacgtaagttgtttttggcctcctgaagtgctgtaattctttttaatcttggctatgtcttttaaaataatgtgcaggtatgagtccataatcgcaacactctgtgagagtctagacacattggatgaaccagaagctaaggtaacaaaatttgtcgtttgggtagtgtatattagctggaagcttctccatcgcaaatataatcggtgaaactcatacttgtatttgttggcatcttgaaaggcatctatgatttggatcattggtgaatatgctgaaagaatcgacaatgcggatgaacttcttgaaagcttcctggagaatttccctgaggaaccagcacaagtccaactgcagcttcttacagctacagtcaaactatttctgaagaagccaactgaaggcccacaacaaatgattcaggttctgccatgaccattatgaagactaccttttgctctcctaatcgattaaagcgcatgtatttgacgacaggcctggcttttgccatgtttcaatttttcaggttgtcttgaataatgctactgttgaaacagataatcctgatctcagggatcgtgcatacatctactggcgtcttctatcgactgatcctgaggtatgttttcttaatatattctactaaactagttcaaggacattggaggatgagcaacaatcatctcttttacctacagtcatcagtgctcttcttttgactataggc

SEQ ID NO: 4704 - DNA, 2254 bp, Arabidopsis thaliana landsberg
gaaccggtcttatgaacctctgatcgaccgttggaggagacgaagaaccttctttgttgagcgacttcgtcatgtaactaaatcgtagctttttgctttccgatgtcggattcgttggggtttcctccagaattgctctgtaccaagcgtttctaaacccatcttcttcagagaagatctctacttcacaatctttgaaaatcgccattgacagaaactaacaatgtttaggctccaaaaacaaaaccctaaaaacaaaagtagtaaaaatccactcttgaagtgacaccttaaaacggcaatatccactcttgaagtgaaaacagctcagctcacttctgtcttgaactttcaaaactgaaaagtacttttgtcgtatctttcaaaattattgggcctatgggctcggcccagataagatcactccttttcaacccccacatgcaccttacgcgcgtgtctatgttacaatcgctaaaaaccgttttgtaggcgcgtgaggtgaaggtggagagttcgtgaaggaagaagacaaaacatttcagtttcacccaaaaaaaatcaaatcataaactcatggacacatacactcactcgatcatcagatgggtagtgttagatatctctgtttcaatcattgtgaaattctctgtttccaagtttggttttttgcttcaatggcggtgatgatgcttatgcgacagtaagctcgacttttttgacgacgtttgtctcttctttacgctttcttgtgttccttttttttttcaattatttcttagtgttccgatgaatcatgatcccgagacgtcttgttcttgttgattctactacactatctttcttaatttctggaaatttgaaatgccgatggtaggaaaactttgctaagtgggttctgttttgattttagctttgagatgggaatttagcttattcaacgagttgtttattggatatagtttcccttgcgaaattctgctttggtttctgttttctttcgttcaatcttaataaagagctttggggtttgatctgtgttcttaacagggatattcataacctggattaaagtttttggtgctttgtttaaacaatggctgcgtggtcaccatcagttgggataggatcttgttgtctcaataatggcatcactagaacatggaagtttccttctgcaaggctttttactggtaggaagaacaagattaaacttggatccgagacactaatgtttacacgaaaacgtttcatgggtgatttggttacaagcgcgttgcaaagttatcagtttagtaagatatgtgcttcaaagacttccatcgagctgagagaggcattgtctagtagaagagctgaggctgatgacctgaagaaggtaacatcatattcattcaggacaaaagcaggtgctctggttaaagtcaaagttgaaaagaagagagaaaagtacagcattttggtttatgtctcatctttggaacttagtggtgatgacaagagtaggctggtgatggtttggggtgtctacaggtctgattcttcgtgttttttgcctctggatttcgaaaactcttcccaagactcacaaacccacacaacagaaactacatttgtgaaaagctccttgtctgagttaatgctagggctagaatttgatgggaaagaatctcctttctacttatcatttcacctgaagttagtgtcaggtagagatccggacggtcaagaaatgctgactcacagggacactgacttctgtatcccggttggttttactgctggtcatccattgccgctaggcctttcttccgggccagatgatgattcttggaatttttcgttcttttcaagaagctcaacgaacgtggttttatgcttgtatgatgatagcacaacagataaacctgctttagaacttgatcttgatccttatgtcaaccgaacaggtgatgtttggcatgcttcagttgacaatacatgggattttgtgagatatggctaccgttgcaaggagacagctcactctaaagaagatgtcgatgttgaaggtgagccaattgtcttggatccatatgccacagtcgttggtaaatctgtctctcagaaatatcttggaagtttatctaagagtccttcttttgattggggagaagatgtgtctcccaacatccctctggagaaacttcttgtttaccagttgaatgtgaagggttttacacaacacagatccagcaagttgcgtagtgacgta

SEQ ID NO: 4705 - DNA, 1288 bp, Arabidopsis thaliana landsberg
ggcttctttcttctccttggcaccaatgcttgtctcttcttctaataattatgcgttcaaagtcattaaactcttcttcaaacctcttcctttcgatctcttcacattcaatcttcttctcaagacattttctttcctccgctttctttgctcgcttatcttggaggggcaacactttgctgatccgtgacaatggatctgtaacgttgaaaccgtgcttctcgagctccgccaaagaactactgaggctacttagtttgcttgaggaatcatcgagctgcagatctttgacttcctttaataaacaatagaaagtcaccatcataccaaccgcggaccattcgcggatatcttctttagccttgaacaacgggctgaaatgaggactttgtggtaatgatttgtacaattcatctgtttcatagcttttccaaaacggtaacttctttgcaaaaggagaaatagttcgtgcactctttgctggagtttcctctgcatcagcagcaaaactgttcaccacactcaagctctgataatatggtagctcagtagagagcggctgatcatcaacatcatcattgttgcagatacttttacctgtattactaatctcagactctgaaccattacaagtcccatcaatttcatccataacggaagaagctgagttgtgtttttcttctctcttcctttttgtgctcccgtctttgctattctcctcctcaggcaacatctgttgagttgaatcatttctcaagcaattctgattccgcatcggctcaagtttgtttccttcagcgttggcctctgtttgtttcaacggtgttacacatgaaacagattcttctgctatggttattacaggaggagtagtgtcattcatcagagaccaatccccatcttttccaactttccagtggcagcaacagtttcagctacagagagttcctcgacattttcctcagggttaaaagatattctcgcatgttttgtagccattttaggagtcattggcctagcaccagaagaagagcacattggcttctgtttgatggcgttggaaggactttcctttacgggtttctgctgtggtccgttatgccaaaccccatcttcccacaccttaaaaggcctaagatccgagtgtttcacgaccaacttatccttggtagcctctaaagtaaccgtgtactgtttctcaatgtgaactcccttcaccaccccttgacgccaactcgaaccatgaaacacctctacacaatcacgcaagtcatactcttcaacgaaa

SEQ ID NO: 4706 - DNA, 1426 bp, Arabidopsis thaliana landsberg
gatcccctactggattttcgtaattactacgattaattgcttaatttcaaaaaaaattagtttaatgctggaatctaatatgtttgtttgggctggcccaaacccaattgttaaactgatctgaaatgattgttatacaaaaaaaccggttcgtgaaccgcattgtctcatcgatgttcaatactgtttccaacaaaaagattgttgtcctcgagttcgccttcaagaaagacacgagagagactccagccattgacgtctgcaaaggtttgttaggagacaaggcccgaatcagcatctatgatccacaagtcacggaagaacaaatccaaagagacttaaccatgaacacattcgactgggaccatccacttcacctccaacccatgagtccaaccactgtgaaacaagtctcagttgcttgggacgcttacgctgccaccaaagacgcccacggaatctgcttgttaaccgagtgggacgagtataagacgcttgactatgagcggatttttgaaaacatgcagaaaccagcgtttgtcttcgatggcagaaatgtttttgatgcagagaagctgaggaagatagggtttattgtttactctattggtaagccgttggaccagtggcacatgcctgctcttgcttagctcagactctttgccctttctcaagatttggattgtttttctctctgttgcttatatcaaataatttgttctgtttcttcttgacgagatattttcctatacttattatgttggttagaacaagagactaggtttggttattattgctaactacattttcatatataaagcttttagtgattctgattactgattatcgtggaaaataaaagagatgattaatttccaatatttgttataattctcaccgttcacgtgtcccctcgacatcgcatatataacaaaactgcccttgattccggcaaagagaaagagagaatatgatgatgctaaggcaaacgtcgagaaaggcttacctagggttacaggcgtctcctctagggttaggtcgtcgattataccacgagaatgtaatcgaccactttgaaaaccctagaaacgttggctccttcaacaggaatgaccctaacgttggcacgggattggtaggagctcctgcctgcggagacctcatgagcctccagattaaggtcgatgattcaggtcagatcattgatactcgattcaagacctttggctgtggctccgctatcgcctcatcttccgttggtatgccttcgaatcagggttttcaattttgatcgattcgttaagaggctcatgatcagagtcaggtagatgtagacaggttataatttgtatatttgtttggttcagcttctgaatggatcaagggcaaaaccttagacgaagttatgaccatcaagaacgcgtaa

SEQ ID NO: 4707 - DNA, 3204 bp, Arabidopsis thaliana landsberg
atattttattaatacatatgagtttttttttttaaacaatatgaaaatataaaatttagctcagtttacactttggtttttaactcatcaaagtattaagtattcactagctagtgttgtgggttgtagatagtgatccgtcaaacaatttaggtattatatacaattttcaggtaatgcatcatcctccggtgtccgcacttcatgcgactcacgaacaagaaaatatcgacgtcacatggtgtcaatatttcactcctaaatttcgtggtatgttttttttttcattttaatgtagcagtcaaattgtttttgctacatccaaatgatctcaaaactaaagtctaatttttgaataatccgtccataacgaacacaaccatccattaatttgaccatgcgtccggtttactctaaaaccgaaccatctcgtcttggttccaacatctaatttgtcctcatttaatggttcataaggtgcgtacgtggatgttgaggtaaatggtaaaagggttatgaagcttctgaatcataaagagacttatgagatggaccaaccgagactaattatgaaattcttaccggcgccgggagctcattgggccggaaaagtcaagataaagtgtcctgagactgatctcgaagctgagttacatttgatctccgattcattcattgaaagattcagaggcaacaacaacagatcaattaaaggaaagatctttgaatcttcctctggtaatcagctctacaacatttttggccattgggacaggtaaaaaacatagtcgttattacagctcttaaaaaccatcattagctttgaatgatgtgatacgcctcccataaatatgtttcagaaccgtaatggcgaaaaatataaagactggtgagctcgaggtcatttacaatgccaaggagaatatcacaggactcaaacctccaacagtcaagaacctggaggaggtaacggagagcgagtcgccaatggtgtggagtgaagtaagtgaaggaatactgaagaaagattgggaaagagcaagagaagctaagatagttgtggaggagaagcagagagcgtctttaaaacagagagaggcttctggtgagtcatgggttcccaaacatttcttagtggtcaaagacggtaaagactgggattgttcaccgctacagcctacggttcctccggcgccactcgtcatcacataggagcaaggacgaatcattcaccggtttcaagattccaaaactctatgttgataattataggttttgaaattataaataaatagaaaaataggttgatacttgataatgacatatccgtcaataagtattaaagatgaatgatgttttttgtcaattcatttgaggttgaatgtgtgagtgatacgtcaggcttttgagaaaaagagttcttaaatactatatgtctatatgagatttttcacctatgtaataacagaaaatattttgtttttcctctacaaaattatttataatccattaaatttgaaaatgaagattcaatctacttctctgttattcgatggtgaatttgcatgtattaaaataatctgtgttaaaataataaatcaatttcatctccgtaataatttaataatagttaagcattagggcaaccttatttaaaagcattaagcgagccttaaatgacgaaaacatggatctaacgagtaacgactaacgcccctccgatcgaatcaatagttaatgctaacccaactctctattttgatatcctatctatctttctagctagctatatagatggagcaaaaagattgatactactagtaattgtcactatatgtactacttagtacgtaagtcatagctccttggctcttttcttaaaaataatttcttttccaaaagtaacaacctcaaatggtaattacttagtgtgagtcattgacttttttggtaaagaagtgaatcatacacgtagattaaatttacagatctaatatttttggttgtgtataggcagaagaagagaaaatgagaaggcaacttgtgctggccaaacctttttctctggaagatgagaaagattctgagctcacagcttcaagtgtcatccgcaagatcctcagtctcattaagaccgtacgtccaggatctgatctcaccaattttcaggtgtaatttcttaaaatccttgtctaatttttgttatatattacagaacggacaaccattgtgtatattttttctatacaatcattgaatttttttggtgaagaaaagtttttttttaaggataattgccctctttttttttgtgttttctttacatatcaaataatactgtgcatgaaatacaaaaagataaaatctatatggatcaaacagtttagtaattcctaactatgttatatatattttccgtacaaatcacgtcattgtccataaattcataatatgtattctgttattaactattctttaacaaaaaaagagttattaattattataactattgaatgtaaagctgccacctcagctgatcctaccaagatcacgactccaatgttatggggagatgatctacagcttcggcggtcaggatctactgggcgaatgcagccgccgtaacattcccatcgaacggctcaaatcggtggtgacgtggaacatctccacactccgtcccgtggtcgttggcatgtctccgtacaaccccattctcggcgagactcatcacgtctccaacggctacatcaacgtcctcaccgaacaagtaaaataatttcattttataaaaagaaacaaaaaaaaatttataggaaaagctcaactgaaattcacaatctatgtagatattttattaatacacatgagtttttttttttaaacaatacgaaaatataaaatttagctcagtttacacttttttttttaactcatcaaagtattaagtattcactagctagtgttgtgggttgtagatagtgatccgtcaaacaatttaggtattatatacaattttcaggtaatgcatcatcctccggtgtccgcactttatgcgactcacgaacaagaaaatatcgacgtcacatggtgtcaatatttcactcctaaaatttcgtggtatgttttttttttcattttaatgtagcagtcaaaattgttttgctacattcaaatgatctcaaaactaaagtctaatttttg

SEQ ID NO: 4708 - DNA, 1688 bp, Arabidopsis thaliana landsberg
ataatcaattaatcattgatacaaaatgttgacattttattgatttaatcgtcgccgatccattaataattttgagagacgtaatcatatttatgaatgtaattgactttctgtctacaagttaaaaccgtgttcattatgaaataaaggaaatggatgtatacgtgtcaacacaaaacttaaaatatatacagtaaaacctctataaattaatactcgataaattaataacctttataaattaataaattcttccgctctgtagttgagattagtgtaaaaattgatacaaatcgataaattaataagataataacttttttgaaaatcctatgtaaatatctggtcttattaatattataaattaataattatataaatttatgaatatatatatgtatatttatgaatatatattatgtataatatatagttagtaaaatatgactctagtatattttttatacaatttatattaattttttctagagttcagatataatatttttaccaagtagaaaaaagtttattttgttttgaacctaataatggttttctacttgtaattgattttaaaaagattattcattatatagaaaaacttactttttagatcaaattttataagaaatttcaaaatttagaaaatctctctataaattaatacctctctaaattaataaatttttccgatccctacattattaatttatataggttttactgtaattcatattctggcttaatgtttatacagcaaaattaaacgtttattcgacgtttcaaaccaatgcatacatatatcaaaatattaatcgctattcgaaacaaagataattagtcaagaactagttacaactatgtcaactctaatcaatttaggcctaaactaccaatgaaccgcgacacgtcaacaaacgcgatttatgtctatagctattggaaacgcctaatatccaaaacttaaaaaaaaaaaaacgattgatggagtcacacataccgaaggatggtgcgatacgtctctgatcgtaataagacataactatccaaaaagagacgatgcggatgacaatacgtccgacgcatataacacttgacgcaaagatcaaacgtgttgccacatgaagattcaaagcatgtgacacacgtgaagtatagaccattgagaatccgtaggcatgtgcggcagttaatggtccgggtccgagccacgtagtaaagcgtcaagacctcccaaaagtcaagctgaccatctccatttcggtcgagctcccgaaacatctcgggatggatccaagctaaaccagcggtttgacgcaagaagtcggtgtattcttgaaggctgacacggccgtctccgttaacatccattgcccggaaaaactgccacgacaaattttgttgttccatggagccattgttgtaataagcaatcgcggcttcgtggagctcatccattatttgttgtagaattttgaaaagctaggaagggaatctatggtttctggtatatatatacatgtgtttgcgaatgttatgaagagaggagactttgtttaagtcgaatgtcaatgtctagttgtagtgttagtttagtgcgtaaatcacaactttttccatgtgatatacaagcctgtaaatagaaatccaagaaacagaacttaagattatatgtgtattaaattata

SEQ ID NO: 4709 - DNA, 1736 bp, Arabidopsis thaliana landsberg
tttcaacaagaaattagatgcttagttttgacttatatattcaattatttttggtgcgtataggcagaagaagaaatgagaaagcaccttgtgctggccaaacctttttcgttggaagatgaaaaagattctgaacacactgcttcgaatgtcatccgcaagatcctcagcctctttaagaccgtacgcccaggatctgatctcaccaattttcaggtgacttttgttgaaataaatctactgttgtgttagaacgactatttgcgtgttttgtttttcctaaccaaacatattgatttgagttttttttttaaaagacagaaaaaacaaacattgatttcttttgttattttattttatttgtgaagaacaaaagatgaagttcgtcttaggatttatgatatcaagtgttcttaatattttttagtatgtaaaattatcagtgaattgtgaatattttgcatgaaatagaaactgatacgatacatataattaagaagaaacttactatatatgatttattagtaaaaattccaacagtttataaagttatgctagcatgttgcataggtttcaaaattcatgttaactacccataagatatcagttacatgtattatagtattgatgttttgtattaatgctaaaaatatttggctcttgtgtttgttagtagcttagtattaattagtagtgttatctccgtaggtaggtacactatactatgcatgaaagtgaactgtgaaccctccaactattacttctctagatagagtattaaataactcgaaaaaaccttttttcattttatacaaacacccatttatttatatttttgaaatctatgagaggtattaactacgtactgtttaagtagtaaaattaatcataccatgtgcaactaagttttttgggtaaattatacaccacttgtaacttatacagatggtatcatcaaactctataaaacagttgaacatttatatttcgtacaaatcaagtcattttccaattaatttatttagattatgatgtttagcttaattatttttcttcgatcataaagctgccacctcagctgaacctaccaagatcacaactccaatgttacggcgagatggtctacagcttcgtcggtcaggatctgcttggggaatgcagccgccgtgatcttcccattgaacggctcaaatcagtggtgacgtggaacatctccacactccgtccggtggtctttggcatgtctccgtacaactccgttctcggcgagactcaccacgtatcgaacggtcacatcaacgtcatcgccgaacaagtataatcatttgtaatataatcattatttagtcattacaactataaacgaaacatagactgatatatatacatcgttaactcttaggtagtgcatcatcctccggtttccgctcttcatgcgactcacgaacaagaaaatatcgacgtgacatggtgtcaatatttcactcctaaatttcgtggtatgtttttttttatcattttagttttgtagttaaattgttctgctacatcccaaattatctcaaaaccaagtctttttgttgttgttgtcaaacctcaaaaccaagtctagttttgagtaatccgtccaagaacgaacaccaattcgaatatgcatccggtttacactttcaaaccgaagcatctcgtctttgttcaaagttcaaacatatctaatttctgcatgaactcattta

SEQ ID NO: 4710 - DNA, 1999 bp, Arabidopsis thaliana landsberg
ccgatagctccgacgtccgttcccaacgacttgtttatccccgccatcacttccgccaccgtcttcctcctcgccaagctcaataagatatgaagtctctactaattgtttgatcctttcgagctttgctttgtttgctaaatttgtattggtgatttgattatatgtgtttgatacacggagaagctgaaagtttcactctttgagttcatttactagattgatgaaaaggaaaaaaaaatgaacttatgttgttcgacagaatgcctcaacgagtttaactctgtttttttcagtgattttaactaacgaacttattcgtctaaattggtccatattttaaaatatgaaataaatgtctttgtgctagagggaagcaaggagatgctaaatatagagaattcgagggtcttgcttgtttctctaaatttcaaggctttcattggtttgaggatatgaacgagtcctttctttgaatgacaaaattagtttctaaaactgataagaaaagatgaaatctcggagacattttttcccttttaactatttttttggccattagatttttctctgtttttctttgtttggtttggaacatggtctagagaaacattcaatccagtaatgctgcaatttgtaagaaaaaagtaagctctttgcctccgagattcacagaggcaaaagaaaaatgacctgtgacacatatgtttgttgatgatacctttaggattgttatctaggtactaataatatacaggtttttagatagacgtttccttagtttaacataatgagcaaggaccaaagctatgttctaaaagcatgggaggtgaccgtgcgaaagactcagcaagcgaagaagcgggctaatagcgtttttggaacagtatcggtagctccacatacagataatgatactacaactgatgataatgacgatgagaccaccactaacaggagcagcttagaggaattctaccatgccgagagagtgcttcccaatggggactactacacggggcaatggtatgatagttttcctcatggccatgggaaatacctctggacagacggctgcatgtacatcggtgactggtacaatgggaaaaccatggggaatggaaagtttgggtggccatctggtgccacatacgaaggagagtttaaaagtggttacatggatggtattgggacatacacgggtccgagtggagatgcttataaaggtcagtgggtgatgaacctgaagcatggacatggcgtcaagagttttgcaaatggagatgcctatgatggtgaatggaggagaggtttgcaagaaggtcaaggaaagtaccaatggagcgatgggagttattacatcggcgaatggaagaatggtacgatctgtggcaaagggagttttgtttggacaaatggaaatagatacgacgggttttgggatgaagggttccccagagggaatgggaccttcaaatgggataatgggagtttctatgttggccattggtctaaggatccagaggaaatgaatggtacatattatccgtcaggaaatgaagggaatcttgaatgggatcctaaagatttgtttaataatctaagtgagtacacgatctgcagcggcgagagggttcctacattgccttcacagaagaaactatctgtttggaactcttccaagcggatagagaaacctaggaggacgtcagttgatgggagagtaagtgtgggcgttgatagagcgtttgagaagatgaatatgtgggggaacgaaatcggtgaaggaggtgctgatatgaggaaggagttggatgcagagttgatgagattggacgctgaaggtcttcagagcctgaaatcgagccctgttcctatgaaactgccaaaggcagggaggaagcaaggggagacgatatccaaaggccatcgcaattacgagcttatgcttaatctacagttaggaatcaagtaaaatttgaaaattgttggtatatat

SEQ ID NO: 4711 - DNA, 919 bp, Arabidopsis thaliana landsberg
  unsure (1)..(919): unsure at all n locations
atgtctgtgacgggagggtaagtgtgggtgtagatagagcgttgagaagatgaatatgtggggacccgaaagcgcagaaggtgctgctgatattgattccaccacgaggaggaccttgcatgctgaaatgatgagactagagtctgaagggttcattcagagcctgagaccgagccctgcacttatgagattgccaagggcagggaggaagcaaggcgagacgatatctaaaggccgccggaattacgagcttatgcttaatctacagcttggaatcaggtaaatatcccagtttgctgcctcatttatacaatttgaagttttgttgatgtataagcgctcatgtgaaatgtatttgcttnnnnnnnnnnnnnnnnnnnnnnnnngctccggttgtgtctcttgatcttaagcattcggcttttgatccaaaggagaaggtatggacaagatttccaccagaaggaaccaaatacacacctcctcatcaatctagtgaattcaaatggaaagactattgcccattagtttttaggtgagatcaaataacattaggctttacttatttcccatctgtacgtattctcacacactgttatgctaattttatctatctttaggagcttgaggaagctattcaaggtagacccagctgattacatgttatcgatctgcgggaatgatgcccttcgggagctatcatcccctggtaagagtggaagctttttctacttgacaaatgatgatcgttacatgataaagacaatgaagaagtctgaaactaaagtgagtttgttttattttaaaatgacaagatgaaaaatatgtagctgctattaactttattctggaattatataatgcaggtgcttctgaaggatgcttgcagcatattacaaccatgttcgagcatttgaga

SEQ ID NO: 4712 - DNA, 2210 bp, Arabidopsis thaliana landsberg
  unsure (1)..(2210): unsure at all n locations
gaaggaatcggccaagactatgatcaagaagagctgaaatctctttggaatacaatagccggtccgaagcccttctcgccaaccaagagcaagagttcttcaatccataatcccgtgattagacacctccaccagtgcatcgccaacaccctctttccaaagaaggccaccagatttgttggtgaagaggagctttgcatgatagaccaatctttggtctttattttgagagagacaaaagatgggaggaatatggcgggtgatagagcagacacttcgttgagtgttgttctcttggatcacctattgagctataaggagtatgttgcaaccatccatcgctcggaaattcacgggagtctttgtgttggtggtctcttaacgccaatactaggagctgtgggtatgaaattcggaactcctgacgtgttgcctaagttcattgacctatactatctcaagggaaaggattttcttgagaaaacaactctagcggatcgctatctcttcaaattcaaacactcggagcttggaccttctcttctacccctaccatgcgagaaccagactttggtgaagacaagacgcaacatcaatttcatgccatctccctctgccttgaacatcgacattggaggagctcgggaagataaaccagaatatagtccagccgactatgagcaacatgagtaatttactcaagctgattatgaggagcaaatcgagtttgagcaacatattgatcaaccggagcatgggaccagcgaacaagagcaagctcattatgaagaaggtgctaaccaaggaggagatgagtttgctgaagttcacaagaagctcgatgtacttgaagagcttgggaaccttcacagaaagacaatgaagggtttcaagaagaagaggagaacaatgaagaaatcgctcaagagtatggctgctcaactcaaggacttccagagcaagccaaggccaccatctccaacacccgaagtaagaaggaccggttcaacgagctcagctgcaaggagagctgaaaggatcgatcaaccccgagcttcatcttttgaccctcgggaagtgatctccgagttgagagagccaaggagtaggtagagacgagcttccacacgctcgaccggacagaacgagcaacaccctttcgcctcaacttcagcccctgccaatacccaagagagcatggatgactatgtctccatctacttcacctgacaattgaggtaacaccacctctccattgtatataacatcatctttttatttttctttgtatgttttgtgttttggtcttgaattctttctcagatttttattacacaagggactgtgtaatttaagtttgggggagggttcaagcgatgtttaacattgtgttctcttttcttatttcaaattttgcatcatctaaggcatagaaaaacccataaaaaatttgaaaagtttcagaaaattatttcacaaagacagagtgtcatgtagattgcatttcattttaanattgtatatagagtgtttgcatttaggattgctcatttgcatagggaataataatnatttcgaactgttaagcatcttttgattcaatgaagtaagttcaatgcccaggctgttagttctctgttgcaaaactgattgtttctctgaagtaagactgaaccctgctttaatttacaacttgactatattgctttgattcaaaactcgcttatctgatgccattctctatctattagaacctgaactgaatttgcaattatcatgtctatgcattgtttgtgaagtcatggctaccatatacatactttgattatcttattcacttcaccatcctctgttaatccaagtaggtgactctcatttttagagcagtttcccatacccttagcctagccttatttcaaaccaaagatcatttgtgtgtgattgtgaggtctttttcgattgagcttggtataacgtgttaggtatgagccgacaagagcagtctttcatgtagacctagcccacgctttttgggttagctaggactaggtggagacttgtatttgggattgggattgtgtatggattgaatgggaaagagaatgagaatgataagaaaaaaaaaaaagagaataagagtttagagttctaaagggggatacaaaaaaagtgttagtctagtaaagagtttggaattcaaagaagttagg

SEQ ID NO: 4713 - DNA, 4134 bp, Arabidopsis thaliana landsberg
atcttacaacaaaatgtttaaatgataatatgttcttaccagctacatttcaaagctctacctcgtacggacacatcatttgcatttgtgcacgtttcttagtcccctattagcctgagccaatgtcgacgaaactcgtccatacgattttaaactcttgccttgagtgccccgagaccaaactgttctattctacgttgcttttattgaagggggaaccacattacagagatgagcgcaaaaccggttacatcactgtttggtaatcaattccaattcgtgtaacatcaatttatacatctcatatactatttgtcaatgcaagttaaaaattcgaactcagagtttcaactatagttacagataataatttaaatagatttataacatctttcaacaaaaattgtcgaaaatgcatatcacaagttcacagcccacagatccaaaacggtaggtcactacatttaaatgtcactgttggtaaaagcaaagagcatccgatcaatatgttaacagcgacgtttctgaatttaaaacacaagcgaaaaacggaatcaatccgtttaatatttttgtcttttttacagaatattatatgagtttgaaatcgatagtgacatatcaaacacataattttgtgagaaatatgttctgatgaaaatttttaatattctaaaattgtcaaatcgacgttccgctaataacaaattgggaagaaatttgtgtaacaagattagctgtcatcaataattgaaactatgatcatattttgtctttttgcaattatagatgcgttttagatttgcctttcaaatttcaattttgtgcaacattctctcacacactcatgtttagtcaaacatcatattggggaaaatatactaaaccaataaaatacacatttcgatatttttctcttagctatgcggccgaaacaagaagttaacggtgaacacattaatgacatggagatgaagaaaatccgtaaatatattagacaaaatatatgtatcaaaaataatctgaagaaatatagccgtttaatttatcagaaaaataattgtacgttaagcttcacgtttgagtggatgaaattgaaatttataagtatatgttcatgcatagtataaaccctaacaagtaactagtatattatattcataattatgaccttacagaaatagttaaatctaacagaagtcgtcatatgatatcgatcgatatatcacttaattaatatccaagctgacaacaaatatcacttcatgttcatgattcgaattttataaaatctcgattatcatcaattcatcatctagacaatataatatataaaagaggccatggcataatcatatataagccaaataaaatccaagttcttttcatttattgattataagaaaaacaaaacaataggtctaattaagaaacaatgatataaattaacagtgggtggaggagaatagggattgcgttacacgaatacaaaggttgatacgtagatataaatagctagatgcgagcatacataaagttatacgacattattgagttgcaccgtggtggtaattagccatcatagactgaccttgctcctgctgtggctgctgtggtaaaggcggttgggactgtggttgggactgagttatttgcttgttgttgacccttttcctcttcttctcatagctagcgccacgggacttagcctggaaatctcgtcatctccgtgaggagtaatcgtgtcgagtccgtgagccaaaagggctagtctcgggagcgccaccgttctcctcgtaggctgcacggagacgaccaatgagggcgtcgagtgagccccaggcttgtcggagaggacaaggacaaggagccggtggatttgggaggccaaagaaggcgcagttttggtggtggactttggttttgccgaattggtcaaggtaacgcagaaaatcgaggacgtgtgcgccactgcaagaagctagagagagcggtggatggtggtttctgaggtattggcagaaagtgttccagtcacggcgtttctggttctcgtagcggctagaggaaggtggagaagaaaaggaagaaggggtttgcgtcgagagactggtattagggtttctgttgttgtggttttgagagatcaaatccatagctttttagatatgtttccaaattagggttctttctccagatcgagttgagtgatttagggcaaagattaggttttaagttatttataataaataactttttctggttaaaggatatatataataaataactaaaaagagagatagaattaggacttggctacttccttgtactgcaaagtggtgaggtaggtgctacaaaaaaggatagattcagtgatgatgatgttgttcaaatatggtgaggcaaagaggaacaacctgcaaaataagaagagacctcttgcttttttgcaagatgagagatataagtagaagaaatcaaagtgagattttttctttctttctccttttctactgttgtcttttgtgtttttcctcttttctactatagaatgagaagatggatagaaaaatacagacacaaatgtccatatatatagctgcataaacatcataataggtcatttatagagaaagagaaagagatgagagtcgtgagactgatcatcagaaatcatatattttccatttaagacacaaaaaaaggaagagaaattaaagaggagaaagggacttattgttttacacagtgtataaaaaggtaactctatagatgagacttgagagagagacagagaccaatgggtcgtctgaagaaagagacaaatatttgtatgattttttatctgtcactatttttcttactttttatttttcaatccgtgattccggacacaaactattagcacatgaggaataatcggattataaagaataaattattgggttataattggttatttatatgtataagtgaatttgatgaaagagttttctacttcttggttaaaggttttcatttgtaaaccaagaaaatcgattcaaatacaaccttattctgaatgaagattcaaatacaaccttacacatgtccaacgagtgaaattacttaaaataataacgccttctcttctcttcacgagtgaaatattttctgaaatatatcgaaagcaattaatcaatgaatgaataaagcgtagcaaagaaattaccaatatcaaagcacatatcagtagatgtgagcaaactacatacctcaaagcaagagagtacatattccacgtcgacgtctgagatttggtggtgtagaacaatcctgattctgtattaagagaccataaactccaagttaccattaattacatccaaattaaattccagttttatcttattctatgtggtattacatgatcataaaaatgtaatatatatatcatatgtacgcgtacctgaatgtagcttggggtatgacaagcacaccgacatcttccaagctcttacatgcctcttctgctccaaattttggatcttctggtatgtctacgtatatctgcgtatacgagtttgttatatacgaacaaaaaaaaaaactcgtaaccgttcaatccggttcagtccttaaccaaccaatcattcatttcaaacacttacgatgttggtttccacagctgcaacgttcactcttaaccgttcaatccggttcagtccttctggtgatgaagaaaaccaaaatggaaatcaatcggttaccactctcgtattaaatttgagattccggataacagaaaaccaaaaatccggtatcaatcacctgccaaaaccctggctttcttatggacatcttcgagcttggcgacgttttcatggagagccaccaatgcggcggcgcagatggggccgatctgtctcattcctccgactaatgttttccttaaccaccttgcctgcatttcaacaagtaattacttgaaccggaattgaaaaaaaatattgttatttaaccgtctcaatttgatttataggtaacgtactttagtaatgaacttcttgcttcccacgattaccgaaccgaccggtgcaccaatacctttcgtcaaacagatctagcttgaccaaagtgacggtactagatttc

SEQ ID NO: 4714 - DNA, 4021 bp, Arabidopsis thaliana landsberg
agaatgaaaataaaactgttaagccagtcgttgtactagttcatagtactacaagaagtagttcatttggtaaaacatttggaaattggactattcttttttttggctttttaattggttttgatcaaattctttttttttcctgaagtgtttcgtaatgaatttatgactgatattctacatactgtgtatagaatttttttgagcgggtatgtgttcgaaacatttttcaacagaatgactaagacatgactggtgttgatcatgaaccaaatgagtgtataacgtacgaaaactcaagaagatgtaagactgaaatgtgattttgctctgaagagtaaggagtaagaaaaatcccacaaagcacgtgtccttgcgtatcttctggttgtgatggtttgagctaaatgaaaaatggcgaatatgtatatgatgctaccaattataagacaacatatactttagcaaaaatagtggtttatgaacaatttagagaaaatattcaaaaatgcattatttctcatatttaaaagactggaaaaaaaatggcccttcttgggaatatgcagcttatttgacatgtaacgtttacaatcgagctgttaaccacctaccaaatgatagagatcatgataagaaggaaaataagaacttattttgatatatactttatatagtgctgattattgccacaatttgatgtcatattaattctggtaataactattgcaagcaaaaaagtatctctcaagtcatccacattatcattttaggtgtgttttcgtggggctcccgtggatgaatcaatggtgttagtgggacattctattgctatacttgtcacgagggacatcttaaatcatttccaatcaattttcacatgcttctacgccatttgttcatttaaattatatatttcaaatcaagtgtgtatataatttagaagaacaaaaatatttttataacatatggacagcactattgacaggtaattgatgctattttagacttgtagtcatcaattgattgtgttttgttgattagtgtttttagaatagtgagggatatatttaggaatattttcacaggagtattcacatgtaagaaggatgttatttcacaattatttttatttttattacattataaataatttgattctgatctgaccgaaaataaatataatgattatatcctgcaattgcagtggaaccaaaaagttgacaaaaaaaaaaaaaagattagatcctgcaacttaacgacttaaagcaatcaaacacaaatgaccaaaatgtaataaattttgatttaaatagtgaattttgacttagtcgaaagaacattatgatggtcgcatggtatatatatatacgaaactaaatagttcgacggattttacaataatatattttgtttttagtaacttttctgcatgtgaaaaacatgacaggttaatatataattatcattcgcaaaaaaaaagaaaattgaaattaaaatgtaaagacaaaaactatataaagctttataaaaaaaaagactaaaaactattcatgaaatccttgtaaaatcacataccgagcttttcaccgatttctaaaacaacaactgttcaatactcgaaaagtatatattacaaaaaaaaaggcaaaaaagaaaaaaagaacgaagctatatcagaagaaagtgatgactctatcacctctatggtgcagtcgttagaggaatcgaactcggaactctacttaccaaattttgaactccgaccacggtaactaatggccgttgttgttgtagtcatatactcattaagcctatctttctttctttttggattattaacattccggtccaatcatgacaaaaagaaggattattgttgatttttccattttttatagagatcttttgaaattgccatttttactaaaatcttacggatatgccattttctaagatttaaaaacatatggatttcggactttttttgataaaaatacgtagtttacacaaaatactaaactctaaaaacaaccataaccaactaaacccaaacataatgaataaaacgcatgttaaatcttattttcgtaacctgaaaaatggcaaaatccacaaactattcaaaaaagggcaaaatccacaaatgtcatccaaaaaaatggcattttcataattgattctaaaaaaaatgaaatacatgcactatcactaatatataagatattctctttcattcaaataaatacatgtcttagaagttacattaagagagcccttacattaacggcgtgcaagaagacgtaaatagaccaatacaaaaaataataaaatgtggctcaaaagatgcgatgtggactcaaacggcacctcaaccaaaattttaaaaattagggaactctataatgtacctgtctttgttatacttttcatgtgaaatgtagccgccaacgtataaaattcacttacgcaaccggataaaaagcatactgtgctacaccacacatgccttgaggccaagccacgtctcttcggatcctaatgtaacctttttctccccaagtttcgccccaagagtttttagccagccagtacttagttccatcctggctcgttccatacccaacaaacgtaacagcgtggttcgagctggtcccacaaggcccatcatatactcctcccgagtaatgcatgaacccgtccccagtcgcgtccatcgacacagagactggttgcctcgatacagcctcgagcaaggcccgctcgttgttgctagggacggtttggaatccactgatacgtgcagctggtcttgcattggaccggcatcccccatctgatccttggtaagagtagtcattctctgatgcgatgcctcgattttggactacatagttgaaagcgtccgacattatcccaccgtcgcagcctcggtcgtactctctgtcgcagtctagaagctgttgttcggacagagatacaaggttcccgccggcgatcttagccacaccttccactgctgctacagccgaaaatgcccagcaacatcctgtagatatggatatttggtaagttggatgccgatcataatagaaacgagacaaaatataatgaccaaatcatcactgaaccctacttactataaccctataactaacttggacatcaagtttaatattttgtatcctcccaattgttttcgcctttgcattgtatttgattctagatattatacatgctaaattgttattcttacttctatgaaccaaaatgaaacataattaatttaaccatatttgaaaattaattctaaaaactaaaattgtaaattaacttgataatcaatgaaagaatattaccgcattggccttggtacttgacaggagtgacagctccttcagctctccagtccttgctctcgactaccatgtcactgacgttccaagtcttagacgatatcgttttggcgaccaccttggatggggaaacttcagttaggccctttagtccggtatgtattgctaggaactcctcgttggtccaatccgcgaattcattgacaccaagcttgtagcttttgttcccttttttgttgaagttctcaatgaacttcaagttcttcttaaacacatcgcgtctcatatttttctcgagctcatcacggtattcacgagaaaatcgagccatccattgctcatgtttatcaaccattgactgctcgcgaaagatgacagtacgagacgtagcttgagagattctgaaacccgtgaaaagaatgattaaaacagtgaccaataccatgattgatgccatttaggttttggaaaatagaggaaataattatgtttttaatatgggcttatgattaatggtgttgacttgtaatgtggtgatgaagtgagaatagaaggaatagtatttatagatttaggattgaaccatgaaatccaattgtatgtaagaaaatgcaacttgacttgaatccatttggggtgatgttaatactttgcattacttgccc

SEQ ID NO: 4715 - DNA, 1470 bp, Arabidopsis thaliana landsberg
tacccttctctccatcttcacttcttcatcacaacacaacacaaacaaaccatttacataaaacaaaaacaatttaatacttcttagtgtgtaaatgtgtgattctttcatcaataacaaaatgacatcgatattattcatgctcgtgagtctaacaattctttccatgaatctaaaagtctctcaagccacatctcgtgtcaccttccacgagccgatcgttgctgaacaccatcagcaatggatgactcggttctctcgagtttacagtgacgagctcgagaaacaaatgagattcgatgtgttcaagaaaaacttgaagttcattgagaaatttaataagaaaggggatagaacctacaagcttggtgtcaacgagtttgcggattggaccagagaggaattcattgccactcacaccggcctcaagggggttaacgggattccatcctctgaatttgtcgatgaaatgataccttcttggaattggaatgtcagtgatgtcgctggccgtgagaccaaagattggagatacgaaggagctgtaacacctgttaaataccaaggccaatgtggtacgtaagcttgtcggaattatacatacaaaagatgattcccacacgtatctcaattatataaaaaattcgattcaatatttgaaagaattgtaataatcattcaacatacaaaacgtaaaccccaagttaggtttagtgttaggtttagttactaagagattcgataattatcaaaatataactaatcaatatatcgatgcatttatgggcaggatgttgttgggcattctcaagcgtcgcagcggtggaaggtttgacaaagattgttggaaacaacctagtatcattgtctgaacaacaacttctagattgcgacagagagcgtgacaacggttgcaacggtggaataatgtcagacgctttcagctatataatcaaaaaccgaggcattgctcagaggcatcatacccttaccaagcggcagaggggacatgccggtacaatgggaaaccctccgcatggatcagagggttccagaccgttccaagcaacaacgagcgtgcattgctcgaggctgtatccaagcagcctgtctcagtgtccattgacgcggatgggcccggtttcatgcattactcagggggagtgtacgatgagccgtactgtgggaccaacgtgaaccatgcagtgacgttcgttggatacggaacgagcccagaggggatcaaatactggctggctaagaactcctggggtgagacttggggagagaatggttacattaggatccgtagagatgtggcatggcctcaaggcatgtgtggtgtggctcagtatgctttttatccggttgcctaactaaacggcagacgacttatgttatataaaagtgatattattgttttaaacatttaaacaacaaaatggtgatatatcttgttatatagtttgg

SEQ ID NO: 4716 - DNA, 2505 bp, Arabidopsis thaliana landsberg
gtttgctacaaagaaactcaattcacaaaaatgatttacataaatttaggtataaaagagtggagatttctatgaagttaaaatacctgaatctaactcttctaaagatcttcccgccatttttgtgcaatacataagtaacataaacaccgggttcaaattgttcgataagttctttccctcctcctttagacgatgatgaagcttctgttgtccctgaaggttcttgagatctcatgttacctccattagatgatggtttttcctctatgttttgatcttgtgtgtttgtagaaggggttggatctcgttgacccattcccaaggatgttctaggtaaagatgattcagatgcttcactcgcatttagataggcttctgcttgagaattcatggattcaaaagcttcacatcttgatacttcaggaggtagtttctcttttaactctctcaactgtgataaataaagttttttaaagtctcattgcttgtttcccaaggaaaaaaatctattaagcatgttttatatataagaagaagcttacatgttcagcgacagatttcatgacctctgttgctgccttatgctttgaagaatgttttacagctaagtcagaagcttctcttgctgttttctttagtctttggatctctgtaccttgattatcacatttctctttcaaatttttaatctgtaagtgtttattaatgtattagatccaattttctgtttaataaacctgagaatttcgagataagattacgaacctggctttgcaattttgtcatttctttgtttataacaccgttagatttcttcaaagtatcaatcatgcccctggaaaatccagagctgcgtggagggcttgttcttcttgatgctcttgtacctaaaggaagtgtcgatgttgaagatgaggcaacgggtttaaaggcattttgaattgcgctaagcgagcttgggaacgcaacatctctaagttgctggagagctggaacttgtgaagctctgacaatagaagattcagatcttgatgacctaacctcagaatacttgactggttctgttttgggggacagtagaatccttgaagaccttatatctctgtctggtcttcctgtcccatctagtgaccgtgtagagttgtggaatttctattagcaacattagagttataaccagactctccagctttaagttttgtgtaacaagcatcacatactcgatgtggcttccccggagttggagctaatgctgcttttaaagctttcttggaactacacgcatggcaatgcactaaaccacaggtataacaattatgcctctttctcgtaaaaccaaatgcttgacgacaaccagaacaaacagattgatcagctcctgagacccacttatggatgcatatacttgatgtaaagttggaaccacatgatatactcttcacatgcctctcccttagagcttcaactaatgtaggcgtttttcgatcatccttgtccccatgtcctagtcttccatttgaaccttttccccaagtaaagacttcacttctcgatgtcaggacagcaacatgatgatccccacatgatatctcttcaacgaattcaccaaccaatcgatcttgaaccaagcaaggcaatttaccatccgaattcgagctaccaagctgaccatgtgaagtccctcccatagtaaaaacatgtcctgaggttgtgagcgcaactgtgaatgtatgaccacacgcgatttggttaaagttgtagtcaattagtgaagatacacaagttggaagaagataagtctctttatttccatgtcctagcctatttttatcaccatcgccccaagtaaacaactttctagatgaggtactagtaccggtctgattcataacttcaactatagctaccgtatgccacacgccacaagctactttcatggttttaagaccactcaacattttcacttctttagggtatgaaacactctctctatctccatgtccaagaacaccaaacgctccatcaccaaaagtgaatagttttccattagcagtcgcaagcgcggaatgccacgtgccacacgcaacagacaagacttgaagtccttccacaggaccagagactcttttcggtatccaatgactaagatcacttccatgtcccaaaagtccaacattatggattccatctccccaagtaaacaaatctccggacgtagatacagcacaagtatgatattctccacaagcaacaaaatctatgttggtaagagcaagaaactcaacaagttttggacgactaacgtcgacttgaataccatgtccaagccttcctccagcttcttctccccatgtaaagacttcaccttgtcttgtcacaagagcgatgtgccttacaccgcaagctatctgatgaacatcaagtactacatttgactctaagggttttggaatcaatacatctatttttactggtgtggagtttacgaccccgtctggtgat

SEQ ID NO: 4717 - DNA, 815 bp, Arabidopsis thaliana landsberg
ttatacactgagaagaaaaaggtttgaagttagctacagtttcacgaattctcccaggtcaaagaactgtgagtgtagccaaagcttacttacttgattctataactcaaaagaaatatattttcatggaattcacaaaatcttgttgtttatttataggctgtttttcgaagatatttacgtcccgaaaaggattacttgtcattttctctcatatatcacaacggagatagatctcttgatctggttagtaaacaataacatattaattttctttgatttttctattcttttgtcacatatattcatgtttatcctctacagatttgcaaagacaaagctgaaacagaggtttggtttgcaggacttaagtctttaattagacaaaaccgtaacaagcaagccaaaagtgaaatccctgaggtgtgtgtatacgtgactttattttcctatattttactttccacaatttccttacgtctaatatacaactatatgcatgtaactcgttttcagatacatgacagtgattgtttctctactggtcgtccttctactgcatctatagatttcgcaccaaacaatactcgacgaggaagaacatccattgatttaggaatccagaactctccaacaaagtttggtagctcagatgtgggatatgaacgtggaaacatgctaagaccaagtactgatggttttcgaattagtgtctcaagcacaccaagctgttcaactggaacttctggtcctgatgacatagaatccttaggagatgtttatgtctggggagaagtttggagcgacgggagatc

SEQ ID NO: 4718 - DNA, 724 bp, Arabidopsis thaliana landsberg
cgtcaagtatatgtatacataagtgggtatccggagcagatcagtcaatctgctccggatgtcgtcaagcattcggatttacccggaagaggcataactgttataactgtggtttagtccattgtcatgcttgtagctcaaagaaagctttaaaagcagctttagctccaactccggggaaaccacatcgcgtatgtgatgcttgttacagcaaacttaaagccgcggagtctggttatagttctaatgtaaacaggaatgttgcaactccaggacggtcaatagatggatcagtaagaactgatagagaaacaacaaggtcatcgaaagttctcttgtccgcaaataaaaattcagtcatgtcatcatcaaggcctggattcacacctgagtcttctaatgctcgtgcctcgcaagttccatctctccaacaacttaaagacattgcattcccaagttcgcttagcgccattcaaaatgctttcaaacctgttgttgctccaactactactccaccacgtacacttgttattggaccatcatctccatcaccgcctccacctccaagatcatcctctccttatgcaagaagaccgagccctccacgcacttctggattttcaagaagtgttatcgatagtttaaggaagactaacgaagttatgaaccaagaaatgacaaaactgcatagtcaggtatcttcattactttttttcttgttttc

SEQ ID NO: 4719 - DNA, 2343 bp, Arabidopsis thaliana landsberg
ataacggaaagcgaaacaggctcgttcatctctatcacaatagcatcttcaggctgcaaaacacacatacaaacataaggtcacttcaacattttattggacagattattaaacaaatctctctagatgactagtgattgttcatactttgtcgacggtagtattctgcctgagcacaatgtttgctgtcccgatatcacctgctgttgaaaacttcaccccttcttttgttaccgagatcacaactgcaaaatcataacatcaaaaccagaatcatgattagagaatcctcgcagtgatacaccaaataaacaaacagttcatttacctgtgtcaccaatgctactgagatctttgcatatcctggaaaattcaccagaaggcattctcacaattgagtggtactcagcatcaggaattcctaaatgctcactatcgatatccatcagcttcatctcaaaatctgcaatcttgtcttgtgctgcatcatcaacaccattcaaataatgagattaacaccacatagtcaatatcaaacaaagttcctctgttatctttcactaaatcaagaaactctattcactttcaaactatagtctttaagctagagactatacctattctgaaaacaaaaatggaaggactcattctcatcaagcaagttctagtttctgtcaaatgaaacctataaataacagttcagatcactaataacatcattaactacacaaaaacaaagccatatcaaaccttaatccaaaaccaaaaaccctctattaacatagatttcatcttctctttcatctctacaatcatattctagcttctggcaaatcaaacctataaacacagaatcaggtcaccaatagcatcaacattgacaacaaaaccaaagccctaacaaacaaaaatcgatttgaagaacttactgggactctcaaacatgaaagtaacagtgtcgctaccatcatcagctttgatggtgatgatatcatcatttccagcacatttcagcatcttagacatattaccaagattcatccccatagagaggttcctatcgcatctatagtgctcgaaaccttcagatctaagcaaaagagacaccaacgcgacatggctcgaatccatagcttgaagcgagaaccctgtggtcgaacagtcgaagttcgcatcgttcaccagatctttgaccgcttctagaaccttcttcagtagagaaccttgaactaaacgaagctccaacatcttcagggaagttatcgaaaggttagagtgtgaattgaaacgggtagggttcttgagatttctgagaagaaattgcaattgttagcgggaaatgatattataagctgagatttttgtggcgccatctagcgattttagggtatttttgttcccgcctgtgtgtgacgatgaattatcacctgtgtgagtccgtattgtttatttcggtacaccgccatcattaagcttttctttttatgggtgtaaaatgggccaaacaaacattcggcccaacaccagctgtaatattaaagggaaaagactaaaaaatctaatctactaaatgtcggtttttatcggtttagtacgatttgattcaatatctttttttttttttaaacaatctaagtggttcaattcggtttactaacgagaaagaaaaaaagatatttttaatattcccgaaaaattcgaaacgagagcaaatctgctcttcaaggtaatcttcgagttcgagactgaagaagaaatccagaaatcattgaggaaggaagagaattaggaaatggcgcatagaatactgagagatcacgaggctgatggatgggaacgttctgatttcccaatcatctgtgagtcttgtctcggtgacaatccttacgtgagaatggtatattcttcgcttcctatgtttctcctcaaacaaattcgatttcttttgcctttagctagatttgtttttaacattcatgtatctttattaagatctcctttcatttgtccatttccgagcttgtttaatgcttttatgtttcttagtgttgaagctgaaattttagtgatttgggattttagggtttaagcgatttaatatacaattcataacctttggtaaatctcagaattcatggagttatagttcaaaatgatatctttggtttgttctgattaaatttgcttagagggaatgtaattcattgattactgtctcatgttatgtctggtagtgatgtgcagcttcatgtttgattgattgatttattgttgttgtttggtatgtagacaaaggcgaataagataagagtgtaagatctgcaccagacctttcaccgtttt

SEQ ID NO: 4720 - DNA, 1907 bp, Arabidopsis thaliana landsberg
gaaccctaacccatatttttaagagaaattccaaatcgatttgtactttggcctataaaagtagcggcacgagattgatatctagtaccgaagaaactgtcccacagggatcatgaagccgatggatgggaacgcgccgatttcccaatcacctgcgaatcttgcttcggtgacaatccgtacatgcgaatggtgatttctcgctcccatctcttaagttttgttgatgttttctgtatagtggagttgttaacttagtaatttaggtttaggttcaggtttaaagttattgtaggtgctaatgattctcatagcttgcactgcacgtttttttcttcaaatccttattaaagttgttgtttatatgtagacccgagcggattatgataaggaatgcaagatatgtagtcgtcctttcacagcttttaggtggcgaccaggccggaatgctagattcaagaaaaccgagatttgtcaaacttgctctaagctaaaaaatgtatgccaagtctgtcttctggatctcggttttggtcttcctgttcaggtcagagactcagcactcaatattaattctcactactctgtcccaatgagccatgtcaacagagagtactttgctgacgagcatgacccaaaggtatgaccatggattctcctttttctttttaactaagtattttcaagtctgctttttaggttatgtgatcattgtgaaagattgatgactaatcaagtctagttttttgtagactagagctggactggattatgaatcttcatttgggaagatgcaacctaatgatactattttaaagcttcagagaagaacaccttcctatgaaaagaaccggccaaaaatttgtagtttctacaccattggtcagtgtaaaagaggtgccgaatgttcattccggcatgagatgcccgaaacaggagagctatcccatcaaaacataagagatcgttattatgggtaagctattggatcttctctattgcttgacatttagttgccttctcaaatgcttatttgagttgtttctcttatgtacttttcatatgttcgcagtgtaaatgatccagtcgcgatgaatttactcagaaaagctggtgagatgggcactttggaaccaccagaggatgaaagcatcaaaacactttacgtcggtggacttaactcaagaatctttgagcaagacatacatgaccacttctacgcttatggagaaatggaatctatcagagtcatggccgaggaaggcaaatatgatcaaagtggttcaaaccaacagcaacagggcagtatcgctcatagtggattaatatctcagcagcagactcaacactcacaaatgcagcagtactatatgcagccaccaccacctaacgaatacatacattacccatcaatggacacgcagacaatgggtgcagccatttcaacccaagagggtgatggttcaagcaccagtgagaataacagagcttattcttcttactcttacccgatgccaccacaccagccgtactagccaccaccaccatatatagatatatatatgacatgaaaattagtcttttaacgttttaaattactttagttttcagatgctattaaattcttgaataactcattatttcactccaaattgtgaggacacgaaaccgtttctactctcatcctgactcattcacaatagacacatggtgtctcaattgtatttgagattgaattctagccgtgtgattagaaagagttatctacttttgtgaagaggtaacttagcttttgaatgattttataatatccaatggtccaagttggaagatttaacaatcatgtcaccataacgccttctatgtcatttagcgactgacctcaagagccgcaacccttatgccgt

SEQ ID NO: 4721 - DNA, 2617 bp, Arabidopsis thaliana landsberg
  unsure (1)..(2617): unsure at all n locations
gtgactcgaatccatagcttggagtgagaacccagtgctggagcagtcgaaattcgcatcgttcaccagatctttgattgattctagaaccttcttcaacaacgagccctgaacaagacgtagctccaacatttcgtcgtcttagatattatcagagttcacaatgagaatcgtttgcggctattttggaaagtggattgacactataaggtcaaggagtccgacttataagctttttcttttctggcgggatttcgccattctaagctatttggttcccgccaatgcgctagtgccggcctcaatcgttttaagaattggatggatatttttggtcattacaaaagttagagggttaatttgtgttaataaaaagaagaaaagttcatttaaaattttagtgaaagtttagggttttatttgtaatatttaaaagacaaaaacacgcgaatccaaaaccgactttgccctagttaaaatctcgtcgtctccttcgtgttcgagatttgatatcgagtattcgaaccagaggataagagaatggctcacaggatactgagagatcatgaagccgatggatgggaacgctccgatttccctatcatctgcgaatcttgtctcggtgacaacccctacgtgcgaatggtgatttctcgattccatctctcaaacattcttggattttgctgttgcttgtttggtttcaatggatcctgaatcttatttccggatctcatctcttaaccagtctcttgctcgttgatgtttttctgtatattggagttgttaacttagtaaatttggttttatggtttagcttgttatcaaattcatcgaaaaattgggttttagatccaaattcgtttagttatagttagatttgattacagctgctgattctcttagctttcagctgcaattttgttttctgaaaatctcgatgttttgatttctgattgaagttttatctgttgatatgtagaccaaagcgaattatgataaggaatgcaagatatgtacacgacctttcacggtgtttaggtggcgacctggccgggatgctagatacaagaaaaccgaaatttgtcagacttgctgcaagctgaaaaatgtttgtcaagtctgtctcctggatcttgagtatggtcttccagttcaagtcagagacacagcactcaacattagtactcatgactctatccctaaaagtgatgtcaacagagagtattttgctgaagagcatgacaggaaggtatgatcatgttcgcactcacggttatatttcagcatttgttggtttgagaattttgaagacttactctagctttctcatggtggcttatctaagtgattttgctttttctgttatgtaggctagagctggactggattatgaatcttcattcggcaagatgcgacccaatgatactattttaaagcttcaaagaacaacaccgtactataagaggaaccgagcacatgtttgtagtttcttcatcaggggtgagtgtacaagaggtgctgaatgtccatacaggcatgagatgcccgaaacaggagagctatcccagcaaaacataaaagatcgttattatgggtaagcttttttcttctgtatgtttgactttgttgacgtttagttccgttctttattggttgtttcgatacctcccctaaggagtgtaaaatttcatatgtttctgccatagtactattttctccttgatcattcataatatactcgatatttgaaagcttcggatatgtgaattcttggactgaactatgctatgttggctctcatgtagtcttgttacatagtgtcgtttccagtttttgttctctttgtaatgtattagtacttttgcatttattcttgttgaagagtttgttttaactgtttctcattttcttttacacgtttgcagtgttaatgatccagttgctatgaagttgcttggcaaagctggtgagatgggcactttggaatcgccagacgatgaaagcatcaaaacgctttatgtaggtggacttaactcgagaatccttgaacaggacatacgagaccaattctacgctcatggagaaattgaatctatcagaatcttggccgataaagcctgtgcatttgtcacatacacaagccgtgaaggtgcagagaaggctgcgcaagagctctccaacaggctagtcatcaacggtcagaggctaaaactcacatggggaagacccaaacctgatcaagatggtgcaaaccaacagggcggtgtggctcatagtgggttactacctcgagccgttatatctcagcagcacaatcaacccccaccaatgcagcagtactatatgcacccaccaccagctaaccaagacaaaccttattacccatcaatggacccacagagaatgggtgcagtcatttcaacccaagaggctggtggttcaagcactgagaacaacggagcttcatcttcttcttacatgatgcctccacaccagtcatacccaccaccaccatatggatatatgccatcgccttaccagcagcagtatcctnctaaccatcatcatcaacctggtcctatgcagcactatgcccccgcctccagcaagctta

SEQ ID NO: 4722 - DNA, 585 bp, Arabidopsis thaliana landsberg
caaggaagcccctaccctccttgatttaacatccatacaagaacctcatgctttattataactcataacctaccatatcgaatcaggtccgatggctataaatgattagatcgatataattttttaacctgtcatcaaattagatcgatataattttttaacctgtcatcaaattaaaccgcataatggtaactgccggttttgtttttcttatgcggttattaatttcggcgctgtctacatatagaacacacacacatatatataatattggatcgtttggtggctgagtataatctctacacacgccctcatatatatatactagataaggccgcctaaataggcgggtgtatgatataaatttatttaaatatttatcaataatatttaaactttatatagtaaatagtaatctacacactttttctaatatttaatatagtaatttttgtattacataaaattttaatcatacacattcaattttacttatattttaactatctatttcatcataataaactattttggtatttataacataaaaactacattcaaacactctgtggaaacaacatcccg

SEQ ID NO: 4723 - DNA, 979 bp, Arabidopsis thaliana landsberg
tcaaaattataatgtcaacaagagtctacaactactgtaacaattctcttctcttacattggaaactaattttaaatagcagaagcaaaaattcaaaacgtaaatatggccagaaattcgcactacattttaactgacaacggtttctattgagacgaaccagtagtaacagcagcgtcagcagattgctgagaggatcctgaaggtgctgcagacactgagtcaggtggtggagcagagactgaacttggaggaggtggattaggtcttgaaccaggacctggtgggtaatcatgagtagcttgttgtgaatggccatggtggtaaggaggatactgctggtaaggtggttgcatatatcctccatatgatggtggcgggtatggctggtgctgaggatagtggccatgtggtggcatcgtgtaagaagaagaagaagctcctctgttgtcactggtgcttgaaccgctttcttgggacgaaatgactgcacccattctctgagggtccattgatgggtaaaatggtctgtcttgatgaggaggttgtggtggtggtgggtgcatatagtattgttgcattggtggaggttgattctgttgctgagatataactgctcgaggtagtaaaccactatgagccacactgccctgttggttagaaccatcttgatcaggtttgggaacctgaggtcttccccatgtgagttttagcctctgaccgttgacaactagcctgttactgagctcttctgcagctttctctgctccttctcgggttgtgtaagtgacaaacgcacatgctttctcagccaagattctgatggattcaatttctccatgggcgtagaattgatcacgaatgtcttgctcaaggactctcgagtttagcccaccaacataaagcgttttgatgctttgatcctctggagattccaaagtgcccatctcaccagccttgccaagtaacttcaaaggta

SEQ ID NO: 4724 - DNA, 695 bp, Arabidopsis thaliana landsberg
accaaaataacagccaatacaactatataagacgcaatttagccaatttaggcacacaaaatgatataatttccataactctatttcatgatatacaaaagcaagacataatagaagaaatgaaagttagaagtatgcttacccatagtaacggtctttaatgttctgctgcgataactctcctgtttcaggcatctcatgcctgtatggacactcatcacctcttgtacactctcccctaatgaagaaactacaaatatgagctcggttccttttgtagtatggcgttgttctttgaagcatacgaatggtatcgttaggccgaatcttcccaaaagaagactcataatctagtccagctctcgtctgcacaagaaaaaaaaaccatttgaaaaagccattataaagtagagcaaactgtatagccaaatctcaaaccaatcaatactcaaatataactagtcaccatacctttcgatcatgctcttcagcgaaaaactcccggttcacatcactttttgggatagaatcatgagtactaatgttgagcgccgtgtctttaacctgaactggaagaccatactcaagatccaagagacaaacttggcacacatttcttcaacttgcaacaagtctgacaaacttaagacttcttgtaccctcgcatccctggccaggtcgccaatctgaaaaac

SEQ ID NO: 4725 - DNA, 5520 bp, Arabidopsis thaliana landsberg
cggtgaatcaaaattcttacaaggctatctcatcatcatcccctatgcatatgcaacaatcctaaatgaaacactctagactcgatcctaaatgtaatgcaactacatgaacactctttttttgtgaaatcattttctgaaatttttcaattttttttggtttttctatgtcttagatgaatgcagactcaaaaatatacacaatgcaacacacacttcctaagccctcccccaaacttaaatcacacagtccactgtgtggataaactggaagagagtactcaggacaaatccaatcacataaacaaaaaatgaagaaccaaatcacaacagatgatataatacaatggtgaagtgacgcgcttacctcagtcgaagaatgaacgtagttgctcgtcaatggctgcctgtgattgctcccaggccatagacgaaccaccttgttctgtatcagctccagcaggtgggtactcgacctcatcagctctctggcggccagcaccgctctgaggaaactcgacctctctccttctgctgcggccagcaccacggtcgcgtaaactatgagactgcagaagtcgttcgctcctactgttagatcgagtgagtgtggtcctcctcttccacccagattcacgaggctcgaatgatgaatgcctcgcagggacatgcggaatctccagctctctaggctcaggcgcgtcatatctcttcgaaggcatttcctgagagagatgtccctgcggaatagctgtagtggaagaggagcagctgagcttgttcttcataaacttgatagccttgaggcacttggcgagtaacttgtcctgtttcatgcaccacttctgcagcttgctgttgttcctgtgagattagctcaaactcctgcttttcctcgcaggaggtatatgctcactgaaatgatacatgctcgtgtcaaactccgcctcatctatatcatccgtctcatcaatatcttctgttgtagctccttcggtatgactgatctcctcagttggtggactaccctcgaaataaagttcttcaagcgcaggcttgaagtcaatgttcctacccccgagaatcctagtagcgtcaatgcaggggagaagaatgttggcgattttaatcgatgaatgctcgaacctgtagcggtgaaagtcgccagccatgtcaaactccaagaactcacatctgcgcaaatgatccaagtccatcatcctcggtgctaaccctggttccttgagcggtactccacaagcttccagaattggcgtcacaacgccacccacgcatagtgctcctctcaccttcttcttcctgttcgtcaacgcccactttctgtctccacacagatagatcaacagaggcattactggtggtgcgttgttgagatcgcctctcaagacattcttccccttcgtccggcgcagaatccctgtaaacgcataatctatcatctccatgtccgtgttagacacggtgcctgtagactccctggagtaaaagacgttggcgaccgatctctgaaagtagcggatcacaggactccggatttggttgctcttggaccgcgtcgagtttagcggtagattgttccctatagtggcccacaaatccttaagctcctctctgtcaaatctgggtttggttccctttccactagggaaactaaacagttcttccaacttcttgatcgaaagctgataccgctgttcatccactgaaaacgtcaagaagcctaaccccatggtatccagctcaaagtctgtgagtgcctcatacatctccacttgcagcgtggaaagaaactcgattgtctcctccttataggtagggtaagggtaagacatgagtgtctcaagatgacacttctcgaacagaagctgcacgtcctctagtaaccccagctgggctaaagtctcataacacggatacctcgttccccagaagtcattcatctcgaagaatctgatatactcctccactgtaacctcgtcgggtttgttcagcagcttcgtctccctgcgccatgactctggctcatactcaatctcgatatcctcatcaatcagctcatatctacttgacatcgccctctttcctctggcaatttcagctcttctctgattacgacgggctgtagagcgttcaaattcatccctgaagctctggtaaacatgttgctctctcggtctagcggaccaggactcagcttcatccacattgtaattagggtccatagaggattctccgctggtgttactcattacggaacctgaaaacaaaattaaactcaaagatacacgttaatacgttagtcccaacaaaaccaaaaacacaaaccaacagagtaaaccgatcgagtgtaccaaattttttttttctttttttttcttgtttttttttcggtttggtgaactcgcggtcgagtgattccttggttgtgcttggcgatcgagtgaccttgagaggcgagagatggtgaagcggtttgaaagaggtcgagtttgttgagagatggcggtgagagcgatgaagctgtgaaggagccgcggtcgagtaactagtgggtttgagacgagctgcggtgatgattcaagagatcgagtgataatgagatggagaagcggtgtgtaatggcgaagtcgagtggttttgaaaggaaggagaggagcggtcgagtgaacttgagctcgcggaagagatgaaacggtggtgttgtcgagtgatggctggacttgagagatgagagaacgatggtgataaggagtcgagtgtttggtgatgagagacgagcttgaaagagatggcgtgaaccgatcgagcgaagttgagacgattgagaggtggtgatggcgaggagcggtcgagtgcgtggggaagaaagatggtgaggtcgagtagaagaagaaaaagggagcgttgatttaagaaagatggggtcgagtttatttggttatggaggagaaaacaaggtcgagtgatgaaggtgatatcgagtgaaggtggggttgcgtggtgattgagtgggagtgaagagattccatgtctcttggtctcttgcatggaagacatgggcgtcagcggagggtccctagtagtcttcatgtctcttctgtgaattcactgttcaatagaaggactccggggaatcccgcaatcctctgtaaacatgaaagactccctggaagactttgtagcttcttcagggcacctcgaataccatgggattttcgttctgagaaccgcaaacactaaacaaaacaaatctaaaataacaagaaagtaaaaattatttaaaaggatagtcatgggacttcctcccaagtgagcttgtttaaagtctctagcttgactcctcacacttattgggggttgggtggctcttccagtggaacagaagttccttctggaattgtttggtctgccatatatttctttagtctttggtcgttaactgtgaagtcttcaccttttccagacaacgtgatagctccatatggtcttactgcactaacattgaaggggccagaccacctagacatgagttttctaggaaaaagcttcaagcgagaattgaatagcaacacttgatcttctactctaaaatattttgaagttattttcgtgttatgaaacgacttggtactttccttaagctgtcatatgcttctacacggagctcatcgaggtcgttaagctgtatcaatcttttctcttcagcagtcttgatgtcgaaatttaaaagtttcactgcccacatagctttgtactccagttcaacaggtaagtgacaggatttcccataaagaagattgaacagggttgtgccaatgggggtcttgaaagctgttcagtacacccataacgcatcatcgagctttacagaccaatctctcctggtgttcccaacagctttctctagaatcgattttatctccctgttagagatttccacctgggcacttgtctatgggtggtaaggagtcgctaccttgtgtttaaccccattcttcctcagtaaactctcaaaaactttgttgacaaagtgcgtgcctccatcactaatgactattctaggaactccaaatcttgggaagatgatgctcttgaataacttcaggacgactctagcatcattggtggggctggctattgcttccacccattttgacacatagtctactgcaaccaatatgtaatcgttcccgtaagaagaaggaaacggacccataaaatcgattccccaaacgtcaaagatctcaacttctaagatcggattcttatgcatctcattccttctgctgatgttccctcttctctgacatgagtcacatttcgagataaattcttgagcattcttaaacattgtcggccaccaaaaaccagcttgcaggatttttgacactgtcttgaacgttgcaaagtggccaccataggcagacccatggtagtgcagtaggatgccttcgatttcgtcttctgagacgcatctcctgtagatctaatctttgcagagtgtgtagagataaagttcgtcccagtagaaatggttaatgtccttgaagaactttttcttctcatagctcgacagattcggaggcgcttcaccactaaccaagtaattgacgtgatcaacataccatagaagcttttcttcaattgcacatacttgatcgagtgatttccgaatttaagcactctcgttaagttgctgaattgctattagctgttcttctggcatggagtcgtcaatagggacctcgtcttcaattctcattctagatagatgatcaggtacaccgttttcaattcccttcttatcaactatctccatgtcgaactcttggagcaataagatcctatgtttggtatctttcttcgcgtatatatgcctcagagcagcatgatcagtgtagactgtcaccttaaagctcactaggtagcttttaaatttctcgaatgcaaataccccagctagcagttccttctctgtagtggcataccttacctgtgcatcatccatcgttctgctcgcgtagtagatcacaaaaactttttatcaatccgctggcccaaaactgctcctactgcataatctgaagcatcgcacatgatctggaatgggaaattccagtttagagcttggactattggggccgtgaccagagcttccttgattaacttaaaggctgtcaaacattcttcatcaaatgcaaactcggtttccttgcatagtagtttggagagcggtcatgccaacttggagaaatctttgatgaatcttctgtaaaatcctgcatgtccaagaaatctcctgatgtccttgacagtctttggtggttgtaactgcatcatcacgtcaaccttagccttatcaacctctattccctcctcagaaattttgtgccccaaaacgatgccttctctaaccatgaaatggcatttctcccagttcaccaccaggtttgtctcttcacatcttttgagtaccctgcataggttcaacaaacacga

SEQ ID NO: 4726 - DNA, 1895 bp, Arabidopsis thaliana landsberg
attcaaaaattttatttcaattttaggtttcttaagccttgacaaaagagagatttttatttctcgattttcctcaatttggtgaaattcaattgggtttttcaatcagatgtctatatccactaatctaattcgaacaatggtcaatcaaatcttttgcgttttcaaagaggattctttaaagattgcgttttgaagaaatttttcagctgggtctcttagattttgtctctccatcctttgaaaactgatcaggtcaaggctttggctctggaacaatcaatctcggcaaattacaagtcatcaaaatcacggattttgaatttatatggagatacagatccacagagaagaagaagaacatttcattttacaaaccaaagggattgttacctaaagacttccattgcttaggtcactactgtcagtctgattctcatcctttgagaggttatgtacttgcggcaagagatttagtggattcattagaacaggtagagaaacctgcattagtggaacctgttgattttactcttgtctggagctcaaatgattcagcagaaaatgaatgtagtagtaagagcgaatgcggttacttctggttaccgcagcctcctgaagggtatagatcgatcggttttgtggttacaaagacttccgtgaaacctgagttgaatgaagttagatgtgttagagctgatcttactgatatatgtgaaccccacaatgtcattgtcactgctgtttcagaatctttaggtgttcctttgtttatatggagaactcggccttcagaccgaggaatgtggggcaaaggtgtctctgcaggtactttcttcggcagaactcggcttgttgctgctagagaagatcttggtatcggtattgcttgtctaaagaatctagatttgagtttacatgcgatgccaaatgttgatcagattcaagctttgattcaacactatggtcctacactagtcttccatcctggtgaaacttacttaccttcttctgtttcgtggttcttcaaaaatggtgcagttctctgcgaaaagggaaatccaatcgaggaacctatcgatgaaaatggttcgaatttgcctcaaggaggaagcaatgacaagcagttttggattgatttgccgtgtgatgatcaacaaagagatttcgtcaagcgaggaaaccttgaaagctcgaaactttacattcatattaagcctgctcttggaggaacgttcacggatcttgtcttctggatcttctgtccatttaacggaccagcaaccttaaaactaggactcgtcgatatctcattgatcagtattggccaacacgtctgcgattgggaacatttcactctccgaatcagcaatttctctggtgagctttactcaatctacttgtctcaacacagtggcggcgagtggatcgaagcatacgaccttgaaatcattcccggaagcaacaaagccgttgtttactcttcaaaacatggtcacgcaagctttcctagggctgggacttacttacagggatcgacaatgcttgggattgggataagaaatgacactgcgcgtagtgaactcttggtagattcgagctcacggtacgagatcattgcagcggagtatctcagcggaaacagtgtgttggcagaaccgccgtggttgcagtacatgagagaatggggaccaaaggttgtgtacgattcaagagaggagatagagagattggtgaatcgatttccgaggacggttagggtttcgcttgccacagtgcttagaaaacttccggtggaattatccggcgacaagcgtcctacaggaccaaaggagaagaacaattggaatggcgatgaaagatgttgaaattctcactgttggaagcagtggtgg

SEQ ID NO: 4727 - DNA, 3201 bp, Arabidopsis thaliana landsberg
gtgggaatgcgaacaaggtgaggaaggtagcttgtatggtagggcacctgatgcgtattccatcgatcctacatttatggaggggcgtgtctgaagataagcgggcagaagtccttgcttctcagcaagctcagtccgtccagccaccaacttatgaaccacctccagtagacgacatagatcctgaatttttggctgcgcttcccccagatatccaaacagaagttcttgctcaacaaagggcgcaaaggatggtacagcattcacaaggacaggcagttgatatggataatgcttcaattattgctactctacctgctgatttacgagaagaggtttgtatctctttaattgaattaggtaatttgaattgtcaaatgtttataacaatctgaaatatgctattttcaggttctcttaacttcttcagaagcagttttggcagctttgccttctcctttacttgcggaagcccagatgctcagagaccgagcaatgagtcactatcaagctcgtagtagtgtttttggaagtagtcacaggctgaataatcggaggaatggtttgggatacaataggctgacggggatggacaggggtgttggagtcactattggtcagagggctgtttcatcttctgcagatggcttgaaagtaaaagagattgaaggagaccctcttgtgaatgctgatgccttgaaatcactaatcaggctattacgacttgcacaggttagtggcattcctgttttaccctacccccttctaacaaataaacaaatcaatgattttggttcttatttatcaacgccgaattgactattctaattgaagtatcacaagcacttttttaggcttctaacaatgatgttattttaatgtatcagccattgggaaaaggccttctgcagaggcttctcttaaatctatgtgctcacagttttacaagggcaaacctggttcaacttttactggatatgattaggccggagatggaaacatcaccgagcgagttggcaataactaatccgcaaagactctatggctgtcaatcaaatgttgtttatggtcgatctcagctattgaatggtagtacttcttaccgaaagtctttgtctgttattctcgcaagcttccagagcactgactgactttctttgttcttaacacaggtcttcctcctttagtgttccgccgggtgcttgaggttttgacgtacttggctacaaatcattctgctgttgctgacatgttgttttactttgattcgtcacttctatcccagttgtcaagccgaaaaggtaaagagaaagttactcatgtgacagattcccgagatctggagatacctctggttgtcttcctaaaactgcttaatcggcctcagcttctgcagagtacatctcatctagggctggtatgtttagcatgattttcagaaagtaggcattttctcacagcaatgtcctgaaaatttctttggttattgtatctgtattgtttcaggtcatgggcttgctgcaagtagttgtctacacagcagcgtcccgaattgagggttggtctccgtcatcaggagtacctgagaaattagaaaacaaacctgtcggtgaagaagcttcaagtgaaacacgaaaagatgctgaatctgagctagtgggtgaagctgacctatctgttgcaagaaggaagaattgtgctgaaatatataacatattcttgcagttgccacagtctgacctctgcaatctttgcattcttcttgcatatgaagggtaagagacgcctttctttctttctttctttgcgttcctgaacttagtctcttatatagttatatttatataggtagtagtctacacaacataggtcttttcttatccttggtctcaattatttccttgaattgctttagacgaactcacatgttttattaccgtaataggttatcggacaaaatttactcgttagcgggagaggtactgaaaaagttggctgccgtagatgttgctcatcgcaaatttttcaccaaagaactctcagaattggcaagtagtttgagttcctcaactgtccgtgagctggcaacactaagcagtaaacagaagatgagtcggagtacaggttccatggcaggtgcttcgattctccgtgttctgcaagtgcttagctcactaacttctcctattgatgatagcaatgtgggaaccgaaagagaaacagaacaggaggaacaaaacattatgcagagactaaatgtggcattagagcccttgtggcatgaacttagtcagtgtatcagcatgactgagttgcagctcgatcatactgcagctgcatcaaatataaaccccggagatcatgttctagggatctctcctacgtcctctctctctccaggaactcagaggctcctccctcttattgaggctttctttgttctctgtgagaagattcaaactccgtcaatgttacagcaggatacaaatgtgacagctggagaagtaaaggagtcctctgctcatggttcctcatctaaaaccagcgtagattctcagaaaaaaactgatggttctgttacattttcaaagtttgctgagaagcataggcgacttttgaattcatttattaggcaaaatccgagtttgctggagaagtccctttcaatgatgctgaaggcaccaaggctgattgattttgacaacaagaaagcgtacttcaggtcaagaataaggcaccaacatgatcaacatatttctgggccattgcgtattagtgtccgccgagcttatgtgttggaagattcatacaaccagttacgtatgcgctccccgcaggatctgaagggacgtctgaatgtgcagtttcaaggtgaggaaggtattgatgccggtggtctaaccagagaatggtatcagttattgtcaagagttatatttgacaaaggagcgttactcttcactaccgttggaaatgatgccaccttccaaccgaatcccaattctgtttaccaaactgaacatctatcatacttcaaatttgttggtcgcatggtaatatttcagaaccttctcaatgcactcacctgattgttggtttttggttctctctgatgtgtttgtgatgtcaaagcaggaggcaaaggcgttgtttgatgggcagcttttggatgtttatttcactcgttccttctataaacac

SEQ ID NO: 4728 - DNA, 5894 bp, Arabidopsis thaliana landsberg
tagcatcatcaaacttttgtaaagtttcccagatcaagcagcaggtagttagttatatgattaacgtttgctactaattagatgctcaagtatgtcacctacatcaatggcacgaaagcagacagactcagccaaagctttccgcacagaagattctggtaccataacctgactaaccatctcttccaaccacataacagcttcatatcgccggtccatatcacaaagaccttttatcatcatatggtaagtttcgacaccaggaaagtgtgattttatcaacatctcctccatgacttgactcgcctcaagaaattgaccatctcgacacagaccatccactagagtttgatatgtttcttcgttcgctacacaagaaacttgcttagacatctttttgagatatccaacagcctccatggattttccatcatcgcatagaccttttataagaacgttatacactccaactgttggaaggcaatgaccttgcatcatctccttattgattacagaaactgcttctttaagcttcccggctctacagagtgctttaaccttggcaccataaataaatggtgtaggctcaaagcctttgcttcgcattgcaaggagcacctcttcaccttcaacaagcttaccttcctcaaaaagatcagtagccatggcactatagctatccaaacagggaattgcacctcggatcaaagtctcagttaacaatcgtttcacccgctctataccctcaatgctactctcccaatgaccagcttcaatatgatggtaacatcgtttcggagcctttaatccttttctcaagattttaccaagaatttcaatagcatcatcaacctcaccagcatcacataatgcatccaatagaattctataaaccacaatgtcctcacctgaacctttctgtgagatcctccagaacattgaatacaacaggtgagtggcttcttttagtttcccctctagacaaaaccccttcatcaaaatcctgtaactgtctctgtccggataacaaccctggtaattcatctcttgaaaaacctgagacgcaaggtcagagcgattgacctggcaaagaaccttcataagcaaattcagagccgttattcgagaattcacctcccaaccataacaatactttctgaagatatgacaagcagcttcgagctcggattctttaaccatctcctgtaaaagagtatcgaaagatagactccaattcacacaattgaactcatgaaggctcttgaagagagaaatagcatcttccagccttccagctctggagaatgtacgaataaccgatgcaaaaaccgaatctttacattcacaagaatcttccttcattctctcaatgacatatttcatttccaacacacggttagatttaccgagaatgtcaatcatggtagcatacaccgagccattgtgaccgtaactcggaaacctctctttcgcttcctcaaaaagcttaagtgctgtcactggattcttctgcttctttaggatttgagaaagaagacttggcgttagaactcttggccatctaacaacactcatgataactcagaaatctcttcaggtcacatcaaggaatcagatttcctgcacaatcaatctcgcctcgtcagcttaaagatgataagaacacgagtcaacagtctaaaccctagaaaccaaaatcatttcaaactaaacaaatttcgccatctaacttttcaaagttgtgatttttcaataacctggagatttcagtatcggattttaggggtctcttcttcaagttcagtctcgtaaaggcagagactttggaagaggttgtgataattgtttcgtagtacggtaaataaagaaactttccatttttgccccataactttcaactattcatacaaaataccccgcatacttcaggatttgagaattacaacccacaactacaaagcaaagtatgtatacaacaatcaaaagagcctgatcaagagcatgtttatgctttctttgactcggatccaatttcgaaactatctgtttttattgatcttgaagagcaccatggactgtattacacattccaggattcttcaaacaccacaatggttggataggttcagctccaatccctctcttaaccatcctatacctccacaggtttaaacggtccacggcttcaccacatctcttaacacctctctcgtctctattccctgaccacaagctctccgccaacgcagaggcacgtggccaaagacgtgagtctaaaaccgtcgagtcagcttgctctgaccacaatgcaacctctcctcctagcaccagcttcctctcttcctcattgagcaaaccatcagctatatcatagttgtatatgctctgccacgtcttaaatggtgcacaccaagacccgccaccgctttctttctgatcatatatactatcattccctagaaacccgccgtgaccacagtctaagtagtagaactctgatgaagagacaattactctgtaaccagcagctacgattctctttgtgttctccggaccgttattccaagtctgtaagattgtgtgctctttaggaagaacagatggatccgccttgatttgtgcatccaacagaacatcttcccagtaaacaactgtgcggttctgtgacacgatgtaaggtaatgtcgagtttatgtacttttcaagaagctggcttagtgttccaccagaggacaagaaagaattgatggcaggatcggttttccaacagcctgggataacttcatctccacctccatgaaagaaagattctggaaattgattaacgatatcttgtatgacgtttttaacaacttcatatgttttaggactcaaagggttaagctgaccggtcccaggttcactagctaaccgctcttcccaactttttccagcaggccaccagaacatattggcacatgtcacaatttccgggtaagcttctccccatgatcctgtatgacctgtggagttttaacagtatctattagaaccaagctaagttcttgtgcaagagaaaatcaagaatggacttaccaggagtgtctatttcaggaagtactctaacaccatgctcaaaaccatactgaacaatctttgagacatcctcgggagtgtataccatgtctggtccaagagatccttttgcagcaagtgaaggttcagaaggaagcaccagtggaaaagattgtgaatcagtgatatgccaatggaacacattgagtttgtttgcactcatggccttaatagtcctcattatatcatctactccatagtaattcctcgatgtatcgagcaaaacacctctatggccaaacagaggagaatcctgaatataaattccaacgggtaagcacaaatcaggagatgttccccaaatcatctgagagaatgtctcaaggccacgcatagctccccaagccgaatgagctaacaagtgcgcggagaagctgccaatggggatggagaggttgtaagactcatcaacaccgtggtgaagcggaagagaaaaatcggtaacagtgactacaaggttcctcaaggtgtatcttttcataagtttgacaggatagctaatgagaggcgagtaattctcagaacggatcaggttgtgataccgtgttacagaggccgaaaggtattggtgttcaggggcaaggatagtgaaatttggagagagtgcaatggctttatgttgaggccatgagagaaatctcggctttggccaaatgttgataggtagagcaatggagaacaatggcaaaagaagcgtaatgaagaagagtattgggattagtatcacatgaaacttggaaagagttagcatgacttgttcttgaaatcaatctacaagaaaagaaaattgaagtatgcattacagatcaaacaacagcaccaaaaacagacacaagtaaatggtaaaagctacactcctagatcagagtaaacaagaaacagcattaagatcccaagtgctaaagtgttgaactttaatatttcaaaagcattctgaagcaaaccctagatgataaatggggttcgtcagcaaatctgattggttgtttatcaaatctccatagtaaggaaggacagagagagcttagaagtaattggaattgcagaaacacgaaaaactgaaagcgaagagagaaactgtaacagagtattacccttagatttagcaatttgtcattcacagaagctgtttggggagagaaattgacttgaggaatctaaaaattgcttcagtctgttcaaaacttatctgtctttactctacaaagtcttgtgaactactttgcttccagaagatctggattctggattgatttgatacttttgcattatagtaataaaaaaattctcgttgcatatttattgtattctactacttgtctattttaattattattaaaaaagaatcttattgtcttatgttaataataaattaataatagactaaaactatcttattattgttaagaactgccaaacaaaaaaaaagaaagaaaaaaacttgtataatttgttaagaaaaaaaacatctataagttttattgaaaataatttattcgcagattttgtaaccgtacaattagaaatcggacaaaaatatgttgaaacaagtgatcattttcaaccagccgtttaaaaaagcacctaacagcaaaaacataaatctgataagcccattttaaaacgagtggttaatgaattccccaatgacaactaatacatcatctataattagccatctcgtctgaactaaaacttggaaggggttgcaaattagttgttattgcagtctatatgaacccaatgtttcgtctgaaactaacgttgggttcaggcagatagtattgtcattttttttggggattccgaccagccatcgtaggaggagatgtcttccggagccccccttaatgtgacaaatcctaactatgatattgaagaatcgcgttttggaaagattgtgtgttatgaccaaagtcttctctttgagaagagagaacaaaagggatgggagagcggaagtacgctagcctcttcccttccgttcttcataacgcaactctttgtcgcgaaccttagctatcgtgtcctctactatctaacccgacccttgtatcttcctcctttcgtagctcagatcctcgtacgtatgcaatttttgctacatcaattttttagctctctagttccgtatgtgtcttgatttgttgtgattgtatttttgcagtgtggattattatttagcccaagtgtgctcgggaacacacgtttcataatcgcacatgtattcccctacagattcacaatggttcttgagacattcgctaacttagctctcgtctacaacatcttcctccttggtctagggatggacctgaggatggtgcggatcaccgagctcaaaccggtcatcattgcttttacagggcttcttgttgctttaccggttggtgcctttctttactatctcccgggaaatggccatccagacaagatcatctctggttgcgtcttctggtctgtcgcgctagcctgtaccaacttccctgaccttgcaaggatccttgcggatcttaagctgttgcggtccgatatgggtcgtacggctatgtgtgcagccattgtcactgatttgtgcacatgggtcctccttgtttttgggtttgcttcttttagcaaatcaggtaaagattcctacaattagttcaaactttttgggaccccatgccaaaactcaaactcatacccaaaaacctacaacaattaaaaaaaattatccactggccgaaaatggaatgaatcctattttttcctcgaaaaagaaatatagcaaaaatatg

SEQ ID NO: 4729 - DNA, 518 bp, Arabidopsis thaliana landsberg
tttgctgtattgcagtaaaaaattaataccatcatttggttttttcaatacaagttaaactagtcacgctcttttgtctttaaccctacagcgggggtggtgattcttttctaaccagttaactgatattttcgtagatcacggcttgcttcagcgagtgttcctattacaaaaccagaagagttgcaagaaagtgaacaggaaatgattcctttactatgttcaatctttctcaccaatcaaggatcagcagagaccaaagaagagacaactaccttcaccttagtgagtagcagcatcacttgttgtttactcgaacttctagatccacagaaaaggctttattgttaaacgtgctggttattttttgtattcaggatgatgaagaagctgttttagaaggcgaaaaggaagcggaaaagatgattgtagaagcatactctgctctactactcgcctttttttaactgaaaggtacttttcgtttcaatcttatcatatatgtcatatccatttta

SEQ ID NO: 4730 - DNA, 2177 bp, Arabidopsis thaliana landsberg
acattgtacacatagttttaagtcctaatataatttatgcatgttttcttaaaattatctatagaatttcatctcaaaaataatctgcaatgtgtagattttactatatatagttttcgtaatatttgaactagtttatttttaacgtaaaattctaattatttgttgttgtggttgtttgaagcggtgaatggggactatttcatggcaaaggacatagggttcgagaacacggcaggagctgcacgccatcaagcagtcgcacttcgagtttcagccgattttgctgtgttcttcaactgtcatatgaatggttaccaagacacgctttacgtccatactcatcgtcaattctaccgtaactgccgtgtctcaggcacgatcgatttcgtcttcggtgacgccaaggccgtttttcagaactgcgaattcgttatccgccgtcccatggaacaccaacagtgcatcgtcacagcacaaggacgaaaagaccggcgtgagacaactgggattgttatccacaatagccgtataaccggtgatgcatcatatcttcccgtgaaagccaagtaatgataattactataaactttggataagtactagctagatatcactttagttaatgctcattatatatatggacttctatatatacaggaacagagcatttttgggacggccatggaaagagttttcgaggacaattataatgaacacagagattgatgatgtgatagacccggaaggttggttgaagtggaacgagacgtttgcgctcaacacgttgttctacactgagtaccgcaacagaggtcgtggttcgggtcagggtcgtcgggttaggtggagaggtatcaagcggatctctgatagagccgcaagggagtttgctcccgggaatttcttacgtggcaacacatggatcccacaaacgcgtattccatacaatgctaactgatcatacttgtctctctatcgtccaactctttttaaaggaaaaggtgtttgtatataaatccggagggaagaaaaaaaatagaggatttgtatatagtgtttattttttgagggaaaatctatagtataggtgtgtttctttcaaagaaaccgtttcagtaaattttaattaattgatcaaattttatatatatattgaacaaactttgacaacagataaagaacaatctttaacaaaagaaaaggtacagacactcaagagattattaaaaaaaataaagtaaatcttatgaaaacaaacattataaatatttaacttttacaaatataattttatgtttacatgttctgtgtgcataacatttgaggcgaagcaacatgtgtcaataatgaatttgcttcaaatccacttcaggtaaatcactagcaatctgaatctcaggatatatcatcatgtaattcttggaacttcttttgcaaacattgtaaagaacatattaattttccataaaaccttaagatggaagagaattgacagcgagactcacaacagcaacaaactggtcgatttatatgattattaagaatcatataagtttggaatgactcatccttagcttcctgatacatccctacgaagtctccaagcgtacatttgatatgaaaagtaatgtcacaatcatcacatgaataaaaccatttctttgcgtttagtgcttcctcgcatatctcgcaccagtactgctcacttgttttttctccgtaacatagggacaacaaatggtctttatcatttttgtgtttaaccatctttggcaaattagaacatttaatgtctaaaataaagtcacactcctcgcaactcaaaaccatagtagccttatctccgcaagcaatacaaaacttttcttctgttgagcggctgatgtataacgaatgaagaggatgactttcatggacaaaaggttccgaaatagaaccgcatcgcacatccaagataatcttatgatcatcacttacgtaagtaaaaccttgagaaacgttttgacaagcattgcaaatgcttatgcgaatatcatttgtgattaaagtagtcaacatgttgtagaagggatctattttcttttttgggaggtcagcacattttttatgaaggatgaaatcatcacattccatgcaactgtagaatgagttagaatatataggataattgcatg

SEQ ID NO: 4731 - DNA, 1446 bp, Arabidopsis thaliana landsberg
  unsure (1)..(1446): unsure at all n locations
aagtgtgttgacataccacgcgtcataaagatcagtcgtcatgatcatcgtattcattataatcattgtcttgaagtcggaaattggaactgtggagtgtgtcataaagagataaaatggacacatggggctcattcttgtttgaaatgtcctaattttgcttatcatgtaagatgtgccacaaggtccgggatttgggataggattgaactcgaaggcataccagaaaaaattgtagaggttagatcatatgaagtgatcaaagaaggagtgataaaacatttcagtcacaagggtcatactttaaagctcaaagaagaaagtgataatgatgattgcatctggtgtaaagtatgcacatatcctatattgtttagcccattctatagttgcatggaatgtgatgatttcatccttcataaaaattgtgcttatctgccaaaaaaaaaagtagattccttctacaagatgccaattactttaaccacaagactcgcaggaggctttttgaacatttgcaatgcttgtcaaaacgttcataatggttttacgtacaaaagtgattatagtaatgtatacttggatgtgcgatgtggttctatttctgagccttttgtccatgaaagtcaccctcttcattcattatacatcaactattcaaagggaaacatgttttgtaatgcttgtggagataagtcaactatggtcttgagttgtgaggagtgtgaatttgttttagacatcaaatgttctgttttgccaaagatatgtatacacaaaaatgatatctatcattttctctctctatgctacggagaagacacgaatgagcggtactggtgcgaggtatgcgaggaagaactaaatccgaaaaaatggttttatacatgttatcaatgtgctttcacttttcatatcaaatgtgctctcggagacttcacatggatggaaacgaataatgatgatgaatattccaaattggtgtttcgtaataatcgtatgtctcgaccgatatgtactgtttgttattctcgttgtcaattcccatccgtcttgctctatgatttaacctgttgttgttctctaagatgtttccaaaaagcggtccacatcgaacccgaatgagatcctcgcatccggcttgctattgatttatctcaagtagatttacaacaaattcattgttgacaggttgtttcgcctcaaaaataacatctaaacacacaatttattatttgtaaatagaaaatatgtattaaatgtttggtttcataatatttaactcataaattggtatacctgctatctcctctttcgttgtaaatactaaactttcttcgntatcaaatatttcattgatatagtgtattaaagaatgttgagtactccattactgaaaagatattatgggtatttctactgcaatgtatagaaattttcatcatt

SEQ ID NO: 4732 - DNA, 1243 bp, Arabidopsis thaliana landsberg
ataaggtacatccataagggaaccggtcatcaagccgtccacatagataacaattaaacataaccatcttcggaataagggataaacaatgctcgtgggtttctggactttgaattattattttaacttctttttttgcacatatcaaatcgatagcaaaatcacatgtagaacaataataatatatttttggcaagttacctctacaaagcttgcattcttcatcaacattttcattttctgcaactactttgataaacaaagaatgttgtggatgatagaggttatgaatctctatattggagtgggcgcattggctatgaaagaagaatccagaacgaaagcaacgatacccatcgctataatagtctttacctagattgcagccgtcacattttagcccacgcgtttttactagtgagtaaatttcctttagtatttccatagatgaaataaatctatgcttttacttctagttttgtatataattttcttatgttttggtttatgtaacgatgatagctttcagttcatatatatagagcgactatattgagtttcccctttcgacaaaaaatatctatattgagttatactttgtttagatgaaaaaagacctccatagaattatgcttgtcttaatattgaggataatatagacttaaacgaatacatcttatttattctttgtttaactaagaggaagtggaagccccctgccccattaaaaaatttattctttggttcagatacgttaaaaaaaatttaaagatctttaaaaagtatattaaattcaaaataaataaaaataaaaagtgcaaaaagaactccaaatgacaaaaaaagagagtgtaagatcaaccatgaaataagaagaagaaaaaacaaacttcaacctaatttttcttagactagctagccaaaacgaaaacggcatggtgttctcctgacgattaacaaaatgtagccgccattaattatgtgtctacacggccaaattgcgattaaggtttcgtgtttattacaattgaatgaacttagtgtgtttaaattctctttgtagttcccaaaacacattttaattcccaaaacacattttagttcccaaaaagacatcgaatacaaactttgaccagaaagtatattcaaacaaataaaacgatgttcgagatatggaaataacctagtcagtagtaaagtcttacccccaacctttcactatcaatttcttttgcaccgtttt

SEQ ID NO: 4733 - DNA, 1633 bp, Arabidopsis thaliana landsberg
  unsure (1)..(1633): unsure at all n locations
gtctgttgacttaataattattgcttagttttgttctttgaaacattctctgacttataaaaggcttatgtgatctgttcgtctattttcaccggaccaaagtaccaactaatgcttacttggtaaatgactcggatgattgtgtttggccaaataagataagttggtttatcttctcttattttttaactttctcccttaaagtaattggctttaacttgattatattatccctctaattttctttataccaaataaatattctcaatgttagaactccaatattgaaattggaatgtcctcttagttaaacaaataataacttgggagttcttcatcttaaaattggaatgtcgtcttagttaaacaaagaataacgtggggaaagaaaaagaagaaaaacaaagaataacttagatgtatgtatacatattcttaatttaatgtactttgctactttcatttaccagacaaagaaatggtaacagaatataatagatgatagttcagttacaagaatttattcctttggggcttatcatcaatattaggacaagcataattctatgagtaaccttttcattgtaaacaaagaataacttaaaatataatcattatgtgctatctatatataaccaaaagctctcatcatcattatgtgaaaccaagacatcataaaattattgaaaatactaaaagtaagagcatagttatgtcaacttatgataaactcataggatactatttactgtatcaaacgcgcggattaaaatgtgacggttgcaatcttggtcgtgactactatagtattggtcatcgctgttttcgttctggactcttcttccacaacgagtgcgccgaatccagtgtagagattcacaacctctatcatccacaacattctctccacatcaaagtacttaaacaaaatgaagatgtccatggagaatgcaaactatgtagaggtaacttggcaaagatatattaccaatgttcaacatgtgatttttccatcgatttaatatgtgcaagaaaaaaagttgtggcaacaattgaggttccaaagacccatgaccaccctttatcccttattccaaagatgattacgtttacttgtcatttatgtggattgcttgatgatcggtttccttatgcatgcaatttatgtgatattacttttcacaaagattgcgccgaatccacaccagagatcaactactcttgtcatcctcaacaccttctcaagcgtctcacgcatgttccaagttatactgatggaaaatgttgtttgtgtggaagcaaacttcataacttattttatcactgttctatttgcaattttagcgtggatgtcaattgtgaaaaaaatccaccatctttcactctttttcaccctaaagctcatgagcataagctcactcttatgccgcaacgaagttttgtatgcagcgcttgtggaatggatgacgatccaaatccttacgtatgtcctcagtgtaatttcatgattcacagaagttgtattgatataccacgcgttattaagatctatcgtcatgatcaccatatttgttacaataactntcttgacgctggagattggaaatgtggaatatgtcataaaaagataaac

SEQ ID NO: 4734 - DNA, 754 bp, Arabidopsis thaliana landsberg
agaatttattcgttgatgattcttattgacatgaataacaagacatgcataattccatgagtatccttctcatgtaaacaaagaatagcttactaatgattcaatatcttattctatataaaaagtatatgtatatataaaccaaaagctctcataattgcgttacgtgaaaccaaaacgtaaaacaattatagaaaatagtcaaaatacaagtaagaacatagatcatatccatctatggaaattgatgatgtttatacactctttcaaacacgtggtctaaaatgtgctggctgcaatcttggtaaagactactatagtgatggttactgttgctttcgttctggactcttctttcacaaagagtgcgccgaatccaatccaaaaatttccagcttttaccatccacaacattctttgtacatcaagatacttgcagaaaatgaagaagcctatggaaattgcaagctttgtagaggtaacttgccaaaaatatattactattgtttaatatgtgatttttccatcgatttgatatgtgcaaaaaaagaagttatggaaataattgagggtccaaaagcacatgagcatcctttattccttcttccaaagatgactatgtttacttgtcatttatgtgggctgcaagatgaccggttcccttatgcatgtaacttatgcaatttgagttttcacaaagattgtgccgaatccacaccagagatgaagtattcttgtcatcctaaacacattc

SEQ ID NO: 4735 - DNA, 868 bp, Arabidopsis thaliana landsberg
aaactaggacattgcgaacaaaaataagctccacatgtccactttatctctttatgacacatcacacaattccagtctccggcttcaagataatgattgtaataaatacggtgatcatgacgactgatctttatgacgcgtggtatatcaatacaatttcgatggaccatgaaattgcatggaatacatatataaggattagggtcgtcatccagtccacaagcattacaaacaaaatatcgttgcggcataaaagtgagtgcatgcttatggaccttagattgaacaagagtgaaagggggtggattctttgcacaattaacatccacgctgaaatcgcaaatagaacaatgataaaatacattataaggtgtgtttccacacaaacaacattttccatctgtgtaacttggaacacgagtgaaacgcttgagaatgtgacaaggatgacaagagtagttgatctctggtgtggattcagcgcaatctatgtgaaaactcatattgcataaggtacatgcataaggaaaccgatcatcaagcagtccacatagagaacaagtaaacataaccatctttggaataagtgataaacgatgctcgtgggtctctagactttcaattgtaagaatgacttcttttcttgcgcataccaaatcgatagcaaagtcacatgtagaacaatagtaatacatctttggcaagttacctctacaaagcttgcatttttcatgcacatctgcatttgcagcaactactttgatatgcaaagaatgttgtggatgatagagattatggatctctatgtcggagcgggagcattgcttatgaaagaagagtccacaacggaaacaacgatacccttcgc

SEQ ID NO: 4736 - DNA, 666 bp, Arabidopsis thaliana landsberg
ggatctaggcacatgcaattgtggccttatgtgggagatatactacataatttcatgtacctcaactaatgaagattataggcaagagccattgttttgatagtacccatcgatcgaaataaaaagtaccctacatacggaatttattttacttgaaagagcaatgagtgatacgaaattacaaaacaaaggtctttctttggtatgcccaaaaagggtagaggttgccaaatggtcatagatcatagttaagtataaccatttgaatatgttattcggggctttgcggcctagtggtaaggagacgggcttgggaagctaacacgttccaagttcgatctacctgatgcgcgaaactccaaacacatttttttggataggaaccatctatgggatccatctccctcaaaagttagactggacccctccataggactcgaatctactttgaattaaaaaaaaatgattatgttagatgaaataataaacaatagaatattgcatttatgatatcttattaaaaagactaaatctataggtaaagagatattttttaagaagttttttttaaaaaatattttatatattaaatatgggaaaagttttttaattaattaaagaagttttgaaaattttagtttttcaattcttaagaaaaaataattt

SEQ ID NO: 4737 - DNA, 2036 bp, Arabidopsis thaliana landsberg
aacttgtattttctaaaaggaactggatacgtttaaaatacatgggttctactgatgagcccggaagttttatgcatggagttaccggtagagaacagagctatgctttctcggtagatggtagtgagccgaccaacacaaagaaaaagtacaatctgccggtggacgcggaggataaggcaacggttttcaagctcttctccttcgccaaacctcacatgagaacgttccacctctcgtggatctctttctccacatgttttgtttcgacgttcgcagctgcaccacttatcccgatcatcagggagaatcttaacctcaccaaacatgacattggaaacgctggagttgcctccgtctcggggagtatcttctctaggctcgtgatgggagccgtgtgtgatcttttgggtcctcgttacggttgtgccttccttgtgatgttgtctgccccaacggtgttctccatgagcttcgtgagtgacgcagcaagcttcataacggtgaggttcatgattggtttttgcctggcgacgtttgtgtcttgtcaatactggatgagcactatgttcaacagtcagatcatcggtctggtgaacgggacagcagccggatggggaaacatgggtggcggcataacgcagttgctcatgcccattgtgtatgaaatcattaggcgctgcggatcaacagcgttcacggcctggaggatcgccttctttgtccccggttggttgcacatcatcatgggaatcttggtgctcacgctaggtcaagatctgccaggtggaaacagagctgccatggagaaagcgggagaagttgccaaagacaaattcggaaaggtatatctctatctacatgaatatgtcaaaacaagttaggctaactatgtcatagatggatcggatataataggctaactcgtgatatcgtataaatcgtgtagattctatggtacgccgttacaaattacaggacttggattttcgttcttctgtatggatattccatgggagttgagttaagcacagacaatgttatcgccgagtacttctttgataggtttgttttctgtctcgattagaaattgacaacttcacatatattcaggaataacataagagtaaaatttatattcccttttatttttattttgtcaatcgttcccttttatttaaactaaaaaaatggtatgttcaggtttcacttgaagcttcacacagcggggattatagcagcatgtttcggaatggccaatttctttgctcgtccagcaggaggctgggcatctgacattgcagccaagcgcttcggaatgcgagggaggttgtggactttgtggatcattcagacgtccggtggtctcttttgtgtgtggctcggacgtgccaacaccctcgtcactgccgttgtatctatggtcctcttctctttaggagcacaagccgcttgcggagccacctttgctatcgtgccctttgtctcccggcgagctctaggcattatctcgggtttaaccggggctggagggaactttgggtcaggactcacacagctcgtctttttctcgacttcgcgcttcacaactgaagaagggctaacgtggatgggagtgatgatagttgcttgcacgttgcctgttaccttaatccactttcctcagtggggaagcatgttcttccctccttccaacgattcggtcgacgctacggagcactattatgttggcgaatatagtaaggaggagcagcagattggcatgcatttaaaaagcaaactgtttgctgatggagccaagaccgagggaggcagcagcgtccacaaagggaacgcaaccaacaatgcttgatcatgtgtcattgatatcaagaaattaataatttcacttatgtgaaatggacataaactgttggaaaataaagaaccatttctttcatcatttgcttttattgcgttttgctttttgtttttgtttttcttgattattcttttctatgtttgtaacgagcgatttttcacttaaatgttctttt

SEQ ID NO: 4738 - DNA, 2586 bp, Arabidopsis thaliana landsberg
acacacacttcctgatccctcccccaaacttaaatcacacagtccactgtgtgactaaacttggaagagagtcctgaagacaaatcaaatcacagaaacaaaataaaaaaacaaatcacaagagatggtataatacaatggtgaagtgaggcgcttacctaagtcgaataatgaacgaagttggtcgtcaatgctgcctgtgattgctccgaggccattgacgagtcgccctgttctatatcagctccagcgtgtgggtactcgacctcatcagctatgtggcggccaacaccgctcgtaggatacctgacctctctccttctgctgcggccagcactgtggtcgcgtaaacttcgagattatagaagtcttcttatcctggtgctagatcgagtgagcgtggtcctcctctttctcccagattcatgaggctcgaatgatgaatgcctcgcaggcacatgcggaacctcttgctcactaggctatggctcgtcatatctcctcgagggcatgtcctgagggagctgtccctgcggaattgttgtagtggcagaggagcagctgatcttgtctcttcagaaacttgatagccctgaggcacttagcgagtaacttatcatgtttcttgcaccatttctgcagcttgctgttgttcctgtgagcttcgctcaaactcttgctttccctcgcaagaggtatatgctcactgaaatgatacatgctcgtgtcaaactccgcctcatctatatcatccgtctcatcaacatcttctgttgtagctccttcggtgtgactgatctcctcagttggcggactaccctcgaaataaagttcttcaagtgcaggcttgaagtcaatgttcctgccctcgagaatcctagcagcgttaatgcaggggagaagaatgttggcgattttaatcgatgaatgctcgaacctgtagcagtgaaagtcgccagccatgtcaaactccaagaactcacatcggcgcaaatgatccaagtccatcatcctcggtgctaaccctggttccttgagcggtactccacaagcttccagaattggcgtcacaacgccacccacgcatagtgctcctctcaccttcttcttcctgttcgtcaacgcccacttcctgtatccacacagatggatcaacagaggcattactggtggtgcgttgttgagatcgcctctcaagacattcttccccttcgtccggcggagaatccctgtaaacgcataatctatcatctccatgtccgtgttagacacggtgcctgtagactccctggagtaaaagacgttggcgaccgatctctgaaagtagcggatcacaggactccagatttggttgctcttggaccgcgtcgagtttagcggtagattgttccctatagtggcccacaaatccttaagctcctctctgtcaaatctgggtttggtttcctttccactagggaaaccaaacagttcttctaacttcttgatcgaaagctgataccgctgttcattcactgagaacgtcaagaagcctaatcccatggtatccagctcaaagtctgtgagtgcttcatacatctccacttgcagcgtggaaagaaactcgattgtctcctccttataggcagggtaagggtaagacatgagtgtctccagatgacacttctcgaacaaatgctgcacgtcctccagtaaccccagctgggctaaagtctcataacacggatacctcgttccccagaagtcattcatctcgaagaatctgatatactcctccactgtaacctcgtcgggtttgttcagcagcttcgtctccctgcgccatgactctggctcatactcaatctcgatatcctcatcaatcagctcatatctacttgacatcgccctctttcctctggcaatttcagctcttctctgattacgacgggctgtagagcgttcaaattcatccctgaagctctggtaaacatgttgctctctcggtctagcggaccaggactcagcttcatccacattgtaattagggtccatagaggattctccgctggtgttactcattacggaacctgaaaacaaaattaaactcaaagatagacgttaatacgttagtcctaacaaaaccaaaaacacaaaccaacagagtaaaccggtcgagtgaaccgagaattttttttttttttttttttacggtttggtggattagtagtcgagtgatttcttggtggcctggaggtggagcgatcgagtaatttctagagtgagtgaatggtgaacggtgagaagactgtggtgcttaaggtgctgcgatcgagtgaagtagaagaggtgatgattctttggctgcgaaagagagagacgagcggccgagtggttgctatagtgtagaggtcgagtggttttgagcttgatggtgataagtgttcagcgggggagagatccagtgaaggaaatggctaggtcgagtggtagctcaaaacggtgaaaacgttaagtggtcaagtatgttgagctcgcggatgagaataaacggtggtgatgttgagtgatggctgggctgagagaaaagggaaagatggcaccttg

SEQ ID NO: 4739 - DNA, 892 bp, Arabidopsis thaliana landsberg
agacaaaaagaggaacattagatcaagaaatatttttttttggagaaactagaaacagactagagagaagaaagaaccgtttcagttccaagtaatggtttctttccatgaccatcaccgaggattgcttgagagcctttgttgtactcaaacgtgacaaaagctacaccatcgtttccttgaccaacaagtatctttctaacaccatcaaaaacaccatcatcccaagaagctcctccattaccacctcttgcttgtagcttcttggtagtagatggagtagtcgaagttgtcgatggagcgaaataggcaccaagagcataaagaacatcactagctttcccatggaatccggcaagttttcctccgttaccatctttaagttcgaatttcttctcagtcaccattccaaaaggcggagaggttgtacccttactagtcttgaacacaagagcagtgacgatttcgctgttataaccaaagactttgcccacagaaactccaattgatgtgatgtaatcatctgaatcaacctcaaactacggtgtatctaacaatgacatttacccatgggctcttgtttctcttttcccatctttctcatattcgaatttgacataagctacaccggactcaccttgaacaacataaacctttgttacatgaacaaaaacaccatcgtcgaatggtggtccaccagatcctccctgagcttccactttgttgggagaaaaactcaaagaagaagaaaagggtgcaaaatacgcccccaacagaaattgagaatgagaatcagcaaaaccccaatgaaaggcccaatggaactttgcagggcaataaaaccttggaaaacggaaaaaaagagtggaaccccaatcttcccaaaaaaaaa

SEQ ID NO: 4740 - DNA, 2322 bp, Arabidopsis thaliana landsberg
cacaccctgttatatcgagggcctaaagcctcacgtcaagcaaaatcgatacacaagatctttcacacaaatccccgagtagtacaggaagtgcctcaagaagtgacgcaaagaacatcaatgtggcgtaaaccatatcccgtggcagacgtgtctacctagctgagagagactcaaggatcagtaatctaagaggaggcgagctgaaacgtggcactcgtcgagacccactactatccaatcccatccaaacctaccaaacaaaactcaggttatctctagacaatggttataagtattttggacatgaatcttttgagttttcaggacgtgagagggattatctacaatgggaactcaacatggataagtactttaagtactattccattcctaaagaagaggagctctactattgtcttgccccactcaaggtaagagcaaaccattggtggaatcgagaagaaaaagataaaaaggagtgaatcgattaccccactgattgagcgagtcaatcacccttctatccatcatttccccttgttttgatcccacacgagagaagcgctcgccatcgtgtcagatcaccaccttcattatcccaccttttttttggcaagcttgaaactcttgatcatcaactgatctaaagttggatttgctccaattcttgcatcatcttggtatccgaaattcaaaaggtcctatccccaaggttgtatctcttcaacctatatcttttacgatttctattttgttatcaatttgataaccaactaaaaatttgtttcttgctttgttattgtttatttgcttcaagatctttatttaaaaaaaaaaacatttttcttcagtttattatttatttttgatttattaaaaaaatcacaaaaatcatattttgttgaatttttgaacttttatttttataaaactagtaaacaaaaataaaaattcgtttcacatttgatattttagatgaaatttgtttttatttttgcattgattttagaaaataaaaagtttccatatattgtcctcgttaccatattttgttgatttacgttggatacatctttgtcttgtttgtggaaggaattccacgaaaaaagagagcaacaatgacatcatacgatatggagaaggaagaaaccaaccaagagatgtgtttcaatgagaggtatgaaaaactatggcatgaagagtactctgaatcagattttgaggatgaacttggccgtgaaatacaagaacccgaaccgcctgactcatacataaccaataaaggctattgtaaaccatggattaaatttaatgatgattttgcagccatgattcgtaatctccattgactcgagatatttctttttcaggaaaagaaaattatgttaagcagagagaagtcatggactataaaggggcaacaacgaaggaataccattgccaaagtcctcgaaggcgtgaagataagattgaccgtcacactttgttttactgactgcctacagcatcacgtcaagtaaaaccgagacacaagttctttcacacaaatccacgagtagtacataaaataactcaagaagtgactcagagaacatcaatgtgacgtaaactgtaacaccccggtttcaggaatatggtggtgcatgcggagaagttgaaagaattgatttggccacctatgtgaccaaattgcacttatcttttctgtcaaacatcttgagagaactccacagttaagcgtacttgggctagagtagtttcaggatgggtgacccttccgagaattgattatctgaacaatgtgaatgaggacaaagcatggggaaagatcatgtggtgatttgaagggtcggtaacaagtatttaaagcctctcgcacgtggctcacccaccgtcggacagaggtgggcccatgggcccgagagaggacgtgaggcccattggtaggggcggttggggcgttacataaaccatatgattacatagctgagagagactcaagaatcagtaatctaagagaagacgagctgaaatatggtactcgacgagacccactactatccaaccccacccgaacctaccaaacaaaactaaggttatttctagaaaatggttataagtattttggacctgaatcttttgattttgcaagacgtgacaaggggaagaattagtctacaatgggaactcaacatagataagtacttatgttttttatgagggagagatatgcaccacacagtcttccccaacgtagtcaacacacttaccatccaaaggaaccaagctgagagaactctacaaatctacgtgttagtt

SEQ ID NO: 4741 - DNA, 1880 bp, Arabidopsis thaliana landsberg
aggacagtgttgtgctgtcttgatggttgcagcaaccgtgaccgcattttgaagggataataggatcataacaaagagactgaagaaatttaccagccaatgagtcaggtcttgatgcttgaaccaaaggtccctcacatggagccatgtatcctggtttacagacactgaaagcacccattcgagccactggacgataaacaccagttttactattttgctcccgaggaggctcctttgcttcatcatccattttatcatcacttaatacaccggtttcttcttcttgaggtagatgttttttgggggatgcgtttgatatccttctgaccattgatggatacatttgatatactatctctgtattagacatcaatagaggaatcttccattgttctgctggtttacgtctaagattagagttccaatgattcttaatggcattatctgttctcccaggtaagagtttagcaatcacagaccatttgttcccaagaaccgcctgtgcagacattatcatatgctcctcctcatctgcatttcaaatcattttcataaaaacattatacaaacatgtgaaaacacataactcacacactaatcatcaaaaaccacatctctaaagaattacaacataaacatcttgaatccaagagaatgctaaaacctattaaaccatctccatatacataagaatctgattctgaagaaaagttcatatccagtaaaatcaccagcaaaacagaccaatctacaaatctctcacaaatttttcaaaaataagctaaaacaccgcttctcattagcactactgagaaaatcatatgaatcaagtaccacaacaaagatcctgaatcaacaatagctaacactagacatagataaagagaaatccagagaaatcgaccaaagcaggaatctggaatcaaggagaatcaaaaagaagatcgagaatcgtgttttaccagagaaaggttttcgtttgaggataggatcgagctgattacaccaacgtaatcggcaagatttaccagagcgacctgggattccacgggagattagattccagttcctcggcccacacattttcacaagcctcgtgagagcctcatcttgctccggcaaccaaggtcctttcactttactctttccgccgccgttcgcgtcgcttttcgctagctcggcgagctctgcctgagctgctttgtgtattgcattctcaaaactcttgcaaggattccgggacgatattagctccggcggacgagagatttctccgttcatcggaaataaacggagaaaatgaaaccaaccggggtcctctatctgtacctctctctgctaagcctaactgcaaagttaagtgggctgtgaaattactattttacccttttcgctgactcacctttttttcaaaacaaaaccgttcgttatgacttatgattcagagttgaccgtttcagcttccaatttaaaaaatttattaacagcgaaagattactgataatttgatatcaatgaagtttggtggaatcaagtcaaaattaatatcaaatttgatattaatgaagtttggtgatattgatgttaaaattttatattaagtcagttcgagcaacatttacacataaactaacatcaaagtcattaacatgagaatggaagactatagtaaaacaaatatcaaccaaaggtttagaatttcgtaagtttttttatttttatttttagaatttcgtaatttagcaaagaaaaaaccagcataatcaataatctatatcgaaaaacagcaataatttttgtttgggccatcaacgatcagaacaagtaaattaagcccattttcactgtcggtaagacttaacccatgctccctcccc

SEQ ID NO: 4742 - DNA, 5292 bp, Arabidopsis thaliana landsberg
  unsure (1)..(5292): unsure at all n locations
ctcatccttcgccgtcgctccgtgccactctccatctttgggggagagagcacaaggacttcatctttggtataatcttatctcatttatttatgaccaaaggggaagaaagaacataagggctctaatgattccgtttttggcgattcatgccaaagggggagagagtatgagcccaaagcaaaaggaccgcaccaccaccaatttcgaaaacttagtttttcaaagagtattttcaattggttccctattatgttcaaaagagggagaaagtagtatttcaaaaatgatatatcaaaaccctcttgaacactaagaggaggatctcatttagggggagttttgtttagtcgaaggaaaagcattttgaaacagggggagaaaatttcaaatcttgaaaatgctttgcaaaatcttattcatttacctttgactatttgcaaaagaactttgaaaaggatttcaagaagaatttgcaagacaaaacatgtggtgcaagcgtggtccaaaatattatataagaaagaaacaatccatgcatatcttgtaagtattaatattggctcaattccaagcaacctttacacttacattatgcaaactagttcaattatgcacttttgaatttgctttggtttgtgttggcatcaatcaccaaaaagggggagattgaaagggaattaggcttatacctagttcctaaataattttggtggttgaattgcccaacacaaatctttggactaactagtttgcccaagtgtatagattatacaggtgtaaaaggttcacacttagccaataaaaagaccaaatgttggattcaataaaggagcaaaggggcaaccgagggcacccctggtctggcgcaccggactgtccggtgtgccaccggacagtgaacagtacctgtccggtgcaccaggggactcagactcaaacccttcaccctcgggatttctcggaagccggcgcgctgtaattcaccggactgtccggtgtgcaccggacatgtccggtgctccaaggaagttcggcctccggaactcgccagcctcgggttcgcgcggcatgtcgtccgctaaaattcaccggactgtccggtgtgcaccggactgtccggtgtgccagcggagcaacggctccctgcggcgccaacggctccctgcgctgcattaaatgcgcgcacacgcnnnagacgtcagggctgcccataccggtgcaccggacatcaaacagtgcatgtccggtgtgcaccggacacccaggcgggcccacaagtcagaagctccaacggctagaatccaacggcaacgctgacgtggcaggggcaccggactgtccggtgtgcaccggactgtccggtcgccatcgaacagaagcctccagccaacggtcaagttgggttgttggggctataaataccccaaccaccccacattcattgccatccaagttttccacttctcaaccacttacaagagctaggcattcaattctagacacattcaaagagatcaaatcctctccaattccacacaaagccctagtgactagtgagagtgatttgccgtgttcatttgagctcttgcgcttggattgcttcttttctttctcacttgttcttgtgatcaatactccattgtaatcaaggcaagaggcaccaattgtgtggtggcccttgcggggaagttttgttcccgactttgatttgagaagagaagctcactcggtccgagggaccgtttgagagagggaagggttgaaagagacccggcctttgtggcctcctcaacggggagtaggtttgagagaaccgaacctcggtaaaacaaatccgtgtgtcacactcttcatttgcttgcgatttgttttgctccctctctcgtggactcgtttatatttctaacgctaacccggcttgtagttgtgattatttttgagaatttcagtttcgccctattcaccccccctctaggcgactttcaattggtatcagagcccggtgcttcattagagcctaaccgctcgaagtgatgtcgggagatcacgccaagaaggagatggagaccggcgaaaagcccactacaagccacgggagcacttcatcggaagagtcccgcacgaagaggaaggagaagaagaagagctcctccaacaaaggaaaggagaagaaatcttcttcgcaccacaaagagaagaaggagagatcttcctcccacaagccacatcggagaggggacaagcacaaaaggatgaggaaagtggtctactacgagaccgacacttcatcaacatcgacctccgactccgatgcgccctccgtaacttctaaacgccaagagcgtaagaagtttagtaagattccctacattacctcgcatttctaaaaatgcacctttactttccgtcccattaggcaaaccaccaactttcgatggtgaagattacgctaggtggagtgatttaatgcgatttcatctaacctcgctccacaaaagtatatgggatgttgttgagtttggtgcacaggtaccgtccgtaggacatcagaactatgatgaggatgaggtggcccaaatcgagcacttcaactctcaagcaacaacaatactcctcgcctctctaagtagagaggagtataacaaagtacaagggttgaagagcgccaaggagatttgggatgtgctcaaaaccgcgcacgagggagacgagctcaccaagatcaccaagcgggaaacgatcgaaggggagctcggtcggtttcgcgttcgcaaaggggaggagccacaacacatgtacaaccggctcaagaccttggtgaatcaagtgcgcaacctcgggagcgtaaaatgggatgaccacgagatggttaaggttattctaagatctcttattttccttaaccctactcaagttcaattaatccgtggtaatcctagatatactaaaatgacccccgaggaagttatcaggaattttgttagttttgagtgcatgatcgaaggctcaaggaagatcaacgagcttgatgatgccaccacatccgaagctcaacccgttgcattcaaggcaacggaggagaagaaggaggaggctacaccaagtcgacaaccaatcgacgcctccaagcttgacaatgaggagatggcgctcgtcatcaagagcttccaccaaatcctcaaacaaaggagggggaaagactacaagtcccgctccaagaaggtttgctacaaatgtggtaagcccggtcattttattgctaaatgtcctatatctagtgacagtgaccgaggtgacgacaagaaggggaggcgaaaggagaagaagaggtattacaagaagaagggcggcgatgcccatgtttgtcgcgagtgggactccgacgaaagctcaagcgactcctccgacgacgaggacgccgccaacatcgccgtcaccaaaggactcctcttccccaacgtcggccacaagtgcctcatggcaaaggacggcaaaaagaaggttaaatctaaatcctccactaaatatgaatcctctagtgatgacaatgctagtgatgaggaggataatttgcgtaccctttttgccaaccttaacatggaacaaaaggaaaaattaaataaattaattagtgctattcatgaaaaagatgaccttttggattcccaagaggacttccttattaaggaaaacaagaaacatgttaaggttaaaaatgcttatgctctagaaattgaaaaatgtcaaaaattatctagtgagctaagcacttgccgtgagatgatcgacaaccttaggaatgaaaatgctagattaattgctaaggttgattctcatgtttgtgatgttcccaatcttagaaataataatgatgatttgcttgctaagattaatgaattgaatatatctcttgctagccttagaatagaaaatgaaaatttaattgctaaggctaaggattttaatgttactatttccaaccttagaagtgagaatgatatattacatgctaaggttgttgaattaaaatcttgcaaaccctctacatctaccgttgagcatgtttctatttgtactagatgtagagatattgatgttgatgctattcatgatcacatggtcttaattaaacaacaaaatgatcatatagcattattagatgctaaaattgccgagcataacttagaaaatgaaaattttaaatttgctcgtagtatgctctataatgggagacgccctggcatcaaggatggcattggcttccaaaggggagacaaggtcaaacttaatgcccctcctaagaacttgtctaactttgttaagggcaaggctcccatgtctcacgataacgagggttacattctgtaccctgccggttatcccgaaagcaaaattaggagaactcattctaggaaacctcattctggccctaaccatgcatttatgtacaaagatgaggcttctagctctaggcataccactcatgttaaaatgcctagaaagaaaattcctgctgcatcaaattaacataatgttttatttaagacttctgatgcttcatatgttttaactaacaaatcaggcaaaatagttgccaaatatgttgggggcaaacacaagagtcccaagacttgtgtttgggtacccaaggtgcttgtttctaacgtcaaaggacccaaggctgtttgggtacctaagaacaaggcctaaacttgttttgtaggtttatgcatcgggaggttcaagttggataatcgatagcgggtgcacaaaccacatgacaggggagaaaaggacgttctcctcatatgagaaaaatgatgatccccaaagagctatcacattcggggatggaactcaaggtttggtcaaaggtttgggtaaaatagtgaaagggaaatatgcccttgggcaatttctataagtattttggtgattaagtgccaacacaaatggtttaagtgttaaattgtgccaaagactaaagaagtgcaaatcaaggtgcaaggtatgtttctagacttagtacattgttttgaagactaacgtattgtgtctaagtgctagaaacaggagaaaacaatttggaaaagagctgacagtgtgcagctaaagacagcttcggtctgggtgcaccggactgtccagtgcgccaggaccagtgtcggtgaacagtccgctctcgggactcgacggcggtgtacggctataaatcaccggactgtccggtgagccattcacggcgaagtcatcgctctcgggaagcgatcaacgacgtgcgactataat

SEQ ID NO: 4743 - DNA, 1132 bp, Arabidopsis thaliana landsberg
gtacatttctcagaacctgaggtattctttatcgcttctattcacactctcttcattacttggtgtcaaattctcaggtactctcttcttcttcttcttcttcttctctgttcaggttaaatgctacatgaggcagctcttaagagggcttgatcattgtcacactaatcatgtactccatcgggatatgaaaagctcgaaccttctgatcaacggtgatggagtcctcaagattgcagattttgggttagctacgttcttcgatcctcataacagtgttcccttgacaacccatgttgcaactctatggtatcgacctcctgagcttttgcttggggcttctcattacggtgttggagttgacttgtggagcacaggctgcgtaataggtgaattatatgccggaaagcctattcttccaggaaaaaatgaggtaagcaattagattcctatcactcttgttcttaccagataagcaaagcttcagatttttgttctctgtattctcatgttaagacagaccaactgcacaagatattcaagttgtgtggatcgccttcagatgattattggacaaaactaaagctacagctttcaactccactgagacccatctatccatatggatcacatatagcagagacatttaaacagtttccagcttcagttatttcgctcttagaaactttgctctcaatagatccagatttccgaggcactgcagctagtgctctcaagagtaaagtaagtttggactttacgtattcctctgacaaaaatattgttcttgtgacttcaactgattatactcttcactgtgaaacagtacttcaaaactgagccattggcttgtgatccatcttgtctaccaaaatacccttcaagtaaggaaatcaacatcaagatgcgcgataacactagaaaacaagcttcacaaataagaagaacagacgaagctcaagctgttcagccaattctagcagattcgtctcccacaaagccgatgcaggtatctctctactcttacggtttcttggtttcttgagtgttttggcagaaatatccgaaataaaagtttatgcatatgcagagaaagtcctcaaattccaagagcagagacagttcacttaca

SEQ ID NO: 4744 - DNA, 2191 bp, Arabidopsis thaliana landsberg
tgagtggttagcgttaaagctctctcaagcttcacagaaagtttcattgtttttctgtgtgaagccttatgatctcgttcctcaatatagctgtgcgagcattagagaagaacttggcaataaaagctttcttacaatcgacccatgaggtgatggagtctggggtcagagtcttctcccagtggtgtgccttgtctcccaaagagaagggaaaaagtctgagcttaaacatatcttcagtgacaccattgatcttggttaggccatagagcctatcaaagctgtcaagatggtccaggggatcttccataggtaagccatgaaacttgtttccttggatcatggagatgagaccactcttgatctcaaagttgttgttctgaactggtggggggcactatcccttgtctttggtgatgattcattggggcatcaccagcaccaatgtttcttggttgatcaacattagggtgggtcttgaacatcatttggttattttgttgatccatagcagctggtctttgctgatctgaggctgtttttgttttggtttcttgcactcacgagctattctgtctatcctgtctttgaaaggtagtatgtgtgcagaacctttggaccgggtttgcatgcacaaagattagtacatgtaccacaaaaacaagcagacgaaaagatgagttagtaacttgagtaatgtaaaagaatttgatcttaagtttttcttatatcttaaatgtaacaatgcaacaatgaattggcaacggcgccaaattgataagtagatttttacgcctacttatatgctgaagcgtggttcagttcaattccccttaaacactaacatgtcgatgcagctatagggggtgtcaatccagtccactgttattcctagcagtcaagatgtgaacacaagaaactaagtcacgccagattataatgatggtgggtttctagtaacaatcctaaatcaggattcaaacaacaaaatgagaacttaagagccctactcgatcattgggtcgagtagaaccaacatgtgacaaatttaagtaactaaaatgtatcaaaaggggatacaaataacaggtaaataaaagtgcaatcaacatgggatacaaataaatctaatagaagtcctaaggatgaattcattgataagggcaactctagggttcatcatgtggctaacaggtgaaaggtagatacccttgacgatagattcaaaaactgagtcaatcaactatcgtgacagagacccccataactctaccacttcctaatctcaactgtcgttgatgaaacatagcagagcagggtttacgcaacaatctaccaaagccaataagcagacaaaccaatgtcttggtctagtctataaatctctggaatttgatgatcagacatccatttgaacgtcttttggacgctggacgtctatgatcgaatctccacatcagccagcgaaaactgcataggggcgaagcaaatccacaagggttctaaactaatcttaaccacctaactaacctagagattaccctaatctaatccatcctcaagaatcctaatcactactcaagcaacattctcaagaacacaaacccagaaattactgaaatcataccaaaatgtagatctaaacaagctaaacaactttacttaaacaactaaatgcaaaaacgaaatagattaagagtaattaagttttgaagattcaagaacacaaagaaaacctaaagataaaagctagatcctttggacaaaccccaaagtgatctatttatagtaaaatgttgaaaccctagattcactagtagacaagagacttgaggcggtttgggcgaatactcgatcttggggatcgagtaaagagggtgctgcaaagtctgcgcctttgtgtctatgctccgagtgatcaattggtcgagtagatgcttcttcctctcctatctgtatgctcaaatgtctagtttagtggggaatgaggaggatccgaagacgctttgatagctcaacaagtcttgtagtttggtcacccttggtcgagtaaacgggtcgagtagaggatcgagtaggaggggcgagtatatcaatctgctgcttcatctaaggctgccttgatcgagtaagagggtcaagtaaactgcatcctcctctttagctgcctcgatcgagtagagaggtcgag

SEQ ID NO: 4745 - DNA, 2526 bp, Arabidopsis thaliana landsberg
  unsure (1)..(2526): unsure at all n locations
cctttctactggtggaaccaactgtttcaacaacttaaatttctgactctatttttctactttcagggatggtgtcaaaggatctaaccactgtggctctgcacaaatgaaaacatgtcaaagactttctatagaacatttctggtttgatattaacattagccacattagatagattcgaaaagacttttgttggttaccttccgcaactctcatcttcacaagagtttcctgaagaagatacccaatccatatcaaaagctgcacatgtacattgctcaccattcccatcacagcagaagcaatcgttttcaagaatatcatctaaacctaattcctctaatatcggtggtggagcactgcaaaacaatagccattcctcaggtttagctgacagcaacccctatatatttagaagctntctttgacatagatcataagctttnttacctcaaactagcagcaatcttggcagtttcagacgttgagatctccggtgctgaatctgaaatacctttaacttcttcatctttttcagctaaaccatgtctacctactggtcccaatgcggctggactgctctcgctaatgatgctactttctgatagagatcgtttcatcgtcgatctaaaggcaataaaatggaatgtaagcatctctaatgaaacatagaatgtatcaaacttctctacaagtgtctcattaaacaggaaagaaaatataccttgaagtctctggtacagaattggcaagaaatcttgctgcgttgtaatgctgatcagaacccaattcccatagcgctggcttatctgattgtggctgaaagtatcccaagaacctgtagaaagatacaaatcaaagtcatataatttttcataccatagaaaaagaaaacagagaaaatttaacccagcatacacgttaattgcatcttgcttttcggcatccatataggcgttactgtagtaacgttgtaaagttctgaagaattcctgtgattgagtcgctgctctccattgaccacgcctttcacaaaatatctggccacataagtaagatcattggttaacaattatgtcctaagatttttatctagcgagacaaaaacttatggccagagaagtaaaagagaccttgttgtgtgccgcggatcctccatactgaagtgcaagtgtatctcccatcgtctcataaattcccatcaaatcttcagcgaggggattgtctagatcaatattagtagactctgtcaatcccaaagcatggagttgacgcccaaatgctaccaacccataggcatattgagcaacattggtgcgatctaaacagtctatgcaattggtcctcaggactcctttctgcagcatggtaacttccttttgctgatcttccttagcatccttactatcattaccgttttccaccaccaaatttggtgcagtttcatctttactgggtggatcataagtagaacattcaccatcgtcgttcctgcaataattaccggaagaatcaaattgatcagagcctagcttctaacaatacaagagagatgaataatgtgctaagcaagaaacctattggtaaatagaatactcactccaaggtggatggattctggttctgaaatccttctcctctaagatctggagttaattgacagtagaagatgctggtcaagttcagagcataagtagccaacctgccgagaattgccaacacgtttgtgccttttctggaaaagtaaaaacgctagtgtgttaataaaaagatgcaatgaaaagaaaagaaacaaagaaacatatgaggttatctccatcacgtactttctggagtgtttatgcaagtcccagtgaagaggccttagacgatcctctttgcttaaccctttattaataaatctaattgcatttgcaaactctgcacgcagaatagtctcccgaggcctcttttcacgcgtctgttttttcaatcaagtgaattaggatttagcaggacgatatatcaaaatttgtatcctctagattaccgaggagttagaataccaacctttatcaagttcagtatgatgattggattcccatatctccttccaagattttcaaaatgcagtctggttgcctcaaagttggggtctttcggtgacactttacacagacaagagatatcagcacaaaaaagcaaagaagaagaaaaatgacattggtaagaatatattatgctgaagaaagaagatcatacatattatatcaggtttgatattcaagcgtgaggtctcctgagaccagaacaaaggaattgaaccccgattctgaactacagaacttattcggccgggattaccatcttgagcttcctcgaaaacaatctgctctgtctcaacatcattagctaccctgcctttctcgtttacaccacgtttcagatatctggaggacaagatagaagattatgatccaactaaaacttatcccagcacagcttaactaaatgaatggcctagataaaacaagctcaagtggagag

SEQ ID NO: 4746 - DNA, 1022 bp, Arabidopsis thaliana landsberg
gcaagaacggtgctgagacattggctgcgatccaagcaatgaacgtcaacgactatgatctatggataaccgtttgaagagaagggatcaaccctaagattctggaaggtttatccacgtggagcgaagaccaccagctaggagtcattggagacactgtagctgcgagcgtctttgcctcagaagggtcagtgttggtggtgcagcaacaagtgaggaaccaaaaaggtggtgatggtttcttgaatggcaagtttgattacaagaggttcttatctccttggtctcactctcataactgattaggttaattttttatttttttgaggatctttgtgaatcaaaaaccaattgattaggtttcttttagtttgaatatcgtgttgtataatcttgtattattgagatgacttttttttgttttttttagttgtatccaaaatcgattacgaactaataataaataacttctaatatagaaacagcttaatttagctgatctagtttcattttcactgtgggctttagtaagttgttaaaggcccaatgggctgatttagactatttctaagaaaataacctaaaaatcgtcaccgtcgtcgtcgattcaaaatccgccgctgcgcttcaacgttcgccggcaatctaaacattttccgggatggaggaagagatgacgaaccgtcgagtatcgaatcggactcgtaaggtcgctacgaagatggcggcggctcttacaagcaatgacaatcgaactcaggtgaaattgctgatttcggattcacttttttgatttcggaaaaaaattgaatcgtctttcaaaaatggttgattctaggctgctatagctaggctagaggctttagagaacgataatggtgctattgaagtgatagatttgaacgatgatgaagaagcttctcttgatgaagatgatgatctcggtgaataatcaatctttcacatttgaagatagctctgtgtgtgaatctgtagttttagtttaagctctgtttttctga

SEQ ID NO: 4747 - DNA, 598 bp, Arabidopsis thaliana landsberg
cagcagcaccctccatgcacacactcctcagaaaccgagatgggactggttcttgcagtttccgaccacgaaaccttgtcgggttagaaacttttctagatttcgcctatcccactaaaagtagtcccttatctatattcgcagtccagctagtggaactagcaggaagagccacgccgttgtttattgggcgggatcaactaaaggaggaggaagaagaacaatacgaggaggaagaggaagagcctgaacgtaagcaaagtggacggatagatcaggtgcaaagcgcctttaagttgtacgaagagaaaagaaatgagtgcgtgacgttgcgttcatacacagctcatgctccaaaacgtctcatgtaccaagacatttgcgagcttgccttaggcaagaaaaccgctttcattctcttaccttatcataaagagcgtgtggaggacgctgcccctaccgagctacgtgattccggcatgctatctgtgaacgcagacgtcttggaacacacaccttgctctgtctgtatatattttgacaagggacggcttaagaacgcggtggttaggttatccatggacctacaacactcaac

SEQ ID NO: 4748 - DNA, 562 bp, Arabidopsis thaliana landsberg
taaacatctacggttatttttatttttaatgtctttttatcgcaaatttttatttgtgtgtattttcatagtaatattttgttaataggggacggttattttttcttttgtgtttttttatcgtaatttcgtaaaatattgactgttatttttttttttttttttgtctctttattataactttccattataatattgacaagttatttctcagttgtgtctcttgcacaatattttttgtgttctttgcagctcttatcggaattttcagccactacgtatagtactcactcgctgattaacaacaacataaatatctgtattaggactccccattactgctagtatcagagcaataacgggctgcgtatctgccaaaacaattatcaatagaagcaaagggacattaagattcttgaaccaccacatcatgtgagacaatgaaatcacccatttctatgtaatatagtctccaccatttttaccatagggataatcaataatcatttgacgatttatccttttctttgatttcacaccatttaaacaaactctaatgcgg

SEQ ID NO: 4749 - DNA, 2963 bp, Arabidopsis thaliana landsberg
acgagagcagagatgcattgctcacctgagactgccgatcgattttcttaacaagatccaacttcaaactccagaagcgctcaatttccgtatctgtgtcctccatttctgagtcactatcttcaacggcttcagggaattgcaattctctgattcgaggaacactttgcagtagcaaaagttggagtgcgtgtgggaaaccttgaacggtgacagatttccgcataagtttatcagctccccttgcagtaacactcttcaacgtcattaggaatgacatagtcccccaaggaaaatttagaaacatgtctaaattttctgccatgtccgcatggaccggagagattttacttctacccgaggttgggcataaaacgccatcaatcaaggccagcacagcgtaacgtaaacgaattccttgatcttgaaccactcgcttcttcagcctgccaacaacccacttaacagatacatcactgcggtcaaataggctgtaccaatacttgccaggcgccaattttcgtttccctttcctctctttcatacgaggcggtttgtcgcagttcaaaccggtaacattttgaaactcagaaatggaaaaccgaacaggggatccagagaaaattaccaaaatttcttgtttcttcctaacaacaagctgcctcgttagcaaaaagtgaataagcttcccagaatacgcggcgctttcggagaaatcaaataatttaccaaactgagattcccggagaattttcatgtcctccgcatctaacgcgttagcgatgtcatctatcaaagacagttcactgtaggactgcactctgtcaccgttgggctcggatccagacctaaacaatcgacggggtaaagagttgttcatcatctacaagtcgaacccttttctgcacaaaatagaagtttataatcagaaacagtatgtacctaagatttcagttaatcggaatatagattggagaaataaagaagttgatggcgatcgagaacgttgaatagcttaaaccgcatatatttgtgaaattacctgtagcccgatggaattgattgcctaactgcgagattgaatctaaagaaacgatatgtatgagaaacaatatagatttgaaatagatattcggagagtttgcagaatctatgggtagagaacggaagacgtttcctctcggaaaaccagcaaatgaagcggcgctaggtttttttttggagctcctgatatttcaaaaaattcgataataaatcgatttctcgaaattaaaatctatatcgtttgcgttcacatacagcattgctcttaccaaggttttcaaaattcaaatttctgcaatcatacgcctatacacctatatgtcccctaaccaagaacacagttataggggggtgatggtaatttcaaatacgtctccgacagacactatggactcatcgtaagtttctatattattattgattacatggtcaatctactgcatatacccttttttttaatccatttgttaatttttggtccaattttttttttattaggtattaccaataaaattttcaaatatttgatttaacttggttattaggtagtacgacacaaaatcatacacttttcttcttcatttgcatgaggattggtttgattccgtagttacttctgcaacatttcaccatccacttgcggtatattagttctttccgcaaaactaggtgtcaaatgcctcaaggtttggtgcccaatgttgtgatatataacaatctaataatgcatgtttatgaggaagaacatatcagctgaataaagtttgtttcttttggagctcattaatgaaatgagaatctccatatgttgcaaacctacaatatcttgatacataggtatatggtcgttagatgatatgtcgatgaagcaaatggtattttatacaatgatgttacattaagaccactattacaaaaaaaaataaaaaaataataaacgaaaacaaacaaacaaaaaatggacacgaaacttgtgaaacaaggtacctggaaactgggtacgttgaaagaatcatggaagctgctcctaagagtgcatctaaattgcttggagtttagtatattcaagatggggaagatcattaccaaacttttgaatgtgagatctcaaacccgacgaagacaaagtcgatcgatgaaggcaaggtatcggcagtatgatgtttcattgatcttctagctggtttctttcaaggtcaaacaatggccttaaccttctttctacctcgctgcattgtagatcgatctcacctgcaaccattgagtaagcagagtggcaagattcatcgtccctgaatgctaatatccatctcccatctactagacctttggacttgagcttctcatagactcctcgctttgttggatccaacaacggtaatgtagatggtcggattctcaagtgtagccatctcgggtgcttttcatctattcggggctgaaaagcaaacaaaagatgatagaaatcatgtactatgttaatatttcaggccttcctgtgtgatcttcacgggaattttcgttaaagaagaagacagtgaaggtgattacgtactttgcagccggctaaaggtgccgttacacggacgattccattatctggatcagcaaggacaatccatccagactcaccggatgataatgctagaaatgagaaatctcgttccttgcctctttcaaaggcaatcctacagggtacagcatcaactgcaccaggaaattgcaaatattagattacctatggataccgagacaaatcaatcaaactggagttctaagaaatacaagagatgacatcatgtaattggttagatggtgtaagtagaagaagtataaaagcatcatgcgctaacctagcttcagttcggtgccaggtttggggactgatacatccagcccagctcttgtggcacaagaag

SEQ ID NO: 4750 - DNA, 851 bp, Arabidopsis thaliana landsberg
ctgtcctggtgtctaagtccctaaaggagagtaaacaaaaatgatatatttacaatggaagagaggaccatactcttataaccttaaagtgtgtacgggatgtaagagtatttgaagtccttgttgatcctttgaggtagaagagtcttctgcgatcatggagttgatgggcaactcttattgggacatatcacgagtcttctgcgatcatgtacctcaagagtgagaattttcttcattagctcatcaataatcttttaacctttcttttgtatctctggatcatgattgcctttttatgtgacaaagagtttaaacttaggtgggagtgggtggttatctaccccattttgatgatatctgcgttggctatctttctttgtaacacctcggtttcatgaatatggtggtccatgcgaagaggtttaaaaagaataaatttaaccatctatgtcagcaaagtgcaaatatattttccgtcaaacgtcctgaaagaactccaggattaagcgtgcttaagccggagcaatttcaggatgggtgattgttggacagaggtgggcccacatgtccaagagtgaacatgggtgctcattggtaggggcggtccggtcgttacaagttgtattacagctgaacccatgaagtatagagttaagaggactcacaccatcgggggtgacaattttggtgtgaaacgaggacattgcgatttgttagtggggatgaattataacacttcggttttagaaatatggtaatacatacggagaagtttaacagaattgatttggtcacctatatcactaaaatgcacttatgttttgtatggtgttacaatattatgtata

SEQ ID NO: 4751 - DNA, 739 bp, Arabidopsis thaliana landsberg
tacatattaaagaaatatagacttttgaaaacaaagctaagaaaaagatttataaatttaaaaccattatattttttaccaatagtaaccatttggtttcttaaaaattattggcttgaataaaatattttgaatactcacatctcttttaggtcggatatttgggatataaatcctataattgatttaggttaaaatgaaaaaaagaaagaaacagactctactcaacaagtgtgtttttaagcaactccaatagagagttctctcaagaaatagtgggggattctattgttaaaattaccaaaaaataattgaaaatatcaatggatatgcccagaaaatgtgaaaatcagatttttactattgataattcaatattaggtaagtatgaaagagaaaaaaattaaagtcataattgtccttcctactttgtttaatttaccaaatatgccatgtatcaactattgttataatttcactatatatcaaatattttactatatttatataaatattattcagatatttaatatgttagcacgttatattcagtataacatgttattataattttatattgattatttcatattaattgatatgatacggtaaatggtttaatataatatatataaatttatcgtgatactatactagttaacatgttaatcaaatatttatctgtatttagcgcgatattatactaattaacatgttaatcaaatagttatctacataa

SEQ ID NO: 4752 - DNA, 5288 bp, Arabidopsis thaliana landsberg
  unsure (1)..(5288): unsure at all n locations
atttcaattactaatgagaacgtaaacatgcgtaggtaatgagtaatccgctttatttattaaacacacgatatatatagatatatatatatgtatttgttccttttttttttaattctataaaccacataccttatagatttcaattacagatgcatttgatatttaaaccctaacttatatcactagatatgccaaaaacggaccatatatatacatatgtttactttgtatgcgactagttattcaatgaagactaacagataaaaaagtcattggtaactgtaaaatagaacgttatttaaaaacaactcatgtaattcctatatgcaaacgcggtatgaaaagaataggcgtgagttggaaattgtgtattgggttatagcctcggcgaagtatcaacttgtagagatcatacattacatgaaatgtttggttatagcagtaatcattagtatgcaacttgctacataatctagttgacacattttatttgcgatttgacaatgtaaagagtccgtaggaaaatagttgatatgtatccattgcattaaatgcggcgatagtgttatatacgggttccaatgttgcattgggggaaggggtggaacaaaggccagaaacaacatgtttcgtataaatataacaaaggaggacaacatggtgcactccctagcgtgtcaccattaacttctccactgagaatagagacaacactggtctacagaaacaacaagtgaaacaacaatgttaagaaaatgatatactggaaaaggcatgtctccataatattagttntgcattctatagaaagtagttcacatctgcagacactacataatactacttaagagaatatagcactactatataaaacatacaacagatagaaaacactgaaatttgaaagaaaaacatgaatttaagaggaaactagatagagattattgtcaatatgagaaaaaggaacacaagcaaccaatttaaaatcgttttgaattacagaatattaagccttaagatactatatacggaacccaagcaacgtatttaatagattttatgagagaattttagttctggttttgtatatatatgcatgtatacatgtgtatttgtgtagttatatcactggatccgaaaatcaactcaaacacatctcgatccctttttaaaggtataaaagcatggaatttaaaatgaaaacatagtatacagagaaaccaatgagacaatataacaagcatcattatacaagaacaccttatagagtagacataacatgttatctatataaaatacatgaaccagctataaataacatgcaaaatatgaacaaacctcttgttttttttaaaaacactagacggacgaagcagaatccacagagtttgaggaaattcccagatctcgccttatctaacttcatgtagagagattatgaaaaaattgagggttagtagagaataaataaaaaaaaatcaaaacttagatctggacacaaacggtgagaaccctatgcaggatacttatgtaagtatacatgggaagacatagaagaagatagagatagagggaaaaaagaaccaaactttagatctggccacaatcgttaatttctatgcaattgaagtataaagaggaaaaaatagaagaagatcggcaataaataaacgaaaatcaatggcttaccttaccagattcgccggaaaggggaggatcagaaattaatacttggattgctaacggcgacgagaacgagaagaaggtttcaaggagacaatcaagttctgggcttgattgaagaagatgagagtaaccgacggtgaacgcaatcgccaacgacggcgcaagattttgggaggatattttgcggtgtgaagaaaaaacaagatttttattttctcatatattacttttggtgcgagagaatgagtataatgttagcttctgaatatttcaaatttcaaaccgagaatcatcacgctcccaaatagtgtattgtcccctcaatgtctaaagttatacatgtaataatacatgtgtttccgacagaacattgtatctcatggctatttctttaaaaaaatttggatccatggctatttactacatattcccttgaaaataccctaaaacgtattccacttattagtttccgtcgtcacctccttttttcccatgcgcttcttcctcctcaccagacaccgaggtccaagctccaggccatgcctgcatttgtggttgtggttggtggattccaagactacaataaacaggagttccaattaccattcctggaggcatctctccatcgtcaataggtggcatggccacaggatcagcagcggcggcaacagactctctctttacctcaatgtcatcatcaagcaagaaatcaaagataacagtttgagccactgcggcatcgacattagatttctgtagcgtgactcgtttgctttcctgagcatggagccacgaacgcatcgtaagatccatgataaacatctcacatgctttcgagaggaggattggagcctcactagctatcatagtcacatccggatcatacttcataatcttcttgatacgagttataggaagctcgtgatttttgaaatccaagttaccttccatctcttttgaccagaaactcttcagttgctcgttacctttcggtggtagctggtggttgccgttgttgttctccataagatttttttcttttttgaagtttctatctaggcttgatattttttatgtggggatttgcatatataaaggaaaagcttaagcatagattagatatggtgggataggaagcatgtaaacttatacaacaatgaatcttaactcatttagtatgttgttaagaatatttaatgatattaacattatttgtttgactaacattatttggttattattataaaaagaaaaaagaaagtgatttatttttacttaaagtgtatatattataccaattaatagtcttagaaaaaggaaataaagtaaatacaaaagctatattttctctataaattggaagttaaatttttgatgtacaaaactaattattttgaatttgattagttagtggaagcccccttagcccaatggttaaccaagggtttataattaatgcttttacaccaagaggtttggggttcgagtctcagctactgcgatttattagtagatttgcagattaatggagacaagtgtgcatgagatctacaacgatgtacaattatagccgtttgttaggattctacgcaaagaagggattgaaggtgtccatcaaacgcatagaaaaagagaagaatgtgtcgtctgtcgtggatctaataagagtcgaaggaattgtccgtgatagaatcatcaatgtaacagttctcataatttgtaataaataataaatctaacacgaatttggcatatgaagttggatataactaataatcagtaaagatttataagcaaacctgttattaataaagaacgctaccaaaccgtcaatggctcttaagcagccaactaaagagaaatcccgaagtctctagttgggttagatggttagccatctcattgctcgaacacaaagaagttgcatgttgccatgtgatggtttagctttctctttattgagagttcaaaaacgtttgatcatcacatagaactattatacatcaacaactttctaaatgaaatcaatacttaagcgtcgatcttttttaccggttatcgcaaaatcaccgcggcattcacttaaactgattaacttatatggattcaaaacaaaccgctactaaagtttcactgatttttaacattgagattataaacaccaaaaacctacaacagtataactaaccaacacaagaaaccgtgttgttcttcatgttttcagtcccatctaatgcggcaaccacgagcatgaagcgtctcgagcaattctgatgagagcaagaatctgagaggtgcgagaagtttaagcttcttgagcctattgcaacagactcttagagcaaactcaaacccttctacagtcacacggctcagatgaactaagtcaacgtcttgaacccgactcagattgctcatcaacatgcatagagccgtatcagacaccgagcaattgcacaagtttatctgccaaacaaaacacacaacacaagaatcaaacatgtttccaatagatgctaccagatctccatctataaatgttattttttgtacctgtcgtaggttttttgagaagtaagcgagcgcccaaaaacccgaatcatcaatattctcgcagagtttcacgtccaagtaacccaatttcttgcagccggacgcaatggctgctaaaccaacaccggttatattctttagccctcgaagttcgaggtgacttagaagttctagctgccggatttgttcaaccccggtgtcagttagttcacagcagtatgatagaatgagtcggttcaagctcttgcaacctcgagataaagctgctaaaccatcatctccaaaaccggcacagctgcactcaaaaaccagaaatcagtaagaaaacgaaacatgtcttgcacatttttcatcaagaatccaccaagaaagtgtaccggtatagatcaagttctagaagcttcgaacatttggaaccaatatggaaaatccctttgtctgagatatttgtgcagagtccaagtttcaatctttgaagattcgaacacttcgagatatattctagccctgcggtcccaacggaacaaaaaaccgtaagataccaaagatgacaatatctaaaacacaaacggaggtttgagttcacatatatctttctattacctctgtcatttacaccataacagtcagtaagatcaagttcttgaacaagcttggagtaacatccaagcgattgaagacctttctcagttatcaaatgacaagactctaactttaaagtccctagattccggcaagactgagctatagcagagatggctacatccgtcacgaatccacaacacgccagattcaatgttttcaggtttaagcagttgcgtgcaagacccatcatcccaatatccgtcacgtcaacacatctgctcagtccaatctccattnnnnnnnnnnnnnnnnnnnnnnnnnnnnnnnnnnnnnnnnnagaaacatgagctccatcaatccatatagtcttcagatgcttcaaacctttgatgtcctgtaagacgctaccagagacttcctgtgaaacacaaagaaaagcagagaacattatcgagtaaata

SEQ ID NO: 4753 - DNA, 527 bp, Arabidopsis thaliana landsberg
ttggaaaccacgtaaattcacatcaattttctttataagtcgtcatagatctaatttatttttctattagtttatacaaacatcatttatacataagtgctggttttctaaatttattaggagtaaaccttttggtttacatgttcccaatgattctactggcttctcttggatctatttaccttcacttgaagaaacaaacgagagtaaaccaatttaataggtaattcaacacttaaactaaccaactgattattctctagttaattaaccgctttttaatatcgatattatatgttttttctgttaactaaaagtagaatggataggaagaagatagacaagtttggtgcattgaaaagaccaatgttagtgaagggattagggatagtgacagtgaccgaggttatgttcttgatgatgttcatggctcttcttctttggagcttagccaattacttttaccatacctgtgtcaccatcactcctcaatcacttccaaccaacggagataacttgtaagtttt

SEQ ID NO: 4754 - DNA, 2086 bp, Arabidopsis thaliana landsberg
agggtttttctttttaaccaagaaatattattgtgcataaagtaaagaaaagatttcatgtttcttttccttatgataaagatttaaatttaacccttcaggagctaatgtgtacatagtaaaatcatggtctatatgtgtacatgtctcataagcgtaaaaatgggtaataatataagagccaagatttatagctacataccagtaatacccgcctaccgtgaaacgacaagattggtatttttcattgttaagttgtgcgagattctcaatctggacagaatagcaagaaggaggatgttccgtgaaactgctcgcaatcgtagaagttggatttgagcatgttgtttcaccgtatgataacgttgttgcattcgaaattgtgttacccattcttcatgaaccttattggaaagcagaaagaatgttgccagatagcgttacatatagagaacacaaaatctcttatgatatcgtttttcaacttttaatgtgatttaatcaaagattcatctttatcacttcgtgatatcttagctaatatttatttattgttttgaattcaacatagaaatctcatcatctctacctttttttaatcaaaacaatagtatcttttatcatatctaactaaaaatttactgccaaggttttggtaactaattttaaatatatggtcagatattaagaaaaattagtgagactcaacttaatttcctatcatgtttcaaaatttgaagttgatccaataccatatttattcttcaattgcttgtagaatggattcaaagactaaatggtggtagtagtaaaaactggcgaagaccacaatcatataatcagtgtagtcatctatctaagttggggctcatagctttccggttttggaatttaagacagttcattgttttgcatctttatctaacaaatcttaatcttcaaccaaaccgcataaacctacttcgacttgaatttctcgccgagtttaccgactctgtccttaaactcttccacagtctccttagccttcactatagagatatttctgatctcatcagccctcaagctcgtttgtctccacacttcctctgctttagacttagttttgattttgaggtctttggctttgttctccatgccatgaacttgttgttttaaggctgatatcagaaggcttatcttctctatgatcaagtaaattacttctctggatttctctcctacatctttcgccatcttcttcagcttagcaatcagatttccagctcttttcatggttccttctacatgattttgctttcctgcgttcagccaagtagattcggtttttgttgtctgttcatggagttcgctgtcaacaatcacttttaggccatacttctcccaacgtcctctagcttcttctagcacttttgcttgttctcttgctcttctcgcttcatccttagcccaattccttcaaaaacaaaactcaaaacagtaaataatctgaagagctaaactctcatatgtttgatttgtcacatttttcaatataaaagtttttgagtttcactaatcaatgtaattaagaaatgttttgcctctatctcactgtgtaagatctattcatgctcatttgatcttgcttgggaaagaaagaagaacttacaagatactatattctatacctggcaatggataaagcgttcctttcaacttcaagctcattttgtaaccggagtatctcttggttctcatcctccacttgcttttgaagtctatcaaacctctctttctcatatgacatctctgccttgttactcgcaaggctttgaagttgttcctcaagctcatttcgtatccttgcaagagcctccatttctgtttcaatcgatgtgcgttctctctccaatgcaagagtctcctcttctttctcaactctaagtctcgctagctctgactttgcttcttcagccaaatttctccactgcatctactatttcttttttcttataaaagctctttctcgaagctagcattaatatccttctcgacctgagcaaccaattcgttttgtgcacaacccacaatttccgacatagcc

SEQ ID NO: 4755 - DNA, 485 bp, Arabidopsis thaliana landsberg
  unsure (1)..(485): unsure at all n locations
ttggtcatcttcaccatctcctctcttctctaactctcaagtttttacaaaaactctcctccaagtatggaccgttcctccatctccggatctttagtgttcccatcatccttgtctcatctgcttcagtggcatatgagatctttaaggcccacgatgtgaacgtctcatctcgtggtgctgctgcgatcgatgagtccctcttgtttggatcttctagcttcatttacgctccctatggagattactggaagttcatgaagaagatcttcgccactaagctgctccgaccacaggtgctggagaattcacgtggtgttcgtgctgaagagttaaagcggttttacaggagaattctcgatnaggcgaggaagaatgagaacatcgagatcagtaaggaaatcgcgatgctcatgaacaacatcttatgcaggatgagcatgggaaggagtttttcagaggaaaatggtgaggcagagagagtc

SEQ ID NO: 4756 - DNA, 2744 bp, Arabidopsis thaliana landsberg
cattctctagtctagtccgtccatgtttggtggtggtacagtatgagaattttgcacgtgagaaagcgcttgtgctaaaaagcgagtgagcattaaagacacgaataaaaaaccagacataaaaagccaaaaagtttctctttaaaaaaccattaaaaaggacccaaaagttaaagaaacgatatattcgaggcaaaagtagaattatcatcacataataatttcgctacgttgaaaaaaaagtgaataaaaaaatgaaatgatattttcagttgtacgctcttctcttccttatatcttccgcttcacttcacaccaaaatcaccacctctcacaaaccctagttcctcctctctctcatttctcggagatattcaccagagcaataaccatggacgctaaagaaacctctgccaccgatttgaaaagaccgagagaagaggatgataacggcggcgccgctaccatggagacggagaacggagatcagaaaaaggaacctgcttgtttctccactgttattcctgggtggttctctgaaatgagtcctatgtggccaggtcttgtttccttcctctctctctctcaaaaaacaaattctgggttcttaaattaaaaagctgattttttttttcattggtttgatgatgcaggagaggcacactcattgaaggttgagaaagttttgtttcaagggaaatcagattatcaggatgttattgttttccaggtaacaaaaataagaatcatttctctgttttttcctaacttatttgtctgtgattatacttataaagacttgttttttatgtgttggttagtctgcaacatatggaaaagttttggttttggatggagtaatccaacttacggagagagatgaatgtgcttatcaggaaatgatcactcatcttcctttgtgttctatccctaaccctaagaaggtatacaatcaatccttttgctagattctgtgaccttgattgtgttgcgttgtgggtaatcaaaagtttatagctttggaatgtaatgaaaggtctttcttgaagtttgcatttttcttctccggtaaagtaggatgatgaaatcattagttatggagaaatagagaaaccagagttccttttattagatgtgtatatagaaactacttgagttggcattaatgattacattccagggtggtgataggaatgtccactagagaaaaggttcatgatcaccattttttgctttttatatgtacaaactttgatggcctcctgagaaaaaaaggtacatagtcccatgttcccttctggcaaagttagagaactcaagtaactttattgggttataataatgattcggaagaaacttatttcaatgggcttaaatgattagtctttagcttgttattgggggacttggttcagaaaaggttagataatcaagcttcttacattcagaattgcttttgctcccaagtatcagaattgggtagtctaactattttgggttatggtaaagtgggtcagctaaaaatgctgtttttgcttttagctagtaaagctataagccagagtgtatctgatcaatgcctttctagttcttccataggttttggtcattggaggaggagatggaggtgtcctgcgggaagttgcacgccatgcttctattgagcagattgacatgtgtgaaattgataaaatggtggtcgacgtgagtggtcacttacttttcacctttccttcttctctatttcgatagataaataccttgttatctaatttgtttccacctactggtaattttcaggtgtctaagcaatttttccctgatgtagcaattggatatgaggatcctcgcgtgaaccttgtcattggcgatggtacaatactgccgcttttttctctctttctgaaacattatgtagttatgttgaacacattttgccgtttcaaactgatcggttggtgaatcgttgcaggtgttgctttcttgaagaatgctgctgaaggatcatacgatgcagttattgttgactcttcagatccaatcggtaactactacaatcagatgtcatcagatgtcatcagaaacaacattatttcttactgttatgttgagcaatactaaaaagcagcctttacttattgtctgtcaggtcctgcaaaggagctgtttgagaaacccttcttccaatctgtggctagagctcttcgtcctggtggagttgtgtgcactcaagctgaaagcttgtggcttcacatggacatcatcgaagacattgtttccaactgccgtgagatcttcaagggttctgtgaactatgcttggaccagcgttccaacataccccaggcatgtttaatgacctttaacatcaatctctctcctttttgggtgattataacttaacctgaatcacacttttcttattttcagtggggtcattggatttatgctttgttcaactgaaggacctgatgttgacttcaaacacccactgaacccaattgacgagagctccagcaaatcaaatggacctttgaagttttacaatgccgaggtaagataaaaatctctcagtataccatttcatgcggtctacacactcgaatcattagcttatgctctcatttcttgggggtttcagattcattcagctgcattctgcttgccttctttcgccaagaaggtcattgagtcaaaagccaattgaaaagggaaagaaaactaatctggaggatcgttaattta

SEQ ID NO: 4757 - DNA, 1361 bp, Arabidopsis thaliana landsberg
cgaaaggcgtcaagcccaatcccgagaagtgtgtcttcggggtgccccggggcatgctcttggggttcatcgtctccgaacggggcatcgaagccaacccggagaagatcgcagccatcaccagcatggggcccatcaaggacttgaaaggcgtacagagggtcatgggatgtctcgcggccctgagccgcttcatttcacgcctcggcgggagaggcctgcctctgtgccgcctcttaaggaaggccgagcgcttcgcttggacccctgaagccgaggaagctctcgggaacctgaaggcgctccttacaaaggcgcctatcttggtgcccccagctgatggagaagccctcctggtctacgtcgccgcgaccactcaggtggttagcgccgcgattgtggtcgagaggcaagaagaggggcatgcattgcccgttcagaggtcagtttacttcgtcagcgaggtactgtccgaaaccaagatccgctacccacaagttcagaagctgctgtatgcagtgatcctgacgaggcgagagttgcgacattacttcgagtctcatccggtaactgtggtgtcatccttccccctgggggagatcatccagtgccgagagcgctcgggcaggattgcaaagtgggcggtggaaatcatgggcgagacaatctcgttcgcccctcggaaggccatcaagtcccaggtattggcggacttcgtagccgaatgggtcgacacccagctgccgacgactccgatccaaccggagctctggaccatgtttttcgacgggtcgctgatgaagacgggagtcggcgcgggcctgctcttcatctcacccctcgggaagcacctacgctacgtgctacgcctccatttcccggcgtccaacaatgtggctgagtacgaggctctggtcaatgggttgcggatcgccatcgagctaggggtccgacgcctcgacgctcgcggtgactcgcagctcgtcatcgaccaagtcatgaagaactcccactgccgcgacccgaagatggaggcctactgcgacgaggttcggcgcctggaagacaagttctacgggctcgagctcaaccacatcgctcggcgctacaacgagactgcggacgagctggcaaaaatagccttggggcgaacaacgattcccccggacgtcttctcacgggcatctgcatcaagccctccgtccaagatcgacgactcgctcccgagcccgaggcgccctcggtccagcccgaggcgccctcggtccaccccgaggtaccctctgcacagcccggggcaccctcggctcggcccgaggcaccctcggtacggccgaggtaccctcggcctctgagggcga

SEQ ID NO: 4758 - DNA, 1255 bp, Arabidopsis thaliana landsberg
gagatagagcacaaaggaagatgagtgatcatttcttgatacgcacattcatctctctcagagttttgaatcactccatccaaaaccaaaacctttccatatgttgcagactaacaaaatacaccaaagttgacaactttatataaaagtgaaccaaacttagagagacagactaaccaagaaactgtccttattacctggaaaacaataacatcctggtaatctgatttcccttggaatagaatcttctctaccttgagagaatgtgcttctcctacaaactcagatagagatattcaaaatcagcttcacagagaattaacatgaggaattagacggacctcaattggggaaaacagaggaatctatacctggccacataggactaatctcagagaaccatccaggaataatagaggacatacaagaaggctcctttatctctcctccaccgttctctgtttccatggcgccgccgttattgtcctcctctgcttctctaggtctcttcacgggcaaatcagtaacagacgcttcttgtgttgaagacatggattgaagaagagagacagtgagtaagagattagggttttagtgtctctctctctctgtggctttgttctcttgttgactatgatatcatataagaggaggggccaacaaatatctgccgtacgattcgactgttataaaatcattttctttttgttattacgtgaataaggcaattttcattattttgtgatgatgaatatcaatcatgacagctcttttttttttggttgctttttaaagccgatccaatgcattgtttcattttgataaacgtcccaattaaatacttttatcgtttaaattttaactttaatttttagattctgttattgaccccaaaaaaaaaaaaaaaaaactgtttagtgtatacgtttttattttatcttagaagactacatgtatcaacaaaagagtattgaatatttccaaaagttgatcgattattattaatatgagtgtgttttgcgattctttaaactcgttatgaacaagcgctctcacacttgtagattttgtgtgtcaagtgtgtcaacttgtgaagcacctattttcgatagatgttaattcacgttttggttgatggaggagaaatgttttcttatcattattgcattataatttgaattctgttattgcatatagatgttttttaagaaaatgtgaaggttgtgtttacttgtgaagcattattttttttttt

SEQ ID NO: 4759 - DNA, 3794 bp, Arabidopsis thaliana landsberg
taacatttaaccgtgtaattgtcggggtaaaaccaatgattccagaagccaatgtcatctgatttattcatataccaagagttttgatgtatatcattggcacgttctggatttaaagagctggcaagattatggtcaagcaatgcgttctgcatcgaaaaatttcttatctttagattggtggagagtaaatttgcacatctttcacttgttcacgtcatgaaatatgactatgttgcgtaattgactgggtaaaaaattggactttgtttgtggcatttacgtttccattgaaaaatgagtattttggaacattagtgcggtctggtcaacattgtttatagtaggtgcttgaaaatagttttgacaagtccctcgaagaaaaaaaatccctgagtgtttcttcacttggctttctttgtcttgttatatgttcgtttcttagttattagagaaaaaaaaatacacatggggaagaagaggatcgtgttgctcttatttataagttttagctatgcagagataccaaaagagagccctttgtctataggacaaactctcagctcctccaatggagtttatgaactgggcttcttcagttttaataactcccaaaatcagtatgtcggaatctccttcaagggtatcattccccgggtggttgtgtgggtggcaaatagagaaaagcctgttacagactctgcggcaaatctggttatcagcagcaacggaagtcttcagttatttaatggcaaacatggtgttgtgtggtccagtggaaaagctcttgcatctaacgggtctcgtgtagagcttttagacagtggaaatctagttgtcatagaaaaagtttcgggaagaactctatgggaaagttttgagcatcttggagatactctgctccctcactcaactatcatgtataatgtccacaccggtgagaactgagggttgacttcttggaaaagttacactgatccatcggctggtgactatgtcgttctgattacaccgcaagtgccatcacaggggtttgttttgagaggctcgaccccttattttagatctggtccatgggctaaaacaaagttcaccgggttacctcaaatggatgaatcatacacaagtccattcagcttaacacaggatgtaaatgggtcaggatactattcgtattttgatagagacaacaaacgttcacgtattaggctaacaccagatggatcaatgaaggcgttacggtataatggaatggactgggacacaacctacgagggtcctgccaattcatgtgatatttatggcgtatgtggaccttttggtttttgtgttatctcagttcctccaaagtgtaaatgcttcaaaggttttattcctaaatccattgaggagtggaaaacaggaaactggactagtggttgtgtgaggcgtagcgaactacattgtcaaggaaactctactggcaaagatgcaaatgtcttccatactgttcccaacataaagcctccagacttttacgaatacgcagattctgtggatgcggaagaatgccaacaaaattgcctcaacaaattgttcttgcttggccttcgcttatattcctggaatagggtgcttaatgtggagcaaggacctaatggacacagttcaatttgctgcaggaggagaacttctttccattcgtcttgcacgttctgagctaggtatgacttggaatataattcaaggaccttctgtatattttgcaattatattgatattgatgttttcgatagatgcatgacttattgtttaattcttatgctaaattcctcagacgtaaataagcgcaagaagaccatcattgctattacagtgagccttaccctttttgtgatcttgggctttactgcgtttggtttctggagacgcagagtggaacaaaatggtaacacattaatgactttactatcgaaaagatctaatcatttggttgtcaataaaattgatctgttacatttattatgagatatcgttaaataaaaggttgtttttccactacatcagacctatactaaattgatcgactcatatatgttctcttggtacattggttttggctggttttaaatactcttaatatgctcatttggcactgactcacaaattctaacccaaatttcagctcatatatcagaagatgcatggaggaatgatttgcaatcacaagacgtcccaggtttagaattttttgagatgaataccatacaaactgccaccagtaatttcagtctatcaaacaaactcggacatggtggctttggttccgtttacaaggcgagaaacgttttatccttcgctctttttcttttctgttttttctgaagatgacatttgcaacttttttcagggaaaactgcaagatggaagggaaattgcggtaaaacgcctttctagcagctctgagcagggcaaacaggagttcatgaatgaaatagtactgatatcaaaactccaacacagaaacttggtacgggttttgggatgctgtgttgaaggaaaagaaaagctattgatttatgagtttatgaaaaacaaaagccttgatacctttgtttttggtgggttacatcttgcctctttcttgtagcattcctctctctatatgtcgaactgcttattttatagtttttacatggtatttttgcttagattcaaaaaaaaggcttgagatagattggccaaagagatttgatatcattcaaggtattgcacgtggacttctctatctccatcgtgactcacgcctcagaataattccccgagacctgaaggttagcaacattcttctggacgagaaaatgaacccgaaaatatcagattttgggttggctcggatgtttcatggaaccgaatatcaggataaaactctcagggttgtgggaactctgtaagaaccattcttcaataacatattaaactagattggtaagtcatatactaaaatgggtacaactatttgattttttgaacagaggatatatgtctcctgagtatgcatgggctggagtattctctgagaaatcagacatctacagcttcggagttctactgctagaaatcatcagcggagagaagatctcgaggttcagctatggcgaagaaggaaaaacacttcttgcatatgtaagtaagagtgtaagactctatgttttcatacacttgcagagggtttaaaagggtcgctgccctcccattcttaagatctgaaactaacacaggcatgggaatcttggtgtgaaactggaggagttgatcttttggataaagatgttgctgattcatgtcgcccattagaagttgagagatgtattcagattggtcttctctgtgttcaacaccaacctgcagacagaccaaacacacttgagttgatgtctatgctcacgacaacatcagatcttccatcaccaaaacaatccacatttgtagtgcactggagagatgacgaatcatcgtctaaggatttgatcactgtgaatgagatgacaaagtctgtgatcttagggcgttgagaaatgatgtttgattgaaactttagtctgttttgtaaacgattttttctatttatgaaaggtatattccaacagatgaacctccattttggtgctccagtgaattactgtagagtaagaatttaccatggttaaagattaggtgactaataatagtacttagattcgagccaatggttaaaagtttcatatttccagaaacactaatcagataatagattcatcatttcatcttccatg

SEQ ID NO: 4760 - DNA, 3988 bp, Arabidopsis thaliana landsberg
  unsure (1)..(3988): unsure at all n locations
gatccatcgttttctctaataatgatctagaaagcatgtagaccacaagaaatggatatgggtagagccaaaacctaatctaatctacctaaagaaacatgaacaactctataaacaatcgcagcgattctaatcattaagaggctaaagactaattcctttaaatggacgcgagaatattccaagatcggaaaaatgtaaaaaagaaannnnnnnnnnnnnnnnnnnnnnnnnnnnnnnnnnnnnnnnnnnnnnnnnnnnnnnnnnnntccggtggctgccggtgtagtcgccgccggagtattccctgtgtacccattaaccgtcgccatcctttttcgcctcttctaattgaacaaagcaacaatcgtagtcgaaatttctgaaattgaaacgcttttttctcgagaagaatcagattcaagaatgatcgaaactgaagaagaaggagaagagagatagagatagagatagagagagagttcttcttctcttctttgagagagagagacgtgggtctgggttataaaacgtgtacgacacaagaaacgtcgtcgttttcaaaagcaataaaaaggaattatcctaaagcattttccgaacgttatcacttaggttatagcggctattttgatgcatttgaattgaaaattcacctaccttatgtaacggctatttaatctttccaatgataaaatttgttacaaaaatatgtaaaatgttgaatcatgtaaaatgctcaatagatcagagatttatgaggtctacaagaggagagggtatcgagagcaaaggataaatcaagatcttgttacaatatgattcatcacaaggacacactatctttgaaactaattccaaagttaaagagagacacatttctatagatacaatgataacttccctagcttttcaaacctattgagaaacatcacactaagaagccatcagagatgactacacaagataaggggagggagatgtacatacggtaccgatcaacaattgagcttaatgactcgagagactctttcaaagaagatgggacacatacttgtgctgaactttataacttctctcatccattccggtgccactctttgaaatgttccgagtgatgcaggcttgtaaagcagctcagattcttcaccatttgggttatttataaaagttaggctgaaggataaacctgttatggtaaaataatcagggaaacaaaatcagcattggtgcttttctggtggctgatgatctcaaaagatcttttgaatcaaagtaaatagatcatgcaggaaaaacaaattaccggttgttgggtgtgaggctacaatgcaggcgcgtttgcccttattattagttgataatttcattcctagcaagtgtttgccaagagcttgaaatgtacaactagcagaactacttgatccatcgtaggttgttctgcagcattgtggctgagaaaccaagagaggctccttgaaacaaaagcaagaaaaagtatcagtaaggctaattttatgatccactgggtttgtgaagcaagatgcacaacattcagctcagaactgaaaggttaagaggtgatctgttttacctttgctttatgatgtttgctaatgtcaggtgataccatatccgtttccaccaaatcttctgacagtctgctacgttttatcatgcttctcgttgtaactcgagcactttcaggagtctttctcttttgtttttttccactttgatcttcatagttgcgaggatgttcctcttggaccagctcttttagcttgacaacttcttcagaaagtgatttgtctgtaagaaaaacaacaaagattttatcctagacagtattataaccaagtcctcatcactctccatgaagcagttcacattatctcagctaaattcctaactaaactacatatcatgtccaattataaggctacattccatgacacatgaaaatagagcagcaactatcatcaattaacatagtttcttactctttagttcttcttccatgagaagcttttgacactccagaaacttgtcgtccctgccagatctgtggatcaagattgttatagttacattagcaaggctccaacttctctaaataaaaaagaatgtctgggaaaatcaagacggtaaggtgaagtacatgcctgattgaaatgatttcattcctcaacttctcaaccatctccagagaactctgattttcacctctcaaatgttccatcaactcctctgaggctgcaaatagcaaaagagagaaaagacagacacactaagaacgtattcacagacttaaaaggtctcttgttataattctcgattccaagtgtttgtaattgcaatgtgaaatcaaacctaactagagatatctaaaattcaagtatggaacaaaggaactcaaactcaaagaacgaatctttcgaaattggtacctgaaacaaaggtaaggaatttctcttcttgttccttattaatctcatcgtattcggaatatttcttcttctgaaaaaaaaggagatggaaatcaaaatcgaacccagaaaagcgaaattccggagaaaccctcagaaattgacaagaaaattaaacggaagatgttgcagaaaacctggagtttggtgtatttgtcgtagagcttggcgtagagagcttccattttctgctcactgtagaagagtgaagaatcaaatcaaattgattacccgacccggaaagaagcaaaatcgacgagcttacaaattcgattcaagagagcaaaacacactcgctttggtttccagatttgaaggagaatgacgaaactgatgaattcaaaagagaccaactttataaaattcccaaaccgacgacgcctatgacactgagaagtggattttaattctagggcaacggtttttttcttcttctcaaagcactatttttcttctatctttttatttaattttaagttcttaattataagaatatgaaaaccaagttatccattggattcacacatttttttttttgatgaaaagatctattttggtccacacttgtgaccataattgtacatgccatgaaggtcacgagagtttcgctgggaacttagtacaaatttcctctgttataaacaatcctgattgattattgactacggattcctcttgtttcatcaacctaccaaaaaaaacaatgatatcaccgttgacgctcaaaactccttcatcttcatcctcttatgtctcttctcacttctctgttgctatctcttcttcaagaaacctaaggatggctttatagcgaataagataatgagatttttggggaacacggagaagaggagccaaaggacatcaagatggagacatgatggacgtattgttaatgcttatgatgatagatcctgaatcttggtgatgtcctaatgagtttaagccagagaggtttttagcttcttttggatcagggcaagacgatgcacttcagtacattcttttcggaagcggaaggagatgctgtctgggagtaaatctgagttacatctttgtaggaactgcgattggaatgatgttgcaatgctttgactggaaaaccaaaggagacaaggttgacatggaagaggccattcgaggattgaacctgaccatggctcatccccttaagtgcattcctgttgctagaaacctaaaccctttggcttgctcgaaccttaaaccctgtaactttgaatttgcaaaaaagttgttggtgagaggaagctctgctccgctttgtatgttcccgtgtccaagtctcccggattaagtggctaccttttggtttagtttggtttattgtgtgaaattgtaaataactgtgtagtgttcttcggtttaaggcatatatcggtttcattgttcactgacttcactgacttcattcacttcaaatcttgtgtttatgaccttaaaaatgcagcgggttttaaggtagattttggtttctccga

SEQ ID NO: 4761 - DNA, 2284 bp, Arabidopsis thaliana landsberg
  unsure (1)..(2284): unsure at all n locations
gtagaaacatgagaggtataaaatataaatgcatataagatcaagagataattgtaatcagaatgttacaaactaaaaagcatttacattcaaattcttctcaggtctaatatgtactttcaaattcttggtagttgtctctaaagataacttgagtgcatggtaggattgtatggttttaaacatgtctttataccatgagcttattgcaaaacaaaaaattgtttaggaaagaacaaaattactttgaaaggatgattttatttatatgtgaaagcaagtttatctaaggtgaatcaaatgacattccaaagaccttgtacactaatacaaatgagcttatgacgcgaggatagtgattgacatttgcagtaacagtaaggggcgtacccacggctagagggggttgggcacgtgcccgacactcttttttgaaaagaaaaaaaaatatttatatactgaagtcatttacttaactatttgttggtccactggaatgaaaaatgaagtgccctaccctaattaaaaacaaaaaatattatactgtccaacccaattcaattataaactgttgatcttgagggcagtttgcgatagttagggtttttttatagctaggagcgtagggaaggtttatcaacaaggcaaattataaactgttgatcgtgaggacaatttgcgatagttaggatttctataataattttgtttttttttaactctctcctctccttcaaactatttccactctatgaaaaaagtttcttggtttttgaacttattttttgcttggttatgatgctttatgttttttttgtgccttacaaggacaaatgttaaaatgaagtaaagataatcgtttgacatggttaatgcagttttgtatgccatgaattttaaaggtaggcatctcagaaatttcttcaccaatttcttgtctttgtacttcttcccgagcgttattgcttcttgagctaccgagcttagttatgaactgaagtcaggggttgactcatgttcttccaattttagattctcgaaccttgatgccaacatatctttacatatccagaagccgtaattcccattgtctagaacaactttggcgttgttgagtagttcatgatagctctccatcatctccacatgatctcacctgtatgcaatcttcacaagtgactactctgataccaattaaaaacgcaagagctatacaataacgttgaactagaacacgatgtaacacatggtttctcaaacttgcttttgattaaatagaaaatatgttcttacaaggtttctccttcaacactattttctattctctcggaatcttgttcttcaatcacacacgattaagaacaagaactctctctaaaaccctaagccctctttaagtctttagctctttgtttctctcaagctaaaacttaattgctaggaattctctcttctgttttgtgctgagctttctctcaagccttagtgctcgatttatactaaatagaccaaggtcatacaacatgccaacttctaattctcaaactaattggaatagacaatttcctttttctttatggattaggatattgtcccttttcttcttgtttcattttcctctcttgtaaaaggaaactcttcagtcttctataatcttctccaagcttctaataaccatcgccaaccgccatagaccaacttgctgatttccatttgatttgcttcacgatgctctgtactcttgaactatttgatgaggtactttagcttcattcaggaactccttcagaggttgcatcttcatcgtagctgtcaatttatcaaataggaaatgctctcgtttaatttggtgattgagagcaacttggttctgacattgttcatatattgaactaaactaggattagtatcttaaataaatgagtgatatctgggagatcactgtccgatcttaattattttctcattatgtttgaatagtaccattctgttcataacttatagtgcatcttannnnnnnnnnnnnnnnnnnnnnnnnnnnnnnnnnnnnnnnnnaaacatccagaagtgactgtgcttgatcctccatgtgcaatccagcgtatatataatcgacaatcaatgctccagggcattgcagatataaatcttgcagattgcgatggtaacttctatatgacaattttcaatcctcgtttattctatagagtaagaaactcgacagttttttcatgaaatgatgttatgttttctttgtaggcatgatatgtgttccagaacaaat

SEQ ID NO: 4762 - DNA, 769 bp, Arabidopsis thaliana landsberg
gcaacaagtttgtacaagattggaagattactaatgtaggtgcttgaaagctacaagataaaaggggggggggggagattgaagatgcaacccgtgaagaagttcttgtactaattcaaagtagttcaagagaacaaagaaaggtgaagcaaaacaaatagaaattagcaagtcgttctatggcggttggcaatggatactagaagtttggagaagattccagaagactgaagagttttcttttacgagagagaaaaaagaaccaagaagaaaatgacaatttcctaatccgtgaagaaacaaaaaatttgtccattcaaattagttttaggattggaattggcctgttgtatggccttagcttgtttagtataaatagaatgattagacttgaaagaaagcttagcacaaacaatagagagaattcctaacaattaagttttagctcgagagaaacaaagagctaaagacttaatgatggtttaggggttttagagagagttcttgctcttaatcgtgtgtgattgaagaacaagattctgagagaatagaaaatagtatttaaagaaaaaccttgtaagaacatattttccaatcaatcaaaagagtttaagaaaccatgtattccatcgtgttctagttcaacatattctatagctcttgtgtttttaataatggcttgactcaagactcttttaaggtgatgggttaattaaaaaccataaacttaagtaaataagaggatttacattcattgatgccaaaaaat

SEQ ID NO: 4763 - DNA, 487 bp, Arabidopsis thaliana landsberg
agtatgaagcttccgtcttcattttttatcgttggttcctcccacttgacaaaaccgatttccatacaaacacatcaattcctctaatcacggatttaattctagatttccagaatccgtaatttccgtcatctagaacaactttggagttgttaagtagttcctgatagctctccatcttctccaaaggttctcccctgtatgcaatgctaacaagtgaccactctgataccaattgacaatgtgagaactatataataactcattgaactagaaaacgatataacacagagtttctcaaacttcttttgattaatagaaaatatgttcttacaaggtttctccttaaacattattttctattctctcaaaatcttgttcttcaatcacacacgattgagaacaagaactccctctaaacctctaaacactctttaagtctttagctctttgtttctctcaagccaaaacttaattggaattctct

SEQ ID NO: 4764 - DNA, 555 bp, Arabidopsis thaliana landsberg
  unsure (1)..(555): unsure at all n locations
acaccgggccgcatgacggtggtcgccatcggccgcgccggtggtgttggattattgcatgtgccagccgtggctgacggggattggctggccgcttagcgcactcgtcgnnnnnnnnnnnnnnnnnnnnnnnnnnnnnnnnnnnnnnnnnnnnnnnnnnnnnnnnnnnnnnnnnnnnnnnnnnnnnnnnnnnnnnnnnnnnnnntcggcttcgctgatatgcagttgcgccgcctgttccggaatttgcttgtcgaccaacggcgtgcgtacgaagccgggacagatcacgttggcacggatacggtctttcgcgccttctttcgcgacgactttggccagtccgagcaggccgtgcttggctgcgacgtaagcgctcttgagcggggatgcttcatgcgaatgcaccgagcccatatagatgatgctgccgccattgccgtgcttgatcatctcgcgcatgcaagcgcgggtcgtcaggaacgcgccatcgagatgaatcgccagcatctttttccagttgctgaaagtgaagtcgacaatcggactgatgat

SEQ ID NO: 4765 - DNA, 1563 bp, Arabidopsis thaliana landsberg
gatactaatcattggttactcatcaacagcaacaaaatctaaacacatatatgactaccaatggattgggaatagaaaaaggtcaaaggttccaaaacaaattgttagtaatcaattacacaaacacactaacgatttgcttctatcgatctatacaacacatagaagatcactttcatggaaactataaagagattgatatactcaagagtgatgaaatactgaccattggtttatcatagaagggaaaattttgcatctgacgaacagcatgaccagcagcagtgacttcactaaaagtaacccaagcttgtcctcggagcttcggagtcttcaaagcaaccacatcaagtatcctcccaaactgagagaacaaacagtaaagagatctcttcaattctgagaaaacaaaaaccaagtcagataaagcatgagattgatgatactgccctgagccaacactacttcacacgtctataacaattatccatacaatggcgaaaacagacaacaccaacatatatatcttccttataaccttgtcactagattcaatacgattctgaaaccctagtatttagaaacgaacactctatataagctaaaaacaagcaaaaaccctaacattcagtactgtagaagcttgaatcattggtacaggaagttcatggaggtttcaacatctaagaatttggaaatttacttgacgaattagattaaacgagaagagaagtttaccctctttcttgatcctttcgttgaggttttggatgtagattgattgattcggtggtatatctgccgttaacatcttcgagtgagctcgtgaagacgatgaagattctcgagactgaggaatttagagagagccctaatggtgggaactgggaatgagagagacgaagaagagtaaaagaaatagctgcgtttcaacatcagactatttaacgacgccgtttagtttgttggttcgatttcctaaacttttgtaccaacgtgaatgagccgaccggatggaccggatttgaatttgaccggctagacagaattgaaccggaaatagaatgagtggtcgggattggacttttatagactcgagatcaatttttttattgcaaaattccaacaaaagtcttgtgaatcattttgattcaaatgttcaacaactttttaaaataatgtaaatgatgttgtatttttccagctgagcttgcaaatttgttctgaaaagagatttaaccttagaccttagtatatctcaatattcatgtgatagataatacaattcacgtgtgagccgattgaatcaaaaggcattaaaaatgcaatgtactaaaatgcctttttgtttctgtgttacatttttctttacactgagaaaataaatcgaggatgtttcactttcatccttgaagaaatatggcaaccattgcgactactagtgaatgatcgatggatccaggaaatatcgttaaccggaacttgcttcttccttacgtaatctgtctcagcttgtacatcaaactcgtctgccaccacatttaaaagaacataaatcagatt

SEQ ID NO: 4766 - DNA, 2958 bp, Arabidopsis thaliana landsberg
tgctggacgcagtgagcagacacacagtccaagtcgacccaaaatgttgggcagcaatcttgctcacattcgtcaactgtggaatgtggaacgttcgatctgaaaactccgagagacgctacttaggacagcagctttacgcgagtgttttgtcaccagagaaatcactgagagatgaatacaacatgcctgagacaagcctccaatgtggtctagtgaagggtacacctaagcctaacccttacgctgtagcctaagttaaattttacaaaaaatttacttttaatgcaacaaaatagtttggattcttctgttgattcaatcgattgagaggcatttgcaagacgtttacctaacggatttatttttctggttttttgggtcttttctttttaactgttttaaattttataaaattgatttttaaaagtatatggtttattcgtatatacatgaaattgaaatgtatgtatgtctatcccttaagtaatttttttcttgttttaaaaagacgcattaagtttctctttttttgttcttcatttttttgtaacgcttatgtaatgtatccataatcttcaacgaaataagcagagatcatcttctttgtctgacatgaagtgttctttccctaattgccaatcttgagatcaaaagcagaaataccatcaatcaaagtttatcatatttttaatcatcatcacacataagtatataacacggctcacaaaattgtcattacgataagattaatttgttaggtacaaaaactttacaacgaagtatttcttaatagctttcagaaatcaagaaattaagtaaaaacccttcagtgtctgtattactttttactgttatatacactgaatcagtaacaccaaaaataggacgaaaataacaaatttcaaatcttcctgaattccttaaggctccttatctcgtgattcttcgaccaacggcgtttcctttagcaaaaactcatcaagactgtcgttctctgtatcaacctgaacgagctctttgaacatcgtcatgacttgaatcatagttggtcttttgaatggccgatcgtccaaacattgagacgcaatcttcaagtaatgaagtagctcaacatcgccagatttgtctgttactaactctgggtcaagtatctcagctcctctcttctctctgtagagctgtttagcccatcccacaaggttgttgtcttcaccaaactcccctggatcaattggtttcttaccagacagaagctcaagaagtataactccgtaactgtaaacatcccctttagctgtacaccggaaactttggtaatattcgggtggaacgtatcctggagaacccgcgagcgtgctcacgctcagatgtgtgtctagagcgctgaccagcctcgccattccgaaatccgagacacgtgctgcgaaatcttcgtccagaagaacattgcttgatttcatgtctctgtggataatgtgttgaatgcagctatggtgcaaaaacgctagcccacgcgcagctccaatcgcgatcttcttccttgcggcccaattcagatatattccgcctttcttcgatgattactcgtgaagaactgtctctaagcttccccatttcatgtattcgtagacaagaagcctctcttcaccaaccttgcaatatcccaaaagtggaacaaggtttctgtgtttgatttttccgattgtatccatctcagccatgaactctctatcaccttgtcccgtgattcgaatcaacttcttgatcgctacaacagatccatcagccagttgggccttgtatacttctccaaacccacctgatccgatcatactatcagcactaaacccgtttgtggcttcaagaaggcgtgcaaaagtaagtttttctcagcggcttctcaaatgtagcaacgttgatgctcaacggttcatgaacactagagagcttccagctgctgctaccagatgtcggaaggctctcaatgtacttctctctctgtttttccttcttctgaaccttccttgctctataaagcgccataataagcatcacaatacacatgaaagaaaacacaatccccgcactcatcccagtcgcaatgctctgttttttagggtgagcatgagatctcgtgggccgggaaccagagctacaaggtggtagaggaaccccgcagaggccagagttgttggcgtatcttgtgagtgggaacgtcgtaagttggcctccgaatgggattggtccggttagattgttgttagagacgtctaagtcgcttagaaaagagagtcctcctagtgatccaggtaagaatccttggagatcattgtgagatagatcaaggactccaattgctttcaatcctccgaagctatccggtatggttccagttaacaagttatgtcccaaattcaagacctgaagatatcccattgcaccataacccaaaggaatagaacctgaaaccgcattgtaggaaaggtccaagtagatcatgctcccgttactggagaacatgtacatggtcatgcctgagtatatccgagtcttgggacatgaatgaaccattggaaaatgctctaaccgctcagcacgaattccttcaaactcaaccaaaccccctgcacctctgcaatccgtcccaccttcattcctcacaaacgcaaactgtttaccagagacgcttccgggcaagaccagtccggcctgacttgcaagttcacctgggagattcccagttagattattgctgttaagatcaagccagataaggttcttgcagtttccaagctcacttggaatgttcccagttaaagaattgttcccgagttgcagaatcgctaacttctcaagctttccgattcctacagggatttcaccggtaagcaggttactagaaagggagatccaaagcatgttggtgcatttggagattgattctggaagagaacc

SEQ ID NO: 4767 - DNA, 913 bp, Arabidopsis thaliana landsberg
atgactgtctttgagaatacgctgacgacacaccatgtcgcccttcctcatgatgcaatggggaatataacttgaggaaattaactgtttacttctgatagaatgtgacagctatgacaaattctccccttcctacaaatccgtgtggatgatgcgtaacattattcatttctacaacttggccaatcaggtatcgatcttgagttatcaacctttttttgcgtgtttcttttggtttttgaaaactttgtatatttgtgatcgataacacaggctattgacagagcagctggagtggatggctcagacggttacttacactctcatcaaacatcgattgggagatcttttctaccgcttagtgtaagcaaatcttctactgatgaagctgttttctcggttagattttgtttagaaaagaaatcaagatctaaacttagagttttggttattttaggtttcagaagtttgaagatccagctgagggagaagatacacttgtagccaaattcaagaaactgtaataatgatctgacttctggagaacgcgccttggaagatggaactcgagaagcaagcagttttcagaaatcggaagtattcgagcatcgagcatcatcacagtggggtaatgatgagtccatgaatccaggttttgagcccgaaagaaataagtggttgttgtgatatatgttctcgcttcctctcttcatgatttcatttatttgttggtgtacagacaaaaggaatattaactcttacgacaaggttcaaaaaggttaaatattctcacaatttttttaaagaagttgagaaatgcagaagaaatattccaagaaaatgtgtctttgacattacagatttgcgatcacatcattcaaaagctaaagggactaaacataacagacatcca

SEQ ID NO: 4768 - DNA, 2457 bp, Arabidopsis thaliana landsberg
  unsure (1)..(2457): unsure at all n locations
atttctgaatattaagacatggaaggttgaatttacaggttctttcggattctgttaaaagaagagattatgatgagctgttaaagaaggaagaatctcggaccaagattgtctgtcagtcctcgcacgcctcttctcatcaggttagtagatataatgtgtgagattttgaatgcgtcatgtgttgctctattgttttcttataaaaggtgatgaacagattttctaatttcttcagaatagtgctgcttatcgatcagaagagtcaaggcgcatacactgtacaaaatgcgggaattcacacatttgggtatgtaccaacaggagtaaggcaaaggccagatggtgtcaggttagctaacttacacttctcattaccaaacatattgacttcaagttccttcgcagaacatctaatttgttaaatggttattgcttccattaaaattataggagtgtggtcaatatcatcaagccaaagatggtgacggatgggttgaacacaaagggactctggtattcgagaaagcacataaggtttggctttcagttctttggtccgaattttgctttttggtaatgatgaataattattgtatatatcatctcttgtagattgaaataccacgagcttttgtttgcgctgagggaaaagtctttgatgtctcagaatgggctatttgtcaggttggtatcttctcattcttaaccagtagtaaccaatgctataactctctgttcataattagctagactaatatggctcaaaaatcgaaagtttttttcgcacttagagaatatttaagataacgtctaagacttttgtgttagtgcatgtgaacatgatgatatattgatatgtatacttcaaatccattgaagggaatggcgtgtagaccaaatacacataggccaagcttccatgtgaacatggtcggtttagggaaggcaactcagagatcaaagtcgagcaggttcccgtgggatcttgatgtggagatgatggacgaggatgaggaagagtttgagttatggcttcaacaagctctagcttccggtctattctgtgaaacatcaaaacgcagaaanagctggagtcctttcaagttaaccaagaaacaatcccgaagaacatcgacttgaccaaaagaagacatcaacaaggatggcaagatcaacaacaatggctgaatggcttgttctttccaacaatggaaaatgggcgaagataagaacgaagagcataaaaaggaaacaatctttaaggtgataatgaagaagtaaaggacatgggagcttgaaaccatatgttgattgatcacttgttggatcccttctctgtaaatagaatccgtggatcctgtgtactgtgatgttgttatggtttttctctgagaaaccctaaactatgtaatgtgaaagctacaaagaagaccagttaaccagaaatctaaaggttaagtttattacaagcaaaatttctggagaaacattttagttagatccatgacccaagctcgtggtaatgcttgaaatttgatgttcttatgttttgttgttgcattgttctcatacattaaccaaagcttattaccaaatattttccctcctcgattcaactgtttgtcctcgtctgttaatcgagtattagtgaaactcgacatccattacttcaattgtcgagactagagaggaattttcaattcgctttcggacatttataaagcttctctcttccttgaatttcaacgtttctgggtaagctcgaaaaagagaacagaccccgatttttgattagccggtacgattcgtccggaggaatagaaaactcgccttgtaagtatatcacatctcattcgctttccccccgatattacactgaaattgttacacatttaccagtttagggttctgggattttgaatctgcgcgatttctgttgtttctttccatttgcagattttactttcttcctgtctcataggagcaaagcgttgatgaggtctttcgtactcaaaatagctatatagatattgtttagtagagaggaggaagatagtgaaatgagtaggctatcttttcgaccccgtccactggacatacacaagaagcttccaattttaaagtcttttaaagactttgaagacgaagataatccttcttccattactagaaactctcagttgctacgtatatctgccgtagaggttgttgacaatgaggtgaagttttttttttttttctcggtgtatcggtttggatgtgaagttgtagagtgatgattaaaagtttcttgtattcacattatcaggtgcagcctccagtgcctagtaagaaactgatttcggaaatcccaacacctcagtatcttgttgttgatacatatgaaagagactactctaggacttttaatcagcctgcttcatatttacgcgctagaggaggtaaacctttaat

SEQ ID NO: 4769 - DNA, 6318 bp, Arabidopsis thaliana landsberg
cacataaaatttttataaacagtaacgtgttttcctagtggggacatctaatcgtgattattctttcttttaatgttataacaacttccctaatttgttatttagctgttaatcaatattttaaccccaaggagaagaaatgcttgcaacgtaaatccccacttgtttcaagttgatgagtgtttggcaattgacaattgtgtgtcccttgttctgtaatgacaatccttccttccttcttccatatttggactaggttgttcatcaaaggaaggaaggccccggctacactacgttagaggctctccaaatctgtccttttcatccacaactaaaccaaacccaaattcaaataaccaaactgaactaaaacattccaccgcaaaccaaaccgaaattgagtatcccggaccacggtaactctgaattccaaactatacctagttttgaacacccctagaattatggacatcatgttcaagcaaagcatcaaagtgaggaggacagagtctccaattgaaaacgagtgaacactaaacaatagaatataacgtaaaaggatatggaaaaacagattgatatcacaacaaagtctcattgacccggagaaaatactgagtcgctcaatatcggtcattacatgataacaaagttttctgacccagagatttccaggaacataacagaagagaagagacaagcagtgagaaaagtcgaatcttacacgatacgctccagctctctggcgtagcttagagtctggttgatgagttgcagagacggaatctctttgcacggtgcagtttctttggctttctggaagacaacaaacccttccttcacttcccactcgggatgctcctataagatttgataaaacctaaatcgcgtcaatagttcatgaaactaaaaaagattctaaactttgcacaaaatgttttctcttacatctgtgacataggttaagagttcttgatcagaagagaacaacaacatctgccgggcatcgctgatagagacataatcataagctttctcgctgcatccagctatttcatctctgtgaattcagtcataacaataaaaaggtgagataacacgcgagaagacataagactgaactaattcagagaaggacagactcattgatgctaccttatggtctttgccaagagatccatgaaatagacgtaagttgcatcaggcgcggtctgtctagcactcaacacacggttataggcaccctccatgaaggattgctcaagctctactgcatgcttgatgcaaggatcctctagtgtagctgatgaaagtaattcaagctcggtgtggaattcagcaattctattttgtaccagcagcctcagaaggttaagacccaggataagattctcctgtggagactgaggaatacggttcctggtgcagaggaaaagaagatatgttagaccaaaagaaaatgaaaaagataatgttcagacagttggttctttctttacctggcatccacatagtaaggtttcagctggaagaaatctctctcaaaagcatcttgatcctcggttttgacgcttagaacaacagcatgctcataaatgtcccctagaatacaccaattgtcaaagttttagaaacggataatcaataagaacaaaaattaccaataactcaatccaaaccaatgcagcattcaacgattaatgtatacatatagggatagacagacaaactaaagcagtacaatccctcagacactcttcagtggtatttaagtatagttaacaaataactcatgagaatagacaaatccaaaacactccatgcaattgaaagcaaaactctaaacttactagcaaatagctcatgtaaaaccaataatgaaaaagagaaacttacttgcaatagtcaattccttggctgcattaggtgaattctcgaacaatggaggaagacttgtgaatttggtaagaagaacctgaagaacacaacaaaaccccagcgacatcagagactcgcaccagtaaattgtaaatctaaaccaatcccaacaatcccttaaagtagaaagttaaaaatttcatagcacttacctcttctaaaagatccttaacacacttatatgctaaaaattctcacttcaataaatcaaagctctcatagatttaaactctcgcgacataacccatcaattttcccaaagttggttcaataagcagatatgcaaagaagtgaattgaaacaaattagggttcaaagaagagagagagatgtagaccttaagctgagacaacagatcgctacaggtattgtaatccttcctcgcaaacgccgccttgaatctctcgaactgctgtgaaacttcagttagctgcggatccatcgcttctatggttttttctcttcaccggcgacgattcttttcttatagatttgattgctccgagaactggcttgatcgcgaagacaaataatacagatagaaataattgtctttacaaaacgggcctttaacaggcccaataacctaaaaaggcccatggtgtacaatagaattctgactaatgtgtaccatcatcatctcttatccaaattttactctctcatctcctctttgctttcacaatctcacaacaatggcgtcttcgctgtgtgtatcaaattccacaatttgccctctgcctaatgtatcttcgcagccgctgctatcattctcccactctctcaggccattcatttccaagtcgaaacctatgtgtgcctcgatacagaagagagatggctctcaatttgtggtgaaatctcaggctcttgacttctctggaactttctttgaaggtggattcgggtcggatgatgacccgacttctccttccgggtcgggagtctcaactgcccttgaagacaaaccggaacctcagtgcccacctgggctcaggcagtacgaaacaatggcggttttgagaccagacatgtctgaagatgaacggcttggtcttacccagaaatacgaagaggtaagtaaaagtctccaactttacctgttttctgtttcatgtcagagggaaatttgattatttgagagagaaagagattttaggattcaattagaagttgagtaagagatcactaaaagttgtatcttgtgtctgttcttacacgttaatgacaaagcaagagaaaatggtttcaatgtagagttgtgtaacttgcagctatcaattgaatgtttgtgacgactccttgttaaaattgaagtaaagagtttaactttctaagagcaaatctcatccttctgtgggctgtgaattctttaagtctcaaccatttgaaacaagataggagcccttagtgcacttcttagttttttagtcatgttttaccataacattttaactcaattcttgaaatgtcctttgatgctcgaaacgagctaatacacagttatcatttgtggtttacgcgtgggttcttttacgctatatcacatgtttaatctaatgaggaattctgaaatttatgttcggagtagtggaagtttttagttggtgcagactctgaaagattcattatgttgctgggatttctttttggtgtgtgtggcagttgcttgtggcaggaggtggaatgtatgtggaagtgtttaacagaggagtgattccgttggcttacagcataagaaagaagaacaaagctggagaaaccaacacttacttggatggaatctaccttctcttcacttacttcaccaaacccgaatcaatagttccactcgagaccgttctcactgccgacgatgacattatccgatcatcttccttcaagataaagaagaggaagtacaactgaagaccatgaacattgtgtatgtgagaaaaatgtcagattctttttttgtttctttgtaagaacaaaagtaaatctatcttttttgtatctttttttgtgcattgctctgctttcttatgtaactgtgagaaactcttaaagctaagcttgagaagcatacttgtatgcattttcattaaaagattataactaacactaacttgccatagttactataatgatggaattcatattactctgtttcatagcacaaaatgacaaaatcctcaaggatgcataacaatcaaacaaaatagcaacaaagaacaaatttgtaaagtattcaggcataagtgactttgtttgccagcttttaccttgtgacgatcaaaacttaaatcagtgagattgttaaactcctttgcgtaatgatcaaaaccatcaacatatacaagtgagagaccttgcaaggttagcattctaatggttcacgttcatgctttaacattttatgaaaatcctagcacagtttcaaatcattttcaattttccacaaaatcaaacctgtcacatacatataacataacaaacgggacaaagtatatttgacacacctctatttgcttgtgtaaactattaatgttcttaattaacaaaacacacgggacaacgaatcaatccattctcattacacttgacacacctctcccacctttcacctttggccgccccaaccgccgccgccttacacttccgccgcactcgaaacaaggcaaccacctcgctcctccgcacccttcacacgtgagcctcccttcctcccctactctctccacacgtgcccacctcaacaccctccctaacttcccgttctcattcatcgctgtcacttccgccgctcctcccaagtacctccctttcacaaacactctgggcggcgccaccgatgcttcgtcttggagaagctccttaagctcgctcaagactccggcgtctaaagacacgtccctctcgtccaccacaactccttgctgctccatgatggccctcacacgcatacaatcctcgtaggtgcgacgcactccttgcaacgacgtcgtgtagacaatcaaaccttcccctcctcccggcggacacttctccgggaactccctaagtgggtcccagttcatcaccggcttcttgttcccttctttctccctccgttctctgtctctcttgacgaatatgttctccttcactgaccgaggccccgagtaggacgactgagtggactcggttcgatcatctgactcgggtcttagcttggacatcgactcggttctcttaagcttaaccattgtcgtcgggatttgcgcggcgatgcttcttttggccctcacttcaagctcgtccagtgtgtggaacgatgcgctcttccgcggaagccgccgtggaggagtcgccggaggtttaacagagtccacttccggcggtttaacggcggcaggtttaagtttagtttctagagatttgctgacttcatcccatgttttaggagcgtcatcaccatcatcatcatcatcctcgtcgagacggtcgaagacggtggagcgtggcggtttctcatcatcttcatgttcgaattttagccatggctcttggatggcgttgacatcaaacaccgcgaaactagacggcggtggtttgtaaacgtcggcgacgacgttagcttttgcttgcttggaagatgtacaccccattttaataaatcttcaaattttgttcagctttctttgtatgtgtttttgtgtttactatatgaagaaaacaagaaaatgatgggtagcattttgtgtggactaagagcattctattatctaaatattttttgcatcaatttgtattcttcctataataatgcttagtatacaattgtggatttattcgagtccatgaataattgtgaaacgatcataataagaattagagtgacgaccaccacaaagtgtgcttgtggcttcagtgtaatctacgtggtgagtcaatcatattcttgacaattcaatcttctaattgtcgtctctcctaaatgcaaatatgtcaaactctaccgaagaaagatatgcaaatgtcattatcatttgaagggtcgatacaaaaataatgcatttcataacacaaagagaatatatagcattggaaaaagaggtttcattttgatatacttgaatcttttgagtatcacaatttcaccaaaaccaagtttttctttggcaaattaaatgtcctaatgaattagacaatcatcaattttttaagtaacaaaacatataactattgatggagcatgttacagagtctgatacactttgacttgaagtgtagtatcaatggctaaaacactaatttcaactaaagacatcattcatcgttgaaaaaacacaaaaacctgagcaaagatgaaatttatctgagatgataaaatttacctaagcaggtgatgactgttcc

SEQ ID NO: 4770 - DNA, 2779 bp, Arabidopsis thaliana landsberg
acaaaattggtttacttaacccttgggttccaaccttttttttatttggaggttttcgttaaccaaactgaaaaatacaattgagtccccccgataatggaaaaaagataacaaaatggaattgaaataaaatctaaaaaaattgggaattaaaatatattgattggatttctcttttccttaagaaccaaaacagagagattcaaaccagaggattgattacttcattaagggttcataatgttatctttttaaaacacaaataatggaaccaaaacatatgttaacatattactgtatttccataaaattcaataaaaaaaccaaaatataaactgaaaccaatttgatgttcttaaaaaagttgttacgtatcccttaaaaggtccatttgttacgactataaatactttatatcatcgcatcttctttctttataaaattataaatattagaattttataagagatttgaatattataaatagttcaaaaaatattaatatgagatggtatattagaggtaaaattatagatataataatcaaaatacaattatgaaacttgggtcaatattaatttcttaataagttataaatattataagtatctgaactatgtatgaaaataataaaataatatttaatttcacgggacagggttataaggtgggacatgtttaggttgatattaaaacgagatggtatactacgggtgaaatcttagaattaacaatcaaaatacaatccttatataatttgaaaaactaaacaaaaatattaatattaacaaaacaaatataattttaaatttcgaaaaaacaaaatttataaaaatcatcgcaaggtgtatcatagtatcatacaaaaaaaataatagcatctatctatagatcatcttaaaaacaaaaaactaattttttatttaataaaaatataagcttatgatgcatgtatttcttgaatatgttatttctatataaataatattaattaaaagaaaaatctttaattttctaacaaaaatatcaacatggggtgtaccgaggatccatctatagataattgaagttttaaatctttattacctctaaaaagtcaaaccacaaaccaagaaatactgaattttaaaaataaattaatatacaataaataacagaacagaaaacatgaattaccaagctttacatagataaaaattatgtgtcaagaaaaatattatcatatacaaataataattcttataaaaaatatttataacttttcaatgaacatatccaccagcggtataccgtgggttatctagttctttataaaataataaagaacgagaatttatagaaatcattaaacatccaaataaacgaaatacaatacttagactaatagaaaccataatttatagaaatcataaaacaacatccaaataaacaaaatacaatacttagactaatacaaataaaacaaacgataacatccaaacaaaaaactaacatccaaataaagtcaaattagaaacacaacttaaagaaaatacaaactaaacaacacttaggctaaaagaaaccatacataaactagattaagtggacggtcttggtggtggttttggatctagacattttgacttgcaagagaatcaacaagtttttcaatagcttcaagtcttttctgaatttgcaaattctcttaaaggctcttttgaagatcagtttccatcccttgtacccatacgttatcgtctctacttcttcagaagcttgtggtgcatttgaagaagccccaacagatggtagagtctccattagtgctccaagtccaaatatatggccatgtttagatgatccagcagcctagaatgaaagaccaaatatattaccaaaaaaagaaaacattacaagttatctaaaacgatagtttagattacacatatcacaagaataaatgaatgtaaaaccagagactaacaagtctaaagtgaatgtaaaaccatagactaacaagcctaaagtgaatgtaaaatcagcttaatgtttagaattattaccttgatataaatttcaattttctcatgttcgtcaagagtttcagctctcagattctattccccagcagattcaagttgacccaagcattcttgtacatgcttttcataagtgtatacaaccaaccatgctcgttgattaacgtacgagccatcaggcttttgatgtgttttcttcatcatagcaataaaagagtagtcttcgttgtttgcttcctataaaagaaacaataaaccaaagtgaaatagtagaaaaattatcagaccgaggagagtcctcggctgtccctttgcctcattgaaagcagagctttcaccactactttttgggttatatggcggtatttttttggaatataggaggtcttaatagtcgatctcgtcaacggatagttagtagcttgattgcttccaataatctcctggtaggttgccttttggaaactcatgtggcttcagagaatgatgttgctgttttggcttcaaccttaccaggatggaggatggataataattattgctgttctgagttgggtaggatgtggattgtatgggacccgtcggtttctgttatggtcttcagaagaacagatcagcttatgatgtgctctataaagctgcccaacattaatcagtcttttggtgttacctttgtttatggtcgaaatactgagatggagagaagacatctttgggatgacctgtctaggttatcaaattcgtctcctctctacaat

SEQ ID NO: 4771 - DNA, 2156 bp, Arabidopsis thaliana landsberg
tcggggatagcctcagatcttcctatttacagtatgcaacacttcgtgcagtgcattctctacatggccactctcgctcggacatattcagacaggtaatgttatttattgttttttgcgaatcactaagtggttctttagtgattctgggcatatcctctgagacatgttttgacatggatctagacgtaagaaatgcgttttttttttttttttgttgtttttataaatcattttgatgatcgtttgcgtctatattattaattatctcagccgtgaagtgtgttcaagggttgtgtctctggagaaataactctgtagaggtcaatgatgagcttttcaagggtagttggaggggaaatcctgcggggatgccaaatgagatcgttgcaggtttgttaaaatcttccattaatttatatatccttggtggttacgttattatgccatttatattatgtctgcctttttcgtttcgttagcatatgatctcatgagcacggataggaaaaatttcaatgtgaccatatggtataactcaacctacaatgatgagtttgcaactggtcaggctttaaagctggtccgagttccccgctctattaatctggtaacaaatatatatggtgatcatgtactctcaagacatggttgcatttcgcattcgatttcatatttatctcgtgctgcagatatcaaatgcttatcttaagtttctaaaaggccctgggacaaggatattatttgagtttctcaaagaagttcctaaagaagaaactaaaatgaatcaagacattgcgtccttgcttgggccacttttcttcacttgggttgttcttcttttgttccccgtaagttctcttacacgctagttaatttgcatccccattatattgtacgtttaataaataagaaatcttgcatgcaaatgcaggtaatcttgacatcattggtgtatgagaaccaagaacgtctaagaattataatgaaaatgcacgggctaggcgatggtccatattggatgatttcctatgcctattttctcaccatatctatgttgcatgtcatttctttggtgggcttcgggtctgctataggactcagtatttccggcgcaatgactacagcatccagtttgttttctatttcatctactcaaatctacaaatctccctcgcttttctactctctcgatattctcaaaggttaagactgtaacaggtataccacatttcctgaatatatattccactgctcaagaacatgtcagagttgaaatttgaatggatttctctgttttatggcttaattaatattgtagtcattgcttacatactggtgtacggaaccgggctcttgggtagctttcttttccaaaaaatgattgaaactcagtcattccccggtaatttagtcaacaacttgacaaacaaacaaaaatcaaagatgctcatgtttatttactatacaatgtatgtacgtttgcagaagaatggattcttgccatggagttgtatcccggcttttctctataccgcgggttgtatgagttctcgcaatatgcatcccgaggaaacgggatgaagtggcaagatctcagtgatagcggaatgggtgaagttttctgtatcatgtcagtagagtggtttcttgctctcatagtagcctactatatcgatcaggttttcacatccggaaagcatcctttctttttcttggtgaaccttttcaaaagtccttcttccctaccaaggaggcctactgtgcaaaggttggattctaaaagagtattcatagatatggacaaacatgatgtcactcaagaggtatgggagaagtcaagttttttctttgccattccatttttccatatttcaaagccctcatgaaaataataatcagagggaatcagttcacaaattgaggaatgaaggtagcacagggcatgcgatcttgtgtgacaacttgaaaaaggtttatccaggtagagatggtaacccgccaaaaatggccgtaagagggttgtatctcagtgtgtcttcaggagaatgcttcggcatgcttggacctaccgctgccggcaaaacttccttcatcagtatggtcagtaaagcaaacaaatgttttcagagtgtcaaatttagtaatctactgct

SEQ ID NO: 4772 - DNA, 1399 bp, Arabidopsis thaliana landsberg
aaacatgtccaagagacctacaattacttctcagaagtcaaaaatgcttgaatttaggatcagaccttcaagcgatgctttccaagaggcggcctcagctctccatatgttgtaggtaagactttgctgtcagacgttacactgagaagcacaagcatgtcacctgcagcacaagagattaaattttgttcatatacggacaatgagaagacaagccttggtttaacaaaacttgcaagacatatttcctacatatccaaggaagtctatgaaggaatcccaacaaccatggaattaatgaactcccagtttagcactatccacataaatcaaaatggaacagaccaaatagagcaatagagtcatgggtcagcagaaactgaaaaaataatcacaaaaggtaagcattgcaatgtgctttgattcatatgcatccggcacaaattaagataaaagaaggatcttatcgtttcaagggaagattctatagcactggaaaccaacttaccgagtttaggtagcatggcaccaatagtctcctgggtcactgggacaggagactcaaacatattttgacctctataagaattgaagaaaggcgatgaagcagcagatctcctcggatctaacagagagatacatacagtaagtgaatggactaggccagattttgaatgagaatcttctatagcatgaccaaatatcctagaaacgaagctgcagaaagaagttaacaggttttaccatgtcagactattgtatatatccgcaaaaacctgtgaaactcaaatatgaaagcaaagataacaaacccagggctagagagttttgtagctagagctgaaggtgcatttcgagtaattgcacataatgtttctgctgcgtttgccttaacctcaggaggactctgattcaagtacaaaggttgtagaaaaagactgtaaatggtatcgaaaacattggcaatgataaatcccagttatgttttttcttattcggtagcctctcactgtaccaaattttaaatcattaagatttatccaaaataaagcctcaagtctctttttgttttggaataacctaaaattttactacttacagatggatttaatttgtcgacgatcatttcaagtaaatcgctatcagccaagtatcgcatcacatccggaaaattgggatagacatgatcatcagctccaaccaagcgaaccaaaacctacacaatgtcagtatatcacaataagtttatttgaaacgatgagcgctgaagtcacaccaagctaaataggatctcagaaaccatttacctccatgatggatgttattccaattaaatcaactaactggctaaacacatttccatgcccctgaaattattaaaagctttttctcaaaaatc

SEQ ID NO: 4773 - DNA, 1046 bp, Arabidopsis thaliana landsberg
tctccttcatgctccctatgaagctccccgttatcactttcctccctaatcaaaccatcatcatcatcattcccaattagtaatcctctaaatcacaatcattaagaaagggttaacttttttaataagggactcaccaagcataagcagaggagtgagaaactgtaatggattgttgataactcccatgagaatgagtttaccatcaagcttaagcagagacaaatatggctcaagtgcatgatgaacaggcaccgtgtcaattacgtaatccaacgaatcagccaattcgctcatcttcgcttggtcggatccgatcacgtaatcatcagctccaagatcttgcaatgcctcttctctcttcttgtttgatgagcttatgacagtcacatggtgacccattgctttggctattttcacacccatgtgaccgactccacctaaccctagtatacctcctcttaggcctggttgtttcagaccaaagtggctcagtggactgtacacagtcacaccagcgcacagtagcggcgcagcctgctcaaccgccattccttctggaatcttgaccacaaacctgaacacaagaaattgaccctttagccaaacataccctaccctgttccccaagatacctaaaccaaaacctaaagatccggtttgaagcttgattttctattagataaattcaaattcatatgcatctctttgattttagtataaggatatttatgagtagttagtatatgccaaaatcgttagttgaacaacaccaagattatgtgttgaaattcaatcataaacttggtgggatttttgtatattatgattgaatttcatcacatactttatactaatttttttaaaatcattgatcaaatagcacaaagattattatcactggatttcaagatcaccgcaatcaaataaaacctgtattaattaatttacgaagatcaagataatcataaaagttaagaaagaaaaagagttgtacttttggtgaacgacggtggctttagtgaaacccacttgtgtaggttgac

SEQ ID NO: 4774 - DNA, 1734 bp, Arabidopsis thaliana landsberg
cgaggtactgtccgaaaccaagatccgctacccacaagttcaaaagctgctgtacacggtgatcctaacgcgacggaagctgcgacactactttgagtctcatccggtaactgtggtgtcatccttccccctgggagagatcatccagtgccgagacgctcggtgtaggattgcaaagtgggcggtggagatcatgggcgagacaatctcgttcgctccccggaaagccattaagtcccaggtcttggcggacttcgtggctgaatgggtcgacacccagctaccgacggctccgatccaaccggagctctggaccatgttcttcgacgggtcgctgatgaagacaggggccggcgcaggcatactcttcgtctcacccctcggaaagcatctacgctacgtgctacgcctccacttcccgggtgtccaacaatgtggccgaatatgaggctctggtcaacgggttgcgcatcgccatcgagctagggatccgacgcctcgacgctcgcggtgactcgcaactcgtcatcgaccaagtcatgaagaactcccactgccgcgacccgaagatggaagcctactgcgacgaggttcggcgcctggaagacaagttctacaggctcgagctcaaccacgtcgcccgacgatacaacgagactgtggacgagctagctaagatagcctcggggcgaacaacggttcccccgggacgtcttctcccgagacctacatcaaccctcagtcaagaccgatgacacgcccgagcccgagaagtcctcggcccagcctgaggcaccctcggctcagcccaaggcaccctcggcccccgagggtgaggcactgcgcgttgaggaagagcggagtggggtcacgcctaatcgaaactggcagaccccgtacctgcaatatctccaccgaggagagctacccctcgacagagccgaagctcggcgactggcgcggcccagagtcgttcgtcttgctgggtgatgaaaaggctctctaccaccgcagcccctcaggcatcctccagcgatgcatatccatcaccgaaggtcaggagctattgcaagaaatacactcgggggcttgcggtcatcacacagcacctcgagccctcgttggaaacgccttccgacaagatttctactggccaatcgcggtggccgatgccactaggattgtacgcacctgccaagggtgtcaattctacgcaaggcagacacacctgcccgctcaggcccttcaaacaatacccatcacctggtcgtttgctgtgtggggtctggacctcgttggtcccttgcagaaggacccaggggcttcacgcacctgctggtcgccatcgacaaattctccaagtggattgaggtccgacccttaaccagcatcgggtccaagtaggcggtggcgttctttacaaatatcatccatcgctttgggatcccaaactccatcatcaccgacaatggcacgcaattcactgggaaaaagttcctagacttctgcgaaggccaccacatccgtgtggactgggccgccgtagctcacccaatgacaaatgggcaggtggagcacgccaatggcatgattttgcagggactaaaaccgaggatctacaacgacctcaacaagtttggcaagcagtggataaaagagcttccctcggtggtttggagtctgaggacgacgcagagccgggccacgggattctcgttgtttttcctagtctat

SEQ ID NO: 4775 - DNA, 2995 bp, Arabidopsis thaliana landsberg
  unsure (1)..(2995): unsure at all n locations
tatccgaatggaatagcaatgtagtctaacaatgacatgtttttttttgttttcgacatcttaacaataacaatgacatgtatatatgcacacgtttggtagaaatgtaatgattcacagcttcatagttgctggcaatcaccaagagccagagaagtcatgcattttccgacaaaatagtatgaaaacaaaaccaaacatataaaatagaaggaacataattcacgaatcgaataaaaaccaaaaactctttgcctttccaaaatcgttttctactatcaccgctttgagtattttagactatttaaaatcagaaaatccaattgaaaaatataggtttatttttaacctttccctttagtttatatagcacaaaataaagtttaattgtctacttaaaaaacatcatagagacattttaaactggataatggtacacaaggttaatgaaataaagtatttagtgatggatcactgatcacctaatgatacaattatacaacttataaagtggcagtgacagatatagttgttgggaatgccttttgccaaactatgttatgatttatattgtgattatgactctaaatgaaaacgacatcttaaggcaaacataaaaagtaacaacatacatgtgtgtgtgtgtgtgatgttaaccgttttgctcatatattagtgtgtaggaaatttgtagccaaatcacatttgaaagtacaatttctatctaacatttcgaatctttaaacgcctatttataacacgaataaaagtcatatagttagaatatttgaaagccatagaagtaaacactcgtagcatcgtataatacttttatagatccaaaactatcattgaaagaacattttgacaattttacattcagaaaaaaaattgtaaaaaaaaattgataactgtcggtcaattacttacttaaaaacgatatgatctagggtcaattactttgtagctttatagaagagaaaagtaaatcaaagccatacgatcgagaatctaattatgtcagtcaaagcacaaagatagaccccacgatactacaatacatgcatgatgcatcgtcattattttcgttccttttttatattaaattaaagatgtttcatgctttttgataggttatggtatcatgaaaaacctaatgtgtcatggcttttccaatctctaaagtgttttcagttgctttccttaaaagtattctgagagaatctcttagccatatgcattgcatattcacatcacacccaatcacatgcttcgcctacttcgctgttttttctctttaacaagaatcacacatcgtctcaggcccaacaagagcccataatgaaaagctctgaatcaggcagaaggttttgtaggagttgaaagactgaaacagcgtcgtattaggacgatgagctatcatcatctgccactctttctcagtttctccgtctctcgccggcgatcgattcgccgaaaagccccactacccaggtgcgtctgtctcgacctttccctatatcttgtaattgacacaagatactattaaaagtattcaattttagtgtaatatattagcttgagttcacaaaactttacattttgcttgattaatcaatttcacacgtacaagaatcagtttttattgttttgtgatttgtttttgtgaattgttctcaagtgaattgactgagatactcatcaatactcgtgtacttgacatcagggtaaagcacagaggcttcttcaccgaaccaaggctctattgtgaaactggtctgatctcccttcacaaacaccgcgtggtttatagacttgaaaacatcgatgggaactggagattacgcaaaaagaacatatcttttaattcagcaaatgaaaaaaaaatggtaataaagaatttcaacgacttcttggtgaattgtggtatgttattaatttctaaccttggatgcttttaaggatttgctcttctgatatgtgagtcttctcaagagacttgccgatctttttctcccacaaggtgaccatttcgttcatcgataaaatgttgttaggaggactaatgtagagggttttgttcagagtccttagatcatccaccgccttgatcatgtaagctgcaacatcttcctctttgttgatcacaactgcaaaatcaatttaaaaaacttgttacataagaatctttataaaaaaaaatagattatacgttctgttacattataaaattctcaacctttggcatttccatcgcctaatatggtgactttgtctctaggaggaacattgttgtcgccaaagatgatggccttgtctctagtatgagaaatgagaccagactcgaactgaagtaacgtacgcaagtaaaaaccggcagagcaattgctaacaacgtaagtgtatggtattccttcagcttcaatggctctcctgatctgtaccttccctgcaaataatgattttgccggctcaaccgcactggtcctctcaacgtctatcccaaactcagccggcaagaatctctgcaaagcaaaaactataaatctagtaagaggttatgttcagctggattttttctcataactattttcagttagatcatatgctaatcggattgccatttatatgtattgaggtttgaatcaaataccaaccttgacgttaccagcttctttaatggcggaaatgatcttggtttgatcaaagatttgcttgtgcccgnnnnnnnnnnnnnnnnnnnnnnnntgtttaatggccttaactaagctctcatgatcattcaaatctccctgtccaagttacataactaggttatggttttgagtttgtatgaaacatgttagagagtgagagttcatgcatacgtgtagtattgtgacaccgagatctttgaagctctggatggttttgctcttgacaggatcagagagagatgcttctcggacaagagcgaatgttgtgttaccggctttcgcgctcccttcacgatgaa

SEQ ID NO: 4776 - DNA, 1531 bp, Arabidopsis thaliana landsberg
agagaaaagcaagattctggtgatcggagggactggtcacatcggaaaactcattatagaagcgagcgtgaaagccggacactccacactgggtctcgttagagaagcctcgctctccgatcccaacaagggcaaaaccgtccagaatttcaaagattttggcgtcacattacttcacgtacgcttgatcctttcgttaataagtttcatacaaattcaataaccataaccttagttatgtatatgataacttggtcagggggatttgaacgatcatgagagcttagtgaaggccattaaacaggccgatgtggttatatcaaccgttgggagcatgcaaatcttggatcaaaccaagatcatttcagctattaaagaagccggtaacgtcaaggtcagatcttgatacaaacccttaacatataaaaaatcgaattgcataagaccaaatttgtacatagtttcatgttttgcagagattcttgccgtctgagtttgggatggacgtggacaagtcaagtgcggttgagcctgcgaaatcggcttttgggaggaaactacagacaaggagagacatagaagcggaaggaataccatacacttaccttgttaccaattactttgctggttactacttgcccacattggttcagctggagccaggtctcacttctcctcctagagataaagtcaaaattttcggagatggaaatgtcaaaggttagtttcatatcattaacattactgtgctttttatgcaattgaatctaacacagtcgaatatttcatagctgtgatcaacaaggaggaagatattgctgcttacactatcaaagcggtggatgatccaaagactctgaataaaaccctctacattaatcctcctaacaacactttatcgatgaacgaaatagtcaccttgtgggagaaaaagattggcaagtctgttgagaagatttacatgtcagaggaacaaatctttaaaagcatccaaggttcagaaaatcaattcaccaagaggtctttcgattctttataactacttttttttcattttctagaatatgaagatctctctctttttgcagagtctccggttcccttcaacgttcttctgtcgataaaccacgcggtgtttgtgaaaggagatcagaccaatttcactatagagccttcattcggttttgaagcctctgagctttaccctgatatcaagtacacgagtattgatgagtatctcagttatttcgctttaggaacttcattaaacacctaatttaccaccataacgctagctgctttcatgtttgtatcaataaaaaatgattcttgcaatgtgtgtgactaatcacagtgctttatctctatatgcatccatctttaagccatttttacggtctataaagctgtgtaaaaccacaaaatatctcacaattttacatatggtcaaatgagaaaatttggatttaacgagcataacatgtttatcatgggagtcaacatctatgcaccacatgagatgttgagtgag

SEQ ID NO: 4777 - DNA, 880 bp, Arabidopsis thaliana landsberg
aactttatacactctgtttcattcattcatataagtttttcataaccataacttttagttatatgacttggtcagggagatttgaatgatcacgagagcttagtgaaggctattaaacaggttgatgtggtgatatctaccgttgggagcatgcaaatcttggatcaaaccaagatcatttccgccatcaaagaagccggtaatgtcaaggtcagtatttcatattaccttgattcaaaccccattacatataaacagagtccaatgttttgaatttttttttttctttttttaatgaaagagtagttctagagggatctaattgcatatatatagtttcatattggatatgttatttgcagagattcttgccgtctgagtttggggtggatgtggataggacgagtgcggttgagccagctaaatcggcttttgcagggaagatacagatcaggagaaccatcgaagcggaaggaataccatacacttacgctgttaccggttgctttggtggttactacttgccaacattggttcagttcgagcctggtctcacttctcctcctagagacaaagtcaccattcttggcgatggaaatgccaaaggttagtagtttcaagaatccaaacacttataacgtggcctatacagtttaatctaacaccgtagaatatttcgcagctgtgatcaacaaagaggaagatattgctgcttacacgatcaaggcggtggatgatcctaggactctgaacaaaatcctatacattaagccttctaacaacactttatcgatgaacgaaatagtcaccttgtgggagaaaaagattggcaagtctcttgagaagactcacctcccagaggaacaactacttaaaagca

SEQ ID NO: 4778 - DNA, 609 bp, Arabidopsis thaliana landsberg
tattcctttctctcttctagtttaaagcttcggtttgctatgtaccagtttagtttgcgtatgaccaaacccccttaagctcactaacgatcctgttgggggctaagggctggggacctggggtcaatcgattaagtttatttaaataatggttacgatcatagttataaggttttaaccttccggttaaccagtgattattttagctaattaggattttaataagaattttgatggggaggcacgaacaagaaatgaatatcttagaattgaagtaaggttcagtaagggtattatcgtaaatcaaccaaacaatgtctggtccataaattgcggtgcccaaaccattccttcaagcacattccaaatcattttcttaccactcaaagagtgcgcactcattatcatcgtttgaaactaaacatggcgacggagaaaagcaagattctggtgatcggaggaactggttacatcggaaaattcctagtagaagcgagcgccaaagctggccactccacattcgctctcgttagagaagcaactctatccgatcctgtcaagggcaaaaccgtccagagcttcaaagatctcggcgtcacaatactacac

SEQ ID NO: 4779 - DNA, 1637 bp, Arabidopsis thaliana landsberg
tttatttaaatttctttacatcgaattttaatgttaatttttttttgggtccaaaaccattaattggagtaataaatatattaaaagtttagagggcaaatcgggaaagaagataattaagttgttttccttttcctacttggaaaagcaaagtaaaacctaaaaaaaaagaaagaccgtaagtagttacaagggtggaagtataaaagagcagtcttttcttcttctttcaaccccacggcgcagatcctacgagtttggtctttgtctctatcttttcaatctttctctctcaatcgctcttcaatttgataacagcaaaggtttgtttgaatctctcttctttttgtatgatttgtattttggatccccattgtgcttgcttttatagaagttataggttttgatattgtttgattcatgtttgcttcatcctaatacaatgctgattcgtaaaggatcggtttttgtacaaggatgatttagatgttctattactgcgacttggttatgttttggttacattaattgaatccttaggattatgcagttgactttacgaagatgaatgcttgatttgcttctgctctttctatctctcttggtgcttctatgtttttatcaccttttacgtgtttgttatgtgatctaagagacaacgagttcgattataaattgtaatctgttttttttttctaatgtcgatttcatatttttgttatgcttgtccagtcatggcaggaatggcatctgatggaactcaatatgatcctcgtcagtttgatactaagatgaatgccatgtgagttaaattttagtatcttaatatctgaatccctttataacaaccaagaactgacttgtgtaatactttctagtctcggcgaggaaggagaggaaacattctacactaactatgacgaagtttgcgacagctttgatgcaatggaattgcaaccagatcttctcaggggtatttatgcttacggtaagtgaagtatttcctttgagaacacattctatacataccttcattgtttctgtctagttttgtattttcttttgtttgtttcaaagcttagtactgttactcttaaacaacctcatattggttttgttatttatcattaggtttcgagaagccttctgctattcagcaaagaggaattattccattctgcaagggtcttgatgtgatccagcaagctcaatctggaactggaaagaccgctaccttttgctctggtgttttacagcagctcgatattagtttggttcaatgccaagctcttgttttggcacctacccgagaacttgcccagcaaattgaaaaggttatgagggcacttggtgactaccttggcgtcaaggctcaggcttgtgttggtggaacaagtgttcgtgaggatcaacgtgttcttcagtctggtgttcatgttgttgttggaacccctggtcgtgtctttgacttgttacgcagacaatccctccgtgctgatgcaatcaaaatgtttgttcttgatgaagctgatgaaatgctctctcgtggattcaaggatcaggtttaatcttgtttaatctcccattcacattttctttttctctctgataaaatcaagtcatttgttcttataatt

SEQ ID NO: 4780 - DNA, 2480 bp, Arabidopsis thaliana landsberg
tgtattagatgttttttttattgttgtctacctctaactctactctcccccggagttctcatcaacaataagacttaacagagttaagaaaagaaaagaagaaagaaagactaatcagatgttaatgaatgtgcttagctgctaacaatttatcttctctcaaccagactattttcttccataaacacgaagtcaaagcacagctccgggaacaaaattaacagggtaaacaaagtgagtggaagtcggagtgagagactataagtttccttattacccgtgaggccgtgaagaagcattcgtgtgagcagatgcttcaaaataagctttttcagcatcatccaatctgtcctgaaacattgtccactctctcctgcatctttctctcacctgaaaacgcgaataaaaaataaacgtcagatagagtagcatatacgacgggatcctattctataaccaataataccaaggacgaaaaagactaggggattcgtatttaccccttcccatggttgtttcccttgctctggttgtccctgtcaagatttcagatgcacaaagaataaaagggaaggttaacaatcctgttctatgcgtttacatctcacgataatgtagtaaactaagtagaaccaaaacggatacggggacgggaaacatgggaacgtcaataactagatgtttctactgtataaatgggaatgtgtcacaccgcattaaaaatgatatcaaagtatgactatataattaacacaactactctctctagagacttgaaggggactagttttcctatgatatatagtcattggagttctgttatataatttccaaaggcagtccacaaaatgcaaaatcttagttttgtcacccacacaataaagataaaaatggatttgaaagcatacttgattccctagtgatggaacaccttgatgtataatccattgagcatctacaactccaattttctcgtgtgcgttctgttaaagcaagtatgattaatgaggatataaaacaagtttgtagaatttgtgagagagtgatctagatgtgcatatggtctgtacaaagcaagtaagtagcagacctgaacacatttccgaacggcaaagtccagaccccatccatgaatcaaatcgttctgcggttacaaggtaaaaattggaaattgctgaagacagtagaagaatagaaatttggttccattacatacctgaatcatatgccacacacagcgccatgccttgcgggagaaaacaggagccataatctccacaaacctgattttggttttagtagcaaaatcaacaaaatgatgaaactataaactttctatgcaaatcctttttgctaagttcatttatacccattcctctcctcgatattgaataattggattttgctgaaaaagaaagcatttaaacatctcttctcttcgagtcgttagaattcgatctgatttcttttgagtttcaccagtattctcttcttcggtatccttcgcctcatctcatctacctagagttgtcaaaatggggggactgctcgtttccaatgcttaatggataggtatggacaagcccattatgaagcgggcattaatggtcatggtcgttaacggacatgggctttagcggactggacgtgatggacatgggcggtccaatagtcataaaatattaggttaagtgatttggggcaaaatagaaaaacatcaattcgtcaaatatttctgtcttagtttcttcggcgattacttccgcgatttccttcctacggcgacttctttctccgacgaatctcggctcctgtttaatctaggttcgaatctcggctccatatctttaatcgtttttttttgggacttcatcttcttcgttaatgcaaaaatcaatcagcagctggaaatattgattcgagatccttatctctaaaagggacttaaagaagattcaaactctggtttatatgaatatttcatccacatttaaccacgatactaagctaatatatttgtaaagtttaaaactagattgtgtatgtattcttaaaaaccatgagttaagtttcaactataattaaaggatccgttaactcggatatgtgattttgctaaaatttaaataaacgaaaatttaaaagacataaaaattcatacatatattgttctagaaaatttaatattacatatattaaaaagaaaaataaaaaataaatgaggtttttcggattatttccccgcaaaaataatattttaaaaaataaaagtcgaagactcgaagtcaacaaattaacatggcaaacaaaacctgaacgggaccatcgatattagtgtttaaattaaacaaagactaaagacgtgcccactaggtagcgttactaatgtttatttgtcatctatattattactaatattaatgtatatgataatctaacaagtagcattgctataattagagtatatatagagaaataac

SEQ ID NO: 4781 - DNA, 1036 bp, Arabidopsis thaliana landsberg
  unsure (1)..(1036): unsure at all n locations
ccctaccagagcagcatcattgtttgcagctaaaagcagtgtgtctcaaattcgtggcactgccagagaacctgaaaggtaaacacacaagatctttctttttaatcgatctgaatcaagtctgttcacatgatgagacttgtgtctgttttttcccttttgttatgatcagctgtgatgcaaacagatgggtttgattatctgaaagagagttgcccatctttactaacggagctattgcagtatgtggcgaggctaagtgaacactctgttatagtatctggacatcgaaaagaaatatttgccgatggttgtgacgcgagtggaagacgagtgaagccccggttgcactgaatgggagagaaagaagaaagatttgtgcattgtataatctctgttatggataatggctgatctaatcggatctagcaagtacaatgaatcgttttcaacgcgttttctcataaatcaaagatccaatgaaatttggggtttattgttggtgcatatcagattattaggtgaaacagattgagttcatgggatataagaatcgtagacagtgtaagtgttacaacgtagataaacaaaggttgttttaagaatacaaaactatgaagacaaattacatgacaggatctgtaagaacttcttttatcttctcacgcttccttctctcatttcgctcttaagcatgtcttcacgtttcggctcttgataacacaatggatgactcaaagggatactctttnnnnnnnnnnnnnnnnnnnnnnnnnnnnnnnntaaaactagaaccataacatcatgtttaataccagcgactcattgcagtatcttgtgctgcagacactttttgtggtatatactgagtgtttggcttcaatctacttggaccttcagcagcggtggcgcaatcttcatctcctctgttgcttttgcaaggttgagtcctctttgggtattgagacgcagcagctggatttctgaccatccttctctgttgttgttcaagagcttcaancgcctgtgctgcgcc

SEQ ID NO: 4782 - DNA, 1439 bp, Arabidopsis thaliana landsberg
ccccgtgacacaatggatgactcagagggtttctctttttagctctccccctacttgaggtggtaaagctaaaactagaactgtaacattttgttgaataccagcgactcatcgcagtatcttgtgctgcagacactttttgtggtatatactgagtgtttggcttcaatctacttggaccttcagcagcggtggcgcaatcttcatctcctctgttgcttttgcaaggttgagtcctctttgggtattgagacgcagcagctggatttctgaccatccttctctgttgttgttcaagagcttcaacgcctgtggctgcgccgcagttgttatagcgtaacactgatccaactactttaccaggcctagctactgcagcacctgcttcattacaaccagataaatgttcaggagacagagttattctgcatcataacattatatacagagagggtgagagaccttggattgtttgagggacgttgataggaattctcgacattggcatctgggcattcctgtctgcaccccgaggtctctcgtctctaatgctacacttggagagtccatcagtgacttcagctgaactctgttgtgccaccggatgattgttatcagagtacaatacgcaagccctgcaaaacataaaaagaggctttgttgagctgtttcgaaagaatcccaaatgatcaaatttttaaaggacgtaaagcataccttggtaatgatgcatgctgttgcctctcagggggattatgagaagtaccattcttgtagtgttcctcgaggtaagcaaattgtttcttgaaatgttccaccgcactgcagaatgaataatacattaaccataagaacatggataatacacaggagtataatatgaagcaggtcagctcaggccggtacctcgggtacataaagttagttggctctgatccatccaagtattctttcagcatctttgggtggtactccagagactctctgtatatgagctctcggacgtcttcttttgtgatcctccgcctttcaaactcaaattccaactttgtgacaggttgagcagaaggctctctttcaaccttagctaaacccttgaagtacacatccgcaagcgcctgaggtaacacataaaaccatttagttagctataaccaaagttacatcataaggagtgtaaagaacgaaatgtatgaaccacctcttcagctgtaggccggtccttgggttcaaaagacaacatcttttctagaagacgaagagcaagaggatcagtatgtgggaacttatgtgaaaaaggaataggcttcttcttcctcatgctgctcaagtatcttcgagctttctcgttcctaacctgtttcagtgtaagaaattcagccaaaaaaagaaacaatgcttaagcattgtggaaaggaacacatacccttccaatggct

SEQ ID NO: 4783 - DNA, 926 bp, Arabidopsis thaliana landsberg
gaggtagatttcttcacggaatatggtgaaggaagcattttctgaatagaggaagtgattggtaaaggaagtgatggagttgtctgttctgcttacgatacacataccggagagaaagttgcgattaagaaaatcaatgatatctttgagcatgttttcggatgcaactcgcattcttcgtgagatcaaacttcttagactcttacgccatcctgacattgttgagatcaaacacatcttgttgccgccttcaagaagagagtttcgagacatttacgtggttttcgagcttatggaatctgatttgcatcaggttattaaggcaaatgatgatttgactcctgagcattatcagtttttcctctatcagcttcttcgtggcctcaagtatatacacacaggttaagctagcgagcaataaaatttcattgattagtataagtttatgattatctttctgaaaatactttttttttctcttcctttcagctaatgtctttcatcgggatcttaaacccaaaaacatattggcaaatgctgattgcaaactcaagatctgtgattttggacttgcaagagtcgcattcaatgatacaccgactgcgatattctggactgtgagtagtagtaatttaaatgcttactctttacaagtttactctttttggtatgaaaccaattttttattcctactgctttctgatcgcaggattatgtagctactcgatggtacagggctccagaactatgtggatcttttttctcaaaggtgaccatgattttgtatatatactttcatcgaatgtttcaaattttcatagggaatctagtcagtagacactatagctctctcattcagattataaaattttatggtaacgttttttttctttatctatgcttctgttcagtatacaccggcaata

SEQ ID NO: 4784 - DNA, 510 bp, Arabidopsis thaliana landsberg
atcataagtttctttttttctatattctctgatgcattaagtgttgtgatcaaatggttttcgcttctttgcaggactatgttgctacaagatggtaccgtgcgccagaactttgtggctctttcttctccaaagtaaaatgcaattctctattttcttttttgcaaaagttgtctgattcacatattatgacaccacaacctgaggttaaaacggattattgctttctttgctgcagtatactcctgccattgatatatggagcataggatgcatatttgcagaaatgctcactgggaagccattgtttcctgggaagaatgtggtgcaccaattggatattatgactgatttgcttggtactcctcctcccgaagctattgcaagggttagttggtagagttatctatttctgtttgctaaaacttgcatgctagaatttctgtgatgtcttatgacttatgaattaaaagttttataaaccatgactatttgcttactagtactttc

SEQ ID NO: 4785 - DNA, 3284 bp, Arabidopsis thaliana landsberg
agatttagactgcttaatgcccatagtcataatagctttgtcatgtttcttcttcctctcggtatgctttaaagcagctcagcaagtggcatattactcacagtctctccactaccaagaccgaaatcaccttgaatcagaatcgtctctgtctgttgttcatacatgtaacgcaaagcatctccagcactgatggatttgtgcgattcaatcgttctcacaagcaagtttggatgcgaatcccactcggatttctccacatattggattccctgcatcgaatgagcacaacagaagacgaaaacctcctctattccagcagattcgagccatgccaatgtgtaatcaatcatcggatcattaactatcggtaacagtacctttgggcgttctagggttacgggacgaaatttcgtggcgaaactgtcggcaagaagaattgcttgcaatcggtggcgactctgtacctccgcatcctctgaaacccgtatcggcgcgccgcctttcttctgagcacccatatctcctcctctctcactgatcaaattcgatctcacgggaaaatctaaaaccctgagtataaactgaagttaatttatgacgaattgagaaaagaggattaaatgtacatcttttaaaaatctgaaggactaatatgacaatttatcattttacagccccctaagagtaaaaaagcactgaattatgtatgttatcatcatgaattttcatggttgaagtactaaacgaaacggtaagaagacgccaataaagacaatgagagttatgaaggtgacgtagcaaatctaacaagtggggaggtttatgaatggacagtacacaaagttgaggaaagtcagggaagctgcaaaaatacaaaaaaactgtctgaaacttctactagtcaaacaatggaacaaaattagatggtgtctctttagctcttcttcattaacaaatctttgaagcagagagaatggaaggtgaagagagaggatactggagatggagcaagagagatttctttcctgaggaatctttccagagctttggtagttacagagctgctctgtctcagacatgttccaggttcaagaacaggttggttagtaggtctgatgatgagaacgagcggtttgagctcaagaaacagagtgagcacgagatgaaacggtgtttgacatggtgggatttagtatggtttggattcgggtcggtgattggagctggaatctttgtcttgacaggtcaagaagctcatgagcaagcaggaccagctattgtcttgtcttatgttgtttcaggtctttctgctatgctctctgtcttctgctacacggaattcgctgtggaaatccctgtggctggtggttctttcgcctatctacggattgagcttggggattttgcggcgttcatcactgcagggaatatacttcttgagagtattgttggaactgcagctgttgctagagcctggacttcatattttgcaactcttctgaatcgtagcccgaacgctctacggatcaaaacagatctcagttccggttttaatctcttggacccaatagctgttgttgttatagccgcttcagctacaattgcatcgatcagcacaagaaagacttcattgctcaactggatagcttctgctatcaacactttagtgatattttttgttataatcgctggttttatccacgccgacacatcaaatttgactccattcttgccttttggacctgagggagtgttccgagcagctgcagttgtgtactttgcatatggaggatttgatagcatagcaacaatggctgaagaaaccaagaatccatcaagagacataccaatcgggttactcggttcaatgtcgataataacagtgatatactgcttgatggcattatccttgagtatgatgcagaagtatacagatatagatccaaatgcagcttactcagtagcgtttcagagcgttggaatgaaatggggaaagtacttggtggcacttggtgctctcaaagggatgaccacagttcttttagtaggagcattgggacaagcgagatacgttactcacatcgcacggacccacatgattccgcctatatttgcccttgtccatcccaaaacaggaacaccgataaacgctaacctcctagtagcaattccaagtgctctcattgctttcttttctggtttagatgttttggcaagcctcttatcgataagtactctcttcatcttcacaatgatgcctatcgcactactcgtgaggagatactacgtgagacaagatactccaagagttcatctcattaagctcatcacttgtctcttattcgtcgttgtttcttcaatgggtacttcggcgtattggggaatgcagcgcaagggatcatggatcggttacacagtaacagttcctttctggttcttgggaactttggggatcgtattctttgttcctcagcaacgaacaccgaaagtgtggggcgtaccgttagtgccatggctcccgtgcttatcaatagcaacaaacatctttctcatgggatctttgggagcaatggcttttgtaaggtttggtgtttgcactttagccatgttactatactatttcctgcttggtcttcatgcaacattcgatatggctcatcagcaaattgtgccaagaacataacaactatggaaaacagagaagaaatgtaacctctgaaaaggtctcttccttccaccctagtgttattctgctttcttcatgaactgcttcgttctgtattctctgtaatctgcaaaaagtaaagtttgtatatataagaaaagtctttttcacaaggactctttatcaaaacatgaaatagagttaagtacactgaatccaaactatgttgcaaaattgttctctcaggctccattctcgtcatttagagttcaaatcaaccagttttgaaatcctctgcaacctaaattgacttcatccagttatctcaaatctgttactaaattagttacattgatcaaaatgtacaacgcaagtggcattaagatagcaacagcatcacagcattcagaaacataagaagacaaagacttaccagtacgttgacgatgaactctaaagaatgaactaatccacgtcattggtccaaatataggtcaaaactcaagggaatattagcgtttagggtcagaaaaaacaaattgaacttgaaggatcagaggaggacgaacactgagcagagagatggtacttgtattcatatgtttgaaaggatatt

SEQ ID NO: 4786 - DNA, 1257 bp, Arabidopsis thaliana landsberg
  unsure (1)..(1257): unsure at all n locations
actttcccacgcaacagacgtaaaacccacaaaagaaattcttatcccaagttttttaactctgttttttttgtttctggggaaaaacaatgtggttgattcataaaggagccaacttggctctgtttctagcgttgactgtgttggtcaacggagttttcgggagattcatcgttgataagagtagcgtgacgattctaaaccctatggcaatgcggtctaagcacgatgcagccattgctaacttcggtgttnnnnnnnnnnnnnnnnnnntgatcggttccgtcgtttacgccggtcaaggagcttatggatgtgactcttttgacaaaactttcaaacccaaattccctcgtcctaccattttgatcatcgatcgtggaggtaactgtttcattcaaattgttccaaattgcaagtttttggttagaaatagaaagttttgtcatttacatgaaagttttgttgtatattatctcaaaagctttctcttttatgtcttagttttacatctttcatccaaattcttctgcaagttagataatcaaccaaatttatggttaagagatagaaagttttgtcatttacataggagacttgtcttaacctttaaagctctctcttttaagtcttactttacatctttcaatctccttttgatctaaatattactgcaaatttggtaatgttccaactttctggtataccatgcttgtctcaatcttaatttagtttgtagaagaacttaaaagttttctctttttaagttaattgagattgagacctttcaatttgatatatgttccatattatgtagaaagttctgttatttacatatgttgcataaatggtaaatatctggttttgattcattgttttgtttggcattagagtgttactttgcattaaaggtatggaacggtcaacaatccggtgtagcagcagttttagtagctgataacgtcgatgagccattgataacaatggattcacctgaggaatccaaagaagctgatgactttatagagaaactcaacattccatcggctttaatagacttttctttcgccaatactctcaagcaagctcttaagaaaggtgaggaagtagtcctgaagatagactggagtgagtcattacctcatccggatgagagagttgagtatgagctatggactaacacgaacgatgagtgtggtgcacggtgtgatgagcagatgaatttcgtaaaaaacttcaaaggacatgcgcagattc

SEQ ID NO: 4787 - DNA, 302 bp, Arabidopsis thaliana landsberg
actctgtccgtcatctctttctctcccgtttactttacgctcacatctctttttctccacaaggacaaaaaacgaggcattcatttttctctcaaactctgtttaagaaaaattgaaaaaaatcattactttccgatttgctttctcactttctcacgcaacaaacgtaaaacccacaaaagaaattcgaagcccaagttttcaaactctgttttttttgtttctgatcaaaaacaatgtctttgattcataaaggagccaacttggctctgtttctagcgttgactgtgttggtcaacgga

SEQ ID NO: 4788 - DNA, 5120 bp, Arabidopsis thaliana landsberg
  unsure (1)..(5120): unsure at all n locations
aaagagaattacatggtaagagaaagcttttccgaggcaatgatttcgctttttccatagcgagaatggcagtggctcatatatgcgagagtgttgaggttaacccgtatcaggaatcacacacacgtgagggtgtgaggtttagttcttttcaagaatctgctcttgatacactaactgatgttgcggttcagtatattcactagcattgggaagactgctcatttgtatgctaacttagccggtcgagtagatggtaattctctggacattcttcaagcattagaggatttgggatctggtttgggttttgctggtgtttctgatactgaccattgtcttgctgattccggtgtagccaaggatatcattcgttatactggagaagcagaggagataccgtttgtttactctcttcctcgtttcccatttagtaaagagaaaaaacctgctcctagtttctctgaggttggagcagaacctccagatgaacacattcctgtttggcttcctgcatttcccgaaaccgaattgtgtgatcgatcagaggaaactaatgcagccacaatcgaaggagaaattcctagtaaagaaaatggttcatctttaccgagtatgcaactttctttcgatggtggtggtaggttagaaatacataaatcttcaaaggatgttggagaatcaacagaagcagtagtcgaaggtaacctgtttctaactgcgcctcttcgatttgtggagaaaaatgtgtcacctgtggtccgccctttggagctttcaaatgaagttgttaggaccaaccacgttcctgataagcatgtgaggaacaaccatcacatcccaattcttgaggcatctgctccatcggataaaatcaacaacaagaactggttagctatatcaaaggatgtagagaaggtagatgttgcaagaaaagaactaactttggtacgtttcaagatagggactacaaaaagatctatgtgtttggcaaaaagtcggagcttccaggaagagggttggtttcaagaaggtgaagacaagagggagaagacgtcagaaatcaaagaaaagcgtgaaagaattgactcgcaattgtcaactcagatgtaaaataggtattatgtcattttagaatttgcagacaaaatagctttgcatcctgagtttagtgatcgtttgcaactggaatacgttactttttagggtaagaaatgtttactaattcaaaacgatggagaaatagatggttgtttggcatttaacttgatttgcagtgaaatattagtttgacagaccaataaatatgctctttgcactttttggtattatctatgaacttaaatactgttatttattaattagacctgtatatatatgctggttacaacaaacaagtgggaagagaacagaacaggcaagagggctgaaaacccagagactaaaggttctcttcctctctaagataacttcatttacaaatctaagtgataactgataaccttaaaaaaattagcagaagcaaacttcattaaccaagtctctgaaaatcattctctcaatatctaacacaattcctggagtctctccttcaaactccttcaagttcatgctttgactttgcaggtcctcccatatgatgtcttcctcgtcgtcctccaagatacagtttgagttgttttgttgtaacctatcaatctctgaacacagagtctgcagaagttgctcctcttttgatattttctccaattttttaagtggatttgcgattaaacgtggtttgatgcagccttctgcagtgaacttccgagctaaaatctcgttaacggtgtcgaagacgagttttctcctgattgtctctgttgggtttgtctgctgttgtctgaatcctctatctctgtgtttgttgtccggtagagtcacattactggccttgttctgttccaggataaagaacagtccagggttgatcgggaggcgcgtttggtgcagctgaaagcttatcatgctgtattcaagatctcttagaatccctgaggccaacaatatctctaagatgtacttgtggttgccgcttttgaagtctgcaccttcttcaggtgagcattcaaaatgatcagaacttggcttcattggtccccggttactctgaggaaatggtacggatctgcagaagctggtaggcttggggatccactcagattcttcagaacgtaaggcatcctcctctgtggcaagagaacaaaaacacggtgagaactttatactaaccaaaaccttgtgaatacatgtagttaataagcatcgtgaacacgtaattgttagtatatatgaatgagtcactaatcagtctgaatgttcttttctaagtgcctcacctttaaaactaagggatatcttcctcacaggggacggtgaatcctcttcgtcgaagactgcatcaagaactgaaacagggctcggttgttcaacggtaactttcagaggttttagggacggtctgtcttgtttgattccaaagtctggactctacattggtagacagaagagattcagtttattgagtactaatgaattaacttgagaagtgaagatacgtgagatagagatctatttagtaccctttgtttgggggtgtgctgctctgggaagtcacagttcctctccagcctatgtctgcttgtaacctcgatgtcaacattcgatcccaagcttatgttgctgtcagaccttagactcctcaagtcgctgcttgcatcgcttaatcggtcatcaggttgctgaagagtactgtgaggttttatcatctgttttcttctcggagaggctacctctgtttgctgccttccgagttgccttttgcctggctctgattttggagttgtgggtcgagtctgtttctcgaacccgagcttttttggctgtgttcttgggctgacactgtgctgttggctcctacctgacttggtcatggaaccagcatctgcagccaaagcttgcctcgaccgtactgtttttgggctattgctcttcgtggaatcgagttggcccttgtaaaggcctggccttggggttaaatccattgcgttctgcttccctgaggtgactttccgggtttgtctagagtttccaaccttgacatttggtagggtgacattctgtggcagcggagaggtggaaactggagctgcagatttcataacaacgatcgatgaagatttgaagttcctggctggacttgttgcagctgaaactggcttgtgagttctctgcataagagtggttgtactcagagtaccgtcgtccctgctttcatctatcagctgctgcgttttctccatagcctcaagtatttgcttaagagctctgagatcttttcccgactttttgaactccaactgcgtaagccgcttctgaatttcaccatataccgtcagtgcagagtctcctgctttcatttgcttccatggagctggttccattggaaacttagaagcagctgaagcaggtatcctcttgatcgaatctacgcttctagatctctgtagagctgttggttccactcgggacattggccttggagagtcacaaaaccggttctctcttctctgttcagtatcagaattgtctgcaatgacttcaagacccatcaatttggcaacaacactagaactcgatctcctgtgagtcattgttgcgggttcctctggacaactcgatctcgcagcatctgctctcggactcctaaaggaattggatctactatccaacgacaacctcggtgtctctttcaactttgaacccaccctgaatccgttgtttctcatctccctctcatcataagaaagccggtgactttccttaaacttcatagccgctcctcttccttcattccactcattagaactccgacatggtgaacgcaatgatgattctttgagaagcaacatgctacttcgagctgaaatgggctgctgctgctgagtgaaggatgcttcttcacctctagttctaatttctctattaatagagcctttgacaagctcctttagatcatacggcatcatcaagccaccattgggctgttctctgatcagattctcaccaggctggtcaaattgagaagctgtggtactgacttctgcagacgagaagctagaggagcgtggagaagacgaaaatgaaggtcttgaagatgattcaaaagagactctatgcttctcttttgctgcagacttcttctttttggtactactcctctcctgcaatcccataaaagtctctgtttctttcagtttgtgtttcctgaattctcattctttagagacgagtaaataaactgagttcagattcttaccgtttctttatcactttccatgttggtttcaccgacgctacctcttctttcccctgcaaaagttcaccccttgttcttagctataagcctataaccatatttttggttctagtgaaactactctgtttctttgtggtcctaaacactcaactgagatttagtaagagagagagagtttaagttacctggaggcaaagacttctctgcgccgccggagacggtgactggtgtcgcgggacaatnnnnnnnnnnnnnnnnntgaaagatcccattcatgcatccaaactgtttattcagatttggattctcatctgacaagttatatagaagttttgcagacatatcttcttcctctacttaactcttatctcaaaaacaagataactaaaaaaactttcacaaactcaagtttctcttcatatatatactctgttttttggagttaccagtttcttcgtctttttactctgctcaggggttaaagatgtttttcttgtgtttcagaggaagaagaaaagaagaaatggacaagaagaagccaacattaacgacaaattatagcttcttgtgaagttacgagcagacaacagattaggttcctccgtgtttggcttggaggctaccttgaagaagaaagaagagaagggcgaaaaaaaaaagtttttcttttgtttttggtctttgagagagagaggtttctatctttaaaggcaaagatacaactgtcaaaggaggctttgaagtttgaagcatatataatgta

SEQ ID NO: 4789 - DNA, 495 bp, Arabidopsis thaliana landsberg
aagcaagtgagtcaagaaaatttctttaactttatgcatagagagtgtagggagcaagagtgggactatgttatctctaaacatcacaactcgttggaattctagatatgaaatgctagttagagctttgaagttgagaaaagcatttgctagtttgaatttgtatgaaagaggttcagttttttacctatagaaaaagagtgagatcgtggagagaaaattgtgacctcttgaagccttttaataccatcactatatacttttcaggagtgaaatatcctacgcactacaagaaaaaggttaattccaaccgacatattacttggtaatacgtaagaattatatgtctacaatattgctttcaatatcacgtatattggatggaatatgatcgttggaaatttgcattcgtcgcaaatttattggaaacgtttatatcgagtgaatgatatggccaattcgatggatacttctgataatttatttgctggacat

SEQ ID NO: 4790 - DNA, 483 bp, Arabidopsis thaliana landsberg
  unsure (1)..(483): unsure at all n locations
taatataccatcatcattcaaatatatgtttcttatatggtaatatatagcttgctcagcttgggtcttagactaattaactaagacagtctttaacttgttaaagatgctacagtctaacctatctgaactccagcgtggttctccatcaagcatacatcacaaaccatgaaggaataataatacagagcttcagctcagtccaacctcgttttcaaagaaaacattagaacttgtccctatttactcaataattaaatgtctcgaaaacacaagaatcaaaaaataactaaccgttcaaaacagaatccaaccgtttaatttttagctactagtatcatcggtaactccacaaaggttcaaccatgcatatcggacaacatttcgacgtccaaacatcaccttgaattacccatctcggaacagcttcttaaagtttgacatattcttcagttacttagcctgaacgcaacangcataact

SEQ ID NO: 4791 - DNA, 1023 bp, Arabidopsis thaliana landsberg
aaccctccaagagaacatacacagagaaacctaattgcttgtctgctcataactttacattttgctttacctttgtcttaatgctgggttcttctttgtcctcctgtctcttattcttcttcttctactatcttcctctgagacacaaaacagaggagataacagagtggagattttcaagaattggtaatgagaagaatcttaaagttccaaagtttttcagagtcaacaaccttctgaggccagagttaagaagacaagaaagtagaagaagaagatgtcggcgaagcttttgtataacttgtcggatgagaatccaaatctgaataaacagattggatgtatgaatgggatctttcaggtgttttaccggcaacattatccaccgagacgtgtcaccggagatgagctcaagtctcttccttcaggtaacactctctctctcttttctctttcttagcttgctatgtcctctccatcaaaacctgaagaaaaattatacgtttgagaggaaaaagttcttcaacataagacattgtttttgtattctagttcctgactaagatcctaaaaacaaggttcaggaccactaaagatgcaagaaaccaaagctctataacatgtcttgtctttagaattctctatacttatctataggtgtattatctaacaaaactacgtatttgttaaaagttgaaatttggtggggaaatttttgcaggcaaagcaagtgacaatgtcggtgataccaacatttcagcggacaagaaggaaacggtaagaatctgtcgccagtagagaaatagtattttccatgaaggaaaatgaatattaatagtgaaatttactggaattgcaggagaagagtaagaagaagaagactgcaaaggagaaacagaggggagtatcctctgaatcgtcctcgaggttgtcgatttcttcatccccatgctcctcgagaaaaaaatctgaagatattagcgccacggcttctcagtttgaacagcccggtttgagtgatgg

SEQ ID NO: 4792 - DNA, 1011 bp, Arabidopsis thaliana landsberg
tgtgagccactgccattctcgctatggaaaaagcgaaattatagttttggaaaagctttctcttaccatgtaggtcggtttgctgacttccaccttccccaactccattgttcatattcaaaaactttgttacaacttcacccaacataacatgtagaaccatctcttgagtgaaaaaccaacacaacacgcatccctctcagaacacaaaagaaaagccaatatctttccctcgaaagtcttctcttaggcacctaagaacaaataagagagaataaaacatcagaatcaattttatactaaacccaaaagtgactaaaaaacgaagaattgaacttaatgaaagatcaattttgttccggtcactaagaatagacgtttcgggttcaatttaaagcagtagaaagcaacaaagcaaactcgagagcgagagttaacgaatccaattaagagaagtaaaatgctttaccggagaaaaagctttatccactgaaaattcaccggggaagaagaacagacacaacttgtgcagctatcggcggcgaacacagtgagagaaaatgctagcgaagaagtgaaattgaaagcaccaagaaacgaaattgaggaaatttcgtatgcgaatcaaaaacccagctccaagtttaaaactttcgatccaatttgagaaggcgaagaaaaagaagggtgggagattttccaagtttgagattttcgttaactttatagagaggaactactgagtttttttaaagaaaattaaaggcaattactatttttttcatttttaaggaaattaaattaatctttattataaaaagaattatttattttcatatatagtaagattaagattattacagcgatgatgtaataattagaaaggatacaattatttgcgggaaataataatatattgctgtacaaaatttaaatcggaaaacttacaagaggcacacattgggttgaagggctatcaggttatcaaacagaatttcaaactaatgggtc

SEQ ID NO: 4793 - DNA, 2196 bp, Arabidopsis thaliana landsberg
tggcctgaaagaataattccttaataactgatagctgacactgtcgtagtagatacagttgaggacgaacattcccaactttttgttaatgtacatttgttgcagttaagtaaagagtagatgaagtttgattccatgtttctattatgcagaatctagtagaggaaaaagacaagaagatcaaggaactccaggacaacattgcagcagttacttttactcctcaaagcaagaatggaaagatgcttatggcaaagtgcagaaccctgcaagaggaaaatgaggagattgggcaccaagctgccgaaggaaaggtatagtttgttctactctcagtcttcaatctggaattatatgaattatatagtaaagcagtagtcttcttcaacctttgtaaaacatgattccctgaaaagggtaaagaaattgatgcttgcctatgttcatgtggaatggcagattcatgaactagcaataaagcttgcaatgcagaagtctcaaaacgcggaacttagaagtcaatttgaaggtaagtcatatgttgatattaagttatagcaaagatttttgtagagtttgcaatttggatttgaggatttttgtggaatgcaggactgtacaaacacatggaggaattaactaatgatgttgagagatcaaatgaaacggtgttgatccttttctcttatctcttaattcctcaagatttttcttaaaacggaagaatgattatggttttgttggaaatatgtgactttgataaatctcaggtgataatattgcaagagaaactggaagagaaagagaaggagatagagagagtaaagaaaggactggaaattgtgtctgagctagtaggtgacaagaaagatgaagttgatgaaattgatgaagatgcaaaagaagaaattgctggtggagaataggaatttgtagctttcaaaaaatgttttgtacattttgaagttcaaaatcacatttcttcattcgttatctgtttcatgaaacagaaagttctaatcttcatcttctattaatatgttttaattcgcaccattggtgtttcgatatcgatatgtggcttcccgatataactcgtgaagaatttgaactcgtcaactcacgcaaatcatctgagtagatatcaggttagaccaaaataagtgagtccaattagttttccccaaaaacattcacagaggtcacgactttaggtcaatctgttgcagttgtcacgaacgaattcaaaatccaaaggagcgggaaaaacgaagtgacgtggaagtatcttagcgaaagcatctctctctctctctcacaatccatcatcttcattaatctgatcaaataatagggttaatcaaaagtccagaaaccaacacagttcaattttacgaaaactctcagaaatggagaagtacgagaagctagagaaggtcggagaaggaacatacgggaaagtctacaaagcgatggagaaaggaactggtaagcttgttgctctgaagaaaactcgtctcgagatggacgaagaaggtattccaccaactgctcttcgtgagatctcgcttctccagatgttatcaacatcgatctatgttgttcgattactctgcgtcgaacatgttcatcaaccatcaaccaaatctcaatctaccaaatccaatctctatctcgttttcgagtatctcgatactgatcttaagaaattcatcgattcgtataggaaaggacctaatcctaagcctcttgagccttttttgattcagaagttgatgtttcagctttgtaaaggtgttgcgcattgtcatagtcatggtgtgcttcaccgtgatcttaaaccgcagaatcttcttctggtgaaagataaagagcttcttaagattgctgatttgggtcttggtcgtgcttttactgttcctcttaagtcttatacgcatgagattgttactctttggtatagagctcctgaagttcttcttggatctactcattattcaactggtgttgacatgtggtctgttggttgtatctttggttagtagtctcaattatgcttttatgtttttgaattcgtctctctgcgatgtgattttgcattcacgctgtttcaatctttgaatttgtataaatgagatggttcggaggcaagctcttttccctggtgattctgagtttgagcaagtgcttcaaatc

SEQ ID NO: 4794 - DNA, 845 bp, Arabidopsis thaliana landsberg
tgtgctatgtgactgatagatgattttcttaaactgagagcaacaaaaatgtgcttttagagttatccgatgaagtcataggagcttgtctcaacaagaacaatgattctctcatcacagtttctgtttatgcttcagacaatttcagctctttgaaatgcagatccactagaattgagtaagttttctaccatctaccaaatcggtatcatgtcgtctgttgcgttattcaaactaatgtgtgtttctggttgtaatcaactattaggtatattctgagaggtcagccggatgcagggtttgctctttttgagtctgaatcattaaagtggcctggttttgttgagtttgatgatgtcaatggaaaggtgctgacttattctgcgcaggacaggttatttttctagtctcacagcctaaatttttttttacgacaagtttcatcctctgagcctgatagctgtttctgcagtgtatacaaggtgtttgatctgaaaaactacaccatgctatattcgatatcagataaaaatgtccaggaaattaaaatcaggtaacttttctccatctttctttgacccttttgttgtttcttgtttgcaaatattgagcaagctgcttttctaactgtgctgtccactagattggattgacagacttgtgaattttctaactgttgtgcccatttgattccctgcatcagtccagggataatgttattgatcttcaagagagctgccagtcatgttcctctgaagattctgtcgatagaagatggcactgttctcaagtccttcaatcatttgcttcaccgaaacaagaaagttgacttcattgaacaattc

SEQ ID NO: 4795 - DNA, 1053 bp, Arabidopsis thaliana landsberg
ataacttgctccggagtgtttttgattggattgaagacttgtcactctaacttgtgcatgtattttacctgcaccagtccagggataatgctgttgattttcaagagagctgcgagtcatgttcctttgaagattctatcaattgaagatggcactgttctgaagtccttccatcatttgcttcaccgaaataagaaagttgatttcattgaacaattcaatgaaaagcttctactttagcaagagaacgagaatctacaaatacttgacgtgagtggttttgtctttgtggttcaagccgctttatatatttgggtttttatgtttctaatagagttttatgttcttaaaggttcgaaatgctgagctgatagaagttagcagaactgacttcatgacaccatcagcattcatatttttgtatgagaatcagttgtttctaacattcaggaaccgaaatgtttctgtgtggaatttccgcggagagcttgtgacctcgtttgaggatcatcttctttggcatccagactgtaacacaaacaatatctacataacaagcgatcaagatctgatcatctcatattgcaaggcagatactgaagatcagtggatagaaggaaatggtaagtagactcatcatccactcttcaaatcaagaaacctcatgatctgattttgttttgctattgagacattgtcgtgattttggttgttgatgtagcggggtcgattaacataagcaatatcttgactggtaaatgcttagctaagataaaagcaaataatggtcctcctaaggaagaggactgcagcagtagtgatttggggaattcctctcgaaggagaagtgcggttgctgaggctttggaagacataaccgctctcttctacgacgaagaacggaatgaaatatacacaggaaacagacacggcctcctccatgtctggtctaattgaagctactcatcatttgttttgttttttttacattaatacaagagatctctgtatcttgttctgtttctcaattgtgtaatatcatgaaataggtaa

SEQ ID NO: 4796 - DNA, 1264 bp, Arabidopsis thaliana landsberg
aagtttcacgtacccatcctagttattcaacatattccagatccctttttatatacctcaaatttttctgattttaggtatgatcttggtatagttattagagtctttttgttatttctagtctttcctagtatttttcagatttttacacgtttcgaatgtatttggaaattatggagcattctcgagaaaaactgagaacttatgctgcaaaagccatctacagatcaaaattggcgtaggtgtcgatcgacaccacccatgacgacaatcgacaccaatatctaacaacaattgtttcgcgtctctatgaaattttgaagatttgcagattcacctcagaatttctccctattttccctacacgtttttaggaacttttattttgatttttctcaaaaaaaaaatatttagatttttatggtcaatgtttaaacctaacttttataatttttctttaaaagcttgagaggctaatttccttttctattttcttcttgggagcgaaacactgtaaaaatccctttatagaagatcattcgaaactctattctctttttaagttcttctaagatttcttattctatcatgttctttgcttcaatctccatgtttgagtaatctctttgttgggtttggggtttctcattacgaatttagatgatttagtagattgataacatattaggattatctttagagttcttcatcttaattattcttaatactagttctaaagtagctaagtagaacttgattccagataatcgatatacccgccataggtatcttttatcggaactattatttgatgagcctggttaataggtgtgtaataagaatcggcatctctactaaggtgaacttatctaactcgtttagcatgcatgctttggaatagggtttcacggaacgcccccgggaatcttcgctctaggcatagtgagtttcacggaaccccaccggttattcttagattagagtttgagtttaagaacggtttgataacaacctagctatcactagatctactaaccgtttgtttcctgagaataccctaaccctgacgttttcttattttattttacatccccatcatctgctattgcttgcttttctttcttttattttctttattattttgtttagcttaatttgataaccttagtctattgtgtgatccgagagctttgtggaattagacctttaagtgctaacgacgatctcttatttgagggagtaggcttaaggcaatttgagctat

SEQ ID NO: 4797 - DNA, 672 bp, Arabidopsis thaliana landsberg
aaaggctgtcattaatgtaatacaattaaagcttgtttatctttttacctaactcgcttcttttctgtatgtaggggtttaaaaatggatcccgtggcaccctacttctattgtgagctataatcatttgggaaacaacgacgggatcacccccccagtgtcacagactttccgctctaaggagatttcaaagagcaatgttgtagatgacatggtagctagtaatggcatcctctttgagcctggtgaacaccctgaccatgtcgttgtcatcaaggtttgattttgaatcagaggccagagtgatcaattcctcctttctttttaagtacattgtaaagtcttaaatcctgctattgttctgaatctttaacagtatgtaccatatgttgcggatagtaaaagagcaatggatgagtacacgtctgagatattcatgggagggaggaacacaattgtgttgcataacacttgtgaggactctctcttggctgcaccaattatcttggatcttgtccttctcgctgaactcagcaccagaatccagtttaaagctgaaggagaggtttgtattccgttagttagctactaataaacacgggattggcttcaaactgaggttttttgttttttttcatgtttgaatttattctctttcaggggaagtttcac

SEQ ID NO: 4798 - DNA, 1009 bp, Arabidopsis thaliana landsberg
tgaaagtctgtggagctgagagattcattccatcgttgttacccaagtgattgtagctcacaattgaagtaggctataaacaaaaacacacaatcaatgaaaccaaagtcttgtgacaaatattttcagtaacaagaaagagtaacttgatacgcaagttaaacaaaccttgattcttgcgccaactaggaaatcaaccaagacagatttcatcttggtttgaccactcttgaaatcatctccaccgatcaaaacattgttcctgatcgccatatcaattagacctacaacaaacccccaagaaaatcagtcatgatttccaatattgattgatcaatgagtgattaaaactcaactacatgaaacctggaacaaaggtgttttgagggcttccattgatgaacgggattccctcaagaacacaagcaatcgcataaagtgttgaaggagagatctcagcctcatccctatccacagactccatgagattctccattgtatcgttcatcccaacgaccacattgctataacgctctgtgttagccgtccagagaaccacaaccttatccaccttattcttctccttaaactccctaagattcaacatcacactcgatcacatcaataatcagacgagattcgattcaaccaataagaataatcactagaacagagagtaacctcatgtccttgatgatgtggtcgacttgttccttcttggtacctttgatcacgtggttagcacgtgacccttgattagcagctatgaaatcaggatcgaagatcccagggagtggcacaatgttctccatgtaaggcctgagctgtttctgcaagtcgatatcaagaaccctggctctagccatggcatctgctaagttcatgtcacttatatcccatcctccaaacacaacatcatccggattcacctgtttttatttccacacaacgatcccaaaattaaaacacactttaagaagaaaacctgtctaaaaatttggttaaaagc

SEQ ID NO: 4799 - DNA, 420 bp, Arabidopsis thaliana landsberg
caaggttcacgtgctaatagcgtgatcaaaggtaccaagaaggaacaagttgatcacatcatcaaggacatgaggtatatagtcttacatagcaaaattagttagttagttagttagtgtattgatgtgtttgaatatttttagggagtttaaggagaagaacaaagtggataagttggttgtgttatggactgcaaacacagagcgttatagcaatgtgattgtaggacttaatgatacgacggagaatctattggcttctgttgaaaaggatgagtctgagatctcgccgtctacgttgtatgctattgcttgtgttcttgaagggatccctttcatcaatgggagtcctcagaatacttttgtcccaggtcttatcgagttggctatatcgaataaattgttgatcggtggagatga

SEQ ID NO: 4800 - DNA, 1888 bp, Arabidopsis thaliana landsberg
  unsure (1)..(1888): unsure at all n locations
ggaagattttatcatgacatttgaagtatctgttatgaatcatttaatttcggcgcatatttgctatttaatcgcagacaggaactttgatccatactgagaaagcgccagactctgccttgtcggagcggaccattggaaatgtcctcgaacatacgcaagtccagatgctatacaggtgaatttttatcacagtgttttagttattataatactagacgtaagattctattttgaggctttttatgaatactctccatgtttctcaaatatgttgtatagaaactctgacgaaatttatggaggacgccattttttttcttacttatttgaaattctcttgatttgtcggttgatctttgcatgggcagagaacagagttatatgaatactctaagacgctgggaaactctcagtatatcctgttaccgtttcaaccatataaaatcatatatgctcatatgctggctgaagttggtaaactttctactgcacaaaagtaagatgatttactttccttcatctgctccttggttagactctatatggcttcctgatgtcattctactgttgcttattcaggtactgtcaagcagtaataagatgcctcaagactagccgatcatctgaagtagaaatgtggaagcagtttgcttcatctcttgaagagagaatccgtagccatcaagaggtacaagttacacaacttctggttccaatagaattacatggaacagttgatttttcgtgtggggttacatctgttagctgtcttttcctttaaatggaaatgcaacagtgaaaagtatttacatctgtgagttgtactttgattaaagatgtcaaaaaagaaactcgagcgttgtggacatccataaaattgggtaccacgtaaagcttctttttacttatgatccgactaatcagacatttctatctcagggtgggaatttggccccagcaaaacttgttggaaagctgctgaactctttgtgggggatgccaccacctgcaccacattcactacgggaactcccaggtaatgactgtcaacaatacatggggaagcgtctaagtcatcatataggcaagtcgctaatacaatgtcatcattgatgccacctgcttcaattgaacccgtacatgagtggggtgggaacggtaggacaatggcagcacattctagaagtgtatcagagccagatttcagtaggacgccaatacaggtctatattactagaaaaccatttctttttcttcttttttgttagtaacagatgcgggtaagttgctccctcatcatgctatttcccctatccagctaccccacactcagatatatcactggatcgagtagtcctaaggaggctttctaagtataccaaccaatacgcgtcagaaaaccattgcttattgcttaaatgtttgtcttttctgataggatcagactgactcctcaaaagacaaagctcctgatggggtgacacaggtgaaatcaactcggaaggtgccaagttctcggtttagccgctttggtattggcatattgaagaacactgtagggaaggtcttcccatctcgatcatctaatgaggtgcaccttactaaatcttgaggtcgtgaggagtcttgttgaacttatactaattgttttgagtcattctttgggtaaaggcaaaactgggtaatgagaatcaattctactatgacgataacctaaagagatgggtggaaagaggtgtggaacccccannnnnnnnnnnnnnnnnnnctcctcctccaacgtcagtgccactccgaagcaactcataaggtcccgaaccaagtctgagataaagaacgagatgactccaactagtgggagctggactagtgccagccccactcc

SEQ ID NO: 4801 - DNA, 1065 bp, Arabidopsis thaliana landsberg
  unsure (1)..(1065): unsure at all n locations
attgatcgacctaacctgttgtgacagtgagcaaaactttttttttcttttgtgatattacttttttttcaacttacagttcaacttcctgaagctcctctcctaagctgctactgctactgttcagtgggcttggtctgaatgttgatgcactcgttggagacataaacgacgagctgttgacgcttccgctccatgaagctgttcttcttgatactgactgaggaagatcaccattaaggcttgttcctgatccacttcttctgatgttgtctacacttggaaatctctgcattgcaattggagatggtgtcggggactggaatgaagcctggcttggtcctggagcgcctgcagagcctactactgcttcatctcctgagttctcttgtctggtttcagcactaaccgattccattacctggtcgtttgcaaacgatgccggtgctgctgggacaaagaattttgctttcgcaggaatcggtggtttagaagattgcacgggaggtgactgatacatgctcgaggagccttgattataggtgtctacgtacctgcccccgaaaaagagtaaaatgatcagttctaagcatgcacattatctacagtaaaacactaacgagggaatattatatccagtagcttttttaataaacgatcagacaaattatagctatcagttgcacaaccgtacactaccatcaggagaactattcccatctcacatcaaaagctcttttgtacccgtaaatcaatggtggcttatattccttccttattgccattctaacttaggatccaggatagcctccacagattatatataattctcaagtgtctcaagtggtttgtttaccttgcacgcacacccatacgtccacgagctgagaattggcttgagccctgtgagactggtgggattcccggagaattctctgacggagttgggctgccactactccagctcccactagatggagacatctcgttctttatctcagacttggtttcatgacccaatgagttgcttcngaatgggactgacgttggaggaggaggtagtgc

SEQ ID NO: 4802 - DNA, 3511 bp, Arabidopsis thaliana landsberg
  unsure (1)..(3511): unsure at all n locations
atggaaagcctacaaaattgtgggaaagctaccattgccatcgtcctcccttatgttgaacatgtgcaaagtgaccttgtgatctgagttctaagagtgagaagcaaagggcagaagccaaggtacatgatttcctaatgggtttagatgaagacacgtttggtatagtgagatcaaatttgatgtcacaaaagccactgccaacactcgagcatgcttatttgaaagttactcaagatgaagatgctcgagtcaagcgaaaaacacaagaaaacaagtccgaaaatatggcgtttctagctcaacaatcacatcgatctcgtcccagtcaatatgaaaacaaagacgctggagtgatgtgtacgaactgcaatcgtatgggacacagagctgaaagctgttttcagattttgggttttccagaatggtggggagacaggccaagaaaccgcacaagccgaggaagaggatcatcttcacttgcgggaagctcgcgtggtcgtggcagtgtaggaaaagcgaatgtagcaagaatcgttgatcagtctgaaattggagttgctaacgtggctgtaactgatgttgatcgtgcggcggtttgcaacttaacagacgagcaatggttaagtgtgaagcgggctatgaatgcagcatccaacaaaacgaatgaacagtcatctggtaagatctcatttccttcttggattttcgatacaggagctacacatcatatgacatgtaggaaagagatacttagagatataagaaaatcgacaccaacttatatcattctagcagacagtagaacagtgatgagcgatgttgtaggcacagtggttttgaactctcatcttagtttaatcgaggttttctacataaagaatttgggatttgatttgatatcggttacacagttaatggaagagaatgactgtgtaatgcaattgtccgttctgttttgtgttcttcaggaccgttctacgaggatgctgattggcgtcggtaaaccaattggtgggttggtctactttcggaatacggaggttgtggcgattgcgtaaggtactgcagatcagtctttggagttgtggcatcgacgttttggacatccgtcactcaaagtagtagagttgctgccggattttacctttagtagtagtagtgcttttatgaataaagcttgtgagacttgtattcaagctaagcaaactcgttgttcttttcccttgagtaataataagactacagatatttttgaaatgattcattgcgatatatggggaccatatagagtaccatcacactcgggagcaagatactttcttacgatagttgatgatttttctcgtggtacttggatatatctcatgaatactaagagcgaaacatcaactaaaattcgttatttcctggctatggtggatcgacaatttggaaagaaagtgagaactatacgcaatgataatggaagtgagtttatctcactaagcacttatttcttggaaaatggaattcgtcattattaggggccggtttggctcggttctctttagttactcttcgcataatcatctacgaatatactctaggcttaagttgctatttagtcacttttttaaacttaattggaaaagtagtcactttactattcataatttgcaaaatagtcacttttcactgtttgattcgtacacttagattgtacaccacttttagtgtacaaatgtaaagtgtacgctgtgtatttttatatacatttgtacattaaaagtaatgtacgatgtaagtgtataaatcaaacagtgaaaagtgactattttgcaaattatgaatagtaaagtgactacttttccaattaagtttaaaaaagtaactagtttgtaacttaactcaattataatttggtttataaggaaacgtgtgggaccaatctcaagtagacgaaaccatttcttaaggtttttgaaaacctttgcgtcttatcttcttcttccctctctacaacatggaagaagacagagcgattctcacttttcaccgtatcccttccctcaattcctccttaataacaacctcttctccggccaaatccggcgccgtacagtttcgccgccgtgttctgcgaaatccagctcgcggagatttcggtttaggtagattcgcgtgcatttcactcgtggagaagtgcgaacagagagaattcgctccgacgacagctcagctcttgaacaatcctctagctattcttgctcttgtccctaaggatgcagctatttttgccgccggtgctcttgccggagccgccgctaaaactgttactgctcctcttgaccgtatcaaacttcttatgcaggttctaatttttcctttgttatatatatttgttctattggttgattgtttttcatttacggtaaattttaacgaaattgtaacgtcatagaacaattagtaatctgaaaatggttttatctgcagacacatggtataagacttggacaacagagtgcgaagaaggcgataggatttatcgaggtaagtttgtttttgttgatgttcgtgtgtgtatgtacgttagtctttcatgttataactgatgcaagagcttactggaaatgattttgtaggcaatcactttgatagctaaagaagaaggagttaaaggttattggaaaggaaatttacctcaggtaattgtttggacttgttttttttatatcaagtgattggttttgtcttgacttattggataattctgtttgaaaatgtgacatcaggtgataagagtgttaccttacagtgcggtccagcttttggcttatgagagttacaaggtgagtttgtgtcatctatagcttattggctattgggattatgtactaaagagaaatagaaatgattgttataaaattctgtagctacttgtcctagaaaacaagtattgccctggggtgataagtaatgtctggtatgacatattaaactatgattttggtctatagttagaagataaaagttaatttgactgccttcaggaaactttgcttgattggattagtcttttttgttatctgtatnnnnnnnnnnnnnnnnnnnnnnnnnnnnnnntttctgtattgaaaatgtgactgatgcttctatattttgtattcagaacttgttcaaaggtaaagatgatcagctctcagtaatcggaagacttgcagctggtgcttgtgctggcatgacatctactttggtaagtaattgtggtttgatatattcaatgcttgctatatttgtttatccgttttcgggtttattcttttgttggcgttaattaactgtcaagtttaaggttaacaaattcttaagattacctatctatttgtggaaccctacttctttcctccaattggttccatcataagtctccatctttatgatggctattcttgaaaactaaatccttatatattttgaaatgtagttgttccatgatgtttaccttctcttaagtgttaatcaaagt

SEQ ID NO: 4803 - DNA, 758 bp, Arabidopsis thaliana landsberg
attaaactttgtgctgtgatacataaaaagtgtatgaatccggaatctacctcttcttcctcagcctcttcagcatgctcaaaaaaccttcggatgctttcacctctcttgattgaaacaaagccatccccaactactagcctgccgtgaacacagttttgaccttttaatgcatgggctttggcggatacttcagaccagcggccatctaatttataagctctaagggtaatgtagcatgaatttaaaccacgaaggtttaggccattgacttgaactctcccattcatgccaacattttcaaacttgaggatatcacattttccttctccggatccaattgcccactcaaagtgatggtactttccagcattctcagaaaaagtttcccgccagtctgctttcaccgaatcaatggatacctttaatattgcaattatatttgtagtcccatctcgcaattagtcctcataagagaaatagtaatatacttttcgaaaagcataacgctagactataggaacccacaaagatgaaaaggttaacatagataaatcacctcatattggaatgttgtattggcaacacaaaaccatgtggtacaccgaggttctctccgcattcgtttcagttccttaagctctttgaactcacgaataacgtttcgtctgcagtctctacaaaatctcttgctgtcgaatctgtaattttgaaagatccatttgttattaaaccgagcgaaaaaagtctcgacatga

SEQ ID NO: 4804 - DNA, 549 bp, Arabidopsis thaliana landsberg
aggacacacacacaaaaaaaacacagagtgtatgagaatttggcaattaggtcatcgccacttttattgtttatgagaattagggcaatgaggtcatcgccactttattcaatcttctgattaacagtttgtgagtcacttaaagaaccttcttagcagaaggcctggaagtgatgtcagcgacccaagcactgacatgtggacgctcgtcaaagagtttcttagttggtgtaccaagcaagtactgaatcacagggatagtgtgaagatcgaccaaagtgaatttatcagaagccaaatacttggactcaccaagcctgtgttcgtaaacatcgaggaccttggctagcttagcctcttcttcttcaacaacggttttgtctgtggtcataccatacaaaggctttaagacttgctcccaaacaagctttgaaccaactgggtcaaactcatgcgattcaatttcaatgcccatggctatgcccgcaatgtccttggagccaagggagacaagttggtttcctttgtctgagtaaaaatgagctatgt

SEQ ID NO: 4805 - DNA, 547 bp, Arabidopsis thaliana landsberg
cctgattttaaaacaagaacagtagatcagaggttagctttatagtacataaaaaagactcaaacccaaaccaaagaggctttctccaactagaacgtaagtctttttttgagtcgctctgttttcgtttgtggaggaaccatatcaagtttcgacgctcacaagctcatactcgatcagcgaaagattgttatcatccttcacggtgatgtctgtgggctcctctgcaacttcaacacgtccccatctatcaactgcaagcctcatagaacccttgtacatgtcgatcttcgcattacgcagagtcactacactgccttctttcatcatatccactggataaaaatgaataatagcatcagtcataaatctataaaaagtacatgagaaatactcaaattatgcaaacaactaactatttccataaagcaatccactctcctgctattatctgtttcacagattcacaaccagtatagactataaagatgccgacttagaacagaaacttgccattaaagaagctcactgagaagagaagcagtct

SEQ ID NO: 4806 - DNA, 2708 bp, Arabidopsis thaliana landsberg
ggttcttttcttaaaatctaggtgcgtgggagaatctgtttcttatttagagactgcctcatagattttctgtcttttgcatagattgttttttcaatggcttgtttcaaagtctaggattggcaacaacattctttgtgttggtaaattgggcaaggtttgtgtttgagtttgtgctataagtctgatgatctccagctttagttttttttcttcttctgtggttcactgatttgtatgatttgttttatgacttggttgatataagaaggaatcagttgcttcttcataatgtgtatctccatagtgtaaaaggctccaaactctgaatttttcactatctagaagcttctgtagccacggcctgagattgagcacaagcattagctcacagtgattttaatccgcaagcctttctcttgcaattaagaagaacctttgtgatactcttcctctcatccacattgatctatctctgtgtgaatgaagcatatgaacaacaaaaaacaagtagcttttggcaagagttacagtctcaaaatctaaagcaatcgtgtccaatttaaaagaaaaaacaattcacggttgtcgattaatttgcaagtgcaggccaaactgaaggttaacatataaggaaaagaaaataaaaataatacgacacctgagagattcgaactctcgcggggaaaccccatttacttagcaggcaaacgccttaaccactcggccaaagtgtcttattgttacgttgcttcataactgatttatatactaacttgctttagtctacaaagttgaaaaaacacaccatgttacttaataataaaattagcattttgcctaaaagttttgttttaaaaaggttaatagtttattctacattttcttactgattttcaaatccaacaaaatttcaagctatctaattatcatttggaaatcgattaaaattttcaagtttgttgttttataagaatagttatcaagaacacattccatattggattcaaaggtttatgatattttaccgtcagaagaaaaaaaagatgaaagaaaattttcgattaaaaaaaaccatccctatcgagaaaaatacaaaaacaaattacaacaaagcaacacaagaaaaataaagttacacaatcttcttcttatcttcttcttaatcatcatcatcgtcagcttccaggttgaaagcttttcttatttatgtttctcaagtaaatcttcttctcctaggcggacgagaatctgcactgtctacatcagaaaccctcgaaccattctcattccttctcctcgaggacgatgtcgaaagagccatagaatcgatctcaactgcagtatccacttgactctcagagtttataacagctgcaatgcttgagaatgagtctctatcatcaaccacaacaggagcatgatggttttgctcttggtggttcctccccaacggatgagtcctaaaatacgcatccacaagcctctcagctgaactcaacgcagaagtgaaagtcgagatccttgcaactcggtgcgactgtaactgtctcctgatcaagagaggatggaatctcgtgttgctttctccttcaagatcaggagcaatgtttggatttagatcaatatcctctgatgctgcgacaatggctgctgctgcagcactagcctggttctgctctgatctaactcccctagatgtcatcaaccggttaaggatcgaattggctcgatcgttgactctttctgatgcctctcggttactaaaatcagggactggggttgaatccctgtcaaacctattctgtatacgtctaatcatttcttccattggtattgtaaaaggcgacctttgaattgtattcctcaagctctcaatgcgtctcgcgtgtggtctcatggggaccttagtatctaaactctcttcaatttctctcttgtggtttccacgtccatagatcggtgtcacggttttggaggtcacctctcctttacaaacaggacattcctttgcatccgaaatttgtaaccattggtacagacaaggccaacagtaaagatgaccacaacaggtgagaaccggctccttcgacaaatccaaacatatattacaatcgaaaaagttaccgtcgctgccactgcttttctcgacatccgctttcttatccaatacaccgtccccaagggctccatcgccattctcacacattttcaaatcctcattgcctctttcactaccctcaccagtctgcatagcagctctatttacagaatttcccatcaactggttgagctctatagccatggtatgggtttcagatagaaccgggatcgggagattaagctgtctgaaccgtgtcctatgccgagtcctgatccttgtcacagcttcagaagatctctcaggcgggtcattagtccaatcagccaaattcacagtctcgtttggtgcaggttggagatcagactcaggaccaggcccaagattcaaatccaggttcattgtgtcagctaactcctcacccatcaatagacaaaaaggctcttgctttcacttgcgctgaccaatatgtactccgtctccgtgtgctctgtatcttcagggaaagagaagcaattagccaataaacatatgcagtccccatataaaacaatccatatatctagcttataattgcagagatacaagcaacccaatgtgtaaaagt

SEQ ID NO: 4807 - DNA, 6852 bp, Arabidopsis thaliana landsberg
tcccaatacattgtactgatcctatacagttgctgaatgctaagcacctgcagagaaatacaaaatttcgttagatttacatgagacgaacaaatgaagagacaaattcaaaacgttgaactaaccggacaaagttcagtagttatctcttttaagctcttcttaggcttctgatgtataaccaagaagccaacagcttgtctaatgtgctttagttcatcccaagccgaaccaacaaactagaacacaacaaaaaaagcatcttctaataagctaactgtccgaaaactccagagaggatttgaaacatctattacctcctccgttgcatcatggcaccacttttccagctcagcaagccctgtttttacatactctccattgctaaacgagcagcattcacgtcttaaaagaaggctacacggttgattaaacgggaaaaacataagcggatctgtattatatagcgacttgacagttgcaaccatatcagaattacctgttaaacagctgaacattgataaatgaaaatatctgcccgaacactttagaaattagcaaggaaggcacctgcagttttggataggttcaaaatttgtaagaagaaagaaaaaagaagttgaaaataaactttatttcagctttggcggaatttatagtttatttcactcacataattggccctcatagtcctcaagtggccggttagacaagtaacaatgttttgccaatgagcaatcatcgggtttggagcaacaacattattgggcgtattttgtgaacgtccttttactaaaccagaccgcggtgtccttggaacctgttttcatcaaaccacaaaaccagaaccagactcaggggctttaataccacaataatatatcaacgattattttctgtggaacaaaaggcaattcaaaagaatgtctacctgaatgcaagaagcaagcagaggggaaatctctttcttcatcttgtcacggatcattccatatatcttttctaggaaagctgtgagttgctgcttaaaaagcaaagcaggatatttagcttcaacttgacgtagttcgtctagcccaccgccaattgcccttccagtcataaatgggaatccagcactttgtggagaacctcggaaactctattatacaagtaatttcatgagaaaagtgagattaatggaatcaaagcattcttgagagacacgtaaacacttctaactacctgagatacccgtccaaacaaagatgaaggcattccccgacgtctgggagtagttatgcttcctgtagcaccggctttcagagtgcgttgaagaaacattaataatgtggcggaattggataaccaatagcatagtacatcgctgttttcctgcatctgcaaagatgtaaatttagcatgagactacccctggagcaggaaagaacatttgtgttggtatgaaagaacatcaaaactacctcaatggcagatgctattgtctcgattatacgattaaatatactggttctttctacttcaaaagatctccagtgtatcagacacttgtatatcagacaggcagcaacaggcttgccttcagaaaatcctatatcttccgaaatagattttagtaacagctcttgattttcctgcaagatgaaaaaccgaacataatgagtatgcaaaatgcatactgacaaaaaaacagaacatattatgcccgcaagtgaaatatgtgacaaggcttcaaagtgatagctacctgctgtttctgattaagcgatttctggggcctatcctcagtttcaggttcctggagcatatcattaaatattagatctccatcaatgtaaatggtaattacacaaggggctgattttgtttatcaacatacctgaagttgtgttgtttctccattggagaaagtatccttctccggagttctctgaaattccgcggaaatatcaaaaaggtcaaattccccgttaagaaattcaatgtaaagacatagccggtgtccaccagtacctggattatggtagtttttggtcttagggccaaagctctagtagtcggtgagatggtaagagtttgttgccggagtactttattctctgactccaagctaaagactttttcttggaatctaatatataggaagtggatattgttagtcgtcttatttcagagaaaaaactgggccctaaatgcaatatctgatactaattaaacctctaaatgcatgacctgagaacgtaaaaatttattttcaaggggaaaatatttgtataaagaaagataaaagtctcacatggaaaaacaaatgcatcatgatctcaaatttgcaaatgaatacaaacctctgaacagaatcttggagctgatctatttttcttccagcttcttcaagtttcttacataattcctcattttggaccaaggcactctgataagcatgctgtgcttcatctgccttatgtgtttctgatgacaacagtccctgcattaggaccatgtcgagattgtagatcagtggcatgaacaatcaaataatggagactttcacataaagcattatcttttttaaatccagaaacagaaaaaaatctcattattaaatttacacatctatggtgtagaaacaattacatcttgtcatcttgaaccaaaattatttggattaaaatatgtcagttttttacctttagcctgtcaattgcgttgctcaaagaatcgatcttctctgtatcttcaacaacagcaggttccttattagctgaacttgcttcttcaagtgctactagagccgcctcctgttcctttacgaccattgcagtagtttctttcaattgtaaccgcatggtatgcaatgcctcttgcagctttgcaacttcttgcacgtttgcctcctcaagatcagtctgtttatcagtaaaaagatagcaatataatccaaaatttgcaactgactttgaagaccacaatctccaaattggtttaacctaaagatatttccaaagaaaattgacatctaagttacccttaaccgcttctccaaatgcaaacgcaaggaaagctcttctacccgctgctccaatttattcttagcatctttaagagcaccggtgtctcttgcagcctacatcaatgtacatatggaagtaaacagctgaataagaaaattcatgcacactgtgttagaacgcaatgaaaagtcataaagcaaggaatccaaccattttcagcattctaagctctcttctagcaagtctgcatctccaggcacattgtgtgactattgccgccttctgaagtcttgtgtaatatgagaatgcttggcgaccacgccaatgagcctgaaaaaggggaattttttatccatcaaagagaacagttaacaaagttttcctatttctgtcctaagaaggttgtctagttccctcccagtaacaaggaaactgtgatctacctgaagtacaatggcggcttttctttgccttcttagcctgaattcactacgtgcaatcatggcccttaagccagtctgcaacacgattgtagatgatcttgtggtgacaaaagatttcctgtcaacgtaccggcggaaattcttctggactcttagagctgcagcttctattctcagtttcttgtgcactgcccgggcaatttcgcctgcaattaaccaagcatagaaaaggagaacagatgatcaaaccagaaaacaaccatctggtaaagaagaaatggttaagctccaaatgatgaaaacaataggatgcgatgagaaaaggatgggtaagcactataattctgactgaacagcatacgccatggagaaaccttactgagtgcagaaaatacctcgtaggaaggattgcaaaacaattgcagcattgcgaatagaacggtaattctttctagccatacatgtgcggaattgcctctgaatgactctggcagcattcccaagcacctctgctctcctcgcatctagttcagccatctgaccagctcgaaggaaaatctttgtctttcctatctgggaacaacatggtaaaggtacgtatatgatacatgaacaaatactgaaaatgccgatagtgagaatgatggaacaaggaagggagatttttttttcttgtggatgatcccatcggggatcatgaccatgacgctaaaattatccatgaatttggtaagaaaacaactttgaaagaaagcaacaaaccagaatgaaaatgcatatcacacctggtagtccgtcagacttttcttatcaagaatcatttggcaagctactttatcatcataactgtaaaagaaggtgtgatagaattgcttattaaactgatgtttgtttcgacaaaagtgttttcatagagatgcagaaacctcagagagagacttactttccttccaaaacttctggagcaaggagaccaaaacgatcgagaaagtcatagaaggcaagcctggtaggatagccagcgcaactgatccgaatggcctcaagaacaccctgcaaatgaaactaattgttattttctgggaagatacgacatttaatgaatagtaagcatataaagaaacgtcgtattttagtatgttattcaaaaactgcgttggttatcgcactaatcgtttaatattaatacaaacgggaaagtgtattctaggtctaataagagatgtagatacacccgttagatttagacaggacatccttaccccacaacgtaattgatgaatgacgttgaaattctcaaagataccaggtttaagaacattgttcggctttatacatctgatgtaatgaggttctgtaccattcagtgattccatcagcgagtgaagttgttgctgcaacatagataagtgatatcaataaacttcctttcaaaacttgcagtgcataactagcaattttatatgcaataccttgaaccgtgacccaatggaagaaaattttgatgacctggatgagtcttcatgaagcgcatggaacaaacccgccacaaacttgcaattagatgcagtaaatagtgcttgatgttcagcaactatataatctttgttcttgtcgatgaaatggtttgattgataagtaaccttgcaaatgtaggatacacatcaagaacagaaagcttcaacttcaattcatttagaaatagacaaatatgaagaaacaatactgtacctctcctgcataatgcgatatggtaaaatcagtgcgcgagagcttcggtttggcaaatctctcgtgttctttaaacgtctggaacaacttttgggagaaggtttcatgtgtagacttgggaaacatactgagttgaatcaaccaaaatacatgaacggatagtactatgagaaaggcatgcaagttaatctgagaaagataaagcataccaggcttcatctagaagtgaaataatccctcctggtttctgattgaagacacgcaattttaacataagaaaagggaaagcataagacaattgtgcagtaaacaagatctctgctcctaaacctaaatatggttatcatcaagcaataaatatcacaaagtggaatgtaagtctcttaaattataaggagaaacatactttttcaattaactcaagaacatcttggttatcaataaactctatgtaactccaagcaatctcttctttggtgtactcttcctgctccattttgaagacatgctgcaaaagagtgataccagaaataagtccaatctacttatccaaaagcaaaagcgctgatcaatataaacatgagtaaacgactaacctgattaaaatgctgttgcagtttttcattcgtgaaattgatgcagaattgctcaaaactgtatcataagccaaacaaaagatcaactacaactcttcgataacagataaatctactaactttccacggttagcaatttccttcaacatcttgacacattatatgaaactatatttaacacccacttaatactctgagacgctgcagaagatatagagacattggtaactttcagttgaaatagcagaagatgacaaggaattattcttttaaagctatccaagcatgtctagattggtcttccatgcacccctggaatgaaatggggtaaaggtgataacaaagaatgttttacgtataacagtacctattgcatttgaaactttcaaacccatagatatccagaactccaataatcgactttgaccgtgggtcctgcccgatggaggtattaattttgttcacaatcctgtaaatgatagaataaaatgtattatgcaaatatatataaaaatgcgagatgaggaaatggaagaggaagttcgcttaaatagcttcaccagtcaaacaagtgagagtatattgtcttggccagggtatccctactcgcaattgcattatcgggatcaagagttcttgtgataatctcttcaggtgtaaccatcacacgcctaataagagcatcttctaggctctgggcgttacacctgtcaaaacaagtgcacaatataaaaaacagcatttactacgaatatataatccactaaaacgaaaatggataaacagattcaaatatagtaagaaaaaggaccatacataagtaactctgccgccatattaagatgacttcgggaatccttatccttgatgacagatgaatctatctcttccccctttccaaaatcaatgttaccaagaatgaaaattgcagcaaccaccctgaagattgcctcctgtaaataaattactttggatgtcaaactctaacatgaaaagttgcaaaacggaaacctgaccttcttaacacaattaatttcaggaccctgttcttccgttactgattccaaccta

SEQ ID NO: 4808 - DNA, 1011 bp, Arabidopsis thaliana landsberg
atgatgtaccagatatccatgtgaaagactctgctcaattttgctctcattcctttgaccagaatttgaataccaccaaagaaaaagaagaacctggaaatgtttcttctataactcggttcttcgctatgtctggaggaaagccgcgatcaacgcggtattcgcagttgtaaacgctagcacagcttacatcggaccatatctcatcaatgactttgtagagtttctaagtgagaaacaatcccagagcttaaactaacaagttaagaatgctctgtatattattgcgtgttctcaaggtatcgatacaaccctatatatatattctatacaagtcggtctaagatcattcatctatagaaagatagatacgagagaatatcttctacttattctccaagtaagtctaatggatatcttctacttattctccaagtaagtctaattgcaagagtagtccttcatatcttcgtaatatcgtaatataaaccatggttaccttcttgcactcgggtttctaactgcgaaaatcgttgagacagttactcaaagacaatggatctttggagctcgtcagctaggactacgtcttcgagcagctttgatatcgcatatataccagaaaggtttacttttattaagtcaatctcggcaaagccacacgagcggagagatcatcaactacatgagcgtagatgttcagagaatcactgacttcatttggtatgtaaacagcatatggatgttacctatacagattttctcagcgatttatatcttgcaaaaacatctgggacttggagctttagctgcattggtcacaactttaatggtgatggcttgcaactacccattgacaaagcttcagagaaactaccaatcagatatcatgaatgccaaagatgatagaatgaaagcaacttcagagattcttaaaaacatgaagattctgaagcttcaagcatgggataaccagtttctcaacaaggttaagacattagaaaaaaaagt

SEQ ID NO: 4809 - DNA, 2604 bp, Arabidopsis thaliana landsberg
aattcaaaaggaaactaaggtaattttctttaccacatttgcttatctgtgattgttgaacatttgatagccaagggcctaagagcaaatgactagttaggtgatgtaactttctatcttgttcacaactattgccttgtgaatatgttcttaaactgcagtgaacataagttttggaagcaattctgttttccaaattttgataattgtcgcgaggatcctgattaacggtgagtattcgtgttatatatttcttatgtattacaatttacaatggtgttatgtaactgatgttcaagcttacctgttttacaatatcaggtaccagttatagacatagtcttccactgtattgaatttaaaccgacctttctttggccgtgtttctccatactcttctttggagtcttcattatcttttcactcgacaagttaaaaatcttctttgtggaatattattccataacttaggataacaatttagtcttttaaattattgcatatgcgattggagtcaactgaaaatgtaagtaaaattgtggaagagccaaatgcagattccttatgcaatataatagatgggaaaatgggagcagaagggaagtatggaattgtttttctcgaaaggcaaatgcgtagtccagactaaatgaagagtcaggtaagatctctctgtctctcttaacacaaaaaacaacaataacatcaaaaacttcacaaacactcaacacaatcacaaatacagaacaagaagcaattaaacaaaacaaacactccactctcaaactaaaaaacttcacacgccacgagacacaagaatcgacaaaaactccacaaaatacaaaattgctcatgtcacgaaacacaacataaaagtctaaaattaacccaacaaattcacaatcacctgaaaacaagagttctcaaaaactttctttctaatttagtaatgatttactagagtctatttataatgacaataacaacaattcatagaaatttatgagcacatttcatataatgtcaaattgagattacaaaagtctaaaattaattaataaaagcaaaatccttgacacaagctctctatgctatgagacacggtcttggttgaagatagacattgattcaagcaccagcttttcatcatgctcaaccacatacctttttaagaaggtctgatcggtacatgccaaaacagacgccattggagggagttcgcttccaagcaatcctttggacatgagagctttgattacattacaccttgggacagtcctcttctccatgctatatccaagtacctgagggaacaaagtaatgaccttaagtggccaattcatcttcttcaccacaaacccagtcttcttcttcaccatctctgcagaatatccaatgcactgaggaaggcacttgaccatcatgacaaactcatctctgctgaatcctaagcctataaatgttttcatggagttcaatatctgctgctctgaagcacgtaagcatagtggattcttcttgaacactgacaatacctcatcttcgcacagaccacacctctttaaggcttcaaatgtctgaattatcctattctcagagtatccaagaaaggcagggcacttcttgaaaagttcccatacatcgtttacagttaagccaaatcttttgtagacattgaagttttcttctagtcttttgtcgctcaatccgtaaacaatgcataaggcttccacaaactttggagtggtcggatcaaaacccatcccaacaaccttgttgagtgattcttcaaacttttcttttccacagcagacatggtgattagagaagagcaatgagaataacaacttttgaggcacgcccaaatctctcaaaaccaatatattcctgattttattctcttgcttactaccctgtggcaaagaatgggacaacttttcgaacttggaactcttctcaagcaaagtgtctttgatgaaatcatagtatacgctgatagttttgtgccctttctttcccaatatttccggaactgaagaaacaatctcagtgatttcagagcttgaagctcctctagactgcaaaaactgaagcttgggaccaagtgatttctcagcatctgctataagcaactgtgggtaatccctaatgatggtggagatctgagaacctgtgaacccatgacttgtcaaaagattcagaacagaatcaggattgttcttgtcctcgaagctaaccttccgtgaaatggattcagcgagttttgtggttaagcacaatgaatcaacaaggtaagagactgtaaagttgtttccttttcgaccaactctaggactcaaacacgcagcagaagcagaggagaagaaattggatataggtgatgccttttgcactgaaagactaaagttacaccatttctgcaactgtaccaaccttcttccatggagtatcagagcatacatgacaacaggcaatgcgattactacaaatcccgaaaaagaacaatttttgaagcaattctacccatcaatctaactcaattcgagcacaaatctcaaacttatgttgagcagggaagaacaaaagactcaatcatcgatcagt

SEQ ID NO: 4810 - DNA, 527 bp, Arabidopsis thaliana landsberg
tgggagaaactgtattttctgtttcataattcagtatctgactgatgcagctggaattggtaattggaacagttattcacatgatctccagctttgctttggggtgaaggattttctggtacactttaaatccacttttttttctttcttgaaatagttcctgcccgtttacatatatgatattttattgatttttatggcatcttctagttgattgctccacaaagtgccagtggggtgcttcttgatacaccagagtctagcaagcttctgagtgcggtagctattgctttgtctaactgtggcaggtacgatatcctagccagtaacatcactttagcttttgcatcgtcaagtgaatctcttacgatacactgtttctttgagttgatccaaattgcctaccaattactccgaagtcttggaaatcagagttgatagaaatgtgttatccctgtctttgctaagtagataatgattagacgcatatttggttgagtgattattaagaattttatactactttg

SEQ ID NO: 4811 - DNA, 1247 bp, Arabidopsis thaliana landsberg
agcttttgtctcagaaaaggttacataagctgcagtgcggtgcttgtctgaagttattagtttcacaatcgttgataggaaactcgttttctcttctggtaatgaggaaacataaccggtctctctagaggttgaagatagaaacacaacaaacacagtagtgatagaggaggaagtctcttctgttgatttcaacagctcaggtagagatattccacgtaaggatgaagaagaaccagtgcaagagctgagaaatcatcaggatactattactacgcaaagcgtccgctctgaatctcaacactcagatgatgaagaaagatcgagcaattctagtgaacaacaacagaaggaggtcaaatctgttcgtcggcgaggtaaagggtcaaaagcacctgaacccgctgctcctgataatgccagtctccttgaactttttgagtattctaatgtaaacagagctgcactcgcttatggaatggcgcagttaggttatgaaaagccagataagcaaaagtctttcatgacacaggactcgctgaaaccagaatcagtagctacagagacagaggtttcttacaatggatactctaacaccgagatttcagaagattcaaggtactcaaacagaaagggtagtgagtacggttcgacagagatcacaacgaggtcctctactgatcaaaacgaagaccagatgaagtcattagaggtttgggttaatggacatcttataccagaagatcttgttagcagtgctgagaaattagctggaccaatccaagctggaaagtattggtacttccatgaacttcagcatccactgtttctctcttgtttttgtttttccctttactcagtttctgatacatgtctctgattcaggtatgattaccgagctgggttctggggagtgatgggcaaaccgtgtctcggtataatacctgtaagtaccttcacattgttctctcaagttgattattggaatggtgtcatcaaattgatgaagaaatggttgacttacttgttgttgttgcagccatttattgaagagtttagccatccaatgctggataactgcgctgcaggaaacacagacgtgtttgtgaatggaagagagcttcacaagagagatttcgagttacttgtgggtcgtggtctgcctagagccaacacccgttcttacattgttgatatatcaggaagaatccttgatcaagattcaggagaagaacttccagccgggc

SEQ ID NO: 4812 - DNA, 2706 bp, Arabidopsis thaliana landsberg
cgacaccaaaaaaagccccatacaagcaacaaaatcgagcttatcgatcttgaagatcaaaatggtagcattaacgtcaaccaaaggaatcacagcgttgatgatgatcgctgcaagaattgcgttgggtgtgtatttgaaaagaggagtgaggaagagaagcgttaagaggacgacaatggacatgatgatgttggagactgccgtttgacatccggccataaagttgacggcggatcttgagaaagaaccggtggatacatagcaagaggtcattgaaccgattacgttcattgctcctaatgctaccatctctttgttaccatcgatttggtagtctttcattgctgcaaatgttcttcctatcgctacagcttcctgttacaaagatttgtgcttgcatttacgtttacatattaaatcaaaattcaatagtaaaacataaattttagggtttatgtaagtaagtaccgtcaaggcaaccatgcctgagacaacgcctatgcggaagcccttgagaaggtaatcgcccgagaaatatattagacgcaaagaagaagggttcagacctttgtcaagatgtttcacctgaggagaagaaaattaagacaaggcaaagtaaaataacttacatcgcaagtaactttagggtttatatatttaagcctataaggttatgcttactatctgaactcctttcttgtcggctcgggttatgtagacgaagaaggttgaaatgatgacagatactaacggagcaatcgctggaatccaaaacagtttcttgtttttcttcccctgtttttataagatcatataagaacaaggaaatagaaatcacgagagattgcaatcgatagtttggtgaattacgatgaacttggagatgagaaggaagatcaagaacgatgcactaatgagtattgtctgccaattccactgcaagcatttgatatcaaacggtgaagatacataaagagtgaaagatactaaaaacagagtgattgaaagactctttactccgtgatgggctgagctgattacggaagaaagaaccgcgatgatatcggttttctttgtgaacttattgattcctaggaagcctttgagctgttgcagcgcaatggtgatggctgctccgcccatgaaacctaccaccgccgcgtgggacaagaaatcgatcaagaaacccaatctgaaaccaaagttaagaagttttagataaacaagaatctctaaacttgatgcatagtttatttgtgaggttggaattagtatttagtatgttacctgaagaatccgagtgctgcttgagtgacaccggcaaagaacgtggaggtgaaggctaagcggagatattcattagggtttgtgttggggtcgatctcagcacgaagcagagtacctaataggagtgaaaccactgcaacgggtccaatcgctatatcctttgagcttcccatacatgcgtacaccaacggaggaacaaaacttgaatctattcaagaatttgaaacaaaaaaaaacaccaataataagaattgttgtatcattttcaaagaaaacatacaataaaaacgtaaatgaggcttaattaggatattgatattaacttacatagaccatacttagggtcaagactcgcgagctttgcatatccaatatcctgaaaccatttgaatacatatcagtttatgctttcttacataagtaacttgtggcagaagtaattgaaccttttttctaacctgaggaatgcagagactggctatggttaaaccggcaataagatcgccgcgaaacaacttaagattatattttcttccccactcgataaccggaaagacggactggataccgagcatgagctttttggattttgactggtccttgaaatgccttagaggatcatcgtggaagaaagtttctttaaaagtgtacatgaactcattgaaaaggttttgcttaggaggaacttcgactttgtggacatacggtgtatttgcttgccgcggggaagatctttccaccggggaaatctctccgtcatcgtccacaggatgagctctagccgacattgctatgtgtgttttgtagcaaacactgaagagacgtatttatagaaatgtcaacctgttttgccaaaaaaaatagtaatattttacattcaaaaacatcgttaacgtaactaagaaagaagatgacttcaggaaaaaaaaacttaagtggccctagttgccaaaaaacgccattagcgcacccctaagaataagaaattagtttgttcgcactagtaagttcgtattagtatctccactaacaatcaaattgatttagctgccgcaaacgtttaccattgtaacttttggctaaacttcctacaccaaacgattaattgacttatagtgaaaattcttatgctatatacatacgtcgtcttagaatcacttttagactagcaattattgggtgatggaaaattggttaggttcttctaaaaccgtataatgccgaatatccatgtaattatataataaaggcctgtgaatttagaatagagaaaaggcaaaacacatcttacgattgaaatcgatttataagggaatcttcataaagtcgacgaatatagcgaaagaaagaacaaaaccattgatagtggaaggtaaacaaagcattacatatctaccttggaaataaatacagtga

SEQ ID NO: 4813 - DNA, 1167 bp, Arabidopsis thaliana landsberg
aatctaattgggtttatgataatgtctcactcgttagctgaataaaagttccgtacgagtaagctgtgacacgtgtccctttcaatctccgctcaacgcggtttggatcgcttctcgccgtccttatataaacttcctcggccccatttttcatttctcacctctctctttctttctctaacttcttcttcttctcctttcagaaacccagcgaccatcttcttcaccggttatggtgacttcggagggattagcaagcgttgattcttggttatatcgccaaggtttcaacgttgattcatggttgctttctgataccttctctcacgacaacgatttgctcgcaagagctctccataccaccgtcacagcccctcatactctcactccttcctctgctttcttcgattcctccgctgtttctcacccttcttccactaacacactctcctctatcgtctccggtgcttctgatccagaaatcatcggcggaggagctaaacggaaacgtaactgccttcttaccgacggtaaagccgccaagcgccgcgctcgtgcttccaagaaatctcagactactttcataacggcggatccgtccaactttcgtcagatggttcagcaagtgactggcgccaagtacatcgatgactcttcttcctttggtattttcgatccgattgtcaagccggagccgcttaggttcgttaacaaactgccttgtggtccttcggatcgatccacggcggttccaatgctcgacacatcagcatttttgtctaatcatcaccaggagaatctcgcagtgggaaatgctttctccggtaacagcagcagtgtaggattaccgtcggggaagccaagtgcaacggccgaccccggtggttctgccgtggagtttgataattacccaacatttccaacgcttgaatcgtggaaggttatgtgatctgtttctttcagtcttagacgtaatctttaactttttaggtttgttttctttgcatcccttcatgaataatcttgttcatagttttcgtttatcgatgtaatggatcaaatctgagttcttttgactttaaaactatttagaggataagccacaaatctatctattaaaaatattcagctaatcgaatgagataatacaaaattctaagttggggt

SEQ ID NO: 4814 - DNA, 1697 bp, Arabidopsis thaliana landsberg
actgaatttctcggacgcgaacaccacagctaacaagtccttctctgtagttgcataatttctttgagcatcatcaagagttctacttgcatagtagatggcatgaagtttcttatcctttctatgtcctagaacagctccaactgcgaaatcactcgcatcacacattacctcaaaaagtagatcccaatctggtggctgaacaattggtgcgctgatcaaggcttgttttatctgttgaaatgcatcatgacactcttgcgtaaactcgaatttgatgaatctcatgtagaaaccaacatggccaaggaaactcctcactgctttaacattatcaagcgcttgaagacttgtcataacttcaatcttagctctatcaacttctatagcatgctcagaaatcctgtgtccgagaactatcccatcctgcaccataaagtgacctttcttccaattcaaaactaaaggtctctcctcacatcttgctaacactctatagagattctctaagcaatcctcaaatgatgatcgacaaactgaaaaattatccatgaaaacttccatgatatcctcaatcatgtctgtgaagatgataagaaggtttttttggtctgcttatatgctgaatgctgtgtgagttcagttcaattcccctaaaacacaaacatgtcgatgcaactatagggggtgtcaatccagtccactgttattgctagcaatcaagatgtgcacaaaaacaactaagtcaagccagattataatgatggtggatttctagtaacaatcctaggtcaggattcaaacaagtaaaaataagaacttaagagccatactcgatcattgggtcgagtagaaccaacatgtgacaaatttatgaactaaaatgcaatcaacaggcaaatagaggatacacataacaggtaaatagaagtgcaatcaacaagggatacaattaaacctaatagaagttctaaggatggattcattgataagggtaactctagggttcatgtcacgaccgcgtcccgcattcataaagaggcccgtttgttttaggggaaaactagaccatggtcgagaaacggactaaaatacttagtcggaagaatgagaaagttcaagctgaaccagctaagtgagctggacaagctagcatgaactagctagctaagctaggtgagctaaaccagctggaagactagctagctcagctaggtgagctgaccgacagctcgactgagctcggtgagctgatcgtgtactgacccagctgggtggtccggtcagctgacactcgagctggtggactgtggtagctcacgggtgaagaggtgtctcggccaaaaggtgtaaggtcgagcgggtaccaacgaacggttgcatcgcctattagatgcaaggaacggatgtgaccttttggaaggatgcaaggaacggatgtgatctttcggaagggtgcaaggaacggatgtgatgcttcgggaagcatccattcgccccttatataagggaggacgcccaaggcctttggaataatctcacatcatctcacaacatccaaaacaccataaaacattcttaaaggagtcccaacacatcctagagttgttggtcggaaagggggtgcggctttgcgtttctaactcgaccgaactgatgcgcatgctacctcccgatccaacggttcgatggaatgt

SEQ ID NO: 4815 - DNA, 1465 bp, Arabidopsis thaliana landsberg
ctttttatcgcagctggaaggaagacgatataaatagggaaacttacttcagtccccaactagaatataacaaaacaaaaccaaattttccctctctttcagttgaggcatttacctgagaagctcagctgcagttttcagatgaaacaaggatttatcatctttgggtatcgatgaatcaatctcttcccccttagcaaattcgatattcccgatatggagaatggctgccacgacgctgaaaatagcatcctgaaacaagatatcagcaaagcatagaatccgtttacagtggcaatattgcagctttggctaaaatctgactgatggagttctgtgataactacctgctcctccgtactgatcccgacgacatccattgcccgtcttgtggcatgatattcctccgcatcatttatactatccagctctagacatttagactgattgagatagtgatatttctttggttcctccagcttgaatttcttcacatcctgatagtacaaaaaaacatttcagataacaagatgtgagtttgtatgccaaacgaggctcagatactggacatgtatggtaagttattcggtgttactactccgaagtgaactacaaaacttacttcttgtggagcagcacaaagcatgtagaaacagtgatagtttctttcaggatcagagacttgacaaactcgtgatctttccaacaaataagttcttatggcagctcctgatattcttcccttttcgtcaaactgaatctccacgaacttaccaaagcgactataaagtacacaaataaacagttcagaaacacccaaagtggtgatattgaaaagctttttcaaaaaaaggttacctggaattattgttcctgacagtctttgcatttccaaatgcttctaaaacaggattcgactgaataaaagacacaatgaagaagcttataagaaccatatcaaagcaagaaaagggaaaatcaacatcatatgcatatggaagtgagcaaatagctgctgactattcagtttgccttaatgtaaatgactactagcattgattttctgaagtttaagttatttgttcactctacagttgctcttgaaaagtaaacacagccgaaatgaatattcgaccatcctctgaagtctgaagttttagatatttgttcaattatctaaaaacttgatttgactaaatatgatgtttttttttcacctccaacactttctgttcaacacttcttccctcagcagcagctctccctcccatgtaagcaagatatctcataagcaactttgtgctttcagttttaccagcaccactttctccactaaccagaatagatggacttactccatcattaatcatctgtctgcattagaacgaacacgaaagcaggcaagtttacatataaggatcaacaacagccacaaaaaaataaaggcaatatatatcactagtgt

SEQ ID NO: 4816 - DNA, 549 bp, Arabidopsis thaliana landsberg
ggccactggaattctgaagttttggtattattatttactccagtttctaatgcaaaattaactctgagtctgggatgggacaaagatctgaccattctttatatatacaaaaaaaaaagacatgtgtaactattctttcacctctaacactttctgctcgacagtccttccttcggtagcagcacctcgccctcccatgaaggcaagatatctcataagcaactttgtgctttcagttttaccagcaccactttcaccgctaaccaagatagactgactaactccttcattaaccatctgtctgcaatagaatacaccaagcaaacagtccaactacattaataataacatcggaaagcaattattcgaagagtctgcgctaaattacctatatgcagcatctgcaacggcaaaaggatgtggactcagctcaccgagggaagcacctttatattgagtcatcatatggctactatatagatgcggaagtcttctaaacgggttaacagcaatcagtatgcttcccgtatatgtctgaaagtaaacgag

SEQ ID NO: 4817 - DNA, 935 bp, Arabidopsis thaliana landsberg
  unsure (1)..(935): unsure at all n locations
atcgcaataggagaagaacacgactcctcagttccaactgatgagtctaagaaatacctgaagattgcgtttgagcttttcatgtgtgtaactaactgagttgaattttaatgttaaatgcaacctttctgatacttggtttattgaatatgtgataatgtgaaaataactcattcctgattccatgaatttctgcaggtgtgatgagnnnnnnnnnnnnnnnnntctttgtaaacgtataatggtgacacctgaagaaacaatttccagatgtctggatccaaattctgcggccctcagtagagatgccttggcaaaatttgtatactcaagattgtttgattggtatgtgtagtatttacgagcacattatttcttgcagctggatgattctttttcttgtttccgaaagttactttcattactctttgctaacttcccttattgctcttgtaggatcgtaaacaagatcaataattcaattgggcaagatcctgactcaaaagacatgattggagtgctggatatatatggatttgagagttttaagacaaacaggtgcgtaatccggtatgccttatgtttggttaatgcaataaaaccggttttgtataatactatggaacaaaggctcacatgaaacatcagacacatgacatgaacctttagttttggaatggggtattctcattgatattactgtatatcaagaaaacgggagacttttaacttttggaattttatttataagacagtgtttgctattcttaagaatatttacattctgatatggaagaatgggaaaacatttcaagtgcatgttgcttttgatgcttactagtgcatgatttttttcagtttcccgcaattttgcatcaatttgacaaaaaagaaaaatcagcaacattttactcaggtttgtctgaggcctgctg

SEQ ID NO: 4818 - DNA, 444 bp, Arabidopsis thaliana landsberg
aggggctgacatatttattataggtgacacaaattcttattttgttaccaaaaatctatcgtgtaacaacgtaggtgtttttgaaatataatgttttatgttatgataaaattgttttatgttgtgacacattaaattatattaccataaatatgtcgtttgatggcaaatatgttaaaggaaaaataaaattgcttgaatgacttttataaatgttatgacatatttttattttttagtttctataatgatagttttttttttgttctggttgatttttataagtagaaaaatatttacaatggtggtagttttttttattaacacatttatttaaatcattaccatatttgatattcccagttttttttttaaaaaaaaaacattttggttaataaaaaaataccttttttttggattttttaatttcattttaaacttttt

SEQ ID NO: 4819 - DNA, 1667 bp, Arabidopsis thaliana landsberg
ttggttagctctaaaaaaaatatatgtttttttttttgttgaagtattttaaagcaagttaattttttttaaaaataaaataatattaatagtcgtttttttaatgagaacaatacaaatgcgagtttaacctcgaaaaactgtaaaacaaacctcaatcttttcaaaaacgacaacaaaaacctctaatttgttttattgaactttggacagtttttttctttattgtacctcaaatttcacatttaggccattcttgaagcatgcttaattacaaagtagcattgtttatgtgaaaaagcacgagacatcttatttcagaaacacttctgtttacaatatcaattatcaaagctgcatcgtttatgctataactttagttgccattatccatcatagcaaccttaaaccagttgcattacaaattttgaattttgaggaaccaacttaaggaagcaaagataaaatttgagagacaaaaggaaagggtaagagacaacattggagtgcgatttttttagttcaactttagtttcagcgatacttcagaccatcggttgcgcctctggtccatgatcactgcaaacagttgcacaatcgccccataatgagtccctccaaaatatttcatagaagaagcttatgtataattaagtgttttaggtacctaaagcatctcagagatgtggaaacgtgtcaatccacacgatgaaaactactctttgtatctcatcgtctctttctcgaacccaatcgttgggaattgcttagcatattcttctaccatctcacggagctttgacatctctgactgtaatttctcatttgattgcattgttgctacaaagtcttttaactttgttcctgcagtacattataggtatcaatacaatcccaagcatgacacaaaaaaagtaaaccgaaccaaaagactttttatatataccttgagactctgctttgatctttaaggctatcttgacggctaaatcaaaatactccgccacttttgcaaaatcttcctcaatgaatcctcttgatgtgagggctggtgttcctgtaaccataccatcatccatcataagaacaaatcggaacatacacgattttcttggtgatcaacaggtctctatgaattagcatagaagtcctttttcataagtagtagattgcaagaagcatgaacatttagcacttttcgacatactaacactttacttgtttcagtgttcttttttgttcaaaaataacattaatggtggtaaatagcagacgtatgaatgtttactactctttcgacatactaacacattacttctttcagagtttttataagagccttacccatacggatgccaccgggaaccatggcagaaacatcaccaggaacagtattcttgtttgctgcaatatgtactaattctaatactttttccactcttgatccatctattccctgcaaaacccattttccaacatcaaatattttacaagagtaaattagctattctaagcacttcctactaaggttaacagtacaaaaattaaacattttacacttgattagctccatctggtcagtatatcgttagtaaaaattgaaaccacacaacatatatggaaaaaaatcatcattgtttttagtgttatcatatttcaagagttac

SEQ ID NO: 4820 - DNA, 1262 bp, Arabidopsis thaliana landsberg
tttctgtctctctctgttaagtctctataacccaaaagtcaaaacaaataggagtaacacggcgtcctctcctcaaacggtcaggaaacaaggaatcaagctcttcaaggataggcttgtagcattgatctcgttctctctgaccctagaagtaaaaagaatataccactaaaactttggttgtgatttaagattaaagaaaggatttccgcacatcattgtcagaagaaaatgacaaacaaaaatatggctacctctgctgcccagtctcgaactatattccttataatacaacgaacctgtgttagaatacaacaaaatcatgaacattttaaagtatagattggtgagaaatacacacaacatcgcaacaaacatatgcaattgtactggtgtgtgtgtcacctctatcatgtgcatatgcatacgtgtaagaaggtgcacttaagctcaacaggattcacctccccatgcaaagctacatgagcaaaccaacccacataacttaccaaactgcctaatggaactaatagagattgagaataagttctaacatgacacattatgatctttgtctcacgctacaagagctcttatacaattatgattacctaggaggctaggactaaggaaaatgaatatcaccagccatagtaaatttgaaaaaccataccttatctacatcaaccagaggaacatgtgtctgtaacgatgaatccaaccaatcatgggatgaaaatgatacctaagaaagaaaagaggaacattagaattagaaaaatcacatgaattatgacaattttatagtcataaatgaagtataatgcaaaaatatatacaacaagcctatgcttgacagttgaatgctttcttaatatagactaacagttaaaattcatttgatctagaatgccaggaaatactcatatgatcccaccaaagatcttaactgatacaataactaacgaatctgcgcaaagctaacatagtcaaaaacgttttctgggcggaactgaggtataagagtatatgagttggcattacactgccatggtcatgatttaactggccttcatgacattcacatgtcttatcgttgattcttgtgtctgcagagtcatccttgggagaatgatcatgagcttctttcctctgaagctcctgtatttatacaaataaattaaagattttaaatgacaaggataaagttccaatgtcttgatctgacctcgatagacactcctgttattggctcacgaatg

SEQ ID NO: 4821 - DNA, 264 bp, Arabidopsis thaliana landsberg
taactgttagggacaaaacgcaacatgaatgaatcaatgttctcaagtgtgagaacctgatattcctatcatggaattgtatggaacatgccaaacttagagagtaaagtgtacgtgttctattttgtaatgcaaatatgatgcaattcaaatcaaacacgagtttatctcctttggcacgtttctcaatatagattgctgcaccagaaaaagacaattttttctgtttgaagcctcttttgacatgaagcgaaatgcggcaag

SEQ ID NO: 4822 - DNA, 1691 bp, Arabidopsis thaliana landsberg
  unsure (1)..(1691): unsure at all n locations
tatttgattagtacctgctgcattcactctccttacatagttaacgtatatgatttgcagcacccctcctgcctgtttagtccctggtgctggacttggacgtctggcccttgaaatttcttgtctaggtatgcaatgcggaagtaattttaattgtatactttatgataataaggtatataacaattatgtgcactggagcaggtttcataagccaaggaaatgaattttcatactacatgatgatatgctcaagttttattctgaattagtaagaatttcttattctcttgaatacattatctttttatattccttacttgtccgtctcaaagagcctctctgtcctccttttctaggttgagatatttggtcacccatgttgtttcagaaaatagaaatcagtttatccacaattcagtatttcacatctttttactttcacaccagccaacctctaaacttcaaactgtttttctaaattgctcttggagagtccacaatttactttcttctctgatgtatctctaattaagttgaggtagtttcttacatttggtccagttttgagttttgctcagcttgttttttgttttcatcagtacacaagtccctggtgagtggacaatatacccctggatacacagcaactgcaattcgctctcggacaatgatcagctacgcccaattgcgattcctgatattcatcctgcaaggtatgccttatcgaacaacaggagaactggcctatggtttttggaatgtgttggtagttttaggtataaaggcttttctgtttttttttgtgaaacataagggaactcaattgaaagggattaggcaacttgtattggtgatttcgtgtagctacaatcatttaaacgtcactttactaaaaaggttaacattttgtgagcagtgcaggaataacagaaggtttctctatgtgtggtggtgattttgttgaagtatacaatgaatcaagtcatgcaggtaagaaacggaggctacttgcttgtttgtttaagccaatacaccactcatctgtttaattgtaaccgttaattcttaatttcaggaatgtgggatgcagttgttacttgctttttcatcgacactgctcataatgtcatcgagtacattgtataccatatccaagatcctaaaagatggaggagtaattaccctgtcacactctttccttcaccgttgacctttttcgttcttctttgatcttttctttgctcctgacatatcttaattaattttccatcaggtttggataaatttaggacctctgttgtatcattttgcggacacatatggccatgaaaatgtaagcattggagttgtcccacaatctcaccataactttggtatcacaataataattttcttgtttctccttaggaaatgtctatcgagctaagtttggaggatgtaaagagggttgcttcacattttgngtttgtgatcgaggtaactacgcgatataaaaatgacattttctttttgatcataaaacatttcatgttcttccacactcagtacttgtccgtaacatttgcagaaagaaagaacaattgaaacaacttacactacaaatccccgggctatgatgcangttagctttntcatgtccctatgatttttcatttatctgttctatattcgggtggtgatatccgata

SEQ ID NO: 4823 - DNA, 261 bp, Arabidopsis thaliana landsberg
  unsure (1)..(261): unsure at all n locations
tggaacctgcttcactcaaatcatgaccctgaatcttangattcattgaactagaagcaacaacagggggctaggacctgcttcacgactatcaagatcaagagactttaacttattaacaacatctgaagaagaacgctcatgctccttacgaactttccaagcatcagaagaaatcgcaaaatcttcaggaccagaaacaccagtataccgataaatccgatctatttctccatcatcaactccatcgactcgaaaact

SEQ ID NO: 4824 - DNA, 1599 bp, Arabidopsis thaliana landsberg
  unsure (1)..(1599): unsure at all n locations
tattcgtgtgaagatcgagaaactcgaggctttcacaaccagagatcgccggagggattgacccgacgagacggttctcacttatatcaacaaagttgagatttttcagattcccgatttccgacgggatacttccggcgagtctgttaccgttgagtcttaacnnnnnnnnnnnnnnnnnnnnnncaatatccggaggtatgaaacccgacaaatcattggagagaagaagaagcttcgtgaggtttcgtaacccgaatatctcttttgggatggagccagagagactgttgtaagagagatcgatggcttgaagctcacgacactgggagagactttgagggatgtttccagttaacttgttctgccatgcgaagaacatggttaagcttcttaggttactcatcaatgacggaatctctcctgtgatgagattattgtcgatctctaaatgcgtcagcttcgtgcaattcgttagctcttcagggattgttcctgagatctggtttacactcagctgaagctcttgtagattctcaagttttccgaagctccttgggatggtcccggtgaggagattctcggaaaaatcgataagccagagctcgggacagttcccaagctcggttgggattttcccaacgagattgttctgccataaaagtagactctgcagcttctttaaacctccaatggtggtagggatcgatcctgagattgaattctgatacaagtagaggttttggagctctgtgcagtatccaatctcatccggaattggaccagacaagagtgacgtgtaaattgctattgtctgaacacgtttcaggtttccaatcgacgccggaagtttcccggagagactagtctcagcgagaccaagcattacaagattctcgcagttacctatctcccaaggaagctcacctcttagattcttgttcccaccagcacgtaagacttgtagattcttgagctctccgatactccttgggatctctccggatagcttgttgtcgaaaagcataagctctacgagacccgaaagattcccaatctccatcggaatatgaccttctagattgttagtgttcagagacagagtcttgagtttcttgagcctgaagatttccacagggatatcaccggagagagaattatccgacaaatcgagtaactcaagctccgtgaagtctccgatctccttggggattactccggtgagattcagtgaagataaagtgagggaagtaagagacttgaggctccggagactagtcaccggcagagaaccttgcaagtccatacctttgagctgtatctccgaaacttcacctctacggttacattttacgccgacccaattgcagggagatgtgtcggcgacgtgccaggaggaaaaagcgtcgccggagatgttcagttgagacttccatgacaagagagcttgaccttgttggtcgagagagaaacaggggatgaagaagaaacagagtagggatgagaagaaggagagtctatagatatttggtggcatcggagaagacgaagatgaggaagaagaatgagagaagtgcgtgggattgtaaagcgaagagc

SEQ ID NO: 4825 - DNA, 7750 bp, Arabidopsis thaliana landsberg
  unsure (1)..(7750): unsure at all n locations
gccgttccgacgactttctttcggcttttcacgcgttgtcggctcgaaagtgcgattggctgaagcatttctctcgagagcgagttgagcgtgcgcttcgtcttcttcacggcgtttcttgtcccactagctcagagtcttccgatcatcgcactcaatttttcgtagatatgcaatcgacgaaacttactctgcgggaggtctatgccaagaagaaagaggataaggaaaggcgattgacggaggagaggcgccttgttaatgcgggattgatcttgccgcgggccgattctgaagcgacccaagacgggaatgttattcccgatgctaccacaccgcagactgttcctgaggcgtctcgagatggagtcattcccgatactgccgcgccggttgacgcgacgcctgctgaggctcggggaaccgagccgtctgttgctgcgcccgaggcggttgtggcgttacttgcgaatgacaaagcggcaggtaagcgcattcgggttgacgatgaatcgtcaaagaagaagaagaagaagaagaagaagacatctggctccgaggcggaaaaaatactttccatttttgaagatcgtactgcctcggccaatctgctcgggggatgtgttggccccttgcttcctcctccagatactcttctggaatctcggaagtatgccgagacggcatctcactttctgcgggtatgagctttgttgcttataacttattttggtgttgtcattgtaaatctaacttctcttttccaggctgtcgcttcgatgaaccggatggtacattcgtatgattcggctatgcggagcaacatggaggtgctggtaaattagccgaagcggagtctcggattcaggccatcgagcgagagaagaacgaggcgctctccgaagctgctgctgcgaagcttgaaagggaagaggtcgagaggatggcctacgtgaataaagagaatgccattaagatggccgagcagaatctcaaggcgaattctgagatcgtccgtcttaagcggatgttatccgaggagagggggcttcgtgacagcgaggtggctcgggccattcagacgacgaggcgggaggtttccgagaccttcattgccaaaatgaagaccgccgagcacaaagtgtcgctccttgatgaggtcaatgaccgattcatgtacttgtcccaggtgcgagccaacgcgcagctgatcgaggccctcgaaggtggcggagttctggagagagagaaggagcaggtcgatgagtggttaaaagattttgccgatgctgaggtaaattttaatcgcttaatggccgagctgaaagatgatctcaaagctccagctcccgagcccgctcctctgagtccgggtggtcataggtcggtcgagtcattagccgacgaggcgggaattacagatcaagctggatcgctcctccctgccaaggataaccgcccatctgaagatctcgattagggacccgaggcggnttttgttttcctcttctctttctgctcggttataatacttatgcctagatggctttatccgatgatatgtagaacctgtgcctggacggctttatccaatttaagtcactttttgaaatccaaaagttatggtttattagtcccgaatcgttatattttactagtataagattgatttttttttaaaatgaaagtctctcggttgcgacccgatcgtattcacttctcgactagcgtttaggaacgagctgggatactggtgttaaaagtataaccgggtttctgaagatgaaaatttcttatcagaaataatctgataaatttcacctcgtatttgtatagcgcgctgtagccgaataggtgtaatggatactccgagccatcgctcattgtattagccgagtaaaaagttgcgaagaaattttattcatgtttcggttcgaaaacctacaagataataaaaatgggagtatgaatatacggacccactcccccattttttaatggggggtagctgaactcgtccgaagacgagctgcctatgtacccttttcagggatcaagccacctcgtagttcaagtttagtcacctcggatttagttgtagtatttccttaggtgcattgcgttccatgatcttggaacggctttgccgtttaagtcagcgagcgtacactccgggtcagacgactttagaaattaagtatggtccttcccagttcgtcccgagttttccagcgtttggttcggcagtgttctggaaaactttccggagacccgatctccttcgtggaatcttcgttgccgaacatttgaattgtaatgacgagtcgtttcattctaataattttgtatacgaaccagggccgaatcttttcgttcatcaatcagatcgagttcgtcgaggaacctttgagtgttatcaggggtgttctcgggggatagactccgtcgtaggcttggcactatcatctcggccggaattatgcattccgtcccgtagactaaagcaaaaggggtttctcctgtggctcggcgaggagttgtccgatgcgaccaaagtacaccttcgagttcgtcggaccacgagccctttttagcatcgagccgtttcttcaatccatcgaggatcgttttgtttgaggcctcggcttggctgttcccttggggatatcgtggtgttgacttgctaagtcgaattctccatttatcacaaaagccttggaagcgggttgatataaactgcgagccgttatccgtgacgatctcataaggtatcccgtggcgacataagatatgtttcctacacgaagctctcgacttgagcgtcctttatgctggcgtaagattcataaactatccacttagagaaataatcggtcaagacgagaactaattttttctgcttcgagggatgcataggtccaattatatccattgaccatcgcatgaatggatacggcgaggcgattgatgacaagagctcggctggctgatggattgttggcatttgacatttttcgcatcgctttgaaaaaatttcgcagttttttatcattgtcggtcagaagaatccgtggcgttttatttnnnnnnnnnnnnnnnnnnnnccggaatgatttctgcacgagccaccgtgaatttctttcatgatcttgcaaaccgcttctccttccacgcatgtcattaagggtccggataatcgccacttgtaaagtttttcatctactagaacgaaacgtgcagcctgagctttgagtttccaagcttcccatttgtctgagggcaattttccttcggctatctagcctttgatgggctctatccactatgaactgcactcgtcttggttgtcgcctggagcgtcgttgtgatccgtgctgatttgtatggggaggacatgttcttcttcgccgagctcaatacttggcttctcaatgaattctactgggatgactcttctcaagctcgggtcagatgttgaggctagagcaactagggcgtcagccgatgtattttcccctcgagggatccttgttaactcgaactcgtcaaaattcttcgccagattttgtaaatgagtcagataggcttccattctttcgtcttgagccgtgtactctctgttgaactgattcgcgacgagctgggaatcgcaaaaagcttgaattttttctatctttagcccccgagctagattgagtccggcaacgagggcttcgtactaggctacattgttggtagcctcgaagtttaatctaaatgactgctcgaggacctctcctgttggcgaggtgaggcggatgcctacacccgagccttgcttcgatgacgagccgtctacgtgcagaagccaagttgtatcgagtggattttcccggacctccttagtgggcagttcgacaataaaatcggctaggacctgggactttgcacatgttttgttctgatactcgatgtcgtattcgctgagctcaattgcccacttagccatacgtcctgattggcttggactgtgtaagatggcgcggagtggcatggatcccattactatgatggaatgggattgaaagtagggtcgcagcttccgagccgacattatgattgctaaagcaagtttttctatttgcagatagcgagattccgcaccggtgaaagtctgcgagacgtaaaaaatcggtttctgctcacctctgtcttctcggactagcactccgctgaccgcagtatccgatacggaaacatacaagtacagcggttctccgattacgggttttgcgaggatgggtggtgttgccagatacttcttcagttcatgaaaagcttcttcgcatcgggtcgtccattcgaacttcttgtttccccaaagcacatcgtaaaaggccaagcatttgtcggttgagcgagagatgaaacggttaagggccgcaactcttccggttaggcgctgcacttctcgcttgttctaaggtaacgccattcccaaccatgcctcgatttgcttcgaatttgccttgatgccgcggtgcgtgactaggtacccgaggaactctccggatcttactctgaagcggcactttgcaggattgagtttgacgttgtataggttaagctgcttgaaacattcgcgtaaatggagtatgtgatctttctcagccatagatttcactaacatgtcgtcgatgtaaacttccattgtcttcccgatctgtaatgcaaagattttgtcgccgaagcgttgataagttgccccagcgtttttgagtccgaatggcatcactcggtagcaaaagatgccttgttctgtgtagaatgcagttttttcttgatcttcggggttcatcatgttctggttggaaccagcaaaagcatccatgaatgatagtagcttgtttctagaggttgattccacgaggcgatcgatgtgtggtaatgggaaactgtcctatgggcaagctttgtttaggtctgtgaaatctacgcaaactctccatttcccgtttttcttttttactacgactgggtttgcgatccagtcggggtatttcgcctcggtgatggatccgattttcaataacttttctacctcggcttttacggcttctgctcgttcccgacccaattttctcctcttctacttgatgggtttaaaaggtggatcgatgttgagctcgtgtgatacgatgttaacacttactccgggcaaatcctctggggaccaggcgaaagtattgacgttttctttgaggaaaatggtgagttcagctgttagttcttctcctagatctccgcccatttctacgcatcgctcgggctttttgtcgtcaaggcaaattgagatgaccggatcgggagttggtatcgtagattcccgagcttcttcggtctttaattgctacaactgctcggagattgacttttcttcggctcggccaagtttggccttcttatgattcgcgttggccgtcgattcagtgacggggttcctgagcttgtacgctgccatgaagcagatgcgagcatttttctggtttctccacatggttttcacgccgtcgtgtgtgggaaattttaggcataggtgatatgtcgaggcgacagctcggaactgatttagccatagggtgccgataatcgcgttatacacggtcggttggtcggtaacagaaaaatcgacgatttttgttattcctttggctcggactggtagtttgatggttccgagagtcatagtggtttcacctgagaacccgagcacaggtcgtggagttggcacgatttgcgtcatatcgatcttcatttctcgcagagttgtaagaaaaattatgtccaatgtgcttcccgtgtcgactaggactcgttcgacgttgaaatcaccgatggtcaatgtaatgactaagggatcgttgtgtggacggtctaaaccgttggtatccctttcgtgaaaggttacttcgtcattcagtccatttaaatggtcgcgtcctgttccgattcgcgtcggctttcctttgatatgccttgattgatgctgccgtgtcttgacagaaagccgaatcccctaaaattgtgaaaatccttccccgagcagcttctggctcatcgtcgtttgtttcgcgattaccccggcctcttttgggtccttcggggttcgccgcgggggctgtctgctcgggattggccacagcgttgacctgctcggttttacctttttctgcctctaaatcctcgatggtcaaacctccaccaatttctccggccaggaattttgctgccaaccttgctccgaggctacgacatctggaagtgtgatggccgtaactcttatgaaactcgcaatattcttgctcttttcctgcggattgatcttttgtccacgtgtaggattcccgaccgcgtcctcgtccgcggcctcgccctcgggctcgggcagcttcgccttggggtgtatcggcctggtaattatgggctccggagaaatttcgtccttcatggtgaacgaatgtcccaccttgggcgcctttcttgtgattcggagcgccaggttgaggtttatcgatgcgaggcgtttgcttggtcggtttgggtcttttagctagtagtttcatctcttcttcattggatacgtaatccgaggctcggtgcaaggcgtctcggattgtcagtggtttgaacaaatttagttccttttgaaattcggatttgtaccacagggatttcttcagagccgagagagccgccacgtcgttgattccttctactttgnnnnnnnnnnnnnnnnnnnnnnnnnnnnnnnnncgaagtggctcattaggctgctgagatagtgaccatagatcggcgtctaatgtgtcgggatcgattagcaccgaatattgctccacgaagagtgttgatagctccagaaaactgtccacagaatttccttcgagtctcgagaaccaatctagggctggccctttcaaatgctcgacgaacaagtgacagagaccggcgtctctttcttctggtctgaatttggctcgggccacggagatgatgaacgactttaagttccctttcgggtcggaagaccgttgaaatgctcgattcttagttttcctggatctgagattatcgcgtcggagatcctgtgcgtgaacggtgtattgtgggattcttccaggatgctcggaccgcggtattcgaggataagttcccgaggtgtcttggagcccgcctcgggacgatttgccaggttttatgcccgaagcgtttcgaggttgggtcgggggacatttcatgagaattctccgaagcgttcttgatatcgcctcggtgtggattcttgacaagatctccgaggcgttttcgatatcgcctcggtgtggattcttgacgagatctcctaggcgttttgtgccccggttcgggataactcatcgatgtctcccgaggcgttgagatatggttggctcgctatcttgggtggaatccgaccccaacacaggttattcgggataactggatttctaagcactgagaccaaagcagataagaaactgtatttagccgaagcaaaagctcggcaccagtgtttatgataactcggttttagtttccgaggcggttgactggtttcagtgtaacatcagaactaagttttagtttccgaagtgctcggctcggtacgagttaggactgggtttttgtaggagtgaatgtattggagcgtttttgggcgaagctttgtctttcatgcccgaggttgttaact

SEQ ID NO: 4826 - DNA, 5560 bp, Arabidopsis thaliana landsberg
  unsure (1)..(5560): unsure at all n locations
gaatgtaattttatttgctcaaagattgatctgggctcagagctactcgaaaaacccggaaaaaggaacaacttctccctttaaaataatagaaagaagaaacttttagtttaattgcttctgcttccttaacaaagttaattacttattaagatttctatgtgtagttagttatgcaaatctctattagtcttaactcttaaacatagttttaggatttaaaaccttgttgtgtacatattatcagctcgatactctgatctttgagatcatttggttatgagcttttgttaacgtgtgttggttgattatatacactaggaaaccgaagctatgagaaaaaggttacaggcagtgcgagaaagaaaggcaacactaatggctgaagtcaggtaaagacagtttcaatccttgacaaaatatatcattagtcctttcctttgatgttttcctcacttgttaatatatcgttcgtttataacctctttaacagatttctgcgacggagatacagacatttgagacaagaccagccacaagagattaaaaaggtcagaagatcaaatggtgggaagaagatccgagtggaagtgtctcctagtaacaaaagtgaggcggaaactaagcatgtttcgcttcctgacttaaaccactcggaaaaggctcacgatgaaaccaaaaccagtcctaagagaagagttcctttgtttgatctaaatcagatatctgtaagcacatttttcactcttaatcagattgtgaagagacttagaaaccaaacatgtctttactcataaattgatttatatagggagaagaagagcaagaaacagaggcagtggacaataatcaagagaacacgagagttgaagaaagtaattcatgtaagagattaatgatcagtagcattgagatgcagcagaaagatgtgaagccatcttcttgcaggaatggcggaaacggatcaaataagaggaaaatttcatggcaagatcctgtcgcagctctcagagtctaaaataagaagacggaaccttttgttcctcctcatagatcttgttgtaacatagcttcacatcaaagttagcttgcttatttacttatcttgattgaacaacatatccaattgtgacttgaaaacttaaaaaccttatccaatggtggcttattgcaaacgtgacatttctataccgaaacatgtgtcagcaaacgacatttatggaagtgatccaaaagtcaaggaacaaaattaacggtcagatgcattgacacgtgtctaaagagacacgtttcgtgtaactttaaactacattattaccgaacacaaagaaccgatctttgaaaacaaaacaagaatctttatggaagaagacgggtctgattggggcggattggctccagagatactcatcaacatcatctcaaggcttacgattcaggagctatggaccggtccgatgttcgtccaaagatcgtggctaactgtttgcagagatccgtatctctggtctatcttcgatctggagccatggttcgattcctatcccgagtcgactcacttgtggtcccctgagttcgagcagaaggtagactcaatgctacgatcagtcgttgattggagcgaaggtggtctcactgagatccgcgtccgccattgcagcgaccacgctctctcttacgcagccgataggtaaatatctttcttatcaagatcgtgattgagtttgtgatatcctctattttggaattttctatggctacgagtctgattttggacatatcaatagatgcccgaatctacaggttcttgccattagaagcagtcctaacgtgacagacgcatcgatgacgaagatagcgtttcggtgcaggagtttaaaggaacttgatatcagttactgtcacgagatatctcacgacactcttgtgatgattggtagaaactgtcctaatctgaggatcttgaaacgtaatcttatggattggtcttctcggcacattggctctgttcctacagaatacttagacgcttgtcctcaagacggagacacagaagctgacgcgattgggaaacatatgatcaatctagagcatttggagattcagttctctagattatctgtcaagggtcttgcttcaatatgtgagggttgtcccaagctagagtacttggacttgtttgggtgtgtgcatttgtcaagccgtgacattacaagcaacgtgtcaaggcttaaatggcttaaggaggtaaagaagccagatgtgtatgtgccaaggtcaggggatgtggcgcagacggagaggtatggacattggagactctatgacgagagatttgacatacaagccatgagaatctgatttctacacacacactgccatgttttataataaagctgcccatagttctgacttgggtcggttgtttgttatatgtagtgttgttaaaatggaccttaggcccacgggtctaaacgggctatttgtaatgtttgaacgggtacccatttaaacccgattactaacgggtctaaacaaatattaaccgagtggcccatttatttttaagtttttggaattttctatgctaaaacgacaacgttacgagttattcagtttctcagttctccaacgacaacttcgagccaaaacaatggcggctactacattgtacaattcctgtcttcttcaaccgaagtatggcttcaccactcgccgcctaaaccagtctctcgttaaccctcttacgaatccaacaagtaagtcttctctggaagcgttattcgaatcaaaagtttcgatttttatctctgtgtttttgtttcctctgtgataggagtttcggttttgtggaagagtcgtagagatgttattgcgaaagcttcgattgaaatggcggaatcgaattcgatatcttccgttgttgtcaattcctctggtcctatcatcgtgattgataattacgacagcttcacttacaatctctgccaggtttcatttcgaacacaatctcctatcatcactacctctgtgaatgtttttgaatcttttttggtgtaaaagcagctgcatttgcatttttagtagaaatgtattcaggtatgtgcattgtgattgattgttagaatctcattgtttcacaatccaatctagtttctacatgctaatagatattagactacctagtgtagattctctcttgttaatgtgatcagagtcgttatgtcgaaatactctacttctctggagaattgtgtttttgttttatttggaaaagctcctcgttgcttgtttgcccttgtaacgagtaattgttagatccagcaaaacctaatacattacttcttttctgcctaaagactggtcttttaagtagaatctttattcgcgttcaaagtttgaattggtgattttgtgagttgctatgtttgactttagattggttattcgtagttgaaatatatcactttatcatgaaattttggctgctctgaatatcccacatagatcccaaatttacaatttgatcatgtcttacttctagttctctatgtaagcctatgaggtgcatactattaatttctcttgatgtggtttcttctgcttcagtataaacaaaattttgaattgtatatattttctacagtatatgggagagctagggtgccattttgaagtttaccgcaatgatgaacttacagttgaggagctgaaaaggtaagaggaaaatacattctgtgtaaaacgtaatatggctaatcgattggtgttgattcctttattatgcagaaaaaagccaagaggattgttgatttctcctggacctggtaaatagtttggcctctgattatgtggtgtgtctttttgaagtgctcgagaagaatttaacacttctcttgaatttgataggtacccctcaagactctgggatttccttgcaaactgttttggaactcggaccacttgttcctttatttggagtatgtatgggtttgcagtgtataggagaagcatttggaggttagttgcatataaagaagacatggttttattctttatgttatgtatcgacaacttaaatgcaattttgtttgaacattgattaggaaagattgtgcggtcaccatttggtgttatgcatgggaaaagctcaacggttcactatgatgagaaaggagaagaaggcttgttctctggattatccaagtacgaatcaggtttttctgtgttgtataatatagttaatcataagtctgtaagaatgtgtaatgaaacaaatcttgttggtctgttggtttcagccctttccttgtaggtagatatcacagtctcgtgatcgaaaaagattcatttcctagtgatgaactcgaggttacagcatggacagaagatggtctggttctggctgcccgtcacagaaagtacaagcatatacaggtaaaacccactcaagtgtttaatgtagcttcttgcctcctccattcaaaacagagctcttgaagtcttgtaaaaaaaaattcacagggagttcaatttcatccggagagtattataacaaccgaaggcaagacaattgttcgcaatttcatcaaactcgtagagaaaaaggaatctgagaagctggcataggcttagcctgaatgagaaaatcagctgtgttcgattagtgcttccctgtaataatgtctgccaatgcaaaatgttccttggcatcttaccattgtttctacccggaatgtgtctagttctttcagttcaggacgaatctggaaaggctcgatagtattcagtgctgttggaacataacagtacatgagataagatctaatcagatctcactttcttattgtcatactggctttccttggtctaattcacggttgtggtatatatagtcatcttgcaagtgaacaagtgactagaacaacttgatcgggcacattggctctgttcctacagagtacttagacgcttgtcctcaagacggagacacagaagctgacgcgattgggaaacatatgatcaatctagagcatttggagattcagttctctagattatctgtcaagggtcttgcttcgatatgtgagggttgtcccaagctagagtacttggacttgtttgggtgtgtgcatttgtcaagccgtgacattacaagcaacgtgtcaaggcttaaatggcttaaggaggtaaagaagccagatgtgtatgtgccaaggtcaggggatgtggcgcagacggagaggtatggacattggagactctatgacgagagatttgacatacaagccatgagaatctgatttctacacacacactgccatgttttataataaagctgcccatagttctgacttgggtcggntgtttgttatatgtagtgttgttaaaatggaccttaggcccacgggtctaaacgggctatttgtaatgtttgaacgggtacccatttaaacccgattactaacgggtctaaacaaatattaaccgagtggcccatttatttttaagtttttggaattttttatgctaaaacgacaacgttacgagttcttcagtt

SEQ ID NO: 4827 - DNA, 922 bp, Arabidopsis thaliana landsberg
ataaaaatcctcttttttttctgttcttgaatcttgcagctcatcttcgtggacttaatccagaaggtatcatcttgttattaattcgtctaaagacagacaacttcataaattgttttgattgatttcattaattgttttatcatcgtaggttgtcgtggcactgacccttttggtatgaacttaatctctccattgtgacataatttccaaatatagtaattgtagttatatgtatcaattactatgcgcaaacaaaagacttaagagatgcttactgatttatattttgtgtttgaacgttggacagatccggcgttcactggtccgaccatacgaccacacccgtcagtgttggagggatccacgagtgcttacgagacaaagcagctctcaaacggtggtctgtatctgcgaattgacatgcctggtgtccctagcgacggcttcattgtggcagtggacggcaacggtgtcgtcaccatcatgggacgagctcctgcgactatgcacgactcaagtgggcgtagttacgtatgcaaggtcgccattgtccctagaggctatgactggcgtcggatcaagataatcgccaaacatggtgtcatccgtctcactatccctccctactaattaatgaatcggctcttaattaagatcatgctttcggaattactcatcatgtttaaaacaatattggaccatgcatatgtttgtctttttcttttggattcccgaatatttcaagaacactaattacatggactttaatatattcatatatatatatatatatgtacgtataagacgtgtatgaaaatattcactcgtatgtttatgccgattatatatatagcctttaatcctcgtttaatgcatggttaaaaagatttttgattaattcccaacaattaaaattaaa

SEQ ID NO: 4828 - DNA, 1024 bp, Arabidopsis thaliana landsberg
gcatagccacgtcaccagagtagaaacggccacttgagtcatggctcagagcaggagcttcaccagtcaccttgactcgcccattcgtgacagagacagtgaagttttctttgggaacaccaggcatgtctgcacgcacgaatagtttgccgtttgggagctgcttcgactcataggccatagtcgattgtgggaacgcaagtacaaatactctcattttaaacacccaatctcagtactaaatataattactaggacaagagagttgtacaggagaataccatttggatcggtgccacggagatctaccgaccacaaacacacagaaaagacaaacatttaaagatgagtaaacaattttcgaaagttcgtgtaggaaaaagccaaacttttagatattgaaagtttctggaaatggtagatggattaaaaatggaaataccttcacggaaacctgagcaaccaagaactgttgacaaaagcataaacttttcatatcagaaaaatgatctataaacgacgagcatatgatatattagagaaagatgggtgatactgaccgatgcaagaagagcgatttggatcgatgcgagtcttggagagggtaagtctaaaaacaccgtcggacatgtgagtggtcatgcttaagatcgcacagcagctgcagccaattccagtgctcgttaggtaacgacgttcggtggagtcgtgtgtgtgaaccttgggtgctttggcgtaaacaactacagattcctccgaccggttatgataaacactcatgccgccttcatcaggaactccaggcaaatccatcctcacgaacatgtctccgttcgctagaatcttgagctcagagaacccttttggcccattcgtctgaaactggttgttgattgcgtaaaaaccttctgctttctccaacatatcaaaacagagataaaccaaacaaatcagagaaatgaaacgcaaatcagtgaaaatttgaacgagatgagagaggaatcataccgggagattgaggacg

SEQ ID NO: 4829 - DNA, 564 bp, Arabidopsis thaliana landsberg
  unsure (1)..(564): unsure at all n locations
ttccaacttttagggtctaaatgctaccatcaaactaacagacagccatgcttcactaaactttattacatgctaaaggataggacctgataaactattgattcccctgataaactatctatcacactccaaactatgtacatggttctatcagcactaagcatcgactagcgttaataaaccaatactttggatatgaatcaagtaacaacagttaactactaacttgtacaaacccaatgcaaataacgtataatttcatcccaaaactcacctccgggaaaaaccaccggctctctggctctgttccatgaaaagggctctctctctttccttctcaaccctctccctcttcaactcctttaagctcttcttcccactcatcttcttcttcttagcttcataaccaccacatacaccatcatcaccctcacctggaacactatcattttcatcggtacgtttctcaaggacgcttcacacctttaccagcaactntatatcccaatctatacattntccgattcaacactctncacaacaacatgcgtggatttaacaaca

SEQ ID NO: 4830 - DNA, 1097 bp, Arabidopsis thaliana landsberg
  unsure (1)..(1097): unsure at all n locations
tgagatcttccgagcaagcctcatcatcttccagctcttctatctgccaaaggcttgacaaccttcaagaactacatgagtctcttgacaagcttatcagccgacctgtcacacaacaggctctttctcaagagcataacaagaaagccgttgaacagcttcttgatggatccctcaggatcttggatttgtgcaacatttccaaggatgctttgtcagagatgaaagagggtctcatggagatccaatcaattctaagaagaaagcgtggtgatctatcggaagaagtcaagaaatacttaacctcaagaaaatctcttaagaagtcattccagaaagtacaaaagtctttgaaggttacacaagctgaagacaacaacgatgacactttggctgtctttggagaagcagaagctattacactttctctgtttgattctctccttagctacatgtctggatcaaagacttgtagtaaatggtcagtcgtctcaaagctaatgaacaagaagaaagttacatgtgaagcgcaagaaaacgaattcacgaaggttgattccgaatttcaatccgaaaagaccttgaagatggatgatgttcagaacctagagtcatgcattcaagatcttgaagatggacttgaatcactttcaaagtcattgattaaatacagagtctcatttcttaacatcttaggccactaatgcctacaaattttgtagagtaagataatgtaaaaaggatcatcaaaataacaaagacattttttcttatatgactttgttcttgttatatctcttcccatctcatatcaagcaaccaaatcatctcaatcttgttataaaattcatagagtattctaatggtgaaacctttttttaacggcccgaagacatagaacatgtgcttgcttaatatatcatgtgacaactctgaatctctacacgtttgttcaaaattttaaaatgaccaaaaagttttacatagtttctatctcatgatctattaaggatgtgttcacatgccgtgatctacggataccgatcttgccgcttattcatcaatatcacagtngtcacaatatgcttaatcatatg

SEQ ID NO: 4831 - DNA, 1058 bp, Arabidopsis thaliana landsberg
actttccttgaggctaagtatttcttcacctctcctgatagatctccgcgctttcttcttagaatagattggatctccatgagaccttctttcatctgcgacaaagcatccttggatatgttgcacacatccaatatcttgagagatccatcaagaagttgctcaacgtctttcttgttcttctcttgaccgagagcctgttgtgtaacgggtaggcgaataagcttgtcaagagactcatgtagttcttgaaggttgtcaagtctttgacagatagaagagcttgaagatgttgaggtttcctcagaagatcttaatctggccaactgctcatcaacatgagcggcttgtgggtgaggtatcgaggggtaactgtgagatcgaacgtggaaggagacagccatttttattgatattagactctttgttattgatcaagaagattatgttgagagagataaagatgtttgttctgccttctcaatacctctccggtcaatacatatatacaccatcaagaaagagaggcaagaggaatctctgagggtggttaaacaattggaatcaagatctccgccatatcagttctctgtctctctccaactatcctcacagctcaattctctatttacttaatgcacgagcggctacttatcgacatagctggcttgtctgctattgaaactcacccttatatctgtcctatgaattttctagagtacacaaaaaacaatttagataatgcttaatcaaagactaaaatgtaaacataaaaatggaacagcaaataaatagtaaggcaaaattttaaaaacaatttttgtagaaagcttttgataaagaacagtttgtagaaagttacatgaaaacatcaataaaccaaatttgttaaatttttattctttacgtagtttttgccatgttacagtggtctgttgtaatagaagaagttttttttttttttttaaatgtaatatgccatgatatgacacgcctgcatcgcattagggttaatgagtaataatcaagaaactgtatttaaaatcaactgtcataat

SEQ ID NO: 4832 - DNA, 1411 bp, Arabidopsis thaliana landsberg
agagctaagatgtttgttctgccttctcattgcctccccggccttacatatatatacaccacaaaggaagttagaatttgaggaatcttttggtgcttaaataattcatatcattaattagatgtttgtgcgatacaccttttactaggtgacaagaggcatctcatgtaatataaaactaatggatcaagatctccgttatatcagttctatgtctctctctaaccatcatcacagctcaacacttcattaagatcaagttccttattttattttttgcacgagtgacaattaagacattgtctcttatgtgtctgagctaaatcagtttttttatggagtacaatgagctgtgagtgcatggttggagaagattacaataatagctctcaaatttatatgcatgtaatacaacctccatatcccaaccttggatatatcttgtctcccttttttctcaacaaccacaagacgtgtgagtatggagatatcccgcaaaacgtaaaatgactaaaatgtgtgacaaactttgacacatcttgtacttgacttataatgattcttgacaagagggtcgctaacattgtctttgtctctaatcagtttcatgatacatttaacctttgttatagattaagcagagtaatctctgagcaatctccatagccaaacattggatctttccacacaaaaataaagtaaattaaatgcaagaagactttatttctctatatacataaaccctatctcaaaactggtcttggcaaaagggagattcacaccagcaaaaaaaaaagtttcaaattctttaaattcttagttcaaaatttacacaagactcctcaatcagaaacaaaaaaaaaaaaaatgtcaagaataaatgccactttttatcctaaaagaaatagaaaatgaaatatgaaagactctttctcattgttactatttctttacttcaagaagagctgcttctttcaaagtatcagcagaatcagtgttcatgtcgagtttggctaatgccacagactgcaagtagaaggcggttggccaatcaggaaacactccctgtgcatgcatcccatcgaggagggccttttctggctcatcgcagaatagatagcttagactacgccttgcgtaaacacttgggtataccaatgacctctcttcaacgaactgtggacaaaaaacaaaaacaaagttaaaaatagagattctactaatatgcatgataaggcggagaatgttaactacctgagaataacaggcaatagcggttttgaagtcttgctctacaaatgctcgatcaccgattcttcgaacatcttgaagttcttccacctcttgtatccatatttagcccgataactcattctcctgagcagagcaaagcacagtatgcatcttcgat

SEQ ID NO: 4833 - DNA, 2229 bp, Arabidopsis thaliana landsberg
caattaattgttgatataagtcataatctattgatcggtgtgtttgcttcatcatttgtaataaactagagtttatttgaataatcaacagagtttgatatattcttcagattaatatgtgtggattttatattctgacgatgatgaaaatttggagattcaaacaagcaaaagtcagaacaattccaaggaatagaaacattcttggtcaaactcttcttgagtagacatctatataaatgattaagcttcttcgatattagactccaaagtatatattacatctctttctttgtggcttgagatttaaaaatggttaaccctttttttcttggaatgaagagttgcagaaccttaatttttgtggcaataattctcaacgggctgagtactttcgttgcacatgccggtgctgagagcaaggtactttacaattatataaggctattctcttacaagaaacataaatagcttggttctgtttcaataggttcacatagtttatttgggtgagaagcaacacgatgatcccgagtttgtcacggaatctcatcatcggatgttgtggtcacttcttggaaggtatgtaagtgtagttttctccattctatactatgtctctatttgtacaatcatgattgatggttcttgcgtttgcttcaatatttctctatctcaagtttaaaaatttctcaaaaggttactcagatttcttgccttttgttccatgttaaacagtaaagaggatgcacataattcaatggtccatagttaccgacatggcttctcgggttttgcagccaagcttaccaagtcccaagccaagaagcttgcaggtaaataattttaaaatcttatattttacttggcttgcaaggaaacagatagataggacatatattttacatgacatctttcatttgtctcaacaaacccacgtggaatcaatttcatttcttattctctttgacaacagatttacctgaagttgttcacgtcacgccggatagcttctaccaactagatacaactcggacttgggactacttaggcctttccgtcgccaatcctaaaaatcttctaaatgacactaatatgggtgaagaagttatcattggcattgtagactcaggtttgagtgtttatttgtgcatttcttttttgctacattgtagattgattttagttctcttgttgcttttgtttccgctatcaataaatcattttctgaggttgtaggagtttggccagaatctgaagtctttaatgacaatgggattggaccagtgccaagccactggaaaggaggctgtgtatcaggagagaatttcacttcctctcagtgcaacaaaaagcttataggagccaaatacttcatcaatgggtttcttgcgacgcacgaaagcttcaactccacagaatcacttgactttatttctcctagagaccgtagtggacatggcacgcatgtagccaccatagcgggtggttcctacgtgcctagcataagctacaaggggttagctggagggactgtgagaggtggggcaccacgtgctcgtatagcgatgtacaaagcttgttggtatctagatcgttttgacataaatacatgttcatctgctgatatcttgaaagctatggatgaagctatgcatgatggtgttgatgttttgtccttgtctatcggctatcgttttccttacttcccagaaactgatgttcgcgccgtgatagccacgggagcattccacgctgttttaaagggtatcacagttgtttgttcaggaggtaactctggtcctgcggctcagactgtgggaaacacggctccatggattttgacagtggctgcaactactttagaccggtcctttcccacccctataacacttgggaacaataaactgatattggtaacaacaagatatatacaacaccataatgtttttttcacaacataatgtttgatgatacgtgccttagtgtgagtttggtaattttattacagggtcaagcaatgtacaccggtccagaacttggcttcactagcttggtttacccagagaatccagggaacagcaacgagagtttttctgggtgaagatcaaatctctagtttctcattaattaagaccaaatctttctatatggatgacatcatttctctaacatcatatcatgcagtgactgtgagcttttattttttaactgcaaccatacaatggc

SEQ ID NO: 4834 - DNA, 1207 bp, Arabidopsis thaliana landsberg
ggctgcacaagcagaagacaacaaggacaaatctttggctgtgtttggagaagcagaatctgttacaattgctatgtttgattctctctttggctacatgtctggatcaaagacttgtagcaaatggtcagtcgtctcaaagctaatgaacaagaagaaaattacatgtgaagcacaagaaaacgaattcaccaaggttgactccgagttccaatccgagaagactttgaaaatggaggacgttcagatcctagagtcatgcattcaagatttcgaagatggactagaatcattatctaagtctttaatcaaatacagagtttcaattcttaacagctttggccattaaaagcctacaattttgtacagaaaagtaaagttaatagtaacaaattcaagtctcagttccaaacatcttatttcttttatcattaactctttagtcatcatataacaaattattcattctagaaacaagaaatcagaaaattcttttaattccaaaatattacagttttaacttcatggtaacacaaattacgttaataacttcaatccacctaattgacgctgtctcgactcattattggtgaagttttttgcatttcacacgttctttgcaatataactctgttcttgtctctatggtgggaaacatttgatgtgattatattctagaaaccatatttaagagatcaaactataaagtctccgtgaggtttcacatgtcaaaaatcgacgaataaggatcttgtctgtctaatattcattcagaaagctttcttaaattgccatgtttaaaaattaccaatgtggctttactttaagcacgagtgactttataacaatgtctcatatttgtgaaagtctgttttcaagaatataatacagacaagatccttattcattggttttgacatgtgaaaatcacacggtgtacttgttttttctgttgaatcatttccattgtctcccacaatttagacatgaacaaagctattattgctgaaaacgtgtggattcagagatgcttgtagtattataatgaggaatcttggcgctgtaatatggttgatttaagttaacaactttaattacttattaccgcacgaagattaaactgtaattttttgggagaattcagatgtcaatggtagaagtcttaattaggtgacgtcttgtttttttggattcaggactgagaata

SEQ ID NO: 4835 - DNA, 3303 bp, Arabidopsis thaliana landsberg
atgagttattgaatttacaccttaacatgtataatagaaaatcggtcacttggtcagggaccataaaaaatttataaaccaataatatggaactttctaattagaagaaaaatgaagatggttatgtgtcatgacttcactttcaattttaagacggaaatttgaatgtgatggatattttgaggagtgaacgaactcatataacctgtggcattcgtgtacctaatcaaaaatttgtaagaaaaaatagaaaaataaagaaaacgaaggttctccccaaaattcccgtgcgtaaagtcaacttggatttaagtagtctgtcaattatatcaactgtatgaccacatggcctcattacccatatttaatacaattccattgttggtcaactcttaggtgtgagaacccgaaatactttaaattctgctttgctctgttctgatatttttataccctttttatattacagcaatctgtactttaccaaatacaacaggtcagcagattcatgagcaatgtttttaaaaataaacgtaaaggacatgtgtattcataaaaagaaactcataagaaataaaattttagtatttcatacatcacaaatcacatcattagaaagtataaagaataaaatacaccaaatgaaaaagttgacgcagttattagaacatgtgttgtatcttatcgtcttttgcagttttctctattttcccaatcttttaaaagtgttttcatagttcaacaacttcaaggataaaaaaaaagtattttcatagtttaacaacttcagggataaagacagggtatcgttcgatacaatccgaccacgctccatccgttggtgtcttgatcgtacggttacattttcaaacggcggagttacacttgaatgcactttcgaaagcgatctgccaaaccctatcgtttctcttcatcctcccttgagcctctatgtagctaagctcataccataatgatgacgacgatgtattaccaaacctatgtagtgtcattcttgaagcttccacgtgttctcccgacagctgtagattcttttgcagctcatcaatcaccgctcttcctcctgcgtggatgcagaaatgctcgaaggcctgcttgaaatctggtatgtacggcttccactttggattgaagattttacgtccgataagggatgagaggaagagaagctgctccgatgccggaaggaccaaaggacctattcaatccaataagtgtgttaatctcttttagaagaaaaaaagttccaacaaagagatcacatgatcatagagataaagtcataggatgaaagcatgtttcgtatataacattgtgagttacctatggtagtgatattagctttcaaggcttctccggcaatggtcatgagatctttagacaagttgattcccacgttaccatttttgtcttcctgttccataacacagttgtaggatttgtcatccgcaccgcgatgggtcctaacaaggtggcataacttgtacttagctcgccacctgtcggatctgcggttagagaggagaatggcggcgcctcccatacggaagaggcaatttgggagcaacatggctctctcattacccttatagtaattaggagtaatgatctcagtgctaattatgattgcgttggagttaggatggacttgtaacaaatcacgtgctacatcaactgagataagactagcgctgcatcccatcccggaaaggttatagcttttgatgttactcctaagcttgtacttgttgataatcatagcggagagagacggcgttggtgagaacagagagcaattaacaatgaggatgtcgatgtctttaggtttaagacctgtattcttgaagagatcttccatggcggtgaagataaccatttgggcctcgtttcttgcggattccatggttggagttggagggatgtaatgaatagctggagggagacaagtctcttctcctagacctgatcgctcgaggattctcatttggaattcgacactcttgggattgtctttgaggatgagacgagagtgttccatgaacgaagagaacgggacacggcacgtgacaggaggtttgtagcaagagtagtccacaaggtagacggtacgtggcttggacatgaagtaaacggttgaaacaaagataataaggaaagaggaacaaaggatatgaagaagctcgaagtggagtgagttcaagacactgagaatctcttcctgacccattcggagaagctcgatggcgacggttgctatgactggaatcaaaagaagagtaaggaagttgttgataaggtattggtaaccgagtttaacatatttaagcttcacggagctcgagaaatcagacattttggaagagttttgctatgcctatgatgaggtgtggaggaagaataggtttgggatataaaggagaaacagaggaaagttggcagatgggagaggagttaattttcggactcaaactctcacgccactcaacgctctttctctcgcttcgtctttctatttaattttgctttttttttttttatgatttactgtccaatctttttttctatatctgtgtttccagttgttgccagacaaacgtcaattatggagcaaatgattatggggaaaaagacttttaccaaccttttgctgttttaattcatttcattgagcctgaaagcatttttttttcctagaaagaatatgtaacaagagtaggaaaagagatttgtcagttgactcgatatacatgttcggtctgattgagatcaatgtgttttgtaaatttgtaatacaaggttcagaggttatacatccaggtacaagaattattttttcccgttaaaatgtgaccagcaacagctatattttgttgaaaatttactttgaatgacaaaataaaattgtgggtttactatatcaacaaaaacttgtgaaaaatatcatctaaccttctttaaaattaactcattattttctttgatattataatttatattttacgactaacaaaaaaccctacaaaagctaaaaaaaaaaattcttttttttttcctccctactctccttttttcccggccattgccgttctcgttttgttctctctgtccaaccttcatctctccgtcgtaccttcttttctctactgtcttgtctctctctttctctccgccatccccatcgtgagactggttacattcttttcagttactatcagtgcggtgttttctcattcatccccaatcttggacaccgcttctgttttttcatgatttgatccttag

SEQ ID NO: 4836 - DNA, 1073 bp, Arabidopsis thaliana landsberg
cctcttccttcaaatgggccacaccaaatctactactcctcttgtctctctccctcgaaacgccaatttatctactctctttccatcactcatggctactcgtcgtcaatgatgaaatacatacatatacttctctaatatccaacatgaatatgattgagagacttactcagtagatggaactatagtagttttaacatgcaagaactgatcacacaacaattctctaactcaaaatttaactgtaagtctcgtagatatcaatatatatatcgaggaattataaaccgaaattctctaggaactcttttcacaaacgttatatcacatcaagaaactaataaaaaaaaagtgtaatagactttggttgatgtcaattccaataacctaaaagatgttaaatactatctagctggtttggttcaatgtggggttataaattattaactctgtgaaggtagaacgttaatcaaagagaaccggcgataattgagagaaaaggagaggtaggaagcaggaattgaataagggaacatggagctttgaaagatgagattgctaaaattggaaagcggcaacagaaaggtggcatttagtgaatgataagaagagaaatggagttcttttaaagacatgccaagtagtgtaataactaaaaaaaaaaagagaaagaaaataaattcgtagcatcatcatgatcatgattcatgataataataattatttctttctttctttctttgaagaggtgagcgagaaagagcaatgaaggtggaattaaattcgtatttataatctgacgtaacgctcattacaattctcaactgtctcaattactattgcatttatattttggttttaatgatctctaaatcttaacattttgaacagctgttatcaaaacatatttttataaaattttcaagcaccttcctctgtttttattcatttttaattttaatgctctgaactactttcctctttgatttttaaccagctttcattattatttttcacttcattgtgtacttcttcgtcggcaaattttttttttaacagatcgtaataatttt

SEQ ID NO: 4837 - DNA, 519 bp, Arabidopsis thaliana landsberg
gagctggttcttgttctcattcttctccttcttcagttggaaggagggaagaaaatggctgatgaagtcctcgtggatcggaaggacttctccacctccggagccaccttaaacgctgcctgcaaaacctcaggggacaaagacttccacaccgatgtattcccggccaaatgtgtgaagatcggactacaaacacacaagaaaaaagtttcaaacatattagtttctttcaatttcaaacctcaaaaaggaaagtgcagagaaaagttcttactcaggagtggtgacaatggagaaccaagacatgccatcagcatcagcaatcttagaaaccacaaagaaccttggaacaatgaagagagaaccagctttgatatgggtctcaagaactcttttcccatcagcaccaaccacctggactcttccacttccacccacaatgtaagtcacctgaagagcagagtcacaagagaaaccaggcgaacacatggagtgtgcatcgatccgaacaagatcagc

SEQ ID NO: 4838 - DNA, 3707 bp, Arabidopsis thaliana landsberg
tttacttttatgctatgtcttacttagtttaatcacaaagagtctcttcttttctactttcgtacatatgaatgctcttttcgtgtttgttactgatttgtatggatcgcgctatgtgtagaaacaacgccacgtgacggtcttgaatgacacttggcgtcatgattgacacacggcgtcataggaaatctggcgaagacctgtgtttgagcacaactctatattgggctttattgggcctaaattgtattttttcctctctactatattagcctgtctcgttcttttttaaatcacgttatcttattattaaaggaccacttaacagtatactaattattgttttaacaattcccaccaaaaaaataattattgccttaacaataaaacaaagataattttaatataaattaaatttgtttaattttaaaattacaataaaagatatttcttattttataaacaaaaactcttctcatctttttttcttctattttttaatttattaaataagaatatctaaattaactaccttctaactaaaattaaagtgatttccatgtaatatttatcaattttgaagtcatagtaggatgctctaacgtgagccgttttaaccaatcgttaacaaagaattcgtctattaagacataaccatgatcaagtccgatgaatctaatagacatgttatccggtttgcgttccatgacagaatatagccaattgtctatatcattgtttctatttaagtatacgttcatgacatctggtgtgttgcataggtcaaacacgcgcgatagttcaaggaaagtgcgttagtgatgaccacgacacaatactgcactttgttttcatatcgggatgctccaagctgagtcactatagccatttactgtcaaagaattcgtccataaaacaatatttgtgatcaagacggatcaacataacatgcatcaacttactattaaaatttaagagtaagttaaagaaaatgttaaaaatttcttaggttggcccattaatttatattcaaattaattctttatttttcacattatatattgaatctaatagaaatttattctagatccgccattgccgtgtaatacatgaacaaatcttttaaagatggacatcgcatatgatctaccgagatcatatcatgatagtctagctgcacaataatcccttatacgaaatcattttcagctggatgctttataacacaacattatattaggttagtgagcctatagctaacttgttttcttttttcattaatcattgtttagatactcatagtaatgattttgagataagtatctatttttcaaatgatatatcaattttaaaaactcattacatcatgtcacaacgttaaaagtataattatacatatatccaacaaattgtatgtatgttacaaagaaaacattgctaattttactatgtctgagtcactatatgcggctggaaagtaccaaaataaatgaagacagtaacatgagtccatcaccatcaccaatatccaaaacttggctttcacatttattttacttatgtaactactatacctttatttatttattcatttttaatccttagctttgttgatctagtttggcaaggtaagtctataacgtccatcggcccgaatccttctttttcatttatttcaaaattaacattttcttcttcggaaactatgacaaagctttttatgtaacccaaatataacttaattacactgtatatccttctacaaatttacctatatcaaattatgttattatatattgtaatggcttttaagagacaatggagacattttctagaacatagcatttagttagatttgttcaagccatttcaaaacttttcaaaaacaaaatcagcaaataaccagctttgtctttaaagaatcgttctttcgtaggaactagcaactgggaaggtgtaaataggcgatttaaggaaaatatataattgaagaaaaataaatcaaatggtcgggactttttatctcacgtgaaagtaacgtcgcatttactcaacagtcgagacgacagttacatatttcacagttttaaacttgtaagttaaatttaacaaaaaaagaaatacaacttcaaacataatcgttgttaagaaatttcatatatatcattcctttctatattaatacaaaaagaatggtatgggaaataaaatagaaagaatagaatgactaaatcatggaacatgacatgaatatggtcactgtttcaagctcatgcgtcttttccagcatagtagtagtagtagtagttgttgttgttgttgttatccggtcttttcaaagcaacgtacttcctatttttcttacttgtataaatccacaattgttttactcaaaaggaaaaaaaaactatcaattttgcaatttggctagttaattcaatttatatctatttgttttaaaactatatttgatctgtatgtgcaatttatttactgatttgaggcttttgagcatatatatttagtgaatcgattatagaatttgtattgaacaatgagagaagaacgaagacatggattgggacaagtactatacataaacgtgggtaatgtgctatgaaggtagttgtttgagaagacagtacgtagagtttgagctgtaagaaatgattagggtttgtttttcgtctgcacttcagtccaatgttttcaccgaaccccactactacgtgaaacccggagcctcacgtgctcttgagatctttttaccactaaattaaccagttcgtatgtaactatgtctatatatatgtataaccatatcatgtaacagttataaaccacgacaatcacaatggatgatttcaatcttcgtagcgaaaaccctaactcatcatccaccacttcctcatcctcttcctctttccaccgtcacaagagcgaaaccggaaacacaaaacggtcaaggtcaacgtccacgttatcgacggaccctcagagcgtggcggctcgcgacagacggcaccgaattagcgaccgtttcaagattttacaaagcatggtccctggtggtgcgaagatggacactgtatctatgcttgacgaagccattagctacgtcaagttcttgaaggctcagatctggtatcaccaaaacatgcttctcttcataaacgaccacgaaactacatcatcttgtacttactctcccggcgctggagaatttggaccgaaactctttggttatgatgacgattatgcccctataatggacacatattcacaaggcgtgccacttacggttgcggactcgaagtatacgccgtggtttggttcggttgatgatgagcaagaacgtgactcgtcctagtcgttgccatatatgcaacattatgtgatttacatatccagaatctaccgtcttccttattctcgcaatacttagtaactatagtttaaggattatattatatgcgtctactatatatatctgagtgtatctaatttagagattgtaatatacatgagtatgagattaattaacctatagtatttgtattgacgtatggataatcacttggaaacacgaaaaagagagtatacaatactgtatattaattatggactttaaaaaaaaatcagcattttctagacaactttttcattatcttcacacaaaaaatagataaacatggattaccaaataa

SEQ ID NO: 4839 - DNA, 2734 bp, Arabidopsis thaliana landsberg
caaacgaattcgcctctccaaagtttgattaatttaagtttaaccaaagcaaaagtgtaactacatccataggaagtctacttaaacaaatgtcaataccttgattttgataacataaaacaaaaacaaaaatggaaactttacaatgtcgtcatcagcatgtcttcattttgcttcttgtcctatttcattcctctctgtttggtttagcttcaaagatcgatgtttctgacgatgcacgaggcatcagaatcgacggtggccagaaacgttttctaactaattctcctcaacatggcaaggaacatgcagcgtgtacgaacgaagaacctgatctcggtccgctgacgcgtatttcttgcaatgaacctggatatgttattacaaagatcaatttcgctgattatggcaatcccactggtacatgtggacactttagacgtggcaattgcggtgcacgagctacgatgaggatcgtcaaaaaggttaaaaaataagctaacaaaaatcaacattaacgtgtgtatagttaatactaatagatatttttatgagtcttatagttagtaatgatttgtgcagaattgtcttggaaaagagaagtgtcaccttttggttacggatgagatgtttggtccgagcaagtgcaaaggagctcctatgctcgctgttgaaaccacttgtacaatagcttaggtttcatcatatattgcctgcccctatatagagagatttcttcaagtgtattgtttttgttcatcttttctcgttttggtcaagctgttttttagagtttctttgatgcatggatctatatgttgtcgtcttgtcgattatgtttcaagtgctttaattttacataatcaatgtagtcatgtttttgtttcaacgcagacattaatggtttactatcacttttttaaatatggaagtatatccatggtgaattttacgaatcaaactcaagattgattataagagtcagtacttcactctattttatactcaacgttagcacttggcagtgcatagatcccacatttattaagtcaattttcttattactaatctagatgggttaacatgcaattatggaaattgtcaaaaaaaattatccttagattggtttgggaacaaacaaaaaaaaaacaattatggtaaagtaaaaaatgaagaagatattaatgacttattatgttcaattatgacttaaaagctgacgtcataaagaactggttggagttctacgaagaagtagtttcgaatccttgacgtcaacctaaagccaatacgaagaagaagaagaagaagaagatcgtgagccactatattcgcttccttcctctaatttccgattccaatggacctgaatcgcaaacacaaggtatatctcctccttcttctctcgctactgttgaacttgaaccatttcgatgctgtttctgatcatcgctttcgaattcgatgtaaaatctcttcgttgcattgaattttgttttctttttttctctctcaaaattggtggttctaaaggaacgttatcgttttgataccttgttcgttgttaaattataacacttaggattcttaattcttatagcactcagatttgttgggatttgaagctcctcgtagtgaagaagaagcttgacatgcctcaatttgaatcctagactaataaatttttcctgaaaaatcaattcgaaattaggattgggaatcggaaattatgtttcggtttgcttcacaaaagttgatctaaggttgattacatgtcttttaaattggtgcatgacgatgcatctgtgattgttaaatgaactcttatcaggtgtctcttagaggtgccagcagtggggagatttcaagggatgctttgcttgctaaagtgtctcaagaaagggagctacgcagttatgcaagacgcgctaatgctgcatcactttttattcaagtacttcttctttctgctaactttggctgacttggaatctctcgatgttgtttttggttttacgggacttttatctaagctacatagaagaaggcataaacttaaaagtaaatttttccattacttgtagagagtttggaggtcttacattgtgagaaagaaggcagctatagagatccaagaggagtgggagaatttactgagttgccattctgttacactgaccaaaagttgggtatcaagcagagtattgagaccgtttctcttctttgtcagatctttgtctgtccaacatcaaaagatacaggcaagagaaatacactgcatgcaaacttgctttaagattctattggaaagcatcaactctaatggtatgattctttcttttttttgtcttgctttaatttgaattgttcgtcttgcaaataaggagggaataaatcttgttgtcttttgcagatcaggggtacaatttttgttcactagcagttggtacatctgaagatagtaaaacatgggcctgtcaaacacgaaggatggtttctctctgctctttccttctcacggagtgtaattattcgcaggaaaggataaaagatgttattggtgtcaatgcccttctattacgtattcttattgttttaactgatcccaaaagctggaagattattacaaatgaaaactttgaagatgcagaaacagctaaaaagataattattcagtttatagggagctgtaaaagtggatattactcagcagttcggagatatatcaagacat

SEQ ID NO: 4840 - DNA, 1153 bp, Arabidopsis thaliana landsberg
  unsure (1)..(1153): unsure at all n locations
accgatcgatatccaatccgaccgtgagtcaaataggtgactaaattaaagttaaataatttgtttattttgtcttagatattgagtagacatatcgtacgacgaaaatcaataatttagttcttcttgtctccatatttacagttttgtttctcaatgaaaatacttgtggatggttattgatggggggttacaagaaccttctatggacagcatttgttatcataaatttgtggttcaaaatttgtcaaatacacttatctataataatgcaagaaaaagataggcatattcttcnnnnnnnnnnnnnnnnnnnnnnnnnnttcatacaaaaatccaaaagtcacaaaataaaatgtggaattaattttgtgattttttgtaacctaagaaaatcaatggaaaatatataacttccactattaatcgagttaaatcaaaacgaatatcaaactttaaaccaaaccacatacaaaagaaaagttctttataacacaaagagtaattttgttgataaaaaaaaaacaaagagtaatttcaattgttcaacaaacgcagcctgaagacggcggaagaagctcggcggttttctgatcatcggagggtttcttgaaagtagtgctcccaaagagaaagaaaccaacgccatagccggcgatagcgacgatgaaaacacctgcgttaaaggacataacagcgagcatcaccaaatacgaaagcccagtcttgagtgtgtacacagcggtttgagcgagcccggcggctcgattggttgagccactgacacgtaggatcggtgaatgagcgagccactcggcaattacggcgaggaggaatataacaatgagacagagagcgtacatgccggagcttgtcccgggccatccggagaagagaacctccgtgttcttaccccaaaagaaggtcatgtgcatcatcatcatgtgtggtgttgtatgattcgacatcgatgatgatgatggtgatggtggtggcatgtcatgcatgtgatcatgatccatgatactaatggtaatagggtttatgattgattttcttgtagacaaaatttttaagagagaatcggttcgtatttattgtgatttcttaaatgtatgtgttgtactgtagtacaagtacatcatcttttgac

SEQ ID NO: 4841 - DNA, 581 bp, Arabidopsis thaliana landsberg
gagaggaatgagcaagccattcggtgaggacggcgagaaagaagacaaagataagacaaagagcatacatgccggagcttgttccgggccaaccggagaagagaacctccgtgttcttgccccaaaagaaggtcatgtgcatcatcatcttcatgtggtgatgtcctcctccttcgttcatggatccattgttcatcatggatgatggtgatgatgatgatgatgatggtggaggcattccatgcatgtgatcatgatccatggtttctttgttcttggctcttgtgttttggttgggaggagaggaaaattgcaagaaattggttgcttggtatttaatggcatttatttgagattcttatttaaaatgaaatttcggtttctgtggagataagagtatcgatgttaacgtactagagtacaacttgttttttgacttgtcaaaccttctgtcgtactcgtacataaaaggtaatatttagaaagtagaaagagagaattatgtcccttaatatctaaattttagttagtaatttttgttcaaaatccctttaattagatactatagtaagttcttagtt

SEQ ID NO: 4842 - DNA, 1982 bp, Arabidopsis thaliana landsberg
  unsure (1)..(1982): unsure at all n locations
ccatgttaaatatcagtgattgaaaatctataccaatacgaagttttattcttaaggtgggtgagtcggcccatgatgccaaaatggtttccactttccaaagtggttcaaaatataatcttacataattacattaatgtttatgttaacaagcatagttctctactactaatcttatttgtttatggtaatcatgagatttgcaatggggaagtggaagggatatttcacttgggtcacctaggagatttcctaaatcttcctagaacctagagtacataaatttaacgacaaagtttagcattttcacacaaaaaataatgaattaaagaaatcctcggtattggtttccgaatcccgattgatctatatgtttcttaaaatcttgtttggtaatttgtaccacttgttgagataccttaaaccttggtaacttaacctatttatacgattatgttaaactaatccataccactttgtcgtgttgcttacgcttgctgtgttacaatttgcggtttgatcccggttttgtacttttcgtattgatattattcgccttcactcaaatctcgtaacttcacgtacgtaccaatagatgttaaaactaaaatggatcaaatcatatttgactcgtggcctttcccatgccaatttatgcacaaattcgtttgattagtatacgtagaagataagaaagtagaactgtacaagtgaagtaaaagtcaaagttgttgatatcgtccaaagtcaaaagtcttttacgagtcatactggtcctactttacattatcaaatacatccaaaacgagacattatacttgtcatttccatgattcaatagaaattgttctatacatgtgccgacacaaaagattctgcaaattttctttgcataggaatgtccaatgttgtttcgttgaaccgaaccaaatagaattcgaacagagaaactagttaatataacagtaatgtacattatagggaataatgatcattcaattatttcatgaaatgaagcaagttcaaacaaaaatagaggataattacatccatgaagatataacaagttatgaacattttgacatttggaatatcatactcggcctagtatagtaataatatttattaatcataaaaaggtacaataaaaccaagccaaaacacacactcaataatagcttaaagcctcaaaaggtgatacaagaaaacaacatagagtttatttgggtcgtataataataatcaccaaaatctcattcagagataaaactaaaaggatgatttgtgcgacttctagatttagttgaagtctggtttctcagggtaagtgcaaccagacctctggatcactacgtttgacgcgtagcatcctgccctcacacactcttcaatcccctttccgtgcaccagctgggacagaaaccctcccacaaatgcatcacctatgaacacagagaaccaagagggttaaaccaccggaattagtttacttgagactgatacaaaatgtatgataatcttcttattacaatataacaaagcaaacggtttggtaaacctggatttggataagagtttttatgctataattagatgagtggttgatatcatcaaacaataataagcttttaactcttagctataagttaagctgtatctaatctaggacggaatgtagcaaattcgagctgctgtgacttagttagagtgcagttagtgaggcctgagttcttaacaaatacctgnnnnnnnnnnnnnnnnnnncttctctttggggagagggatgactgggtacttattcacttttgcatcctcagcgacaaccacaggatctgcgccttgtgtaatcacagtaggcctcttgtatgttccagaggctttgggtaactgggacatattgatggctatttgctcaacaccatcagtctgtataaaatatacccaatcagatttatacactgtctttcttcaacaatacaggg

SEQ ID NO: 4843 - DNA, 1584 bp, Arabidopsis thaliana landsberg
tgtgtttcaaaataaagagcatgtatttcagttttcattcggttaatacattttttatttatttatctgggtattataacaatctatacatggaagaatgtaaaattaagtccccaattattcaactgttccaaatacactgtagacctgagaaatacccttctaccctaaagcttatttcgaatttttgcattaccgctagcctagtagtgtgtcagacggcaacataatctttggagagattttattttgagaagcgtgatccaattaaaaaagagttgggaagaaccctttcggatattatcgaacagtcgcgccttcatgtcctctttattaccgtctctcaccgctaaagaaaaattgaagagacaccgaagtttatcgaagagaataacgtttacggagtcgattactaagcaccagcctgttaacaccgtcgcgtttggagccggcggatttcaccatatcaggtaatgatttgatttcaatttggcttttgtactggtgttgttgccgccgccgttcgagctaactcatcggttttgtttctagatggacgacgttgaattaccgaaccgatagattgcatttggagaagagccgcttggtgaaagggtgaatgtgtatcacaaaatcaaaacactgtccggtattataaacgcgctcgatgaacaagagtgatctttcattctcaacagttctttggggggcttctagatttccccaacaaaccggcgtttcggcgagctttgggttatttttgttgagtaggcaattggaagtggctaactccgacgagatttgggttgtttttgccggtactcccattagattttcgttaagggagtttaagattgttaccggtcttccttgtggcaagtatccaaaagttcaaaagaataagaagagaggaactggtgggaagcagattccatactacaatacattgttcggtcttgaagaagatgttacggttgagagggttattacaatgcttacgaaaagggtggtaacggatcgcgatattaggttgcggtatgcttgtttggctctcgttgatggcttcttattgcctacatcacactacccaaaaataatcaaaaaccacgccgagatgtctgaggatctccaaggttttctgtcatacccttgggggcggctatcattcgagatgatgatgacttccattaaagagagggaagttgagcagcttgcgactacgtgtgtggcggttcaaggtcttttattcgccttgcagctcgttgtccttgaagcaccccccgcaattgaggaagggcctccaattgatgaggtgtttcgttctgactcagatgaagaagcagccgctggagtaggttcgcgtcagggagttgccctcaagctcgggaacgctaaagatgttgatgctaaatgcgaggtaatgatttcggacgatcaatcgataacaaatttgttatcacattaactgtttctttattttagggtcacagcttatgttatcccggtaagatttcatattattatccggtaaataaattaatcattggtaaatggttatcattacaattatagtataactggtta

SEQ ID NO: 4844 - DNA, 507 bp, Arabidopsis thaliana landsberg
tctgatcttccggtggctttggtcgaacagatactctctagggttccattaacatctctgattgctgtgcaatctacttgtaaaacgtgtaacgctttatcaaaaactcagatttttggcaaaacgaggcagcagtttctagggttcatgatgatagattttgggctttattcaataaagttcgatctccaaggactcaattacgaaagcgacttcgttgaaccatctataaagcgagtaagtatacttgaccaactcgatatatttaaagtctttcattgcgaaggcttgttgttatgcgtcttcagaggtaaccgatggcctgtagtgtggaacccttatctggggggaacaaggtggattcaacccataagcgatttccacaaatatcaagtatcggacaagtttgctttcggatacgagaacaagaacccgtacttcaaaatcttgaggttcttcgatgcttttaaagactcaagactttttttggatttaatgaaatctacc

SEQ ID NO: 4845 - DNA, 673 bp, Arabidopsis thaliana landsberg
agcctgaaaactgggcattgggtaaaattcttttcacatcgttgcatccttttaacacttctgtattatctcttcgtgatctgactgatcaaatgtgtattgggtagttgagaaggccaagttctactacattgctggattcttcctcacagtatcgcctgaatccattcagttggtatctgagcacgctgctgcaaacaacaaggtaattaagacatggtcctccatttcatgagactctgtttcagcagaatcttttatttgtttacaactgcttcttttattaacatcctctacatattcacctatccttcaggtgttcacaatgaacctttctgctccattcatctgtgaattcttcaaagatgtgcaggagaagttcttgccgtaagctctcctaattttattttatccattacagatgttctgattgcgtaaatgtactgaataacactctacattgatcttacagatacatggacttcgttttcggcaatgagacagaggcaagaaccttctctagggttcatggctgggaggtaagaagtttctctagcacgactaaatttcagcacgctgttcttttttgtatagctgagataataattaaccatttagatgttttatatgtatagactgaagatgtcgaacaaattgccatcaagattttaca

SEQ ID NO: 4846 - DNA, 1919 bp, Arabidopsis thaliana landsberg
aggcacaactgatggtccaagagaatctcctcccatcaacgaaatccagtgagaaggaactaaagcggttaccgctaatagggcagatctggagccaaaggatgtgtcgatgaaaaactgctctagaattttggaaagggcgatgatgaagaagtgcgattcttctcttgtcgggttcaaaggcggatctgcgtctgagttatgattcggggcaaggcttgtagagtaaacattcactcttccgtcgcaaagaagaccctaagagaagaagactaaaggaaatgaaagttttggattttgcacgagagaagaacttaacggagagaaaaaccaagaccagaagcttaagaaagactgaaacaggctaagaagattttgcaggtcccgacgccagcgaacatgagtctcaccggcgccggaaagcatgtttacagaagatgtcttgattaccgtgtctgggagagaacgaagctttttatttttacccatcataatctctaaattatacaaattcttaaaatttattactataaattttttaagagactctctcaagggcttagagcaaccccaatggtttagaaccaattggttcttaattttcaattttaaccttattttaaattaaaatgttacttttactaagttaagaaaagttaagaagaagctgaattaatttttactccaatggttaagaactattgaattcctaaaagacaacaattcaaactatttcaaaacaatgtctacccactcaaaacacaacacatatactcttcttaattttaagaaaacatcttaactaagatgtttatcttagctaagacttgttggtttcattaaatttaatcagttttatagctaagaattagttaagatacatcggttggagttgctcttaacaagtcacaacaacacaaatttgaaaatatcatccaagaacacaaaacataacaagtgacttcaatctttataaccagcaaaagccattgtcggagaataccatctaacagttgaactaattctgtcttttggcaatgtaattagccaaagctagtaaaggtttaactctactcgaatcaaacccatgaagctgttcgtgagcatcgctcaacaacttatctgcaaagtctttagatttctcaagacccattagtttcggatacgtcagcttatcggcaatcagatcttttccggcggtctttcccaattcctccgacgattcgtcacgtccaaaatatcgtccaccacctgaaacaacaatccaatgcatctcgcgaatcttctcagcttctcaacttcttcatcagaaccaccaccaacgatggctcctaacaccgtagccgcctctaacaacacggcggttttatgaacgtggataaactcaagaacctctaagccgacgtcgttttggtccattcctccactggttagatccactacttgacccgccacgagcccttttgatccaatggctttcgctaactctccgattgctcgaacaactctagccgtagaaacagccgttgacgttgctaagtgctcaaacgcgaacgatataagcgcgtctccggctaaaaccgcgacgtcttcaccgaaaactttgtggttcgttggttttccgcggcggagatcgtcgttatccatacatggaagatcgtcgtggatcaacgacattgtgtggatcatttccactgcgcacgccgccggtaacgccacggattcttcgccgcccactaactcacacgctgcgatacagagcacgggtctcactcgtttgcctccggcgagaagcgagtaacgtatcgcttcatggatcttgattggttctcggagcgagacggcggagtcgagagcttcattgacggcattagcttttccgatcatgtatgacgtgaaattgaaatggttgtggatga

SEQ ID NO: 4847 - DNA, 512 bp, Arabidopsis thaliana landsberg
aggactttttctatgccattatgtcattcccacaaaactatcctaatagcccacctacggtgcgttttacttcagatatttggcatcctaacggttagttctttctctcggttatgcgctcattagctcattgatcttgtttgagtagctaaggttttgtgaaaatgttcgtcttgtggtctgcagtttatcccgatggccgtgtttgtatatctattctacatcctcctggtgatgatccaagtggatatgagcttgcaagtgagcgttggacgcctgttcacacagtacgttttacaatgatcctaccatagttctctttgtatgtatatctcactttctaaagactaagaacaatgtcaattagattttaatgagtggaaataacatttctgatttcaggttgagagtatcatgttgagtattatatcaatgctctctggtcccaacgacgaatctccagcaaacgttgaggctgctgtgagtgttttctattgatcagctgtgaactc

SEQ ID NO: 4848 - DNA, 566 bp, Arabidopsis thaliana landsberg
  unsure (1)..(566): unsure at all n locations
gtgaattgttccgaagtatctacactaaaatttaaaccgaatttttatcatttttaaaactcaaccatgaagaagatgaaaaggcaccgtcatgctgacataagttccagtcccaatcaacaaaaccggacatacgtttttgatcaagctagagcagaatcaattgatcaagaaccaaactaaaccagcagcaaaacaggacgtacgtttttcaaccatacaattctcaaattgtcgtttctatcttgtcttctctcaccacaagaatgcaaaaacataaatccatttttcttgataaccttcttcttcttctttttgtatatgtatgaagcagctttttgtgaatgaatcttcgaaataggttaaagaaacaaaaatggagaccaaagaattcgactcttacagtgagcgcaaagctttcgacgagacgaaaacaggtgtgaaaggtctcattgatgctcacatcactgagattcctcgaattttctgtctccctcaaggttccttatccgacaagaaaccttttgtttctaccactgattntgcgatccctatcatcgacttcg

SEQ ID NO: 4849 - DNA, 562 bp, Arabidopsis thaliana landsberg
  unsure (1)..(562): unsure at all n locations
agaaactatgtactcgtcaattctgttcatgaactcaggcctgaaattttgtcttgctatctccttaacttgccgcttcattatctcataaactgcttctttgctgtcttcattgttgcggagggtctcaagtatgtggtgannnnnnnnnnnnnnnnnnnnnnnnnnnnnnnnnnnnnnnnnnnnnnnnnnnnnnnnnnnnnnnnnnnnnnnnnnnnnnnnnnnnnnnnnnnnnnnnnnnnnnnnnnnnnnnnnnnnnnnnnnnnnnnnnnnnnnnnnnnnnnnnnnnnnnnnnnnnnnnnnnnnnnnnnnnnnnnnnnnnnnnnnnnnnnnnnnnnnnnnnnnnnnnnnnnnnnnnnnnnnnnnnnnnnnnnnnnnnnnnnnnnnnnnnnnnnnnnnnnnnnnnnnnnnnnnnnnnnnnnnnnnnnnnnnnnnnnnnnnnnnnnnnnnnnnnnnnnnnnnnnnnnnnnnnnnnnnnnnnnnnnnnnnnnnnnnnnnnnnnnnnnnnnnnnnnnnnnnnnnnnnnnnnnnnnnnnnnnnnnnnnttgacgttcgatagcat

SEQ ID NO: 4850 - DNA, 4332 bp, Arabidopsis thaliana landsberg
  unsure (1)..(4332): unsure at all n locations
cgtgatatttcccaaaattcgatcgtataaataaaccaatcaaaaaattcagtttgaacaaaaattgaactgaatatcaaaaattgaaggttttttatggtcaccgtttttgccggtttaacaaatgcatacatgtatttttatggtcaccgtttttactaatttatagtttttggagagtgtgttgaataaaagacattgagtgatttatattaaaatgaaatatcctatgtactaaatgtaggttggtacatgctacattaccacaaagtccgttggaaaaaaggcgagtttgcacccaaaatccatattgaatctaaaatcaaatactagcttaatataatttatttaactgaataaaataagtaaaaagaaatggagaaaatattgattaaatttatctcccgctatgatttcaaatcctactctcgctcttttagatgtttgatactagtttgagtattgtttatctatgttcgggagttcgtttctatcttcatcattaacaaatccatttggcaagtttgtggggtgtttttggttttgaagttcagttttagtaattagactttttttaaaaaaaaagttattatccaaaataccctaaaagtcttggaacttaaatgttatgatcagatcgattacaaaacaatataataataaagcaccaatgaagtgtttaaagaaaaaggtcgattacaaaccaatataataataaagcagtgttcaaagaaagagccaagatagtaataaagcagtgtcaaagaaacgcaagtagagaaagaagtcagtagacgaatggaatgggctacctctgaaaccagtagcggcactgggtggcgagaccggtaaaccaccactgagacccttgagaaaaaaaatcatctgcctcactgttcttaacctgaaagatctccatctaggtaactcaagattgaggttgatgaggagccttatattcttttattatgcagcagcgtagaaagtggagcttgccaagagtagaattcagactaggacgatctaggatcatgattgatctatctccctcaagaagacgatgatggcgggacctcaaccacttaccaccaacaaagctagtcgtgatctcgaaatccaaatgattaagcctacgtctctgaaaacttgtttttctatgtatctggtgccattaaccgatctccgatatcattaggattaccaaaaacaactccgcttgttttgctacctacaaaacccattggttcgtcccctgccacatgaggccagatctgaccatgaccaaactgctcttcccaagagcgagctaagtggtcttttaatatattgtcgtgttgttttttcaggagtttttggatcaaacagatccttccagtagttgtaatcctcgtactgtgagaactcctcttggggcttccccttggattcccataagacattttcttctttcacctcgacattttgtttatgttaatgcatgatgttattttaaagtatatgcgtttcaacaccaacaaattctttcaaatatttataagaactagatgaacacccatgctacgcatgggtttttgtttttaaaattgtcgaaaaatatgactatagttttttgttgatttttatgttcattttgataaattcatctatttaatataattattattttttatgattaaattcatctataattcgaactatcaaatctagtacaatatgaatatttatatatttattattctaatatttcactatcatgaacacatacaacaacattatatgatatactgatacaatgtatgtagttatattacttatgtattttgaaatttgtctaacttaattgtaacaaacaattctttattccatatattatttcgtcatctagtacaccaccacatcatgatatgctagtaatttaaatcaacactttaattctcatccctactatatagtcatatagagtctcatgttgttgttgttttggtatgtctaatgttttggataactattacgtgaaaaaattgtatatcaatgttacaaagttatcagaactcacaaaaatgtacagaaagaaggtcatatgataaatcaaattcacaaaacgtaataataaaaaaatatctaactaaaattactaaattaatatgaggttaggtagcaaacataagagttttaagagtttggattttggaattggtggtgtttgtttctcaaacttcataaattagagtttaaaatgtttttttattttttgtggtcggcataagagttgaagttttaataaaataaaatagtatctgatcattttattggagaaaacataaaagatgtagtattttataagaactcgaattggtcaattttcaaaatgttagtatgaaaaataaaatatctagttatatgtactcgtatctcttgatatttttggctttaacttagggatgttagtttgatttgtctttctggataagccagtagtaaccaaaaaagtcaaaatcttgttggctaagtcagaaattaattaaataaacaaaagggcccactaaattaattactttaataaatattttgtgtaatgatatatagtataaaacgcgaccgtctacatttttggttgtttacgagaaaagcggattacaggtacgcttcttctaagataaatctctccccgattctctctttttctcgctagatactctttttcttcaattagggtttcttctcgcttgccttttaattctctccagctgatctgatctccgttaccgatggagtctactgctaacgcactcgttgtcaggttagagatacaaccttcctttctttatttgcgaatcgtcagttttctcacagtaattgtcggtgattctgggttttcgtggcgatcgtctcgtttctgttgattttgttgcttgtaatcggtcctttccttttgaatttcgctatggatcgactctctctctctctgtctctgtattataatcttaagtgtaattcgaaaattttccagacatacttagcagtatctgcttgaatcttaaacccgaacaatgattaaaactataagttatcgtaattagaatcgtaatctatttcttcgacaattttttttcttttttttcattgaagtgatactaattttgtttgtgattatgtaggtgagctatggaggtgtgcttaagcgtttcagggtgcctgttaaagctaatggacagcttgatcttgaaatggctggtcttaaggaaaagatcgctgctctctttaacctctctgcgaatgctgaattgagtctgacttactctgatgaggatggggatgtggttgcccttgttgatgacaacgatctctttgatgttactattcagcgtcttaagttcttaaagatcaatgtgaacgctggcgtgtccactaactctgctgctccagagagtagtgggagttccacacctgcgggtatgcctaacccggtttccaaannnnnnnnnnnnnnnnnnnnnnnnnnnnnnnnngtacctaacccgatgcgtgataccatatcaaaggtgtacatggaccttgcatccaaggcctcaacttctagtcctgtagttggtgagatgcttgattgcatttccaagctagggcagctctcaattcctcaggaaagtagtccttgctcacctgttaccaagcctggttcttcaggtgcttccctgagcagggatgttccttccgctggtggaaagaaggatatctctgagtggacccagaccggaaggaaacctgttaatctgaatgaacccactggcgctcattcaaagacttctggtcatgtaccaaactcgtctggactgggtgctaatttcaacgagtgtccctttagtggcagtaccatgaattactcctgtccaaatccagttaacctcaacaagcatcctcgtcgtgtttgtcattccaaaaagagcaccaatggtgattactggacttcattgggtgtattccataagggcatccgttgtgacggatgtggagttcttccaattactgggcctagatttaagtcgaaagtgtaaggatgccttctacttactactttagaaactataaacatgctagaacttattgtgcttatatgtttcgcttgtgaatattgtgcagtaaagaagactatgatctgtgcaccatctgctattcggtgatgggtaacgagggggattacacaagaatggataagcctgtatccgttcaacatctgcatccttttagaggaccgtttacccaagtattgctcttcttctaagtttataattaaaattcttcttgtttattctatgtgtcttctctgatagctat

SEQ ID NO: 4851 - DNA, 2368 bp, Arabidopsis thaliana landsberg
  unsure (1)..(2368): unsure at all n locations
gcatgtacttgcgcgcgcaatgtatacgaccattttttgatgatgtaactcttcgggtaaacattctatcactttgcatttcattggtaagtacaatattggattttcttttgtggtatgcactagtcggtatcagtcccgagatgtaattagagaaatatttgtaactagaacttttttccaactctttcgaatttttttttttttttttttttgccgtagatttggaatatgatcctaacagaatatcaatacaatatagcaactttggctcactggtcactgcttcataacatgataacaaaactctcaagcaactactttcatctgaccctttttatgtcaaaaaaggtctttcgtctgaaccgaaaatcaaaccgagttggaagcttctagcaaagataatgagccgtactagtcacaactcacaagtcacactttcgaatttcaaagttcaattgaagatccgaatatccactgccgtagtttgtacgatactttcactcatttcatgttgtcatgtgtcgtacaacagtttccagtttcccattattatttaatgtttatttattaatatttggactttaattacggcaggttatactatatggtatgatagaatattttcttcattccactggattttgctaattatatatatttattccaaatcacaattttgatttagcgtcattacaaaaactaaaaagtaatgaccaaaataaaagatatgtaatttctgatattcggttctaactattctattctcttcctgattccattaccaaacactgagagacaaataagctactggccgctaattggctatcgctctctttacatcttcgaacataagcaatagttgaaaaatataactttactaaaaaaatacatatttttcgttaaaaaaaaccttgtggtcgtctatatactattctaataagtaaagaaaaaaaaaaaaaagtaacggaagcatgaactttcatgcctggaagaaactactggccaaaaccatccactaaatacaactaatgaagtaatcatcctagttgagcatattgtaatcatcacattcaagaaaaatatcccatggagaacaattttgcattatataaaaagttaattccttgtcgacttttatataacacaaacaagaaggagcacatcgtaaattcatcaccgcttccacaccttcaccgtacgtgtctctttcgtactttctctctatttgtcattctaattataaagtacaaaaaaatcaatagtttaattattaaattaatattaaaaataaatactttctactaaaagtctaaaatattataacatcgaagttgcgaaaaataaaataaaataaannnnnnnnnnnnnnnnnnnnaccgtacgcagagtgctcaacgaacccaaacacactctaaaaatatcttctttctccttcttcttcattcttctcaatatctcctaatgggttttggtacatcttcttcttcatcttcttcctcagctctgaaatggctaggtttcgttactgccgtttgggtccaatccatctccggcaacaattacaccttctcaaattactccggcgcactcaaatccttaatgaacctcactcagttagaactcaacagtctctccgtcgctaaagacgtcggaaaagcattcggaatcctcgccggacttgcttccgaccgtctttcaactccggtgatcctcctcatcggttctttcgaaggtcttcttggttatggtgtacaatggcttgtcgttagccgcacgattcaacctataccttattggcaggtacttaatcaaaccctaatttctaaattgaaaaccctaatttgcctcaattttgacggtcactgtttcttgtgtgtagatgtgtgtgtttctctgtatgggaggaaacagtacgacgtggatgaacacggcggttctggttacttgtataagaaacttccggcgaaatcgtggtcctgtttcagggattcttaaaggatacgttggtttaagtactgcgattttcacggatctatgtaatgctctgttttcctctgacccagcttcgtttcttgtcctcctctccgtcgtgccttttgccgtttgtctcacggcggttttcttcctccgtgaaatccctccgtctactaccttcgccgaggataacgaagagtctaaatactttgctgtgtttaacatcgttgcggttgttgttgctgtgtaccttcagtcttacgacatcatcggaatcaaaacaggagctttctcaatcgcattcgcttccatacttctcatgctcttagcctctcctgtcgctgtacctttccacgcttttatccgtagcaaagttcatgatgagcaagac

SEQ ID NO: 4852 - DNA, 2510 bp, Arabidopsis thaliana landsberg
aatgtttcaatatttgtctccatgactagtatttggggattcttcggtcgcattctctccggtactctctccgaatactttctcaagtaagtactcctcctttcatctccatatgcattttatcttaccattcacggtttgatccgctcctaagggcaatatccgtctctatttttttttctattttagatgtcactctattttagagatattttactccaatatttgtctttaaaatagactttactctaaaataaagtaaaaaatagaggaatctcattttcacctagagtcttttctaaaatagagtcttttctaaaatagaggaaaaaatagaaatatacatgggaattggtataagattaaccaaattatggtgttttagggactaataacagtaaaaactttataagctaggcacagttttggccctagtttactgttcaatccattttactatgtgtggttctgtacgatgctaccattgaaagtatcaattctcgttctaacatttaactaccaacattcattacagagctgtaacgtgacgtatataatttttcatcctcatatatggacatacaaaacattcaatgcgttctaaatttgtatatgtcttcttccttaaatgatttttctcatataaagaaaagggatcttttagaattttctggttgattcatttaactagtttttgtactacatagacaattccaaatcaaatatcttgctcttttccttattttggaccacggtcttttctcttcacgtgcccacttaattttccaccaaaatttcccctttggattcttttgaaacttttacattctactgatttataaaaattcaattttaaggttatgcaacatatatatcatctcaatcaaccatgttgattttatactttactaaccaaagaatgtataattttcttctaatttttataggaaagctggaacaccaagaccactatggaatgcagcctctcaaatccttatggccgtaggatatatactaatggctttagccgtgcctaattcactctacatcggttcaatggtggttggagtatgttacggtgtccgtctagccataactgtaccaacagcttccgaactctttggtctcaaatactacggtctcatctacaacatcttagtacttaacttgccacttggctcgtttctcttctcgggtctcctcgctggcttcctctacgatgcagaggcaacaccaactcctggtgggggcaacacgtgcgtaggagctcattgctaccgtctcatcttcatagtcatggcattagcttctgttatcggagtcggtttggatcttgtgttggcttataggactaaggagatttacgctaagattcacgctagcaagaagtcaaagaaatctggtggtagccttagttaagacactgtatatctagttccggtgcactacattgttttcagatgctgattttgtatacatgatacaatatcggattcaagatattgttgaacaaaatttcaagtaccagagatcattgttgtagtagcatcgccaatgtatttttttgtctttccgagatttgtcaaaattatataaatgtatgacattttgatagtccaattccaattattttctaagattttatttagttacatatatatatactaagtggttaataatacacaatataatgcagaaaatcaccaatcttgtcacttttcagtcacttgtgaattaatgggcaattaatagatgggaactcgaatatgaccataataagaatttttgtagaaaattaagtgggatcaacaatgggatcactcgagaaccagctcacttacaagtgaatcgaaaactgaaccaagattacgctaaaccgggatcgacaattgaaaacccggttcaccttttaaatctattctgctcagtgagtagccgccgccgtggtctttgtcgaattcgtggtctctcctccacgcatcgacgttacgccaccatctaatctctttaaacctccgtcagctggtttatctcgccggcctcgtttacttcaaacaaggtaaggtctttcatctttgttaaggttttaggaactgaaactgttattggttttgaattggaatgaatactcaggagaactagaatagttagccaatccatagcaactctataatttgtatgtttctgttcacttttcaagaaaaagttcataatttttttgattcagggtttagggtttaatataccactttctaccaatgcaaagcttgtaactttgaggtatacatggctacttctgatcaacaccggtctcgccatcacgacgaaagctcttcaagacccaacaagaagaagaagttaagcagaaacccagaaacaaatctcctcttcaatctcaattcatgctccaagtccaaggacctctcagctgcattagcactttatgatgcagccatcacttccagtgaagtacgtctcagccagcaacattatcaaacgattctgtacct

SEQ ID NO: 4853 - DNA, 4211 bp, Arabidopsis thaliana landsberg
  unsure (1)..(4211): unsure at all n locations
tacattcccaggaagtctttttctcttctacttcatcagtttcttgagttcaatggaaactactttacctaacttaggggaatcagataggatcatagatcatgagagcaatgtggttgagtatgtgcattacagagatctgtattcatctgttggcttgacatagtgcatttgttttacatatatagtgagaaaacaaaaacgaagagattccaaagaaacggatacactctcgatgttgaaatgtgtgtcaacttctctagtctgaaacttgttttgtttcttatgatgctggttgctatgttcacactctactgttctccaccgttgcaaannnnnnnnnnnnnnnnnnnnnnnnnnnnnnnnnnnnnnnnagaacctgctgtaaccacagatcctcgctatatagctacatctgagatcaactggaacagtatgtcacttgttgttgagcattacttatctggcagaagcgagtatcaaggaattggctttctaaatctcaacgataacgagattaatcgatggcaggtggtcataaaatctcactgtcagcatatagctttgcatctagaccatgctgcaagtaacataacttggaaatctttatacccggaatggattgacgaggaagaaaaattcaaagtccccacttgtccttctcttccttggattcaagttcctgacaagtctcgaatcgatcttatcattgccaagctcccatgtaacaagtcaggaaaatggtcaagagatgtggctagattgcacttacaacttgcagcagctcgagtggcggcatcttctgaagggcttcatgatgttcatgtgattttggtatcagattgctttccaataccgaatctttttacgggtcaagaacttgttgcccgtcaaggaaacatatggctgtataagcctaaacttcaccagttaagacaaaagttacaacttcctgttggttcctgtgaactttctgttcctcttcaagctaaaggtcagtgactcagtagtaagtttcttcgtcttttgtatcagctaaatttgacatctctattctctcctcctaagctgattatgattcaattgcagataatttctactcggcaaatgccaagaaagaagcgtacgcgacgatcttgcactcagatgatgcttttgtctgtggagccattgcagtagcacagagcattcgaatgtcaggctctactcgcaatttggtaatactagtcgatgattcgatcagtgaataccatagaagtggcttggaatcagttggttggaagattcacacatttcaaagaatcagaaacccgaaagctgaagcaaatgcatataaccaatggaactacagcaaattccgtctttggcaattgacagaatacaacaagatcatcttcattgatgcagacatgcttatcctcagaaacatggatttcctcttcgagtaccctgaaatctccacaactggaaacgacggtacgctcttcaactccggtctaatggtgattgaaccatcaaattcaacattccagttactaatggatcacatcaacgatatcaattcctacaatggaggagaccaaggttaccttaacgagatattcacatggtggcatcggattccaaaacacatgaatttcttgaagcatttctgggaaggagacacacctaagcacaggaaatctaagacgagactatttggagctgatcctccgatactctacgttcttcattacctaggttacaacaaaccatgggtatgcttcagagactacgattgcaattggaatgtcgttggataccatcaattcgcgagcgatgaagcacacaaaacttggtggagagtgcacgacgcgatgcctaagaaattgcagaggttttgtctactgagttcgaaacaaaaggcgcaacttgagtgggatcggagacaagctgagaaagcgaattacagagacggacattggaggattaagatcaaagataagagacttacgacttgttttgaagatttctgtttctgggagagtatgctttggcattggggtgagactcagaccaactccaccgtcgctgctgattcttcctccaccgcgtaaaaccgtactactgtgtgtgattttcgttttctggttaaaatttattcaaacattagagtaggggttaaaataacaaatacctgataagtaaaggttcgttttgcaaaacacggacttctaaaaatctcattttcctaatacgcaccgtttttgtgccttggtccaaaatcaaattaagttctccttcccaaatccctaaaatgtctcgtcttttgttgtttaccaggcgattatgaaattctcgaaaccgaccctggtcttacggagacgatgataccttcctcaagtcccatggagtccagacatcgactctcgttctcaaagttagtcttcgtcttcttcttcttattcttcattagtttctctagtttcatgaacactacgtactattcttagttaacttagtagcttcacacacatggttgacttttctggaaatcagatcttcgattttgtttttgattcagaaatgtgtttcacaagcgatctatgtttatctatctgttggattgacatagataatgactcattcgtttgttttgttgtgtgtagtgagaagacaagtaggaggagatttcaaagaattgagaagggtgtcaagttcaacactctgaaacttgtgttgatttgtataatgcttggagctttgttcacgatctaccgttttcgttatccaccgctacaaattcctgaaattccaactagttttggtcttactactgatcctcgctatgtagctacagctgagatcaactggaaccatatgtcaaatcttgttgagaagcacgtatttggtagaagcgagtatcaaggaattggtcttataaatcttaacgataacgagattgatcgattcaaggaggtaacgaaatctgactgtgatcatgtagctttgcatctagattatgctgcaaagaacataacatgggaatctttatacccggaatggattgatgaagttgaagaattcgaagtccctacttgtccttctctgcctttgattcaaattcctggcaagcctcggattgatcttgtaattgccaagcttccgtgtgataaatcaggaaaatggtctagagatgtggctcgcttgcatttacaacttgcagcagctcgagtggcggcttcttctaaaggacttcataatgttcatgtgattttggtatctgattgctttccaataccgaatctttttacgggtcaagaacttgttgcccgtcaaggaaacatatggctgtataagcctaatcttcaccagctaagacaaaagttacagcttcctgttggttcctgtgaactttctgttcctcttcaagctaaaggttagtagcaagtttcttcgttttcagtctcagctagttctcccctcctaagctgattatgtttatttcaactgcagataatttctactccgcaggtgcaaagaaagaagcttacgcgactatcttgcattctgcccaattttatgtctgtggagccattgcagctgcacagagcattcgaatgtcaggctctactcgtgatctggtcatacttgttgatgaaacgataagcgaataccataaaagtggcttggtagctgctggatggaagattcaaatgtttcaaagaatcaggaacccgaatgctgtaccaaatgcctacaacgaatggaactacagcaagtttcgtctttggcaactgactgaatacagtaagatcatcttcatcgatgcagacatgcttatcctgagaaacattgatttcctcttcgagttccctgagatatcagcaactggaaacaatgctacgctcttcaactctggtctaatggtggttgagccatctaattcaacattccagttactaatggataacattaatgaagttgtgtcttacaacggaggagaccaaggttaccttaacgagatattcacatggtggcatcggattccaaaacacatgaatttcttgaagcatttctgggaaggagacgaacctgagattaaaaaaatgaagacgagtctatttggagctgatcctccgatcctatacgttcttcattaccataggtatataacaaaccctggttatgcttcagagactatgactgcaattggaatgtcgatattttcc

SEQ ID NO: 4854 - DNA, 2673 bp, Arabidopsis thaliana landsberg
tttaatgaaagtgtaagcatgtaaaatgagatgggaaaaaggattgtataatactaaaacttaggttgggttcttaatcaagtacctaaccttttttgcaatgaaataaagctctagtgcaagtcaagcataggaatccctcctttatccttggaagtaacaagtaacaaccaaaacataataattgttacttgatgttttcttaattagtttttagcattcctttattccctctgtttaatgtttatgggcttttaagcccttgattgatccataagaattaggacacgtgggcactggatattgggtactcatcagtccgtcatcatcccatatgcaccaaaatcaaaagttattcacctttctttggaccaaaatcaaaggagattcaatgtattagtagttgttttgcaatgatatttaatgtaacatttccagtgagaacacaactcctgtgggtttggcagctccaacttttctttctccatttctagcctgatgaaataccagaatacaatctggtaaagcttgttgagcaaaaagggcagacatcgagtacaaagcagaaagaaaaaattggttctcttaaaaggaaaaaaataaaatcaagtcacaattaaaccgaaaaataccaaaccgattataaaagcaaaccgacacgaggttacatgggtagtaatttatttagttccaaaacgaaaattggtacaaatccttgtgtttagaaatctgcagatccatcatcatcttaagaattgatctccgcaccagctactttaaaacgaacccaacgtgttcaactccacacaaaattatctcgtcgcccggctccggaacttggatatgggattcgaattgcacctcatcaatttctgcgctgatgatgccagttgggatttggacaatgaccaggtgatgccatttatatggtctattattgttgtcctccatcatctctgatgattgatagagatttggtttgaggttaatccgatataacctgctaccttcacagtcccaattataagaaaacgctggaaactgtagatggaagggcttttcgcaaacaaccatgatttggacaaagaatcccacaagcttgggggcagctttaatcttaggtagtttgatcctcataggttccctccatgaggttcgcatattgttggtagaagcaattgagtatttcgttatacaaacaagtcgaaatggagcctacgtgcaaaatgagaatcaatcaagtcacaacttaaaaatatagcttatgagggggttaaagggaacagattatagagaaagagccttacctcttgagaatattcctcgttcataaagtcacgaaccagatcgctaatacattctagactgatgcaatggctaaagtccaagtggttgaaagaatgattcgaagagaagttaacacgctccagagattcgcacccatgtgcatagagatacttgaggctctctggaagatctgtcagtgaaaagattttgttgcagttgttgaggtagagagttctcataaaggataactctctgatgcttgttgggattctcctaaactcgaggctgctgagatctagatatgttaacttggtgaaatgactaagctcctctgataatgacacaagactcttacagttttcaaggctaagctcaagcaactcgtttctgcctggagctgatttttccacactaagaattcccatcaatgatccaagactcttgcatttttcaacgcaaaaatcaagcaaattgtatctgcctgcaccaagaattcccatcaatgatccgagcttcacacagccagaaagtacgagtctctccacctgagaaagttgtggcagtgccgtaagtctgcgacagttactgaggctgaggtactttaacatggcaagttgtcccatggatgtgggtagatacacgaaatcatttccaccgaggtccagtgtctctaggagctgcaactgacatatgtcttcagggatgtcttcaatgtttaagtttatcagctttagctcggtcagacatggaaagtctgcaaagctaagacagctgaaattaacaggatccaacctgtaactgaaccgcttgatgtcgagtgatttcaaaccaaagaaaccagagttaagtagatgtgttactgattgatgagcggtcttctgcacagaactaaaagacagatggtctcccgtacccgagagacccgacaacttaatgaatattttcccctggatagctagatctgtcagagaactcagtgtcgcccctgaatgaggaaggttcagtataatccgtttgaggccccagcggctgaggctggcttcttgaaggtcattgacgagtatcactccctcaagaccatcacagtacatcatatttagtttcctcagatataatctattaatagactctgggatttgcaccaggctcgtacagctttccaatatcaactcttcaagatttactgcggtcgaaagttctggaagttctctgagattcctcgatcctgttacatctagtatccgtaggtttggaagcagctgaaaacaatacagcaaaacacagaattacaggaaagataggtaacaatatgacgaccttatcagaaagagtaaaacgaatatgtaatttgaatgagcataccttggttccatcccagaggatgtt

SEQ ID NO: 4855 - DNA, 1721 bp, Arabidopsis thaliana landsberg
actgagttcaataatggtgtgtggtcgaaagataggtggcaatatagtcaatggataggcatcccagtgtagtaacttcagattacgagaaagaacataatcatctgaaattagctgcaggttcgacacattaccacccaagtgctggaagaacttgagaaatgtgagattatgcatagggccaaaaacactattcctcaataataaagtgtcagccatttcacacaagtgcagtgacaggccttcaactcttcgagtaccctgttgataaaagcgtcaacaactgaagaaaggcatgtatatccaaaaaccatcaagattagagtggaaaacaagagcaattctaagatttactttttgaaagaacttactgtgttactgtccagtacataatggatctctgtaggatcccataaaaacctttgtttggaaggcctccagtcggattcttgacgcacaatttctcttccagtttgtactagcaagatatgcatgcttatacatccatcaattgatatgttgacgagacactttgctgctaagtgatttatccttgcatcacaatttttaagaaatgctctgatatatcggagatggccaccattaaagaaacatgccacatgaaggaaaacagtcttgtcgtattgatctaaaccgtcatagctagctctcaaaatctcttggacatttttttgagggaatgtttcaagtagagctagctcatcttcccattcatctatggccacaatagcactgagatgggaggcaaaagctacaagggcagaaggaaggccgtgagcaagccgagaagctctgataaagagttgctcaaaaccatcagaaggaggtcttcccccaaaagctaactttttaaaaacctgaagcgcatccttatcgtccaagcacttaacctcatatatattgtttactccgcaggaattgagcaaacctttgtctcgtgtggttatgatgatacggctccctggaccgaaccagcttgggtcctttgccaggccatgtaactgctccactttatcgacattatcaagcacgacaaaaactttttgatgcccgagtctctcctttatctcttgggatccagcttccatgctccataactcgacatcttcatcatagaggatatgggaaagcaattccttttgtagatgcttaatatcatagcctttagacacgttttccaaaaaacagtgagctggaaattgacgtgaaaatcgatcatagagacacttggcaatggtggatttgcctatgcctcccattccccagatccctatcatatgaacctcgtcttcacaaccaatattcagaaggagagtcatcttcatcatatgagcttccattccaactaaattaatcaaatctgtcgacttcatccttggcagtcgacttgagatgcctccaactacctcggctatcatatctgcctcatccacgctaacataggcaacacaaaaaaatacatcaaccagattgtggatggctaaggttagatcaagaaatcagcagaacattgtacttagtactctataaaagtagagaaaagaaagagagattttaccaatttctggaatgcttgcgtgatagattagcgacttgggtgagagctcttctccatttagaaaccttctcctccatctccggatctgcttcgtacctttgaaaggcagtcgcgaacgttccttcctggtatctcacgtcag

SEQ ID NO: 4856 - DNA, 1039 bp, Arabidopsis thaliana landsberg
  unsure (1)..(1039): unsure at all n locations
acatgtactgcttattggaggagatctcgcgtaagtgctttacttattatatgtaaatattcatagattcccaagcttttgtcgaatctaaccatggatgtctttctccagatacccaaatccgtcatcttttacatatgaaaaacgtctcttttgtccttttgagtatgcgctgcagcctccccggtggtataaaaatgactctattgctgttgacaagcctgaattacccaatggagtgtctgacctgaagagttatgaaggtcctcaatgttttctcatccctggaaaccatggtgagtttcaggtctcagcttcatttatctttcaaataagttgtttcacatacctgcataccagtggcttctttaatctcctctaacgatataattattgattattattttgtagactggtttgacggactcaatactttcatgaggtatatatgccataagagttggttaggcggctggctaatgccccagaagaaaagctattttgccctgcagctccccaagggttggtgggtgtttggtttggatcttgcacttcatggtgatattgatgtcgaccagttcaaattcttttccgaattggtgaaggacaaggtagtttgtgtaacattttcctttcccatgctttatataggtttataaatgcaatttccgttacctagttagagttctaccactgtttggctaactactgagtacttactatatactgtattactcgggtatagatttgtgatttattttgtttctgaagggtcattaacaagtggattagtctatattttagtggcttcgtcttttcatataactcaattttcattccttttctttgattaaattaannnnnnnnnnnnnnnnnnnnnnnaatgatgctgtgatcattatcacgcatgaaccaaactggcttcttgattggtactggagcggcgatacagggaagaatgtgagacatctgatatgcgacgtattgaaatacaggtgcaaacttagaatggcaggggatttgcatcattatatgcgac

SEQ ID NO: 4857 - DNA, 1519 bp, Arabidopsis thaliana landsberg
cttatctttggtagagactccatacttctcctgcaacttggtgatctcatcttcactcttcttctggtcaaacttcttgctcatcttcgcgtgctggtagtataacacgattaggtaccgattcgcgacgttgaagccagagagatggtcgacggcgttcttggcatcgtagatatcctcgtaaacgacgaaggcagtacctttcgtcgccttgtcgcaaccgattcgaatctggcgaattgcgccgtacttgccgaagatatcgtacatctcttcgctcgttatgttaaagggaaggttacgaacgtagagcacgcgattcacctccggtgggagtctggtgttactcttgcgaagactgattgttgtcatagcttctcttcttcttcttttccttcctttattagccggtgatttgttatcgccgccgtgaaaaaagttcttctatcggaaaatgaaagttaatagttctgattacgattgatgcgatgcgagtatttatagggtggaagaattaaagggtataatcgtctttccgaatgcaggcttgggggattttgattgacgattttatgtaaaccattaaaaccaaaagtaatttaccaaaccgatatctatttctggtttgatggcaaaaacctgaacgcctttcagtgttgatcaacctactaaaaaagcagccttatatacctgtgcggcctccagctcaaaagcttgattattggaaacagtaatgtttaaactaagaagcttttcgcatgtctcctctttttcttctaatacacacaggatttgagataaagagaccatagactaattaactcacggataaattttacaatcttttattttttctcaaaaccagactacatgcacattattcataatcgctctttcaatacttttaatacaaattatgtacaattgttcttacagaatcacgatatgcagatagatacctgcactttacgtagcttcagttctgacacgcttaactggagctcgaagagaagatagataattagcatctgatttctcaataccatcgaaaaggtaactgaaaggaggcatctctatatacttgccacttcttggaacaactttaagttcctcgttttcccacacaattcgtcctcctgctattgtcacttcaacttttccctgagatttaacaatcaagtccccaataaaataaaaggttatgattgctcagagattatacaaatcagtaaagacgaattgtttgtaaaaagggtatcattacctttcctcttctgccctcgtagacgtttgtgtctgatcttgaatgatgagactttgagctaatctcgtagcttgagtttggattcaatatgataatatctgcatccgagccagcaaggatagctcctttccgtggatatatgttgaaaattctagcactgacaaacttaaagtcatttcaaatgcgaactcataacttaaaagaaaaaactcattggaaaaagcaaattttctacattaaaaagaagctgggaaa

SEQ ID NO: 4858 - DNA, 2183 bp, Arabidopsis thaliana landsberg
actttttcttcttacagtgctcagctctgtagcgtgttttccaaatttctcactatctgaatcttgaggcctgctactttttatcctgagaactctcaatggcttctcttcttcaccattgaccatagccttttcagaaacttttctttccacagagccaggctgattcataagaggggcaccaccagtttgcccaacaacccgagcactagctttcaagctagcaattagatctttatcagccatatcttttcgcttccaaatttcttgtacagcatcttcaagatccttgacctggcatcataaacacaaatcagaaaagagaaaatgggataaccaaattgtcattcacagcaatcaactagaacctgggacaaatatgagatagcaaaaaagacttaaggacccatgaaacacacctggtaggattccccacgacaagtagaacatttgtattgaagattcccatccacttgaaactgcatatatttctcatcgctgcgatggtagcttacaaagttagcgttattttaaagtatttggatacacacttgggagacatgcttacaggacacagaagtacaatttcattaacgatatgtacctaattccatcacactggcaatgaacccagcgctggcaaaagtcacaacacaccattggcgttgcttccgagtccctgtaaacctacgtgatgaaatcaaaataatttgtcaattcaaagaatgtaagaaaattctgcaaataactgcttttgcaatacagatgtctggatagtatagggtaacaactccaaaatacataactctattaattatggccaagaatatctaaatatgatgcttggaaacagagcgcacgttttcctatcaccgaggaggagaatatgtaaatataccttcaaacatacaggacaataattccccttaacaaacaaccttccacaagcatcacaacaagtatgccccaaaaaccacctgcaaagtttagaaggaataataagagatagtgcactttacatgaataaatttcaagtatcacaaggcaaaaagttaaataccgtaagctctggccattcccagggactgtagactcacaactgtaacatttggtgtgcttaggacacaaatagggtccagaactaacattctgtaatattcagagattaaaataaaccaatttgcaaaagataagataagaaccttatacagacgcaataaatactataccttgtgccgaggatgttggcaatcacaatgatatgcatcatcacatcttttgcagaacataaacttttttggatcccctaaagtcccgcagccctaaaggaaaaatgatcaaaagaatacaaataatcaagcagcagtcatacctagcccagcatgtaaagagcaagaataatcattgagcacaaagttgtgtccgaacatacctcacagattcggcaagatgggcacgcccaagagctccaattaaaaagatctgctagcaaaaaccggtataagaatctaggcagaaagactcataagtcataaacaatagattcctatgaaacaatacctctatgttgggcccaagacttcacgcagtttctatgatacttcttcccacaacatttgcaagaaagcatcttggctctctcactcttcccaacttcaaccaaatagcacatgtgacatgttatgcttgcactgtgatgatcatgatcttcttcattgaggtctttgactgaaacctacatagagaaagacataacattgaattagtgtcttgacgagaatagacttcataatcatccaaaaaatcacaagtagtttacatataaatcatagattacagaacccgaaaagacaggacaacaccaaaacacatacacgagatacagataatcaacatcactgaaaacacgttttctcacaaagacagattcctataaacaagttcaattcaattgacatagcagtaacccctaaccacaaaaacaagtttcgcaagtaagaattcgaacctctaagtcgccagaacaatcattcgcagcataaacttccacagccttcttctgcaacaccaaggtgcgtttagctggtaccaaattcgatgatgcagcaacaacctccatcgccgaatcactcccaacaccaacatttctagccgcaatgcgaggaccagtatcgaaaacagca

SEQ ID NO: 4859 - DNA, 2377 bp, Arabidopsis thaliana landsberg
aaacgctccagttggagtagacactccttccttgaaaattgtaactttagaaacggacgaaagtatttagatccactgatgtgggttttgggatcagtctcgcatttcgtatgttgcgattaagttgaagttttggttgtgtattgccagttaaaagcagattactggttcgagtcagatgcagaggtgagcctcacagatttatggagcaacttcaacagctgagaaacaaagttgtttgaaacctcaaattcccaattactaggatgaggatgaattttctgttacattttactaccccttttgagcctgaaatcctaatagatttttttccttataaaaataaaagatgcaatattttaaggtcattcaagggatgtggcaattatgtgaaaaaacttgtactctaattagatatataattatacttaatggccttttgcatgtcaatgcatacatctgtttttgtaacatgtgtttataatgaactttgaaattaatctttttgacactttgggtccataggttacaatttgcatgttcaaacagaaacaaagcatcatttacgaaccacctgatttggacaatatcaaacgttacttctgtcagaatcatgtcaaaaaacgaatggttccaaattgaaaactagttaatctctcatcttgttacatttagtttcaaagctcgaagtcttgaacgctagtagagaaaaatatcttgtggaaaagaagtatcaactttacaaagcttgatgtcattcatgagttagatcatatcatgtttgatgtcattcatgagttaatcatgaccacattggacattgatatcttggtggatccctaaatatggtgcttgtttggatcccaagcaatacttttcgttaaatggcataactcttgctaagaagtaactgcctaaaacagtaaaacgtaccctaaaaaaaaaggaatgcctttcagaggataattttcctaatatacattgttgaatataattctgctatataaactcacccacacacgagaagattgaaagcgactcaaaaatcaagaacatcgaacaacgtcgttttgccgctgactaccatctcaaacgattcccaaacaaatggctcagttcactacaacaatatcgttttgaccgagattcttgatttttttttatatacaaacttttatggtaattttattgttgaaaatcatggctaagcattatcggaatagaagcaaaactcaaatatagcctgtcaaataagagaaggtatagagcagattcgttgatacatcatagaagaagaggtagtgaacaaaaattttctacctcgccaagtcagttttgctccttttttgtttttgtttttggctcatattcaaactttaaaaatgcaatgttgacgtttcttctaggttggaattggacagaggacaacttggtaatgtttgtaccgaggttgtaacaataaataactaaggggtttgaggagaacggagtagcttctttattaatgatgaacagaaaggcagtaattaacataatggaaaaccgtaagtacagaactgagaaccgaaagtataggttggaaaactgatattaatggtcggaaaacctgaaaatacagaacggaaaaccagaaattaagagataaaaagataggcagcaattctctcttaaattctctgagtggtgacttaggttctagatcccccttcttagtactgtctcttcctatttataggcaaggagctgatctagagttctcttagtctctcttgcgatttctcctttttgcctttctgaatttatcgggctgggccgagctgtgatgggccgagtagtcattctgatgggccgttgttctgatgggccgttcttctttgttatgagctttcttgacttggtctatttgtgtttgggccgaattgggcatggaggccaaagcccgtatcccacagcgaatctaaataagaggaaacaaagaaaaaggagaagaagaagaagaagaagaagaagatatgcagccaaatgggcttaaaccattaacataatgggaaagcctaacttaagcccaatacttcagctgtcaaataagaagagaaagcccaatactccaaattcggatcatatcacattatacatctaaatctgtttcacaattcaaaacatacatttggattttgactagtcgaagcctagtaattagtaattaaccatatccatgtctcagccaatcataaactaccacgtgggtgattaaattaattacagagccaaaacaaaattttgtcgtttcttcaaatttcaaaaccagattgttctgtctcagaattcagaatcagtctctgatcttctccatgacgattccgtttcattgatcgat

SEQ ID NO: 4860 - DNA, 1187 bp, Arabidopsis thaliana landsberg
tattagtgatattaaataaggcattgtaactttgttaaacattaataaaaaacaaattatattactgtttaatgttcatccatgcccttctttttacaataatgaacatatataataatctaaaagttttgtagtgtgtacataacatcgaatttattggagttaataaagactgtctaaagaagtacaaagactcttatcaccttcaaggtcaagcaatgtacttcatcaacccctagtttctgtctatatcttaagctttatcagaataacttttacttgtcataactcaaaaccaaaaacaaaagttctcagagtaaatgttattttgctaagatattgtatgttttgtcatgtatttgattgaaccctttctctctacacaacaaaaccaatttctaagggagttttattttagatttatgatggtttaaagagagaaaaacaaaaaaaaagtagttacagttttttgtcccacatcggcaatacgagagggaaggagagcagagaagggcttatataaagaagatgggcctcaccgttagaaattaaaaagggtcggatggctatttatgccacgctcagcctaagataaagggtgagtgctgtatggcaaaatcaagacatatggccgacattatttctggaacaacccatgggttggctcgctcggccgaccctccaaattacaattaaaaataattaaaatttgtttatcatacgttctgcgtaattgtttactataattagataaagaatccattttaatccctcaactaaagtattaatgaaaaatactctattctatatacatttaaaatccaaatgactatcgttaaatctatattctgcattttgatttgttaaaatgcaattttttttgttttaaggacaacattagaaacatgatgtaatcgattgggaatataaaacagtttgtcaatataactatgactaccattaataatttaaacctaacaccttgctcacatacaatactccatgcatattgcataggtcgaatcaaattaaaccaaaaatctatatattttgtgatattaattctgaccgatcattaaaatttactgtatactgtatttagtagttgtcgacaactagtttacaaaatgtttaagtgatcaataattaaaaaacaaattggaatcaaaataattttaccattcaca

SEQ ID NO: 4861 - DNA, 1253 bp, Arabidopsis thaliana landsberg
ctacagaagtacaaagactcttatcaccttcaaggtcaagcaatgtacttcatcaacccctagtttctgtctatatcttaagctttctctgtttcttatcagaataacttttacttgtcataactcaaaaccaaaaacaaaaattctcagagtaaatgttattttgctaagatattctcagagtttggattgattcgaggcatataagaatttaactgatttggtcatctttaagatcttaactattaataaggaatccaaaagttatttaaggttttgttagaaaagcaagataggcatcatgagttagtatatatatatatatatataatatagaactttttgattttttttaatcaaactatattatatatatatgtcttagttcctaataaaatgtaaacttcaatagaatttttgaaatataaagttttaaacctgtaattgtttgcacttattagatgtatattactatttataccaatatataacagattttaataactaaacaattataattttttaacaaaaacaaacgtaataggttactgaaatttactttataacaaaataaaacgtttaaatgaaaattaactctttatataacatatttatctacagagcctataaatatgactaaatattgctttaatactccagagcaaaacaaaagaaaaacgattcacaataatatttaatatattttctttgcgatattggttaatttctaccaagaaatgaagttgcctattatattcttaactctattaatttttgtttcttcatgtaagtctaaattatttaattaggataatgtgtcaatattataatcattacaaaaactgtttaaaaatttgatatatcttttgaaaatttgataggtacatcaatacttataaataaatttagtgacgaagagagaacatattctttcagtccaacaacaagtccttttgatccacgctcactgaaccaagaacttaaaattgggagaattggttactgttttgattgcgcaagagcttgtatgagacgaggtaagtatattcgtacatgtagttttgaaagaaaactttgtcgctgcagtattagtgatattaaataaggcattgtaactttgttaaacattaataaaaagaaaattctattactgtttaatgttcatccatgcccttctttttataataatgaacatgtataataatctaacagttttgtagtgtgcatgcaattaacatgaaatttattgggaa

SEQ ID NO: 4862 - DNA, 921 bp, Arabidopsis thaliana landsberg
atgctgcttacattttggtatttatataagagacattataagcttctaaaccctatgtaactttccagattttttcatcctgtagtctctaagtcatcaagggctgagaattgattagcaagctgtatcttctccgtacaagctttcgtcacctctgttctgtttcttttgtctttaagcgagagtggagaagaccgttgcacagtgcacgacgatgtttctgttttggccttaagtgttctgtggcccaattcatttgtttctgtcgcaggcccaactgatgaagttgacaaaatgctgtcgttttgaagaggttgtctgatactcccccttaaacgcggtgtgggtggcaaatccacgtcaagtttgaacctgagatcacagaaagctttaaatgacaatgacttggtgaatatatcaactatctgttggtgagcaggaatgtgtttgacaaccaaagaccccaaagcaactctttcacgaacatagtggtaatcaaattcaaagtgtttgcttcggacatgaaacgcatgatttgctgttaagtagacagaagaaaggttgtcaccataaagctcaggcgtaacggtaagaggtatccctaactctcggagaacatgacaaatccaagtcattttttgagcagtttctgaaagtgatctgttctctgcttcagtagagctgcgagagacagtcggctgcttcttagaagacgaggaaatgaggttagtgccaaggaacgtacaatagcctcctgtagagcgacaagtttctttacagccacccaatcactgccagtgtaagctcgaagattgaaatcagactccgtttcaggctccatttcactgtaagcacgaagctgaaagtcagagtttttggacaagtgaattcccatggctagagtacccttacatgcgaagg

SEQ ID NO: 4863 - DNA, 6823 bp, Arabidopsis thaliana landsberg
  unsure (1)..(6823): unsure at all n locations
ttaaacttaagtagaattgttttttatatagaaatggagcaagtcgatcttaaatgttagatcataaataaacttctcatgaaacctaaaagaaaaaatatataaacacccaaacccattccattcacttcaacaactcaattacaattatgcttatatatcttacatgcaaaacttcatcattatcatcatcatctctagctcctcctttgaatcttttccaaattcaacttccgaaagagataaccctaatttctagtcttcttcttctaaattttcttccatggatatcgaaaaggcagggagcagaagagaagaagaagaacccattgttcaaaggccaaagctagacaaaggcaaaggaaaggctcatgtatttgctcctcctatgaactacaaccggatcatggacaaacacaagcaagaaaagatgagccctgccgggtggaaaagaggtgtagcaatcttcgattttgttcttagactcatcgcagcaatcacagctatggctgctgcagcaaagatggcgacaacggaagagactcttcctttcttcactcagttcttgcagttccaagctgactacactgatctaccaactatgtcgtaagtttctctccaaatgttactcttactataggttataccaagaatgtagtaaccaactatggaaatgaaacccaaatgtgtatagtcgtactatagataataccaagactgctacgtagcttaacccgttgaatccaaccaaagccaggctagttgcaaagttcaagcagtagttagagagaaaaaatgagctacgttttaaataagggggaaaaaaaaactatcaacatgaatttcgagcaatgtgcttggtgcttattagggatttaattatggtacatgattttcgattatataaagattcaaacttatatcattttttattgttttgttttgcagatcttttgtgatagtaaactcaatcgtgggtggctacctaaccctctcattgcctttttctatagtctgtatcctccgccccctcgcggtgccgcctaggctattcctgatcttatgtgatacggtaacatttataaaaaaaatttgaaaataaatagttataataatgcaatgccaaacatacaaatgaaatttctcattttgtttgtggtttaacaatgaaacttttcgtagctttaaaaaaaagtacaaacgcaaacgctaaaataagtcaaggctttacttaagctcgagtaatccttatattggtcacaaattacaatgaatatgtttgttgagtaaacatatgacaaatccctctaactagttcgtacggttgtgttggtccaggtgatgatgggcctcaccctgatggcggcatccgcttccgcagccatagtttacttggcgcacaacgggaattcaagctcgaactggcttccggtttgccagcagctnttntaggtggggtnnttaagggggacttttgccaaggaacgagcggtgccgtggtggcatcctttattgctgcgactcttctcatgttcctcgtcatcctatctgcatttgctctcaagagaacaacctgaaaacttggattgatcctcttgactaaatttttatgtgctttgatattcatttgtgtgaatttttattaaaaggttcctatgtataatttggttttgttgtgtttggtaactcgggttttagtgtggaaaaatgttgtaaatcaatcttctatattcacatattgttttctttttccctatataattttcgtttcaaagataacaaattttaaacttatatctgcccgtcgatcatccaccaaaagtgaccgttgggagtctgtctgttcgatggcgcaccggacagtccggtgcacaccgaacagtccggtgccccctgccacgtcaccagtgccgttggaaatcgaccgttggagttctgactgctgggcccgcctggatgtccggtggcgcatcggacacgtactgtagagtgtctggtgcgccagcatcgtgcgtgcctgacttctgcgcgcnnnnnnnnnnnnnnnnnnnnnntgcaggtgaccgttggcgcgaagtagtcgttgctccgctggctcaccggacagtccggtgtgcaccggacatgtccggtgaattatagccgaagtcgccggagaaaaacccgagagcggcctcttcggtcgaggcagcctggggcaccggacactgtccgtgtgcaccaccggacactgtccggtgcaccaccggacagtccggtgccccagaccgaagcagccccttggctgtacacagccaagtcttctcttctcttcttctatctgtttctaacacttagacaaatatattagtacacaaaaccaatgtactaagacttagacacatacctgtacttgtgatttgcactttgatcatccttgggcatattttcacatttaagcacttgtgtttgcactcaatcaccaaaatacttagaaatggcccaaaggcacatttccctttcacccacatcgacgccatggttatcaactgcagcgtggcaggctgggacctgcacaaagtcttagtcgacaatggcagccaggcggatatcattttcctccatgctttgaatcgcatgggcataagccacagcctgctcatgcctttggacaaccccctgtacggcttcggcggcaagggcacctttcctatcggcaaaatagagttacctctctccttcggtgtagcacccaatgcccgaagtgagcaagtcacgttcgacatcgtcgacatggtgtacccgtacaacgccataatgggccggggctccatcaacaagtttgagacaactattcacggactttacctgtgcatgaagatcccaggtcccaaggcgccatcacagtctacggcaaccagcagacggcgcgcaacatagagcgggacttcgtgcccggtcagagaaacgtgcactgcctcacgacccagcgcgaggtccctgcgcccgccagcccaaccaataaacaacacgacaaggcacagctgcagagccaagacgggaccaagactgtccccctcgatcaggccacgcccaagcagacagtcactatcagcgaagaccttacctcgcatgaagaagagaaactcctctgctgcctgtccaagaataaagatgtcttcgcctggtccgccctcgacctagtcggagtcagccgatccataattgagcacagcttgggaattgacccttcggtgcgaccaaaaaagcagagcgtcgcaaaatgtccgacgaaaagacagaggcgccaaggcggaggtgcaccgcctcctagaggctaaattcatcgagccagtggcttaccccacgtggctctccaatgttgtaatggtgcagaaaaaagcgggaaatggcgaatgtgcatagacttcaccagtctcaacaaggcctgcctaaaggacaatttcccgttgccgcggatcgacaaaatagtcgatagcgcggccggatgcgaggtcatgtcactcctcgactgcttctccggttaccaccagatatacatgaaggaggaagacaaggctagcaccagcttcataacacccttcagcacatattgcttcatcagaacgccagagggactcaagaacgccgggtccaccttctccagactcaccaaaacagtgttcgaagggcaagttggcagaaatatatttacatatgtggacgacatcgtcgtcgccagcaagagcaaggaggaccatctcgctgacctcgccgagactttcgcgaacatgcgagatgcacgactccgcctaaacccggaaaagtgcgtcttcggcgttcgcaaggcaaaatattgggctacctggtatcacaccgcggcatcgaggccaacccaaccaagatccaggccatcgtaaacatgacgcctccgcagtccgccagggacgtccagcgcctgacaggcaggatggccgccctcaatagattcatctccaggtccgccgagcgaagtctccccttcctcaaaacacttcgcgatgcgaaagacttcgcctaggggccggagcaagcagcggccttcgcctcactaaaacagtacttatcggagctggccatcctcacaagccccgactcctcgctccccctattgctctatgtcgcggcttcgccgcacgcggtcagcgcggcactagtgcaggagcagactgttgaaggcacagtcagacagtgccctatttactatgtctccgaagtcctgacaccgtccaaatgcaacatgacagagctggagaagatcgcctacgcagttgttatgtcctcgcgcaaactgcgccattactttgaagcattcaaggtccgagtcacctcggacagggggctcggcgaactattcagaaacccggaggcatcggtgaggattgccaagtgggcaggcgaattctccggctaccacatgagcttcgagcccaggacagccatcaagtcacaagtcctggcagacttcatcgtcgactggactgggccaataacacagccggacccgtccacagagaaggtttggaccatccattgcgacggcgcatggtgccatgcgggggcaggcgtcgctgcagtcgtcacctcaccagccggagtcaaacacagatgtgcagcacgcctcagcttcgctctggaatccgacaaatgcacaaacaatatagcagagtatgaagcggttatcctcggcctccgcaagctaagggccctcggagtcaccacatgtatcatcaagacagactccaagatagttgccggccaggtcgagaaagactatgcagcaaaagaccccgcgctcatgcaatacctcgcggctatccgaagtctcgagagacagttcaagggattcaccctgcagcatgtggatagggccaagaatgaagaagccgacgcattggccaaggctgccgccaggggcgagtccttgccctccgacgtgttctttcacatcatcggcacgccagccgtccggagccccgaagggctccaaataactaatgatagcgagggccaccgtatagtcaacctaatcatgaccgaagactggcgggcaccaataaccctgttcctacaggggtactatcatccaaccgacatcaacgaggccaagcgcctcaaacatcgaagccgggacttcgcactggttgagggccaactctacaagaagggtgtcagtcagccaatgcttaaatgtgtcaccgagaccgaaggcgtccaaatcctgcgcgaagtccacagtggtacttgcggctctcacgcagggccaagggccctagccgcaaaggtgatcgccaaggtttctactggcccgcaatgatctgcgccgcaaatcgggtcacaaggtcctgcgacgctgccagaagttttctcctcggtcaagcagcccctcgcagtatacaaagctgattgtccacacatggcctctccagcgctggggcctggacattgtcgggcccctgcccaccactcaggggaaccttaagttcgccttcgtcgcagtcgagtacttcaccaaatggatcgaggcaagggctgtttccacaataacatcaaaaactgcccagaaattcttttggcaaaacattgtttgccgcttcggagtaccgtccgaactaacagtcgacaacggcaagcagtttgacagccaagacttcaaggatttttgcttctccattggcaccaagcttgccttcgcctcagtatatcacccacagtccaacggagttgtggaacgcgccaatggaaaaattttcacagctgtcaaaaagatgctcgtcgacgaaaaaagggcaagtgggccgatttgctacctgaggcggtctgggcgctaaacacgactgagtgcagggcgaccgggttcacccctttccgccttctatatggatcggaggccatgaccccacaagaaataaaacatgggtgcccgcgtacagctccgtcagccgtccccgacgtggatgagccaacttcaaaagatctcattgacggagaccgggtcttcgccctacaggccctaaacaaataccaagcccagaccaaagcatggcgcgaccacgcagtcatcccgagggagttcagcgaaggggacctcgtactcgtccgaacagctcggacagagtccaggggcaagctggagcgccaagtgggagggcccctttatagtcaagacgaaagcttcccccagcgcttacaggctcacaacgccaaacggcgaagacctggagcactcctggaacgtcgacaacctccgcaaattttttgtttgactcctcagggctgatttcgcccttgtaattcgcaaaaacaatcttattctagtccggcactcttttcctcccagggggtgaggtttttaacgaggcggagccatgtaatatatgtctgaaatcccccgcaaaaacatgcgtcgaaaaaagaccgcgacgacggtcttcgacattcgaccaatacgaggtcaccgcgaggctaagcgctagccaccctcgtgtgcgacaaatccgcgcagaagtcgcctaagggtgcagccggactagcacaacaagtgcgaaaaaaccgaagtctaccgagaagactatccgcgcagaagtcgcctaagggtgcagccggaatagcacaacaagtgcgaaaaaaccgaagtctaccgagaagactatccgcgcagaagtctcctaagggtgcagccggactagcacaacaagtgcgaaaaaaccgaagcctaccgcgaagactatccgcgcagaagtcgcctaagggtgcagccggactagcacaacaagtgcggggatcctctagagtcgacctgcag

SEQ ID NO: 4864 - DNA, 666 bp, Arabidopsis thaliana landsberg
tgctccatcccaaaaagtccaatgcgaacatatatgtgaccgttgttatcatcattctctataggctgccagaaaacattaggccaacagttgtggttcatgaaccgaccaacatttcctttctccttggcgcttatcaagacttgcgttggaagattagcatcttcagagacttgttcgcaagcatcttcacacaaaagctccggttcatagttccatctgaagctatgatttatccgagatgtatcgaacaagtagtcgtcatcttcttctacttcttctttcgtcttgctcacaccagcaaactcgcagataaaagttccagctcggattggatcccaagaacgtaaaccccaaccacagtttgatgtcttaaacacttccaagtggagcttcaaaccggtttcaaccattcgggttggacaagatccaccacactcgtaaatcaatggtttacgacaaaccaaaatgttgttatggtatggtaactgaccacagttttttagaatgcatgtgcagttttgatgaatgtatgactgaacaagtgattgactatcaacattaacatcattcatcatacctgagtaacactgagatctaatgtagtcaaaatcgtcaggaatcgttttgtcttcttcatcgacttcattaacgagcggaactcgt

SEQ ID NO: 4865 - DNA, 2801 bp, Arabidopsis thaliana landsberg
gcagacgttcttaaattttctgactctttattttcatgttgtctggatccttaatactatttgttggcaaacaatagtgtaaaagtccctttagttttgtttacttctttcccgaccatgtcaccatgggtcagaagatattcattaatcattgtttgatcatttgtagattcatcagtgtaaagatgctcacttgactcgaattcttatttgatatcttactaacaagaaataaaaggaaaagtaactcatttgatggaacaacaataaagtacacaagaacatactaatatctccttgagaacattgacatgttccaaatattatttttgaaatagtcttccaaatactttatctaatctggattaaatccattggctcaaatgctttctcagaactgtgcgaaacctttttccttcaaggactcgacggtctccttgatgctaaccttcaagggtatgtagtctatgccaaggctcctcgttttatccttggacacttgatacgttggcacgtagggattctcgtccacacacctgcgtatgaggcaaaagttattgacacaggacatgaacaaaacaaccggtgtaatatatttagttcatgttttacctttcaggtagtgggagatttgggtaaagctcacgtagaatgttaacaatctcggagtggtgaacgacacgctcgaccaaacaataacgcccattagctgaagggacctcaaatgcttggatgtgcgcattggctacgtcttttacattaacccatccgaaactcaagtttgggaaagtctttgcacctacatatcggaaataaataaaagacaccaagttgaaaagggtttctctagctagcatttgacaaaccggtcctaagtatcatgaaagaagtaaaagtttttctcttaccattgattaagtttaatatagcagcagcactcgtgttcagagttggctgtaggagaggaccgatcaccatagccgggttaatagtaacaatgtctaagcctttctctttagcgagtttccaagctgcatcttccgccaaagtcttggatagaacataccacatctgagccaagtaacaaagcataacattttagtttgaagagaacattacagcacaataagacgactagttgctagtagatgacaacaaaataatcgaaatgaatcatggctcaatattcaaaacacaccttggaggcctcgcaaagctcaggatcagagaaccaagtttcatcgacggtaacatcaggtgtgcgtggttttccattgtaaccaacggcagccatggaggaggttacaacaaccctcttaaccgaagaggctttggcgcacgaattcaaaacgttaagcgtccccttgaccgcaggatcaataagttcagcctggagatgtggatacatagttaagatcaaatcaatccacaaaataaaaagcaattttttgagggaataaaaaaccaaacctgtgggtctttggcatcattaaaaaatggagaagcagtgtggaaaactccatggcaaccatcaatagcagagtcgaaagaaccttgttccaaaaggtctgctttgaacaagtgaagtctttcctttgcaccttctagtgaaactaagtgttgtgtctttttcggatcacctgtgtacaagcagagacaagaacatcaaaggatcattgtttgtgtgtttagattgttcttaagatcaaaattggtatccaattccaaagtatcagtttttaagatgtagccttcgattcactaatagaatcaggatccaagcacacagagtttaccagtagaaacccaaatcttaaactacagtaacacagacttaattggaatagtatatgaaccctaaagcaaatgaatgtgatagagaagagagggtacggaactgggatcacggacggaggccttaacagtgtagccacggctaagtaggaacttgacgagccatgaggcgatgtaaccggaggctcctgttacacacaccactttaccttcaccactgtttgccatttttctcgattttagttatgttctgtctgcttctctctaagtggagggaccaaatgacgaatgcgtatatttgggtgatttctttgccctctttaaagacttttttgatatttttccttttgcgtggtttgcacaatggttaggtggaaaagagacacacgttgttgagtagtcaattccaatttcacttcaaactcaatagtcaattcattttaaaacagaaaagaacactataatacttcaaaagataaaatcatatatccaaaatcctctaatataatatttgcgtagtttggccgaaaattttacaacaataaagcaaaatttagaaattgttttacaacaacattttttaaatagaatttataccatatgctatcatgaaaaaagaatgtataaaaagactttgattttggcaaatatgaatactataggtttcgtatttttgtaacttgcattggatctaccccttgttgtgccataaagttgggcaaacttagtatccaaagctcaccgaccaactcagacaacgaatccataaaaagaaattgtctttcttcttcatctagacatatttttacatattcagtattcacaccaagaaaatcaaaagctacactactttctcatctgatcaatgattagaaacataacaagatttaatgaacagagtaatatgatagtcaatggttgtccaagtattgtatgagacaatgagtcacaacttaatgtttctaccattccaaacccacacccattatatagtggtctgacaggga

SEQ ID NO: 4866 - DNA, 1223 bp, Arabidopsis thaliana landsberg
  unsure (1)..(1223): unsure at all n locations
aagttctaccattattaaattctactgatgtacagattctcaattatcgttgtcaaaggatttggtcatttggggtgggggtgggttgatgtaattacagagatacaaccacagtcacttccttcccaacctaaccaaaagggcctcatgctttgcagctgctactgcttccgcagctttgtttgcagcttcacgcttcattgccctctttgcacgccttcctgttatggcactgctagtcttctcctttggctcacatgaggatgaagaggcgggttcagagccagaagcctggccacctcggttcttatgttggactggccttgcttcttggcggcctgccctcacaaatccattgtcaccccacctccggtttcctaatcgaagacttgaaccttgcatataaaactcgtcaaggtcatcgtcgtcctcatcctcctcctcatactcaggtggaatgtcgaaatcatagttgaaattgtcattgtctgaaacccgctccactgcttccagtggctggaaccatgatgccctcaggaggaggcatacactctcctcgaacatgaaatcttcaacgctgcaatgatatataacagacaaaattagttacaaaggaagaagtacagaaaatgatgtaaaagccaagagtaaactaaagcaataaaggcacaccgccagtcaagtaaatggagtttaaaatggagccaaatgtaaacaaggatggaaattnnnnnnnnnnnnnnnnnnnnnnnnnnnnntgagaaaatcaaatggaagcttacattgtgggcaggtaggtttctccttgtaacttgcccaacggagtatgcacgtcacactatatatagatagaaatgaatcattcctcttaaaaatgaaaagacaaaagtcagtatatatcctatttcatttctaatcaaacatacttattctgttcaaacgaaagaaacagaaaaacgttataacaggtttaaagcaaggccaaagtcgatcgttcagaaacctgagatgagagctaaaactgatctaacaaaacaaatgccttaaaccacaaatggtaacttccacagtatcagactaaatattgataaacagatcacttataaccaaaccagtatcattcctcatataaaaaaggatatacactccactagcaacaaaacaaaatactctgaaaaaaacaaaaatcacccacacttaccagtaagcatgctcacagcctt

SEQ ID NO: 4867 - DNA, 1503 bp, Arabidopsis thaliana landsberg
tttaggatgctgatgtataagcattatactaataacacactaatttatatagaatattggaatcaatacactaatcgtactattgaagtctatatataatgttttgtaaaaaattcttacacaaatcagtctagtaataacattttctttattatcttttggattggaacgaaaacaagtacaaaatacgatacataatctacaaataactcgcaaataaacaagtcaagaaacggtacaaagaatctgcaaacacattttttttttgagagtgtaaacaaataaaatacaaatacaaagttttattgtcccatacaaagtaaatttcctttgccccacctttacttaaggctcattaactcatatgactcattggcccatctctgccaattgtcacacgacttgatggttttctttgtcttcgacgaagtgctaaaacatgtggctcaactttgggttccaaaacaaaagattttgaaaataatatatcataacacaaagaaaagaaagaaagatataaagtcagcttaaagctctcgcatggcgtctcaagattctcatatgttattgagcttctttatatctactcttttaatcactgtcgtgacctcgcaaactcgatgccgaaatttcaagtcgatcatcagtttcggcgactcgattactgatactggaaacttactcggcctctctagtcctaacgatcttcctgagtcagcctttccgccatacggagaaaccttcttccaccatccgtctggtcgtttctccgatggccgcctcatcatcgacttcattggtattttaaacgttttaacgttttgaattggctatgttttgattaaactttgagagagtctctgtaaagcaagatcataatctttgttttagtgcaatttttttcaatttaattggattccagtttttgatttttatactgtaataattttttgttttaatatgtattaaaacctgaaaaatacgaaagcattttatttcttggtttcttttgttcacagctgaattcttagggattccacatgtgcctccgttttatggatctaaaaatggaaactttgagaaaggagttaattttgcggtgggaggagcaacagcactagaatgttctgttcttgaggagaaaggaactcattgttctcaaagcaatattagtttaggaaaccagcttaagagcttcaaagagagtttaccatatctttgtggctcctcatcaccaggtagtgaagatcaagcttttatttgtttccattgaaaataataatattttgtatttgcaatgaattgagttaagttgtaatgattttgtttgttttagattgtagagatatgattgaaaatgcatttattctcattggagaaattggagggaatgattacaacttcccattatttgatcgcaagaacattgaggaagtcaaagaactggttccccttgtgatcactactatttcttcggcgatctcgcgtaagagttttcatcga

SEQ ID NO: 4868 - DNA, 549 bp, Arabidopsis thaliana landsberg
tgcgccgcagccttcaccgccttctggtcgcgcggcgtttatgttcgcagcgcgtgctgcacgcgattggggaggtggccgagcacgctgtccggcagatcaagcggattttgcgtgacgaaatagacgccgacgcccttgctgcgaatcaggcgcacgacctgttcgaccttctcgaccaaggctttgggtgcgtgcttgaacaacagatgcgcctcgtcgaaaaagaacaccagcttgggcttgtcggcgtcgccggctttcggcaggtgctcgaacaattgcgacagcagccacagcaggaaggtcgcgtacaaacgcggcttttgatagagcacatcggcgggcagcacgttgacgatgccgcgaccgctcagatcgatgcgcatgaaatccttgagatcgagcgccggctcaccaaagaaatggtcggcaccgtcggcttctagttgcaacagcgctctctggatcgcgccgaccgagccgctgctgaccaaaccgtagtcattgccgagcgatttggcattgctgccaacaaaactgagcacc

SEQ ID NO: 4869 - DNA, 966 bp, Arabidopsis thaliana landsberg
tgaatactcgatagcacaggagttgatcggtatggggggaagaacatttttggtgcccggagagttcccagtcggatgctcagttttgtatttgacatcacatcaaacatcaaacatggaagaatacgatcctttaacaggatgtttgaaatggctgaacaagtttggtgaaaaccatggtgagcagcttagagcagaactcaacagactccagaagttgtaccctcatgttaacatcatatacgctgactactacaacgcgctgtttcacctttatcaagaaccagccaaattcggttagacttcttgatcgttttactgaacctaaacaaacaagtacattgatcagtttgctaaatattgagttaattatgcaatcaggattcatgaacagacctttgtccgcttgttgcggcgcaggaggaccgtacaactataccgtaggtaggaaatgtgggactgatatagttgaaagttgtgatgatccttcaaagtatgtggcttgggacggtgttcatatgactgaggctgcgtacagattgatggctgagggtatactaaatggaccgtatgcgattcctccttttgattggtcttgccgtagctctggagttaagaacagtgggtcatctgacacatagaattctttgatgagaaactgatacaagttggtcaaaaaattgagaaaaggatactgataaaaacatgtatgttccttagtattgtctttgatcatgttcatgtattgtatcatgttgttatgtgaaataatttaaaagggtatcatgttcatgtatactccactccatatagagagtaagtaaccggcaacggcattgaaaacttggagataaattggaatatttgttgattcaatttggaaaatggcaaaaacaaattatttagccaagtgaacatttgttgaatcagtttggaaaatggcaaaaatgagaaagagacaatcat

SEQ ID NO: 4870 - DNA, 1198 bp, Arabidopsis thaliana landsberg
cttcaatgtttttgcccacaaagaatgcgtagttatagtcattccctccaatttctcccatgagaatcaaagaattttctatcatatctatgcagtctaaaaaaacaagattccaaagtaagccattgttttacaagtgagcttgattcattgcgtgttggagtttaacagaataacgggtaggatctctaagcacatctcaaaacagaacctttttccccatttttgttgtgactttctacttcttaaccaaaagatgaatactaagacctaggtctatagctagaaccttttaaagaataataaaaagtgctccaatcattgcctttcaaatactattccatgatgctaatattaaggtgaagtggaatatttcataactttagtacgatatgatgggagcctaagaaatcagatttgatgttctaatcatgtaaaacaggaaactcattagttaggtaaagtagatcttccaaacctgaaggagagccacataagttaggcaaactctccctgaagctattaagctgaacggctaaactaacgttggtgtaaggaaaatgaatgcctttctcttcaagaaaggaacgttccagtgccgttgctcctccaactgcgaaattaactcctttctcaaaatttgcattttgagatccgtaaaaaggaggcacaagcggaaaacccaaaaattcagctgtgaacagaaccaaagaaaagaactataagttgagaaatcatcaataaggcttctctatacttagtatttagatgatcctaggttttatacaatcaaacttactactcaagcaaaaatatcaagaagaagaataagttaaaggaagagttacacacaagcaataagacaggggaagagttacataagaaagagccaaagatcttttggtttcttctcacaattttttcaacaagaagcaaaaaacatttatccactgtaatacgtatcacacatactacagagctaattgcgtggtaggtgtttagattaacaacaaactacataatttccacgtgcttatacattaaaatcaattattcatatgtgtttttgtaagcagggtgaaaccaaaatagagaaagtctatggagctagacctgaacacgtcatgccaatccaaaatagtacatgctcccaactttttggaactatttttgtgtggatgtaattatttcaggaaag

SEQ ID NO: 4871 - DNA, 378 bp, Arabidopsis thaliana landsberg
ccgtgtttacttggttctcggccaaggcgcaatgaagcattgtagtagtcagcatatatgatgttgttttgtgggttaagctttctgagtctgttgagttcttcctgaagctgctcactgtggtattctccaaacttgtttagccatttcaaacatcctgttaaaggatcatattcttccatgtttgatgtttggtgtaatgtcaaaaatgctactgagcatccgagagggaacccgccgggcaccagaaatgttcttccccccataccaatcaactccttcaacacagtcccaaagcaacacacacgttatagttttttactcgttattgtgactagcagatcaagaatcttattaaaatggttaccgtaatcgcag

SEQ ID NO: 4872 - DNA, 436 bp, Arabidopsis thaliana landsberg
  unsure (1)..(436): unsure at all n locations
gacttgtcgcatggcgggtctagagtcttttgtaaactatttttcagttttcttgtttttccgcaacgttttcgatttaatttgtataaatatatgaaaacatctgaattcttagggtttcatttttttttcctgacacggcttctttctctgtttttctatttcttgatctgcaagtcaacagtatgagacctatagtgatcctccaattttccttcttacagctgaatttttggggcttccttatgtgcctccttaccttggatctaaaaatggaaactttgagaaatgagttaataatggcgtaaacggagcaacggcattggaatgttcctttcttgaacagagaagaatttttagttctcacagcaacatgccaacatcagtttagatattcagctaaggagagcttaccanatctatgtggctctccatc

SEQ ID NO: 4873 - DNA, 575 bp, Arabidopsis thaliana landsberg
tcccatgataataaaagcatttccaatcatatctctacaatctaaaagcaaagaattaaacccattacaagtgaggtcaattcactgcaataacgtaataatcatgactccactagctagaaaagggaaaagttgatcttcagtacctgtaggtgaaccacatagatttggtaagctctccttgaaggtcttaagctgaattcccaaactgatgttgctgtgaggataataaattcctctcttctcaagaatggaagtttctagtgccgttgctcccgcaacagcgaaattaactcctttctcaaagtttccatttttagatccataaaaaggaggcacatgcggtaaccctaagaattcagctgtaaatagaaaattggagaatcacttaaggtctcatactactgttaacttgcagatcaagaaaaaccaaatcagagaaagagtctacataagaaaccctaatcaagaaaatccagatttttataaatcggaaaagctgtgccacacaagaaaacagaggttcaacgcaactatcagtttttttttatttttttggattcttctcagagatt

SEQ ID NO: 4874 - DNA, 985 bp, Arabidopsis thaliana landsberg
ccacaatcgaggctttcgaggatatcattcactctaagaatgagtttccgctagaccccaagacattggccatctccttcaaggccttatatggtgcttttatatccgcacattttggagtcgaagtcatgaggaaagcctttgagcttgttgaggtcaaggcacgcgaacagatttctcgcctccataaggtcaaacccgggatgcaatacctcatcgtgcttcgcaagaactgatccaaatatattgttaatatgatttcattgttgattctcttctttcgtcgaacttatggtgctttgtcgtcttttcttcttgttgttttgtaatattctccactatcctacaaatgaataaaacttcactttatgcttatacgtataacgagtattgttgatgaatgatgtatatggatcgtataacgttattccataaaagctaaataaaaagtttgcctactttgactagacattttttacaaacacttctgttttcttgcgaatagtattttctttgagcttatcagataaatgtctacagtctacactaaatgtctaaaatcataagacctttcgcaagtataataactttgaccaaaatagtttaatgatttctttctagtataattttaattatattttgtaataaaaatgattcataacaataattaacaaataatcaagaaaaaaaaaacttaccaaaatatttttttgtgttaaaatactttttcctagaaacattaatatttatgtctcaaagtaataaagaaaagagaagatttgttatatatatacaatacaagtgaaggattatcacgagtaggggtttcattttcagcttcgactgcgtcaaaaaaaaaaaggaaccgtactgtctattctctgtggcgttgaatctgcgatggcgggaatcagattgctaccggaagaacctgagacgactcctcaacaacaagccagagccgccgccgcggtgacaacgacaa

SEQ ID NO: 4875 - DNA, 687 bp, Arabidopsis thaliana landsberg
atgaaaggattgccgctgcatcacatattgcgagggagttgcagataactccatggaatctgagcagtagttttgttacttgtgcaactcaggtgaacatcacttatattgggaattttaaatccagtgagctcttatctatatgttgtaaccctaatccattaaaggcatgatcaatctgttctcatttatagatacgcgctggtgatatattataagttctttgcaagaaagactagaatctatttcagctctattttctctagttttgttaagagtcattttgaatcctgtcaatatgacgttcctgatcagttttataagttctcatgcttttgttactaggctggtttgatgctcatttatctgatattcctctttgggtttgagtagggcagagaaaatatagagcgtttggaaattactggagttggtgatccctctggacggggtctaggattcagctacgtccgagttgcaccaaaatcatcagctgcatccgaacataagaagaaaaaggcagcagcctgtcgcggagtcccaactgtcactggtacagatgctgatcctcgcagattaagcatggaagcagctcgagaggtttgcttctttatttcagattgtctatgaacctaaaagggctcatattttttactatttttcccattcttctagacttctaccata

SEQ ID NO: 4876 - DNA, 518 bp, Arabidopsis thaliana landsberg
ctgcgccatcaaagtgacaccttagggaatgtgatgattcttgtaacctgttgacaaatctcctttccttggggagatacgcgctggttgcagtcagtcatctgttgaaacaaatatgtataaagcacctatttttccgcagagattgcagtcaacagattacttgttggtccggtctcctaaaggaaagctctctctaaggcgtattgacaagatagttgttgttggacaacaggtttgcctttcgcaagatttctctcttagaattttggtccagggaatgtccaactacatatatatacccccagacacacacacatacataattaagattgaatctatatattccatgcttgtgaatttagtagcgtaacaatgggcttactagcctgagcgaatcaaactaatcttttccgttatcatttttcctttagtattttgacgttggtgtcctagcaaaattttaggataagtgatggaagggtatagtaagctagcagatctagaataaatagata

SEQ ID NO: 4877 - DNA, 3847 bp, Arabidopsis thaliana landsberg
cacacttgtagtgtagacgcgaggggagactttcacaaacaagcatctagagctgtgattgggaaattgatgagaacaaaatacatgaggaagatgctccgtgatgagttcagcctaaatgtctcgtactagaaggcgtggaggacttaggaaatagctatggataatgccattggctcggcaatgggaagctacgcattgattcagccttatttcaaacttctgttggaaacaaaccctaactcgctagtggtccttaatacggaaaaagataacaaaggggtggagcggtttaggtacttattttttgctctagctgctgcagtccaaggttattcttatatgagaaaggtgatagtgtttgatgggactcatctgagaggtcgatatggatgctgcttaattgctgcaagcgctcaaggtgcaaatttccaagtcttccccattgcttttgggatagtgaacagcgagaatgacgatgcgtagacatggttcatggagagggctcacagacgccataccagatgttcacatgcactcatcgatatatgctagcatacgaaaggtaaattatatccggtaacaagataatgttactagataattttacacttacaaagctaatttttctaataccttgcaaatcttgttttacctgatacgtgagtatatcataacactaatacattgtcacgaatctccaggtttatcccatgccttcacacgcggcctacgttgtccatctgaagaggaacatagtctcaatattcaagtcagaagaattgagttttctggtcgccagtgcaactcgggcttaccggctaagcgacttcaatcgcatctttgtagaggtaagaggtatgcacggtccatgtgctgattacctcgaaagcattgggtttgaacattgaacgcgctcgcattttgttggagagaagtataatttcatgactagcggaagtcgctaaacaatgtcttaaccatggcaagggattatgcggtaattttgctgctagagactctttgaacaacactggttacatggtttgccctctaaaatcggagaagctgcacaactcgaggtgaatgagatggtcattgaaaattttgtaaaaggggaagggtatgccgtacttaaaatcggagatgcattttatgaagtgcgagacaaagaagactcgacatttgcggttaccctttgggaaaggacatgcacatgtagagaattgcagctacataaattctgtcttcccatgccatagcagcgatgataaaggagggaatcggtgtcgaaacaatggtaggcgtccaccacacagttccatatctgagattggcgtattatcatgcccgtctccgacatggatacactaactccttccacacacacaaccattgtaaccaaacaagtaatttcgtgtagggtccttagctgggataaagagaaattttttggggagtgaaggagtttttttgagtaaagggaggtttgaaataatggtgccaggaaagttggaaacggagaatgtatgataaatattgaagaaggaggatcaggaaattttcaatgtatatacgtacgaaatctgatcctacaaatgtaatattacgaaaagggagatccccatcaaacttctttgtatgaatgtgataaattatgttaatccttcggttaaatgctatcatatgttttactgtttttaatgaccaatgttaaaattatttgaaaagaacaaaagcaaaaataccaatgcttcaacatggtgcagtgaaaatgttagaaaaattgtgatctgaatcaaagttagcagctagaacgcatattagcaaagaatttcgagtaattagtatataatacaaaacatacgttagttggtgaggtaacgactaaaagaaatattgtggtcacaattatagactaaaacaatattcgcaaagcgtgtgtaataattatgtacatgtaattcaattttgttaacgactaatttataacaaagaatttctctgaccacactatttcaattttgttatgagatccattgaggtaataaaacttttaacaggaacttaaaatgatatttgtcattaaaaattgaaaatatataatttaaaccaaaatggaacttttatattaacgtaacttttgtattatgtgttaatatcatagtggaactcgtaagaaaacagaaactttgatttgaatcaacgttagcaacttaaacgaatattagcaaccactgtgtaataatcgtgttaacgtgtaagggcaaccaaaatggaacttttgtattaacgtaacttttgtattaggtgttaatatcatagtggacctcgtgcaaaaatagaaactttgacctgaatcaacgttagcaactaaaacgaatattagtaacgactgtgtaataattgtgttaacgggaggggacaagttcaatatgattatgaccaaagatatttcaattttggcataagttccactgtggtatcggagagtgtgtgtaattatactattagctaataacacaattactaagcacaatatgtgtaaagactgtgtgataattgtgttaccaggtaagtgcacaagtttaatatgattctgaccgaaaattttcaattttggtttgaggtccactgtattaatcggaaagagtgtataatcattttgttaacggataagttcataaaagagttatactataagacttatactactaaccgttaaaaattacttatcatataagacttataatattagtcgttaacataagtattacagacactaaatttaaagactgtgtaataattgtgtaaggccacacgtctaacgggtaaggtcacaagtttaatatgattctgacccgagaatttacaattttggtatgagtttcactgtggtaatcggagaaagtgtgtaacaatcaaacatagcataccttacgtaacttttgtattaggagttaatctcataatggaactagtaacaaatatgaaaattacttataatataagacttatacaattagccgttaacacaattattaaacacacaatataaaattattggtttggacacatcgttagcttttaaagggaatgacctgttaatataatgtttacacgttaataccattaccaaaagtttttcgctacaagaaaacataagccaaaataaaccattaccaaaataaaagatccaatttggttgaaacagttagcaaacacaaaagggaataaaacaaagtctgttataaaatagtttgataatgttgaatttatgacgcaaccccaacaagtattattatcgagacaagttttttaacttcttgattaaaggcagctacatcaaattccacgcactcctcgatcccaccggcggcatgagcgtgtatgagaaacaccgagacaacgcctgaatcaaaaggcgaggtgacctgagggataccatgcaggcggtcaatcgggaaagggtgtagcatgataggagccctagacgagtttgcctgtttgaagaggtaaggaagcatagcagccagcggctggagctcggcatatatcgatgtgtctttgcggagctgaatgtttgaatcgagaatagtgatcttgtgcgctttgagatcaacacccaatgccacccaatgtttttttatcaaaattgaacggcatgtacacataatccgcctcggcatacaatcagcgaggtctgctttgccgacacccataagtagatcaactaatgctgcaggtaatatgaaatcttccggcggggaagtttgaaaaactttgaaaagagccttgtcagctgtgaacccaacttggaaccaagcacatcaaacattagcttctc

SEQ ID NO: 4878 - DNA, 1153 bp, Arabidopsis thaliana landsberg
caaactttcaatttttacttcacatgagaagagccaggatggaaacaactatggggtttcatgtaagaacaacacagaatccattgaaatcaagtaaaagttggagacatggcttaagaaaacacaaaacaatgagaatgcagaatcaaaatgttgggattaaaagagaaatacctctcattgcgattaagacgagctccaaagtagaaagaaacagagagcaaccaacaatcactgtgaacagcaacaagagaaagccaatctttcctctgcataccatctctagcgaaattgataccaagagcaggctcaggtagctccggaggcacttcctctgctggtagattcacttcccatgactcattagggtgtccgtacaaacacaaattctccttttctataaccacaaacacccaaaaattgaaatcaaatctcaataaaccacataaaagggtatctaaaaatcgaaatctttcatacccggatcgcattgagagtaaaaatcatcaacatctggaaaaaatcacaaaaacgaacaagttaaaggacgaatccaaaggcattacgaagaaatctgggaaatttagagaaagagagagagagagaggatttagacctttagtgagagcacgaagaagagcggcacgacgagcggaataatctttgaagatctcttcaacggtgcgagggttagaggaaacggctgcggcggccatatctctacagatttttataagatttatagatcagtactagttgacaaggatcgatgtctgtatcaatggtttttgagacccgatgcgttcgggcatgaagagagagagaacaatagatatggaaggagatggagagaagcagacggaacaagaaggagaagaaaaataagagagagagagaaaataaaaactttatttttatttttgggagtttggttgcgtcagcgaaaaggtttggtagtagacgaagatgcgtcgctttttaggtaaatggcattttagttgggcccttaagtgttaggttttaggcccaaataagtccaatctcctaagcgacttttttgttatccccccaaaccttagttactttgtgattttacatacaaaacaataaacccctgtctggaggagtgttatgtgatgagtgtcattccgtt

SEQ ID NO: 4879 - DNA, 727 bp, Arabidopsis thaliana landsberg
aattcggttcgaagcttaaagatttgactaagtttaacatattctaaaccccatgacacaacacaattgatgacacagcccagtttttttttttttaatatgaataataataatattattcaaacagtttgctactctctccctcaacttcttgaaatccctttcttgacatctaaagagagagttttgtatgctttaaaattaagaaggttaaagaaaaaaagagaagaaaagaaaaaaagttgattaacatattgattaaaacatgagaaccagagtctctctgagagatcatcatcatcatcatcatcaattgatcagcatcactgtcttcctttctttgcacagcaaggcgggcatttatactgcttgatgctctctgctttagccggagttatcttgacgcattttccatggtaccaacgttcacaaacatcacagcaaatccagaactcctcatttgtgtaatgacctccacagcttccacagagagtgtctccatgctcgtcttcttcttcctcctcctcatagctctcttccattagtttcggtgttgagctctttgtctgcccgtctattgatctctgctaattacgatttttgatttcaaagagggaaaccagataacaaaaaagaagaaaggaggctccttattttgtgaaccttagtgccatttctggatttgcttcctgagtccgagcttggcttgttgtctttcatggctttc

SEQ ID NO: 4880 - DNA, 1160 bp, Arabidopsis thaliana landsberg
  unsure (1)..(1160): unsure at all n locations
cggctggaggcactggctcaggtaaatgatgaggctttcttcttttagcattctcatgtttattcactgcttcttctgatgtgaatgactccctctatctctctctctttctttcacatgaaggtatgggctcctatttattggagactttgaatgatcgctacagcaagaagttggttcagacatacagtgtctttcccaatcagatggaaacgagtgacgttgttgtacagccctacaactcacttttgacacttaagcggcttacattaaatgctgattgtgttgttgtccttgacaacactgctttgggaaggattgctgtggagcgtctacatctgacaaatcctacctttgctcaaacgaattctctagtgtctactgtgatgtctgctagcactacaacactgcgttatccaggatacatgaataacgacctggttggcttgcttgcatctttgatcccaacaccaaggtgtcacttcctcatgactggatatacaccattgactgttgagcgccaggtaagatatctcaacgagtttaatatcacaaaataattttatgggaagctatcattgtatcttgaacatgaattctacagtatgcaaatggtttattttattgatctcatgctctattaactgacttgttcttggcaggcaaatgtcattcgtaaaactactgtgctggatgttatgagaagacttctacaggtaagctgtttgctttctccaatctttttttgaaacttgaattggatgtgcttctaacatgattgtatgtgcagacaaaaaatatcatggtttcgtcttatgctagaaacaaagaagctagtcaggcaaagtatatatcaatattgaatataattcaaggagaagtcgatcccactcaggtacttttacctagctgttttttgatcggcacattgacgataattggtcattctttcttgctgatgtaatctgctctgttgtttcgctacttgatactaggtgcatgagagtttgcagaggatacgagaaagaaagcttgttaatttcattgagtggggacctgcangcatacaggttctaacctaattgtgtctgcaaattagttattgcttttggcttgaccatggactttgaatataattttttacatatcttactctcaca

SEQ ID NO: 4881 - DNA, 4530 bp, Arabidopsis thaliana landsberg
agatccgacgaattccgatgatctcatctcatgaaatagacaaaaactctcttctgggcgacagttcactacacacccagtgatgagagaattatatgaaataacatctttcaagccaatctcactaaactgcctaaaagcatcacataagcttccatacttagcataaaatgaaattatggtgttttgaacagttaagtctaagatgaagcctgctttaaccgcgtaacaatgtacgcatcgccctccacttagatctccaaaccttgcacaacccatcagaataagcccaatggcaactggcgtcaccattgccacattatcattaaccaacatctgaaaaaacacttctccagcttcctttatcatttcgttttctacgtagcctccaatcatagcactccaggttacctcattcttcttaaagtctaaatcgaaaactcttctcgcatagataatgcacttgctcttggcatatacatccaagatcccagtcttaacaactaaatcattgctaaaacccattcttgtgcaatacccatgaacagctttcccttccctcaatgcaccagcccttcctagtgcaggaaacatccccacgatggtggatagattaggactcagaccatcgattctacgcatatccaaaaacaatccaatgacatcagttaaacagcaatgtaaagaaaacccaaaaattatagcattccaagcaacaatatctctcttaggcatttcgtcgaacacctttatagccatctcaagttccccacacttagcatagaaatcaaccagagcagtacatacatacatatcagttgcaaagtcgctacaattcacatgactatgtatcagcttaccatcgtcaattgctcgaagaccagcacatgctttcaaaacaaacgggtacgtatatttcgtgggtctaacaccagaattcagcatcttgtagtacaaatccaaagctttttccgcgaaatcattcgaagcataggctctgatcatcaaatcccaagcaataggattgatccttggatgaggaatttcatcgaacacatggcgtgcaagttccacttcattgcatgatgcgtaaagacgtgttaaattgacgagcactgtagaggaacttaacgtaagagagcgtttaagaagatgctgatgaatgacctgacctaagaccagattccttgagcgaatacaggtttcaagaagacttagaaacattgggataatggattttaagtttcagacatatgttacaaccaaacatcaaagacttaaaacaaaagtgaattccgacaactaaaaaaaaaaaaacatgtttcaagaaaaaatcaaaacagttaaatgttactcatcagtgtccatattgcatttgctcaggggaataataagtaagaagcttcttgaacagaggaacaatcgcaaccatagcaagttggagctgctcggagctgttaacacgaacacttacttgccctgctcctctattgttcagattagcacgagcaattaaattagaggaacgtccaatgggaacctgagactgtatgttccctccaatagcaagatctccgtgccaatccattacagaaagtccaagagtagtcaaaaaccgaccaagcggataatctttatctctcaactgagcttccaaagtaccaccataagcaaaatctccccgactagtcatagctccaccagacattacggttctgaaccatttactagcaataaacttatctgggactttcaaccccgcagaaaccgaatcacccgagtgtgttacagaaagaccagctgcagccttgtttctcctgaaattgttaaatctcgtttcgcttcgaagagtataagccaattcctttccaacagtttgcatgtcgaaacctagggaagttgatttaccctctccatgtttaaccgagctggccatttctagctgtacatttgcatccttcttgtcttttgtcacttgacctgagacagatattggtattttttcttttacaacaaagagccgttctgcattcacaccttcataaccaatatcatgatcccacccatgagtttccaggactggcctaacaagccactgattggaggaatcaaggtaccggtagcggtgagtagggttatcagagtcaaaagacgcaggtagagataaatctggcataggaactggaactgatgcaggtccaccactctcctcttccacattttcactatacccatcaggcaaatctttaatctctgcagcaaatttcttaaacatcttacgtctctttctttcctctttcatttgcttcttcattaaaagtttctctcggtactccatttcatcgagatactgcttcttctgagatttactaagcgtagccatctgagctttagtcaaactcttaaacggaggaagctgatcatactctgattcttcgtctgaatctgatgattcttctaaatcatcttcatcttcttcatcaccatactgctgttcaggaagcttaggttgtggtcttgattgcagaagcgatgaaaggagaaatggtaatggcggagccttggaccgagctgcaaatggtctccctggaatattatcttgcaacttcaaaagagcatttgcttctgctagaatcttagatgcaaatgagagtagcaacaaatgtggcttccacacttggccattcggtaatactctctggcctgcccgattagtcctgcaagctgagtgattctcaactaaagaaacagggttcatgagcctcatatctccagctgcttggcgaatggcctgctggatgacatgagaacgttgtgtaacaaacatatcatagctagaagcagtgccatttgggccatctggtggaacagaagcggcatgagtcaaacccacaatggcattaaaccatatcgaaggaccaaaaacatcacttatggtgcgcaggagaggcatgtcaccagaatctctgctttgcatatccaacctatcaagatatagtacaatgtcaggtggattcttcttgatgaaagccttaacagaattcaggatcttctcattcttggcttgatcagaccaggaaggtaagagaccgggagtgtcaatcacccgtaccttaattccctgaaccaaaccctcaacatcttgaaccctctttgtccccatctggaatgcatcagtacaaaatttcacttcatcaaatatagaattgatcgatgcacttttaccaaccccactttttccgagaaccataatcgttcaagaaaaatcaagtggatcctgaccagcagccttaagctgttctgccatggcactggcgcgatcaaaactaaaagcacctacacggcttccatttctgcccctcaactgcttaaccaatccaagcctgtataaaacctgagccacaacaacattatgcggggtttgccctagtctatgtgcaagcctcaaaaattttaccctgatcatttggagcttctcgcgggtctcatcatgctcatcagcctctgtagtggtagagtctcagcttgctgaaactgattgtgagacccattcccattgacgcgagactgttgaggagcacgtgatgcaggttccaaaagaggagaagcacgaccaagacctgctggacgagcaggtggtaatgccgcaggattacttctagactctgttggtgaaacagaacttactacctcaggttctgtttccacatgtgaattttctgtaatctctggatctacatgtactctgctgctttgctgcttctcaagctccttatttggttgaggactctgaacatcatgtcctccattagcactttgaactggtttgtgttctctactagttaccccaggggagccactattgctgtgaacttcagttgactcaggatatgagtgcggcgaagaagccaagtgttgctctggttttaaacaagtactgtccccttcagtctctcccttttccccggaactagattcctccaatggagatgaagtcacagcacttgatacttcattgtcacctgaagcattagtaacgatattacttgtgtaggcggcaccagtctcaccatttctttctgcctcggactcactgtccatacatactgaaccattctcaaatagatccttacttgttccttcaccttccacaacatcttgttctgtctgtttctcaaatagattcttacttgttccttcaccttctacaacctcttcttctgtccgtttctcaaattgattttcagttgttccttcaccttcctcaacctcttgttctgtctgtatgccatcaactctttcctcccaattatcgacttcaatgccatcattccatggttcctcaatcccatcatctttagggataacttcagccaccacttctttatttttaggagaggcgattccatttcccaaaaaagaatgagtctttccattttcaatacccacatgctcagctgctaaattggaaccattagtattagttgatgtagcattctcagtggtatcaacaacatccaagctcgattc

SEQ ID NO: 4882 - DNA, 1817 bp, Arabidopsis thaliana landsberg
ctataattagcctttcttgtatataaatcaaattttttgatgagaaaatgttagttaatttgtaggtttattcgaaagattttttctttaagaaaaaaaaaaaaaagatcgtcaaacaaaatggatggaatcacatatgcgatgtatgctgcagtgccggccttgaacatacataaatatttgatattttcatgtataacatgtcttttaaggctgggcttgtggttttgagaatttggttattacacgcttcttgcgttttgtatttttttgggtcataaaaaaatttcacccaaaatattaaaattttgaattatatatggatagatacacagatatgtaagcaagttccattcaggtatcaagtttagactaatcgtaaaaaagacgacgtcatatattcgtagtaattaatatacatataccccaattaacagaattcgatttcaagccaatctattagtatatgcttaattcatcttgtgtgatagtttgacgggttattatgtaaaacgtgcatgtgatgagtgcttactaagcagtcttgactctcgagcctacacgtttgttgcgcgcgtatgcatgcagcatatatacacatgtacgtagatgtgaaatgcatgcactcagggccggctcaacaaaacgtgggaccctgtgctcattaattttttttttaatatatgttttatatgtttagattttagtttgattatacactactgtttgtataatggaccttgattgcttaaagaaaatgaatgaaaaaataaaggaccttgtgcactagcaccagaccctctaagccgggcctggtttcagcggacaaatatacataacttactgtgatgatggtggacattgtttgctgggctgtgaaaaatggttctgcgggccgaaacctgttgttaatcgcgaatgccagttcagaagatgatcaattctggccatttcttcaaggtttgagatatagaggtttcaaactttttgcaacaatccctgataggactttacctgatgatgaatgtctgacggcggtaatgtgtgctaagtacatagtgtcttggaaacacctttcactgtgtaagggcatagaagatactggttctgatgactaacctctgtgcgcagcaggtctcaactaccccctggtttggcaacaatgtttcatcattctatgtaactctcaaaacattgacctttcatctttcttctgttaaacttttgctgttttattcgtgtttcacttctattttcaggctctgcttttcccaactactaacctttttaatcaaaacactctagcaacacaactacagtactaacacatgtcaaattttctcagtaacccaaacccaccaactttgtactctgtgaatcttagatcaattttataccgatctttataaacccagctttacaaatccagattaattgacaacacgattaatctacgatttgaagaacacatcttaagcccttaaaatctcaggaccaatttgaaacctatctggtccagtcacattcatatggtggaacataaaaagaaatcaaggatgcagatttaagtcatatatggtttccttctacaaacagaaacatgtaaccaaaaagtctcaacaactgtgtaaaaataacaacaaacttctccaaatatttagttttcctctgcctcaaaattcaactacttggaagtaacaagacaagacaaaagacaagagagacgagagagacgagagaagtgtttctacatgttttttctttttttctttttaccttttcttcaagtatctgtagctgttggagagttctcaggt

SEQ ID NO: 4883 - DNA, 5700 bp, Arabidopsis thaliana landsberg
atttgaaatcccgaatagctcgccttgaaactctttacagtcctgatcacaagacaccaaaacattacaatagcgtacaatctctttaataaggctaataaattaaagactgtatatttctacatacctggacgccttcaaagtaccttgtctccattttccctgcaaccgcaatgtttgagagctgttgtttgtatacttgtcttgtataaactagttcctcaagggaaccagcactcaacaaacgaaaaaccaccacatgacgtttctgtccataccgaaatgatctatcttgcgcttgcaagtcatgagacgggttccaatttgggtcaaatataaccacacggttcgcgctcacaaggtttagtcccaacccaccagctttagttgatatcagaaaaacctgacacataaaagctcatttaatcatcagatcagaagtaggtaagaagaaacatgatctctatcgaaaagggttcggttaataaaaacctgtttgctaggactcgcattgaaatcatccacaagagactgtcgcagattagttggagtagaaccatcaagtctagcaaagctataaccttttctaattagaaacttttccagtatgtccagcatcctgtaatttaatggatcaaaagcttgcaacgacaaatattctcctacattcatcaaactaaatccaaaaactaacctgacagagtaactgaatagaagtatcttatcaccctttgaaatccaagaagccatcaacttctccaaagctctcattttcccacaatgtttaacatcactaaggtccatgaagctcttgcttgcagatattccgcctaatagatcaatatctgtcccaaacactgtagatacaaactctgcgtccttcttctgtttctctggctcatcttttgggtttggtttaataagctccagatgattgcttatctgctgaagtttcataaggcatggaagcaccaagcagaaaggacaagaatcacaaccatcgtggttgtctcgatgaaggtaactccagatggttccatcaggaacaatccttctgcagcactctgattgcttaagcgggcttccacaagcgcatggattgtccttattcacaaggcactgaatttctgggagttgaatcattctttgataaacccgtctctgcaattgactcatttgacaaaagactacattatcttctttccccatcatgagatgcccaatggtttcctcctttgtcctcctcaacatatacttacggagaagactgcccaaatgctgtttcctcttatctgcaatctggacaaatctttccggagcagtagctctctgccctagcttaagtggttcatcatagaagtctcggaaatgttcacgagtgcctagtgatcccggtgctacccactcaaaaagattgaatagctcactgatcttgttctgcatcactgtacccgtgagaccaatcctcttcttagtcttgatctcaaggcatgcttcataaagtttcgatttttcattctttaaccggtgtgcctcatcagcaatcactatctcccaattaatcccggacaaaacggggccttggattcgaaacgtatcaaagctggttacaagtacctcaacaccgcgtgccttgagtttctccagaatcatatctctgtttgatccgtggtacaccgaaaccttgaagaagcttgcccatcgagaaaactcactctcccagttgtgaataatcgaagatggacagattattagtacaggacccttatcagactctaaaagacatgactcaccagcgtcaccgtcttttccatacactgcagcaagaaatgcaattgtctgaatggtcttgcctaaccccctgagtcaatacttattatcagagttccattatcacccaaacataaactattacagctacagattcaaatgcacaagaacattctcatgtaagaagaactcacatgtcatcgccaagaatgccaccatggttgtttttatagagattatacataaacttcactccctctcgctgatgttcaagcaatctacagttgatagaagccggtacctacaacaaaatcataaggcaaattcaaataatttccagaatttgagaagaaccatcaacacttgagttccattaaacatgagcaaaagttaaagactttggtaagaaaataacatgtatgatcggaatctctccaattgatgacagcataagtggttcataaggaccggaatagtcaaattcagcccggcttaacccgggtctcccgaattcaattgatctctcatcgtcttcatctacttcttcttcgtcgaacttgatgtttcttttgtgatcatcttcgttatgatcaaaatcttcgacttgggtttttgagattttagattcgtgctttgagggtaaaaagtaagaatcatcgagacgcagaagctgctgcgagagcgacgatttgggaggttttctcgacggttccaattcttgtgtggatgaaactcgcaacgatgatgatgacggaaaactaccacagggcttcaatgtctctttgaaagtgtgtaacaacgacatcgctaatcgatcgcgttgcgagagcaaaggaaaaagacttgcttttttcgagaaactgaaataaagtcgtaatatttagcaatttgaaaacttacttgctgttattctaatttgaagaaaataagaggctagaaagggaaatacattatacatgtgcagttttaatgggccaaatacggatagaaacgaagcccaaactgtacttgtggcagtaataatgggccgagttcgaatagcatccaagagaagcccaaatattatttgtttccaaacatgcttttaggtttagggtttctcgtgcatctcttatatatagcaatctccttcttgataacgccgagaaaagtcaccatttgtcgattcaacccaatcttgggttttggtttttctttaatgcttcggtgaattatttgattttcaagaggctttgtgtagaatatgatgaaagttgcatatcggtgatggtcttttgattcatatgatcgacaaaaatttcaactcgctacgttctttctgattcttacaaaagttggattttttatatttttgtttgacggttttggagaattctctcgacgtttttgtttaaattggatttgtatcttttggtattggaaaaatagtaatgctggagaaatgatgagaaatcagataaatcttaggacaccttctgacacagattctgtgtatgagaatgacatcatattctgatcttcagttaaatttcttttttcgtttcaaaaacaagtttttccgttctgtttgtaattgaattttatggttttgaagataggttaccttaattctcggtttattaagtggataattcaatttgaatctacggatgttcttaagctgcaaagagagattgtgattctgaggcaaccaaatattacaattaaaccttataattacaacggaacaacaatcaattttagaaggaataatgaattcaaagggattttgtatatatgtacacacagcgaactctatacgaacagtagtggtttatgcctttaagccgatcacatcaactcaatttatgaaaccaatagattatagtgacaaatctgactcaactgattcggctttttagaacgctcaataatttggctcttccaatgatttcagccttgtggtgtcttgagtgcctgtctattgaattcctgaagctgtctgtcatgttcttcaagcatctggtccactctgcttggctgagccaacaatggtcctgacatgtaaatcttgctatcactaggattatactgaaacacaacaatgaatgttagtaaaagaaaacagctgctctgatacgagaaaataaaaaaacagagatcattaactaacccaagatgggtcaattggtgctgtcatatgtctactatccatagtatcagctctattgtatgctcgccgatctcttcttctttggttcgtgactggttgatcttgccgttctaataatgttttggaggagactgagcctgataacatcttcgggtttactctagctggagggtatctagaaagtgcattctccttcacatgcattgttgacttagccatgttccggttgctcatcaatggacctgagtgtgaaattctcacaccagtttgattgtttctgttgtgctgcatattttgataatcaggaactggtccatgaggagtcctctcctccttaaacgacttgaaactatcgttcctactcctcaaatctttatattgtttctgcatttgccaaaagagtgatttgctttacagttagttacctccacggtcattgtgaccataaaagctaggaccttttacagttacttacctccattgtcattgacagagagttatttgctttgaccggtggtacaaattttctctcgtgtgatattctcgtcatagagtcttgtctttcttgtttctccgccctcataggttgttgccttttcgcttcatcacgcattttcgcatcaatctctttactaggaggatattttggtaagttcgatggatcgcaagcaaacggcttggttttgaagtactgacaaaagaacagagttttgtcactaatgcttccatgatctcagtaaaccaagaacatagtaaaacatcatgaaccagttacctcactctcaagggcacgatctgcagagctccggtgatcaggatctatggagagtaaagtctctaaaagtgaaagaacacttgcaggaaagtccttaaacatctctgatactttccgcctataaggaatcgcggttttgaatccagctgaagatggtaacttctgttttctccagtaattttctgttggtgaaccgcaaagcttgaagattttatgcaattgttctacctagaaagattaagggctacatttgagttgaagcaaacaagatgcaacctgaatttggaggaaatgaaatctacgagaatttgcatacctcggtttttccagggaggatcggtttaccggcatataattcacctaagatgcaacctgtgctccataaatcaaccccaacaccgtaatgagaggctccaagcaaaagttctggtggccggtaccaaagagtgacaacatggctagtcaatgaaacactttttgcagggtcgaaaaaagttgctaacccaaaatctgctatcttcaagactcccttactgtcgtcaattagtaggtttgagccttttatatcacggtgaagaacgccacggctgtgacaatgttcaagcccacttagaagttgtcgcatgtaacatttaacctaaacaacagaaacataaaagaaacggattttgaagcggaaagaaaaatctatgcttttgacattagggtagctcaacatttatgtgcagtacctgaggctctgtaaacttgacaccaggtagtgaagaaagtcctaagagatcatgatccatgtactcaaaaactaagtaaagggacgatgagacaggggcagtgatcaatccttccaatttcaggacattaggatgatcaagccgtcgcattactatgatctctcttgccataaacttaacactttccatatcgctaagatcaaaccggactttttttagcgcaacaatcttgttatgaagaagatcgcgagctctgtatacgctgctatatg

SEQ ID NO: 4884 - DNA, 2750 bp, Arabidopsis thaliana landsberg
  unsure (1)..(2750): unsure at all n locations
aaccaaagtttttatttaattaaggttttaattaacgtattattaaacatggaaatttattttccaaaattactggtactttaatgtaaaagattctaattttattttaataatgaaaaaatattttcatataaaatcatttaaatattcaaaaaataattaaataaaattagtacgttttttgtttattttggtaaaaacaattgcgatagtagtaatacgaatgagcagaaaaacattaaaaataattaaataaaattagtacgtttttttgttttattgtaattctgttttttttttttggtttgatataacatacatgaaaaatatatttaaaatataagacgtttcagacattcgaattcaggacaaattgtttaataagttggacagaagaaacatcaccttgatttaaaaaaaatactttgaagaaaagatgaacattaccatcatcatcatcagtaagtttatagacagagagatctctgtgtttcattgacttctcattctgctggtttctgctgccctaacttgggcgaagtaagcgtgcgcctgtcatcaaatcaacaaaccatattaatttacctaatatgtgatttatatacaaatacaaaggcttctaatttgttttctgaagcatgcgtaccatggcttcttttgcagttaatctgtcttgatgatcataccgaagtagcttgtcgaggaaatcaatcgcctacaccgttttaaacaaaacccttaagaacccaactaaaccattttctatacaaggagttaaggactcaaggaannnnnnnnnnnnnnnnnnnnnnnnnnnnctgattgtctgcgttgatgaatttggaccaaggtttcctgctatgcctgtaggttgtgttccattgaaccagagaatgatacaacactaattctcagcttcagctcattacatggcaattcaaagctcggagattacaatataatgtttaagtttcacataccgcccaacaagtgcttccagttgtggatcaagttctaactggtacttgttcagataagcattcaattcgtcagtcccaagcacctggtgaataagaaggagagttcatgacgacaatggaacggagatctcccatattctaatactgaattacaagtaatataccttggcgattttcactagctgatcctggttgtcatggccgtagaagaaaggttccttacggaatatctaatatgggtaatgaggaaaaattaggtcaaaattagatcaccacaagttcatttctcagaaaagaaaggaaagccgctcaaatgttatatcatgaacttaccatccctgcaaacatacagccaagactccacatatccaatgaatagtcatagtcttgcaagtccacaagaagttcaggtcccttgaaatatctgatacacattaggagagataaacatcagagtgaagctaggcaacagcgaaaaaaataaaataaagggtatgaagtaaaaccataccttgaggcaacacggacattatactcttttccagggtggtaaaactcagcaagaccccaatctataagacgaagcttacgcagctcatggtcaatcataacattatgaggcttgacgtctctgtgcattattccttgtgaatggcagaagtctagtgcctgcaacaagtagtcttaccaaatgtgagtatgaagtcaaatggaatacttatataatccaaccaataccagaatttataccttcaacagctcatagatgtagtaacgaatgtcgtaatcagtcaacgtaggatacaaaactttaaagtctgtgctgttaacatattcaaatatcaagcttggagttttcgaatgttgatctctaacaacatcaagcagcttgacaatatttggcccaccgcataggttctgaagtattttaatctctcttcttatctacgaaaaaaagatcatagagagattcaagaaacaaccccaatcatccaaaacaatgtaaaacaattcaccttctttttcttaacaggtttgaggattttgataatgcacttctccttgctgttcacatttataccctcgaaaacttcactatattttccacgccctaccttccttactacctcataatcatcttgcgccctgagagagcaaataacaagatcaaaatgttaaactaaaaaatcattgctttacaatagaagaactaaaaggcaaaataagcacaactaaaaaatcaaattcatcaatagagataaaagtaaagttttttacattagcagcatcaatttgattagattagcttcatcaagaagcaaatccagagcaagctgaattcaaattcaatacaaacactagaaaaatcgattaaattactttagcaactaccaattcagctaattctagggtttaacaatcttacccccattgaacaatgagtgactcgtaatcccaataatccttgggtcgaatcacattgacttcggtgtacacacgagctttcgacatcgcccgcgtctggttagaatcagagatctctacgagaaaatctggatcgatcgtagtacaaccggaaacttccgagacagctctcgctgtgggagtgacgatagatgagcgtaggataggagagtgcgccgttggcgcacgtaaggctaagacggcgcacagtaacaagagacgtcgaagaggagaatcgaagaagaggaagaacaagaagaaaagcgtatctatcattcactacgctcttccgcaccagattaactt

SEQ ID NO: 4885 - DNA, 563 bp, Arabidopsis thaliana landsberg
ttcttcgtcttcaacaatttggctagaccaaaatccgatacctgtgcctcgagattgccatcaagcaaaatgttgctagactttatatcacgatgtataatcctaggagaacaatcatgatgcaaatatgataaccctttcgcagctcctatgatgatattgacgcgtgaatcccagtccaattgctcgcctctctctactaattcaagaaccaaacttctcagtgaatcattcataatatggaagagagccataaagagcagattgatcataccatgaagtgcttcatcaaggctaccaccgggcaagtaatcatataacagtagctttgatgttggtgaattgcaatatccacgtagattcacgaggtatcggtgtttgatgctcccaagaatctcaagctcccgctcaaaaaaacgatcaaacccttcgtttaactttagaattctcttcaatgcaaagactttgccatcatgcatggccagcttatacaccgttccaaagcctgcacatccgattatgtgctcttaattcaacatttccagcttcttaatgatatcttt

SEQ ID NO: 4886 - DNA, 2232 bp, Arabidopsis thaliana landsberg
acgaccctgacgtgccaataagcgattatgagatatcctgaggttagtccttttcttgttgggcattgttattatttgtaaggggttgtgagcgggtgatgtaatccttactgcacatccaagctgctgttcttgctctccgcaatactagaggtcttccttggccagaaggtcacaagaaaaagaaagatgaagacatgcttgattggcttcaagaaatgtttggatttcaggtaatttttctagttcgtgatgcttgccaattgtcattaagcttttgttgagagtaatctataaattctttaatggtttggcggaaagacaatgcagctaatcttaggagcacttaatcttattacttgctaacatgcaatttttcttgtttatgctatggttctgcagaaagacaatgtggctaatcaaagggagcatctgatcttattacttgctaatgtgcatataagacaatttcctaagcctgatcagcagccaaaggtttataccttaattttaccattgttgaaagaccacttttatataggtttcgtgtgtccatgcatgtaggacatttctgcgcagtacattttttttccatggaatatatatgtaactgcatcctactatgagcataatatttaatgaatgtactttcagtttatcctttcgtttgttctcattgtgccctcacagttagatgatcaagcattgacagaagtgatgaagaagcttttcaagaactataagaaatggtgcaaataccttggtcgaaagagtagtctttggtaagggaattgtagcaacagagagtttctgtatgctgttcatgtacaggaattagatttcgtgtgtgtgtctaaatgtttatgcaaactctggtgtggagaatctgttttaaagtatgatcttcttgtaggttgccaactatacagcaggaaatgcagcagcgcaaactattgtatatggccctgtatcttctaatttggggtgaagcagcgaacttgagattcatgccagagtgtctctgctacatttatcatcatgtaagtttcagtttgtaaggtcttccgtagtttgtgcgtgattcttgtatttttatgcttgtccgccaatgataatcttatgctttactgtcattcttaatccttgaaagttatatcttttgttgtttatatttctgctaaggagctataacttgcacgcacagtaataaaattgtcatctgagtcttgttttgaggcaaaacatgtgtatatgtgctcaggttgacgtatttctgatgagaaaatgtcaattgatattattccccttagaaattagaatgttggttaaatgtcaattgtgctcagggtaccatgctttcttttgataaatacacagatttttttgctagtatgcgttcctagatgtgatattcttatacttcctactctatttcatgctttcgcagatggcatttgaactctatggtatgctggctgggaatgttagtcctatgactggggaaaatgtgaagccagcttatggaggcgaggaagatgcattcttgaggaaagttgtgactcctatttatgaagtgattcagatggtaggccttaaatttcgagcttttccttgtgctttcagcagttttttgcttgttaatattcttactcactaattgtgccattcacaggaggctcaaaaaagcaaaaaagggaagtctaagcactctcagtggaggaactacgatgatttgaatgaatacttttggtgatatatctatctacctgctttcacacagtcgtaaaggtcttcataagtggtttctacgattaatcaagtatggtttcttcattgcaggtcagttgattgttttcggttaggttggccaatgcgagctgatgctgatttcttttgtctgcctgttgctgtacccaatacagaaaaggacggggtacactataactacacatcttctctgttcttgtctacatattttttttgggtttcgggaatctgctacactgctctagtttctaggtggtgtggttttttttatactaggaactctaatcttttgctactgaattttttttatcatatatcacaggataacagcaagcctattgtcgccagagatagatgggttggccaagttaattttgttgagattcgttctttctggcatgtcttcacaagtttcgatcgaatgtggagcttctatattctgtgcctcccgggattactatcttc

SEQ ID NO: 4887 - DNA, 2827 bp, Arabidopsis thaliana landsberg
catctcctccagcatctttcgcggacacaatcaggactttcgtccctcccggaattgccattgctccctttgacaaaatgaaggctgttaaccgggagaactatcttcgttttgccaaaaagctagcagttgatcttcggaaatattcagtttaacacgcaagtcggagttttaaccaaaccttatgacttttgcagataatcttggagttcaactccaccttttgtagccacgaagactagctctccaacaaagagagtgaaattgacgttttcaaaaggacagaagaggaaaatgctggtttcttggataaggccaaaaaagttctgagccggatgaaagctgccgaagcgaggattcatagcctcgaggtgaccaatatcgacctatccgcaaaactcgagttaggcaaaaatgcctactttgctgctatcgagaatgagaggcgagctagagctaatctcaaagtctgcgaggagaagctgaagaaactcgaggaagagcagtccgcgatgttgaacgctgcgaggaaggaggaaaggagaaaagttcaggctcagttccatgacttttcttcgaaatacgggagcttgttcaaggagtccgaagaggttgaagcactgaaggtctcagttgcggagaccagagtgaagcaggaactactttaagagataaaaaagggggagttggaatcagttcgagccgatgaagttaagtacccagagaaggctgctgaaccaaagaccccccaacctgacctggttgaactcacttctctcctggacgacacccctccctagacagtcgcggagacaaccactcctgacgaggttttggtcaacaatgaacaggttctaacaagaattctgctttgcaacccgggatggcggtaatgttcccagtagatgttcagaaagactcccaaacagcggagtaagaattacctcgaggttgttctggtcctttggaacccccgctttgttttatgaaaagtttattttgtttttgcttttgttggccatagaggctttttaattgctagtctattttccgaattacgagatggactcggttttaacttttgagttggaaaaaatgaccaaagaatgcttttcctttacgagttagactcgatttataaattttgggaaaacagtaaggatcgcgacgactaagtattagcttagtttgtgtatttccgaggcggaggtgaaattctaatggaatctacctgagactgtttagagtaagaaatgaaagacttagtatacgacgaaactcggttttattgattttaagaatttagagactggacccaatgtacggcctacgtactcaaaggtggggatcaagtctaacgtagttcaatgacaaagatacatttaaatgtaaaaacatttcaagtggatggaattccatgccctgcaaactgctttgccttccatgttcacgaggcgatagactccattccaaactacgtgtgtgattctgtaaggactttcccagctgatccctaacttgcctgctcctttctttgtcgtgttctgttgaaacctacgtagaactagagttcccacctcaaatgatctgttttagacgttcaattgtaatagcgggctgcaacgttgtggtagttttgcatgcggactaaggcttgatcgcgacgctcatcaatagtatcaatgacatcaaccatcattttgtggttcgtagcttcactctgtggatttctgattcctctcgcacttgggactttgatttcggtcgggatgactatctccattccgtaaactaaggaaaggtgtttcaccggtagctcttctcagaatcgtacggattgcccataaaacattttgtaattctcccaactaagcgcccttgtactcgttcaacttctttttgagattagaaatgattattttgttcatcgctttaccctgaccttttctctgcggatagcgaggtgtagtctgatgatgtccatggaccacttcataaacggataaggtgcggacaccaaactaagaagttcagcgggctgcaagatgaatggtgcatgcctcagggattgctcacatttacgtgcgtatgcttcgcagtcttcaatcattgtttgccaaaaataaccatattttgtttactttgagtgatttccgcatagtacgggtatgctccacaaagatgcaaacaacatccggagccgaaattaatcgtttgtaaaaaatgccatatgctacacataaacgagcacaagtggccttcagctttcgagcctcccacttgtcggtagggagtaccccgttgaggatgtagtctcggatcagttctctccagtctgccccccagtcgtgaggtgtctgattatcagggacttcgggactatttggaccagacgattcttcggtaattggaggcgggacaacctttggaacgtcgttttcgtcatcgagctactgctggtcgggattgtttgcttgtgcttcgagctgcctacgtattgcccgagtaacaaaattcacttcctcaagtcaaatactgggttgagctattgtttcaacggggattatccttgttatagttacttcggacgtagaagccaaagcggctagggcatcagcagctgaattttctgcacgagggactttgattaactcgaacctttcaaatttgtcgggcaggtcgcggaccagatccatgtaagtttccatgcgattatcttttgcctcctaatctcaagaatactgactagcaaagagttgtgagtcaaagtgagcctgcaggttacgtacacctactccaattatgaggcgaagccagctagcaaaga

SEQ ID NO: 4888 - DNA, 1019 bp, Arabidopsis thaliana landsberg
gatacgctccttctggcatatatttagaagtttcgatagaatgtggagtttctatatcctgtctttgcaggtatggttaaattcaatttccaaacttgtatttttcttggcctgtcatgtaatttgatgtatttatatctttttaaggcaatgatcataattgcttggaatggatctgggaaattaagcggcatcttccaaggtgatgtcttcctaaaggttttgagcatcttcattacggcagctatattaaagcttgcacaaggtgattattcgtcaacttatataccactttcatgcggatcattaataatttttctgaaaacttatgtgcaattatttatatattcatctcattcatagatatgtgccttatacatttatttcttgctttgctctttaatatttctgtaagaaactatttattataagtgaagggaaatcatttcttaccgttctctgaatgtttgcaactttcagctgtccttgatatagctctaagctggaaatcaagacatagtatgtcattccatgtgaagctcagatttatcttcaaggcagttgcagctgcaatctgggtggttctcatgccactaacttacgcatacagctggaagaccccttctggttttgcagagaccataaagaactggtttgggggacaccaaaattcctcaccttcctttttcattattgtcattcttatctacttatccccaaatatgctctctacattgctcttcgcgttcccattcatccgacgttatcttgaaaggtctgactataaaatagtgatgcttatgatgtggtggtctcaggtattttattcatatatcttatcttgataaatcgccagtccatgaatgctaattaagaaggtgactaatctctatttttggtgttacagccgagactctatatagggaggggtatgcatgagagtgcatcgtcacttttcaagtaagagtgtaaaacttgcatgctatggctgttgaaattttgactgttcttaccacact

SEQ ID NO: 4889 - DNA, 4891 bp, Arabidopsis thaliana landsberg
gaaacacgttacattaaaatgtcagaatccagaaacagatcacgtacacgtggacataattagtacacgtcaggatatggacctattctactaatgacgaaagcaccctcgtctccgtacatagccgttgcagttattatctttcgcttcgttgaaaaaggaaaaacaaaattgggacgtaatggtaaattaagtccgtaattttattttgccgttgtttagattactagaaaagactcaaaaatcaaaatcattgtattcggtgaaaaaggaaagagtcaaagttgaattttctcagctctcactctctttttctctctctttacttctactgtatcaagaagctccgttttgcttagccatagtgcgtctagggtttggttggtgggaagaaggttccgatcatggcgtcggtgtcgtcgtcggatcaaggacctaagacagaagcaggatgtagcggcggaggaggaggagagagctcggagacagtggcggcgagtgatcagatgttgttgtatagaggttttaagaaggcgaagaaggagagaggttgtacagctaaggagcgtattagtaaaatgcctccgtgcactgctgggaaaaggagttccatataccggggagtcaccaggtactgtgacttttcaaatcgggattgtcggtttatgatgcggaggagattggagtataggtttggttgtgaattgggagttgtgttatctgtattagagtatggaatgtttggattggtggatatgcactttggttagggatcttgtgtggagctaaattatctggaatctgtaaactgttctaaaacacactaattttcacctaatgtcagattttatagtgtctaggctcaaactagaagaaatgagtaggtgtgcttagcatctgtatgaggtttttgttccatagcagttggagatgttgatgcgttttgtttgtcgtatttgtgttgagtacagacatagatggacaggtcgttatgaagctcacctttgggataagagtacctggaaccaaaaccagaacaagaagggaaaacaaggttcctcttcttcttttttttttctctctgcatctgataaaattgctgttgtcatttgcaataagttttctcttgtttggagtatcaaagctgatcttttctgtttcctatatattttcatgggtgacggaatttcgccacaccagtttatctaggtaagctaaaagctttatatgtgttgattatattcttgtatatcaaattggataatttttcactgaagaacccaactcttacttgacaggagcatatgatgatgaagaggctgctgctagagcttacgaccttgctgccttaaaatattggggtcctgggacacttataaattttccggtgagattgctaccgtagtatgctttctaagttactcttcaaccgtgtggtttccttaataattttcatggtcaatatatatgcataagtggagtaaggatggttagaagtgttttggagccacccttctcaagtttcactgtttttagctacatgcatttacgtatttcattctcgtaggtgactgattataccagggatttagaagaaatgcaaaatctctcaagggaagaataccttgcatctttacgtaggtgcgtatgtatttaaaagcactatagttttcttttaagaaccatttattgctgatactctttagatatccctttggcagaaaaagcagcggtttctctaggggaatagcgaaatatcgtggacttcaaaggtaaaactggaccagcaattgagttctcatttctctgttttgtctgaaaaactatggaatcaagagtgatcatctttgtgtaattgcctataaggaagattctttagtgacacattgtggatcatcacggttttgattaattgacatatggtggatatgctactagttaatttcatagaaaagtctatatgctactcttaagaatagggatatggcaaaactatcttcactgttttggctgtagccctctttagttttgtctttttaaccttctttctcacaattaacattcatacctgatatgcatttctgctgtctttccatctattctgcacttcccgaccagccgatgggacgcatcagccagtcgtatgcctggacctgaatacttcagtaacattcattacggtgagttgctaacaatattgacctaattgaaacaaatgtttgcttgcatcagactattcaaaactcattgtcattattaacaggggcaggtgatgatcgtggaacagaaggtgactttctaggtagcttttgtctggaaagaaagattgatctaacaggatacataaagtggtggggagccaacaagaaccgtcaaccagaatcttcatcaaaagcatcagaggatgcaaacgtcgaagatgctggtactgagcttaaaacactggaacacacatcccatgcaacagaaccatacaaggcgccaaaccttggcgtcctttgtggaactcagagaaaagaaaaagaaatatcatcaccatcaagctcttctgctttaagcatcttgtctcagtcgcctgccttcaagagcctagaggagaaagtgttgaagatccaagaaagctgcaataatgaaaacgatgagaatgcaaaccgtaacatcatcaatatggagaagaataacggcaaggcaatagagaaaccagttgtgagtcatggagttgctttaggcggtgctgctgctttgtctcttcagaaaagcatgtacccacttacctctctcttaacggctccattgctcaccaactacaatacattggatcctcttgcagaccctattctctggacaccatttcttccttcaggatcctctcttacttcagaggttcgtagtcatatatctatagaaccagagacttcagaggttactacaacacatcttccttatgtcattttctttggctctctttcttctgcaggtgacaaagacagagaccagctgttccacgtacagctacctcccacaagagaaatgagccgttccctttagactttatgtatgtcagattctccttttttgagatgaattcgtcgacttgacatctctttgtctcttttatggagaaaaagttgggaaaagtgtgacaatggtctgaagcaggaatgtacaggttttgttagtggttgtgtttttttttttccagtgtggaatatagaatcatgatattttgtgtaaaacagaaaaaagttatcattatagtatagaagtttgctcttaatatttctgcacaaggtataatataatttgattgtgaccgatctaattattcatctctaccaaatgttacgactatgtattatcacatcatctgcacaagacttatctagctttgatacaactaactgaatcctattacccagacagggactgagtatataatagttccaatcgcaaaagaaaccacaatggtaaaagatgcgtacgcataggctctccatgggtaatcactttctctcatcgcattgaactcagccatgaaggtcgaaactgtgctcagacatcccaacagaccaaactgtatgctcgaagcaaccgtgttacatgttctcgtgttcacctgtttcccaaaatatatacaatgaatgttatcttttgtgatttgatctgtttggtagagagaggaggtgaggaagtttataccgatttcttcaaggtagccaatgctgccataacgcaagctgcaactacatttgcaatgagggtgccaaatgggacccatctcaaattttgactatcctttcccagcccacgtccattgagtcgggctaagaaccatctgagccagacaccaggggctgcaactaagcaaccaaaccatagctgagcctcgcttgttcctttgtcaaactctttcacaagcagtatggaactggcagtgagtaaagccacaagcaacagaagcatcagggtcagagacacaatatggctctggaaggtgttaaccttaagacaatggaatttatcctcagaagaagctcttctatgaagaagccatttaaaccctttggccgtttccactcccagaattatggagtatgacgtgagaaacaatcctgtaaagtcgtttatgctgtaagcaagtatgtttcatccaatttagtaggtgattggagattgagaagggaattttttgtttttacctaataaaaagccaagcacagcatacacccattgaccatcagcactaagatccagcattttctggttccaaccgctgaatgttgtcagactccccaaataaccagtcgataatcctatcgccacaaattcagaaactcttgctatatctgctttgaatacaacgccaaaccaacccatcaagaatgatcctacctataaggaagcatttggagaatttttattaagaaagataggtttgtaattaagtttgagatgagtgcattgcgactttcaccatgttggagggaagatcaaggtacaagatgctcccatcacttgttactcgagcaccagttggcccaaacaatttttgcagcaaatatctcgtaatggcctgtatatttggagtcaacgagttgattataatgatttaaacaaaaacaaagcacaacagagagacagacagaaaatggaaaataagcattttaccccaaaaatcccaaaaacagccaaatgaattaggcatgatatgtactccaaggactttggtaacactcgctcttcctcctttccctgtgcaacccacgagctacaatagatcaaaacattggacaaagaaaccaatactaacaatgatgtgactatgcaaagttagaggtagtctctacggagttgtttatttcaggtgacaagagtgacttggtcggtaaag

SEQ ID NO: 4890 - DNA, 2655 bp, Arabidopsis thaliana landsberg
  unsure (1)..(2655): unsure at all n locations
aatcaccgtgagttcgatctatactcgcatttttcgctggaagaagtcacggtgaaattcggaaaatcttacctcatcattggaaagaaatggacgatgaagtccaagtctatgatcgtcttccgccaggaaaagattatacaaaaactatgggaatgagtaagttttgtctgtgtccgagtggttgggaggtcgctagcccgagggaggttgaggcgatatatgctggttgtgtaccagtgatcatatcggataattattcattaccattcagtgatgtgctgaattgggattccttctccatacaaatccctgtttctaggataaaagagatcaaaaccattctacaaagtgtctctctcgtaagatacttgaagatgtataagagagttttagaagtgaagcatcatttcgtgttgaatcgtccagctaaaccctacgatgtgatgcatatgatgcttcattcgatctggttaagacgacttaatcttaggcttggtacatagtatacaattttttgttatgttgcgaagaaatattaagtgtctaagttcatatgagttactactagctttgtattctttccataaatttgcaaagttctctcttgtaaaaatatatacaacaacaaacacaatatcaaagattttcttattaataagagaaacaaagcatttgttattcttgttaattaatactaggtgatcacccgcgctacgccgcagttttttcgatttttttgtattgtttaatttaaatataatttttatttatctaatcattcactcatgtaataagcaattacttttagtattgaaaaaaaaaaattctaacaacattctcaacaatgcatcacacacataattcataaacaacgtttgtcttaaaccaatttaacagaaggtagtgttagattctaagaacctaagaatttgatgataaagctctttacgtattctttaccctcagtgatttattatatacatataatttaagagaatataaaaatcaatttaagagaataacttactcaaatcattaagtaattcacgactattatacactcgttagtttggattacaaaaaagaaaaaaaactttgagtgtgagaaaactattaaaatggttttattgaaatatcatgtaatattaaaacaaatttagtaatagtacaattaaatatgtaaaataaaataataaatttttcattaacctataaattagaagttgaagagcttacattaattatttaatagacacatgtcaaatgctaaagtgatgatgtgtcaatcatatggagagagttgaccaacttttcatatatatgattggtaagaaaagttgtgtgtggttgtagttgtactacaagcttagtagaaacaaaagtattattgtgtaaagcatattgtatttttatgtattaaaatacagaagaaacgtgatacaaaatttggcgttttccactaaatcaaaaagtgagcaccattgtaatcgatgaacagtagaatttttgttttttctttacagttgaataatataatactaaatactaatgaactcaaatttttacatgtgaattttatgtttgttacatgttataaactcagataaaaggtttcgctatggaaacactaaaacgaagctcaaaagtatggctacaagagcttcgttcaaacctaaacattttctggggaacaatcgaatccgaaatctccaaaaacggtgccgcttcatatatcttccctctccaacgttgcatcttcagtttcctctgcgcctctctcgccggcgttgacgcttccgtatcgccggacatcgctgagaacggttggaaaacaatcaatacttggcttgcgttgcaagttattcccactgctaaacttggcgtagttcctcagcctcttgaagagattttacttcatacttggccttatccttctctcttaatcgccggaaattacaaaaagctttacaatttcatcgacgagaacgccggagattgtctccggttaggtcaagaagaattcgggttgacccgagatgaggctattcaaaatcttctctttgttttaggttttaatgcctacgggggcttttccgtcttcttaccttctttgatcgggagaataaccggcgacaattccggtttacaggagaggattagaaccgaagtcaggagagtttgcggatccgggtcggatcttaatttcaagacggttaacgaaatggagctggttaaatccgtggnnnnnnnnnnnnnnnnnnnnnnnnnnnnnnttccgctgcaattcgcacgtgcgaggaaagattttcagataagttcacacgatgctgtttttgaggtcaagaaaggtgagcttctttgtggttatcagccgcttgtgatgagagacgctaatgtttttgacgaaccggaggaatttaaaccggaccggtatgtaggtgagaccgggtctgaattgctgaattatctctactggtctaacggtccacaaaccggtaccccgagcgcgtcgaacaaacagtgtgcagctaaggacattgtcactctcacggcttccttgctcgttgccgatttatttctccggtatgatacgattactggtgactccgtttcaataaagctggtggtaaggctaaataagtaaagattgat

SEQ ID NO: 4891 - DNA, 3064 bp, Arabidopsis thaliana landsberg
aaaattaaataataggttggtttaactataatttcgtaaaaaaaaaaccttgaactgtcattctatgtataatgattttataatgttagtttgtactttggttgatgatgatttattaaggataaactcctaaaagagtaatctcctatcaatcaatgaaagattaatattgatagtgaagataagccatgtgtgaacatgtagtgtgagctttgattttagattgtaggagttcatgattcgtttagttgtaaaaggaaaattaatttgtaaccacaaaaaacaagagtctatttggagattaataggctgtcctcaattatattatcatcaaagtacacaagacatacactttcatataagccatagactcaccaaacttctttttttaatgttcatttttatttcttaatttttataatatgacacttttgaaaatgaaatacacataaataatccaagttttttttttttttttaatgcttttagatagttgtgattttgttcagctcgtatttggattaagatataacttgggtttttaatttgattatttcgattgggtagaatcagtttatcaaatcgaactacactgaaccaaatctaacaatactaaaccgaaatcataatattaccactttgatttgtaatttaaatgctagagaatcccacagtattagaagaaagtcgttcgtatctaatgaaacattcttaccaatctctgagctgcaataataaataagatgaaatacaaactgtaagatatcaattgtagttttgagcgtaaatttccaatgggagggaacagtcttcttggtcttgtttttttttcttttgtttcttcatcggccaaaaaatatataatgtcacaatgataagggaaatcccccacaacacaatcttctgtcacttggctttatcagagctttgtatctctcttttcatctgtgtttcatcatcatcgtctcgtggaagctgcgaggaggagatccggtggaagacggtggtggagctctgttgaatctctcagggctacggctcctttctcgctctcttccccatccattgctgcttctactttacatcaaaaatttatacaatctcaaactcacaatcatattttcagtggcatacagagataaatttacgaagatgaggtcctatgttaattttacctgtcacgggaagcaaagctacctctgccaccataaccagagtcgccaccacgaccacggccgtcggaaggaggtccccaacgactgaatttgttcattcccccaccaccacgtgtagccatttcgcggatctgaggaggaactcgctggtttgctccttccaaaatcttgatcagatcctgaagcatgtttcgaatcttgatcaccaaagaatgtgaatgcctgaccagtcgctccagctcttcctgttcttccgattctatgaacatagtcttccactccattggggaaatcatagtttacgaccgccctgtgatctcaaatcgtattagctaatataatcatcaagtcacataatttaatcatttgttttacaggactgggaggatttggattatataaatacctgatgtccttaacgtccagaccacgagcagcaacatcggttgctacaagaaccggagttctgccactgcggaattgattaagaacattgtctctctcaggctgggacttgtctccatgtatagcagcagctccaaattggcgggttagattgcgtgttagttgatcacacatccttttggttgagcagaatattatcacctttgagcctggttcctgagaccgcaagatctgctctaacctcctctgtttctccattggtgctaccacttcaatatgctgtttccaaaaaagcacaacaatcagattctcctgaaacagtcagcagaaccaatagaatcagttcaagcaatacctgtgtgattgacttgttagccacaagctcgtcaacattgccaatgttgacttgagcagggttaacaagcaagtcagctgcaattttcctaactccctttggccatgtagctgtgtacataagggtttgacgcttagtgggaatttctttcacaatcttccttatctgaggttcaaaacccatgtccaacattctatctgcctcatctagcacaagataagatatctgacgcagactaatcctcctcatttcaaggatatcattcaatctcccaggagttgcaaccacgatatctgctcctctttctaaatccctcaactgagggccctttggtgcaccaccatacaaacactgaaacagagataataagaccacacatttggcatacgttagacatatacttcacaagtagcatgttgaaactttacaagttcagagacttctacataccgtacacgaaattcttgatgacctcccaaatttaacagcttcttcttggatttgtgtggccagctctctcgttggagacaataccaagattgttgggcccattcgcgaatcatttcggatacgttgaagatgcaaaaatccaggaatcaagtaacccaaagtttttcccgagccagttttagcaatggctactatgtccctaccttgcatagcaatgggccatgactgagcttgaattggagttggagcagagaaacctgcactgagtacctaagaaaacagaaaaccacactgtcctatgagaaggggaacaccaaggttcttttgggcttatggaatggtggctcatgtcagaagaagcaccatcccccatttgcaggtggcaaaaggttactgatgaaacctgcagcaggaggacgcctcttcttctgtctggacccggtggtgaaatgaatcatcacaccattaacaggccctgccacaagcttggatgatttgggaagccctttccaaaaaatttggtccaccatatagggcactccaaataatttgcaaggacctcaaagaagtggcacagtgtacgacattggctcctcccaggagcaaacatcgcacctgggaaaaaaagagaaaagggtgcgtatggcataaaactttgcccctaaatgttatacctaag

SEQ ID NO: 4892 - DNA, 3506 bp, Arabidopsis thaliana landsberg
aaaaattaaccacatattcttattaacttttaaaatttttatgtgaatctaaaaagtctaattttactatattttaaaaatatgtagcactttttttatttaatccagccgacggtgtatgtgatattgttaaaactggtgtacaaatgttagtgtacgacaataatgtaaaaattaatatataatactgatgtaagaagtgatagactgaatataacaatgtacaaaatagtgtaaagagatgatggaaaatatggtgtacatgatcgtacacctttaaagatctatgagacagtgtactaacattggtgtacgagataatgtacaccactaattgaaataatgatttatacatttcctagaagtgtacaccaagttttgtacactttgtttactaatcttgtatgctatcatttaaaagttgtatacaccattctatccatcaatcgtcataatagtttcaatcattttgtacaccataaaaaataccttaattatgtacaccatcatgtacaccattatattgagtaatcatataaggtttatacaatcattatgtttataagagaagtcggtgtacttaatggtttatgaaatattagtatacacacttgtacaccaacgaataatggttagtgtacaaaactatgtttgaaatgtttgtgcattagattgatgacatataattattctaaaagttaatataatgttttttgaaaagaatatattatttaaaaaaaaaatatttaagaaaactaaaataaaaaacaaaaaagtaaaaacaaacaaaataaagtacaaatggtctctcatattatttttattagctctcaagataaaggatattttagtatttgatatgtattttgttttttagtctattaaacatatcctctatctcacaaaaaacaaaaaaaatgtctatctctctaatttctaaaaaaactacccactttacaaattatttatgaaaaagtgtctactttgaaaccctttataaaattggtcgaacacttgaaatgcatacggatcagatcttgtatttaattatgcatgggcttagattaaatagttttcttaccttttgttttgccaatgaaaagttgaattatagtaaggtccgttaggcccattaaaagcccacaaaagtcttcaatcagctatattcccattccactgctcccaagtcaccaccacttcccgtcctctctccagtcactgtttccgaagccctaaagttttcaaggtcgccgattaaatcaccaaaggaggcgtttttatactattcccggttcaacacatggcggaggaagaggttatcgctatccccgtgcagctatctgaccacaagcgcaagcttgagaatctcgaatcggagatcctcgagcagcaacacgccggctcgattgataatgacgtttctgtagatgatgacaaaaacgcatctgattattgtcagctgaagcgaccgaagattgacgatgaagctgttgatggtttaggtatgtctgattcctttcaaagtatggattttggtggatgcatatcgaaaagatttcacctttgttcttaatattcgttgttacggcattgtgttgtagggattgggggaactgtagaaaacagtggtgatgttgaatccaaggaggagggaactgagaaacccattgctcagagtgatgagaatcaagatggtaatcctttaattgagaaagttcaggagaccattgatgctgaggaatcggacaataagatggaagataacggtaagcctgaggataaccactagttactctgaggttgtacctctcaggacgtttctgttgaagaaagtaaggaggtgacattagcggtcacagaatgaaggtgaggatgatagtaaggaaacgaatgatgttgttctcagaaagaagttgaaaacggtagcaaagaggtcactgattgtgactctcagaaggaagatgaagcaaatgctggtggcgagagtaaggaagtgaatggcagtgtttctcatgatgagattggtgacgagagtaaagaagtgaatggtggtagtactcataaggaggttgatgatactcagtccacgactcgttgaatagatgtcccgagttcaaaggtgacttgatttggtttcgcttttgactctttagtgagtaagttttgctgagttttggcttcaatatatgtgatcttggcacacttgacaggttggcacgctaattggtaaaggtggggagatggtacggtatcttcaggtcaattctggtgctaaaatccaaatccggagggatgcagaggctgatccaagttcagctttaagaccggtggaaataattggaactgtttcttgtatcgagaaagcagagaagcttatcaatgctgtcattgcagaggtttaaaagttttctttgacattatccttttttaaatcacaatcttttagttgtctatgctaagagttggctacatttttcttcttctgctgcaatcccaggttgaagcaggaggtgtacctgcccttgctgcaaggggggtcccagaacagatggagattaaagttccaagtgataaggtagaccctggtaactgttctgattggccatttttaagtgataactaatccatcttcaactcacaggttggtgtgattattggccgaggtggggagactatcaagaacatgcagacaaagtcgagagcacgcatccaggtgattacttctatttaatcttgaatgtatggagagtacagagaaagattgtgacaatattgcttgttacgggtaacagctgactaaaatagttttcatatagttgataccacaaaatgaaggtgatgcatctaaggaaagaactgttcgtatttctggtgataaaaggcagattgatatagccacagctttgataaaggatgttatgtaccaggtttgtcttctaatgttctttctctgaacgatgtcattgcttttagtttttgcaaccatgtaaattgctttgttttcattaatcttggtgcacgatatgtctggtataccgaaatgtttgataatcatatcctgataactgctttattttggctttattttcaccaatgcatctacataatttttaaggtgataaatctgtgttttcgtgttcccgctatctgtttgctaatgttctcgtgcatgcaatctctgtaaaaactagcttgttacctatgatcaactataggtccattaccttaatcatgttgttcattttatgctgattcacatttgatttatgtttttggggcatagtcatttgattgtggataattttactgttttcctgctttaagcatatgcaaaagttctgctgtcttagtttgaaagttcagtgcaaatctatgcgggctcccctgatttagtgaataggtgcatattcatgtcctaatggagtacttggttcatactgctgaaattagaaggatagcttgagaaaatatgtacatattgtaagaaaactgataattttctcctg

SEQ ID NO: 4893 - DNA, 2637 bp, Arabidopsis thaliana landsberg
gtggatgtttaattttcccattgggtccaaacagaagtataggtgtcctcctgctgcaggtttcaacagctatcttgtgttgcctgcaaacgggaggatggtgcttcttctggctccataagcacagtagatttttggtgtttctctgctgaaaaggatatcctggtttgttgttttgccaggtatacagtgcaggattctcagctccatctccaattcaagctcagtcatggccaattgcgatgcaaaacagagacatagtagccattgctaaaacaggctcgggaaaaactttgggttacttgattcctggtttcatgcatctccaacggatccacaatgattcacgaatgggcccaacgatcttggtcttgtcccctactagggagttggccacacaaatccaagttgaagctctgaaatttggcaagtcatctaaaatttcgtgtgcggtaagtgaaaatacttgaatacataagtactgaacatgctacttgagaagtgacttattgagtgtttctgtcaatgtatatttgcagcgtatgaatggtggagcacccaagggtcctcagctgaaggaaatagaaagaggtgtagatattgctgttgcaacttccgggcgactgaatgatatccttgaaatgaagagaatcagtctgcatcaagtatcttaccttgtgctggacgaggcagatagaatgctggacatggggttcgaacctcagatcagaaaaattgtgaatgaggttcccactaagcgtcaaaccctcatgtacactgcaacatggccaaaggaggtgaggaaaatcgcagctgatcttcttgttaaccctgcccaggtcaatattggtaatgttgatgagcttgtggcgaacaagtccattactcaggtctgggtttgatttcgttttgttactcattttagtttgattatcttgacataataacaggaatggatctgatagcttctttaattatttatatgatacagactattgaagtcttagcaccgatggagaaacatagtaggttagagcagatattgcgctctcaggaaccgggttccaagattataattttctgttcaaccaaaaggatgtgtgatcaactggcaaggaacctgaccagtacgtttggagctgctgctatacatggagacaagtcgcaggctgagagagacgacgtactgaatcaatttagaagtggtaggactcctgttcttgttgcaactgatgtagctgctcgtggacttgacgttaaggacataaggtatgaatatgattccagtttcaaattcaaccatcagaattatagaagcatatgatccgaatgtagaaatttgattcacagggtggtggtcaactatgattttccaaatggagtagaggattatgtccatagaattggaagaactggaagagctggagcaaccggtctagcttacaccttctttggagaccaagatgcaaaacatgcttcagatctgatcaagatcttggaaggagcaaaccagaaagttcctccacaggtccgcgaaatggctacacgtggtggtggtggaatgaacaaatttcgtcgctggggtacaccttccagtggtggtggtggcggccgtggtggctatggtgattctggttatggtggtcgtggtgagtctggctatggtagtcgtggtgattctggttatggtggtcgtggtgattctggtggtagaggaagctgggctccttcacgtgacaggtaaattaaagataaacgactcagctagatctcttgattctttttctcattattaactttaaatcggtttttggtggttgaagcagtggcagctcaggatggggaagagagagaagccgtagtcctgagagattcagaggaggtccaccgtccacttcatctccgcctcgcagctttcatgaggcgatgatgatgaaaaatagataagtcattggaatctaaaccagattggggcaatatacatatagaagagcctctttctcttggggtaaattattcattttgtggtgtgtggaccgaagctgctagtactttttaaaatcacacacacctgaaggatactctaatgttttggtctacgagaaacctttttctgtttatattatggaaagcaaagactcgtttatgggttctttctgtgttggtgtttaagtagtggatgtttctcagctgataaattttttagacctctaaataagaatgactttttgatattttgaagtaaacaagtttgtttcgttattaagaactgcaatatcagtatatcaaaaaaaaagtactgcagtttcagcttacaagtcactgactactcttaattgactccttaaccaaagtgtctatacaaattccccaaacatatttctccattaacccttcgcatgaaggaaggatcaaagattatatgatgacacatttgtctggttgaatacattactgaacatcagtgttaaggcagggaagagaaaagtgcaaatgcagttgcagatatattgtcgcaaaaagcaaaagagagttaggttgacttatattattcaaaaatgtaccttcatggccatattacataacagatatagaaaaataaagttcaactagatttcatggagtcatatctacttc

SEQ ID NO: 4894 - DNA, 466 bp, Arabidopsis thaliana landsberg
  unsure (1)..(466): unsure at all n locations
catctcttcctagagctgcactatcaggatttagcgactttttcatgctttcatcacgagtgaccatgaccgttttgtacaaggaatcttctaaagctttcccatcacacctgcaacagagagaaagtcgaggctccaattatggctgaccataaaactgtttatttgagaaaaaacagagtagtgaagcatttacatgaaaagatctgctgccacttttagatggaaccgtgatttttcgtccttagcgttctgaagcttctgattcttcaccctttgcaaactcgatgttccctagatgaaggattgcagccactactcggaagattccatcctacagtagtagaattgtaagaagagttgttccaatgactcaacatgtccaataactagaaagtacctgctctnnnnnnnnnnnnnnnnnnnnnnnnntagctttccttggagctaggtattccttggaatc

SEQ ID NO: 4895 - DNA, 944 bp, Arabidopsis thaliana landsberg
tgtgtagtgcaatgtcaaaaaagaaagtccctcattatttcaacttcggaccgaccaagatgggttcaattttcatttttatgtgcttacgatcatgaatcatcaagaatttgatggcagacataaagtgcagttggtactcactcataaaatggagctgggctgaaaaatcataggaatcttcatgcacaatagtaaggccaaaaccttttttttttatatataataaacaagttgtttgacaaaaaaaaaactaggttttagacccatgtgtgagttctttctatatatttttgaaaagtttcatatgtgatatagatatactgaaatttatttttaatttatacgtgatggtgataatatacatcgaataaaagaaaaattattgtgacctaaacaccataaaagtttaaactaccactgagtcgaagatttcaataaatatacacaatttcaataattataacaatgtaaatctaaaaaattaatttattacaaagggtgaataattttttcatgacatatacatattttttttaatatttcgttattttctttctactttcaatgtgcaagttttttaaaaatagttctttttgtaataggtaaggtatgattccagtttcaaattcaactatcaaaaagttagaaacaaatgatcctaatggagaatacacgtttgttctacgagaaacctttttctgtttatattattaaaaatgtacaaagactcgtttatgggttctttctttgttagtgtttaagtagagggtgttttcagctaagatatatgtttcagacctctaaataagaatgagtttttgatattttgaagtataacaagcttgtttggttattaaggaactggtccattagtattacgtacgaatgatccatcccgtgcctgaaactctatcaccttcatgatgtgaagcatcatagct

SEQ ID NO: 4896 - DNA, 1198 bp, Arabidopsis thaliana landsberg
ctttttttagtagctctgtgaccctatggcttgtcaagttcttgaggtttagttgcttctatatcatgtgattcaattcacaattgatgcaagcctagtttttgttttggagttgttcttctttgagtttgttgttccatgcttagtagagagatcattgattgttttaggtaacagtctttagagtaaagagtcttgttttcacaatgttcaatgcttattctattcatagagcaataatcgtcattgcaaactctgtttgattgattgtgtagggtgcatggcagctttggatgcagagcattacttacaagagattggatctcagcaaggtaagagtgattgaggaaattgttggaaggctcaggtcattgagttattgttgattgatccctgattcagttagacattgatggaccagaatgagacttgatctttatcttagaacaagttaagatacattgatttgtttattccttaatattgcagttggaattgagtccgggtattgttcaaagttgtagctctaatggtaaaactagctacgacaaaagtcctcttaaaatatgagttttagatgatgccttaacattcatatattcagtgaacatgatttatccaataatgtattatgtattcttataaattagtataatataaaaatgggtttccagaaatctttaagacatttctgatcttgaagccgagtcatttccagagcttctagaggcttttgaaatgatcacagatttttcagaggaaacggctttggtgaagctttaacactttgatgtcaagaaagagagaaatgacggcttggaagggtcttcaaccgatgacgtcgttcactcctacatggttgaaatattcaaaagagttcataaaatccttcccaaaagtagtcccgattattcttctaaccattcttaaaattcgaaacgatgaatgtgattcttaaatgtggatttttctcaaaattatgtagtcaacaagattgaactatgccttaaataaaaaaagctgtttgattaaaaggttgaattaaatctctactttataataaataaataaaggttcctgcattttatctttgttgttttttctttttgtttgacttgatttagaaatattaaacttttctaatcaacgatataggtttaaagagtttttaaagttagttataaagtgtattttcccg

SEQ ID NO: 4897 - DNA, 880 bp, Arabidopsis thaliana landsberg
  unsure (1)..(880): unsure at all n locations
aaccctccgaatctaactgaacaccaccatccaaaaacttgttagctgtctcatgaccaatagcaaagaacagtgcagagacttttaaatcagaaacatctccggtaaccacattcttcactttcaatcctccaagcacatctctttctccatctccataagcttccacaacagacgagttccaaatcacatcaatcttaggattagacaaagctcgctgctgcataatcttagacgctctaaaagcatctctcctatggattatatacactttagatccatattttgtaagaaagtttgcttcttccattgctgaatcgcctccaccgatcaccgcaagaggtttgttacggaatatcggagcagctccgtcgcaaacagcacaagcggagattccacggttccagaaacctccagaaccttcaccagatccaacgaagctaagccgcttagccacagctccagtagcgagaatcacagcgtcagcgagaatggcttttgaatctgtgaatagcttaaacggtttcgaagagaaatcgactttcgtcaccgtctctgtaaatatcgtagtaccgaatcgctccgattgtttacggaatttgtcagtgagctctactccgagaataccttctggaaatccggggaaattctcgacgtcggtggtggttgttagttgaccaccgggagcgatgtcgttagccatccatccttcgaagagaagaggtttaagttcagccctannnnnnnnnnnnnnnnnnnnntgtgccgctgggccacttcctacgatacagagccttgtgttgtgagtttcgagaccattcatgacggcggatgaagaaaacgcggcggaggcgagagacggcggttgagagagagtgga

SEQ ID NO: 4898 - DNA, 1821 bp, Arabidopsis thaliana landsberg
aagatattgtcaatagtacttactcacagggtagattcatacaaccatttcaactcttattatgcccacatgtttatgaatggaatagagttgaaatgaaggaaatagaggaatcatttcacaatcttgtaacgtcattatcatgtggccataatattctttagacagtaattttcaacatatgctgaagtatatatacatagtcccattcccatatctcgcccaaatagtctctacagatgaaatgcaaaacacacaaaaaggttcaaatatatttaaaacataactatcgccattaaataacatatactttatataacttcaaaacattctattcatctcccgccagaaagttgagaatcagcgatggaagatccaccggtaaaccctttgaatcggaggaggaatacgacattcctaattcactaaatccgtcatgaaccccaaacatcatcccacttccggacaagtccaacggagacaattctggtaactttgcatctcctcttagataatgtagcacttgtctcatacttggtctagcccttgggtcatagtgagagcacaagagacctagcttcaaaaccatttccacctctttttcatcacattccgaacccatattcggatctttagcagccaagatgtctcccttgttccacaacccgaaaacccaatccacgagcaagaacgtctcatcggtctcttgctggaactcgataggacgtctaccgcatgcgacttcgagtaagaacgccccaaacgcaaaaacatcggtagccatcgtggcacgtcctgtcctagtatgttcaggagctaagtatcccaatgttccaacaacatgcgtggtctgaggatccgatccgtgatcatacaaccgagccaaaccgaaatccccaagtctcccattgagctctctgtccaacaagacattgctagctttgacatcccggtgaatcaccacttgttcccattcctcatggagatagaacaagccagaggcaacacctagaataaccttaatcctctgtttccaattaagtgttacctccggagtgttgtacaagtacttgtctaagcttccattaggcatgtaatcatacaccaaaagaagctcacctctcctacgacaataacccaagagaggaactaaattcctatgactcatccgaccaatactcacaatctccgccacaaactctttcatcccttgacgagactcatgcgaaactcttttaacagcgatctccaacttcgtaccaggcatcacacctttgtaaacactcccgaacccaccagttccaagaagtcccttctccttaaaccctttggtcgcgtagtacaaatccttgaacctgaaccgattcttcccgaactctttttcccattcctcgagctcctccgcaaacttcctcctcctcctcacgatgtaacaaacgaggaaaataaacgagaaaaaaaaaaactgagaaatcaaaggcattccgatcttgtagaactcagagattctcttgggctcgaagcgaggaagcttcgggagtctcgataaagctaaaggtggagccttttcgttcaaaccgaaactccacccgagaatataatgttccgacagaacagagcctgtcgcagaggagaaacccacatacatatcttggagtagaaccgaagaaagatctctaacagccgtaacaagcggccttgtaggtttatcttcgatgaacggagccatcgtcacatcgattttatttgtacgtccgtcgtaatcgacccagacctgcatcggcttacgactgatcaaagtcagattcttgaattgacctt

SEQ ID NO: 4899 - DNA, 1137 bp, Arabidopsis thaliana landsberg
attcgttcaagactcttttccggccaatctcttttttcgtattgggcatgatacctttgtaaacactcccgaacccgcctgatccaagaatgttcttatccttgaacccttttgttgcatagtacaagtccttgaaccttagtcggttcttcccgaactctgtttcccaatcttccacctcctccgcgaacttttttcaccattccccatcctcctcctttcactccccaccaactcattcttcttctgattttgatttgaggaaaaatttgttctctctataagatctaccgatctcttttgctctttggctttgtcttgttatggaagctctgtgctactctgccttaatgtcttatgttcttatatatgcactgacaaagctttcttgggtccaccacttttctccctcactatcctttctgttttgttttttatgttaagagagatatggtgagggagatcaaaagaaaatgatattatattttctatgaaaatattattcttatttgatatatatagatagatattgtgtatgtttttaagcatatcgtatcaaaagagccccacttcaaggatgaaatacctataacatattaagggcatactgtctatgtggataaaataggctactagatcatatcagcctataaatttaaattgtttaatcaacaattcaatacatgtccgtgaatacatatatacgacagaacaaataataggtaatatttgctgtcatattcttagaagtaagaaaatgttttgtgtcatatgaatataaatttaaaatgaaaaagggtctcattggtttctaaaaagggtattataggggttaaaaatgaaatgtttaaaggcattgggtaacgatttctaaagcatcaaatccaaaactctttttacgcaacagagagattcacaaaaaaaaagttgaacttagatatgtgacacgtacactatctatgggttcaaagaggcctatatctatatgtagcccccttaattataatggttaaaaacataataaaaaattaacaacaattggtggtggtggagtaatacatattaaactagaccagttacatacgtccaagtgttcaggaaatttagacatgctatcgatcttaagtcttttttttc

SEQ ID NO: 4900 - DNA, 691 bp, Arabidopsis thaliana landsberg
acatcaaacatcacctcccaccggagagtagagagtcagcaatggaagatccgccggtaaaccctttaaacacagtgaaaaaatcagtcattgcaataccgctaaaaccgtcccggcctcccagattcatcacgctccccgccgacaaatccaagggcgttaattcaggcagtgccatgtctcctcttagatattgtaagacctgcctcatacttggtctagcccgagggtctgaatgcgaacacaacagaccgagtttcaataccatttcaacctcttcaagatcataacctgaagaaccgagcttcggatctttcgcttccattatgttacctctgagccacaaactgaaaacccattccacaagcaagaacgtatcatcgcttgcactatggaactcgatgggtcgtctaccggaaacaacttctaaaagaaacgcaccaaacgcatagacatcagtcgcggtagtggcacgtccagtccgggaatgttcaggtgctaagtaacccaatgttccaacaacgtgagtggtctgaggatccgagccgtgatcatacaaccgagccaacccaaaatcaccgagtctaccattgaaatcagcatctaacagaacattgctagctttcacgtcacggtgaatcacaacttgttcccattcctcatgaagatagaacaatcctgaagcaactcc

SEQ ID NO: 4901 - DNA, 826 bp, Arabidopsis thaliana landsberg
tgttcttagtcagcatctcgaacggtggtaacgacacgaatcacatctttgccgtcgaattcgatacaatccagagtagcgagtttggagatccaaacgataatcacgtcggaatcgatctcaacggtttacgatcggcgaattactcgacggcgggatatagggatgatcacgataagtttcagaatctgagtttgattagtcgcaaacggatccaagtttggatcgattacgataatcgtagtcatcgaattgatgtcaccgtggctccgtttgattctgataaacctagaaaacctctagtttcgtatgtgagagatctttcttcgattcttctagaagatatgtatgtaggtttctcatctgcgactggttcagttctctcggagcatttcttagtcggatggagtttccggttaaacggagaagctccgatgctctcgttatcgaaactcccgaagcttcctcgatttgagcctagaagaatctctgaattctacaaaatcggtatgcctttgatttcactatctctgatcttctctatcatcttcctcgctttctacatcgtgaggaggaagaagaagtacgaggaagagcttgatgattgggaaacagagtttgggaagaatcgattcagattcaaggagctctatcacgcgaccaaaggttttaaggagaaggatcttctcggctccggtggatttgggagagtttacagaggcattttaccaacgacgaagcttgaagtcgctgtgaagagagtctcacatgattcaaaacaaggtatgaaagagtttgtggcggagattgtgagtattggtaggat

SEQ ID NO: 4902 - DNA, 730 bp, Arabidopsis thaliana landsberg
acatatcactcattaggtaacatagacaccgtctggctaatactgttggtgataccactggtgctccactcatgaactgtacatacggaaaaaattcatatatctatatctattgtattttctgctggtaaaagatgacggtttcttgatgattcaaaatgatacctctgtgtagaattcgattgcggtttcaaaatctttagcacgaaatgcggcatctccgtgcttcttgtaatccatattctcttgcatttgacccgtccacatttggaatgagaactgcagcaatatttttttcctcatgatgagatattgagatgtgtcaaaagagatatgtttctcaaaaatataatgtacctcatttgtgaccaccacatcatcctctccatacccgagtttctcgagtagttcgtgcataccacttagatccactctccagcatgcttctccgaaaggggtcaagggcaatggctcctttgttgcaggttcagtgtatgatggagtctgtcattattaagtcccatgtacacataagaaagcctgcagaacccgaaaccttggaagatttaatgtagtaatgacttacagggatgttttcttctttgacgttgggccataactcagctcttttctcaagtcttgaaagagctgacataagaaactttatgcttggcctctcgtctggttcagggcgcaaacagcgggaagctagatggataagttctgttct

SEQ ID NO: 4903 - DNA, 2031 bp, Arabidopsis thaliana landsberg
  unsure (1)..(2031): unsure at all n locations
ctattacagcttcaggtggcgtctcctctcttctttgcttgttccattttcctgatggaagctcataactgacacctctgtacaaagagatggaagtcccggacctccaaatcactaaaccaccagtttttntctgccatatagaggaaaagaaaagaacattttaacaagatctaacaaaagtttatgcctacgctttcatattgaacattggacttaaattgtgtgtttctgatctttgcagccgaaagacaagccttatgaaaccaaatagagttattggggggtcataagaagcaaacctctaatatctcatgcatctttctcatgttaagcgcgcttgctccttcaatcttcaatctcacaatctctgggcttttccacttctccttaatagcatccactgccacctgagtcacacctccacctcgaatcctcatcttgctcgctgttctaaacgtcaaattcctcaacctccttagctctgattccggaagagtcatttccgccaacgagtatctattctccttctttgcggtccactcagcttccaactccttcttctccttagcactcatcttctcccaaggaaaaccaacatctccattacttccaatgacattctctccaccaagtaacgattcctcagtgaatccacctctagtattcggtaacttcccttcttcaacatagaatatatcctcacagatcctttctcaatccttctctcttgttcaatctccttattctgaacctcctccatatatccatatttcttcaatttctccactatcttctccatagtactaccatcaccatctctacttctattatcatcaccactcacaatctccgacccagaaaatctcccttcttttcgataattcacaactacctttggaggtttaggttgattacgtttctgaattctattccaattctctagccacacaccattattacaatccctactaaagctaaacctcctcgatgcaatttgatcatttctcgaactaaaggtaatacctttacaagacccaagtgaaattgatgaactataccttaagaaacggaagcagaaggagctttgaaacgagtagacaaacttcttcgtgacagtagttgggcaaaaatggagactgggcttcatcgccattgttgtttattcacatagaaatgtttctgtaatccaatccatataaaaattgaaactttcaataaaaatttcacctttagttcgtcactaagctcctggctctgtgtttatccatggcgggcaaaaaagaagactgtttggatacagatctttcgttaaccctaccttaaaccaaacagagcacaaaaccggcgcatcttatcaaatataactcaagctagctaaaatgagcttctatttaattagtacaaaacgataccgtttgagtcctcaaaaagcaagcaaatcaaataaataaagagttttccatatttaggtctcagcaattattaaataaagaaagatgctaaaactagcaagtctttcaaaagaaacttattctgcaagaaatgagtttagaagaagagtaaagtttgaagttctgagaagaattattcagaggcagagccagagtcagaggcgtcagatttgaagctgtaatagagatccatgatgaattcagcagcggagcttccgaccatcgcgctttgtcgctcaggcaatggagttgtttggacccaccaatccaccaagttatgtagtgtcagtgacgaacacactggctcatcccttaaccatatctccacctgcaaaagaacatcaaaaaatattagagttaaaagacaagagagagtgagacatagatagagagaagagttagtttacttggtcttcgctttcgagaccgagcttcaccattagatacttcttgagatatgagacagtcatgttgctatctctgtgaacataaacccaaatcaaagaatcaatatcacacattctgcaacaacagcagagcttatagttgttatttagctagaacctaccctaccctt

SEQ ID NO: 4904 - DNA, 8283 bp, Arabidopsis thaliana landsberg
agcttcagttccaaccgaacccgtttcccattcaaacaataaataccttgtcatggtttactctatttttaactgtctcagtaacatactcataagtggagaactaaccgttagaaacgtgatcccaccgtttaatatatagccagtagtatcacgaataagtccacgacgtttcatctcgatcagacctcacatgaatctcccacgttcttctgaatatgatgcatcagaactgatatctaggtttctgcaccttgagatgattctgggcaacctttcaaagtcaaatacggatggagcttaaatctgatggtcaagatgtcagctactctaaattccttgaagcaagatctttccatagacgtcttgatcgtgatctaatttcttttggtccatcgggaaaacgcatcgcataaccaatagtcacacactggtttggatttatacttaacacagatttggacaacttcttcagttacttgcccagaaagaaacactcataacttctcgaatataaatccgattgaaactctgccagttgatatggcttcatggcaacgtgatctttgcagatatgtcttatttagaaactcattctctctggtatgacgggaaacatccttgtataaccttaacttgaagctactattttctcttcatcttcttccttctttgctttgcccattctctgattttactaagatctgtttcatctcacttctccttaatgacatgaaccaaatatctttctctccatcttcctccattgcggttgtgacgatccgttctcatccaaagcgtctcgccttctccactactccgtttacttctcttcgatcatctttctctttctcctcaagccaattcactctctcttaagtcaagttctctttctctgatggtgtttaatctctctatctcatctctcgatgaagtcaacacgtcaacatgacccaacagtgtcacatttagtctcggcttcttccaccaccacccatgagctctttcccttttctttcatccaataaataaaactcaccacgacgtcgtctgtttggttactcggaggcggtggctgcgatcccactattaagccttagggtttctcaatgttttctttattattccttctcgtcaaacaacgatgatatatatatgtctttggactctaaatgggctgtctcatatttccaaaacaaagtagcccatcgaatgagggagtagggtgttacaatctcccccacttaaatgaaatacgtcctcgaattttggcggttattcctttgcatataaaattatttacttggagctctagcaaacaccacatccacatttacggtatactagccgacgacctttcattaaaacctcagcttactgtttttaaaaaatcaacacttgttttctaaccacgtgtgtccttccattgcactactttgatgactgcttaaaagaacatataacttgtccatctccatcgaactctagcgcataagcactgatcactattagagcccaaagtagaaggattgcgaacaaaacaactacttaggcaaacaagacctccaaactaactatcattcaacatgttcgtacaggctcacatgtgctgaggcacttgaccttggtttccttcccattcctttttttcaatagtttctagggctccttccccatcattgataatttaacatatttacatgtctatgaattagatggtttccatccgtcttaccttaaatgtctctaagctcttattctccgataatactttcttccatttcctttctcgataaccttactctttagcttttcattgctatcttgaacactgattcttacttgacactttttaacaccatactaaagcgaagaaaacatgagaatccaaattacatttcaattatcaaaagaaatgcaattaagtcttcccaaaaagaactaagcagatatgtaaaactcaatcaacaaaagattactcaacgcaatcaaagaaatcaatcatcaagttcaagcaaaacacataattaatcattcaaaatcttttttttttaaattcgtttttaaaaatctgacgctccgggtcggaaccggagtggccttaaccggctctgataccaaatgtaacacccgtcccgccatataggccaaaacgacatgttattcatctgatcttgccaaaacgttttctttaaacttctcacacgaacaaaatattgcacataactaactcctcacgcttactaacgtgagaaaaaaggggaaaaaaagggtgagtaaagaatactcagtgaggggaatcaactctgcccactgaaacatagaacactttctaaagctatacaaccatcatcataacatataaacttagacacaagcaatcaacctaacatgctttaactactaatgacacatttataataatcaatttatccataaatccatgatagcacatacatatgtatccttaggtccaatcatcctcgtgacaaatagaacctcatgagtggaggctggccctcgtggctcagacactcccatgcatcccgggctcgtcagcctttcttgaccagcatgtaacacgtcggcccatcactgtccacattattagggagaccacgacccatagctcgattctccccagtctttcatacaaacatacataatcatcatacatacatacttatacttaacataaacatacttataatatcatacataacatcacattatcaaacatcatactcaacaatcataaagtcatatcatcatgtaatctaatcctatacaatcatatctaagcctacatattatgcgtcaagaagcataacaaaagaaaatgataccatgcttcgcaaataccaccctcaccttggcctagtagaaaatgacaacacaattctccttcttcctcatttagacaaacttatcatctcaactgcgaccgcatgctcttaagctctaacttggttctccttcaaccaagccctgaagacctgaatccatgattatggaaaactcttacaaagattcagctcaagccaagctcaatttcccaataaaacaataaaaactcgtcatgatttactccatataaatctgtcaaggaaatatacctataagtcgagaactaaccgttagaaacgtaatcccaccgttgaatatttagccagtagtaacaagaacgacttcacagagtttcatcccgatcggccatcacgtgaatctctcacgttcttctgaaaatgctgcatcagaactgatatctaggtttctgcaacttgagatgattccgggcaaacttctaaggtcaattctggatggagcttaaatccgatgcacaaggtgtcagatactctgagttccttgaagcaatatctttccgtagacatcttgatatcgatataattctttctggtacatctgaaaaacgcatcacaaacccagtagtcacacactgttctggatttatacttagcacagatttggacagcttctgcagttacttgtccagaaaaaaacgtgtataacttctcgaatataaatccgattgaaactctgtcagttgatatggcttcatggcaacgtgatctttgcagagatgttttatttaacaactgattctctctggtatgacggaaaacatccttgtataacctcaacttaaagctactcttttcttttcatcttcttccttatatgattctagttttgcctagcccccttctctaatttactaggatccgcttcatctcatttctccttactgtcacaaacgaaatctccatctcttaatgcctttcctttgcggtggtgatgatctcttctcctccgccacgtatcgtccttcgtctccgctttctctcatcttcctcacgattatatttcatctcttctctttctattcctttttcttctcctttaaaagcgtttcacaatgactaacacactcaacaacaacgatagtggctgacctttaattagggttaagattaagacgacgccgtgacgctcggtttaggaacggtggcatgaatctctttggtttccttcacttgtgaactctcttctctctccaatatggtaacgaccacactataaaactcatgtgttgatgctttggatttgctttctaaacattcttatttggtttcctttagcggctcatagaaaagggagatagattcacctatatatatgtgcaaccaacaacacacgtaacagaaccctttaacattagggagttgcttcacgtgggtttaaatgggctccatgggctttgctttctgacaaaacaaatagggtggacaattgatgttgggtttggggtgttacgaaggagctcatccaatgttagatcgttgagacgcaaagttggtggttgagtagctgaatgagattgattaggcgtgtttgaattggatggtggaggagagaaaccggcttgttggttttgactggtaggtgagggtggatcacagtttctagatgcattcccttgagatctggaagcatgagcagaaggaacaagtacatgttgagtggatagatacctagtgtagtcgttttcagaagacatctacgagaaaagaaaaaaacattagtaatagagaaagaaaacgtaaactttcaaaaaacagagaaagaaaacataaaactaaaccctaaatcggttgaaaccccaaatcaaaccctaaattaaaccctaaagaaaccctaaatggaattaaaacacgaaatcagactagagtaaaacaaatcagcgttttgaagagagaatcggagtgaaagaaaaattaacctttcaacaaatcttcaaatcttcggaaagaggagagaatcggtgtgtgtgaagtgaatcagagaggagagatcggagataggaagacaatcgaaaagacattcggcgattggaagagatcggagaagagagagaatcggcgaaggaagagatcggagagattagggttttcgtgatgtgcggctgggtttgagctccgcacaaactaggttattcctatatatagatatttgacacgtctcaaatccttcgcaatacttgctaggattttgcgaggaacaaccaaaacaaccaattaaaacgaggcaaccattgtaagggaattgcgagggtccctagtaattccctcgcaaagtcttcattagggttttaaaaaaaaacacgaagacatgttttaatattgttaatcatgtcttattcattttctgattcattttctcctatttcaagtaagaccctcaacaacaaaaaaacatgactaaatatttttaataatttagggtttagtgtaaataagtacgagggaaatgctacgaacgacttgcaaatccctcgcaaaaccttaatttggaaaaacactactcaaaatcattcggattcattttttgaatcattaggaagttaattatctacattagaatctactttctcatcatatatttcgaatgtgcattttccccaaatacatcaatgatgatcttatgtttttctataacttgaatcaatgtttataactttttcaaaatgaaatgttaatattgaaacctatacaacattttttgtgcattaccatatactctacttgtgtgattatatggtcacttagattcacatttataaatgaaaataaaatatcgcaaaacacttttatgtattttagggttaagggtaaagatttgcgaggtgtctgcggaagatttgcgacggtgtatattgttcgccgcaaaatactcgtacttctctcgcaattttgcgagtaaactttcctttgcgaccgtgactttcaaaatctttcgtaaagaaaatttttataagaggtaaactagcattgcctaatgtgatcatagaccaaaggaggcttatcaaaggatttcaagagcaatcacgagtgagttcagatttatcggctatcgctaagagtcaggatgttaaggatccgttattaccggcattgggcagttaggctatagaggacattggtagttcgatccagaggacatgatcgaacaattatcaagaaatgacggcaatgtggttgacatgctatcgaggaagttatcgttcgtttgatcgaaggacccgatcaaaccattacccataaaaatgaagattttaaggatggattttattttaggcaatttggtcaagggaaagatcaaggctaccgaagaaaattaaaggaagtgctgaagaccagttttgatcggagaaaactagattttgccgagaaaaatatttcttggactgggacaaactagtggtgatcaagggaagtgttaatcaattatcaaagtttattgaaacggttaaatagagtaagtggctgaggacatgccaccttacttgaattttggccgtaaaataaatcggaagattgtatggttccgatttggccgtatagtcgttttcgagattttgcggccatgtcgtggaggtgcttgtggtggaaggagctccgtcacaagcttggcgtgtgttgtgcgtgtgttggcacacgcttaggataaggataagatcaaagagtccctaaggatgagtttggatagggctagacatgagtttggataaggataaggtttcagataacgtttatccgccacctcgtgcttccgttacttgctccccacgttttctcaccccaataaatagcaaagctcgccatttgctctctaaaccacgaaataatcacatttatactagttaggtcgtgaagcttctcggagaagccgtggtcgtcgggagcattggtcgggtagtcgagagtcgagttagtcgggtaataggtaagtagttccgcccttagtcttttattctttttagaatagtttcctaagttttatttttcggtccgcggcttagatccatcgttagtacgcgttggagaaagcttaagtcggatcgagatataggcggtcaagggtagagtttgctcgttcatccaggccaaggtgagtttgggttaagtgtgttgcatgtggttacatgtagttcctagaactcgtgtaaaccagattgattgttgtttgtttactttccgttcatagatctagaattgttgattgattgggttgtgtagtttagctcttagattggttctattagctaagtgtagaacataagaatagatctatgaaggattgcttatagtttttaactacttacttaagtagttatacaaagttgtgagaaatgcctaggaggttgcattgtgtctgtgtggggcaagtgctaaactattttggtaacggttatgattgcaaggttatcgggggatgcatgcaagttataatcgtttcatttctagtcgttgatgtgaggtttggctacacgttagtgataacgttatgctctagatgacctcgcaatgattgattgcttgttagttatcattgattgattgtagtttgattgtttggttgttgtttgttatcttcgcatttgcttggttaacttgtttgtaattagctttgcatactaggtagtaattgagaggttaggttgtgaggtagatcttattacgagtggtattgagattcaataggctcgtagtaagtaaacgtcattagtcatttttatgactagttttgaagcgatgtcgtgattgtcccaatagctcggactggctcgttaccaatcgaggctacccgacggggcagtacaaattataccgtaagggagttggtctcttgtagacggtaaaggggaagagatgtgatccttttagcctttgtggctaaggatcggagacattgccttgtgggaaatcagaattgctgaaaagagaaaggcctttagagtagtaacactgtgtgagctcggatagtttagttatgcatgcatgcttagtattgattgtgttcattacacttttcaaagtgtaattggttgatttcttgtcgagtatactcaatcgagtatactcgaatgttgcattgattgtctgttgcatgattgtttgttgattgcatgcatttgattgttattttgggtttttgggtggggaatattgcatgtttaggggagcctggacttactgagcgactagcgctcatccctcactttatttttgcaggtagccatagtgagaaacctttgaggggagcacagacgtaaggaagccggtgtagagttcgttgcctttgtaaagatatattttttgtatgactcgttttgagcattaggccttagctagccgaacacaaatgtattttgaggtattttaagattaataaaatgagttttcttaaaaagccttgttatct

SEQ ID NO: 4905 - DNA, 661 bp, Arabidopsis thaliana landsberg
ccctcttactcatttttgctctcgcggacttgttttacagcctctgtttcctggcgaaagtggagtcgatcaacttgttgaaatcataaaggtagtatttttgctatcaattcttttagggttagttgtatttacaaagaaaatgacatctttagagctggcactgactaatagtttctcactgctgattatatttttttcataaaactttaccaccatttttgtagtaggactcgtacattctctcttcatggttttttaattgtcatgcaggttttgggtacaccaacaagggaggagatcaaatgcatgaatccaaactacacagaatttaaatttcctcagataaaacctcatccttggcacaaggtataccgctagtagtatcaattatcacctaatagggttctcttaatcgatatatgaccaagcttgtctcggtttagtgaggttgattgaagtatatgtgatcaattaacttcatatttcattcctctggcatatagagcgatgtgcagctttgcctttgtatataagattcttatacaaacaaataaattgaacctttgccaaaaggaattactcatgcacacactcctgggggttgaaaacagttaggcttcatgatcttggcttttttgctggtttaaagtttctatct

SEQ ID NO: 4906 - DNA, 4025 bp, Arabidopsis thaliana landsberg
  unsure (1)..(4025): unsure at all n locations
gctgacagttataaccaagtactaaagataagatagtttagcgtgtgtaagtctatcaatctaacctccaccgtcatcttggccagctcgggtaattccacccaagaccttgtatgcctctgaatgaactgagtctacccgcattgagtaaatcttaactccagcttcaagagtgcaacttgcctgacttggacgaacacatatatgtcttaaacattatctgaactcattttttctttcagttttatgtttttgtgtattctcaaacgtcttaacagcattttaaaaaagacaaagaagaatgaaatcgaaagcttaccttttgaaaatttgtttctgtattgttctcatcttcaactttgataatctcacaaagatggtcgatcaaattcaactcccacgtattcttttgattgattttctgtttaacacaaaaaccacattagaaaaaacttcaccagtcccactcatatgggttcgcatcatcaattccaagtatacatgacaaaaatcagatcttcaaaatccgtaagaaattgcaaatctaaacaaagattatagtgattaaaaagctacttgtaaatctcatcagaagcatatttacccaagaccaaggtcaaagacaaggacttttagccacgaattttcctttttcacttgctataattatgggggaaaaaaaagccagaagaaagtagttgcttacgttttcactggctaatttgatacagttctgaaacaactcgagaatttgctgtttgtcgaaacacggatcggactccgtctcaggctgagacccacgagcgaaaatgacagacctacgacggctagcagcggctctagcggcgcgagcttgttcccgttccaatctgtcatcgttagatcccaagaagaagggactcgtcggagcctggattcgagtcgtcgttgaagctggcttttgcttagggtttggagttaaggattcatccatgacagaacttctccgcttgtataaactcaatgagagaaaatgcgtttgttgggttcaccggagctttgtggatccgagagaattcaaagtaatttgggaattagggattttaatattttgattttccctcttctttactcttttgaatttcagagacactgatgataatgtgtaaatacattattacccccgtcgaaaggtgagtgacgtggtatactccactttgatcatcgttagaaataatttaaatatgaaatatccatggccggtcataggaccatagattcggttaaaacttggttaagagttaaccgatatataacaaatgaattttgtttcgccaacgctaattgtactattaacggaaaacaatcttgtcaaaatggtacatacgagaagcagatagaagaaactcaaagaaggtatctagagagataatacatccgtagagatgtcagaacagatttgtttttcagtcaaagagcaagtctctcttagtaaaccatgatcagagtactgtgtttttaaactgcttcgctggattctctttcacatgttaggatgtccgaaacctccagctggtggcatgggcctaaaaccattgttagccattggaggtggtggcggtgggaataaaccagatggagtggtggtggcggttgagcttgatgaggcgggggtggtggtggcggtggaagaccatttgctccaacagctgactgaggcttgtttggttctggcttggtaggcttgaaatacacctgcagctgttttattacatcctttgtcagtattttgattaatccaaacacaaaacatatccaatctcggaaaacaaactaagcttatggctttatgagaattatgatgagaagcacttactgtaaacatcttggagtctggatcccagtgagagaaaaactttggggttgatttatcaacctctgtgctaggaacctgaaaccaatgcgaaaacacaaccatcaatatcagtaaacaattcgaccaagatatgttgggctactagagctataatcccagatgacttctagaatgtaaatatgtcacgaataaaagaaaaaaaaaacacataccttgaaagctatgatttcatatggttcagctgcaaatagaaggtattgatagctcttgtcatacggttgaactttctgcacacaaaaaaaaggaagaaaactattcagtatgaaggaaaagaaattttttatgagatacatagacaaggagttgtaacactcacctgctcataagatgacatgaaacgatgtcttggctttatgttgtcctctatctcaggatattcaatctgtaaaacaatgtttgaggagtaaacagacacagtgagattttactctggctaagtctctaatgatgatcattgaagttcaacaataacaattagatgcttacctggaacagaagagatctttgttgcagctcgggatcatactgttttgtaacccggtaccctggtctaccaattttaactgcaagaccatacataaaatggagttattaagagaccctttaaatcaatcaattaagtaaaatctatgtactcaagagcaaagatatacaattttgctagtacttctagacaatcactttcccattatatccaattccaggcctaggcagatttgatatcaacaatgggaataaagctgtattataattacaaaaaactaagtaaacataaaacaacttattacctgttctgcgaactgagacattgcgcttaagtggctgcggcttagtaggagcgtccttagcctctcgagcagctctctttgccaagtttgtctgatgcctcttaccttgagtatgtgccaagtagtttccttcattgttatgcagcgttagacatagtttacactcatagctgcacaacataaaaacacaccaaaaatcaaattagtggcatgaggggaaaaaaaaaaactaattctagaaacaacagcaaaacaaactcaagagctataacacatatgaataatcaaactcaaaacggagcaaaaatgtagatgaagttggtanaatcacagtattcataaatctcaggttgatcatccaacaattgaatctgctacttactcgtgcaacaaagcatacataaatccaataacataccttccaagatgatttcgcatgaaatagggatctttagcaaggtctatggtttcaagagcaagacgacggagacgctcacggcgatctatggcctcgttttggccggaggcggcgcctccactaccaggcttggaaccccattctctatccatagctgctactaggatctcctttcacgctaactaatccccaatcggtccttctatgctctcttgtgctgctctctcgattgctggaaaattttgacaattgctgagatttttcttatgacttatgaagattggggaaaatagcacagatggggagattgggtggtttatcagagaccctaatgtgggttgggtttcgtataagatgagacagtttaaggcccaatatcagcccatcaatgtgttaaagagaaaataacttcatcaggttttatttcatacatgattcacttaatagattcattataatgataaactggttaaattaaaatcctagatagacagacaatttctgctttcacttattggattttataatcaagcattcaaggtatatcactacttgataatataataagaatgatataaattactttaaaaattttatataattatcaaataatgcgtgtaatgaatttcattgctttaaaacatgaacatcaatgtgttacgttacttcttccacaagaaacaagtaagactttgactttttaggtttcttgttctcgtgatcttcacgaaggtgaagcttccctgcttatagggaatcatcattaactcttagcacattaattaggagttttccacatgcgtatttatatacaagcatgaagcatgcatcaatgtgaagttcgaaaacatatccaaaaactgcaagaaagctcatcccatggcggattcaagcttttctcttc

SEQ ID NO: 4907 - DNA, 1848 bp, Arabidopsis thaliana landsberg
tggggatattgagaagaattgaaacgatgtctcggctttatcttgtcctcaatctcaggatattcaatctggaacaaaatagatctttgcttcagctcaggatcgtattgctttgtaaccctataccctggtctaccgattttaactgtcctgcgaactgagactttgcgcttatgtggctgcggttgcggctgagctgaagcattcttagcctccaaggtagctctctttgccaagtttgtctgatgcttcttaccttgagtatgtaccaagtagtttccttcgttgttatgcaacgttgcacatagtctacactcatagcttccatagtgattttgtttgaaataaggatcttttgcaatgtttatggtgtcaagagcaagacgacggagacgatcacggcgatctatggcctcgttctagccggtggcggcgcctccgctaccaggattcgacccccacgctctatccatagcttataatatcggtagactcagctagagattagcagagtaaattaggaaaccagcttttccatgtattctcatcaaaatgaaaatgatcacttgttgagatagatatatagtccatagttccgtttatagaaaagccaaatcaacttagttcatcgggttccttttgatgtcttgtttaacgtgtgaaaccaaacccaccattattattataaacagagatgcctcattggcacccataagaaaaaggcataaacttcttctacggttctgtttactaaagagttccaaaataaactacacacatttaacaatatgatcattagcgcggtgcgatggagggaatgactccgctgacaagttggttagctgtgaattcagagaaggtagtataactgcctcttgtggaagcagcagcgaagcctgacattcctgaagcagatgattggactgaagggcttgaatatggcttctcttcctttggaatcatcccgtagatgttctccagctccctcactatttccagcatccacggacgcgcttctggattgtcctgacaacatctgatggctagttccatgaatctcttgacgcattcctctgagtactgccccatgctcctgtctatcactgacatcatcatcccagcatcgcatgcttcattcacctcccgcacgatgtttcttccgtgcgagattgggcgcattcctgtgagaatttcgagaaagacaatgccgaggctgtatacgtcactcttttctgttagcctgtggctcaagtaatactctggatccacatatccctgtaccatacgtttcgggaattagtcaccttccctaagggatttaaaacagaggaatgttaaagcaacatacaggagtgcctttgacgatggtagttacgtgatccctttgcactcctccaccatctagtgctatgagctttgagatcccaaagtctgcaactttagggttcatcttgctgtctagaagaatgttgcttggtttgatgtctcgatggatgattggtggatcagcttctgtgtgcagatacagaatccctctcgcagacccgagcgctattctcagtctcagcgccaaactcagtggttgtctaaacctcgctgcagtttcacattcatctatctcaatcctcccacaacacttttatatatacaagacaaggtaggaacttaccagagagtgcgtcttgaagagaaccgttgggcatgtactcatataccaacatctgaaatcaggcataacaaatcaactcaagactatcttgaaatttacaatgttaataagtgactcacctgttctcctttctgatcacagtagccaagcaaagaaacaaggtcacggtgatgtcaccg

SEQ ID NO: 4908 - DNA, 4267 bp, Arabidopsis thaliana landsberg
ctaagatggtatggagcaaattctcttttcatcctgagatgatatgtgtttcctcgaaccggattcaaccctataccgtgtcatattcattcgttcattcactcccatcttcatcttttaagtactctgttttgctaaaccaaaacagagcctccttctctacatagcttccgtccctcatcacataggcgacaacaattgtgaagaattaaatagaacctacagttttagaatcgttgtaatttggctaaaacaaaccgaactgtgaataccaccactattttttctttgataacgtcccaataaattatcacaattctcataaaacaatttagttaatgacagtcatatcagttattcagggcactttgaattcactttaatctttgtcaactttttctttatggttaaatgtgatcagtctataacaaataaatatagctttaaaaatcagatcttgattaaatttgcgatatgaatatatgtgtgcaacaataagacacatacttgctcatgatgtaagaacatatcgccaggaaaggagacctcattttaattaaccagaaagaactttcgaaaaaggtttttttaaaaactgatattctctatactttaacagtctctctcataaatcacttcatcaaaaatctaatatttacgaatcaaaggactggtgagaaaacagaaaatgtaataaacaatcaaccggagagatctaaatctctctcacgaccaccggccaattaacttcttatttaagctaggtacaacagtttttttgacaaattcaagaaaaatcatatattaacggaaccagatggaactttttttattactgtcatattgccgcctttttttgtatatccagcgtgttcctactaaacattaccggaaaaaacgtaattacaaggaatgccattgccacgtcagcaaaaaccgagtcgtcaagtttgtaatcgctgacgtgtattaataaatgatatatccctatttttactgttttagctatgatttaggtataggttttagagtctatttgttatttgtagagtcttttctagtcatttttaggttttacatgtttgggattcatttggagataatggagcattctggaggaaaacagagaacttatgctgcaaaagaaatctagagactaaaaatcgcgtaggtgtcgattgagactacccttggtgtcgagcgacaccaatacttgaccgcaattcaaagacacaacttatttaagttttgaagatttccaaattcggccgaaaaccttcccttatttctaaagaaggcccatcacgttttaggttatatatatagattttaaggtcattgtttagacctaagcttggagaggctaatcttcttttctcttttgtacattgggagcaaaaccctgtggagactccctttaaagaagatccttctaaacattaatctcttcttgttttcttcattgatttcttattcaatcatgttatttgctacaatctccatgtttgattagtcttctagttaggtgtagagtttctcattagggttatagatgatttagtagattgcccctttgttaggttatttgtagaattcttcatctttagttgttcttaatgctagttctagtgtaactaactagaacttgattccggataatagatatacctgctataacacccccaaaccgctctaggccaagaacaaatccggaagcatcacggttgactcccgcagccggcaaacccaggttcactgaatacgaccgctcgcccgaagttgtccaaccgcgagaaatacgtttacctttctatcacggcctaaggctttgcaacccgtaccgtgatacgcgagttatgatagtcggcgacaggactaattatatcatgggagacacgagatttactaaaataagagctttattactatcaatgaaaatatcgagttataccacctatacgcaaaacctatatctttacaaagacaatgcaaactacaccggttggcctaacatccttcgctcccactaaaggttacctgtaaaacaaaagtagaatcttgagtaatctagcattactcagtaaggccgggattctaatagtataacccaaccaaacccccaatcacaaagattaaattacacaagattcacaagcaataaattgaacaaccactatcaatcccagtttagacatgctaaacaggcctctacgaattcatgatatcccccccaaggcgaggcctccacactcctagacacgacagtctaaaagagattacacccctcaatactacatcgtcatgtagcgcttgcccaggcatgacctggtccaaacctttgtaagccataacattacggagtttcacgcaacgtacaacagacggatggactatcatggttcgcctaacaatagttaaccccctattgctatacatcattatatataaccataatcctatgttgtccgacagcataacggttacgctaacaaacgggcagcataacggttacacaatcgttaagccaaacttcataaccaatcaatcaaccaagtataaatgattatgaaataataccaagtataaagtagcaacctcatgcataatttaaaaataataactaaaacccaatctgtgtgctacttcacacggctcagttactcaccccctaaacatgtgctacgacacacgctttggatcttatcttagatcggagactctatcggaaactaactttatcttcgatgccaaactaagctactcggcagagcctcaacattacctgaaagctctttcgggacaattcgctcgctcccgacgctcagattctcactcacggactaactaacattttctcggattttctcttggttttggtttgaaggaaataataagcggaaggggcctatttatagggttggtggtccgtggaacatgtggtggagaatggaccacggaggccagaaaaatgggtggctatgggtgcgacacggcggcgattgatgcaaaactgtcgcactaacatgtgttcgtcaagacaccaagccatctttgttcggcgacatgtggtggagaggtgtgagctagttccggtggcgcatctccggccacacattcggctaagcaagtgacaaagctgcttcctccacaagcacctcaacgacacggcaagttctaatccatacgtccgaaactgctcgatgatgcaacagcttgggtcctaagctgctcaacaacgtggccgtttcttgaccacaaatctgacaagtatcttaccctcctgcttgatcggaagctgatcagtgacatgcccattcgtcgatcacacacctatcgcggatcaatcatgcattgcccagggtcgtccatcgctcaccacgggccgatcctgcatcgtccgtgatcgtctgaatatctatgtcatcgccccaaactcgatttctctcgcccaacttccatttttattgttcatcttgcaatttccctcgatcaaaactcttgaaagtatcctaaaatacttcggctcatcgccaacaatcattctctttgatattggccgatggttctttgatagccatccctcggtcaatttgtagtcgtgatgaggggtattacattctcctccccttaataaaattcgtcctcaaattttcaggggaaatgttacctagaacttctccaaaatgttgacaacataacctatgccaacttctttagactccttgtcttcttgaacttctctccttgaatctgggtcttgcatgcttcaaattatggttcaccgttcttctcgtcctggactcctcccctttgactaatcttcaagggcttcgtcttcgttttgtgattctcctcatacccttgtattgacttaatgacttgtgtattcggctcctccccttagacttaattttacattatgtaaagtatgttttcatcattttcatctataaccttcttacattatgtaaagtatgtttacattatgtaaagtatttttcacactctcttactttagctattttcttcttcagctataaccttcttggttcatcgttttcatcattttcatcatttgtttacttctcttcccttcttcacttcatcactctccacttttcttagaactcttcaactccatttctgtatatgtgatttcctttcacatatcatgtgtgttgctcaaaagcttaacacacaatcttgccttcatccacaccacacgcctcaagttatcacagggtttataggttaaggatggtcggcc

SEQ ID NO: 4909 - DNA, 5929 bp, Arabidopsis thaliana landsberg
aacttggatgaattttatgtaattcgcccccgagcacctctcaaaagagtcgtcgagtcccatgtgaattctatatgataacattaaacaaaatcacggttccatatttgtttaatactagtatgtattgcagagtagactttcctaatccagtagattcttaaagaaaaaataatataaaaagattgaaaatagaaataaaagatgggagacacgaagggtcacttgtattgtaccgagtccaaatgtaaagaagtctcaataatggtgtaataaaataaagaagttgaagacaagatcacaatcaccatgtgaagatcaacacacaagatcataattttattgtatgtttgcttcatttcaacttttttaaatattgttaagagggcaggcattgagtgcgccacgtggcaaatgaccatccctttgtaggtgcagcaaacgtgataaagattccggactgttcacccattcccttcttccatttgtttcttattttttcatactttaagttttcttacaaatcttatcgtatcataatttttttccataatgcgctcccttgaatggaataacgttggttattttgtttccaaccaaattttcataccattcgatcaaataggtgcatcaacttacaagaaatgaaagtgtgatccctattttattaggtagctaagtaagtgttagtgaacactacgttagattgtttctcaaataacggatcaacgaatctcgtattcattactatactgctaatgaatgcatcaattttaatttttattggttatctatccttaaaaaaaagttataagaatattttgataatttgttccaagatgtagtactagtagtagtacttggtctcgtaaacgacgacgccgtttaggaaatcaaacggccaaaaatgcttccacttagcgaaattttattggtgggaaacgcaaatgtatcgataatgatttaaagaaaaagcggcgtttctaattggaccacgttgcccaatctctacggctcacgcacgatctgacgtcaaattggcataatactataataaccttatcgagaataaaataatagtcgcatccaaacaaaagaaaccaacccttttatatcacgacgagtgtcacgccatggacacttgtccatctctctcgctctgacccctttcaggtatcttttatttctcaaagaggaattattgattttccatttccaaagaaaaaaaataaattcgaaggtcaggaaaattaacaaaaaacttcctttttttttttgttagtttgtgtgactgagctgcttcattttttttctttctttttttttttggtttgatgaatcgatttttgttgtctattactgattggttttcttgttcagattcactgattcgaagagaatcatgatttttttttcccgctgaataataagcatatgattgggtgttttggagatttgtttactgattaaaaggagattcctttccattttcaccatttgctctgtttgacttcattgtgcttatatttcatttagatcttttgtttgggtttagctttggaactgataaaaatctgattttgtctcacggctttggatttggttcttaaattttggtactttaaaactggataaagatcagtgcttttttagattcttcgtttgttgatgaatttatggatgtatgtataattaaaccataatctctctgcttgtttgttttcttataggtaaatatccagaagcttgatcctcctagttgtacgaaagcttgagtaatggggtctagattaaacttcaagagctttgttgatggtgtgagtgagcagcagccaacggtggggactagtcttccattgactaggcagaactctgtgttctcgttaacctttgatgagtttcagaactcatggggtggtggaattgggaaagattttgggtctatgaacatggatgagctcttgaagaacatttggactgcagaggaaagtcattcaatgatgggacacaataccagtttcaccaacatcagcaatggtaatagtggaaacactgttattaacggcggtggtaacaacattggtgggttagctgttggtgtgggaggagaaagtggtggttttttcactggtgggagtttgcagagacaaggttcacttaccttgcctcggacgattagtcagaaaagggttgatgatgtctggaaggagctgatgaaggaggatgacattggaaatggtgttgttaatggtgggacaagcggaattccgcagaggcaacaaacgctgggagagatgactttggaggagtttttggtcagggctggtgtggttagggaagaacctcaaccggtggagagtgtaactaacttcaatggcgaattctatggatttggcagtaatggaggtcttgggacagctagtaatgggtttgttgcaaaccaacctcaagatttgtcaggaaatggagtagcggtgagacaggatctgctgactgctcaaactcagccactacagatgcagcagccacagatggtgcagcagccgcaacaactgatacagacgcaggagaggccttttcccaaacagaccactatagcattttccaacactgttgatgtggttaaccgttctcaacctgcaacacaggtgactaaagaacctaagctactacattttgtaggaaatacaatcatctgaaaaatattagacgtagccttcatgttttaagataagctggttttggatatgcatgtatgtttcagttatctgagcatgacttgtttttacttttttcgcagtgccaggaagtgaagccttcaatacttggaattcataaccatcctatgaacaacaatctactgcaagctgtcgattttaaaacaggagtaacggttgcagcagtatctcctggaagccagatgtcacctgatctgactccaaagagcgccctggatgcatctttgtcccctgttccttacatgtttgggcgagtgagaaaaacaggtgcagttctggagaaagtgattgagagaaggcaaaaaaggatgataaagaatagggaatcagctgcaagatcccgcgctcgcaagcaagtgagtgtttgtttaaattttggagattaaagaaaccttaaaactgtgaccatgttatttactttttcactttcttgcttgacaggcttatacgatggaactggaagcagaaattgcgcaactcaaagaattgaatgaagagttgcagaagaaacaagtgtgtctcgcttcttccctatcacaattaagaatctcgagattttcatattttcttgaggttgtattcactgaccaaatgtttcatgcaggttgaaatcatggaaaagcagaaaaatcaggtactgtcttgatttgaatatcctctatggttgttggctaggcttttaactctcactcataatgaattacacttttggacagtattctaagcttttgagtagaatagtgtaagctataccatgaagtgagacatatcatcacatttttgatttcccactctgcataaagtattataagatttgtgaatatgttgcaatgccaatttggatatttcatgagactaatctgacgagcatggatttaacggaagttggctcatttgttgttgcagcttctggagcctctgcgccagccatggggaatgggatgcaaaaggcaatgcttgcgaaggacattgacgggtccctggtagagcttataatggcgtctaaggaacccaacaaagcgccgaagttatagaacaactcagaagatagaaagctagctttgtacgtagtttaggcaggttctgtgggtgattgtaaatcttgaagtgtggcggatttgacagagatagataaacacatatctgttgtattttcctaaatcttttggttttatcttcctgatgtaatggatctttatcatttgtcttgaacatctttgtgacttaaccagagggaatttatcttgtatcttgtctgcaattttttctttagctcatttgggcccaagtcaacacctttattatagaagagagtaaacatcaagtttagcatcaacatctggtaatccaactgggcgtacaaaattagatacacatactaaattggcaaaattcttgcagatagcatcccgcttcaggataaggtgcatcaacgttgaatagatgatacttgtgaaaagtctctggagttgaggtggtttgataccatcggaccgtaatacttcggtttaagatcagtaatgagacatcttctaactgtgtttcttgaacaagatgctttcaaacggttactgccttggatactcatgcacaagcccttctgaaacactccttgctctagcatgtccgaacagcttgctaacaatagccagggaaaatttggtaacagttgcgagccccaaacttgtaatcacgtttccatctataacaacttcggctccttcgatcatttgttgattcataggctcgtctgactctgaaggatacacagtcgttctcttctcctaaaataggattccaattgtttatggcgtttgtccatgtatatgacaaagaaaagaacaatagttgtcttcaccttaccttgagtaaaccatgtttatgcaaaacggtagatgaagagttggtagctccatatattcgcccagattcatgttgttccctgagcagtttcttgagaattttggacttctgcagacgttctgagccagtatggcctcccttgggaatttccatcaaagaaaagaaatcatattactcaccatggaacaaccaacagttgtagtttgtctaaaagcttttcctaagcgcattgatttgacatggcatataagttatactgaaacatgtacatagcaagatttatttaagaagaagtaaactagcgaaatggtatgagtttattatgagactaggacatgcagggttttgcttaaagccttaccggaagaatgattagatcatatgatgactcagcagcttcaccaatcaatttgtcagtgataattttggtgccttggaatgccgtaatccgcaaagatcgttcaactgatgaaaccgtgacatctactttggctcttctaagaacatctgcaattgagaccagttcaaccgcttcagacccgttggctaccgggataagaacctggatttagatgcatcattaaaacaagtttctcagctttcaaactaaaatgaaatgttcttagaatcagctaactttttcatctttcaaaactaactgagcgtgaaaggagaaggaatggataaaagaaaaaactccataggtatagaagataaaaccaagatcagttctcatcatatatcatgagattacatggaaatgcattgatcatagcttcatgcgacttacacgaggtgtgtggtctaaagaccagtcaatgctattgaactctttgttcttaggattctggtaaccatcacgcagaagctggagaaatgattgaaaaagaagactatgagaagattgttgcataccgagaaggataaagaaaagcatgatccagaaaagtataagtgaataggatatagaccagaaactcttcaattgacttggctgtggtttctccgaagagctgctccgccaaggaaagagcaaactggaaagaagtgccgggtccacggctagttgtaagctcccctgaaatctgaatgtttgtcttaacagcccagaatgtaggaagcttcccgaaaaaagcaggatgtcccgttgtcttgcacgatgaactacaccaagtttagaaatcaaaacatgaagagaaaagattagttactagatgacatcaaagattttgatttataccctctttcccgtcaaaagtccccatggaagaagagtaatagcaagagccatggatatagccccgtataaccgcatatcttcagcttgt

SEQ ID NO: 4910 - DNA, 3140 bp, Arabidopsis thaliana landsberg
  unsure (1)..(3140): unsure at all n locations
tagctcaagaaaaaaagtactaacatgataatgaacagacaaagtagaaagagtatatgataatanaatccgggataaatggggtagggttgctgaactcccatctaacaacattgcaccactggttaagcttcaaaggcaagtcacggtgcccccttatccacttgctgtagtaagggtacatcactgtctcactggttggacgaatagcaattgggacttccaagtcagatttacctgactttgtaacccacgcaacctaaacaaaacaatgagatctgttataagaaggcctttttcttcacaaacaagatctacaagatatacaaacctcaggggcgaatccctcgatgtggtccttctccttttctaagacaccaggagatacaaacagagggaaatagcaattcttgaccttcattttcttgatttccgcatcaaagaaaatctatggaaaaaccaatgaaaacaaaatgatcatttcacacacttgattccactttcaatcaatgtgattaactcaaatcacaataaagaaacgatgatactcacttgcataatctcccaaatggccattgaccatggccgtagaatataacatccagagatatcgtagtactcaatcatatcttgtttacaaacctagacagacataaagaaaagcagatgtcatataaccagcttgggacaaaaaagaatgtggaaacactcatcgttgaacatataaacaaacctcagaataccattccccgaagttctcatctttcttaacactgagtccgagacccgtttccttcttgacgtccttcttcttctgtccactcgaagaagcctttgcaaccttttctttcacaaccttttctttcttaaccttttctttcttttctttcacaaccttttctttttgttcactgggatcagccattgcaaccttcttcttctgaaatgcattaccaataacgaaatccaattacaatcaaagttatgaaaatcaaggtttatcactaccaagctaatggattagtaaaatcaatggcaagctacttcgggatctgcgaatcgtttgagatttccgtcaatttctcaaccaaaatcgagttactgtccactcacacaaaaacaaaatccggcgaaaactaaaaagctaaggaacctaagaaacacgacaatggattacactaaagacatcctagcgaattaccaaaatcacaatagattcacggaacaataagaaacgtttgaggtaaagggaagaagaacttaccaatttcgccggagagctgaagcaggactgagctgaagacggcggagcaaaagaagcagcaaagataagagaagagagaaaggaatcgagagagcaaaatagcgttacaagttgcgaacgtttgactcgcttgacgagctttgttactgaacttccaattatatacggccacgtgttagggttggatctggtttttgcctaaatgcttagtttacatgggccaagcccaataagtcaacgatcgatgcattaattatttatactatagttgtggagaaaagatggatttatattctaatccagtttcgcagtcgatccatttgcaacttgaataatggttaggtcatggaataaaaaagctgtattttattactcatgagtaaaatcaatcctcacatgtcattataactcgacctagtaacagcccaccttaatggcccactaaagcccaaatttgaaataacggtcaaatcttaacatttaagttaacaaatgataaattagtagtatatgattaaactcaaatctaacaaggatgcaaatgatcatcgatcatcacatgtcaattaaaatttagagtatatgtaagaaataactatgaaatcaataaaaatagagtaaatgactatggacaatagtatcttgtcggaaaggcaaataaaattactgaaacatcctttttctcatcttctctctcatcttctctctcatcttctttctgtttttttttctctttctctatctttgctggattctctccttcgccggatctatgtcgtcaacttctcttttctttatggatattctctaccactatttactccgtaataatgtcacgatgactatgaccaaatgccaaattgttttttcgttattttattcatgtcacttcttaaatttgcatgattttttctaaattttatgtagtattttatgatgtaccagtatctttccgtttaacatactatatttctgttttacatgtgattttctaatatgccatgctattgtttaatttgacatgctattgttcaaaaatacataaggttttgtacaaataccaagttatttctttcgttatttttactcgattcatgttattttaaaaaagtacatgatttttttctttttttctttaattttttgacgtaagatgactctctttctggactatttactttataataatatcacgatgattattctttcgttatattaatttgattcatgttatttttaaaaagtacataatttcttttttttctttaattttttgtcgtcagatgacactctttctgggctacttactctgtaataatatcacgatgattatgacttccacctctgaatctcttttctttttttccctgaatcttatgagtttcttttctttttctcactgaaccttatgaagtctccaccaccacaaacaaatgtatcattgtaaaaactataagtttacaaggtcaattggtcttttcttcacccttaccccatcataaaaaaagtcatttaccaaaaaaatctgacacatagttaatttctttattatgatgtcaaatttggctattgcctaatattacccatattagattcattataattagatcagttaaaaacattcagtattttcttaaaaaaatattcggtggaaattttgtagttaaactttcctttcaaaatcaaaagaatttgatttgaatgctcaacgtctaaaaccctccagcactgaattttaatgatgacaaattttccaatttagcatgaattgcatatttgcattcattgttgcacatgtaaccaattggtagttttcttacgaaatatctaaaatcagaatcatatgataagaacgatgatgtgtatttatataaga

SEQ ID NO: 4911 - DNA, 3815 bp, Arabidopsis thaliana landsberg
aagccacatgaactaacaaaaaggttatggtttaataagcatattcaaaaacccatacaccaaaataaaaccgactgttaacacaatctaaaataaataaataaacaggcaattaagttcaaacgtatcaaaacgcacaggtaacgatacacaaattctgagttaggatgcaacaccggacaatattatagtcgagacgagttttttcacttcttaatccagagcggcaacatcaaattccagggattccttaacccctctggcagcatgagcatgaattagataaattgaaagcacatcggaatcaaacagggaagaacctgagggatgtcatggggacgatccagccggaaaggttgcagcaagataggaccaccagacgagttggcctgtttgaagaggtaagggagcatggctgccaatggatgtagttccgcatacaacgctgaggcacgtcgaagttgaatgttcgaatcaataatagtgatcttatgcgtcttaagatcaacacacaatgccacccaatgttttttgtcgaaattgaatggcatatacatacaatcatcctctgcaaacaatcggacacggtcagactcacctacccccataagtagatcaacaagtgctgcggggaaaatgaaatcctcaggcggggatgttttggaaaactttaaaaagagcctagtcagttgtgaaacaaacttggaaccaagcacatctacccttagcttctcaccatcaatatcgtcagtccttaaaagatgcctactaaatttaataagagcgtccatgaccttgctggtgaactgttttttcctctcaataatgtcaaagatctttttggctgatagggaaacttcaccaacaatgctaatgaaactgcaaaaccatgaaattttaaaaaataacgtaccagtaacagccacacatcttaccttgtacaattgaaaataatgtaccatttatttgataacaagcttaaaatgtaatactgttaccttttccctctgattttagacagagaacgttgataacgttcttctggatcggcaacaacctcaccgacgctcagcaaaggggacgagtgaccaacaagcagcttggttttcttgtcaaaacggaaccgcccatctaatttgctagacagagtcctaggtatttaacttttccttcctttgttcacctcaacatcgagtacagtcccgatggctgcttttgtagcagacgggtttgaaggtgggggtgttgtaaagtcctaaaacatgattaaaaacaaaataaaaatgttaacatgaagtaggtagtttacatccagcagaggacaagaaaatgtacctcatcagaatcccgctgagtaggtgacaaactggtctctctagcagcgacatcaccaatctgtaagaaatttaaattggtgactagatgcccaacaaccaattaccgttaactatatgtttatcgtagcaaaaatatacttatagggtaatatacatttggctttatagttatagatacaaattacttgactcgaggctactttagacgcatctgcgaggggctgcataaaaaacacacgcatttaaataacgagtacagaaaaatttgaaaatgaccataaatattccaatcgtgtgctaacaaaataataaactgctaaccaacctcctcgctggcacatgattgtagttgggaggaatgcaaggggaaatcgtcgttaccctgagaggtaccattgagatagtttattattttgcatataacgatagaactaacaactaagattaacagttgggtaaaaatgctcacctctacctggcctctttgaggagttcgttcaacaccaacgagaagttcctgaattgttaaacaaagcgccaaaaacctgtgaggtggggcttaataggcaaataattaaccaattagaacataaaacaactaacctcaattgaaacatacgacaacggatggacatttgagtcttctggggtgtgttctgacacacgagttgcggagggacggttcatatcctaaataaaaatttaattgccgagaaaaatatatgttagcgccctaatctgaagaatacgttatagtaatctatcaactgataaccaatatgttatcgcctcatattttgttattaatgttatcggataagttatttaccaaataacaaatatacatccaaatttcaattgaggactaaaatgagcagcggtaaaaaagattaattaaataaaaaagagagacatggtcaccaccgactgcggtagtgtcgtctctcatttcaacgtcgccctacaacgcatacgaatattgcaaaatggtaacagtaaatttttaaaataaatatagggtcgcacacaaaacagttatttgtacacatataaggagacttttaccagttaacaatatatttgcgccataatatattcgcatatgcagcagatcgggcttaaaaaaattatttaaaaaacataactcacctaggcgtccacgactgtggcggtgttgtatgcgatctccgcgtcggcctacaacgaagacgtgaataagaaaaattggaattcggctgttaaaatttaggaggggtaaactacaaattatgtctccccagcaccgaaaagtaaaacataaataactgataaatatacaccctaacaaaacaattatcgggttatggctccacaaaaaagttattacgataagtttaaaataaaaaaagataaaggtatatgataacaaaacagttattataataacttatcaattatcaagctaacaaaacaatatattgacacaaacaagcaattatttttacacaggtaaggagacttataatagttaacaatatatttaaaccataacatattagcctacccagcacatcggtcttatatatttattatcaaaacagaactaacctggacatccacgagtgtggcggtgttgtctgcaatctccgcgtcagactacaacaaagacaagaataagataaattgacagttaacaatatattttgcgctgtaacatatgactcccccaacaaccaagcgtaaacaataaataatgttaaagctaaacactaacaaaacagttatcttatatatttattaccaaaacagaactaacctggacatccacgactgtggcggtgttgtctgcaatctccgcgtcagactacaacaaagacgagaataagataaattgacagttaacaatatattttgcgccataacatatgactcccccaacaacctagcgtaaacaataaataatgttaaagctaaacattaacaaaacagttatcgagttgacttaaccatagtttgcctcgacagtctattacacatattatcgaataactatatggttatatcatataacctaatcaacgtttccacctaacaagcggtattaaatgggtattcgagcaatgaaaacccaacctgcccgcccacgcctgtgttagtgtcatctcccatattactgtcgccctacaaataatacgttgactacatattagggaaatataccaaacattagcagtttaaaatgttagcatgtaatttaaaaattatacactccctcggacctatttttgaaaaatagttctttcctctatcggatcgtcctgaagatcagaagcattgtaaaaagaaacaacgtcgtcgacggtggatattgcttggtctccttgaaaagacggaaggttgaaatcagaatgcaatggtcgggaccagctacgagggggatttgattcctgatctcaaaaagaaatttcattgttggactcctacgggctaggcccaaga

SEQ ID NO: 4912 - DNA, 3254 bp, Arabidopsis thaliana landsberg
  unsure (1)..(3254): unsure at all n locations
tctttttgcccatcttttcccatttatggatttaggaacattttacattgtgaaagaaaagaaagcgttactattttttttttttttttgttacagtactctgatttcaagtaaaataataataataatactacacatacttattttttatacttggagcttaaaatttacggccgcacgaacggagtgcacgtttgcttctgtcacatgtttgtttgtccgagtttttgctcttgcatactgccgttgtaaaaagttggaaagaaaataatcttaacttttcaatttcaaattagaaatgaaatcaaagaaattggagcttgacttgtctttttatagatatcctccttttacctattttactatactcaattcttctatttttaggatccttctgaaaattaaattaatttttccatttatgtttgtagtttcttatttctgacaaaacaaatgttggaaataatctatccttagatgccacgtgtagctattcgataagtgataagattcagtattatctggagcgttagcgttaaataacactcttaagcttcacatgttttatcgcttacactcaaattaagtctatgtaattacaaaattacaacactctctccatctctttgtttactccgcagatgatgagtgtgaaaacctgtaaagttgaggtaaagcaatttatcggtttcgcttttaaattgtttgttatcgaaaacttgttttgatatctctcatggcttttcttatttatgtgtcgattgctatcaactttgttacagcctttaaaatggcaaacaccacttagaagtagcaagaccaagcaggatgctaagccttattcgtgttcttcaccaccatccatcaaggcgtatacatctccattcgtgagccaaaaagcttcaagacgtgttgctttgtctgctgaagatatcaagaatgctcatagagaagcgacaaagatctccagtacgagctgtggatcaagcaaatggacaggaaatttcattctcattttggagcttcgaagaaagattatcaattttagaaccatcattgatcttcctcctctgacctattatctctctatatccaatgtacgttacctcttccctacgttttctttctttcagataatcgtatctttgacctaataaactcacagactaatcacaatgagaattttcttttagtttctgaggtgaaaagtaatgtgaattttccattaacaaaatcgaaaaaatgttatttgcataatgaataaagaatgtgaagaagttgtaactagctatatctcatcgtagcaattacaaaaaaaaaagatatcccagttcataagcagtgatcaaataggtaaatccagtgaaaatcgattccttggttaaaaaaaaaaacgcaccacttgatttgtgtgttagatatgactgatttgtggcgttgttgtttgttttctggatcaatggtagatggtgatgcgtacgatgaaagatctccataagctctgtcctgagatcattgacagctcccaaatcctcgaaatgagacgtgaagaagttgacaaggtttatacaaattcctctcataacttaaatccaaattgtgataatttgtttattctgatcaaaactattgcaaacagttgcttgacaatttctacaacgcttnnnnnnnnnnnnnnnnnnnnnnnnnngatgaccacgaatggatcatcaaatccaagtatagaagcagtaacataaggaagaatctgtctgatcgacttggtaacatatatcaaagtcttaatgattaatattaatattaaatattatatatcacaacattattgtaacaaaatctctatgcattgttcttgtagtggaaaaggtgttagctgcattagatggactgattaaggggatgaacgagaggcttaatacgacagagaacggcaatgtggaaatgaagaaaaaggttagtccgcggagtactaaaacatcaaatgaccgatcagaatcattggcgaagcaaccgatcaggccaaaaacggtgctgagtccaccgagtaaagtccatggagacttttcaatctctgtgtcaaatcttcctagaaatgtgagaatgcaagcgcttgtaaagctgagtcctatcgatgtaaagcgactcgctatccaaaattttagtcagaaagaagctctgagcaataatggtgatggtgatgatgagagtctcaaagtgaagaagagtgaaacagaggagaaagcaaaagaagctattcttgagaaacaagatagtgtgaagagtcagattgatgataaagattgctcaaaagtttcagtgaaatctgaaatggtttcaaaatcttttgctccgcctcctccaccacctccagggaatgcagcaatcccggtggaaccaccacttacaatgtctgctgaaaaagagtcgtatgctccgcttcctccacctcccggaagagcagcactaccaccgccaccgccacttccaatggctgtgagaaaaggagtggctcgccgcctcttccacctccagggactgcagcactacctccaccaccgccacttccaatggctgccggaaaaggagtggctgctccaccacctcctccacctggcgcaagaggaggcttgggagcgaagaaagtaactagtaaactgaagagatcaacccatttaggggccctatttagattcctcaaggggaaattagaagggaagaatccagaagtaatatctcgtggcgctggaggaggaagtaaaggcgcgactggaagcgctccagccagcggaaagcaaggaatggctgatgctcttgctgagataacaaagaagtaaatcacatctcacttcacttataaacaacaaaatggtcaaaactcatacttgcttaatggctacacaggtctccttattttcagaagatagaagaggatgttcgaatgtatatgacttcaatcaatgagcttaagacagatattacaaagttcaagaacaaggacattaccgagcttcaaaaatttcaccaccgtattgaatcagttcttgagaaactagaagatgaaacacaggttagtgataacaacataagtgatcaatgtcccttcaactatcatcaccatgttcggattttgtgatcacaataatgtttgccctgtgtgaggttctagcaacatgtgaaggattccggcataagacactagaagcaataagaatggctgctgccttatactcgcacctggagggcatgatcagaca

SEQ ID NO: 4913 - DNA, 808 bp, Arabidopsis thaliana landsberg
cttcttgcgtcacctataccgattagatcatctaagtcaatattatccgggagtaacttaacatcatcaagacgtgtttcatcgcctataggcaacctcaagaatatttctgttaaagaagctaggagccccaagacgagcagctcgcctaaatggacaggaaattttattcttatggtcgagcttcgcaggaagatctttacctttagagacatcattgatctttctactcttgatggttctccttcaataaccgatgtgcgtaaaccgcaaccttatatccttgtttattgtatctagatgctttacatgtaattttgactcacttgtttgttttgttgtgtagatggtgatgcatacaatgaaagatctccagaaaatttgtcctgagatcattcatagctcccatatcatggaaattagacgtgcaaatgtcgataaggtattcaaaacatgatccgaatatatgatttacctttgtcctaatatatgttcatatatcttgaatctgatcaagtgtttctctcgcaggttcttgaccatttctttaatgctttgaaatccattggagattcatggattgataaccctgaatggatagctaaatccaagtattggagtagcagcgtcgggaagaatcagtctgatcgcttaggtaacaagaaaatcatcttttatatcaatgttaaaaattttgaagtgcaaaactcttaaaaatattctgttttctttggcagtggaaaaagtgttagctgcattagatggactgattaagatgtccaaagagaggtttgatatgatggagatt

SEQ ID NO: 4914 - DNA, 1799 bp, Arabidopsis thaliana landsberg
gtctgcgtttagggttaccggttctggtgggtttcccagcaccggaaccaaggtcttttatgttgctcttattctacttttgttttcttttttctttatacacatctgacagattttcttccaacgatttcaaatctgaattttcagatctagatatataaagtctaaaactcttcctttctaggtttttgctgcttgtcttttgtctttttcaagagcagagtcagatctggccgatccatccaaggcagaggcgtttctatccgtattttcgcctcagacttttgaaattccacctgaagatcccgatctcgttctctccttcatgaggctctcactccttcgggtctctggatgctggttttatctcaccgcccatccgtgtttaggtagagtaaagggaatcttctagtctcagatctatcagtttatcattgttgttttagacttcgtttatttcgtttgaacttttggattttgggtctaggaaatttttgatcagatgtgatgtaatttgttagatcgggttgtttcccctttgtttcattttaatatgtttttagtccccgggagattccatgtactctccggcttagcctctgaaagagtgtttctcttgtcagctcttgtactcagatcttctatcaatgaaatctatatttcgagtataactgagccaagatcgatactggtgtatattgatctgctacgattctagtatacttcaagtatacattcacatatatgctaatataattttacattctttttcttttaattttaaaacaaacactttaaacaaaagagtggttgacaaaagaaaaacactctagtcgtgatgtaatgtaatatgacgattgacggatatgaagtggtgaagattcacccacttgatctcatggatcattctcataatctcatctacactatagatatgctttcaatgacaataaaaatccggcattttacaagtaccgtagattatagttttgattcccaattgaaattccttatactatatttcttaaagtttttatttttttcccctaatattttcctatatgaaagtatcttagataaatatatatacaaacttctctatataaagaagttcaatgaatctctcatctcactcaatccaaactcaatccacaacgctacacattaaaaaataaaaaaaacctatggcaaccatttccttctctcacaaccaccaatcctccgacaaccgccgtgtggatcccatcaccaccgtcacggccccgtcgtggaagagatcgaaggactcatcaaagttttcaacgacggctgcgtcgaaagacctcccatagttcccatcgtctcaccaaccattcacccatcttctaaagccacagcctttgacatcaaactatccaacgacacatggacacgtgtctacatccccgatgccgcagcagcctcgccgtccgttactctccctctcctcgtgtacttccacggcggtggtttctgcgttggctccgccgcttggagttgctaccatgacttcttgaccagccttgccgttaaagcccgttgcgtcatcgtttccgtaaactaccgtttagcccctgaacaccgtctcccggcggcgtacgacgacggcgttaacgtcgtctcgtggctaatcaagcaacacatatctaccggtggtggatatccttcttgggtgagtaaatgtaacctctcaaacgttttcttggccggagatagcgccggagccaacatagcttaccaagtcgccgtaagaatcatggccagtgggaaatacgcaaaca

SEQ ID NO: 4915 - DNA, 492 bp, Arabidopsis thaliana landsberg
aatctctcgggttgatgctatcactgctaatttctctgtctgttgagaagatccagatagaaggatggcggggtcatcacgctcttctttgccaagatccacccaacgcaaaggttgtttcccattctcgcttaacgactctagcagagtagattccacttgataaatctggatttcaatagcggtaacaaactggttatgcctagataaagtagtgtcatgtccacaatttacatggcttaagctcactgccctctcaaactcttacaactgattcaagtcacaacaatgtaaccaatatcactaacacactgatgagttaccatgaaaaaaaaagggaacgatcaaaggaccattgattgtttcatacctgccatttagcagtgctcaaagcagctaggagttctttgcagagctcgtatgattctacggatactcgaccgactctcttctctttaaaccacatcctatacgcagattccattctggaaa

SEQ ID NO: 4916 - DNA, 755 bp, Arabidopsis thaliana landsberg
aggtgataggtactcttccaatttcatgttcttttggattttttactaataaaagttacattttaaaaggtcaaagtaaaactcagtaaacattacaaaagtgttaaagaaattgatgctcatatagtcatatagtcatctgttttcatgacaaattataacacaatcgtcttatattaaatcttcacccaaaagaagaaaaaatttagtcaccttctagattctattgatctctccatatagaatcaagattcatagcataaaagtataaacatgctcttaacggtctatttttttatgtgtcagcagaagtggaacactctggtttgctgagttcatcacccaacatgtgattatatataatttctatcataaccttgttctttggataagataatttctttcaaaattttaaagtattgtaaccttgtttttatttgtttttgtcatggttactctagattagttaatgtttttgtaatacctccacttcattttaatgatatttacaagtttaacaaaaaaaataaaaaaaatcaggccgttacccataaataaaccaaaatataatttagactacatacattatttgtagggatgttaaagatgggtaaaagtccagtggatacccgaaacttgcttaaaatttaaagcccaaaaattcatgttttgtgttaaaattaaagtaggcttaaaacgggcgggttttatttacgtagggttttatgtagattttactgttgggtttttttttc

SEQ ID NO: 4917 - DNA, 726 bp, Arabidopsis thaliana landsberg
atttgcgaccaccacttcttattctttcctttttgttgttatgtccaaactgatttaagagtatccacattggttatttttatgagtgtttttagatggctatttttaaatataaaagagtaaaacaaataaaaaatatgagggtcattaaaatgaaaattatatcttcctaaaacatttaagacatctatacctttaatattattttatatgaaatacatctatgaaaaattattcgatgaggatggtctaatgagtcggagagtctcagaccaacatctatctataactattttttttttcactggaaatatagatttcattgatagaagatctgagtacaagagctgacaagagaaacactcttctaaaagccggagagtacatgggaccttccaggaactaaaaacatatttaaatgaaacaaaggggaaaaaaaccgatctaacaaattacatcacatctgatcaagtacttcccagacccaaaatccaagagttcaaacgaaatatacaaagtctaaaacaacaatgataaaatgatagatctgagactagaagcctcacttaactcaacctaaacacgaatgggcgatgagataaaaccatcatccagagacccaaaggagtgagagcctcatgaaggagagaacgagatcgggatcttcaggtggaatttcagaagtctgaggcgaaaatttggatagaaacgcttctgccttggatg

SEQ ID NO: 4918 - DNA, 2249 bp, Arabidopsis thaliana landsberg
agggggtaggaatgtttcctatgaccccaatactatacattatttggaatgatcaattacaaaggttagaaaaatgccaagggtgtcgatccagtatgcgagttcccctttgtttactctctataaaaaataagtctgggagagaaagaacaccaaagaaaaaaaaaatattagagaatggtcgattgtttgatgagtctagaaggatcttgaatgttagcttgttttataagacctagcgatgaaagcctggtggatatagttgtggaacttcggtatggaatctagaatgttatgtaagcttgcagagaagtacatgttgcttaggatttgattagacttgctagccatatggatttagttagaattatcatggcaataggctagagaatgttgggagttgctttgttttcaaacctcttcacgggttcggcttttgtgttttgcttgagggcaagcaaaaagctaagtctgggggagttgatatatccctattttcactgattttatctatgttttaggtatcggagtttgagtctttatgttatttctcaagtctttttagtatcttttcatgtattctatgcaatgggataacaatggagatgaggagacattttggagcaaacgctaaggaaaagaaacctaaggacgattttcaattccagaataagaggagtgtcgattgacacactcttggtgtcgatcgtcaccagttttggcctaacgaagtctatgacgctttcaagttacataaaaaaaaatttgccctagaagacttccatatttgcattattagtccgtagacgttttatagggttttatatacattgtttagacctaagtttctattcttcatagattcattcagttcttcatagattcattcagttcttaatacagtgaagagatcccttctttcccttatcttatttgttgtgtttatgctttcagatactcaattatgttgtttgcttcaatcaatatggctgagtagtctgcttgttagggatagggtttctcattagggattcatatggtttagtagattgccccttttgctaggttatgtatagaattcttcatctttgattatgcttaatggtagatctagagtaattaactagatcttgaatccagacaatagatatgcccaccataggtatctgtaggtggatctaatatttgatgagcctggtttataggtgtgtaataagaatcggcctatttactaaaatgaacaattgtactcgtttagattgcatatttaggttaataatctctcggcttctccggttattcttagctttaggcgtagagagttttgcggaacaccaccggttattccataattagagttcgagtttaaaaatggtccgataacaaactagctttcattagatctactaaccaatagtttcctgagaataccctgttccaagctcttcatttaatctgtcttttgctgctttttactttgctttcttatcatttcaatcataccctgctatcataattttgaaattgaactcattgtttgaacaaaagaattttgtggaattcgatccttaaatactgcaactgatctcttatttgagagagtagttcttagggtaatttgaacgttatcagcaaccaacagagaattaacaacttaatcaaaaacgctctcaaaacagatggtcattcacaaacacaaccggttactaagctcaatcaccaactcaaaatgatatgcatacaaacacaaccggttactaagctcaatcaccaactcaaaatgatatctattaaaacacaaccggttactaagctcaatcaccaactcaaaatgatatctaaaaaaggtaaaaagatagagattaccagagagtctcgaccccagggataggcttttcagacagaagtggaagatgttgtcgacctggaagggctagtaaagaatccaacagatcttgatagtcgacattagggttatcttcttcgggggaattagggtcttcttcttcttcctcttcttcttccccatcttcttccccatcttcttcccaatcttctaccccatcttcctcttcatgattattagggttttgttgctccgtttgacgaggctgttgttgaagacccaaagattgatgttgacgagaaggagccttttgttgacaagtaggaggctgttgttgactcgtaggagcctgacgttgacgagtaggaggcagattgcgatgaacgggaggcggttcgccccg

SEQ ID NO: 4919 - DNA, 455 bp, Arabidopsis thaliana landsberg
  unsure (1)..(455): unsure at all n locations
nnnnnnnnnnnnnnnnnnnnnnnnnnnnnnnnnnnnnnnnnnnnnnnnnnnnnnnnnnnnnnnnnnnnnnnnnnnnnnnnnnnnnnnnnnnnnnnnnnnnnnnnnnnnnnnnnnnnnnnnnnnnnnnnnnnnnnnnnnnnnnnnnnnnnnnnnnnnnnnnnnnnnnnnnnnnnnnnnnnnnnnnnnnnnnnnnnnnnnnnnnnnnnnnnnnnnnnnnnnnnnnnnnnnnnnnnnnnnnnnnnnnnnnnnnnnnnnnnnnnnnnnnnnnnnnnnnnnnnnnnnnnnnnnnnnnnnnnnnnnnnnnnnnnnnnnnnnnnnnnnnnnnnnnnnnaattgcttaagggtcgaattccacaaagttctttggttcacacaataagctaaagtatcaagattaagctaaatgagtataaggaaataaaaagaaagtaactaagcaaatagcagtttggttt

SEQ ID NO: 4920 - DNA, 2535 bp, Arabidopsis thaliana landsberg
cttcctggctacaactatctttacccgatcgacattgttcttttaaccatttagagacttccttgtcaaattatatctatcgcttcttagtctaatttcggccaagagtcatcattcatcatagctaaatcgagtatcgcactcgtaaaaaaagttacaagtttttccaaatatattattcatcgtttatagttaatgtggtagatccacattggcgtagtttatcttccccaactcgactttttcttcatactaaccctagattcaagctgcataatattcatggacttatatatgtaagcgcatatataggtccttgatgtattcttatttgtggaagtgttatgtggggttagtatctgaagtacatagcatgttcaagatgtcatatgttctgtggatgcaagagaaaagggatcatgacaattatgtaatatcaacattgggtacaatcatcatagaaattcatactgtctatcgtaattcgtaagcgaaatataaaataagatgatatgcagttgatttcttctccattcaagaaacacgttccccttaactcgatcaatatttacataaatctacccaaattatcttccatataaactagtgggggcagagaatgaaccagaccaaaatctaaactattttagttggcaaaaattttggctgtctgaacattctttaactaaattacgccaaaacagataaaaatattaatatgatgacattatgtaccgtaaattgtactgtttgaagaacgtgaaagacagaaaaagctttgttgagaatgaaaacagagcaaagtggctattactgatagtctttttcttcacatgacctggtcggatttgttcctcttttctttttgtttccaatcagtacggtccaattttaaacgactttcgccgaagaagtaaataattgaaacaaaaggagtaaatattaaaatattatagttgagaaaatttatattcacagtaattgattagaaaataactttaaactatagtatatgtgtagttagttaagcgttgttgctatactataaactaaaaatatttaacatgagatagaattacacaaactctaggtaaattacgaacaaataatataaactcaaaaaataacagtcgtttttatatttaaatgtattagagaattcaacatgttatctagaaaacagtatttaattactattgtaaagaatttgatgtccacaatttataaagagttttaaatagtcttagaaatttagaataattgtacgaacatatgacaatcataaatatttaacaaaatgagattaaatattataatctctaatttttattttcttttgctccatccctttataaatcaagattaatgttaattaccaatgcaatggaatatacaagttgattgttagaatattataatttatccaacaataatgatttctccaatttaatggaaatttacaaccaatttgaataacatttacttccatactacgtccttgaacgaatattcgaacccgggacgactcggtagaatgactcacccacctttcacggccatctccgagccaccaccaataaaactcgccgcctcaccaataaagaaatagagaaaaaaagaatccgagtcaaactcagccgcaaaattgtctccaataacattttcggctcgtaaactcgttccgagtcaaaccgagtcagaatcggctctctcattttattgtctatttactctatacgtacgaacgccgtcaagtgacatcaccaaacggctttttcagtaacgccgtgaagtaacggtcgagattcgatccatagatcaggcttgcttctgattcccaccacgtggcaattcttctgaaaatcatcgggacaagtaaaccgtcttgaccgggtcgaatcagaccgggatataaaccgaatcgattcctcgaaaaccgattcttcacaagggataaccaacggaccttggttaacgaaaccaaactcttcctcagcttgaacaagaaggttccttaggacaggatggttcagatacgtcgcgcgcaccacaaatctcctacaactgcttcctacgtagaccgccacgtgccctgacggtacatccgacggtacacaacggctgaaagaagaagacatcctcgcttgatcgcgccaccgtcgaagcatttgccttagcctcacaatgtgacggatcttgctgcatttcccgagacctccagccattttttccggtttagtgatttggttttctttgtgagagaaagaaaatgtcagggggattttgagagttagggagggacgaggtttatatagtaaaaggaataacacaatgccattggttttcgagatatttacgagattacctccgtggtccttactttggctctattcttttccttaatgaaataaagattagtgtaattggttgattattaaatattaaggaaattaatcaatcagttttgtttgaagagaggttggatacaaataatatgatccttaagaggagaatcagagattttagtagttttgt

SEQ ID NO: 4921 - DNA, 1324 bp, Arabidopsis thaliana landsberg
  unsure (1)..(1324): unsure at all n locations
ctccgttcttaaaaacgtctttggacgttctccattttcatctcttccaatcatatccactatctattctttttgtcacctaaatatatagaatcatatatatgcatgtaagatttcattgcattattgatgtgtggtattgtaatgatagttattaaaatattaactattttaaatgaagagacctgttttttgctagggtcatcagaagcaacgaagtagttgccttcactaaaaatggttggatcagcacttcctccgatcgcatacatttgccatttctcgtacctattgtttgctacatgcgcatatcctcttcgcactctgccacgtcatcagtcacatatccatgtcagcattttctaatctagttcaagtaatctagatatcaatatgtatgcatgtacactcacctaggcattctctcaataagacccggtccgaaatggttgaacgcaattgtaactctcatgatcttatcttccacattattgtcattatgtccgagtaacatcaccttcataaaaacataccaaattatcatcaagtattcaaaatactattgtagaagttacatctatgtaaaatataaacttactttatcatgctgcgtgaagtagttattagaaatagtgacagccgtagaagcatgaagtacatcgatcaaaccatcttgacaccgagaaaagaaacaatgatcaatccaaatatgtgacgaatcaaaaatggctattgcatcaccgtccgatcctttccggctaccaacatgggtcgggctgatccgtacccgccccgacttacccggtttacaatcatggatacttatcccatgtataatgacatggctcacatgttggatcgttatgcatggtccataggcaatttccactttagcccctcttccatcaatcgtcttgtagctgttcatgatgagctcgttacgcaacactatgaccatgtcacgtgcaaatgtgatccataatggtttagattggatcactgcgtatctcagtgttccgggtctagggttttcagggtcgtctgatgggtttgtaaccacgtagatcgacccgtattccccccaaccgcagattttccaaaccctaccgcgcaatcggctagtgcacgacggttagacgcccaataaggnnnnnnnnnnnnnnnnnnnnnnntagggtttggtaatagtttgggaatggtataccattactgtaagcagcctctacaacagaagaagagaaagctgcaaagagaagtgaaataattgttaagaanagagaagcgatttgctagangatgtaaggcttgaatctgactatgtgtg

SEQ ID NO: 4922 - DNA, 672 bp, Arabidopsis thaliana landsberg
gatgggtttggtaatagtttgggaatggtataaccattactgtaagcagcctctacaacagaagaagagaaagctgcaaagagaagtgaaataattgttaagaaaagagaagccatttgctagaagatgtaaggcttgaattgaactatgtgtgtgcaaatatatatacacgacaatagatataagctagagaatatacatatcagtatctattattaagtatatatgattttgtgtctatgtgtgaaagatgagaaggtgggacacacggatggcgctgactaatgaaatgaaacttatattatcgaaatacttctttgatcaacgctcttcgcttatttatagatagacgtgggtgcacgagcttgagatgacgatggattaatggttttgactttggattttagtttgtacttgtttaataatctcacaagtttggagtatatataatttagtccttttgtatatataaacatagtgactagtctaagtctatgattcgtgagttcggtacacaaagacactgcattttgacatgcatggtatcggccgacgcatacaacatggtgccaattatcagatttaatttatcggtaaatacttcaacttgtttaacataatgcgctttttatttgaaaaccactgaaaacgagtgatgatatataagaaaac

SEQ ID NO: 4923 - DNA, 3498 bp, Arabidopsis thaliana landsberg
ctggttattttgttactcatagccgaatacgtgatgtgctagcttatcagaataccgaaacaacaaacctcacaaacaagcttgacagggtatatagctattgtttcctttactcatgaacttcagtatacactgacacttaggaagataagaagacataatacatttttcttttgcaggaaattcatgcgttgagagctcaattagaagcttcaaaatacgaagtcatcaaatattgcataggtacacttgtgtcgatttcagcagtgggactcgccgtccttcgtatcatgatttaaagtacgatcccaacactcaacactgctctctgcttacaggcttaaaagccaaattgataacttgtcatttttatttgaatcccatcaatatgccatattatttttttctggcgatcagagaatattattgtttctgtgatctattttgccatcatcctttctaggtgtcagggtttgaaaatttgcaccgagaattatgttaatccaaggattattggtttcttccatttgcattattagttttctagctccttatatgatatgtcaatgactcaatgttacaaattgtcccaactgattttgtttctaagctcaaatattgtcacaacgtatttcattggatcctcctacgactggaatgctcataaggacataggtttggttatgtcttcgtttttttcaaatgagcttatgattataaaaactcaagattaggataattttctcaaaaaaatgcgtatatatatcattcttaagatacaagaaacattagttttgttaacagttaagatatagagtcggatttgatatttttcttctaattgagtgttaacatgaagcctaagttgccattgaataaaatcacacatttccttcttcaacgccaagactctttcttttattttcttccaaatgaatcatcttcttgcagtgtatataaatttgtgggatcaatggtttcttaaaacccccttcacaagaaaagattggtgatcgcaaatcagacatgtcaaacgtgagttttcttgagttgcagtacaagctctccaagaacaagatgttgaggaagccttcaaggatgttctctagagatagacaatcctcagggctatcttcacctggaccaggaggcttctctcagccttctgtgaatgagatgagacgtgttttcagcaggtttgatttggataaagacgggaaaatctctcagactgagtacaaggtggtgctgagagcgctaggacaagagcgggcgatcgaggatgtgcctaagatctttaaggctgtggatctggacggtgatgggtttattgatttcagggagtttattgatgcatacaagagaagtggtgggattaggtcttcggatatacgaaattctttctggacttttgatttgaacggcgatgggaagataagcgcagaggaagtgatgtcggttctgtggaagcttggtgagagatgtagcttagaggactgcaacaggatggttagagctgttgatgcagatggtgatggattggttaatatggaagagttcatcaaaatgatgtcttccaacaatgtctaaccatatctctctctgttgatgtaatcaaagttcattattcatacgatctaatttcaaaacattaagtcacgttcttcgagaatgagaccaataatagtagatataaagcaataaacttgataattcctcatgtaaaagggtctagagcagatgaaacttgttacagcgtagcaaatactattccatttcccaactgctagcaaagttctggcgagagcttagagcgcgctatacatgatgcgaaacaaagtcacagaaaacgccgctctaccagtaatccccgcaagaacatttaccatctttgaagtgatggaaacgtttgttgtctctcacgatcaacaccctaccaatgattttggacatgatcttgataaagttgtgacaatccccacacacacggagattcttgatgattgttagggtcttccttggtggggtgcatatgataccataagcaatcgctaacctctcactgtggtagagtagtgcctgttctttagcctcttgatcgatatcatgaagcacaaaccgtgtgtcaggaacataaaccactcctttctttgcagccatctcctttgcttcatccttgtagaaagtcagatttcgaaactcaaggatcctactcttactagtaaccatatttgtttccttgaatgatttaggtggaggagtaggaattttgttgattacagcctttgaaggatcaacatcaaccatcaattcctccatgtaatcctctaaatcgatatcaccatgtaaccgagcatagttccgcatagcctcccagaaatcagctgtgggttcaaacggaagatcacggatatattgctcagcctcaacaagatgtccacatttcccaagaacacctaaaacacccaaataatgctctgtcttcggactaatcccatgctcgttcttcatcgaatcaaaatgcaaaaacgcttcttctataccaccaacagtagcacaagccaagaagaccgtaaggaaagtctcctcgttcggcttcaacccatgtttcgtcatctcttcgaacaaatgcaacgcatcatctcccattccgttatcactatacgcacacatcatcaaatgccaagaatccatatctttatcaaccatatgatcaaacactctcttagcatcagtaatactactacactctccaaacatactaatcaccatattgttaagtttgggatcacctctaaacttagactgaaggaaatgatcatgtaccttcttagaatgctcaagcgacttcaaattcgcacaagactcaaacaacaaaacgaaacattctctatcaggcatagctcctttatcaagcaattcaatagcatctttatatagcctacgctgacataacctcatcacctcttcaacactaggaggaggagctacctcattcatctgattagggctttgattcgagcttcgtggtggttgcggttgttgctgctgctgcggagtgtagtactgactctgattactttgttgaacattctgattctgataattgttaccaggtccaccgtattgaggcctctgaccaccgtactgaggcctgtgaccaccgtactgaggcctgtgaccaccgtgttgaggattgtgaccaccgtattgagacatttgaccaccttgttgaggattttgaccaccgtatggaggcctttgacccccgtgttgaggattttgaccaccgtattgaggtatttgaccaccgtgttgagtagaccattgattagggctttgtggaactcgttgattagtgttggtctgattctgagagctctgagaatcgaagctttgaggtggatatgggcgttgatgctgagacggtgatccagattgaggattctggtggtaatcgtttgcggcggcggatgtgcttaggtgtttgatcggaat

SEQ ID NO: 4924 - DNA, 679 bp, Arabidopsis thaliana landsberg
ctttcctttgatgcatgtatataaacagagaatttcccttcatggccctgttgaggagtgacaaaattctgaaaacatcagccgaggaatgaagttcaagaacaaactttcaagttctataaggaaaactgacacaatgtctgaagaataaagcagttggttaccaggaaaaatctgtcccaaagcctctcaaaaggcaatgtaccaggagttaaaaacatgaaagcaattttagagttctttctaataacaggaggtgaactcaatatttctctaatgactacacgagctgcaatctcatcatctgaatattccctcagagaaggtggaagccaatcagctaaagccttgcatcctcttgatgaaatcatataacaagcacgtttactatgatgaggatacatgtaagccataataaagaacatggtgatcagtgaaagcaccatgatgatccatactcgtcttcttcctggaggaggagcacggtatcgagctccaggcaaagacacgggaatgtccgctaagttccctatactccatcttttaactgccttcatctcatcaaatcctttattgcttcagagccacaacaacacctcaataatagcaataatctagatgaacaaagctaacttcctctggtcaatcaaaacctggagaagttacagaaatagaaaca

SEQ ID NO: 4925 - DNA, 974 bp, Arabidopsis thaliana landsberg
  unsure (1)..(974): unsure at all n locations
ttacctatcagagagtaatacaaattgctgattttcaggatctctaagagcattggtcaacaaacgtctttcagcgtcaatcattgatattctaccccagaccacctacagaaaaatatatgattcttttaccacaatcatgaaaactataacagaagcaagagaaatttatgatacatcaaccaactagatgtagtcattccaaaccaatagttttttcatgaccgaagagagggatgacatgatatctacaaatatagacatcagacatagaaaaggagacatacctcgtcacttcgaatctcacggttaagaaagtaacaactggtgtgaaccggagtatcctttgatgcatgtatataaacagagaatttcccctcatgaccctgtgcggaggggtaaaagccgaaaacagtcagtgagagaaataagtcaaagaaataatgaaataaacgcagagttgctaaacatattgcaagtgttcatatggcacttgctgcatccaagttggtaaacgattttccagaaaaagtttacaattttgaagagttgtcaatataaaaggccagcctaaacttagaaagagttcactgaacttcctatcattcgtatcttattagcaagaaggaaacctctaacacaattgatgcggggaaaagaagctgggaagagatgaagtatacctggaaaaagaggtcccatagcttttcaaaaggcaatgtaccaggagttaagaacataaatgcaattttagaactcttttttataacacgaggggagctcaaaatttcactaataactacacgagctgcaatctcgtcatccgaatattccctcagtgatggtggaagccaatcagttagccccttgcaccctttagatgaaaacatataacatgccgctttgctgtgatgagggaacatgtaagcaccaattacaaacattgctatcagtgaaagcactgncatgatcca

SEQ ID NO: 4926 - DNA, 1447 bp, Arabidopsis thaliana landsberg
  unsure (1)..(1447): unsure at all n locations
ctgaaagcttccaaattccttattatgctccatagctcccaaacgtgtaagtgtatttgaaacgactcatatcatacgaaaaggactagaaagactgtaaaaaacattctgaaactatgttagaaatctgtaaaagccaagacatatcacctagcaaagagggcgatctactaaaccttatgaatccctaatgagaaaccatattcctcacaagcaaactactcagacatattgaatgaaacaaacaacatcattgagtaagaaagtataaacacagcaaataagataagagtaagaaaggatctcttcactgtattgaaaaaactgaataaatctctgaaaacaatggatgaattgcttatgtctttgaaaatagggattgcaaagatcttgataaaaggaacttaggtctaaaccatgacctctaaaactatatataaaccttataaaatgtccaaggactaataatgcaaatagggaagtcttttggggcaaatttccacttctgtaaacttgcaagcgtcatggacttctggggccaaaaccagggtcgatcgacaccaagattttgtcgtgcgacactgttaactgaattagaacgagaaatcaattcttagttcgcttctccttagtttatgctcacaaatgtttcctcatctacattgttgtccctttccatagaatacctgaaaggactctaaaaaaactctaaaaataacaaaaagactgaaaatcgtagatctaaaacatagttaaaaacagtaaaaatagggttatagcatgcgtcaactattgtgaggctcctgacttcagagagtttgataacacctaatcatgtttggttagaaacttggcatttgcttacagaatatatgttagatatgcaaaaaagaatactagaaagatctggtatgaatgattaaccctttatagaaatgatatgttttattaccatcttttataactaacatattttgtataactcacatgactcatatgagcacatagcagctaaagaatcaagctttgcttgaaattgaaagcttttacggtcaaacggaagtacctttagtaattacaattcactaccatttcccaacttcaaccaacaaattgattactgaagagttgtattacaacatagaaaaatccgctagaaaacatcaaaagttgcttccggatcatataatgtgtaacatatgaacaaaataatgtgtaagatcatataatggcttctgtcaaaactaattttggaggtgtatattttgtttatgggtttggaggtacgngaaagactcttctttgaaaactttgtcgtcttgatctgatcaaaggacaatttgataatgtagctctgtggatgcagtctactatagaagagatgaatgctattacgtttcatccatcattactaaactcactgtcataccatgtatactactgatgt

SEQ ID NO: 4927 - DNA, 1697 bp, Arabidopsis thaliana landsberg
ggtttgggatggagtcacaagaacgaagcttctcaactccaagacaatgatcagtatctcactccctttcttgtcaccagtactcccttatcccaccacagaaaatcaagaagcttggtagatgcagttatcgccgaggttaaccaatcacccaacccttcaaaagcaggaggaggagaagtgaactctactgataagccaatgagaagacgccaaaaatctgaagccgattttagttcacgagctccagaattgctgttgaaggaagagaacagaagcagcagtggcgcgttttctgcaatagctggaaaaaatttagcactgagatccaaagcatcaagcagagctaacttatcagcagaaaccagacatctcaattccataccaatcaatttgatggatgctcctgtgggagacagcttctcaagcgtgaggaaatctgttagcgcatctagtctacaagaaccaaactgtaacagcaacggttcatcgctatggccaacctcaaagtggaccctgaaacctgagttactcacacaagtagccatggctagttctatttttgacggattgcctaagccattaactggtcggagaaacaaaaaggctgtggactaaggttagttaggtacttaggttccgtcggtctcgttatcgactgtccacttttggtttttgtaatccaaaagcaagaagtcgatggcttttataatagattgaggagtaaatagaaagtaaaaagtgtattgctgcatttcattcattcaaaacaataaggcaaaataggttgtgacattgagagtcaaaattaggcattaaggttttgttgaatttaatttgtacgttagatgaataatcgaatatcagaatactgtattcaaagtttcaaagtatttattggttaagtagtttgcaaaataaccaaaaaatacaaaaaacaaaattttgttgtctaactaattttccactccaataaacaattaaaaaaagaataaaaaagagagtaactctttaataaatctgaaatccctaagctcaagacgagttttcatttctcgagcaatttcactcttccgagaacaaccttagattccgatgatgaggggtctcgtttccggcgccaagatgctatcatcaaccccatcgtcgatggcgacaagcatcgccactggtagaagaagctacagtctgattccgatggttattgagcactcatcgcgaggagagagagcttacgacatcttctctcgtttgcttaaggagcgtattatctgcatcaacggtcccattaatgacgacacatctcacgtcgtcgtcgctcagcttctttacctcgagtctgagaatccttcgaagccgatccatatgtatctcaattcccctggcggccatgtcaccgccggtacgcttccgctttccattttctatctttagcttcgtcaaaattcgtactagtgtgattcggaatcagatcgctatatgccactgctttgtcaattacttgatatagttgaaactttgatactgttcgttaatacttgttcttctgtggatttgtaacttgattcctgctactagttttaatgtccacagtctcaagagtgtctggtttgtgacgagttaacactttctgagtctcaaattgtttgttgtgagtctgtgacgcatctttaatctttgtctttgatacaggtctt

SEQ ID NO: 4928 - DNA, 502 bp, Arabidopsis thaliana landsberg
atgaaacccattgttgataaaacttaagatatttgagcttaacactccccaagaagggatcgggagaaattgcggtgactgcgaagcaaatatgcatagagaatctcattccatgtatcaggaactcctggcaaacaccagtggatgcaatctccatagtttttcggatcagctctctgttcctttgtcaagagcttccctctccgttctccatacacagtcgtatgtccatctttcctgtattccgacagttgcgtaatgttcaggaacgtgacattttctccaactctgcttagaacatcaccaacaatcttcatgatttcttgatttgatcctgtaccccaatatgatcttttgtctattggatataactcatcataacaggttccatcgctccctggattccactcccagctccttccaagatcacacaccaaaatcactctccatgtttttggaaattgaatagggttgctctgaaaactatctataatcttttatg

SEQ ID NO: 4929 - DNA, 3982 bp, Arabidopsis thaliana landsberg
ccgttggcctgaatcccaccttcttcattatcttctccctcgtcttcgtatgtatctaaatacacgtcatcttcctctccctgcaacagccaaaagagaacaaggaatatgaaagacatcaaacacaacattcatgatagtgacaattcaaggaaataaagagagacgtataaggcaaaaacatcatacatctgtttcttctgtttcctcgtcagaagaataagccatgtcaagcttgtcgtataatgtttcatctcccttgtcttttacaagttccacttgttcctgaaagaatgaattcagggactcgggttagcaaacattgcagaacaagaaaatgcgttctttgtttgattagtgaatgctacagattagatggaaccatacaatttcagctctcagctgctctgatctcgtctgtatcgcctcaatgtgtttaataagagcctgttgaatgcaaagtatccaaataagaaagcaaaatcagtgttagccggtgaggtttaaacttgattagacgcaggtgttggtcataacaagtagaaatcaatggtaagtttgcagattttgagatcaacacacgttgttgcatatatttttatcacgaacctcgcgtttttgaagctcaagagaacgagccaaagctttcctctttgtcaagaggtttttaggcctcagtgtggtaggacgtttataatcttttcctctatacacgattacggcatagcctttggaaattttgtcaacagaaaccaggatacctccactctcggcttcaagggccattgccactttctgtgcaccctctaaagttttagcctttacaagaatcttgatcagctcccgatatttccagtgcaagtgcatgttctctacagtcccatcaaacacccctcttcgacctggagcaatcaattcaagtttctcagacaagtcaatatcccagagaacacaggtcaaacatacttaactacatcagcccacatattgataataaaatggtttaccaagaagtaagaaagctttcatcttcaatccgagcttttggaacataaatctctcttcttctgttatgccctcaaggtctgttctctgctctgctggcttcagagattcctccaccttagctaaagcccgttcagctttcagcagctttttctcagcctagaaaagtttattgaaaagtactaatccgtttaattccaggagcaatctcttaactcaatatgtgaaatataatttgacaggtaggaagtatagggtcaagtcaggaactcacgaaagcaagtttcctttccaacttcctgacaagttttgcagatctcactttctcaacctcttgtttcatttcctccacatgatcatcgttatccagattttttccccatttaccagttgcatcaagagtttctccaagagtaccggcagaaacaaggttttgattagctttagtacttggtaaaaccagagctgatggacgtgcctgttcctctttgtcttgcaaagtccttgcaagttgttgattagcctttatacttgggacaaccagagccgatgatgctcttagacgtgcttgttcctcttcgtcttgcaaagtccttacaagcatctccttctccattaatgcttcacctacttctagtgacaaaaaactctttcctctgtagaaaaccaataaatccttgttcctcgaaagcagcatacctcccgtcaatctctgcagtcacttaccaagatcatgacatcaaacattcagcatcaaatatagacaccttatcatttattctaatgatatctacatttatataaaaacaattaaatgttactcggctgtgaaaccttattaccttgatgtcttcagccattctctcactggtcgtcagttgtacaccacgtttaagggcaaccttggcaatcaaactcttttgccataacttaaccatggctgttgccaacccttgcagctgtctacttcgacctgtacatcaaaagaaaatctcgctattcaaaaaccttattgggctctacaaaaagtcgtaaaggaaatccaatacctaaagcaaagtggggaggaagaactgtagcaattcttcttaaagaggttgcctcctttgttcccagagttgatctcactccataaggaagtgccctaaaaggaggttcgtaaccaggaacaatccctggaagcaaatcagcatcaacaggtaacggataacctccctgccagtccgtgtaccgaggaccaagaccctctaacagttcatttatttcatcttcatattctacttcttgtggagatgtcctgtctttatttcccacaacagttggctccttctctagctgaggaagattcactagttgaacactttgatccactgtacttgtaggtaaagaagatggcaatctctctgctcttctgtatacttgcttgttcatgttccctgatccatccctgttgctgccacctttgtaattgtacaaggcgatggaagtccctgacctccaaatcaccaaaccaccagtttttctctgtcacagtgaagatataattagtattacacttgacacactagaaacaaagaactttcaattctttgacttatatcatttcaaagctccaaagattaagcctttgtaaataaaaacactgattgggggatcataagaagtaaaacctctaatatctcatgcatccttctcatgttgagtgcacttgatccttcaatcttaagtctcacaatctctgaccccttccacttctcctggattgcatcaaccacagcctgagtaacacctgcacccgtaactctcatcttactctttgttcgaaacatcacattcctcaaccgattcaattcaaattccgaaagagtcatctccgccagcgagtatctactctccttcttagctgtccactctccatttaccaactccttcttctccatagaactcaccttttcccaaggaaacttaacttcatcattccctccatatacaccaaatggtgattcctccgagaatccacctcttctttcttccacatagaacctttcctccaccgaactcttctcaattcttctctcttgttcaacttccttatcctgaaactgatcttcatccacaaatccatacttttttaacttctctacaatcttctccattgtactactactcccactaccaccaccaacatcaccacttcgactactgttctcaccacttataacccctaaatccgaaaatctctcgtcttttcgacgattcaacactacctttgaaggtctaaactgattctgcttctgtgttctattccaattctcattcctactgctactactactgctactaccttcacacgataatcgtttaacatttttcataaaagagaaaccgaatctataggacctgagtgaaattgatgaacttgtaccatggaacttgcagaaagaacttcccagagaatcgacaaacttcgccgaagtagtcgtcgtcgtcgtcattgggcaaaaatggtgacttgaattaatcgccatttccgacagaaaatactctcaattgggtactctcaacaaaaaaatttgacctttgattccttcagctacgcaaacgaagctcctgactctgttatccatggcgggggaaagaataagatgttcgagatgattagagggttgtttggatacgtggtttatcgtaactaggaccaccacaaagagcgtattatagagaaacataacttattatcgctaaaatgcacttatagtgcgcatcttgtcagaaataaaacgatttcaataacacacgccttgtgacgggatccaaattttttcagtcaaaagcagttacttatgcagagaagggaagagagagtagaaaatagatatcttttgcgtgagcctctctttgcccgtacgattcttcgggctctatgagatatcgaattttcttctcaaggttagatttttcgctttctactaaaatt

SEQ ID NO: 4930 - DNA, 1663 bp, Arabidopsis thaliana landsberg
aatctcagaagaaaacattttactgtttcatgttttttgttctcaaggagacagaggttcgtgcgttaaaaaaaaggctaattgaaaacgcagttgcaaataaaggagaaacatacatatatcacgtacacaaaccattactctactaatccagaagctgaaatgtttatccaaagcctaaatcaatctctcccttcttcttcatttgttccatccctcacattcctacaacataagtaagtccgatggatcagatgtaccacaacttgcattgttttcatttcaatgtgggattcaatgagccttccttgaaagcttacctccaagacgatgttaagttccgagttttcctatcaagctgaagattctccagcgccgctgaagctctagttacctcttcatgtgcatcttgattaccttgtctccagttgaattcatcttttctgtacccagatgtggacaatccggctcttctatctgtaacatcttgtcatatttatttggcatcaaaaaatcatgaagcatacgtatttcaaccaatacttcaagaaactagggaaatgatgactcacccgatgcttgagatgcagaaaccggcctgcccatttatttgaaggtgagtaaagcaatcatgtgaaagagtaaggatctttgatttggcataataacaaagagttgaagatatgtgtaccttcgttgaggaggtaagctatcagaagcagatgatctgcgagggggatttctggactcaaggcttgatgacgactctgtttctgaatctctccttgaactattacccatgccctgcgtcatgctctgaagaaaaaaattcattacaaaaaatgatgatcactacatctgaggtgcatacagcaaaaaccagatgataatggtttaactatgaaaggatggaaacatgattcttagatgtgaagagaatttgaggcttggaaatttgctattctcaaatctctgaagaactctaatctctactaagagactttatttttcttggaaaactgaattttactatctataacttcttctcttggttgcgaggacagagtaccaagattttatgtaagttggtgtttgtaaagcttgagtgtaaacaactagtattgatcatcttcacttacagaacaggaactgtaaacactacaactcatagatcacacatactacaggtggactattgtaatttgtttagagtatggttgtaaagattgtaaactaagagaaaaagttaaagatagtaaagttcagttttcaacttggctgcaaacatcttcacaggggaaaaagacgaaagaaatacctcaaacttcaagaacccttcaagaacatcgagaaggagtggtccactatctccatttctattgagctcaaaaccattgttgctattaaagtcgcgtaactcagacttccacgaatcttttggctttgaatagattttgcaggagatcaccagattagtgagaaaaattcatctacaatcatcttaatgaaatacagcaaaagaaaaagggattatctgaattaccaaattgctttcaggttgataaactatgagcgtgtgattaagttgtgcccagtccaagtattcacaaatcaacgcagatagtaaccttcctgcatttcaacaaaattttcgaaccaagag

SEQ ID NO: 4931 - DNA, 1895 bp, Arabidopsis thaliana landsberg
tctccctgtggacatcatttttttcttctcatcatttgttggactttggagaagagttaaagagaaatggtctttgatatatccttaaaaattccgcaatagcaagagttgactagttaatgcgtttctttcgggggacgataaaagaagacaaacattgtgttttcctctgccattttttttttgtcttgtattcagaataaaataaaataaatgttaaatagtatatgctatgttaatattcccacttaatatgtctttttatgttatttgacttatttccaagttttttttcttctgtgttatttgacttaaaaaccttagccatataatagaatatgattagaggaattgaataattgataaccaccattaccatacattattgtattagctcatgaagaaccaccactttgcttctttctggatattgttgttaaagtcaatgcctttttcttcaacagtgtctaaagaagaagagagagaagccattgtagtagtaaatgaaatgagagattggtggtgaaaggggtcacctttgcttttttattcaaagacacttcctttaataaaattgattaaattgattgctcttatacataacttaagagagtggtttcttaatttctatgcaaaattttgggatctgttttctttttttcccttttgctttatttctttattaatttattttatttttcctttctctcctgagagagactctagactggtcctagggtttgagctccttttgactcttcttggattccttcttccttgtgtgtttttcttctttctcgtacttttgtttgttgaatttctgctccttttactttcttctccttcttcttccgtcaatttcgtttcttcactctcttgcctaaagctctaaactttttttttgttttctctcaaagtttccatttttgagctctctcttctttgatctgcttcaagttcttccctagttcgttacttctagggttttataatgagcttaaaaacaaacccttttcgccgaatctcctaaatctttggttttttttgaaatgcatttttctctgtggaagcaaattcatcactgtgcttctctgatcttagacaagagtaagagcagcaggagaagaagagatgggtctgattcgtctctcaatgtcaagaaaaaagctgcactgattcggaaattgtatgaagataagctcagggaagctttagaagaagcttctgagaatggctcactcttcaaatcccaagacattgaccaagataatggagatggaagcttgggtcgttccagatccttagctagacttcacgcgcagcgtgagtttctacgcgccactgctttagcagctgaacgtattatcgaatcagaagactcaattcctgagctccgtgaagctttgaccaagtttctgagcatgtacccaaagtatcaagcttctgagaagattgatcagttaagatctgatgagtatagtcacttatcatcatcagcttctaaggtatgtcttgattactgtggatttggtctcttctcttatgttcagactctgcactattgggatacttgtacgtttagtctctctgagataactgccaatttgagtaaccatgcgctttacggtggagctgagagtggaactgtggaacatgatattaaaactaggattatggactatttgaacatccctgagaatgagtatggtcttgttttcacagttagtagaggctctgcttttagattgttagcggaatcttatccttttcagtcgaataagcggcttttgacaatgtttgatcacgagagccagtctgtgaattggatggcgcagacagcgagggagaaaggcgcaaaggcttataatgcttggtttaaatgggcgggcgttgtt

SEQ ID NO: 4932 - DNA, 1432 bp, Arabidopsis thaliana landsberg
  unsure (1)..(1432): unsure at all n locations
tatgacttcttcacccacttcatgtgatactgacatatcagcagcatcgaaagagagaacatgcctcccaccgttgctgccattattagcctttgaagctggtttagtcgagcttcttcgtttgtggttttttggaaccagtaacggagctcttttgcttgttcagatgacctgcattatcagaatcagcaggactctgacccaaatcaatccagagggagctatctgatgactcgtcttcgctgaaaaccggacttttaatcaattcacccactgagatactctcagcttcctcaaacacagcgcttgtgttatnnnnnnnnnnnnnnnnnnnnnnnnccatatctgtctcaaagacatcctgcacctgagcagaagtatatgcaccggaaaatgcgggtaattgagttcccaaggctttattatctccattaatagcaatgccattatcttgaatcccagtcaaaccttccaagccatccatggagtcacttagatacagaggatactcaggtgttatcttcacaattcccgaactcgttttcccagattgactctgcaagcagctaatcacagatttcttaatcaacagacaaccaaatccagttggatcatacccaaacacacgataaaacgaagtgatgataaaatccggtcgaaacaaagacaatccaagcgagtccatgtcttttggacctaaagcaccggcatcaagcaagacatgccagttgttttgctgagccaatgccatccactggtaagaatacttagaccccgtgacccttgattgtactggaaacacaaacaaaccagttgcagaatccttcttcctcttcttcttactcaaaatctccttcttaagatccattgaacacagcctaagcgtaggccacttaaaccaggcgctaccaacctttgcacctttctccttcgcacactgacccatccaactaaccgattggctctcgtgatcaaacatagtcagaagcttcttgttagtgtggaatggataagactctgcaagcaacttgaacgcagagcctctactaacagtgaacacaagaccatactcattctcagggatgttcaagtagtccattatcctaatcttgatatcatgttcaatagatcctttctcagcaccaccatatatagcatgattgcttagattggcactaatctccgacaaactaaaagtgcaagtgtcccagtaatgaacagtttgaagatacgagaacaacccaaatccacaatagtcaagacatacctttggtaatgataagtggaaatactcatcgtttctcaattcatcaactttctcagaagattgatactttggatacatggtcagaaaaatggtaagtgcttcttcaagctcaggtaaagtttcttctgattcaaatgctctttgagctgcgagtgatgtagcacg

SEQ ID NO: 4933 - DNA, 1447 bp, Arabidopsis thaliana landsberg
ccttggagtccttaagagattttccaattctgtttgattcacggtaattatcctttttttcaagattagacataagttatgtgggggtctcgagggaatcaacaagacatgagatattagaagaagatgtgacccattagggcccaataaccccccccccccctcaactggagcgtggagatcacaaatgcctagtttgacgagaaaatcttgaaatgcttgtcgtcccaatgctttggtcatgatgtctgcaagttgtgtttgtgaggagacgtgtttggtgacaatagtccctctaatgatctcgtccattatgaagtgaatatcacgagcaatatgtttagttttctcatgaaaaactggaattgcggcaagttggattggagaaaagactatcagagtgaagcgtaatggaaaagcagtcaatcccaaaagctcttaacaattcttgcaaccaaagaagttcactaactgtatcagccatatctcgatattccgcttcaactgaaaaccgtgaaacccgatcatgtttctttgttttccaagataacgcagaccctccaagttgaatgaaccatccagttaaagaatgatgtgtcgttggaaagttatcccaatcgaagtaacaccacgcagagagaatcaatttagtgttggagcgtaagaatataccttggctatgattattctttaaataacgaacaacacgaagtgcaacattccaatgtgcaggttgcagtttatgcatgaattgagcaagaacattaacaaaataagagagtttgggacgtgtgacaccgagatagatcagacgtcccaccaagtgacgatagctagacagatcagaaagtggttcatcgtcaacagagaaaagcttgtaattttgctcaagaggaaacgagataggtttaacaccaagaagacaagtctctacaatgatatcaagggcatacttgcgctcgcataaatacatgccttcggaactgcgagcaacttcaatgcctaagaaataacgcaaaacacccagattcttcatcttgaaacaaaaactcaaatattctttaaactgattgataacaccacaagaattgacggagataacatgatcatcaacataaactagaagttgtagttgtgtatcatgtttctgatacatgaataagaagtagttggaaacgttttgctcaaacccatagtcttttaaagctgtagtgagtttatcaaaccagcaatgcggagcctgcttgagaccatatagagacttctccaaacgacataccttgtttttgtcatttgtacaacaacccatcgtaaattgcataaaaacctcttgatcaagatcaccgcgtaaaaatgcgttatgaacgtccatctgatgtatctcctttgtagacccacacaacacctaaagctttcagcaagatgacccaattttttgcagcaggtg

SEQ ID NO: 4934 - DNA, 586 bp, Arabidopsis thaliana landsberg
tcagcaaaacctgtggcaaagagtcacagctgtcctatgtatgatggtaaagatgtcctcttttttgtttgctgagttatgtcagttactcaggagataaactctactccatcacggaatctgaggaactttaataatctccaaattcaagagatacaggaagaaaactgcggtaatattgtgtatcgtgcaggatctggttttggatcaaatggctcaagctccaagatttcttcagatatgaaagataacgcaattagacgagaaacagaaggtgagtttaggttattgggaagaaggggtactggtgggaggcttttgggtttggaagatgaacaaccaagcagaggaacaagggtttcatttaacatggaccgtgtcagtcatagtctggaccaaggtgaagcttctctggccagtgtatatgacgaaagcgatggtgaaaacccgaatgaggatgattgggacagaagggagcctgagattgtttgcagccatatcgatcatgtgaatatgttaggtcttaataaaaccacaagtaggctcagatttctgattaactggctagtgatctctttgctacagc

SEQ ID NO: 4935 - DNA, 5288 bp, Arabidopsis thaliana landsberg
  unsure (1)..(5288): unsure at all n locations
aatccccaaggaaaatgggatatgggatttgactttcgcgccaaagtaattgggccactaaaacttgggcttctgaactaaaaacaggcccataactatttttgtcgattttagaaaacgttaatgatagttaacaccgtttatcatacctttgacaattcagatttccttcttcccaaaacaatggcctcccccaccgttaccgttaccgttaccgttaccgttaccgttaccgtcaccgttcttttgttcacgttggctctctccgtcgcttcttcaacgccgggaaatgacatcatcgacaaaagcctaaccaccacttcatcagccgaacccgatccagattccacaaacccaaccctttccgaatccgatgaggtcacagtgccggtgaatttcgtcaacttccatccgatcaatcgtcatttccctagacgtccgttaacgacgacggctcctttcaaacgccaaccatgccacgagctgttgggacgtggtcttcagatctcttacggcaacgacatgatcttctccagcgaagaagtcaaggcgacaggtacagacgtagatattccggcgattaagatctttgtcggttccttcgcgtcggaggaggaggatcatagctccaagaagattacggtgaatttagtaaagcgtaaagagaatatgttcaggagaaagattcgcaagtttctcaaccatttggtctgaagaacaaaactcgagtttgttgtgttagaatctaaggaacatttagagaagcacattctggtaaataaatatcattatccatatgatgtgaaaatgatgaagatgattttgtctatataacaaattcagtagaatatgatttttgttttgtgaaaccttaagtctataatttgattatattagtagtctatatagattgtctcaagagtcaagtctcaagtgatttgattatgaagatggcaataaaacttacattaatctacatgtagtctcttagctttggagaattaggattggttttcacaggaaccaccttgttgtgtggttgcgcttagttcagggcaaggtgtggggttgaccttgtcagcggctcctacgacatctgagcatttccatattggagacctttttgttccggtcagtgtaacattggagaagcagagattggtgaaaggtgaatcttttaatccctgaaccatgccagcacgctcgactttgatgccccatacgttcttgatcgttatgcctcttactatgggaagagcggatgtgttgaatttatcgtctggatgatctccggtgtcgccagagatcttaatcccggtccggactttttctaggtaaaccccggagattgttatcccctgtatgcttcctcctcggccaatgtttgtcttgatgtggatgccgataccagaattgtagagagtgatgttttcaactgttacattttggattccgccagaagtttcgcttccgatggctattccagcaaatggggaagatccagtgatgcggcggatggtgatgtcacggcttggacggttgtatgcaatgccatactcgtcccaaccgctcttcaccgcaacaaggtcgtcaccagtagatatgtaggagtcttctatacagacgttagagcttgaatctgtggtaattagtaaacacatcagtcatgatttgaaacgtaacaacatgattaagtagaagagagaaactgataaaaaaaacctggatcaattccatcggtgttgtacgaatcagttggagcgaggatagtaacatgatgaacaacaacattactgtaagaaaaaagatagtcaagtactaatgaccaagtgcatattaaagttcatgagagatttgtgaacctgcaataaaccggatgaagtgtccagaaaggggagttctgaagaacaacatgagagacgaggatgtttgttgagttgttgaattcgatgagaccaggtctggtaaactttagagttccatgtctccacatgttccaccaaggttctccttggccatcaatcgtcccatttctgcctagcaaatgcattgacacacaatctgatttagaagattcatttcgacgacatctaagctgacacaaaaaaaaagtaacaacctgtaataacaacgtcgttgagtccgtctccgtgaataaagctgatatatcttcgtccaggacgctcccgtcctcttccataagacggcaaaggatcggtcaaaggccatttctccgtatcctaaagtaatcaaacaatcagaaatcgcaatgtagaaacaaacaattcctaacaatcattgaatcaagttatgtaaattagtaatcattcacctgaacggctttaataacagcaccatcggcgaggtataaagtcaagtgactcgtaagattgaagctttgagtcaaatacacaccacgaggcacataaagaagagttccttcgttactcttattggagtttcgtatccgatcaatagctgaattgaatgctttggtgttcaaggtcttgccgtctccgtcagctccaaaatccgaaattgatagcatctcgtttctgtgtttcattggaactataccagagcatgtaatcggagctcccagtgagagatggtgaggcaaaacagtggagagcaagaagagtacgaaaacagagatcggagcttgagaaatcttcatatctgagacgagagactttggtagagagtgaagaagagagagagagagagagtaaaatctcaannnnnnnnnnnnnnnnnngaattttgattactgtggatctagctagagagaagtaatggcacggacgaagaaagctaaaaagcagggagattgttaacttacgtttttgtccttctcttagcttaaaacggtctgataattaaacttcgaatctaaacaatttaatattttacagcataatcccagtttaactgtaatctaaacaaggccaattaataaatgtgcaagcccataactacagtatggcccattagtttttccccgcgccaaatttgccctagttcctttcttctttcccgctatttccaaaatctcccaaaaggtcaagttccagcaaaatgacacaatctttgtaatcaacattgttctccgtcaagcttctccttcaaaattcgtaagctttctgttctctaactctttttggtttcagtatatgaatcaatccgactttggaatctctacttaaaaataaaaatcgatctttttgctgcccagatagtgaataaccttaaaatcgatgacgagagaggagactgaaaccagtggagaggatatgatgattgatgacccaaaacccaaaatcgaaaacgatttcaatgttcattacctccgaatttactacggcaagttttaatctttatcacatttgggtatatgtctcctcataaatcaaatctgacttttttaactcataaagatatatatgcaggaaatctatttccttacactgatattcacaaatggctttcttatgggcacggtacttgtttgtttacttgtctttctttctttctgtcacactctttaaaggttagaaatggttgtgatgaattgtatatttgtctgtgtttgtaaatctgtagatgggaaacatcctggttgtgatgaatattactttggtagaagagaattctcgtttacgcttgaaaacgatgtttatttgcggtataagtctttcaagaatgcttcacttatggaagctgctatcaaatcgaattttccatacaagattgatattggtgctgtgtatagcgttgatgtaagttgcaaaaatccgtttttcaagctttggtgctggtctatgaaactagatttactcatttgagttttgtaaatgtgttttttcagccggataagagacatgcatatgctcaaagtggaaccaatttgtttactccagtggagagggagttagtctttgatattgtgagttttaatatcttattaagaatttcgtataattggttttgtgtttttgttcttacgtagtttgttttagttgcttgacttgaatatattgtttcctcaggatataacagattatgatgatgttagatactgttgttcgggagccgatgtttgctccaaatgctggcctttaatgacagttgctatcaaagtcattgatacttccttaagaggtatcaaaaatgttttcttaactctcaaatgtatgatacaactagagtttgtagtgttcctgagattttccatccctatgagtttttgtaatatttatagcccctgtaacgtgaatgtcattgtagagttcacttcttgatctagtgtttgtcaatgtgcaagactgcttggtcttatcatagaacaaacttgtagtcactcattctggtcttgtcaattgcagaggattttggtttcaaacacatcctctgggtcttcagtggacgtcgtggagtggactgttgggtttgtgatgctaaagctcgaaggtgaaacaattactaacattgtttttcacttcgcttggtgtatgaatcactttctgcatttcatcttctgttttatgaaatgaaacgttgtgtgattaaatcctgcaggttgactaatgaacaaagatcagcagttgctgaatactttcgtgtttataaggtagtgttctcaagagctcaacgatggtttattttgttggtttctggcattgtgaaattgtctgagttcaattattgcctatgtgacacagggaaatgaaaacaatgcaaaaaaggtcgatctgatgggtcattctcttcatccgtttcttgcgtaagggtttctccatcacctctgcctttctgatttcaaaaacactgtctttgttactaatttcttctgggattttcaggagatcatatgtggactttcttaagagtttctttgagggtgagttacaagcaactcaaagtatattctcaagcaaagaaaagtatgagaagatacttgggatgattacagatgaaggtatgaaagagtgttgatgtatttttccgcctacgtgacgtcctaatctcagtttgtgtcatttacaatgatttgcatcttcatgacagatattcaagcagacctcagaggaaagtgggagaattctgcgagatcatctctatcagaagaagccaccagccttttaaggtgggaacaacttaagaaagctcttcaatcgaagagaaacaaggtgtgtaatgttttaaaggaattcaaacatgtatgttaagtgttgtgaaaaccttatttgtctttcactcagctnttagcttgatgaacttgaatctta

SEQ ID NO: 4936 - DNA, 2929 bp, Arabidopsis thaliana landsberg
  unsure (1)..(2929): unsure at all n locations
tctcagactgtaaagaaccaatttctctctgaggctacttgtgcattcactgtcattgcccatttcaaaatctatccataatattattgcatactcctttactgtcttctcacttttccgtttctaggatcatccttgcaaaatggaacagtttcagctaataaaagcaagttcgacaataagatagaggcgtcatcggcaaaaatgtattttcattattatggacaacttctacatcagcaaaatatgctacaagattatgtgcggacaggtaaaatatctggcctcaatgtgttgtttgtttcaaaactgttccagttttcttgattttaaacgattcaaacccatcatacgaatatcttctgttttcttctcaccgctgtttgtcttggaataactatttatgaacctcattcatgtcttcaggtacgtactatgccgcagtcatggagaatcattcagattttgctggtcgtgttgtggtcgatgtgggtgctgggagtggcattttgtcaatgtttgcggcccaggtatttaatatttaggctataggttacagaactaagactttgcaatggtcaaacaagaagaggttgatagataggcagagctttatctgtaaagctagactatgaataaagaaagcttgtttattgcgaagtcctcaatatagttttacaaatacatctctgactcgaacctctccttgccttaatccaccgaattggtgatccataaatgcaaaaggtagtaatgccaaagtaaatgtgaactactttctagttatgtctcggtgtgagcggctgacatagctatcagatggttatggtacttatgaatttttgcttcatcttcttcatacttatctttattttctgctatattaggctggtgccaaacatgtgtatgcggttgaagcatcagaaatggctgagtatgctcgtaagctgattgctggaaacccattattcgctgaccgaatcacagtaagacttctaattcaatttggtcagtatatagagttgtgttatatgcatttgtctgatgttgttgaagcttgcacaagtgtaggtcatcaagggtaaagttgaggatatcgagttgcctgagaaagcagatattttgatttctgaaccgatgggtatgtatctcagagacgtacttttttttttgtgcgtctttttcctttgaaaattacaaaacttggaatctttagaccagaaaaaaccttggtcagagaaaaatatgcgtaaaaacatcactagtgattgaaagttccattaatcatttgaatgacaagtctttatgttttaaatcaggcaccttattggtcaacgagagaatgttagaatcgtatgtaattgctagggatcgttttatgactccaaaaggcaaaatgtttcccactgtcggaaggtaaaggcaacctttgagagcctttccttatttaatttcttactatgtcttcactctcatgtagttttatcactgtaggattcacatggcacctttttctgatgaattcgtatttattgagatggcaaataaggtacggaatgcaactggttattctaagaattacttcccagaatgttttccaaaatatgctggtttagttcagtttttctatgaagtcttaagcattcaataatatacattcctcctctatgcaggctatgttttggcaacagcagaactattatggagttgatctgacacctctatatggatcagcgcaccaaggttatttttctcaggtatattcacacacaacataatcgaaatatgtattcacacacaacataatcgaaatatgtatttgcaccaactaacatattggttattctcaacataacgggtattgatgaatcattatctatggattttacagcccgtggttgatgcatttgatccgagattattagtggcttctccgatgttccacatgatagatttcactcaaatgaaggtatacatacactagttaagactgttcctcagcgttccattatgtcaagaaatttgatctttcatggtggggtgaatgacttacaatctcattttacccctgaattcgtttccctaggaagaagatttttacgagattgatatcccgttgaagttcactgcttccatgtgcaccagaatgcatggacttgcctgctggtttgacgttctctttgacgggaggtaactcttgctttttattcttcttcattcaaaacttttcatcttcatgtttctctttgcaattgaagatttatatttcaaactcgtttcactctattttcaacagcacggtccaaagatggctcacaactgctcccggtgcacctacaacgcattggtaccaaatcagatgtgttctctcgcagcctatttacgtaatggcaggtcaagagatcactggtagacttcatttgatagcccacagtgctcagagttacaccatagatctaactttatcaggtgcagtttgcttcttctttttttctgtgttttcgtcatttgaaagcaccatgaaccaactttcaacttcttttcctgatctgataacaaaatgggtttttaacagctaaaatgtgggggcccggtgcaagtcaaggcggaattctccaatcatcgacatgcaaattcgatctgaaagaaccttattatagaatgtctcagccacaagcataccctgttgcacaagaaccacctctacaaccacaaccagagctaagtacacaggtaaaaatgcattcagcaactagaataggtatggttgctttctttntatatgtgtaccaatatatatgcatttactcttagcaggacatacaaacaccaaacgatgaattagaagaagagttactgcaacaattgccacagaacccaagtgcccagctcttaaagctaataagtgaaatgaaggtgagagatgata

SEQ ID NO: 4937 - DNA, 1848 bp, Arabidopsis thaliana landsberg
gcgccaaatgattaaacacaacagcaatcatatcctgattgtttaatcaagacaataacaaacgcttacttgctactgactggtggttcctgtgtagggtaaacctgtggctgagacattctataatagggttccttcagatcgagtttgcacgatgatgtctggaggattccaccttgattggcaccgggaccccacattttagctgtgtttaaaaagccaatcagaaaataagtccaaagtagatgatatgattcaaaaggagagatgtcagaaagcaaaattgacctgagagtgttagatttatagtgtaactctgagcactgtgggcaatcaaatgaagtctaccagtgatctcttgccctgccatgacgtgaataggctgcgagagaacacatcttatttggtaccaatgggttgttggtgcaccgggagcagttgtaaaccatctttgcaccgtgctgttggatacaaagcatcaggtttgtatgatatacctttgaggctttgatggtcaaaaaggaatattaatctttagctagcacaggatgaaaacatataaattgttacggcttgatacctcccgtcaaagagaacatcaaaccagcacgcaagtccatgaattctggtacacacagacgcagtgaacttcaacgggatatcaatctcataaaattgttcttcctgtgaaaaaaatttgacagttattgaatttggatcatgccattcactaaacagggacgactgcacatagaaatagcatgacagaaaagtgtcctcaattttaaggaaacaccgtggaaccgaatctaatgtaggaaatagctttaccgtcatcttagtgaaatctatcacatgaaacatcgagggagccaccaataatctcggatcaaatgcatcaaccacgggctacaaaatcagtaaatatgaaaaattgtaaaggatgagacaagcaaagaaatatcagtgattcactggttgtaaatgcatatacctgggaaaaataaccctggtgggctgatacatatagaggtgtcaaatcaactccataatagttctgttgttgccaaaacaaagcctgcatagagaggtagaaaagcctaagttactgaaagcctaaccatcccatacttaattcaaccattttattttatgttacaagcaatctcaaacatatcttcctgataagatgtgcaatatgtaccttatttgccatttcaacaaataagaattcatcggcgaaaggtgccatgtggatcctacagtgacaaagttacatgagaaagaagacatttatgagatagaaaagtaaaactatcgaagatcagctttaccttccaaccgtcggaaacatttttccgtttggagacagaaaacgatccctagcaataacatatgtttccagcatcctctcattgaccaatagggtgcctacagacacaggtatatcagatataagagatattctttcatacataactttgaatcagcaatggtgtttctccatttattttctcacagaccaaaatttgccttctgaaagattctgattttcatgaagagcacgtgaaaagaagaatccgtctctgaaacacgtacccattggttcagagatcaaaacatcggccttctcaggcaactcaatatcctcaatttttcccttgatgacctacaaatacaattgtgtcaagttgaagaacatcagaaaaatggatataaatgaaaaaaattacaaacgaaactggactacaggtcttactgtgatcctctcagcaagcaatgggtttccagcaatcagtttacgggcatattcagccatttctgacgccttcacagcatacacatgct

SEQ ID NO: 4938 - DNA, 490 bp, Arabidopsis thaliana landsberg
cagacgcatcgacgtagtagtagacctttaggcccacaattattataatttatgcataccagggcagcaaagagttgacataatggcactaccagcgcctacatcgacaacaacacggccagaaaaatctgagcggttctccatgactgcagcatgatagtgtacctgaagagagtaatatgccgaaaaagagctatcttgggtcaaattgctgttcgcaacaacaaaaaaaaagtttatccttcctctgaggtaatcaatgcacaaaggccagatcttacccgtcctcacataatcctgtagcatattttgctgatgtaaaagttgtccataataatggaaatacatttgggctgaagcagcctcaatcttatcatcgaacttgcttttattagctgaaacaactgttccgttcggcaaggctgatcctagaaacaaaagaacgaaaaagacatcaaagaatgagtacgatcaagagtcatgaatatct

SEQ ID NO: 4939 - DNA, 2507 bp, Arabidopsis thaliana landsberg
  unsure (1)..(2507): unsure at all n locations
gttgtggttgtgattctttctgctattggggttgcttttaattgaactgttgatgttcataagatgttgggtaagactgctgattatttgaccagaggtggtgagactggaatcttctctccgatgcatatgattctctgtagaaaaccagagaaagcttctgaatgaatgattgagaatcttcttccttgttctcgtttttcttcttctttctttctaagttcatgttttgccccttaagaatctctttgtcgtcgtattaatgttatcactttgttgtttattgtatttttttttttcaatttgatttgtttaaattgatgatggatcactggaaattagtttttcgctcttcttaaatagtttctgaaagaattagccgggaaattctattggagtgatcctttacctttttaaaattttctagagtttacaagtctctgtttagttttaatttctaagatcaaactcggaataaaccggattagcacgtctatagagttgcataaacttttagtatcatcaatgagggtagtttggtaagtccttaggtgtcacattgtgtctgtagtagtgagtcgggagtggtcgtgtgggattttgtgggctgtccgatatgcatatgttattgtcgtcaaccgtctgatatattaatctatgtatcttttaaagatttgattttgatttattttaggcttatggtttgtcgcattgcggtagtgggtagcagcgtggtcgcacgaactccggcttaccttagaaaacgatattttatttagttatttagtttttttttttccaatttgttttgtgcattactaaaaagattgtgtcatttgtgtgtaaaagtttactaaaacactgggtcatttctatagtgggcttttatattgatgggcttaaggccaatttttattggtttacctcacttccagttccaccgggagtggatatatgcttatattcgtacgtgacatcaacaataatacgcgtatacatgtgtaagtcaatggacaatttgggtcgaagctgagaaaattgtccaaactatgacagctgacgcaatcttttgttttcttttggccgatacattttccgcttaccagatggaaaagaaaccacaatgtcgaatttatccaaccggttcaattagtcttacttggatgctggtggaattttccagaatgacaacaacttgaacaaaataaacttcaattgcttttagaaacagcaatctcaccaagttcacatattccttttatattcccacgaaaaaaatctaatcaacagtgaacacaatccacacaagttaaacaagtggacataaaagtcttggacccattttaaaacatctatccacattaaatcattcactgatctttaaccaatcccacacacactaccacaaacaatggccaccgtcgctaacttcttagccaaaccaatcttcaccgcagtcccacggccttgctccggcgatgcttcgacctcctccttcgtattctttaaccataaaactaatcctctgttccggaggaaaaacctaccgaaaagattattctccgccgcgaaaataaaggctggagcggcgtctccgggaaaggtgggtacaccaccggcgaatgacacgaaggtacaaaagattcacagcggagaggaattcgacgtagcgttgaaaaatgcgaagagcaaactcgtggttgcagagtttgctacgagtaagagtgatcagagtaataggatatatccgtttatggtggaactgagcaggacctgtaacgacgtcgttttcttgctcgtcatgggtgatgaatctgacaagaccagagaactctgtcggagagagaagattgagaaagttcctcactttagcttttataagagcatggagaaaatacacgaggaagaaggtaatttccgaattatctctaatttcttttctcattaaaaagagaactcgatttaatctagaaagtaaataaaacatattggaattagactttacttaaccgataatgcccctaatttgttgaacaaatttctctaagtaaggaaacttttaacagaatctctcaaaatcacctagattttagcagatttttggacacacgtttattagctgattacgatgtacgatgattatttctttaggtacataatattgttattttgatgttgtaacactaaccatttaaaagtatatgaagcataataagtcacctagtaaattagtaaagtaatgtagtggcaaagacgtaactaaattgaaaagtttgaccatcgacaggtattgaaccggaccagttaatgggagacgttctatactacggagacaaccactctgcggtggtgcagctgcacggccgacctgacgtggaaaagctgatcgacgagaatcgcactggaggcaagcttgatcgtgcttgacgtttggtctaaaacatttgtggctctttgcgtttaaagtgtattcggaccgtgctgaaactgtcccnggtcaatgtccg

SEQ ID NO: 4940 - DNA, 1457 bp, Arabidopsis thaliana landsberg
  unsure (1)..(1457): unsure at all n locations
gttttcgaattttgctgttgggatcagcgatggacatggggcatcatacttcaacttcaaaacctaagaacaagaacaagcttttgaagatgcttcctaaagcgatgtcgtttggacatcgagttccaccgtttagtcccggaagagatctccaccacaacaaccaccataattacacggcggctaacaaaatgtttttctctggtcctatggttcctttggtacctaacgcggctcgggttagaagaaacannnnnnnnnnnnnnnnnnnnnnnnnnnnnnnncctaaagtctcttgtatcggtcagatcaagcttggtaagtctaaatgcccaaccggtaaaaagaacaaagcaccttcatctctgattcctaaaatctccaaaacgtcaacgtcgtctttaacaaaagaagatgaaaaaggtcgtctttcgaagatcaagagtatcttctcgttctcgccggcgagtggacgaaacacatcaagaaaatcccatcctaccgccgtctccgccgcggatgaacatccagttacggtggtttccaccgcggcggtgccttcgttaggtcagatgaagaaattcgctagcagtcgtgatgctttaggtgattttgattgggcggttgagatgaaacatgaagaagaatcacccgctgatcatcaccgtggttactattctgacgacgacaccagaggagcttacttgagatacgatgatgacgaggatgaagatgacataataatccctttttcagctcctttagggttaaaaccaaagaaagaagttaacttgtggaagagaagaaccatggatccaccaaaaccacttcatcttcaaaccatttgattaaatttctttctttcagtatactatatcaattactgcagttcaaattgtataatgatcatcattcacaatgagtctggattttcttgttttgtgtatatatgtgatatattgtgatgatggatgatgatcgttcacttcaatagtcttttgtgaatatcaattttgctccgtccaaaaaaaaaaaaaaaaaactctttctcgctacatatttacagttacaattacaaattagtttttgtatttccttctgtgacagagagtatgacaacaaccaatgtctttccaccaccaaattgtccatatattaaatgtaaatcacaatcaaccattaatatcacatacaaaatgatgataatgtgtatatatttattgggaataatacaatatcttcattgggtaggtacaaatcattaacatctcattcttccttacggaaatattcaaatccgtcaaagtttccgtgccttcaaagttagaacacaaaagcaaaatcaaataatcaagaatcacactattttgagttttttttctttcatatcaaccggtttcggatggtacagacaaagaccaaaaactcattcttttttgaagtgagatgtaataaaa

SEQ ID NO: 4941 - DNA, 4663 bp, Arabidopsis thaliana landsberg
attgcttaattgattgagacttagctaaccagtttatgtatttaaaagtatgttgatgtaaataaatttagaaaatcagaggttaatcgacaacaaaaccaaaccgcaatcaaaaatttgaaacaattgagaatagataaataatggtgatgataatatcttttatttgaatttaaaattactaagtgaaggcaaattctgaaccaaaataaaaaaaatcagagatttcaatatagactgaatcagtcaagcgacggctaacgccggttttatccggttcgtagggatcatacgaagacaatgacaaaattaaccggagttggagggagggtacatgataccatcttgaccatgacttgtaacgatttcaaaatctccaacttcactagaggagatctgtctttgtagttcaacacaagcacaaaaatctaacctgtgcgttgcctctttatagaatgtggcatatgtaaagcttactccttctcctacatttccatggacgagttttttaaaaagactatgatactcaaaaacactataaaacaaggaaaaaaaaaacagaatgtgagagtcacttactgtgagtgactaacaacagattctcacaaggatacttatcagcaagagtcttgaccaaattaacatatcgattgttgcaactttccaaagtctcttcccattgtggcatctgtatgtatatatacagaacatgtcaaattcttgtacttatagacttgtgttcaaactaaagaatacacgcaaagatttcttagagaccaacctctttgtaaaccgggtctacattatgatccaccattccatcaggaaacatagcttcaagttctgaaatcttgaaatcaaatttgccatcttttggagcaacttcaggcttaatagcgattgagttcagcatctcgctcaagccaaattcaatagaaacctgaagcacacgatcaagcttcttaaatttatttatacagtacgtacactataacactacaaacaacaagtctcttagcataatgtaactagaacattcaaacacgttgtaacgaaaaacaaatgcataggactttcaatgacatagagacaacatgcacgacgactaactgttcttaagatctatgaaaaaatctgaaaatcttccatagtttaacataaacacatatatacgtagatggtcatttgaccttgagcttaggtttgtcgaaggaatcagacgaatttgcgtcggggtcagaaagggcggcgataacttcggaagcggtttggatgcagcggaggaaaggggagacaaagacacggtgaatgggaaaatggatctgagatcggatcatctgaccggttcgaaacgctcgaaacatgccgccttgaataagcggtggatcccaaggccgagcagcagtcgagacccattgtggctcaaacttatcaatgcgatcgccatggcgcatcatgaaaacatgttggtggccatccatgtttgatttagacttcatttcctctgtttcttgctgcttcatggcgtgatgcaagtatagtatattacatgcaattaagaagaccattgactttttattgtattttcatttgttttttactattgtaataaactcgtcaataggcatcagacatgaggaagactacgtatagttcaaagtttttttttgaatactaaagaacaattttttttgtcgtttcagcagtttgctaagactgttctcttgcttatagcaatggtaatttaaatacgttctgacaaattcttgttgaacaacaattttgtgttagaaaaattacaaccctttagctttacatatttttgtaaaatttgtggaagaaaaggaaaataactgaaccattattcttatattttttttttattgaagcaacccgttaaaccagatattcacatataaaccggttaaaggggagattggcggcttacaactacatgatcatggactgggattttggtgtacttataagatactccatgactagtaactacctcaaatttaccaaacccatcaccattcaaaatctgccttctcatttcaacactaccacaataatctaccacgtacttagttgcgtctttgaagtagttgtaaaatgcaacacttactgctccccctgcaatttcccatcccaaaaaaaaaaacgaactacaagattaggaaaacatcaattttggttaaaaactaaaaaagccataactgttttgcttacaatgagtgactaagagcaagttctcagaaggatacttctccgcaagaatcttcactgtcttataatatcgatcctcaaaggcttgtgcagattctccccattctggcacctaaacagtacaaacaaggaatcgagaattatcgaaataaagtttagatatagtcacacaaaacaaaacattaagaacgaagacacgacaaaacaagtcatatagagcacctctttataaaccatatccacattagaatccactgttccttcaggaaacatagcttcaagatctgaaatcttgaaatcaaatttcccatctttgggagcaacttcactcttaataaagattgggtgcggtatctcggacaatccaaattcaatagccacctaaagcagacgagacaagacatatataagcataaaacatctcaaatgcttcaatcaaaatgatcagcatggttataagaacaacataacagaattttgcttagagaatcattaaaaatttccatagtccacaatatatgtgtattttttttataacgtatgtatgacacggaccaacactagcataaaaccactagactacaaaccctggtctcaaaaaatatatagagagatattctgactgaccttgatcttagtattgtcgatggaaagcacgtctttagatgacatagcaatgggatcgaaatcgacggctgagagggcggcaacgacttcggaagcggtctggatgcagcggaggaaaggggagacgaagacacggtgaatcggaaccccaagttgagaccggattctctgaccagttctaaaggcccgatccttaccgtcttgagcaagcggtggatcccacggtctcgcagctgttgaagtccagagtggctcgaaattgtcgagtcgatcaccatgacgcatcaggatgacattttggtggccaccgatgattgatttagccgactccattgcctttctcggtgtgatctttgttactagaagtgggaggtatttatacatatatgcaagcaatgagatgttgagttttgttttttttactataaacttttgaaggaagttaaaattgcatttcttttcctcagtaggaaattgcgaggaagcttatcacacaagaaagtaacaaaattcttttaaaacacgactcatcattgttattactacgaagtttacatctatataaatccaacgtgataagaattaataccaaaaccactcgatatagacgactctctcttcttcttctttcttttaggtcaactagttagtacaaatctctttctacaatatgtaattaatgcatgatacataatacataaaaggaccaatatgtaaaatatactaatgtaaataattaagtactaataagtagtccaaaaatacaaaatggatagaggtccaaacaatcaaaatttgttattaatccgtaattttttggttttactgtgtacggatagtgcatgaagagttggataaaccaagggacaaagcgagtggaggtgatgaattgatgatgaatagagtgacacatcaagcctgtggtccttgtataaagtccaaattataatattgaccgttaaagtccagattatattctttaatttactggatcagagtttgaactttgaacttggaagtggggttaaaataacaatttgtaaaaacgctatcaaatttgcaggtaattatattttcttctgttacatgtttgaccaaattatccgtcttttttgctctatttattaatgaaaattagaatgatttaatttatgaaatttagtaatggaataaataaattatgttgataattctgattttatttttccacctttacaaaaagtcaggctatcccactaatcttattacacaaagtgaatgaattaaacagaaaaaaaaaaatagaggccgtatcaacacctcacatcagtggtaacaaataagacgactggatcagaaaactagtttgattcacattttatactgccgacagttaggacttaagaccgtatctgaagttgaagttgaattcggctcttgaaaccgacgagccagtaatgaagccaaaacttgaagaaacgaatcattcgcagttctgcatcatcacagtacagatagagacatgagaaagtgaaggtttattatacaaagtgagtccattttatctaagtctagacctcgaaatcatagcaacttcagagttcacatcctcactctacaccaaatcaggattttaaaatatgtaaggttaagacgcaaatcattaacattaagataggaactttaaccttaaggaatgatatgtccctaactatcggaaatctaagaacaccaaatattagccacatcacatatcgtccaagcaagcaaatctaaaactcttctttagggaaatcaatttaacatttcattcatgaatctacaatat

SEQ ID NO: 4942 - DNA, 1007 bp, Arabidopsis thaliana landsberg
agcgtgcagtcttgcactctgaatcgtattcagtgaataccaaacaacaatcacttgtgatctagaaaagcaaatacggtcttgacgttgaagtgaaaaaaatacgctagattcagatgtgaagtgtctgcatattctcttacatatttctaccaaaaactgaaagtgtactgtccatatatattgacaatcaactcatctagtttggcctgggaacctctattttatgacctgacctcgactgctgctatactatcacataggccttcaactgtagtgtccctaaactctacgcctacgacccctataagcccattcctaggattctctgatttcaccgagagagtacaaaacgagaaacgcaacactacagtgcgtaaacagcaatcgttacccccaattccactggagacaaggacagagaacaacacaaatggtgaatcttccaatccttcagatgttgttccaaagagcggcttaggttgcacacatctctggctacaaagtcgagttcccttagggtaaacatctgataataatatccaatgagcttctggtatgggtttaccattataaattgataacgatattcctaaatgcatcagatgcgttccttcgaaatctacggcgacgatcaagctagagctactccctttgactgatggcataatcactctggatactcttcagatccatgcaaaggagaaaggttagctaaaaaaatctctagtctctcagcaaagagactataaacactttgctgcgtcttctttctttccgtgaaaacatcagtggttccatatgaagaatgcaaatctcgaagctttaatatgttttggagtgaatcataatcataaaatgttagatgctcgtgtttaatgactgaaacaccaatgaacttgtgtgtgtgacaggtcgtagatacattccagagcagtcactgaagataaacgcaacttcaagcatttcctctgggattttctagtcttttacccaatgccactttt

SEQ ID NO: 4943 - DNA, 3088 bp, Arabidopsis thaliana landsberg
taccaaatgctaactaaactacgtacatttaattttcgaaggagagtgatttcgtgaagcaacactatttccaaattgatgcaaacatatgatatgtgacttaaaatgtatacgcgtaagtaatgcatgaatcaagagacatgatcatgtagattaatttcctaaagatgttgctttcattctttttgtggttacttcaatactatgatcactttggattctcttaattttaagcaacattattgcttgctggtattcaattattggcgttctaatatgaggcttatgaattgactcttccattattaggcgaaaatatcattatggagagtacattaatgtttttgttaacgaataaactataattatacgtttataaatgggttcattgcacatttgaataattgaaaatataattttgtttcgcaaattaacgaatgagcatcacacacatccatgcatgattcgacacctacctaatcagtttactactgatcaatgaatcatttggtggaatattatcccgttcattgtgctgaaattgaagtgtgcatagacaacagaaaataacaataatgctccattgccagatgatgtgtcactatctaactggttagtgaaaccaatggaacagggtgcccctacttgtgtgatatgtggatgactggattgcttctaaagcttaacaacctccactagagactttcttgagcaaaaaagattggttataaaggaccaaccattgtcatgttattgagtgtcatttttgtgagggagagaaataagagagcaaaatgagcataaataggaatctgttgaatatcataataatcctttgtatatgtctcaatttgggttgtaacgagggagctcaagaaagagagactgattggcatactatccaagtcagctctctcctcccttcatcatcatcatcttgtgttctttctcccagaggtgatgatttcttagccaattcattttctgatatgattcattgtcttttagctttatagacaaggtagatgaatagagactctcaattaggaaacttaggttataaatcttgcttccaagtagttgatactattaccatcacagattcacaggactaagaaagcgatagtaaatatgtctttagtagtatatgttgaatgggggaaacgacaataattagtagttgtaatcaaaattttgttagctagttgagtgagttaacaaaaattgcaacaatttatactcttttgtgagttaattatataagtacaactctgtatgactccacataagttgaaaattttctttatcatttccttagatagtaatacatcaacgaccacaaaatataaggttttggtttttttttggtgataacttaaagaatctgtgggcagtgggcatattcgttttctttctaacgcgaactttttatctcattcctattcagcgtctactacaaagtcttcactgcacgtgacgcatagacacggcacgtgttcgcgtctaaacaatggcaaggccacgagtccagaccatgtcgagatcctaagactcgaccaggctcgcgtaaactcaatccactcaaaactatcgaagaaactcgcaacagatcacgtcagtgaaagcaagtcaacggatctaccggctaaagacggaagcacactcggttcaggtaactacatcgtgacggtcggcctcgggacaccaaagaacgatctatcactaatcttcgacactggaagcgatttaacgtggactcagtgtcagccatgtgttcgaacttgctatgaccagaaggaaccaatctttaacccttctaagtctacttcttactacaacgtatcctgctcatcggctgcgtgtggttctctctcttctgctacaggttcaatttcagtttttgtagttccggttattacaaccattataaccgtatccggttttgttaaccggtttttaatttttaattaggaaacgccggaagctgttcggcttcgaattgcatctacggtattcaatacggcgatcaatcgttctccgtcggatttctcgccaaggagaagtttacactaacgaactccgacgtatttgacggcgtttatttcggttgcggcgagaacaaccaaggacttttcaccggtgtcgccggacttctcggtcttggtcgtgacaagctttcgtttccgtcgcagacggcaacggcttacaataagatcttctcttactgcctcccttcctccgctagctacaccggacatctcacattcggatccgccggaatctccagatccgttaaattcacaccaatttcaaccatcactgatggaacttccttctacggccttaatatcgtcgcaatcaccgtcggcggtcagaaattgccgattccttcaactgtattctctactccgggagctttaatcgattccggcaccgttatcactcgtctcccgccgaaagcctacgcggcgttacgaagctcgttcaaggcgaagatgtcaaagtatccgaccacgtcgggcgtctcgatcttggacacgtgtttcgatctcagcgggtttaagacggtgactatcccgaaagtgggcgttctctttcagcggtggcgccgtcgtggagcttggttcgaaagggatattttacgtgtttaagatatcgcaggtttgtttggcgtttgcagggaatagcgatgacagtaacgctgccatctttggaaacgttcagcagcaaacgctagaagttgtgtatgatggtgcgggtgggcgggtcgggtttgctccaaacgggtgtagttaagttagttaatgaaaaacagatcggggaaaattttaaatttatggatttggcacaaattagctttatccttaatcaagtgtgtaatttgggtaaagatcggaattcgtgatggtctttgaagtaattgtatagtaataagtttgtgtggatgatacaacaattacaagaacaaactgtttattgtaaaattttattccaatacaactatacaagatgaaaaaaatacagagtgtgttggtaaaaagccccataagagcccacgcaaagactagctggtttcaatcaccctatt

SEQ ID NO: 4944 - DNA, 2393 bp, Arabidopsis thaliana landsberg
tccgcttaagcatgcaaaaaatatatataatttttgcttttgtgttagcaatcgaagtgcgtcgacttataggtatgcatactttgcaacagactagttcaccaactcaagacaaactgcttttccaaacttcagaaccatcgatgctactataaggaacaaagcctcagattacaggcacaacaggccagatttagcttcgaacctgcggcaaaactagttccgtggcacttaaaaatggagttactttcctctactattcaatcaaacttcttcgtttgatgcactaatcgttaagcgagttcacaaatccgcttctacctttttttttttttttttttgatctctttttgtaaagcctaaatcaggaacaatgtatatccatttaatctctaatgaaatgacgctacaaaataaaataaaattagttcactgctcaatcaatcgcgcttagactttagtggaatattacaacccattgagtacgctagacttggagactggagactggagtgaagacaaaaagaacagaatgacatcaacatctagctgacgattaaacgccaaatttggagcctagaggaccaaattacacgttaacaataatatctagaggaaaatgttacaacccctttagtacgcgggacatggagacttgagacttggagtcagtcgtctcgagagacagaaatatcaaacacaaacaggttggagtccctacttaataatgtgaatgtatgtatgatatcttagactttaacaacagcccctagacacttatctacagcaaagagaatggttataaaaggaccaaccaaattcatgtaattgagtaacacttttcttgttgtgagagtaagagagaggttaaaatgagcataatgaggaatttcttgagtatgataattatgctttgcgtatgtctcaattggtgttttgctgaaggagctgagaaaagcgagagtggaaaggtacttgattcttacaccattcaagtcagctctctgttcccttcatcatcatcttgtgtcccttcttcaaaaggtgattatcttagcctatttactcaccgatgattcattgtgtttagagttctttttttgggtctcttttgttatattttaacatgctattttcttcacagcatctaataccaagtcgtcgctgcgcgtggtgcacatgcatggtgcgtgctcgcatcttagcagcgatgcgagagtcgaccatgacgaaatcatcagacgcgatcaagcacgtgtggagtccatctactcaaaattgtcaaagaatagcgcaaatgaagtcagcgaagccaagtcaacggagctaccggctaaaagtggaatcacactcggatcaggaaactacatcgtaacaatcggaatcgggacaccgaagcacgatctatcgctggtcttcgacaccggaagtgacctgacatggactcaatgtgagccatgtctaggaagttgctattcacaaaaggaaccaaaatttaacccttcttcgtcttctacttaccaaaacgtctcgtgctcatctccaatgtgtgaagacgctgagagttgttcggcttccaactgcgtatacagtatcggttacggcgataagtcgtttacccaaggatttcttgcaaaggagaaatttaccctaacgaactctgatgttttggaggatgtttactttggttgcggtgaaaacaaccaaggacttttcgacggtgttgctgggcttctcggccttggccctggcaaactctcactaccggcgcaaacaacaacgacctacaacaatatcttctcctactgtctaccttctttcacaagtaacagtactggccatcttacctttggatccgctggaatctctgaatccgttaaattcacaccgatttcttccttcccaagcgcattcaattatggcatcgatatcataggtatcagtgtaaggcgacaaggaattagcgattactccaaactcattctcgaccgaaggtgctataatcgactcaggcacagtgtttactcgcctccctaccaaagtctacgcggaactccgcagtgtttttaaggaaaagatgtcgagttacaagagtacgtcgggatacgggctttttgacacatgttacgatttcactggcttggatacggtgacatacccgacgattgcattctccttcgccggtggcactgtcgtagaacttgatggatcagggatttcgttgccgatcaagatatcacaggtttgtttggcgtttgcagggaatgatgaccttcccgccatctttggaaacgttcagcagacgacgctagatgttgtgtacgacgtggctggtggacgagtagattttgctcccaatggttgttaattagctacttgaacaaaaagaagag

SEQ ID NO: 4945 - DNA, 348 bp, Arabidopsis thaliana landsberg
ctggttgaaaagattgctccaccttcaaccgctttaatgaaggttgcaaattatctaaagtatcagcacaacgaggggtaccagaaaccgctccagcattagcgcttagtgaatcatttgatactacagatctattcactgagcccacagcactgctttcgttttttaaacgggccagggcacgaacattagcttgttgctgataagtcttcactggcacacagacagggcaccgaggatccttgcagtttttatagtggccaatcaatgcctttgtgtgacgacagcggggatacaaacactgaggatcagcacaattgtccatgtgactccatagtttctgaactg

SEQ ID NO: 4946 - DNA, 515 bp, Arabidopsis thaliana landsberg
acaaaacaaaaaaccaaaatattttcctatatatatatgcatgtccgggttttacaaaggcgaaggaaaactgtaagaaaaaaaaaggagaagaagaagatggcatctcactctcaggtttgttttctcttcttttctccaaatcttaaacggtcacttcttctctaatttagttcgatcacaggttttggtggaagagaaatcgagcgttagaatcttgacatttaacagacccaagcagcttaatgctctgtccttccacatggtattgaatcgttcccttgcttattcttcctccatttcgtacgtgccctagttacatatatattggtttgaatcaatcttctctaggtctctcggttgttgcaactgttccttgcatatgaagaagaccctagtgtgaaacttgtcgtcctaaaggtaatcactatatccttattatctcctctgtttacacacacttaataacatctccacagggtcagggaagagccttttctgctggtggggacatt

SEQ ID NO: 4947 - DNA, 1428 bp, Arabidopsis thaliana landsberg
  unsure (1)..(1428): unsure at all n locations
tttgataatcatggcttgttttgtattagagatgacatagtttgtacttgactacataaaatatagctttaacgatgaatcatgaatgtgactacaaactaggtttccattttctgcttcaaaattgttatctgtttagaaatttgggaactcaacaagagaagaagaaacaacaagttgaaaggaaatagcaagcagtgaatcttgcaagtacaaaagcataagtttacactaaggcgggtcgtttccatgtatggtcttcttgatcgttattggcttggctaggtcgtttgcactcgcatttcttgcaagcatcgtttctcctaaagttcacgaagtcgcatctgcaaaattaaaatgagccacgggaacaaaatggtctggtttaggatatgaagataacaaattactaaataagagacagagaggaagagagacgcacgaggggcattcccaatctccaggctcagctagcgtcttgtgacgttgttctcggcactctcgacactgtttgttgctagcaaagttcatatatccacacctgaaaatatacatacaaagcattctgatcagtacagacagagcaatcgagcaaagatacaatcatacaagatacaacaactttacaaactttcaatctttagcagccagaaaaaatgaacgtaaagactaaaggcagatacagctgataatcataaacaaacgcggagacatagaagcaaaaaaagaagatatagtagaggctttgagaggtaagggaaacttacccagtgcagttccagtctcctttcttcatttcaacaatattcaccattgaagttttctttggtccctttgctttgcatttcagacagctctggtttcttgtgaagtttaagaaactacacctgtggagccagcaagaaaataaccaatgagggtatggcataaaagacttaatacttttgatttcgagagaaacgggtaattgtcagatttagacttactcaggacatagccagtcaccttccttgacaacagcagcaacaggtcgtctgtcagcgacttcattgcactctcggcatctttcatttctggcaaagtttacaaagtcgcatctgaagaggaacacagtaacagaaaacacaaaacctaaagtcagaaatttacagaaacaaacactcatttctcaaaccagtaatttaacatcttcatccaaagatgctgacaacattatcgcagcatcagatacgatatgatctaaaaggtaagagcctaggaaactaaaattggattcactgtgtataaactataaaggaccagaccaatttctagagacatggcatacgagctaattgttcttagaaattacttacttaggacaagcccaatctgcactgtaaagaggtcgatcancgtgagaagactcatcgtttcgcgatttaaaag

SEQ ID NO: 4948 - DNA, 4270 bp, Arabidopsis thaliana landsberg
aaaccacgtatgtgttctaagagaggtgagtctactttattttttattcggcagaaaaacatatataggggtgaagggttttagaatatatgctcgaatcctatctggaaaattttcatgttttctcagtgtcctgtgaataaaacaatatcttatggaaagacctcatgaatttctctcatcgtctggtcctgttaagcttttaaactttttgattttatcctgccgattggatacttgcagtacatgagagaatgcatccttgggaacttcaagagaagatttcttactgctctacaaaccgataacgatctccagcggccttctgttttggaatctcttatcaggcggcatatgggcatagttcacttggcagagcagcacgttagcatggacctaacccaaggcatcagagaaattttactcacagaagccttttcagggcctgtgtcatctttgcatacattcgaaaaacctgctgaacaacagcaaaccactggatctgcagttgaagttgtatgcaactggtacatggacaatatcatcaaggatgtgtctggcgcaggaatcctcttcgctccgaggcacaaatacttcaaaagcactagaccagttggagggtattttgcagagtcagtcaccgacctcaaggaattacaggcgtttgttcgtatcttcggcggctatggagttgaccggctggataggatgatgaaagtacatacagctgccctggtaaactgcatagaaacttctctgagatcaaaccgggaattgattgaagcagctgctgcaagtatgcattctggtgacagagtggagagagacgcatctgttaggcagatagttgatttggataccgtaataggattttgtattgaagctggtcaagcgttggcttttgatgacctcctcgctgaagcctctggtgctgttcttgaagacaatgcatccttgatacactcgatgatctctggcatcgttgagcacatacctgaagaaatacctgaaaagaaagaaatcagaaggatcaaaggcgtggcaaatggtgttggcgtagcaggtgatcacgactctgaatgggttagattaatcctagaagaggtaggaggtgcaaatgacaactcatggagtttgttaccttacttttttgcctctttcatgacctcaaacgcctggaacactactggcttcaacatcgagactggcggattcagcaacaatattcattgcttggctcggtgtattagtgctgtcatcgctggaagtgagtacgtaaggttacaacgtgaataccagcagcagcatcagtccctctcgaatggtcatcactctagtgaaaatctcgactcagagtttccaccccgtgtaactgctgaagcaagcattaaatcctcaatgttactctttgtaaaattcgctgcatcgatcgtgctagattcatggagcgaagccaacaggtaagagaaacctggaattattttactctctctctcgcatttttatccgcatcatcatcatatcatcctttttgttcttcagatcgcatctcgtggctaagcttatcttcctggaccaactctgtgagatctcaccatacctccctagaagctccctcgaatcacatgtcccgtacaccatcctcaggtcaatctacacccaatactactccaacacaccttccacaccgctctcaacagcatccccgtaccactccccatccgtatcgctcatccacgcttctccctccatgaaaaactccaccactccccagcgtggtagtggtagcggcagtagctctacagctgcccctgattcaggctacttcaaaggctcatcatcttcactatacggtcaggaacactacaccgaatccgaaactggaaactcaagaaacaatgagaacaacaacaacaacaaacaaaggggaagttctcgtcgttccggaccattggattacagctcgagccataaaggagggtcaggatcaaacagcacaggtcctagtcctcttcctaggtttgctgtctcaagatctggtcccatctcatataaacagcataactaagtaacaacactcccacattctacaaaagagacaaatttgtttctttttccccaaaagaaaaagacaattatgtagagagattagatttgtacaaatccctcgcaacagtcttcttgttatgtattggattgtaattcagaaaacctattatgcatgtctttatcttgggtaatcgactaatttcataattcattaacataaatcaatcatttataatcttaagattgaacaaattcttaagataattaattactttataaatttattaaaaagaaaaaaagaatatctgttgggggcacgaaatgtaacgaacccaaaattagaaccaacagtcatcttcgtcattagtgagctaagttgttcaatctctcacctgaaaaccctaaccttcttcttcaatctccaatggcgcgtaaatcttccctcctcaaacgagcagcaatcgccgtcgtctccgtcatcgccatctatgtaattctcaacgcctccgttagtcgctctctcccttcctcatccgatctccctcgccagctaatccgtgaagatgatgatgatgaaggacgtgctccgattcagcctagggttagggtttacatgtacaatctccccaagagattcacttacggtttaatcgagcagcactcaatcgctcgcggcggaatcaagaagcccgtcggtgacgtcaccacgcttaagtatccgggtcatcaacatatgcacgagtggtatcttttctcggatcttaatcaacccgaagttgatcgatccgggtctccgattgtccgtgtctcggatcctgccgacgctgatctcttctacgtccctgtgttctcttcactcagcttaattgtaaatgcgggtcgacccgttgaagctggatccggttacagcgatgagaagatgcaggaagggttggtggagtggcttgaaggtcaagagtggtggaggaggaatgctgggagagatcacgtgatacccgcaggcgatccgaatgcgttgtatcggatcttggatcgggtcaaaaacgcagttctgctggtttcggatatcgggcggttgaggcctgatcaaggatcgttcgtcaaggatgttgtaataccttactcccatagagtcaatctcttcaatggagaaattggagttgaggatcgcaacacattactcttcttcatgggaaatcgatatcgcaaagatgtaagtgctttaaaatgttccaattctgtagctttctattattaatggcaaatgtacagaaatgtgtatataatccattgtggtaatgctattattattagtattggcaaatatacatacagttttggttttgtatgtgttcagggtggaaaagttcgtgatttgctgttccaagtacttgaaaaggaagatgatgtaacaataaaacatggaactcagtccagagagaatcgacgagctgctacgaaaggaatgcatacttcgaagttttgtttaaatcctgcgggtgacactccatccgcctgcagactctttgactccattgtcagtttgtgtgtgcccctgattgttagcgatagtatcgagttacctttcgaagatgttatagattatagaaagttttccatttttgttgaggccaatgcagctctgcagcctggatttctggttcagatgctgaggaaaataaaaaccaagaagatcctcgagtatcagagagaaatgaaatcggtaccttctccttcttatcataacttgatcctctttatcataacttgggacgattctcgtacctgaatgatgccatgtatacaggtaagacggtattttgactatgacaacccaaatggagcagtgaaggaaatctggcgtcaagtctcccacaagttaccactcatcaaactaatgagtaaccgtgacaggcgcctcgtcctaagaaatttgaccgaaccaaactgctcatgtctatgcacaaaccaaaccggtcttatcacttccatttaaacaatctctttgtcttttgggagagaccttttggactgtggaggagcttgagaaggagagagttcaccgagacttacacaagcagatattcccccctcccgtggcataactacttctccggtaagcaaactgagagcacatgcatggtgacagattcataaggaagatatatttgaaatccttcttcttctgtagattccattagttttattgttctaaatagtg

SEQ ID NO: 4949 - DNA, 1125 bp, Arabidopsis thaliana landsberg
gactaatttaatgtgattaattttaatttgaacttcaatcgtcaatttccacaaacaacacaacacgcgatgtctcgtgaagatgcacttttctatattcccgataatatcttttactcgaaaatacaactttcacgaaactcaatctcttcttcttcctctgatactgtacatctttaagctctttcttcaactgaagaattggtgaagaagaagaaacaaaaaaggaatcttttagtagattttacaagatgaaccccaaaatcagaaaacccaataattcatcttcgaagaaggtcacagtttccgttctctctgttttcttagtgttcgtcttcgttaatactttcttctacccaagtttttactctgactctggctcaattcgacgcaatctcgttgattctcgagaaagtttccattttccgggaaattttcgtaaaacgaaggtttacatgtacgaattgccgacgaattttacttacggagttatcgagcaacacggcggagaaaaatctgatgacgtcaccgggttgaaatatccgggtcatcagcatatgcatgagtggtatctttactcggatcttacccgacccgaagttaaacgagtcgggtctccgattgtaagggtttttgacccggctaaggcggatttgttttacgtctctgctttctcttcgttaagcttgattgtggattcgggtcggcccgggtttgggtacagtgatgagcagatgcaggagagtttggtgagttggttacatagtctagaatggtggaggaggaacaatgggagggatcatgtgattgttgccggtgatccaaatgcgttgaaacgggtcatggatcgggttaagaatgcggttttgcttgtgacggattttgaccggttaatagcagaccaagggtcgcttgtgaaagacgtaatcataccttattctcataggattgatgcttatgaaggcgagcttggagttaagcagaggaccaacttgttgttcttcatgggaaatcgatatcgcaaagatgtaagatttattggtctccattgttcgtgatcttgaatttggaaaagggtttattaacaatatatgtgctttgttgcttgtgtgtgtgtgtttgata

SEQ ID NO: 4950 - DNA, 3929 bp, Arabidopsis thaliana landsberg
tgcacaaccaatgagagaaagcagcattgctttttcactttatattatgttatcttttaatttactctttgaccaaatatctgcaacagatcaggtgagaagaatcagtgacaaagatgcagagttcataattgagaaagcgtttttctcctcactgaaacaaaatcataaaaagctagatgctaacaatactattaaatagttaatgtaggcccatattcggcccaatattaagatagtagggagtctcattattggctgaagaatgtagaatgtactcatgtagctcttttctcttgggccgaagacttttggtagctttggagttaaaagtcacatgattaaacacagcctcaacggccaacaacaacatattcaagattagagccattaacgtataagctcgtttagtgaggagattctgtaataatttactctttttcttactttaatattctcttgcgctttaaattttatcagtttggtttcttagagaattttaaaactgcgaaaaagtatcatttttatgtataagctaaattctatcttgagcaacaacaaaaaaaaaaggaattcttgaatcaaagtaagaagattaataaaatagatgaactatttttgtgaataatgtgaatggacactttgattaagctaaagtggtattgaaaatagacaactactaatctaagaagaagaaaattcttatattgtcttatcaaaaattgttagttgtactaaatctccaacggttttccatttactgataattataacatctgagctagctcttttttctttttagccaaaaaaatctctgaaattgagggttgggtaattactattttctttttaaagtgacaatcgtcttatttattgagccatttttttgacaaaacaattttttttcttttcacttctgcagagaaaataggagcgacggtggagagagagaggacaataacaaaacaaatgcatgtgacgccaatcaacaccatacacgacgtattaattgtttaaagtaaaagacaacagtacccctaccggcacaccgacgcgacttcgttgcccacatgtccgctgggcaattatttagcgcggtcgtcgggttggtgtcatggtaaatccagtaaacatcaggggtataaccgtcaatccgtaaaattgtctttttctctccgtccgcctcctctaaattgcttttttggctgcactgagaaatcagaatcctaaatttttctttgggagatcaattttagctgtcaaattttgagttcttttccttatctttgcacttattagtatacatttcgttttgtctagtcaagaaaaatctaagactttttaatcctcccttgtcttctggaaatctgggaggattttaaggttcttcttgtccaaaaattaaaaaaattgccaattgtggattgtgtatcattcattgtcatcatctaatcttcttcttcttctacttacgagtttggagaagttatccgccattgaagcatttaaagtaagtttaatattatcttactataaagttagtattatgacttttaatcttttctcggtaattgccttgtttgtcgtcaaattattgaatcctcattttctgggtttttgtttcttgttgtcggatcttcagatgccggagaaaggaatgattttcccgccggtactgagccaattggtgattttacggccaatgcctctacttcaatgacggcttggtgctcttacatcactcgtctgtctcctaatgtgagtcgtttggagtattgacggttgttcgattcaaagcttcgttcagccatggagattcaatgcttactctgttcgaatcagtccttctccgtcgccgtttatgtcaacgaaacccaatctagtatcagagaaacctcaccgccaaaatctcaccttgatgatggctccacgaaatctggttccgaagaagacgaatctcacttcaaactcgacccgggtccagttcgagtggataaccgctggatctcagaagaatttcacggcgaatttgatgagaggttggttggctccgggaggagcgccgtgtagagaagcgaagaccgtcgagatttcagttcccggtgtcgacgggattgattctgtggagttaaccgccggagagattcatgaattcaaatttcaagccatagacgaatctggaaaaaacgtttgcattggtggggactatttcgagactgatatatccggcgagaactggaaatcgagaccaccggtgaaagatttcggcaacggaacttactctttctctttacaggttcatcctgagttcgccggagatttcaatctcaccgtcattttactcttccgtcattaccaaggtcttaagtttagtacctcacgtttaggctttgaccgaaagcttcgcaatgttagattacgctttgttaagacgcctgacgttactctgccggagctcccgtcatgtaaaaaatctgattttaacagagatgcttggtctggacgatggactaggcttgggaagaatgatgagtgtcagattagcaatgacgggcgttaccgctgcctcgctgcggatttcccttgccggaaaccgtggtgcgacggtgcggttggagctatagagagtaatggttgggtttactctagccattgctctttcaagctcttctctgcggaaaaggcttgggattgcttgaaaggcaaatggattttcttctggggagattcgaatcatgttgattcgatcagaaacttgctgaatttcgtcttgggtcatcctgaaatccccgctgtcccgaggaggttcgatatgaagttttcgaatccgaagaacccttcggagactgttaggatcacgagtatctttaacggtcattggaacgagaccaagaactatcagggccttgattcgcttaaagacagagactttagagaattgctcaagaagtacttcaacgaagaaacaaaccgtgttcccgacgtgatgatcgtgaactcgggtctacacgacgggattcactggactagtcttagagcctttgcgaaaggtgctgaaaccgcagctgcgttttggagagaagtttttgacggggtcaaaagcagaggattgcaaccgccagaagtgattttcaggaacacaatcgcgacaggcgggtacgcgagaatgctagcgtttaacccgagcaaaatggaggcgtttaacggagtgtttctcgagaaaatgagggatgcgggattggtcacgagcgtagttgataacttcgatatgacgtatccgtggcactacgataaccgttgcaacgatggagttcattacggaagagctccagcgaaaatgcggtggagggacggtgagattggacatcagtactttgtggacttgatgctcgttcacgtattgctgaatgcattgtgtgtaagatagatgtggtaaagtttggtaattaggaagagtcacggattctttgtttatgtgtagacttaatttttttgaagtatagattattattatttgggaaaactcaactcaagcttgagttttattgtataatagcaagagattggagcaacaattgtgtactatatgtatctggttgacatttttctgataatgataattttgaattcttggatgataaataagaacaagtttaaaatttggctcaactcagcttctctctgtttcattcctctgttctaatttcttaatcctctacatacggtaatttggctgattgagaatttgggtttcatgtaatcatctccatggattctaaaagcaatattctataggagaaagggtaaaagaaatagaccaaatacttaaggcagtgtctttaattaggaacataatgccacaattaatttggtgaagtagcaagcgaggtatatgatcaacttgacaaatccaaataacgaagtatttg

SEQ ID NO: 4951 - DNA, 538 bp, Arabidopsis thaliana landsberg
  unsure (1)..(538): unsure at all n locations
ttcttccccttatatacacaaacaccacacctttttttctttagaatcctccattactcttcttctggacttcggaatctttcaaagcttcttcgatttttccagaggcaatcatggttaaaggtccaggactctacactgaaatcggcaaaaaggccagaggtacgatctctctctctttctctatggcgacgcgaatgtgactgttgttgacatttcgtaaacatttgagctcttttctgatctgggtttaggttgatattcattgaatcggttagggtttctcattcctggatttattccgatttctatcggtcacgcttaggtcgttgaaatttgaatagatgcataaaaagttaaatattcgtgttttgtgagctgattgataatatctgtgttcgtttccgtcagatttatgctatccgnttcgtttatctgtttagatagaataacaagactggttctctgggtttcaatttttgggtcactcgttgataagctggttttgaaatttttatcttgaatctggaaaatgtct

SEQ ID NO: 4952 - DNA, 995 bp, Arabidopsis thaliana landsberg
cagaatttaatatgttgttttggatatactgaatacaggtttaaaaccggaagaattcttcgaggatacacaaatatggagatcagctctgaaaaactattggtccttgcttacacctctaattttctctgaccatccgaagagacccggtgatgaggatcctctcccgcctttcaacatgatacgcaatgtgatggacatgcatgctcgttttgggaatttaaatgccgctttactcgacgaaggaaaatctgcttgggtaatgaacgtcgtcccagtcaatgcacgtaatactcttcctatcatacttgatcgtggtttcgccggtgttctacatgactggtgagtgtatgtttttccttctgtcacctataataatggttaaagaagatctttttagatattaagcaacatttgcagcaaactgaagaattatatcgatttttttttattgattcttaaatgtttttgtcaactgcgtaggtgtgaaccattcccgacatatcctcgaacatatgacatgcttcatgccaatgaacttctcacacatcttagctcagaacgatgcagcctaatggacttgttcttggagatggaccggattcttcgccctgaggttcatatatataaacaccactctctttttttccccataagatcccaaaaaatcaactaaccaaagtgatctttgtgtgattgattcaatagggatgggttgttctaagcgacaaagtgggagtaatcgagatggctcgagcacttgcagctcgagtgcgttgggaagcaagagtcattgatcttcaagatggtagtgaccaaagacttctcgtctgtcaaaaaccattcatcaaaaaataactcaaaagcaacatcaaaatattatatgcttctttcaccataaacaacactcactacacacagtcttttcactggtaagttctctcttactctcacagtcaaaatgtcaaatcctgagcttgtaagtaatcaaaatc

SEQ ID NO: 4953 - DNA, 1269 bp, Arabidopsis thaliana landsberg
aacgttttacttttaagcatttctaacatttgttgtaatccatgtggttattgaaatgtttgacatgtcttgtatcctcaaaaatagtgaattattgtttgtcatgatctcttgtttgtggattgtagtgataacgaaaatatttagaaatctaaaaaatttattgactaatactaataatttaaatattctggttgtaaggatgtttatagcataaaattctatctaagtaaatatacagtgttcaatggaaaaagtccacgttcttttataaacaagtatcgatatccaaatagacgtatccacacagacgtatccacatatacatatttagttttaaattattatttattgtttcttaacatattattacttgcctgtaattatcgttatccacatagacatatccagtttagtcaaataaatatttaaagaacatctaatcggtccaaaccttttgaaaattacctaagggaatctaatcggttcaacccgttaggctaattccgtaaggaaatctaatcggttcaaaccttttagctaattatcatatgatattgttaaaccttcaatttagggtaatatgctaatttcaaacctcaggcaaacatacaataatgttgatatttcaaacctcaggaaaatttcttagccaaatttcttaacataattctaaaaatatttataaatgttgcattacaaatccaagatcatatggataaactcccatggattcaaaaagttaataacataaacaggatagcaaactgatacctaaatgagacaaagataccatcaaagaagcttaaaattctcacccgacttacattagtagcaatccaagaaaaacattcaagaacaattccccaacattctgacttcatcctcaaacccttactccgtacaagtgctcaacatgtgcccaaccttcttacatctacggtaccttggcctaccaactctgtccggctgataaggtggctgaaccatgcacacttttatttcattcaagtcgaggaaaccaccattgcgtttaccattgcacacctttcaacggcatctcatttgaaagtaccctatagtcgattcataagccagccctttatgattctctacaaacttcgcataaggattattcgcgacaagacacttcttaaagaaagtgtagtattttgaatgaggcatggaccaccacatgaaatgatggtttttgtcaattcgtacggatgctaatgttttcttagaaaaaccgcatctctcccctctctc

SEQ ID NO: 4954 - DNA, 2951 bp, Arabidopsis thaliana landsberg
ttgattatagtttttgaattagtaatggaatgggtaattctcaatttaaataacaatgataagaatatttatcctttcaggtttagtagaggataaatttattttaattctataattacaatgctagagtttaaaaattaataaactcctgattgctgctggaaaaaataatttcatgaacaaatacgagaaacacaaaaaggtaagaatgttgcaatcttttcataaaagagtactctattatacaaaaaaagaatcaaaaatctggaaaaaagtaaacataagtaacaaaacaatttctctaaataggatatattgtaataaaaatgataagtactatgctttaaggatggtaaaaatttgaggtagagaaaaaaaaaaaaaaagctttggcagaaatcaaaagaataaggttctatgtaattcccaaaatgccccctcacggtgaggatacggcctcgatggcgctacccaatggccacgcagcttccacggcttggtctccgtatttgaccttcttcactaacgttattgtctgtgatggctccaatcctgttatattttttacccaagaaaatacaaacataagacaaatgaaatacatatacaaagacattacagaaacttggaccagatcatcctaaaatgtaacacttttttccttcatgtatttggtgcataggtttaagcaaattctagtatcctgaacctaaaataaatagtggattctcttgaaagtgacttggtgtaaaaaggggagaaacttaccgaatccatcaatgagcagagtatattggtaaacgagatccatgcacaagtaaggcaaattctcttcctccacaagtgggaacgttgattttccctcttccagcttcatactacaagctttctttgctgctttctcaaagtccatgggacgaactgtagcaacaggttgcttcgggtcaacgaatccagcctgtgtcataataattaataccattataccgagattagcaaagaaacctgttgtgtgtgaaagatttgataaactgtgtttttggttgaattacctcagcagcacgatcgaagaaaaaagaagcaacaaacatattcttttgaccaccacctcgaccaccattccagactcctccgaatgtgcatttcatgtgtgtacacagtgtatcattcacttttagtgcgttgatggttatccttcggcactcgtcaagactcgcacccgattgtgaagcaggggctttaaattcttttcctccatacttgtacatacctacagtgaataaagtatcttagaagaaatcgaaaactgttgatccaatatgctaagagaatttctagaaaaggatggcgaagataatggcaataatgaaaacatgtgtcatacgaggagaatttcagagaactctagtttaagaaaaaaaaaacagctctcatgacaaaacaataatctcttaccatcatagcctgccacgatgcaggggttctctgaatcttcagaaactttcaaaatctctgctcgagcggccagtaatccgtaatgtaggtaactacaagcacgaaaaaagccaataacacctcacattaaagattttgaattaataaaaatgtgtgctagcatggaaggaagaccaaatatctaactagtacagtgtctagaagatatacagatgacatagaatagcctaaaactgcctcgctctttgagagacgtaagaggtgacaaacctgtgaacatagaggaaatacttccgtcccttcagatacatttctctgacatatgaatcctctccttctaatggttttggtgcacttgcagcatcttcctcagatatagcatatgccatttgaacagacccccctccaagatcaaccactcctaccgtatctgagtatggttttcccaagttccttagcaagtagttaattgttacctgcaaagttaaagcccattaagacaaaatgtcagcttgattagaggttggtgagagtccaacagcttgagttttaatactattttacatactagactttgaactattacaattgccatagtgaaacacttcttattgaataattaagaaactagaaaggataccagtccagaatttacttctccgaatggagacgatgaatataaaggcataaacgcagacacatgagaaatacagcaagatgatttcatataagacacgaacaaatgtgggacaacatacccactgataagaaccttcctgggtaccatccagtacagtaacagcatttgcctcagttttcagcatgcttctatctctcaggagttccctaaccttataaacaaaagtataatacagtataagagctaagtgacctggcgaatgtgcatgaaaaatttatggatataaaattaccgcttgcaaaatgttctcagatgcatcatgacccagcgtcctcaaacctgcagtagcctgacaagatttagagaagaaaaacatttcaattgattcacaaaaaaacaacgataatacaagatagcttcaattattctacgtaaggaaagaattcgtttccataccccaactctgacatgtgtctttggacgcagctcacggggaacagaagcttctgctttgtcaagaagagacaccaaagagtttgctgcttgtcggggatcagtaggatatgcgctcaaccctggttttagctgaaatcaaatcagtaaatagcttagagataaagttcaaacaagtatcactaaactgcaaattaaacaagaaattcaagccacctcaatgtgatgaaactagtaactaaatgatgcaagcgaggtgagttcaagttttatcttagaattccaggaacacagagcacaagtcaataatataccctgaacccaaagttctaagcttcccgtttatcaaattgagctttacctcagggcaagagatattaccatgatcaactgtagtggagga

SEQ ID NO: 4955 - DNA, 2219 bp, Arabidopsis thaliana landsberg
gatacactcaaacacagctttatgtattgcttgtaaaatagaacatagaaattctctaacgagcacagaagcaacgacagagaaccaacctatgaacatcgaggaaatactttcgccccttcaaatacatttctctgacataagaatcctcgccttctactggttttggtgcagttgcagcatcttcctctggtatagcatatgccatttgaaccgaccccccttcaagatcaaccactccaactgtgtccgagtacggctttcccaaagtccttagcaagtaattaattgtcaccttaacaatgggaagtttgatgaaaattaaaacttgttacttgactacatgtttaagataaagagacatacagaaatacaacaaatacaggcacaaaagtctaaccataatacaacagatttaaaatccgaactggatttaacatgaatctgactctaattgatggaaaatctacaacatacccactgataagatccttcctgagtaccatccagaacagtcactgcatttgcctcagtcttcagcctacttctacctttgaggagctccctaaccttaaaacaaaattacatttaagtttacaagctaggcaagcaggcgaatgtctttagaaaacatatacacgaatattaccgcttgcaaaatgttttcagaggcttggtgacccaaagctctcaaacctgcagttgcctgaaaaaaatataaagcaaaacagttaggtcattaacatgaaaatgaatgaacacattagtagctttacttgactttgtgtgaaagaactcgtttcataccccaactctgacaggagtctttggacgcaactcacggggaacggaagcttctgctttgtccagaagagttactaaagagtttgctgattgccgaggatcattaggatatgcacttaaacccggttttagctgaaataatatcacaataaaagttcagacaaaaagatttctgcgagctagaaataccaccaaatgcaaaataaacattgcagcaaagcacaatgaacacgggaatctaatatcgtcccttttaagtttatcgttggaagtacataagtgaagttttttaacccaattgtgagaaaaatccacacaacttcaatttgaagaaactatagaaacagagccccatgcggttataaactaaaaatagaaacttaactaagacaattgcatcattggtaacaaacttgaataccgaataaccgaatcaaatattagcttaacattgatctagcatttgctaacgagagttcgttcatgagcctgaggcaaggttccattatcagaaaaaacaacacttcagaagagcaaaagaaatgcaatgaatacctgtaagaagagctcgagctcattctccaaaggaacaagatccaaattctgatcgaaacagtaaacatgcacacggcttccagaacttccagcatcaaaaatcacagcgtaattcttcggacccctcgaattggaacctccctcgtggtttttcatcgtgtactcgatgacagagacggacgtcgacgtccccggcattaacagaagcacaagagctatcaacataatggggatcgaaatcacaagtagaagaccacgatgtcgatggaccttgtcagcaagggattcgtgccgtccgatcgctcgcttcgccgtcatttttcctccgtcgatagacacaagtccctgatgagagtcggaagtaggagaatggttaccggataatccggtggctagtccagactccaatagctcagaagcggaaggtgaacggtaacggatcctgttcccggtggcggaggacgccgatatcttcaaggactgcgagggatcctttaacggatccagatcggcgatcgattgcaagttacggctgcttaccggattgatcctatgcttcgattcaaattctgccacgcacagatctgaatcgtgaagttttgcgtgaacgatacgaccaaaacaaagacgttatgtcataatttaacgattacggaagagaaatgggtaacatccacgaaaagctgattttagtgtaaagtttagacaaaactttttaacaaaattcaataaattaagggcaatttgagctaatgttaattaaatacttgctataaaaccaagccaaacaaatcctaccaaaattaggaacataccggaaagaaccaaactaaaccagacattgataatctagacgttac

SEQ ID NO: 4956 - DNA, 1164 bp, Arabidopsis thaliana landsberg
cgtatttcaccttcttcactaacgttattgactgtgatggctatccatctgcatattatggaattaaaatttagattaaacagatttttaatttggaaaatcaaaatacatcttgaacaatgcaaggtttcaagtaggaaggagttctctatctggtttctaacatattttcaatatggctttcaatgacaatgatacatcactacactatcagaattctaacacaatccagttcctcctatgtgcatgtccatcatgtatacttaccatcatcatggtcatccaacggagaaatatatgtaaactgagattttgattagtgagttggaaaaaaataggaaagagtaacataccgaatccatcgacgagaagagtatattggtaaacaagatccaagcacaagtaaggaagattatcttcctcacacgtgggaacttcgatttcccttcttccattctcatgttacaagctttgttggccgctttctcaaagtcaagtggtcgaacctcagccacaggttggtttgggtcaacaaaaccagcctgtcattatcgttgatgttattgtcagtgatggctcaaagactagtgggcgagtaatgatgttctgtaagtgtttggtgaagtcacataaaacgtgatgcaaatattacctctgcggctcgatcgaagaaaaatgatgcaacaaacattttcttctggccaccaccgcctccaccattccatactccaccaaaagtgcatttcatgtgtgtacacaatgaattattgactttgagtgcgttaatagctactcgccggcactcatctagacttgcaccggatggagaagctgcagctttaaacgcttttcctccatatttgtaggtacctgaatcgaatcactcgatttaaaggaaacagaacgtgcattctaatatgtactagaacttcagaatatagccaacgtgttccacaattctagcttttacttaccagcatatccagtcgcgatacaggggttgttagagtcctcagaaactttcaaaatctcagcccgagcagccagtaacccgtaatgtaggtagctgcaattagcaagccgataagatattgcgttaaagttgaaggatacatcaaacacagttttatgtatagcatgtaaaatagaacaaagaaagcatct

SEQ ID NO: 4957 - DNA, 928 bp, Arabidopsis thaliana landsberg
  unsure (1)..(928): unsure at all n locations
catcaatttttgcaaaaaaatattaatgaatagcatttattttttattaaaaactttaaaatacaaataaattaaaacagaggaagtacttaattaaatattttggtatttattactactgtttaatttcaatataaaaaaaaatcaactttaactaatttatgcgtaagctcattgtgagagttaaacatagttgggagttacccatctcccgcaatcgtaacccataacgtcttttgtttgcatccatcgctctctcatacaaaattcagatctgaagcacacacaagcttcggattnnnnnnnnnnnnnnnnnnnnnnnnncgctttcccaaattcaccgtcgatctggagccgttacaggatccgccgcagaccacggcgtcctccggtaccggcaacggcaacggtaagatacgctaccgttcgccttcttccactgagctcctggagtctggtaaccattctcctacatccgactctgttgacggaggtaagatgacggcgaagcgtgggattggacggcacgaatctcttgctgacaagatccaacgcaatcgtgggattatacttgtgatttcggttcccattgtgttgatcggtctcgttcttctgctaatgcctgggagatcgatttctgattccgtcgttgaagagtattctgtgcataatcgcaaaggaggtcctaattcgagaggtccgaagaattacgctgtgatttttgatgctggaagttctggtagccgtgtacatgtttactgttttgatcagaatttggatcttattcctcttgggaatgaacttgagctcttcttacaggtgatacattggtttcgtttttttctcctctttctggatcataatctatggcttaataagtgcttgatagatctttgtgtcattcccgagattngattcattgcttatg

SEQ ID NO: 4958 - DNA, 2524 bp, Arabidopsis thaliana landsberg
tgcatctaagcagttgcaaagacacactaagcaaatctttcacgtgcaataaattatacttacgtcacagccatcagtatatcctttcaaatattcctcctcacaattgatgtatttacatgtgtgtaagttgacacaaacaaatcacttgccctgaaaactaaaactctcgagttttttcaaaaagaaagtccaattcaatttaaatttgaagtcttcaatttgttttcaaatactaaaaagtgcggctctccctctagtgtatggcctcgtttactagtagtgcggggaccttttaatcttttattactacttgttgcattcaagcatgaagcatggacagacactcccttagaaagaaaaacaaaattatgaaatttcctgcttcattttgaaatttctgcggaaacttatgatttggatatattataaacatactaactcctctacattaaaaaaaaacattacaagtcttcttttcatttgggacataaatgttaaaatcttttatagatactgtatttaagtcaatgatctgattatctgacagacatcgtgagactcctcatgccatcaaaataaggcttcttcaagatctctatttgcattgtcaaaaatcttcaaagctgtaaataattttcgagtaatcttttgttctcggtcagagagatatgtaataaataaagtttacttttcctcaaagttgtacatttttttttattttttgttggtttggcaatttttccggtaaactatgcaaattctattcgccgaaacattttgcagatcactaaaccaaactgaatcacacgcgcgagccaaatgcgcgtgagatttcatcaccttcgtcaaaatactatcacatcacaccaaacccctgagccgactataaaaccttttagatctctccctcgtgttataactccgccaccaacaatatttttctctactcaattcactcacactccaaaagcggtagcaatgtcagccaccgccgccgcctcctcctcgatcgccgttgccaccaactctctcaggaacgtgactctgtcttccagatcgccccttccatcagccatctccgtggctttcccttcccgtggacgcaatactcttcagcgacgcctcgttctcgtttcctgcagtactggagacggatctaagcctacgattctcgtggcggagaagctcggtgacgctggtattaagcttttggaggatgtcgcgaatgtcgactgttcgtataacatgactcctgaggagctcaacattaagatctcgctctgtgacgccttgatcgtgaggagtgggactaaggttggccgtgaggtgttcgaatcgtctcacggacggctcaaggttgttggtcgcgctggtgttgggatcgacaacgtggatctgagtgcagcgacggagtttgggtgtttggttgtcaacgctccgacggcgaacacgatcgctgccgctgagcacggaatcgctcttatggccgccatggctaggaacgtagctcaagctgatgcgtctgttaaggctggttagttcctttttgattcattgcctcaatttcatactttccatatgttgcgaaatatttattgattatgttctttctatacctgtgattgatggcttgttgtgtttattaatttgtatcatgagctttccttttcctgtactgttgttgacgatggtgaaatttaggatcgttacatttgctgattcttttgaaattgagttttgatcattcttgtctgttatctagctgacttgtggatcttggttttaataataccattgtaatgcaggagagtggaagaggaacaagtatgtaggtgtttcacttgtgggaaagacccttgcagtgttgggattcgggaaagttgggacggaagttgctcgtcgtgctaagggtcttggtatgcgtgtcattgctcatgatccctatgccccagcagaccgtgcacacgccattggtgttgacttagtgagctttgatgaagcccttgccaccgcggatttcatttctcttcatatgcctcttacgccaacaacatcgaagatactaaacgacgaaacctttgccaaaatgaagaagggagttcgaattgttaatgttgctcgtggaggtgtcatagacgaagatgcgttagtgagagctctggatgctggtattgttgcgcaggctgcacttgatgttttcaccaaagagccgtccggctaaagatagcaagctcgtgcagcacgagagggtcactgtgacacctcatcttggagctagtaccatggaggctcaggtgtgcaattcattttacagttcaggtgataattaatcatgaaatttctgtttggcttctgttatatagttggtgttttggctttgacaggaaggagttgccatcgaaattgctgaagctgttgttggagctctgaatggagagcttgctgctactgcagtcaatgcacctatggtttctgctgaggtgagcactcgcttgtgctagtaaatacacacatattggtg

SEQ ID NO: 4959 - DNA, 538 bp, Arabidopsis thaliana landsberg
tttgtacgaaataaccgtgtatttgttggctcgcttcgttcgtagtcagtttatcttgttttggaactcagcgagctaaaagtgcctttagttggagattcaattagaatgtagcggttttattctagtttttgagaatggagccattttatttctcgtttggcaagcggaacaaatctactctattttttgtttggctgaaaaaaatataatagagcggagccgttctcttcttgtttggttaggctggccgcagcggagagcgttgagcagccccctccccttcgtagcggctacagctccctcccctcaccccgcagcgctgccccctacacgccactctaagcgccggccctcttctctctccccctcaatccaggggttcactattcatcccctacgacactgtgttgttggtccacgagtaactgttagtagataaaaaattgataatatatagaaaatgatattttatagttgtagtgagctatagggggagtatttagggggaaccgctgcgggagatgaaaaaataggg

SEQ ID NO: 4960 - DNA, 511 bp, Arabidopsis thaliana landsberg
  unsure (1)..(511): unsure at all n locations
ccctatttttccccttattttttcatctcccgcagcggttcccccgtaaatactccccctataccccactaccactataaaatattattttttataccaactatcaattttttatctactaacaattactcgtggacccacagcacagtgtcgtaggggatgaatagtgaaacgttagattgagggtagagagaagaagggcgcttccaagagttgcttatagggggcagcgttgcgcggtcaggggaactctacgaaggggagggggctgcttagcgctgtgcgtgcagacagcctaagtattgcttgggcaatacctccgcttagcccaagaagagaccaacatataaaaaatcccaatcccaagcccaacgtggcaacgtgacacgcttgtcgctcactgtctctggctctctgctctcgtactcaacatctaaggctaaggctatctgcactcatactactctanatttctaccctaacaagaatattctgtcctagtcagcaaaat

SEQ ID NO: 4961 - DNA, 552 bp, Arabidopsis thaliana landsberg
  unsure (1)..(552): unsure at all n locations
tgtttttcaggttataattttgttctgttgtggatgctgctaagtgccggtggctcgaccttcttatataggtgtatcccatctttagcttctttattgaggattgtcacttaagctagcatgtattttaaaacctataaatattttatacattttaaattgaattcttttgaatcactttcttttgtaatcactccgataattgtataatgtaaacttattgtaacatgtaatcattttgcaataaagaatttatttctgctgcaaatgttagtgtgtgatttgtgtttacttaatcctgcgatcttggtggtaagtcgtttatccggggtccttggggcactcggacagattctgttaagttgtttggtgcacacgcatagctgtctgaggtctttgagacaaggacaggtgcatgtgggcccgataacttgggaggttctgcgacacgtggtatcggagcgtgattaagtataatacggtcacatacatatttttaaaacaaagttttggtttcaaaaacctattttcaactanacgggtacgagctcg

SEQ ID NO: 4962 - DNA, 3200 bp, Arabidopsis thaliana landsberg
atggcacaacctaaagacggatacatcaaaggcgatagaacaaagcacatcctaccttaattcttctacacacacgatctacaaaagagcggcgatgtacgagttctacagatccgttcgaatgataatccgactgacttattcaccaaggcgctacctactgctactttcaagaagttagtctatcgtatcggattacgccgtctcaaagatttcgacgaatatactcataagggggagtaattgtatgttgcactctttttcccttaaccatggttttttccattgagttttcctggtaaggtttttaatgaggcagcatttcaaatactttactagttatgatattataatggtcatcagggggagtgttatgaataaagatggatacccattataaggcccatcatgtaagcccatcatctagatgtttctagggttttaccctttccttgtactcctatataaagaaccctttatttcattggaataacacactcatttcttctatctctttctctgtttataacaaaattgactattttttaaattatgttttaaaatgtgattactttccaaactcactcttttgttaattattatgatttatcttcaaaaatttggctacttagtcaatattctcttgaatcaatacaaaataaccggttcaactatccccggtttggtgtaatcataaccgatgcaatcatatatttaatgaattaaaaaatagaagaagcgcaacgtttcagaaatcaaaaagccccaacgttccgattaatttcaaaaaactgaaataaatctcagccgttcattaacacgctcctttcaccctccgatcacatctcgtgttcttcacaacgtttcctttactctctctctcttcccccttgagacccaaatttcaaatttctctcttctctctctcactgactcagtgaattctcatcttctctcatcacccaaccaaatcaagcatgccgtttatctccgagactgctagtgccatcaagcgccggttcggattcaacgaccgtcccgctccgtcggaatctctccgctctgtaccttgcacgccagaagctaacaccgtctcgagagataatcacactcatcagtctttgcttttctcttccgccgttcgaagcatgcctgaattggacgaagatggtgcgatttgcgctggatctgctcagatatcgaggtctcaaagctttgagttcaatgaagatcccgctttttggaaagatcacaatgttcaggtattgagcgattttggtgattgattcgtgtagatctgatttcgcctagcttctgtgtagtagtcacaatgcctagtttttggttcaattgaattggttgctcttgaagaatcttaatgacgaaataattttcggattttgtggttttaacacattaatgaattgattttgagaacattttagggttttgttgatttttctggataaaagaaaactaagtttgttctatcgtttcttggaatgttgaaaataggttatcataagaactcgtccacttagtagttcagagatttctgtacaaggcaacaacaaatgtgtaaggcaagacaatggtcaggcaattacttggattgggaatccagagtctcggttcacatttgatctcgttgctgatgagaatgttagccaggtattgccgattgtttatgcatatttttttcgaagctctagaatgttcctgagtctgcttgcttttatttgttcttacaggagcagatgtttaaagtggctggagtacctatggtagagaatgttgtggctggttacaatagctgtatgtttgcatatggccaggtgagttttctgactgtgagttttatctgtatttgctttctagtgtttccagtctgatgactgatggtagtcttaatttgtagactggaagtgggaaaactcatactatgcttggagatatcgagggaggaacacgtagacatagtgtcaactgcgggatgacacctagagtttttgagtatttgttctcaaggatccaaaaggtttggtgtgtttgtctttctgtatgcatatgctttagctgtgaaatgctgtgttctaacttatctgtcttttctttaccaggaaaaagaggttcgcaaagaggaaaagctacatttcacttgtagatgctcatttctggagatttacaacgagcaaatccttgatttattagatccatcgtcttataatttacaggtatacataccaattgtatcatggcaacttgtgatctgaatttcgtatcttatgtgggattaaccaaatatcctcttttgcagctaagggaagaccacaaaaaaggtattcatgttgagaatctaaaggagattgaagtttcaagtgccagagacgtgattcaacaattgatgcaggtaatttatttttattctcttagctatttgatattaggtgcactttgtctgttcttcttggtttttctgactctgacctgctcccgtactacttttcctaagtataaaagtttgatcctatgtaagattaaatttctcaaaataacctgttatgtcaaattattcagtttccatggagaagctttaatgacactattttcttgaactttcatcttttcttttgcatctactaactactttgcatgctagatgctctttccttccatagtcagaaagataatgcaagaagtagttgacaatttgctcatgtcattcatttatttcataatagctttctcatgcaacttccacatcttttatgtgtagggtgctgcaaacaggaaagtagccgctactaatatgaatcgtgcaagtagtcgatcccacagtgtatttacatgtatcatcgaaagcaaggtaattaattgcattcaacttgctacttgagttctcaggctttatttctgaaatcgttatgatgaagtatagcttatcaatttctcaaagtaaaagttatcctgatctgtgttttctattagtgggtatctcaaggtgtaactcatcatcgttttgcacggcttaatcttgttgatttagctggatctgaaaggtaatggcagctataagtttcaaacatactaccctttctctgttcaagatattctgctaacatctggaataaaggcaaaagagttcaggagctgaaggtgaacgcctcaaagaagctaccaacatcaacaagtctctttct

SEQ ID NO: 4963 - DNA, 5280 bp, Arabidopsis thaliana landsberg
gtgcttgagtttgattatcttcctaaacatgcattaagaaaaccaaggaatttgatacagtaattagcaattattagcttaacacaattaatgtgaaaaaaaagaagaagaagataaaatacaaacctcatcgaacttctcaaagttttgagtatccaaatcgtcgttgacctcaggaatgaacgcagcttccatttggtaaatcttttcccattgtacaccttcgaaccaaggatgtgcctgcatgtgacattttgtggtttggatcaactcgacttatgacatttgtgggcttaaatcttttcaacttttaactatatattgtaacttttactatagaagaaaaaaggagaaagataccttaatttgggaggcaccagtagagcctagtcgttggttaacgctacacaagagcttaccaataagatctcttgcccctcgtgatagccttgattcttcagggaacttcaaatgtgttttccaattcactatctgtttttttgcattcataaattctagcttataaatacataaagttcattagaaaaaaaacaaaagtcaaatgattaattttttacaaaattaagtattgaaacctttctacaagtagacattgggtcgtcggcgtaaaagggtggatacccaaccagcatttcgtacattatagctcctagtgaccacctggaggattttttaaaaacattctaaggacttacttttttgttctttgttaacaagttgaaaatagacaagtgtgtacacgtaccagtcacattccatgccgtatcctttctttaacaagacttcaggtgcaatgtagtctggtgtaccaacggttgagtaagcctgttaagtgatacaccaacaccaactacaagttagacacataatcaaagaaatatttcaaattagagatcttttgatagataagaagtacatacaagcattcttcgattcttctgccaatgttccaactgttcttgctgcgagcgtttaggagtggttgatacgctctctgaacctcctccgctacccgcatttcctaccgtgaaatcttctccgtcaataacactacaatccaatggcttacatagtccaaaatcagataaccttaaatgtccatatctatcaagcaacaagttatccggctttatgtctctgcaccaaacaacatcaaaagatctcaaattaaattaaacacatttttctttgtgatctataacgacttaattataagatccaacctgtggatatagttgcggttatggatagattctatagcgagaacagattcggcgatatagaacttagcttcatcttcacttaaagtgtctttcctcatcagaagagtcatcatatcgccaccgggcaaatactccattatcagataaagatactcattgtcttgaaaagaacagtaaagcttcactatacagttactatctacttctgccaatagattcctctctgctcttacatgctccacctacaaagaaattttcaaaaaaaaaaaaaaaaaattcgtaaaaccgaaaatgcaatgtgggtcacattatgtaacctggcctctgcgaagcatttctgatttcttgagtttcttcatagcaaaaacatgacctgtgttgatctctctaacaactcgaacctctccaaaagcacctttaccgatcatagttaagagttcgaagtcatcagcacccattttatgcctttggagtctcatgtactctgtttctttcttctcaagaaacttcataagattggtttggtcttcttcacatacatctgcatccgctagcttcttctctaacgttgttcgtctgccaaatttaaataactaaataaataaacccatcaagaatatatctaaaatatttgtacctctctttcctctcgttgaggttcttcatctgttccttataatgattctcaatgtactgtttggctgcagcaactttctgttttgttgaatttgagagtgcttctccgtcaccgcctagtggtggaagtttcgttgccgtttctgtatcatttcctccgtcggggacggtggtttctgtcacgccaccgccgtaagtgcttccggagaacatatcctttttccgaggcttatctcgtggttgaaacttgtgaaaccaacttcttgcagaatccattttttttaattattctaaaatatgaactcttcttaatctaaaaaaggaaataaaaacgaaactaaaacgaattacaaaaataatggataatctaaaagagatataatcgaaccctagattccagaaatttggtagcaaagaagattgtttggagaaaaagattgaacgaacctgagttcatcaaatctgaaaatctgatagaagcggaaagatcggagattaagatacggttgcctaattaattttatcggaaaaggaaaaaaaagaaatcttttattgaggaaaaacagaaaatgtcgggttaccgtagaagtttgaaagcgattttatcatatatatatatagagcgtggaattgttaatatttttattttcagaatatattaatgaaatataacgcacactcagttttatagggaattgtttacaaatttaacaatacttgtgatgttgacgacgaacaattaatttagtggttatctccactctctacgcactagtttttcattttcaaaaagcttcattaaacttaaatggtggatatatacggaaaatttggttatgttagtttgttagtaacgaaaattagacataaatataatattcagaatcgagattattaaaagaaatgcaaattttaagtaatacgaatacaaaagaagggttttttttttgtcttggagtggaggagagtttggagaaaaagagacatcaaaaggaagatgaaaaagaaaggaaaagtcagaataaataatatcttctactccactacttaagttaccaacagaatctttttataagcattttgatgttgagatctcaacctaataagcaacttcaacaccttaactctctctctcttcgtctctctcgtccccaaccaaaacacacattcatgtctctacaccaacttttccatataacactcattcaccaaaaagttcttgcagaaacaccaactccagatttgttcaaattatttacgtcacattttgttagttatcatcattacattttcgattgttagtttgtcatgtgggaaaatcattttctattcggttctgtttgatgatcagcttcaacaaaatatccaaatacagctcttacctcagaaattaacttgagagaaatccaaatttagactatgtatatcgcccttctcttacaaacaaggcttttaaaaacatcagccaaagtcttacaagtgccactttcgtcttctccagccaaactccgataaggttatcgcctgtacctatgtcgtttaaagttgaagtacaaatgcagaatcccacgctcaaacgtgcatttgaaacctttcttgtgagaatactcccattctttattcacaatccggaacgcctgaaaagcaaacaaaaataaatttgagcacaatgataacacgagaggtgatgatgaaacccacataatggttacgagtacttacaatgtcttcataaggtggaccagcatggaaccggatcatacacgtttcagcacttgtcccatctttttcgatagtgtaaatgggagccttaattttgtctactaaatccgggtagaagatgttaaacttgtatccttgaacgatttttggaggcggattatcgtggtcatagtgagtttggttatacttattccattcgtaacctgtgtgaacccgattgaaatacttcggttttcttggccggtacttgtcatgccaccagtatacctagaagatgaaaattatggtatttttgttctacaaaactgaaaagttgcagagaagagaaaaatagtgataagggtacctcggaatcgaggttcacttcagcattagagccaaatatggcatcaccttcttccattgctcccattgctttcattgctttaagctccaagttatcttctacaggtgctggttttgagtccatagcttctttaagccgtttcttctgtttctccagcacaatcatccgtttcatttgctgttatagccgcagtcatattttgggtcagtagaagcaccaacaacaataattcatgtgtaaaattcaattgtaggaactgttaaatataccagtagcttcttgtcttcctcgggatcgattgcttcttcacgatcatcaccgtgcatgagctctggcgaaaacgaaccagccgcttctgctgcctcatcagcttcttcttcctccgcaacaggctctggagaaaatgcttcttcagcatctgaaagattcgtatcatttatctcctcctcattttcttccaccacacgtgttaagccaggattaacttctacatcatcttcaccctctgaaagttgctcgaggcgatgtagatgacgtctcagcatctcagcgtgtatttccttcaagcaagcctgttgaacatcaatatagtcagtgaagatgcgaaaaacaaatcctcagttttcaaaatctaacacaccatgatcatccacgagcaaatacctttgccttgtatatttcgaggcgtttaagaactgcttcccaatactctactactttcgcagacccagaacgcagctgcgattcgatgtccaactgcagttctacaagctccgcgtgggtcttcccatcgagaagttttctcacatcagcttcaacaccagcgtgtagtcccctctcttgagcaagcaattctgcaggaggctcctcccctctaactctagctcgatcaagggcatccctcttacgagcttcagctaactcccaatcgcataccacaataagcgcctggaaaatttcaatggtattaagcccaaatatttactcgtaagcagcaggtaatataacatgaaaaagaggcaagaatactaatcaaccatcaaaaaggtacaacaagatggtccatagaatatgtattttttggatcgaaattccatacatgcataataactttaaatgcgtgaatctcctcaaatgcaaaatgagactcagttgtagaacatacctcccaatattgtacacgtgttggagttgcccgatccaaatccagatacatcttgatatcatcgcgaagctcttccatatctttaacagtaagtccctgcatcatacagatcagggggtcaattttaataataagaatcataacaatctgataaaaccaaaccagta

SEQ ID NO: 4964 - DNA, 5774 bp, Arabidopsis thaliana landsberg
ttacattttataaccctctaacgttatattcacaagtttggcttgtttctgcgagatggcatccagatgaagctgggagggctgaccttgaggacgcccctgtattctacccgagcgaagaggtcttgttcatattctatacttccaaacccttttaactgaatttctagatccatatttctaacataaactgcaaacctgtttctaggagtttgaagacactttaaattatatcgctaaaataagaccggaggctgaaaagtatggaatctgtcgcattgttcctcctccttcctggaaaccgccgtgcccactgaaagaaaagcaagtatgggagggttctaaatttacaacacgtgtccaaagagttgataaacttcagaatcggagttcaatgaagaagatttcaaagcttcctaatcaaatgagaaagaagaaaagaaagtgcatgaaaatgggaatggattctgtcactaatggtatgggcgatccctgttctgcaagcactggaatgagtgaacttgagacgtttgggtttgaacctggtccagggttcacactaaaagacttccaaaaatatgctgatgagttcaaggctcagtactttaaaaagagtgaaacttctacagacgataaatgtaaagttgataattcaatagactgctgggagccagcacttgaggatgttgaaggtgaatattggcggatagtagataaagcaactgaagagatagaggtaaagttttgtcccctgttgttctttttatttgggggtttatggtctattaggacccctgtatctcctaactaccacaatgatttttcaatataggtgctatatggtgctgaccttgaaactggggtatttggtagcggattccccaagatatcatcaagtcacaatgcttcttcttcagaagataaatatgcaaaatcaggctggaacttaaataactttccaaggcttccgggatccctccttaagtacgagggcagtgatatttccggtgtccttgtgccgtggctgtatattgggatgtgcttttcttctttctgctgggtaagattgatctctgtgaattgcataatttattttgcaggttaaagcatgtacttagttgggatatcttccttttactgaaatcaagcgtagcctcatacaaaaacttacaactacaaccggatgtgctttgttttttgtatacctattcacaaatagtagataaatgtgattaaatttctgtgctacatatttacaatgataatttttccattattcctaaagctacgctaggattattattgattcaatttcccacaaaagtattagttagtgtcttcatattatacagttttcttacaccagtggatgcaattttcattacttcacatcttatttcgttttatattttccacttctgacattccttttgttctgctttttttgtttttgtttacctgaaatagcatgttgaagatcaccacttgtattcgttgaattatatgcactggggtgcaccgaaattgtggtatggtgttggggggaaggatgctgttaaactcgaggaggcaatgaggaagcatttgcctgacctttttgaagaacagcctgacttacttcataagctagtaagtattggatatttgatgaactaaagcatcgctttgcttctctataatcaatgatcaatagaatcttgaaaagtagaaaagtgttcaatcacgatgatgttcttatttcataatatgttaatgttagcatataatagaatattaccatatctgtgtttccatttttgtagttaatcaccctgtaggaatttctacagacccgttttatgtcctctattgacttgcacagttgcacctggtttaaatacatttgttgcagattattgtttcggtataaaacaaatcctttgatgctctttcgtgtaggttacacaactctccccgtcaaaactgaaaaccgcaggagtacctgtgcaccgttgcgtccagcatgctggagagtttgtcttgacttttcctcgggcatatcatgctggatttaattctggtttcaactgtgctgaagctgtgaatgtagcacccgttgactggttacctcatgggcagattgccatagagttatactgtcaacagggtagaaaaacgtccatctcgcatgataaattgttgcttggggcagcaagggaagtagtgaaagccgactgggagctgaacttactaaggaaaaatactgtagataacttaaggtggaaagcattcagtgcgaaggatggaattttggcaaaaacattaaaggtaaagattagatattcttactcttgattcttgaagtttagatgcctataagtgtgaatgattggaaaatcctgaactcatgaataacttgagaggtatctttgcaaactggtaccacggtggtatccgttgtaaactggtagcatgaggttgtaattgatatggaacttgaaattctcttaagttgaggggtattgcatatcacacgaatctacagctaactaacaagggaagaacggaagattactacaccacctcttactagttaaaacaaatgattagttcaggaggtgttcatcttctgcctgggtctaactgtacaaataaatctcgtaggtttaagaggatcattctttattgtcaatatggtgattaatggacttgtcatgttttttatttaggcacgcattgacatggaacgtacgagaagagaatttctgtgcaactcttcacttgcattgaaaatgcacagtaatttcgatgctaccaacgagagagagtgctgtatatgcttctttgatttgcacctgtctgctgctggctgtcgttgttccccggagaagtattcatgtttgactcatgtgaaggagttgtgttcatgtccatgggttactaaatattttctatttcgctatgatatcgatgaactgaatgttcttgttgaggcagtggaaggaaaactgagttctgtatatagatgggcgcgtcaagatttaggattggcattaagtacagacgtctcaggaagcaagatggagatagatgaagaaggaaaagtccacaaggacccgactccacaaacaactgcactttcagggaaggatttgcagttgaaagtaacatcgaaagaagtaagtaaagagttagaaaagactagtaaattatctcatgttaatttacttctgaaagaaaaggaggagcaaataacgtcaagtcactgtatgaagcctgtcaaagaagaaactgtttgtgattcttctgatccaaacgtttcagcttgccaaccatctgaaggaggcataatctgtatgacagctgttaagtccgcaagtggtaaaaagaattcacagagtctacccaatgatgtgatactcctcagcgatgatgagtatgacatacctaggaaacgaggttctgtgagaagagatgcaatttcttctggcaagaaattagaaatacgagagagaccgacccacgttttggcgttagaagcttctgccaaaattgctgctccaatttgccaaagggaaggagattcgctgcgtgatacacgaaacactatatcattgcctactaatgaccaaaaaacaatgagaagggatgtaccgagttctacttcgcacgcggaagttaatgcggaggctactgggcttactcaagatatatgtaacagaatggcaactaacagccacggtggtggaaaacctactagttgtaaatccaaaaactctggaggtttggctatagtggatgttgtggatgggacaagaagtagttcagttacaccgtcttgttcgcaaaataatagtccggataggttcatccgccaaaagggtccccgcattgcaaaggtcgtgaggagaatcaattgcaatgtagagcctttaagttatggatgtgtgctgtctggaaaatcatggtgcagccggcgagcaatttttcctaaaggtgacatgtggtcaagtatttttgctacttgagaacattaacagttatacatattgcaagtgcttattgtctattcttctttggtgcaggatttcgtagccgggttaagtacataaacattttggatccaacaaatatgtgcttctacatttcagaaattctggatgctggacgcaacagtccattgttcatggttagttggtagatagatgctgatctaatttaactaaccttaaaaatatgtctgagtagtgtttcattttcaaattaaatatagccatatgaataaatccgatgacatgaatctgaaccggaaatatgatccattatttggctgtcaaagacgtagagtcccatcatgctaacataaactttaaaagttttgaactgagtatgaaaccggaattaacctattaatcaacctttaaaatcttgtgtgtgtgtgtaaaaaaaggttgttttgtcttgattctattggtcattgtgcagttccaaaaatcttgcccatcaacaaactgtgtggtatgttctttttgtcaggtttacttggagagtaatcccagtgaggtgttcgttcatatgtcgcctacaagatgctgggagatggtaagagagagagtaaatcaagagataactaagcagcacaaagctggaaaatcagatcttcctcctttgcaaccctctgggagtcccgacggttttgaaatgtttggatattcgtcacccgcaatcgtacaggtaaatctttacaagttttgtattaggctcagatttttatgcttatttctaattatatatacaaaatggaaataaattctaacaacaagctaatatgaaagtccaacttttgacattttctcatcttttatgatagctagaaagagtcggagtatagcattgttgcttttgtaaaatggaaagcttcatttgtaaatctagttgacatatagatactctaatgtgattaacaggctatcgaagcattagacgtgaatcgagtttgcacagactattgggattccaggccttattcccggccacaagttcagttccctgcaaatcctcttctcagagaagccaacacaagtggcagatcgaatgtgggaaatctccagctaaaccctggacaccatatatcgcctactggaataaattctattcttaaagttctgttcaagaaagctagcatggaggaactaagctcacttcaagaggttttaagtgagactaactcagatatggtgaccgaacttgtgaaggaagagatccagaaccgtcgctgatttgattcaaaggggattgattttagagtgtacatacggagttgaatccactcactgttttgcaggatgaggctcccttccctactcattctttttggacacccttacagaggaaggatataagcatacagctaaaaacctagtttcttcttctgtctcaaaacaaaaagaaaagagagagatagaagattttagggttcttaaacccattagttttggttactagtcaggctaaaaggatcatcaagtgtgtggcttagttcccacatcagtttactagtatgacatctgttttgaaagtccaaaggagatggattttaggagatttcatatcaacgccctcttaatgctccattcatctctcacttaaagcatctgattttctattttgatgagcaaataatgattgataatcttcataatcaaaggtaaaacaacttataaattaaaaactcaaacatccaggaatgagggtgacaatttcattgaaatgcttatagttttaattaaaatgta

SEQ ID NO: 4965 - DNA, 1475 bp, Arabidopsis thaliana landsberg
aagctaccacttgagctcggaaatcttgagtatctacaggttttgaatttgcataatctcaatctcgttggtgaaataccagaggatttatcaaactgcagactacttcttgaactgtgagtctttgtatctcttctatgctgatatttagtgagtttttgattcgtttatctaactttttagttttgttaatctttgttgtttgttgtagagatgtttctggaaatggtttggaaggagagatccctaagaatctattgaacttaacaaacttagagattcttgatctgcatcggaaccgaatcagtggaaacattccgcctaatctcgggagcctctcgagaatccagttcctcgatctttcagagaatttgctttctggtcctatcccgtcttccctcgagaatttgaaaagactgacacatttcaatgtttcttacaacaacctctccggcattatcccaaagattcaagcttcgggagcttcttcgttttccaacaaccctttcctctgcggtgatcctcttgaaacaccgtgcaatgctctcagaaccggatcaagatcaagaaaaaccaaagctctaagcacctctgttatcattgttatcatcgctgctgctgcgatcttggttggtatctgtctagtgcttgtcttgaaccttagagctcgtaaaagacggaaaaagcgtgaagaagaaatagtcacttttgataccacaacacccactcaggcttcaacggaatctggtaatggtggtgtaacatttgggaaacttgttctattcagcaagagtttgccttcaaaatatgaagattgggaggcaggtacgaaagcattgctcgacaaggataacattatcggtattggatcaattggagcggtttatagagcatctttcgaaggcggggtttccatcgcagtgaaaaagctcgagactctaggtagaatcagaaaccaagaagagtttgagcaagaaataggaaggcttggaagtttaagtcacccgaatcttgcttcttttcaaggttactacttttcctccacaatgcagttaattctttctgaatttgtcacaaacggaagcttgtacgataatctacacccgagagtctcccatagaactagcagtagcagcagcagccatggaaacaccgagttaaattggcatagaagatttcaaatagcagtaggaaccgcaaaggcgctttcttttcttcacaacgattgtaaacccgcgattcttcatctcaatgtaaagtctaccaacatactccttgatgaaagatacgaggcaaagctatcagattacggtttggaaaagtttcttccggttttgaacagctccggtttgactaagttccacaatgcggttggatacatagctccagagctagctcagagtttgagagtgagtgacaaatgtgatgtttatagctatggtgtggttcttcttgagcttgttacaggtagagaa

SEQ ID NO: 4966 - DNA, 2302 bp, Arabidopsis thaliana landsberg
ctccaccggttttctacctgtaaccagctcaagaagaaccacaccgtaactatacacatcgcatttctcactcgctctcaaactctgctgagctaactctggagcaatgtacccaaccgcgttgtggaacttcttagtcaaaccaaagctgtccataaccggaagaaacttttctaacccataatccgatagctttgcctcgtacctttcgtctagaagaatgttggtggacttaacattgagatgaagaatcgccggtttacagtcattgtgaaggaaagagagcgcttttgcagttcctaaagcaatctgaaatcttctgtgccaattcaaatcagtattcccatagcttgagctggttcccgggaaaattcttaggtgtagattatcgtagaggctaccattagggacaaactcagagagaatcaactgcattgttgaggaaaagtagtaaccttggaaagaagacagattcggatgttgcaaacctccaagccgtccaatttcttgctcaaactcttcttggtttctgattcttcctaaggtctcaagcttcttcactgcaatggaaactcctccttcgaaagatgctctatagactgatccaatcgatcccatgccgattatattttccttgtcgagcaaagcttttgtacctgcctcccaatcttcatactttgaaggcaaattcttgctgaaaagaacaagctttccaattatcacaccgctagagtcaatcgaagacgccagtggagtggtttcaactgtaagtatttcttcatcttttctccttttacgagctcttaggttcaaagcaagcacaatgcagacaccaaagaggatgacagcagccgcaataataacgataataaccgaaatgcttagagcattagaatttctggattttgctgcagctccacgtgaattgcagggagttacaagaggatcaccgcaaaggaaagggttgttcgaaaatgcagaagatccaaaagcttgtatcattggaacaggagggataacaccagagagattgttataggagacattgaaatgcgttagagtattcaaactcccgagggaagacgggattggccctgaaagcgaattctgtgaaagatcaagaaactggactttggagaggtttccaagttcaggtgggatacttccgttcagacggtttcgatgcagatcaagaatctttatgtttgttaagtttaatagcttcttagagatctttccttctaaatcattccctgaaacatctctgcaaccaacaagcaaacgattaacaacaatgtgagattcaaacacagtaacaagaaccgataaattctcgaaaacatcgattaaaacttacagttcaagaagtactctgcaattggatatatcctctggaacttcaccaatgagattgagattatgcagattcaaaacctgtagaaactccaaacttccaatatctcttggtatcaccccatctatagaattattccctaatctgatcactgagaggctctctcatcttcccaatacttcccgggatacttccattcagcttgttagactccaaatccaaaagcttgagacttttgcaacccataacaccagtaggaatcctaccggttaactcattcgacgaagcatccaaaaactccaaactttcactgcaatcaactatctctccaatctcaccaccaaatcggttccaagagacattgaaataagttatgttcttgaacgtaagaaccgcaaaaggcgctaatccatgaaacaaattgcttcctaaatcaacaagaatcaacctctgacatttctgtatctcctcagagacatcaccagacaacaaattgtttctcactgagatatattcaagcacaggaatatcacaaatcctaggcggcaacactcccttcagattattgtaagagaaatcaaatcctacgaggttgttacagtttacaattgaagcagggattgatccaaagatattgttatgagccagtgaaacaaatttggtcttgtcacagaacttaaacagagaaaccggaatctctccggtgaaaccatttttagacaagtctagaaaccttaagctagacaattcactaataaactccggaatcggaccagacaacgcattggaactaacattaatcgtccacaaagtttgcaacttgaagtaatccaacggtaaattacctgtaaacctgttgccaaacaagttcagaactcgaataaactttagatttgacaatcccggagctaaggttccggcgagacttgtgttccacagaacgatttt

SEQ ID NO: 4967 - DNA, 879 bp, Arabidopsis thaliana landsberg
gtttgaaccaccaattgagattggggaccataactacttgtttttttcttcatgtaaatttgagaattcatatactccatttttgtgaaaagaattaggtagggattatttaatggcaaaaatggttggtgaaggagagaataaatgctttggtaagaagtacagacaagccagacactctcctccattacatacacatatagacgattgaacaaagcaggcacgtgcttcttcttcatttggtggaagccagagagtgtgagaaagactgaatttaatacattcaccagtttactttccagccaaggcacacactctcttctctataatgcttagatgagactagcctgacaacaaattccttcttcttttgtccatttttttgttcaaaaacttgcaaatactcttgaatctgtgattctttcttcttttgtcgtttcttgagaatgttgactttggtcggtaaaattttctagccgttaaggatgactaagtaaatgcagaagcagctcaaaagttctcacctttagctcaatcccaagaaaaatcaacggttttgttttataaatgcagctacttgttcttggttctggtgttagagaacaaatcccaatttggagctcgggtttaatttcgggttcgggtttggatcatgaaccgataatgtcaattgggtaggatccgtttatgagctgaatatgagaaaggttcatctttttctggttttggttcatttcatctacatttcaacttctcgctctgattccatcagtgaacgagacattctgcttcagttcaaaggcagtatcagtgacgatccatacaacagcttggcttcttgggtttccgatggtgacctctgcaatagcttcaatggaa

SEQ ID NO: 4968 - DNA, 1466 bp, Arabidopsis thaliana landsberg
ttaacttaaactcaacagctacaaggatgtctctacccatatgatagaaacagtaatgagaacaattatcggtaaaatatttcaaatatcagacaatccttttcatatgtttctgaatgataacgtaatattatttaacttgcattgcaaaattatagtaaaatccaatgcaaaatgaaaatttttaaaccaaatagatcacaagataacgttttgagccacattacatgattaagagaataaaaaagcttgcctgaattggagataatgccgacaagtatccatcaaaagcagaagtcgaaggccaaacatcagccacagaagcagagtctttatgcgtcctaggcaataacttcttatacgattgaatgtagagaaacaatatcagatccctcaaatcagctcccacggaatcaacttcctcaggtttggccaaaaccaatgggtcagtctcgcaatggagcaccgaagagagagtttcgagaacgaggcgcgcatggtcatcggagatcgagagtgcatcggaaatggcagcagatccgacgcgatgattcgtcgccaaagaagctaacttttgcttgatcggagctagagtttgaatcgggtcggtaaaaacgagcttctggatcggaagaaggccgtgctcgaaaggaacacgtcttgggtggattattaaattcgaattttgaatcgggtctgggtcaggtggtggtgattggtcgatgagctcttccgtcattatgctttaaaccagagaacgagagaaaaagaactgttatgaatgaagttgcagatctttgaacataggaacaattgtcatcaagaagaagaaaaaaagagagagagtgttatgttacagtgtgtgcaaccacatgctattatcctacgcctggtgatgaacaatgggtcaaaaaggccgatatttaaatgggctttgaacggcccattaagtaacgcgattagtttcttctccgttgtaaactgcgactttcaccggccacgagattaagtcgttgtcaatggatgatttggaagcttactattctcactataatttaccggcgatggttcctcctccgccgccgggagtttctccgattccaattacttcagctcattccgtctatttgcctacccatgtctcaattggagctcgcgatgaggttaggacgcttttcgtcgccggacttcctgaagatgtcaagcctcgggagatctacaatctctttcgtgagttcccaggatatgagacttcgcatctccggagctcagatggagctaaggtaatcattttctatctctccggatttgtgatttgggtaatgatgtttcccggcgaagagactgagaatcttactttatttgtttggtagcccttcgcatttgccgtgttctcggatctgcaatcagctgaagcggtaatgcatgctctcaatgtgagtacaaatttcttcaaacttgctctt

SEQ ID NO: 4969 - DNA, 7446 bp, Arabidopsis thaliana landsberg
  unsure (1)..(7446): unsure at all n locations
atgtcttttactgtgtagatcaatgttttcttgaggatcaccggaaagcgagaagatgggtttcatgatttagcctctttgtttcatgtaagttttcttcctcacaagtttaaagcttttgcgatatttctcattgtctcttgatgcctttagtatttgctatttgtatttgatataggtgattagcttaggagacactattaaattctcattgtcaccatcaaagtctaaagatcgtttgtctactaacgttcaaggagtccctgttgatgggagaaatctggtgagacgactttcgttattctgtggcctgtggatgaagcattattctaatcctctggcctgtgtcctattatgcagattataaaagcacttaacctttacaggaagaaaactggtagtaacagattcttctgggtgagaacactatacatcaatgatttcttttactacatttcactgtgatgatttgaacttatattctttctttatatgtaaagattcatttagataagaaggtgcctaccggggctggactcggtggtggaagtagtaatgctgcaactgcactctgggcggcaaatgagctcaatggaggtcttgtcactgagaacgaactccaggattggtcaagtgaaattgggtcagatattcctttcttcttctcgcatggagctgcctattgtaccgggagaggtgaggtatgttttgcttagagtttacggtctattttgcggcattctactagttagcaaatccttgttctgattcagttcttttacacccatattaattttgggctttgtgggttgtaaacatgctccagtttattttgctgaattctaatctaaaggctaatgcagattgtccaagaccttcctccaccttttcctcttgatcttccgatggtgctcataaagccccgagaagcatgttccactgctgaagtttacaaagtaatcaactgaaactgattgatggatattttgattctagaagcttttcaggattttgtgacttacgcttttattttttagcgtcttcgtttagatcagacgagcaatattaatcccttgacattactagagaatgtgaccagcaatggtgtgtctcaaagcatatgcgtaaacgatttgggtacgatctatatgcatatgtcgcatctcccttcctttgccaagaagatagccacatctttaaaattcaagattcagtctgatacatggaccatgaattacatttacgcttttgacttttccagaaccgccagcgttttcagttcttccatctctaaaacgcttgaagcaacggataatagcatctggacgtggggaatacgatgctgtgtttatgtctgggaggtataccttttctacagctttttttgttatttccacttcattgagaaatttcacaaaatactgtgcatcacataggagctcatctaatggaaacagtgtgctactactgtagttgtcttcccaaattcatcttaacaagctagtataagatcatatataatgagctgagtactgtttactagaataagagattataaatgagttgagtaattgtgctaattttggtgggatgaatgcataacagtggaagcactattatcggtattggttcaccagatcctcctcaatttatatatgatgatgaagaatacaagaacgtgttcttgtctggtatgctcttcgtacaagtagtgtggtttctactcttctgaatcttgtacatgtaaggaactaattccaagtaaaattgttgcagaagcaaactttatgacgcgtgaggctaatgaatggtacaaagaacctgcttctgcaaatgctactacctcatccgccgaatctcgcatggatttccaatgagatgttacaaacatgtaattttttgaaaggattgatttgagattcctacttgtgtttcgaatagtgagtggttaactaaaggagaagatgctttaaatataaattaaaagttttttaaaaagacatattcacgaatgataatcaaagagagaagcaaccacacataagtcatgaaaccattttctgtcttctttttttcttgttttattactttcatttccatatgaaactcctatgctcttacagagaaggagacacatattgtctagacaagctaaagatatcttttccttcaaatggtgaagtccaatctggagaggtagctgcttgttgtgtttccacgataacaccagcacctgaattctccatagatacaccgttgctgttgttgagtctacctcccatggaaccatttagactgtaccggttcatgttctcatcatatatttggctgctgctctttaacccggaccagtttccattgactctactattttgtgataaactttgatctagactccagtctatgtttgtgtagtccactgaaccgccagagatccaatctataggtgaagatgcacccgatgttccagctgaaccaaccgcagagaataatcccagcgaagacgcagcagatatgggtggagatgatgctgtatttctagtccattgcccgccattccctctggccatactaccatgtggatccacttggttgttgttagtgaatcgcttctggttttgatactgaagttgctggtagacctgatttggattcagatggtttggacttgggcttcgcgcactagggatattatgtgtttgcatgaacccatttgacttcattatctctatgctcgctgcaggatgccaactggtagggggtgcactcatgcttgaggttggaacgtgatttgtgattacaacctgtggccgctgcctcatcaccatgactgattctctatttgcaggctgctgctgctgctgctggaagttcttaaattcatttccactagctaaatagcgagcttcgaccctcacagcaggctgaggtgacggtgatggcgatgatggcaaagagtaagaagccgaaggaacctgtcctgtggttggtggccaccttttatcagccaaagcagcagattgctgaggttttggccaatctaacttcagttcgggtcgtttcataggctgagccaacattttgttcacggattcagttgtggagggtgattttgtatagttaaagttcttgtcatctcttgttggatgtaagccaggtgacggaatttctgacctttctacatccgaattctgataacctattcctactataagttttccattactgggtgtaagaggatcaccacattcctcttgtttcactggcacagaaaactcttcatactttgtgcctttcaagacttcttctgctctgtccaaatcaccctctgcttgaacaaccgcacgctctatttcctgccttgtacacttaagttgcaactccatttttgtaatcctagctagctcttctgttatgtctattttcaaattcccaggactctgaatgctttgcttctctatttcttcctcaagcctatcaaacaaccaatgaacagattcctctactttaccatcattcatcattaatgccgttgtcgcatgctcttgagatattcccattgccacaatttgctgtgtacgggcttcaagctttctggaaataagatatgtgctacacttctcattcaactcctgagccctcctctccttctggcgttgatgttttctctcattcttttgacgaactttttctcgcttgtcattatctgcacctggtatcacctcctgcttaaggggcagattagttgttttctccttgtgatcttctgactcaccagaacagctaccattattcgaaactgaatcagactcaatcccatttacatctgcctcatctatactccggaaacgactatactgtaatggtgagatagaagctatcgacactgaatcaagagcttgaaatgttcctaaaagaggattataaccactagctgccaagctgctattcccattaaccgaaagtgaaggctttggtgatgccttttgagcttctttaccagtttttttatccttagactttgactttgttgctggagacatctctgcaaagaacatcaatacacctaaaaaataccaagaaacgagcaaatagttaatttgatactccaaaagctaacatgagacttctttagaacctttaaaactacaacacaacacatatcttagctaccaaaactatgaattaggtaaataaaatggtgaattgatacttttttccagaaaaataagcaaattcagtcttctatagagactcagcttttttgctaagccaattccagtgactaacaaaacgatgaaacattcgaaaggttccaattcgtaaaacgatgaaagtgaattatgaagaaaaattgggaacagattcttaaattgaccgacatagaccaaagcttctgattcttctacagatggaagcaaattgaagaatatcggagaagattccagaattcggcgaaatttcacgaaatcacgcggacgatttaaacgaatacacatcacgaattgagagagagacgaaagcgtaaggaaatcgaagagaagaagctggacctgtagttaggaagaagatgatgattggagatcgatagagaagatatgtgattttgttgtcgtcgtcgtcgatggcgagaaactgaatctgcagagagagatgatcttttagggtttttgttgggagaggaaaaagggaaaatggaaggagttttttttttttgtctctgtgaatatgtaagccaatggagatgtaacgaatgtcactgacttctttcgtgtttttttttttttttcaactcttcttttattaataactatgaaatttgtattagtacagaataatcatcactatcctaggaagttgtccgtactaatcacatttattataagattttaattgattttctatgcttttttacgaaagatcgactagattatgtcgtatttactagattttctgttgtattttactagattaactctttttttgtggctctatttctctctacttttggtggaagtagcaagactaatgtgtttgttttggtgctatactatgtacaagccgatgttggaaatgatcttggtagagtgagttgcgtcgttgcttccattggtttgttgttgcttggaatggtggttcaagaagcgtaagtaatccttcaatagagggttggagatctctaggaagcgaaggtggtcaagtggactagactccaaccggaggcaggattggagtttcatcgaaatgtttatgggagtacctcaaaccagaatgaacctttgatggttacgcctatctcgacccgaaaaacataaaaaatgaaggttaatcggaatgcgaaaagatctaatattcaagcttggacaaattgacttcataagaaactaaacctacttactaagtttgtcactaactttagtgattggaaggagacgacatatagctcttgaaactctatttacatgaaaaattaccataagttacacatggggaaatctttctagtgagtgaataagcgtatatgcacttggccaaatatatactagcaaagatgtgtacaaccagtaaactagagatatatctctattacagtactggttcatgatcagtgattgttatagatgaccaatacacatttctcagaaaaaatgacaaggaacataaaacacaacacaagcttttattgatcccatacatgtaatgacagaggaagaataggcagtcccctgccttcttgggtataaaagccccaatatacaaataaacaatagatgattgttgtatacgtgtatatatgaatatgagagttggtaagtggtaatcaatccaacatcttctctggaaattgaaagctttaatggcgaatgcaaacacaagggagaagaagacgcaaaaggcgacaaccataatagctgagacacctaagaagtcatgtttatatcccatcacatcctcaagcagttgtttcaccatcacctgatggataccgtccgatagcttcaccgatctnnnnnnnnnnnnnnnnnnnnnnnnnnnnnnaccgtacagtgtccaagccaccgggtttgcccagtagtaccatctccaccacagaggaatcctctgtagtcaaatcattcaaaacattagtatttctaaagaaataaaagataagcttagtaatgtaccttgtatgggatcatgaagccactgaaaagattccagagcatgtagaaaggtgctgctataatcgaggcgacattgtggtttggggtgattgctgtcgtcatcatcccgtagaaggtgaagtacattatcgaaaagtacatgaagaataagtaccacaagaacttcaccgcggaccattcgaacgcggccattgcatagaatatggtgctgtatattgtggattgtgctaacacgtatggaaattctataaacacctgcaaactcatacaatttttaggtttttaaactcaaaagcggggatgagaaagatagaaagataataaacatatctgtgacctgtgcaaatgcaaagggaagtgccgagtacattcccgctgctctctcgcggtatgaaacaaatctttctatggaaacaacgggctgtgcagcggttgcattggtgattccaatgaagagaaccgcagcgtacatcgatcccattgcattaaataactgttgttgagtgtccctatatatgaagaaatgtatcattggttaaaggaatcatcactctttggtgatagcaatgtgccactttactcataccttttggagccaaatttccaacatattgttccaagcatcagcgagataaccacggtgtagaagaatcgaactgcagtgtattgtgggtttcgccaatatgataggttttgtttccacaggcaagcaacaaactgactatacagtgactgagagtatctggttggaaactcgatttcttttgcaatgttacttggcttgctgagtacttcgatcagctccttgttgcgtctgcagtagaacggagacataaactaaggtaaaccgaacttatggaaagctaacatgcatagttttgactaaatgaggaaaggcacatactgacaaagatttgagttcctgtaaatttcagcaaaatcaactccaagccggtgttcctcggtagaagcagtgacatcaagcatccatgctgccggattatggccaggtttgatcttttgcaccccttcaattgactaaagaagaaaacagtagcagtcaagagactttattttacatgttaaaaattaatagatcaagaacacaacctacctcgaaatacttgataagctcacaagacgtctggccaagtggaccggcatatatgagttctccaccacgtttcatgaacaaaagctgcattaacaatgaaatttagagatagagactaaacaatcctgcagagtctttgattcatctgtttaagaaaccaacctc

SEQ ID NO: 4970 - DNA, 928 bp, Arabidopsis thaliana landsberg
  unsure (1)..(928): unsure at all n locations
acattagtaattattaatttatgatattactagaccatattttttcatatttatttcaaaaaaattattatctgggtatgggatcgattttggtcaatttttacattgatccgaattgggtccgacataatttatttaatttatcatgtttattaatttatcgaatattaatttatagagtttttgtaatttcaatttaagtggtggagggtctttttaagacaataattagttagtggtttnnnnnnnnnnnnnnnnnnnnnnnnnnnnnntcgtttaatttacattaaggtccaaaactatcttatatttactaatttcaacctcaatgtttggatttggtcagaaaccaaatttattaggtttccaaatccagtttcgctcctccttgctctagctctgttatctgattcgtaaccattgatgaaatgcgagttctcgacgaaattgcagagtcaccatttctgatttcaccgctaaaccctaattcgacagccaatggatatagatgggtcgataagtgccatggattcttacataacacggttctcgttgcggcttctctcttcttcgtcgcttacttagcttacgaagcgaagaagagtctgtctaaactctcgaatcggagatcttatatcatgattgcttattatggttgtctttggcttgttagcttgctcaatcttgcttggtgctgtctccaggtttgttaataaaatatcacaactttgattgaattacaaagatttttttaagaaagatcaaaactttgattgaatgatgagtattttaaagacttttttctagggttctgtggaaactcaaatttagaaactttttgggtcataagggttaggaaatgaaaaatcataggtattttaattgttttcttggatagggttaattggagttaatgaaatgaaaatgt

SEQ ID NO: 4971 - DNA, 548 bp, Arabidopsis thaliana landsberg
  unsure (1)..(548): unsure at all n locations
gaaaaaacaccggggcgttgagtttgntttcattatgtttgatttctctgtcattttttttaatgtgtctagcgagtctgcctttggcccaatggtttagtatctgcatgtatccacggatctctatttgtcgacgaatgttatttacaataagtgtttcttattttctttccaagnnnnnnnnnnnnnnnnnnnacgagagacacaagtatgttacatcataatatacaaggtgtctccatagttttggtattagcacacaagtcaagagtatgccctacaaggaaaagattttttagatatcctattcaccttgtatctacagactgacaagacactaggactcctgttattcccaatcagcgtcgaagaatccagcatctttcatttctgaatagtagacattctccaaattcagatcttcctcctgaagcaaacacaagtgaattttagcaccaaatcatgtggtgatgaagatggtactatggtaatggtgatggtactatggtaatagtgatggcgatggtgatggtactatagttataaag

SEQ ID NO: 4972 - DNA, 4260 bp, Arabidopsis thaliana landsberg
agaatgattcatatttctcataattgctgatctaggaaattaacgtactatatatcaaattgataagctttgaattgagtgatgaatcatatatttcaattaaattgcatagagttttatcatgttatttttgttgaaaataaatcaattaatttcttcttaaacaattgttttttttgtctaatacaaaaaatgctaattttgaaatttagttttatggtatttcagttatctgttgtcggtgtctctacatttaaagacatttcaaaacatgtgacccactaactctagacatatacaaaaaatcggttataattatttaatacatatctagttattttgtaacgctttaaattttattagcttaattattattttttcaagattgttttgatattaatgaagatctgataaaaatcattgtttatatattaaatgattcggggattaattggagtaacgaaagatattcaaagttggaaaatctaatatttgaataaccttacaaaatcaataatgttaatatacaagatttttgtttaaattactgtcgacatgacacatgtctttttcattaactcgtttttctgagtttttgttttcttacatgattgtcattttgacgcgttaatcaaatcttctaacactatttaacccgtttttgccaaaagtcaatttttcttttttatcgtctctatttcacctcttcttctgcgtcttctccaaaattgatacttttcttcgtgtcacgtgaaggtccatttcctcagatcacaaaatttccatctgatttcctcaacaaaaacccttaaagcccagatttttcgtttcaattgtgtgtactcggagactccacaagacctcaaaaggcttgacctttcgtttctctaatcaagtttcgctcaatgaagaaggtgcttcatcgaagtttcaagcctgccaaatggtatattcactttctcattttcctcttgcgagtttcttcacattaccggaatattgatacatttgggtgattgttattttcaataatgaagcaaaattgctttacaaatggcggcttcacgcctgaaaatcctgaagaacaaaaaggatacacagattaagcaactgaggagagaattagctcatttgcttgaatccggccaaacccaaacagctaaaattcgggtaagtaaaaagcaataaaattttcatttgttttgtatgaaatctgtgattttgaattcatggattgtcaggtggagcatgtggtaagagaagaaaagacagtagctgcttatgagctcgttggtatatattgtgaacttcttgttgctcgtttgggtgtcattgactctcaaaagtaagtttctttgaacaacccttgtttgttttttcttcattgtgttgatcattgtttgtgatcttacttcaggacatgtcctaatgatcttaaggaagctgtcgcaagtgtcttatacgcttctcaaaggttaacagatgttggggagctctcagatattgttaagcatttctctgcaaagtatggtaaagattttgtttcagctgctattggtttgcaaccggattctggtgtgagtcgtttggtaagttgttttactgcgtgttctcttactttactccgctgtttgtagaagagagctatgattgtttattgagactctctctttattttgcttagttagtagagaaattgtctgttaaagctcctgatggtccaacaaagatcaaaattttgacggagattgctacgcagcataatgtaacttgggaagcagagtctttggttgaatcagatccaaaggaaaccatgtcggcggttagtaatacattttcagctaaatattactttcactcgtctctttctctagtatacgtttcctcattagcagtttcaatttctttgagcagagtggagcaagttcatctgtgtctcagccagcaactggaataaagtcggagtcttcaagaatccagaacaatcaacctccagtatttcaagctgcagctactgtcaatgtgtcgcagaattcatatgcaactgatgggagatcttcaagccgcatgacatctactgatttcaacgttgggaagacacctgatcactatcatcaagacccaaaaccttctggttagtttttctataagaagcgttttccgttggatgtttgttggtgttgagtgttagaaaaaaactaatcgtcttttttaatacaggagatagagttgacggtagagaacacagggatcacaatccaggtcatggggatacatctccattcgaaacgaaatttgttgatgcaacgagtgctgcacgtgctgctgctgaatctgcggaaagagcgagttttgctgcacgtagagctgctgagctttcaagtaaagaaagaatgatgatgatgcagaattcaacagagtcgcggaactcatcctcgtatgagaatcttagaagcaatcccccacatagtcgtactagtagctcaaatatgcaaggcggaggttttggtaaagaagagttattaaaaagcaataacaggcaagtagatcaatctactactactactagagcagagtcatctaagaagactgttgatgagctatcagaaaatacttcatggaggagaggtcattctcgggagaactcattggagatgaggccgaatgattcctttgctaaaataggtagagagaaacagcagccaggtatggatgatataaaccttagcagttcagcagatgttctaaataagaaacaatcaagccgagcttcatcgcattcaccgtcaagcaatttttccgatgataatgatgtcactgccttggaccatatcgattcaccaagtatctttgaggaaaacaaatttcagagcactgttggagatagagagagctacaatgacagtcctgttgttgttgttgctccggcttttgatgactatagctcgttttttgacaaacctcaattcgacacagaagatgcttatcatgatgaaccagaacaaggattaggattttcattgcttggcagtagcagcaaaacatcggatcatatgcctacagagataagttcatggagcctcgaaggacacaaggatctgggaaaactcagctcagcctcaacctcacaggttcttgaaaaggagaagccaagttctcctccaacatttgatgatggtcctacaagtcctccagcttctctgcatgagcctgagccgtctgcaaagtttgatgattatgaccgagattctgaaagtgaagaagacaatctaggaagactttccggacgtgcagaaggaaagtcgaagctgacagctcagaagtctcacatgtctgaaggtcctgatgatttaggacgttactttttcccatcagacacagaagaccaaggagatgattccaaaacacaggaagaatctgacgcagagactcctacaggtcttaagtttggacctctagccagtggacttgagaatgaaacgactctcccatcttatggatcgagtccgccaagagacaagacgtcgtctaaatctataaaagagtatcttccaacagaggttgatccgtcaaggtcttcttctctgcagacagcttcttctagcagtattaggaatgaactttacactcagaaagcaagtaactcagacaaaagaccaagctctatacctccagattcatcttctagtgatgatgaatcagaagtggaacttccaaagagagtttctttcagatatcaagagaaaagaactgagtcaagaacccggcccacacatctacattcgggtgtcagccataaggacttggaggaagaaatcccgactcgagcttctaccagaagtcaagataggaggacccacaagaccacccctgcctctgcttctgcttcatattttcacacaatgtccagtgacgatgaagatgagaaagaagtccatagagatactgcacacattcaaaccaggccttatatttccatctcaagaagaacaaagggccaagagagaagaccatccctcgttactgcaaaaattgacaaagtttcttttgatgaagaatctccaccaaagctaagtcctgaggccaagccactgactaagcaacaaggatcagcttcctctttaagctatcttcccaaaactgagaaagtttctcacgatcaagaatctcatccaaagctaggtcttggggccaaaccactgattaagcaacaaggatcagcttcttctttaagctttcttccgaaagccagcgaagctt

SEQ ID NO: 4973 - DNA, 4127 bp, Arabidopsis thaliana landsberg
  unsure (1)..(4127): unsure at all n locations
attaagataattgccagctaacgttaaaagtatctgcggttttcaattgaacaaatacaccacatacattaacttctgcacttaatatgttcaatagtccagacaccatatgaagatgataaacagtacccacctgtatttggcataatctgcttcaagaaatcccaccaaaacgggtattccactgcaagctatgaacatttgcaacgtcaaggggctgccaagaagctaccatatcaactttatgacttacagaaagaaaaaagaagcagcaaaattataaatatttgatgactaaccttgactgacaaagctgctgcaagaagtaagctgcttctttacgaatttcgcgagaacgatccctctcaggaccagcaaaactcattacaacaggaatctgccaattcacttggaataatcaattttcatgggttattttgccacatcaatgaaaacacaaacttgactatttgaaaacaccatgaaaaaatgagtgttgagataacgaaaccatgataaactatctacgtttttccccaaaaatggtgttagctttccaaattgaagtttgaaatagaaattggagacacgcctttgataaaacaaattggccatattctccggactataccaatgatcccctgagtcagcaagcatatggaaggtgaaacttacaaggccaacaagacaagcattttcctggaagtcagtgttatctttaataatttcgtttatcagctgcagcacagcacatattacctgaaaacaccataaaatattcacaaacacaagccagtcagtattcacagcaaactaataactacttatcatgaaggacaacaacaaaaatcctgctagattacaaaagaagcatactcgagatttaggaatatcgagtagatccattagaggcaggaaaccatgctgtgtcacaaatactactttctgctcaggtctctgacgaaacatggcaacaagtttctgacaagaagatactattgcatcttctgactcatctggcctcaaggagctgaccagtctgctgaactcgactgcctacaaaaacttaaccaataaatactaagatttggaatcactaaaaacagtgttgagaagtaacaattctcttttcaaaacttgattaacattatcattctcagaggatgaagtgaatcggtcaagtagcattagcaacatataaaacgccgaaagattgccaaaacaataggatatagatttgcagaatacctgcagaggaaaaagattctccgcgggcactttttcatcaaatacctgagaaacaagatatggaaatattttagcagtatactacttgaaatatcaaacgtccaaacttgagacagaacataccaagccatcaatgtcaataacatcatctttcaaaacacccatcatcaagcgaaaaagatcaccaccatcatttgagtgccctgtttccccctccatttgcttctgagcaattgtagccctcaattttgtagccagatcattctttccaccatctgcaacaggagaatcaccttggttgacatttgacgtaggcatggatgttgaggcttcatttggttttccctcagacactttatccaatgggtgaaataaatcatgcaaagaagcatccccaggaggatcactaaacctagccagttcattcccactaacactagatggagtcttcacagccttttaagagagaaataccaatcaaaacaaatctagtcagtttacaggtttccaactcagtaaatagagcactaggtctgaacacgtcattcaacaaagaaagggaaagtattgcagtaagaacataatcttgtaaaaaagcaagaccaaggcccaacaacaaacaaaaccagtctcactatacaagcctctatgcatgtaggtgtgaaatttgcaaaacaaataaagaagtatataatacagtacaagtcggtgacctgttttgtttttatcggtaaggaacttattaatcaacttcacacaaaagcacgactcgtgatttaccatattatctaagaaaatgctaggacagtaatgacgtaacagcacaactaacctttcgaatcccacgttcttcacctttgcggccaaaactatgtgatgtctggtccactgggatggataattctttgccaacgtgctttattgctgaagtattttttctagcttcagaagtttccgttacaagattttcaggtgtttcaccacgttcagatttcccatgaaagtctgatacatcttgaggtgtccccttagcatccgaagatttctcatggatcgacagtgtaggaacttgatctgacataatatcatcttctgaattatctgttccttcttcaccaagatcactgggtgtcgactgatctttctcagacctaaaactcgacacccctaccagaggtaatttgcttttcgagtcctggacaagaaaagtactatcattagctttagaaagttcatctctagctttaatgcgttctcctgttcatttatcaactctttatctgcatattcaaaacattgaatgatggtaaattagagccgaggattgagtcaggaatcttacagtttttgatattcccacattttctcctnnnnnnnnnnnnnnnnnatcttgactaccttcatcatccttctctgaacttgcagtggcttccttcatatatctgcaaaggatgaagtacccaaggacattacaggttcagtggatgcaaggaacactattgcgtgttctttaagatgggatatataatacattttgtaatattcttccaaaaaataaagttaaatacataggttctcacttgatggtgccactatgccgaagtgatgactgcaaagctcgtctagagtttcgtatccaagggtgagagagcagtgtctttgcatcaggcctctgcctggaatcctgtaaaacacaagatacaaatcagatgtacatactggatattaaataaatcattgtctaggttctggtacagaggtaggtgaataaaccctatagcagaaaattataccttcttgaagcactgtcgtagaaagtccgtaatatctggagaaagactatcaggaataggagggttgtcatcctgaaacgaaaccataagaaatagtttgtcacttctggctaacagcttttgcatttttcaggagagaagtgtttacgacatggagaaggggacggaagagacacctaaatttgattgacttaaatgcaaactcataaaatgttgtcaaatacctgaacaatacgaaagagggctggcatgggttgcagatcatagtaaggaggtacacatgtcagaagttcgataacagtgcatccaacgctccaaatgtcagaagcagcacaaactcctgacatttcaataacctgaaacagaagttgggcttctgtcaatacgtacataatcaggtaaaagttctctaaaggagcaaacaaaagcatctttcaaacaacaacaaatattttttcaaaactgcgtacgaaagctatacagaatatggagatgaaaaatatataatcaaaggtgtacctcaggagccatccagtaaggagttccaaccaccgagtgagtattaacatcagcctcgttaagtttagtggcaactccaaagtcagcaagcttcacaagaccctgaagtgtgatgtagtcaagtatctttctaaggaaaaagcctagaagaatcttatccagcagatctcaaaacaaaaacacactgaagacatgtctgagaatagataatatagaaaacacacctcctttgtcgtcaaaatatttgcacccttaatatcacggtgtataacaccctgctcatgcagatataccaaaccttccaagacctgtattcactagttagtacacaatgcataacgaaacttaactcaacttgaaagatgtatacagacctgagcaatgtaaacagccaccaaagattctgggaaaggtccaaatttatttggtttaataatgtttgcaagagagccattcccaacgtacctgcaaacacataattgaacttgagtttcccgtccatagtccagagtggaccaaaattaaccaaaaaagccacctacccccaaataatggtaaaggtaggtc

SEQ ID NO: 4974 - DNA, 541 bp, Arabidopsis thaliana landsberg
atatgaaaatacattaacagtataacacttgaatcaaacctgcatacttaagacagagcataccaagtcatcgatgttaaggacatcatctttcaaaacacccatcattaagcggaaaagatcaccaccatcttgtgagtgccccgtttcaccctccatttgcttctgagcaattctagccctcaatttcgttgccagatcattctttccaccatctgcaacaggagaatcaccctgatttacatttgcagtaggcgtcgatgttgaggcttcatttgtttttccctcaggaactttatccagtggatgaaataaatcatgcaaagaagcatccccaggaggatcactgaatctggtcagttcattcccaccaaaactagatggagtcttcacagcctttaagataataacaagcataacaaatctagttagtttgcaagccacagccccacaaaaaacaaatatatctcactacagaagcttctaaagtgaaataagctaacaagcagccatggcagtccactagatctagagcggctgc

SEQ ID NO: 4975 - DNA, 592 bp, Arabidopsis thaliana landsberg
  unsure (1)..(592): unsure at all n locations
tatttgttctgtctttatggactagatgtgatctctcatctttttaccactgctatgctgactgaatccttgggttgatgcttcttggttgttaatttcatcagcaagaaatcgatctcctaaaggtagcttctttcttccaccattacacaatgtttatgctggttaagatgcaatcttcctctataccttctaagatgatatttcaatacagaacttgaaccataaaaacattgtcaagtatctcggatcgttgaagacaaagactcaccttcacattattctggagtaagtaatacttttgtgtttaattttggtccacgctggactacggtctggattttcaagtccaattatgtgtttgcaggtacgttgagaatggctctcttgcaaacattattaaacctaataaatttggacctttcccagagtcgttggtgactgtttacattgcacaggtccgtatatatctttntctagttgagttaagttntaaaaaaaaatatttatgtactaactagtgaatacaggtcttggaaggtttagtatatcttcatgagcagggtgtcatacatcgtgatatcaagggtgc

SEQ ID NO: 4976 - DNA, 4371 bp, Arabidopsis thaliana landsberg
  unsure (1)..(4371): unsure at all n locations
tttctcattcttttatctcaaaccatgcccgactatatcattgtagtcatcaccctccttgccgatgagctaactcatgtagttcttctcgttcctacaagtgtctcggacatggaaccgtacttaacgtcactttgtctgttgttgattgtgactattgtttcgacaaaccgtgttacttcgtctgccattttgctacctagctttggcccccaagctatcatggatcctttgttgatttcttctttttatccttatgtagctattagttgtacctctttatgttggttcagctttgttttcagccttattatccatgtacttgtggctactatgctcattttgttttcatgaatgaaacgaaaggttgacaaaaaaaagaagatttgtcttgtataatcttcaaagtttatcttcagattttatcaaagtcaataaaaattaaaatttccgaaaaaaactccaacgttgcttgaatttgttttcttgttaaaatcatataattaaataaaaggtgaatcaggtgaataacacttttgggtaaagttaataaataagtaaaagtataaactgaagaatgcagagactaaaccaaagtcagagaacccatgaagaagacaggtggataacacttttggactggattgcgtaatgacaacccagtccttcccacaactatttccttcgtcttctacgcgcgtgaagaagacagagaacgaagtgaaatacgttgacgtggcatctgttgaaaacagtaaatattttccctagcaccgcttaagaaaagtcacatcattaacatagcctgcggtttgtaaatataatttgaataaaatacactccccataatatcaccagagaatatgctctacttttctatttattgacagtaaatgctataccttttacgcagagatctaacctgcaaaacagaacattatggatcgtggtgaaaataattcggtagttcatacgatgaatcaaaagagaaaggtacaaaaccatcgctttccagtttctgaatttactctctggtgatttaattgaccagtataaactttacatgttaaagtactgactttttctttcgaatataaaacttaccatgattgtagatctggtaaacaacttgttaggatttacaaaaattaaaccgtgaatcacgatttttgttttagtccgaaattaatgtttacactaaaattaattggaaaactgtcattatgggttgagatttataattactttttattatgttctttgtaatacctaatgacctatttccttacgcaatgtagacggcaggacaagatgaagtattgttggtgattggcgagtgggtcagggttgataatttagcctggcagtttgaacctaagactgtcaaaggagcgtccttcatctgcctcaggaccaacatgacgtacgaagagctagctcagaaggtgaaagataaatttggctttcgtgcaagagacattacaatcaaaatggcataccaatatccagagtggatggttatagattaagggaacgactctcctcctcaataaattagtgaagatagttatgttacaatgttcattcaaatgaggcggcatatagaggaggtgaatctctatgtcactgtcgtccaacatactatttcaagttgtcatgttgatgtagctgacaagaacttcaattcagaggacactgacgagtcagattatgactcagaggaggaacgtcaccaatttgcacttgatagtgccttggttgggcctactcaagagcaaacgtctgctacaacagagacagaacaacgacgtaggaccaggggggaacttttcccaacaagagggatcagtattagagagcctaaagactgcatccgaatgaaaagccatgaatgttgacctactgacaaagggaaaggaataatggacccaattgggaagacagggaaggctggtccaaggagagccagtgtgacagatagctctagcgacaatgactatgacttgctacttgttccattcaccatgccacctatccacccgctatcaccattcgggaaaatgcagatatcgaaggcgtagattccttaaggggagcaatcatgtttctcctattacaaatgatgtggaagaaactgcaattcaaaggcataacattcttttttggggtcgagcacaagaagcattaaacaccatactatctgatttcagtgatgatccaatcctattcggtcgagacgccccaccagtatttaatgatggaaaaggtgaaggtatatcctgcaatccgtctataaatatatacatgctttgctgatttatctgaatgcattggaagttgatagttcgtttacgtagtttatgttttctataccattctatgtagaatgattggttctatttcagtatcgtttatcatacatgtgctgaatgatggtcattgtgtttcaagtgtagactctgcattctttgatgttaaatatgaaggagacaagctgtttgttggcagagtattcaagtccaagtttgattgcaagattaagatagctatacacgccatcaactgcaagtttcacttccgaactgcgagatcaactccaaagtttatggtcttgaaatgcatctctaagacttgtccatggcgtgtgtatgcttctaaggtagattcttctgacagctttcaagtacggcaggcaaatcagagacacaccttcaccattgatcaaagtcgtagataccaccgcttagcaacaacacaagtcataggcgaacgtatgcaatctcgatttctcggtattaaacgtgggccaaatgctgctgttattagcaagttcctgcttgatgactaccatgttagtatatcatacttgaaagcttggcgtgctagagaggttgccatgaagaagtcattaggatctatggcaggcagccatgcaccaatccccgcatacgctggcctacttgagcaagtgaacncaggcagtctgtgctttacagagtatgatgatgatccaacttgaccacgacgtttcaagtaccaattcattgccttcgcagcatccattaaaggttatgcatttatgcagaaggtcattgttgttgatggaacctctatgaagggccgatatggtggctgactaatatcagcatgttcccaagatgggaatttccagatcttcccacttgcttttggcattgtcaacagcgagaatgatagtgcatatgaatggttttttcacaagctcagcattatagctccagacaatccggatttaatgttcatatcagaccgccatgctagcatctacactggattgagcaaggtgagaaagacaatagtttccattcagccttttatatattatacaagtaatgtctgatttgttgactatttcaatcaggtatacacgcaagccaatcatgctgcttgcactgttcacctttggcgtaatgtcagacatttgtataagcctaaaagcctttgccgtctaatgtctgaagctgcccaagcgtttgatgtcactgagttcaataggatatttctcaagatacaaaagttaaacccggatgtgatgcatatttagttgatttgggtaattttgtttactctcttcataatattgttcagcttccatatagttatagtaaattggttgacaggattgtagattacataaccatgtatattgtaatgtgtatagggttttcagaatggaccagagtgcattcaaaaggtcggcgtttcaatattatggatagtaacacatgtgagtcgtggaacaacgttattaaagaggcacgcgagtacccacttatttgcatgctggagtacataagaacaactttgatggattggtttgctactagaagggctcaagctgaagactaccactttagctccgagagtgcatgaaagagttaaggaaaactatcaagccgccatgtcaatgtctgttaagccaatttgcaacttcgagttccaggtccaagtttagactggtgaatgttttattgtcaaattggacaagtctacttgttcttgcttggaatttcaaggtttagggataccttgtgctcacgcaatacaagttgctgctcggcttggagttcctacaaattctttgacagcaatcggatattttaatgagttagtgaagctaagttatgaggagaaaatctatccaattcactctgttggtggggaggtcgcacccagaatagctttaggaacgacaggggaggtgcatccaccattttttcggcggccacctgggagaccaaggaagataagaatattgtctcgtggtgaattcaaggcaagttcagaatattaaaacagtacatagtccattcgatttcttaaaatctaaca

SEQ ID NO: 4977 - DNA, 1747 bp, Arabidopsis thaliana landsberg
  unsure (1)..(1747): unsure at all n locations
aaaccgtatattggaaatatgaaaattgagaaataaaaaacttaaaatagtaacaattaacgattttgctttaaacatacactctcttgtcactccacgagccctacgcttcccaaccgcctgcctttttcnnnnnnnnnnnnnnnnnnaccactctcgccgtcgccgtcaccggtactccgatcacctccgcacgattcatttcctatttgcatttttcacctctctaggtaataactccgcgccgtctcatcaatttgcttcctctcctcagatttgatttcaatcagtgaattgctctgtcgaaattattgatctacgatcttagatcttacggaaatttcgttccgatttcaatctccggtgcctgatccgatctgatcgaatcgtgttacattcaaatttactgttgcttagcgatcgcgatcgaattcatatgtttttcgattctgtgatatcttcatgactcttgattcgtgactcgattctttagcggaaagtgagtcttctggagaatgggagattgaagaagtaagagattcactgattgaggaagagagaaagttagttcagaaaaatggctccagtgagtaaagctgataagaaggcagccgtagatgctgctgcgtggatgttcaatgtcgtcacttctgttggtatcatcattgttaataaagctttaatggcgacttatggttatagctttggtaaagatttctcttttgctcttacttaagacgttttctttgaaacctgtagctattcttctaatttgtttacttatcatgttgcagctacaacgttaaccggtttacatttcgctacaacgactctgatgacgcttgttttaagatgtcttggttacattcagccttctcatcttccgtttacggagcttttgagatttattctgtttgctaatttctccattgttggaatgaatgtcagtcttatgtggaactctgttggtttttatcaggtattagacatcatctagctctgtaattgtgaaaagaaatgtattgctgattttatgattgtcctgtttttgcttgtcagattgctaagctcagcatgattcctgtatcttgtttgttggaaatggttttcgataagattcgttattccagagatacaaagcttagcataggactggttcttgtgggtgttggtgtttgcacagttactgatgttagtgtaaacactaaaggatttgtagccgctttcgttgctgtgtggagtactgctctgcaacaatacgtaagtgttctgtgctcttacggagtaacatatcgtttctttgtttaagataatactaatattggtgtggtttttacatgatgcagtatgtacattaccttcagcgcaagtactcgcttaactcattcaacctattgggacataccgctccagcccaagccgcaacattactggtagttggcccgtttcttgattattggctgacagaaaaaagagtagacatgtacgattacaacttggtttcagtggtaagtacgaaaaacctcaataagttcttagtctcattggaattagatttaacttgactctcctcacaaaagcaaaatcgcatcattatgtcaatagaagtaaaatgttactaccttatgaattttgtggtagtctgattatgatagcctttttgtgtttttgctgtttggtaccaactttgtttagagtcagcatgcagagccaagcagatactataggaatctagcttatttcaatg

SEQ ID NO: 4978 - DNA, 508 bp, Arabidopsis thaliana landsberg
atttcctgcagacaatcgaaagcactggtcagaatattctccggatagctcaagctttcttgtagcgtccgtggtattatacaattacaatgagtagtgtttttgattgattaagcttactacctttttctttctctgctgacatgtgggtttggttctctgcctctcaagtgcttcattgatctggctggacgagaacgtgcttttcaaactttatgtgctggtacaagattgaaagaaggctgtcatataaacaggagtttacttactcttggaacgggcatccgcaaactaaggttcgattatatgacacagaaaaaacctggtttaccaatgaggtggtgttctaacagagtgtaattattttcaagtgcagtaatggaaaaaactggcacataccgcatcgagactcaaagctcactcgaatccttaaaaactctttgggaggaaatgcgagaacagctctcatatgcacaatgagccctgcacgtagacatgtagaacagtc

SEQ ID NO: 4979 - DNA, 599 bp, Arabidopsis thaliana landsberg
tggctagttttcgtcccgtacgtacctgcaagtgtggtggttgtgtgtgcgatcttggtgctcttgaggagaaggatcgtgaagaagacaaagttcatgaattcttgtttggacttgatgatgctttgtttcgaacagtgagatcaactcttgtgtcacgtgttcctgtgcaacctttggaagaagtgtacaacattgtgaggcaagaggaggatctgatcagaaatggagcaaagattatggatgatcaacgtgaagtcaatgcatttgctgctcagatgagaccgaagctttaccaaggaagaagtgatgaaaaagaaaagggaatggtgtgtaaacactgcaatcgcagcggtcatgcgtccgatagctgctatgcagtcattggatacccggagtggtggggagataggccacggagccgctcaatgcaaactcggggtcgtggagggactagttcaagcggcgggcgtggacgaggtgcagctgcttacgccaatcgtgtgacagttccaaatcatgactcctttgaacaagcaaactatgctcttactgatgaggatcgtgacggtgtgagcggtctcactgatagtcagtgg

SEQ ID NO: 4980 - DNA, 414 bp, Arabidopsis thaliana landsberg
gggacgaaaactagccatactgtcccaaatctttgttagcttccttttttatgtctcaattgtaagccctctttgcttacaacacgctaactcagatttaagttgctgaagtttaggcccattcatcacagaaaaccttttcttcaaatgatcccagaggtccttcgccacatcacgattagaaacgttcttcttcaccactggatcgatactcattttaatccaagacacgagcaatgcttgaatagtccaccaatcttccaaatctggagatccttctacgggttttgaaattgtcccgtcaaggaatccaaatttctttcgagagcataacgccgtcttcatgctgcatgcccattcatcatagttacttccagtcaacaatggatgtgagattactgcaccaggattgtc

SEQ ID NO: 4981 - DNA, 3630 bp, Arabidopsis thaliana landsberg
acaatcattatcgatgtgagtggtcaatcaaagaaactttcctcagcgctttctcatggcacaatgagactctcaacatctggacgtatgttttcgttttcttctgatttttttttcccttggttgaaaatttgtaaacggggttttgaaatttggcaggcatttgtgtggatttgcgatatttacttggatgatggttgtgagttcaatggagacgacggagcttggcctcgccggctttgttagccttctctccgggtaagaaaaatctcgaggtcaaaatcgtcattttttgttttgaggaaaattaaacaaatttcaatctttttgggggatttgtgggtcctaatgacagagcaacaattcgctggccatggccgtcaatggcaatgtcaaaagatgtttacttctccagcgatcaaactctgcatcacgtaaagattcttccttttttattctgtgacattgtttattctaatttaagtagtagacatgcaacataagtgctttcaaataacaaatcccatttttgttgtgtgctgattgcaattagcagtagtgctaaatggtaactttcacccaccatgtcatgttctctttggattttttctatctttctgtttttaactttggtttttatggatacttcagtttctctagacttgctctttatgctcacctactttgaaatcacgtgatttcctaccgaaattaaggaacaaactttatgattggatttgtttagtttagcataaatcttgtaacctgccccaactatttgatgtttctctcactttagttttctgtagattttctttgtgctcacctaactttccaactaacatgattttttcaacgggtttaagaaaagaaaggctgtttttttgtcaacataaacttatgatttggtggtgtctactggcaggacttaaacgtgacacacactcgctcgctcctgaattctcaaggagatgttaactacgaagccattccgaaatggccatggcttgtgttcttgaccggagcaatgggctgcttgatctgcagttccatgtcacacctcttcgcctgtcactccagacggttcaacctcttcttctggcgtctagactacgctggaatctccctcatgatcgtctgttcattcttcgcacctatctactatgcattctcatgccacacttactggcgactcttctacctctcatcgatctcaatcctcggtctcctcgccatcttcactctcctctctccatcactctcagctccacgtttcagatctttcagagcagctctgttcctaacaatgggattttctggcgtaataccagccacacatgtgctttaccttcataaggatcacccaaacgtgcttatagctctcgtatatgaacttgcgatggctgtgttgtatgcaacaggagcagcgttttatgttacccgcatacctgaaagatggaagcctggggcttttgatattgcaggacatagccatcagatattccatgtgtttgtagtcttaggagctcttgctcatagtgttgccagtcttcttatcatggattttcgacgggcttctccttcttgtgccttttaactcgaaaacacattgtaaaacatttagtaatacttcattcaatgtatcaatgtatgtttgtccccatagaagacgcaatgtaccatccaagatattcaaaagtaaacaaaaactcaatttcctacaagtattgttcaagcttcatgatacaaagatctaatctaattgattctttctgaaagataaagcagagctatatatagaaggaatcaaggaacctctaatcagttgaatcattggaaaatgaaagggcgaggaagatacagagaggaacaacaagaaaagcagcaatcttcaacaattcctctgtttctttggagatcacacctattcttgaccaatcaccactatacctgaagagattttaagaacactatactataagtattaaataactctgcaattctcgctctttgagtgctaaaaatcttacccagcatcgatgaatcccaaactcagaacagcgatcgcagatcgagcgacgattgtgttggggactttgattcgcaagatgggtcgttcttcgtttgatttctctgaaaagtctctccttttcgacattatcgtgacgccattagcaaagcttcggagtttgttgtcgttaggacagaatgagacgaagctactgtgttgtaaggtcagcattttcacttttcccggaatgagagattatcagactttacatgttgataagggtaatgtttttttttttctaatacagctaaagactgagggtgcttaggtaatttaacttgaaattctgaagcttctaattttttcccaccattgttctcgtttagctcggctaaaaccctagaaaacctctggagctatggagatgatgcaggattcgttccaagtccataggattccacaatcgaagtatgtcgatggagttagatggcttccacaagcttctgctttgaatcgtttcttcgcaacagcgtcctatgacgcggattgtgattcttcatcaatcgagatccaatcgctcgacccaaaccctagagggaatcacaacacgaacccgttaatcgagtcgttatcttcatggacttcaccttctcgcgtttcgtctctagaagtcgcgggaaacggcggtggtggcggttcattcaaaccaatggtttcagcagctacgtcttctggttctcttcacgttctgatgattgatttggtggaaggagctgcgattgaagaggtttacgcggcggaaggggagaggtttcatgtgggacgcgtggaaggtgtggattggagagagggaggagaatgtgttactgttggtgaagatgggagagtgaatgtagtgaagattgtgaatggtgaaggtttaaggtatagaaaggtctttgatgggaatggattggtggcttatagagctgtgaaatgggcttctccgactgagtttgttactggaggatatggttttggtttgcaattgtgggatcagaggaagtctggtgaagctgtttcacaactcaaagggaactggtgagttcttaactctgtttaatgattgaataaatgctagttcaatctggttttgaattcctggcatgtttgctcttcgatgatatggaacttgaaagtttgtgcgtttggctttagaacacactcgtaatatttgatttggtgagctgtttagcaagtagaactaagaatgggaacggtagatcctttgagttaatagtctatataagaagcatgcctatcctactgtgtctattctgattataacattgcaggtttcaaggcaaaacttctgcaattgtccactccattgacattcatccatctcggaagcgcacttgcattgtaagtgttttttcttcttcgcatgtgttagatgtcttttaaagttcttatctgtttgaagtttgaaaaacgtctttcccatcaactgatgaacatgataattcctagtgtgatcctcaatctttaccaagtttttgggtacatagcccctggtaatattccttcatatttcaaaggagaaaaaagtgaatcattttgtttctgtgtttagaata

SEQ ID NO: 4982 - DNA, 592 bp, Arabidopsis thaliana landsberg
ttgttcagaagtgtaatggttggttttatcccaaaatctataatgatcacatattcacatgcatatagtaaaggtttgtgagataaaattgtctctacaatttggtgtaagattataaaagtgaaatcatcaaatccgatgtgattgatgatcagatcaacatatgcttaacttaagtacatcttgtcccaagtaggagtaagcaaggacgggcaagtacggcacttcttccaccggccatcaaaggcttatacgaccggaacacgaaaacgaagaaaagtgagcacagatgaggaaggccatgaaacaaggtggcacaaaacaggcaagactcgacctgttttgtctcaatcaggagaaaccggtttcaagaagatcctagtgctctacaccaactatggtcgccagaagaagcctgagaagacgaattgggtgatgcatcagtatcatttaggtagcagcgaggacgaaaaagacggtgaaccagtcctctctaaagtcttctaccaaacacagcctatgcaatgcggttcgatggaacctaaaccgaaaaatctcgtaaacctaaacccggttagttatgaaaatattc

SEQ ID NO: 4983 - DNA, 1438 bp, Arabidopsis thaliana landsberg
  unsure (1)..(1438): unsure at all n locations
cgaaatgtatttcttctgtttaaatttttattatctgtttgaaagatataatacggttgtgacatgaaaaatggtatggttgtgacaatattcaaaaacaatattcatttttttttttgggatcaaatctttgtcattttctaatcatgtaaagtagtggtaaattgccccccaccatgtgttgttgttttcgatatgtcttggatcttttcttctctcttgagctttgaacccaccaaactttttaaaaagattacataaacttttgaggaaagaataaagaatgatgctttactcattcacatgactaagctttaaaagattctctctgtaacaggattcgaacgtgacacatcacatctcatgtcttacctctcaaggagaagctattccaaaatggccatggctcgtgtacttagttggagcaatgggttgtttaatctgcagctctgtttcacacctccttgcttgtcactcaaaacgtttcaacatcttcttctggcgtttggactacgcaggaatatctctcatgatcgtcgcttctttctttgcaccaatctactacgcattctcctgccaccctaacttccgtttactctatttatcctcgatctcgatcctgggtctcctcgctatcatcactctcctctctcccgctctctctacgccgcgttttagacctttcagagctaatcttttccttgcaatgggatcctctgctgtgatacctgctacacatgtgctttgtctttactgggatcatcctaacgtgttcatcgccctcggttacgagattgccaccgccttgtcgtattttgtgggagcaacgttttatgttagccgtgtgcctgagagatggaagcctggtgcgtttgatatggcgggacatagccatcagatattccatgtgtttgtagttatgggtgctcttgctcattgtgttaccactcttctcatcattgatttttcacgggcttccccttcttgtgggttttagcaagaagatattgtttagtaagcttctgtgatcttgcgtttcgatgtatgtgatcttgatttgctttggacaatccatggctatttcctatttgaaaccgagacttgatttgtcgaatctcattttcaagattgaaatgattctgattactaaagcagaatatatacatatcgattccttggaagagaagaaattgtgagaaagtaggaatataaagaaaacctagaaccttttaattcctttgtttctctnnnnnnnnnnnnnnnnnnngtgataaaatggttaaggttcattatactatttttgctagggataattaaagaacaaatctcagatagttacatgggctgttttgatctaattaagccatctccatgaatgtcgtgcacaacaagccattgttgctctctggaatttgtgcaagccataatatgaaaacca

SEQ ID NO: 4984 - DNA, 2567 bp, Arabidopsis thaliana landsberg
tatctgttatccacttcttccgtgtcgggacttctcctcccataccgttaatccactgttgattcgcggtgtctttgaaagaaaacctcttcagtttgatcttgaacttattgtaatctgttacccaataggtcgtgatccacaggtctgaatcatgacgtgttcgttgtggtatgggcatggatctcgctggagcctcagggcgaggactttcatatacgcaccaatttgctgtacaaaaataaaaccaacccagacacaacacaacattaattcaggcgtaaccaagtaaaactcagccttaacacctaaataaatcagccattatctaaattaactcagacagaacgacgggaggggtcagccataaccttagacaaactcagacagaatataacaataacttacatcgtaaatcagtcattatctactataactcagacataatgacacgataactcagccataacattagccaaactcagacagaacataacaataacttacatcatcacccagccatccatgtttctcgtctggccagtcctttctttcggctatgataacagagtagaacagcacatcgtcgaacccatatgttttgtaataatgtttgctaacaaataataaagaaagttaatataaacaaatagtgtaagcatgtcgtatttaacaacttagtaatgtataaagggtcatacctttcgggacctgtcaaataagccttaagcttctgcagtttggccggatcaaccggtgccagaggatcatagattgctcgtgaaggcagacaaccctttctcatgcagctcagcccgttgtctccaataactggaaaagtgtgagtgggcatatcttcggggttaatcaatgagctcccatccggggccagcttaacagttttgagccgaatttcttttacactctttagcctctcggtttcctcctcatcttcatcagactcaggaagcatttcattatactcggatacaaccttatccgtgacatcaactacatccgaatcttcctcagctttttccttagcttcctcagctttttccttagtttcctcagatggttttggtttctttattctaatctttggcgcagaaggaggcacctttttaggctgctccaaaggctttcttcctcttcctcttctcgctggcggtttctggattagctcatttaatgttttctcctttttctgctttggcacatttggggctggtggcttcctagagcgtaaaaggcgattgagaggagaaacagtctcaacgaaatcaaaatcagacacaatggaggccttatcaaattctgcttcaagcttcctacttaccccaacatcagcttgtttcgactgcataaacgtaacgaaaactcaggcgttaaataacgaaaactcatacctatgtataaatataactcagccataactaactaaaagttataactcagccgtataatataaagataactcagacataactaactaaaagttataactcagccgtacaatatgaagataactcagccataactaactaaaatttataactcagccgcataatatgcagataactcagccataactaactaaaatttataactcagccgtataatatgaagataactcagccataactaactaaaagtttaccggaggaggactagtagcagattggttatttgtcaggcttctttggaccttctggtgtctgttgagtttggggcttagggtagccttgctgtgttttgggtaaaaacatatctctaatataactagtagagtttaattctgagtcagatatgcccttcagatgctctttaatttgtttgacatcgttctcattagatccaaaccttgtttcaaactttgcatcaatcctcgattctacttgaactccaatcacatccagacgcgaggacatttctttgatgctattatcaacggtgtcaaaccttgagtttaagggagagatcaagttggagaccacatccacgagcgactgctgttctccctgacatcctgctcttcgttgccctcatcagattcgacagccacttccttcttcttattcttcttcatctattgggcatctttctcaggagaatgaacaccctcgctgtgagagactttctgcttctttgcgggagattcagacacatccgcatctttatcttttacgagtttcttcttcttctcattcgtcttcacatcccaataacctttaacaaacttagcctcgtgtatgtcttcgatcaagtgatcgagtgctgggtcttctaattcgtttggccaagtatgaaacagctcgcttaactcagccttcgcaaccattttacgcacacgcaactacaacacaagagataataaaacccatcagtatgtttaactcagccatagtataactcaggcgtcacagaacataactcagccatcacataacatatttcacaaaacagaacataacttagccattagagaacataactcagtcattacagttcagaactcagccatgacataacatatttgacaaaaaaaagagaacataactcagccg

SEQ ID NO: 4985 - DNA, 2458 bp, Arabidopsis thaliana landsberg
aatggttgcaacatgtaagattgttctcactgtggctgtgcgaaccacctggactataagtctccatgtaatcaactccttcttcttgttcatagcccttagcaacaagacgagcctttaatctatcaagagttccatcagcctttagcttcgttttgaaaacccacctgcagcctaaaggagtaatgaacgagtcaggtggaaccaaatcccaagtatgtgtttcttcaaaagagtcatactcttcacccattgcatcagtccatccagggtctttaagagctgttttgactgtctttggtacagggtagttactctttactgtaaacatagcatatttgggatttggcttgaaaatgcctgatttagaccttgttatcataggatgactttgatcattagtgttgtcagcagcttctgtttctgttgtagcttcactgaacactgaactttctgaattttatagaattttcactcaactctgagtcttctgcatcatttcctgaacctgcagaagagataggagtttctggttgtggtgaattctgctgagtaactggagaagaagggagactgttgcctataggaacagaatctaagtccgccgtacacccacaacctcctcctccaacagcaccagagaattcaccttgttcatcactgaaagaagctgcagtattagagatatccaagacttctggagttgcaggaatactcttcgggagaaagttgctttgccaagctgagactaaagttgagtttgtacctgaaactttgtcactatagatatctgaaaaaaggaatttggattcatcaaatagaacatgtctgttgatatatatcttccctgtaggcggatgaaaacacttgtatcccttgtacttctcattataacctgtgaaaacacatagtaacgatttaggatcaaacttgttacttgcataaggtctgagattaggatagcaggcacatccaaaaactcgaagagaagtgtagactggagcctttcccataagaacttcatatggacttttctgatctttgagaactgaggatggaagaaggttgcacaggaaatttgaagtgtaaaaagcttctacccacaaaaactgaggaactttgccttgaaacatcattgacgaaccaagttctgtaatgtgacgatgttttctttcagcaataccattttgttgaggagtgtagggacatgagatcaactgtctgattccacactctgcaagatgagaaacaaactgattgctgataaactcaccccctccatcacactgaaaactagcaatcttttgttgacactgattctcaaccatcttttaaaccttaaaaagacagagaagaaatctgatttgagtcgcaatggataaaaccaagtgaatcttgagtaattgtcaataaagattacataatatcgaaaatcttgagaagaaacaactggtgcaggaccccataagtcacagtggacacgttctaggagtctgcttgaaacaaaatctgaagaagcaaaaggaagcttgcaaatctttcccatttggcaagcatcacacaaactgtgacttgttttacttataactatggctttatttcttaaaggttgttggagaacatcttgattagggtgacctagcctcatatgccacacctcatcacttgtagcttgttgtctggaagagtagcaagccatgaacttcggattctccaacaggtacaaatcattatggcgggttcctttcgtgaggagctgttttgtcagcttgtccttaacaatcacaccatcagagtcaaactcaatcacacaaggataatctgaggtaagcttagacacagataaaagagacttagtgatattaggacaaacaagaacatctcttagtggcagattacctatggttgcttgtcagatctgctgaaccaatgtgagttatggggagaaagtcactgttgcttacaataactgaatcttctccactgtaaggttgagcagactgaagctgagaagtagagttcgtgatgtgtgaagtagcgcctgagtcagtcacccaaggattggatttctgatcagagacacgcattgcagcaaaggctttactgaagtcttcactctgaaaagcatgatcaaaacgcttccaacacttataagcagaatgaccatacttgttgcagatctgacaggtaggtcttgttcctgagtcagagggagagccacttgagatttgttgagggaaacctctccctttagtggtgtagttgttgcgacctcgatttccaccagattgaccactttgagtagtttgattcagtagcataagccaagtgaggagaaacattaggaacctctgcatacttttgcagcttatcatcaaaattaatcagcttgaaaacaacatcctcaaaagacatgggataggtatccatagaaccttcaatcattgtagacacaggc

SEQ ID NO: 4986 - DNA, 4195 bp, Arabidopsis thaliana landsberg
tatgaagctggggcggggcttgtcttcctccttcatatatatttgatggtaaccggagaagcagtcgaggagtgacatgacttcgcacccggtcgcgctatcgactattttgtcgatccgagacagcgggaagttgtcctttgggcaggccttgttgagactggtgaagtcgatgcacattcgccacttgccgctctttttctgcaccatcacaacgttggagagccacgtggggtaagccactggctcgataaatttggcttccaggaggcgatgtacctcggccttggcggcttctgtcttttcgtcagacattatgcggagccgctattttttcggtctcaccgaagggtcgattcctaggctgtgctcaattatggatcggctaactccgaccaggtcgagggcggaccaggcgaagatgtctttgttcttggacaagcagcagaggagtttctcctcgtcatgcgaagtgaggtcttcgctgatggtgactgtcttcttgggcgtggcctggtcaaggggaacggtcttggtcccgtcgttgctctgcagctgtgccttgtcgtgttctttgtcgtttgggctggcgaacgcagggacctcgcgctgggccatgaggcagtgcacatttctttgcccggcgacgaagtcccgctctatgttgcatgcagtctgctggttgccgtagactgtgatggcgcctaatggacctggtatcttcatgcacaggtaaagtccgtgaatggctgcctcaaacttgttgatagagccccgacccataatggcgttgtacgaatataccatatccacgatgtcgaaggtcacttgctcacttcgggcattgggtgctacaccgaaggagagaggcaattctattttgccgacgggaaatgtgcccttgccgccgaaaccatacaacgggttgtccgaagcttcagaagctgtggttatgcccatgcggtcgaaggcgtggaggaagatgatgtccgcctgactgccgttgtcgacgaggactttgtgtaagtcccaacctgccacgctgcagttgatgaccattgcgtcgatgtggggggcgctgcgtaggtcgacgtctcgcgcgtcgaaggttagcggtatgtgggaccacttcgtctgcacgactgggccagtgacggcgacatggttgatgctgcggtagtggtcccgcttctgccgcttggtgtcgaagtcggtgcttgacccccctgttatcatgtgaatgactccgcgataaggttgatcggcgaagtcttcttgctttgggggatggggaatgttttggtgttgctggtgtggtggtgggggtggaggaggtacgatttgtacttcctgatgatgttggtaagcgtggtgcggtggatgcggagcgggggcgtggacgtatggtggagggggtggctggtagttatgcgcgacaattctgggattgtcggctggctgcgccctcgccattctgtctctggtggccttcgtttcggggcagtctttggtttggtgggtgcagtcttcgccgtgaaaaaggcagtagaatcggcgcggcggctgcgcgcgccctcggcccctgccacgagttccatttccgcggccctgggggggatattcttggcggcgaggggggtcagcagcgggatgctggttggcgatgttgtgtacttgctgctgactgcggccatctcgaccggagtctggctgcggagtcctcgtccacgtgcggctggactgcggggcatctttgggcttccgctgtgactcaaccttgcgctggtggagctcttcggatttggcatatttttcaaagagctgatacaactcctagaggttcttgggcggatctctgatacagtggctgtagaggacgccggcccgaaggccactgatggcgtagtggatagcgatctgatcatcgacggagggcagctgtgacttgagtgttaagaatttgtggtaatactctcgcagagtctctttttccagctatttgcagagtgagagttcggccaaggcgtcggtgtttgggcggtacccttggaagttgagcaggaatttgtcccggagacttctccaggagtcaatggacagcgggggcaatctggtgaaccaggtgagtgctgggccctctagggcgatgatgaaagacttcgccattgtggcgtcgtcccctccggcggatgcaacggcgacctgataactcattatgtattgcgctgggtcggtgctgccgttgtacttgggataggtccctgctcggaagttagctggccaaggcgtcacttgtaggtgtggcgccaggggacttcgctcgtcgaggtagttgactccttggaatggtgcgccgtgctggaaggtgtggtcgcgctgggggaaacgcgggttctccggctgtgcccggtgttgcaggggtgggccatgctgcaggccaaggtggccttcgcgcgtgccttccggttgcgcacgctgctggaggggtggctcttgctgcaggccgaggtggccttcgcgctgcatcagcgcgatctcgcgctcgaggtcttgggccttctgctcctcgtcgcgtatcatttgccgcaccttggctagtgcgggaacaaacagccacgctatcttaagcaacatagctagttttatcctacttaggctagatgaagtatccgaagctctaacaaaagaaaaatagcatttctatacatcatcttctcctatctatcatggccaactgtcacccttaccactacacgaggttcatacattaaatctaaaccagatattgaacttttccgtatgtaaaaagccaaagtttcagccgcgtttctcaagtacaccgtcacagaaactctaaaaagaaggggaataagcaaatgaagttaccgtgcctggcccctcagaacatggtcctccaattaaagcaacgattctagccccagttccaggaaaacaagctccaagtagtcccgtagccacacttatagccactcccgtgcatcgtgactggcgccgtccagcctggacaggccactgatccgtctgtagctcttccaacagctacactccaaaacaaaaacaaagttctttaccatcatcatcagctttaataaaattatgcaatatcaaaaatccatcagaaaaaagtagaaaagcaaaaactttatcaaactccaaccacaaaagatggacgaacttaccaaatcaatcgtgaattcacagtcagaagctggcaacaagaatctattaacacccgaatagccgaaattggcagaattatccctccccattggaaaaccaccaaccgggtttcgtctcccagaagcaccaagccctaactgctccaaaacttgatctttggagatctccttatctcccctaaagacataaactttagtcaaatcagaaaaccccagctcgtgaacatgcgcctgcgtcccaaacgagacaaacccaaccaatgcattctccggaagcaacccgatcgcctgcttaagcgcagatttcgcgtatccaaactcctcttcaatcatacacgtgtccaggacaaaaacaaacaccgacggcgaaggctgaccagaaacagcaccggtctgatcaaaattgccaacaccagtaggctgagaagggttaggcagagtgtattcaacggtagtgtactgtggatagagctcacaagggacattagtctcggacataacatggtagtgaggagggaagtggtttctctggaagcaaataggacagatccagatcttggcgaggaaatcaacacgagcaaaaggattaagagcagcggtacaaatgcgacaacgaagaggagcatattcaacagatgggatatcccggtggtaacggatcggagagatacaagcagcgacagggatcacacacttgcttgcttcaactttggtgcgaggccaaacgttccacgtcatacgaactccatcgattccttctggatccatactcgccatctctgacatggtttttaagggtaaagatccgaaattggaatgaaaaatttggtctttgtgattctgtaaattcaggggacctcagaagaatcaaaagcagagacgaaactgtggaaagggatctatctatgtgagagagattttatgagtagagagagtcgtctgtttctaataacatacatacatgcttttttagggttaaaaagaactgagagcac

SEQ ID NO: 4987 - DNA, 729 bp, Arabidopsis thaliana landsberg
tttgctgacgccacatgttatacactaccagtttgaaagtattgataaaacgatgatgaagagaaatctctttattgaatatttcagcttaaggtttacaatgacagagaagggtttatatatgaaccccaaaatagtgagacaataggtcacacgtcattagctacacatcacaacagaggaacaaagaggatgaaatttgttatgaagggacagttgatgagctgtgaatcccgtacgttgatgcgctgaaaattgaggaatcttgttaccgttgcaaggtagagaagatttgaggttaatgggcttgacactttgactgaggcccaaagtattggtgagtgttgcaggtccattcgcaaaaagcaaagcttctgattgtagaggaggttctctctgattcacacaattgagctacaacttttctaagcagagaaggagcggaggaagaggatcgtgaggtccaagaaagcaattctgcccaagaccaaaccaacttctgtcgagagcacaacctgtggaaaaccatacgttaaacgcgtaggcaagcgatttaggtgacttatccacatgttaaacgcgtgcttaggaactgcaccttagaaccaaaccgaagcagtccacaatttttgagtgcttctcggtctaagcgcttcccaagtcttggctgcagaaaaaccatgacaaacaacatcatcaatgcgcacaagtaagagatcttagccttta

SEQ ID NO: 4988 - DNA, 1709 bp, Arabidopsis thaliana landsberg
acatatctgatatctgtgtttggaacaaactggactttgtattttgatatacgtacaaaagtccatcgtacgtctttctctttttggcccttgttgtgttttgtttctagttgttatatatgtttatgaagctgggtttttttttcttctttttcatatgtcttattttctcctcaaactaaggttgttggagatagagaattggtgaaattatccacatattgaaaaactacaaagatcgaatttcaactgttctaagagttacattttctttgatgtagtgatatttttttatacatatatcctagaagtgattattaagcatctcattgttcttaggactagagatatagttcataatggagtcagatgcagtcttcaatctatatgaatgataatatatatgtcacatagttctggttctccaacacataaaacccttcacgtatcatgagtttaattaatccccaaatattatttactacgttgatctcttattaatatataaatgaaaaaaaaaaaaaaaactacactataacaacatgatgacatcctgagactcaactcaagatcctaaatgcatctacctcttagatacatctatgtataaatatctctagttatgaacttatgattaaaaaatgaatgttactaattaaatcaagattaagtcacttggttcctctagcgtttaccgagatcaatggtagtgaaaccttcttcagcagagaaacgttgttgcattccagtatcaccaatcttctgatgctcgacgttaggcaatttataactatcgtccatggccagtaagtcgtctccttgctgctgatgaacgacaagtacggagaaatgaaaatccggcgacgtcaacatatctccgatcacacctaactcagggcactcactccagtccgtgagtccgtacaagaccgaagactctaggtcatggtctcgacccactaacaccatgtcgtaggcatctccaagtgagctaatcacttgcgtagtttccacgccatctcttactatctcctctacgtagtgaattttccctttgttcgctgcatagctcttgaaatcgctgatgagattgtactcagacatgtcgctgtaatcttcgtcttgaagagcgctcttgtgacggaaatgtatcatcgtaacgttaaggtctggtttttcagccatcctcatgcataacgcgagcgcttccgcatcatccttgccaccgatgaagagcatcgcaacgttctgccacgtattggtcatcaacacggaccgacgtccctcggtctctcctcggtctatgaatattgccaccgaacaaggtgccgcgtccaacacgttaaggtttatggtccggatgggcccgttgacttgtccgacagtcccgtcaatcgcgtactgcttgtggaacggaatcacgattaacgtcgctttcttgtcgagggccagcgtgcatatgtcgttgtttatactcgagtaaggcgcggctgcggtaaagtgctgcgccatgagagctccctaacataagataagtatccattattatcaatctacaaacgcagatgcaaaaagtatgcttggaaaaattgaaaacgttattgatctcttataagattaaaaaaataaaaacttttgttgaatttttacgaggttctgggcctagatcccctcaagccggagaccagagctgttttacctggtacttt

SEQ ID NO: 4989 - DNA, 3672 bp, Arabidopsis thaliana landsberg
gagcttggctcacagctgctccggttcgggtgttactccaggaaacacacacccagccgggtgcgatgaaacattgtgacccaggggaacacctcagataaactatacttggctcgggtgttattccagaaaacacacccgagccaagctcaactatatctcgaggatcgcttgggctcggcctggaaggcgcggcattcggtccgagcccaaggtagaatatccacccgaggaggatacttatacaaattcagtgaagggtcaagatatcatttcaaaaatatctctgggatattatcggttatggaagtttcccgaaactcccgaagaataaggaagatttccatatagaaaagaacccctatcgccgacccggagataactggaaatctttcgagaatatcgcgagaggcggtttaccaaggtcctatataaagcgcctcaaggaacgaacaaaggggacatgcacaaaaacactctcaacttcagactatcaaaacgctatgattttgaaggcaaaaacacttattttttacttttctaaacacttgtacgatcaaatcatcatctcttcaataataatatcaagaacaccgtcatcggtaatcaaacaattctgtagttctttgagagtttcgcggtaatatcaagaacaacgtaagcggtagtcacagataccctaagtacaatttcgattgtgtgagtttcgactctcacaatttggcgctagaaggaggggaagagatttctctttctccaagaacacaaaaccgaccgatcaagcaacgatgaccaacaaccagatccccgctaccaccgttgacgcggagggaaaccctgttcctccaatccagacaaatgctcccgaagtcgccactcccgcagtcctagcagaactgaggagcatgatggcacaactccagaagaaggtgaacaacaatgagcaagcaaagcgatccttggcccaacagctcgaagcagctacttctcaagggcaggtcaggaccacccgcttcggcgcacgacactttcctgatcggcgagtaactgcagatctcaatccaacaagacttgtgttcaacacacattgcaacacaacgaggccactttggcgaactgcttcagcgcttggcggaacccgagcagaaccaacagcctcgggagaacagaatatgacggaccaagtggaagaagccaacccgcgggatccaattccccaagccgaagctgacgaggctgaccagatggaagtctccgatggcgaagattcggaagaaaacattagatggggtgaggaatatgctagggagcaggaaataaacgccatcaaactccttagccaaggcggacaccgagatgaagctcgtacgatcacagatacacaacgcagtctcctccgtcccaaacatcgaccgcattctagaagaatcccacaggacgcctttcactcgcaagacctctaacacaaaaatttctgtggcccgagccaagttcaagccggaggagagagacggtggtctctgttatctgttcgtcgaacacttgaaaggacaggctttagattggttctcgagacttgaaggaaattctgttgatagtttccagtaactttcgacacttttcctcaagcaatactcaatgcttattgatctgggcacatatgatgccgatctttggtcgctatctcagcaaccaaacgagccgctcagggacttcctcacaaaattccgatctaccctagctagagtggagggaattaatgatgtgcggctctctctgctcttaagaaggcgttgtggtacaaatctgaattccgaaaggagttaaatctgtccaagccacaaacgatccgcgacgctctgcaacgagcctcagattatgtttcccacgaaaaagaaatggagctactattaaaaaggcaggagccgtcaaacaagcaccctgcagcgaaaaatcccaacctaccgctctgaaccatgaaaagggcgcccaaggtgggacgttcgtacaccacgaggggcaaaacttctctagagcccataattatcaagccgataccccccgaggtcgaggacgaggccgcggccgaggtcgtggaatagaatccgatatttggacgaaggaccaacccacaggaaacgatcaggaacactgcaagttgcacaaaagctacggtcaacatacctccaggtcttaaagtttcggggggaatttggctggtgaaatcggtggaggcctggccaccgaagatttagatgccgaaagccaaaaccgagcaggtaaatgctgtggcgaatctacagcaggcagccctcgcggcaaaccccgaaggacgcaagagaggtaaaggcaaccacgaggcaaatgacgacaaaccggaagctgctcggggaaggatcttcacaattttaggagattcagctttctgtcaagtcacaacggcgtcaatcaaagcttatcagaggaaggccgactcaaatcgtaactggacacgaccgtttaacgaaccagatgacgaagtgactttttatgagagcgatactaacggcttggaccgtccgcacaatgatcccttggtcattccactaattattggtgatttcaacgttgaacgagttttagtcgacatggggagcacactggacatcatttttctcacgaccctacgagaaatgaaggtcgatatgacgcaaattgtacaaactccgcgacatgtgctcgggttctctagggaaaccaccatgactctcggcaccatctagttaccagtccaagccaaggggataacgaaaatcatcgatttctctgttacttaccagccgaccgtttataatgcaattattggcacgtcatggttgaatcaattccgagacgtcgcctcgacatatcatctttgcatgaagtttcccacgagcaacggcgtgaagaccatctggggaaatcagaaaaatgcccgaatttgtttcatggcagcacacaagctcagaaaccccgtcaccgagtcgacagccgacgcgaaacataagaaggctaaactgggctgagccgaagcaaaagccatctccgagcagtgatagcaactaaagatcgaggaggctcgagaatcaacaagaccagtccccgacccggtaatctttgtctggtccccagaagacttgcccggagtaagcgtcgaaatcgtagcacacgagctcaacgtcgacccaacttttaaactcgtcaagcaaaagaggagaaaattgggtcgggagcgagcggaagctgtgaaagccgaggtagagaaactgttaaggatcggctccatcatcgaggcaaagtaccccaattggctcgcaaatcccgttgtggtaaagaagaaaaatggcaaatggagagtctgcgtagacttcactgatctgatcatagcctgcccaaaggatagtttcccattgccgccaatcgatcgcctcgtgcaatcaacctctggaaacaagttgctgtcattcattgaagctttcgctggctacaaccaaatcatgatgaaccccgaggatcaagagaaaactgctttctataaagcaaaaggaatttttttgctatcgagtgatgccattcggactcaagaatgccggggcaacttctcaatgcttcgtcaacaagatcttcgccttatcgatcgggaaaacgatggaa

SEQ ID NO: 4990 - DNA, 951 bp, Arabidopsis thaliana landsberg
  unsure (1)..(951): unsure at all n locations
aatacaaactgtatataggtatttacttatgttatgtttttcagttaattatgagatttcattccgtatagttatttcgattttccaaattcgtatgattccgtatttcccaaaaaaaatatacctgaccgagtttggcattaggaaacttggcattaacggcatcttcaagttctttaccaagaggagcagcaccagatttcaccactcttatcgagctcaaatcatacttctccgtctccgaagacttcgcaatggccaacacaatcggcggaaccatcggagccaccgtcactttacacctctggatcagctccaatagcagattgatctcaaacttcggcattatcagaatcgccgcaccaactctaagaccacacaacatgatcgagttcaaagcgtagatatgaaacatgggcaaaacacagagtatgacgtcatcgctgtggaaataaagattcgggttctcgccgtcgacttgctgagcaacgctcgtgactagtcccttgtgagtcagcatcactccttttggtaatcccgtcgtgccagaggagtaaggtagtgccaccacgtcgtccggtgaaatctccaccgagtcgatgacttctgatgcctcggttgtcgactgagtcaactcggtgaagcggaggcagccttcagggattggcacggattcgttgtcgtcgatgcagacgatgactactccgtcgtcgttttgaagtggtttgattttgtcgacgtaacgagcttcggtgattatgagtttggtgttggaggctttggcttgtttagctatctccgccggagtgaagaaagggtttgcggcggtggcggttgcgccgcggaaggaggcggcgaggaaagagaggacgaattcgggacagtttgggaggaggagcatgacgacgtcgttttggttaacgccgagtttgtgaaaattggcgcgnattt

SEQ ID NO: 4991 - DNA, 2887 bp, Arabidopsis thaliana landsberg
ttgatggtgtcctccattcccttatcattttattagttgtcacttgtctcatatattcaagagtagtataaagaacaatttacacaaaataatgtaattattctgatagaaatcgaatgtaaattgacattaccaattttttatatacaataccaattttcacacttttattcatgacaagaacatttacaactatgataggagtatacaaccaatcacaaaatgcaatacacaactatatttaattacatttacgttttttttttttaccacatgattgattagttaatatcaatttaaagcagtatatgaatatcatgatcagagtaaaaattcatttaaaacgtcacttaaattataaaaggccagagtcgaaaacgacacctgttgacggcaaccaagaattcccgtcaatgaaacccgaaacagtaaacccttgagcttcagtcaacgtcaacgccgggtgatacccggcccaactaacccgacccgacaccgatgatccaggacccgaattcccaaattctccgtaataaagagtcttcaaagcaaagttactcgaccaaggagaccaacccgaagggtgaatcgagccgtctataaacgattgcatcacaacagtcctcgaatactgcttccatggacgacccaagtaagtcttggtcgaaccggttattctgcaattatggatagaaataccggtgttctggttcgggtcggaccggccttgggccgtgacgtagttctggtccgaggagcctttacgagatacgaggttgcagctttggaaaacgacggcagagtttccgaagatgaaatcgacggtgcctgttatgtcggtttctctatagaactgtcgtttggagagagtgtagagtgagtcttggtacccatctattgagcatctgtataccacggacctatctgatccgacccgtaatgctacagcttgctccgagtttggtccggcactgttcacgaatgttatgtctcgagctatgaatccatctcccatggcggcttccataattaaaccaaaatttggaaagggtttagtacttcaatgagaaacaaaccttaaaatataaaactgtgaagttgaccgaaacaaaaccttaaaatacagcataaaatatcataaatagaaaatataacacttctctgaattaccttagttacatgtaaagaaaaaaacatgagagtattttaacacaatcaacttgtaaaattgtaaatatttaaacgaaaaaactaacctaaaataacacataagaatacaataatttattacttggatcttttaaacatcttgacttatttaaggatagccattagttcttgattcagaaattttggttttctaaatttgaatagaaaaacagcctatatgaaggggaaaaaaaattctatactataaaaagtcatttactaaatgatttgatgcaatggtattaaaaaaaaaaattgttcactgaattgaataatttagtaattaattttagtgaaaatctcaccgacagtagcggattggtaagtattccagccgcctctgttacttctgctaccgacaatgactgttttgcccttcccgtcaccgaccaacataacgttcttctgtttgctcggaatattcagattctctttataggttccggctgttaaatggattacgcttctgccacttcccttctccaaagacgccaacgcttcggctacgctcatgtgagtcccgcttccgtcggctgccaccacagcgtgaggtctcagctcttctactgaagcttctaaaagcttccggtctgacgaagaaacccacgtcggaaaatcatgatcggacaacagtttccggccaccagttagattagacgaagaagaactcttctgtttatcagacacgaacatgtctagtgaattggtcagtaaaccggtgaggtttcttgcgaaagaatctatcgcaattccttctttgttgaagctagatttctcactgaggctttgcttacatgtctcttgattagtcaacgccgcgcttagccacgtatgtacatcatcattgacgtgatctttacgcttgatgacaacgatgcgatacaacatgtcgagggtgtcgtcaagcagctcaaggcagtcgttgacaggatctagcatgagggtttgagaagtacggtgcgaaagcgtgagattaaaggcgagagaacgagcaaagagagcgtggtccaagctgagttggactgagctgagaaaccctttgttggaagaagttgagggtttggttctcgaagatgaatcggagtttgggtgtcttgagatttttgtgaatttagagtttgatgaatgggcaaatactgaagtctgaagggacaagaggttcaagactaggaacaacattagtttgatcccgaacttatgatttggtaatgagaatgatgtagttgccattgtgatatatgtgcaactttgatgattcgtgtgtagtagagaagaagtgttatgtgattgctaatctatatatagtttcgtaataaactactactaggttattaagaaaaaaaactaaactagaactaggtgtacgaagaaccttttgaagaggaggtggaccaaattcataaattcgagttccgaaggacaaggttgggaagagactttttattaatgtattattgcccgttatgatacatcgggttagaaaaattacgagtggaaatactcttcagtaagaaaaaaaggtcatatatctttagatcaatattattacatttctaagaaaactcaaatgataagtttatttgaattgattagcatatttcttaccgttttcttaaaatattatttttgattgaaaactatatatttataaagagatatagttttattaaaactaagt

SEQ ID NO: 4992 - DNA, 2384 bp, Arabidopsis thaliana landsberg
caaattcagattttattcgaggacttactgttttttttttttctttagttacacccaaatatacaaataataaaaaaagaaaagagattataccacaccattacttactttaatcacaacataaataactatataagaatttatttatcaaaggagctttaattacaaagctcaattcacaagtcctgggtcgaaactaacgcccgttgacggcaaccatatattcccgtcaataaaactcgccacagtgaatttttccgcttccgtcaccgtcaaagacggatgacacccactccatttaacccgacccgaaaccgatgatccaggacccgaattcccatattctccgtaaaacagagatttgagaccgaaaccacccgaccaaggagaccaacccgacggatgaatcgacccgccgataaatgattgcatcaccaccgtcctcgaatactccttccacggccgaccaagataagtcatcgattccgccgtgatcctgcagttttgaatcgcgattccggtgttttgacccggattgctccgtccttgcgccgtcacgaagtttctctgacccggtaaaggtttccgtgcggcgatgttgcaggattgaaatacgacggcggagtttccgaatatgaaatcgacggtgccggtgatatccgtctctctatagaattgtcgtttggagtgtgtgtagagtgaatcttggtatccttccactgagcatcgatgcacgacggatttatctgctccgacacggagcgccaccgcttgctccgatttgggtccggcgttgttcacgaatgtcatgtcccgcgctatgaacccttcccccatagcggcttttcaaattcagtaaatcaataaccggatcaaaccaaaactctaaaatataattaaccggaaaataacggaaccgaaccaaaccgaaaattgatttatagaatcttaccgacggttgcagttttgtaagtagtccagccgcctctgttacttctgctacctacaatgactgttttacccttcccgtcaccaactaacataacgttcttctgcttcgtcggaatgttgatgttctcatgatatgtcccggcttttaggtatattttggtcctgcccccactactcgctaatgacgtagacaacaaggcttctcctatggttttgtgtgtcccacttccgtcaggagccaccaccgcatcaacattcagctcctccaccggagcttctagaagcctccgttgctccgacgaaggaacgaacgtcggaaaatactcttgtttcgataagagtttccggtgttttgacttgacggatacgaacaagtcaagcgagctagtcaacaaaccggttaggtttcttgcgacgaaatccatcgcaagtccgtgtttgtatgactcggatttttcttgaaggctctgctcacaagtgtcttggttcgtgagtgctgcgcttagccatgtatggacatcttcttcatcattatccgcagggatgcgagataacatgtcaagtgtgtcgtcgagcagctcgaggcagtcgtggatgggatcgaacgtgtgggtttgtacggttcgatgagaaagagtgaggttgaaagcaagagaacgagccaagagagcatggttcatactctcttggaccgttgcaagaaacccttgtttggtttttgatgatggtgagcttcgatgtctcgagaatcttgagaagtgggagttggaattggaactgatactgacagctgaattagtttgaattaggtacaaaaagtttacgatcaccaaaaacattagtgtgtttggaatcttgtgatttgatattgatgatgatgaagccattatagttatgaaacttaatgattagcgagttgttgtagtagcagcagcttaaggatacatgtatatatagttacatttttatgttcgttactatttttgatttgtgtcgatgttaattaatttcttactaagaaacgactcttaagtttcgagcaaaatcacataccgtaaatacttgtactttatttcggaaatatgatgcatccatatcaatctttatcgtataataagcagtgcctaatctaatctcttccatcctgaaaattaatgactttgtaagataggtgatatatgatatatcagaatattaatttgatgtgttaccaagcttgaagcattagtaagtaagtaggacacattttttttggatttgtttatttatttctagttaacaggtaagagatataggaagtgacaagtactatcttttatttgaaaaaatatattctctttgatgcaatgaaactaaacatttcacaactctattttgtggtcaatttatatggattacatgttccacacaatgtatgtaagttagttccctaa

SEQ ID NO: 4993 - DNA, 936 bp, Arabidopsis thaliana landsberg
ccagatggctgaaatagagagatacagagacaggttacttcactgacaaggaacaaaaactctgacaagtttttcagtttcatataaagctgtacttacagcttcgatagatgtcgtttggttcgggtttatcgcagacaaatctagagatccttgctggtctaacggaaacaatggcacatcaaccattattgattgctttgaagcaactacatttgtaaagtaagcctgaaactgaaaatttcataacccttaagtttgttgagcaatatcaatatgactttgagggtctagacaatgtgttttcacctgttttacggatacatcttccacggcaagctctagttccgggttcaagacagcaagtttcatcgacaggaactgcaaagtatggctctttaagaattagacttattctctttggttaatagtgaagttaagttacagagaatcatggtttcattgcttacctcgacttgtctttggagacattgaacataattgatgatctcatcaagcataccagcttttcctgtgaccttattgcatccaggcacaatatcttgcagatatttcattttcttgctgatcttttctcttctcgcctgcaaatccaaatccattcagaaaccctagatatatcatgattcttgtatcacaagaaacttatttatttttattaccctttctgctaagctgtgtctgtcagtggcttggcctcgacgagctctcacgtggatataatctaatttctgattctctgaagctcctttcgatgtctcctttgaagtgtctgaagatgcttcagtgtttcccatgtttgattttcctttcatgcttgactctgtctcagcctctactttgatcttcttctctgacttttgctcttcccttgtcttaacctaagacattattaataaaaaatatcaaaaacca

SEQ ID NO: 4994 - DNA, 3965 bp, Arabidopsis thaliana landsberg
tgaatcctggcggatagactgcttcttgttattaacatatttgcattttttgtttgtttgtcaaaataattttctaaatataaatacgtataaaataaaattttacactggaaagtaaaataacaattaatttgaagaatatgctataacacataatttagttgaagtttgaaaaattgattgggtagttgctaatgttttctttttggaacaaaattacaggagaaaaggtttgggaacgatcggtgttcaaagaggtcaagataaaagtataccctagttgtacacctcctggaggaggcagtggacgaccatgtcctcctcctagattctagagaaattctatcatagaatatttgatccaaaaaaagaatgattcatcatatatatgtaataatcttttcaacatttaataaacttattcctaactaaaaatataataggaaagtggttggatacgaagaaacatacaatggttgtctgtatctatattgacggctctaacgtcaaagctatatataatatgtgaatatattagatgatatcaaacgctcaacttacttaattagaaattagctagtcaaattccttacgtaagagctttggtgaaaatgtcatccaattggccatgtgtagagagacatggagtattgtacctacgggctacggctacgagaatctcataacgatggaaataagtcaataacagttgatttggtatagtgtagttttaaacgtagtctcttttatgtcatcaagtgtttccaaatgtaaaatgcatatcgattgtcctatgagaatagcagtgggatctcaacgtatgatgctaagaattacctttcgaaagttgaaaatattattcgatcttggttttaagacttttaatgaaactttacgttattatacatgtactaagtactaaggagtctacttcagctcatgtgttttaacaaatatctccaaattaatttgaaggttaagctttttataagagtaagcaaaaattttaatgcattccattgtgtgattaagcataagatcctcacctaagtactaattccataagcctacaaagcacaatactatagaaaagaaagatacccaagtggactaaccaagagtttttatacaaacccccaaaaaaaaaaaagaataaaacaccaaacactacaaattaaaacagaacattgaaatcaaaatgttaaaacttaaaagctacaaaattgcgaaatatgtatgtacactcataaagttggaagtccaaatatctatctaacttgcatgtcgttattaaatatcctcatctcatcaatctaacatcatctctaatccaacggcccaatcctcaccgtccaaggcaaagtgcagcatcaacatcaagccgccacgcaaagccaccgtcactcatcctccaaacatcacagaacgaagtaatcgaactcacctccttatcacgacacgtgtactgcaatctcattctacacgtaaaagtccggtacgttaccaaaggcttctccttcatcacaagccacacactcatcttactacactgctcatgatctttcccaaccaccaactctctgtaagaaccgttcgtccaaatgactctccctaaaccgtccgatataaaaccaggacacgtgtctctctcaagattcatcttcctctcctcgtccgtacgccctaactcatactctccctccatcaatctctccgttacacactccaccgtcaacaacgacgacacaaccgtttccgtcattaactctgtctgataacgtctgttataactagctccgtcattaaaactcagccacaacgccgccgcacctaactccggcgccgccttagccttcaacggcgagtctttcttctcaggagtctctggaagaagaggcaacgtcacgatctctctaccaccaccagatccgttcttcgtctcatcgtttctctgtcgtttgctgttaccgttactattaacggatccggtactgctactattattctcctttgaatattttctcttacctctccgtgatctcgacgaaacgttagttatcaccgatccattcttctccgtcggtgaagcaggagatccaccagaatcaggtctcggtgcaatcggacggtaccggagcataatccgatcaaccttcgagatatcatttccaccaccactaccaccgtacctcgcaatacaacaacctccccggaaattcatgttttgtctaacaaacaagtttgttttgttggagaagaagtgtttggtgtgtatataaagaaaagaaaactcttacgtcgacacgtttggagaaaaccttgccacgtgcgagaccaaacgatgaacagcgcaacgacgtgattggacgaaggttagagacgtggcgttttgtttgaatccgacattgagactcgaagtacgagggaagtggtgaccaataggagagcgaggagtggctattaggtgcggtgcgattaaaggtagacacataaggctgcgactttggagttacgtgtaacagaacgcgagggttttggttttgagatgagaggacacatggcgtgatcttgtttgctgttttctacgttcaaaagttttgagattctttttttaagtttggtttctattattagcatgtaggatggggagattgtgacacgtggggagtaacgctgtgacacgaatctcctttggatgtggggttgcatttatttccagaagaagatactttttgcatgcatataattggtggaaagtataatattaatagtataatacacactttataaatatctactacgactacgaaatcttccggatttcactaaattacaaaacaataaaccgtatgaaatttagtattagtatctaactattcgtttgacaaaaaaaagtacagatatgatcaattaagtagatattagttgaagataagaaaaaaatataatcatgtaaaatgtcatgtgtcgtttaatagacatgttatctaattaattttcaatcactattatttcagtacgattcaatagttgtccacataacctatttataatccaactcaatttaattctagaagaagatacttttagcatgtatataattggtggaaaatataagtagtataaaatatgcatatctactattttttccatgttccggatttcggtgagttataacaagactgtaatctcataaaagtttatagaccatgaatatagaacacagtgcagaatggaaatgttataaccggccgaagttaaattttccattataattatttattttgtgtaattattgattaaaataagaaaatgagtaactactattatgacggtccaaattctaacagaaaaattatgaatggcatgtcagataaatgcacaaaatatgttgtggttaaacaattgcaatgtggtcataatttttatttcttattcaatttttttacaaaaaaaattgttaaaaaataagaacattttactgcttataagaatgttttgataattatttaaccaaccatttttcttgtaaatactttatattttattaagattcactttatggtttgtaaaatatttttatagttttgaaataataaacttgtaaattcataaaattatagtttaactttagttttctgattcttaaatattgaacaataactaataatattagcaattcatagttccagtgccaactctttaagataaattaaattgcatatatatatattgcattatggactgaatgtgtgtatatgtaactatgaagtatatgaacatgacgatgccaactctttaagataatttaaatttgattgttcattggaatccaaattcttgaaatttgacaactttaatcttaaattcatcaaaataagataattaaacccgaattttttaaaactacaagaaataattaaaaaagaaagaaagaaatgttgatgcatattttattgaacact

SEQ ID NO: 4995 - DNA, 4167 bp, Arabidopsis thaliana landsberg
taggtccgattgttttttcttttcagtagatgctatcgttgttttcccttagggtgaggaaattcaagttcagggtggaaacggttcaattcaataatataaaatttcacatttcgttatcttttaaattatacattacaagaaaaagatttcttcatacatataaaatttcaatatggacatctcttagtaattgtgatcctaagtccatgcttcatagacaatatgaaaccaagaactggcttaatcttttgccctttaataactttaatctcatagttgtgtaatatctccacggccaccatcttcatttgagtcatagctaaatgtttacctagacaagttcttggaccagaattaaacgataagaacttgaaggagggctcatgtcttaagcttcccttgtcagaaacccatctttctggcttgaattccaatgcgtcatctccccaaaccgctctcatcctccccaacgcataaaggcagattataatcttagagtttgcttggactttatggccacttggaagcacatctgatttgataggagacttgcgcccaaaggaaactggtggatagagcctcattgattcatacaacgccgcatgtaagtagaccaacttgtctaagttctcttggccatttcttccgtcttttgaaatatttttgtcgatgatctctttacgaatctttgttacaacttgagggttttcagagagaagccaaaaaaaccaagagagagcagaagacgttgtgtctctcccagcaagattgaaagctaagatggtgtctcttaagaatttatcattgataggatccaagagctggtactgggttgtatcaagctttatgtgagatgtcaaaagatttgcatgactatctctaatgaaatgatcattattattcacttgtgatctttttacctcttctctcctggctgatatgtatttcccacacactcgatcaaaaatggcaccagcttctatcatcttcttctccatcccaactccgatccagctttgtagcttccacgagaatctaggtttaacgtgcctatacattattccttctactattgtgtcgagagctttagcagactcaacctctggcgtttcaatagagagagatttaggatcaaacccggtaacaataaagaaagttgtatcaaaagtgaatctttgaaacacttgctgcaaatccacgaccttctcttcctcacaacattgattgaaaagaggaacaagaccatcgtaaagctactcctcgttgcactcaatgatagcttttgaaagccttatattaagcataagttgggagcttttctttattcctccaagccccgagtcgaataaagtaaattctcagagacatcaaagacctctttaaagtcggcacctttggtatagttggagaagtttgagctcaatatgtagtgaatattagctggatcaactgtgaacaacatatccatttcagcgaaccacggtcccttaaatagaaaggttaagtggctcatttcaagagcctccacgccgaagttgtagatgcggtggagaaccatcaggaagcctggaagcatcccaataactggccagtttcgaaaaacctgaccatgaggtttcttgaagtacatgtaatagaagaagaaaaggcaaatgatggctatggcaacgtcaagtaagcttacagaagccatatgagagagttaggagcttggtttacagacacaatatggtggtggttccttttgtgtgttgaaggaacttgtttatatagagtaagattattacatatataaattagcaaccaacaaaaagaaaatttattaaaaaagaaagaaattaccaatgcattcattcaactgcttttcatatcttaagaattaagattagtgaaagtgttaagctggtgaagctactaaccacacaaatggatgagacagaattggtggaggacttgtaaagaagggtccataatcttacaatttcagacactaaatgacaaaccaactttaagaggatagacaaatcgagaagtgcatcagaattcacggtcccagacactgcaacgaaggtcgttgtaatagttttccaaatctattaatgtcattaaatttaatcaacagtccaagtaacaactaactgtcagaaataataacacctcgacctggtcagtgcaatgaaggccgttttaacagtttttctttattacatgaagaaaaactgaatcatatgtttagtaaataaaatccaaaaaagtctagttgcatacataaaaacaagggaggagaaaatctaggcaaacccatactggagataataggaggtgttccgacaacatcaatcacatgcttaatagtattattggaagaagacaaaagtatctaataagacataaaaaagggtgtagacacagatttcgtctggatataataatacaattacaaaagaaagataaagctgagaaaccaaaagaaatcctgaccttcctataggagatctcattatggctactttggttggtctcttgactgctctccattatctgcaaaaatcatatctttttaacgatctgaacaacatcctcgtcctcaagctcgtgttcctgaaggataaaatacgatgtcgagacagcaatagttagttagtcagggatattgcaatatcgatttaccagattaacttttgtttgatttgctagaagaactaacctttccaactctttgtggcttgtgtttggcacttgaaccccaaaccagagcgctgtatcaggagatcattagttaagtattcatgagcgatgcttttgagcaagaaccatataacagagaaaagaaaaatgttaaggattttaattacttactacttgaattgtttaagcatgtctttgtgaatccggatgcagaagtcctctactgttctcttcttggatgataagattacgggatcatcataatccggattcattgcctttggttttgtgtagattcgagttagatccaagtattcccatatcttgtccagaagtccatcaagattccactccagatgcgcactgcaagataaataaatttatatcttaatggcaaaagtaaacaagtttatcgcaaatcctgccggtaatttaacaacatttacctgacaggacagtaatgaggaagtttgtccaaaatttcaagttcctcaagtgtgattgaatcgatcttgttgacagcatagatacagggcatataaatccgactgccctcgatgacatcaatgaggtcatcagcggttgcatcgtagcgcagggtgatgtcagcattgtgcatcctgtactcaccgcaaatcgccttgacggtgtcaaggtcaaggtgtgtgacagcgactgtagaagttagattgataccacctttgtcttttttcctaaatgttaaatttggtggctccttgttcaacctacatagcaacagtccatgatcgagtcagactatctaccagaaacgatcaaatatacagtgtataaaggttgttatataaacaatctataccttattccgaatccttcgagctctttttcaatgagacgcttgtgagtaattggttttatggcatcaagaactattaagatgcagttgcatgtcctagccgtacttataacctggaaatagtaaagtgtgaaagatgatcaaagagggtcaaaatataaaatactcaagagatttagactcgacttacctgtcttcctctaccttttccatctttagcaccctcaataataccaggaagatctaataactgcaaacacatagaaggggacataaaaaagagtattagcatcagtgtccaatgaataattacaggtcgtttcctgacttaaactaagtaccaagaagtcattaaaagatcaagcaagatacatgtttaatatagaagtaagactcgagaaaagataattacaagctaggacatggcatatgtagccaaggatttcattgtgtttcaacaattaccaagacagaggaaacactatccaagaattatcatttttcccccacaaataacagattaacacagacgcatagatgtagataccatacctggattttagctccacgatatgtgataacaccaggaatgcatgtcaaagtcgtgaactcataagaagcaacctgagaaaacattgtgg

SEQ ID NO: 4996 - DNA, 1526 bp, Arabidopsis thaliana landsberg
agcgattgggttcccagaagaatctttgacgcggtagaaccgaacatcattgttccagaccttcaaatcaataattcatgtcactaaacgactggttaataaatcacatggtcgatatatggaaaggtaacagataagattccaaatttaccggagctaaaccatctgctggttcaatatcaattccaaaaagtgtcttagctagactgaaaagtccatccataacctttggcagtgagaagtatggacgtagttcttcctagaaagaccaaaacgagagataaggatcaagactttcaaaacaatatataattgcatcactagctacagaaggacaaagaacctcattaatatcgtatttggattcacgaagcctctcactccagaaagtggtgtcccaatgagtcatactgtcagattctgcagcaccctggttctttgcgaaactcttgaggtcttccatgtctaatttatacaacgattcaagaaagtcaaagttccgtattggatagcccaatgcctcatgctatttctgaccgtaacaagtttcaacagtagccaacttgtttaacaaataacaaattgatttgaatacatcttctctgtatcagtatgttaccttgaacagccgcatcccaggatgcactacgaagcttctctaaaagctctgctgctttctcaacagtagccattttcatagccatgcttacctagaacagtagaaagtcgcattaagccaattagaaagaaaaaagaacagttttacttaggttgatgactctacctcagcgtaattgttgtaaccaagaagcttagctttttccaagcgaagcttcaaaatctggtcaataattgccgtattatccaaatcgccagaagaggcacgagataggtaagcacggtagacttcctcacgcagagcacggtttttagcatgttgcatgacaggaagataactaggagcatccagtgtaatgatccatggtccattctcagcagttgcattttcatggccctagtgtcacatatcaagaagcaaaaattaacaaaccttactaaaaaaataacgaaacatggaactttatatatctttcagttaatattgataccttggagacagctgcttgtgcgaatagcccaagagcagatggaggcaatccctcgatctctttcttgtctgttatcaacttttcaaatttctttgttgcatccaaaacattctcagaaaacttatgggaaagtttttcgagttcctacaatcaagaaaaaaacagcgcgtaagcataagcaaagttgtgacaaacatagaaccaatttaccaagtaaactgatttacatcaaacctgttcaattttattaaactcttctctcttttcatcatcaagagcaataccaatgagaaccgcctcctttatttgagctgaaattcatactgaaaccaaagttatcatatgaaagaaacgttgttttaatgttccaataagaaactacttgccttctactaagcgttgacgagcttcactgag

SEQ ID NO: 4997 - DNA, 1556 bp, Arabidopsis thaliana landsberg
tggtctgaaccaaactccacttgatggtgacaagccaagccttatgacattccgggaggtaaaaaatatcttaaattctatattgattgtgaaggaaggaaatgcctgagtatgtatggtagttggtaacaaactatgagtacacatgcccccaaatgtagttttccctgccctagaagttaaattggtacctgagaaaacttacttcatgtgtaattttattgatttattcgactattgtggattggtattcactcatggaactttacatattggtggcgtggagggccatgctatgacgaaattttacaatctttaggagtagcactagatagaccacttctcttttcgacctatatgtagctttccatacttgaaactttaggtgcttttggagaactcttacatgcatggtcaatgactcatgatccttgtctttatgacaatattattctgatttacaggtagagactgtgttccatgaatttggccatgctcttcagcatatgcttaccaaagaggatgaggggctagtggctggtatccggaatatcgagtgggatgcagttgaattaccgtcacagtttatggagaactggtgctaccacaggtacttgggttcaactgccttgccgaatttaatttacaaatgtttgggtccccgtgatttttgtcctcttacaaatacttttgcagtgctgcgtagaggcatttactagtaaatttataatgaacattatctgaatgtggtttcagggataccttaatgagcattgctaagcattatcaaacaggagaaactcttcccgagaatgtatacaagaagctactggctgcaagaacattccgtgcagggtcccttagtcttcgccaggtcagtacattatatcaaactgtagatgttcatatgtagtactaagcaagattctcttcttcagcggattgtacacatttcagtaaatttggctcttgttgttccagttgaagtttgctacagttgatctggagctgcacacaaaatacatgccaggtggggcagagaccatctacgaagttgatcaaagggtgtccataaaaacacaagtgatccctccacttcctgaagatagattcctctgtagcttcagtcatatatttgcaggtaacatccttaaacccgttttgttgtaacgcatccgtaaacgttagtcatgtgcagttatcgtaggtgcgtttgatagtttgtttcacttgttcaccttctcatgtcttgtcaggtggttatgcagctggatactacagttacaaggtaaaatatattcttttgtttctatataattcaccgatgcagcagttctattcacgatggttctctgctggtcaaatatctaaatacacttttgtggacaacgtgcagtgggcggaggttttgtctgcagatgcgttttcagcttttgaagatgctgggttggatgacattaaggtatatgctgctaaacaaacttactgaagctttgattcgattttccagactctgaacatctctctgtgttgagtgggttgcaaatcacaggctg

SEQ ID NO: 4998 - DNA, 966 bp, Arabidopsis thaliana landsberg
aactgtcagcctctgcagcaccttggttcttcgcaaaactcttaaggtcttctatgtctaagtccataacacatgtaaaattaattataatcatgattttggtttgaaaggccgatacaaaaaagctatgagggaaaccgttacatactttattggatagagaaatgcagtaacagctcactagttaaagaactatatgttgatttaagtatttttctcactagaagttaccttgaacagccggatcccatgaagcactgcgaagcttttctagtagctcatctgctttctccacagtagccattttcgtggccatgcttacctggacaaggagaatgatattaaatttaagcccatgagtaaaggagagtaagttgacttagtagactataatacctcagcataatttctgtaaccaagaagcttagccttttccagtcgaagcttcaagatttggtcgataattgctgtattatctaaatcacccgaagaggcacgggataagtaagcacggtagacttcctcgcgcagagctcggtttttggcatgttgcataacgggaagataactaggagcatcgagtgtaatgagccatggtccagtgtcagcagttgcagtttcatggcccttgggtcatatatattaagacgaatcaacaacttaaaaacccaatgtaaatcaacatgaaactttataaatctttcagatattataccttggaaacagctgcttgtgcgaacaatcctagtgcagatggtggcaacccctcaatctctttcttgtctgttatcaacttttcaaacttctttgtagcgtccaaaacattctcagaaaacttatgagaaagtttttcaagttcctatagtggacaagggcaaatcaagtaagcagatcatattactaattacacagaagtaatgcgtgtggactcatggagctgacatttattcgtcaagagttatagaa

SEQ ID NO: 4999 - DNA, 1124 bp, Arabidopsis thaliana landsberg
atgctacttcctatcctaatcaatctctctacagctctctccactgttcctttatccagctctccttccaattgaaccgcaattgtccaaactctctctaagtacctcgcattgactttctgatctcccgtaaaaggcctacagatcatcggaactccttccccgatgctctctagggtcgagttccatccgcagtgactccaaaaccctcccactgcaggatgtctgagaacttctatctgtggtgcccatttcacaatgtaacctctttctgaaaccaacctactgaattcctccggtaaagactctgtccattccgagccgggaatagaacccggtcggatcacccataagaaaggttggttgctattacgtaaaccccaagccatctccaacatgtctttagtttccattagagccaagcttcccaaacttatgtaaatcactgagcctattttttgcttgttcaaccactcaaggcaactcctgtcctcttcaagtaaactagaaggcgctgaagctgcaatgtgaagtgggcctataggatacactggaacttgcagttgtttttgtaaccatgccaaagatgagctctctagacagcttgttgagttgatgataactgccgaagctgttcgaatgttgacagtctcactgtaaaccttgagtatactctctaatggcccaaatgctgaagttggcaggtccttgtaccttagcggatgcaaccctggaaattccttgtctgacactttgggatctgcaaagcaaacaacagcatttggattggtttatatatctaaatgcacttttaaagtttgagttaacaagctaaaaaatcttgagtacctttcatgtcaagcaagaatgactctgcgttgactctagacaaaacagagcgacagacaaaggcagtagcacttgtcgtgctgaagaggacgctaggaagttgaaactctttaactgcagcttgggagaagtacatgtactcatcgtagacgacacaagcgatatcattaccttgctcctgaatagttgaccaatacattgcttgaagcttgcctcgcaaatttgattgagcttgaagagaaacttgaatggtccaaggtttttgagatcagact

SEQ ID NO: 5000 - DNA, 1016 bp, Arabidopsis thaliana landsberg
caggatgaggggctagttgctggtatccgaaatatcgagtgggacgcggttgaattaccatcacagtttatggagaattggtgctaccacaggtaatttggagttcatttccaggcagaatcgatgttacctcgttgtgatttacaaagtaatgtgaaatgagcgttatgaattgctggtttcagggacactttaatgagcattgctaagcattacgaaacaggagaaacactcccagaggaagtatacaagaaactcctggccgcaagaacattccgtgcagggtcctttagtcttcgtcaggtgaatataagacaactagctgctaatgttttgttttcaggggtggtattaatgatgatttcatgttttgaattttcagttgaaatttgccagtgttgatcttgagctgcacacaaaatacgtaccaggaggaccagagtccatctatgacgtagatcaaagggtatcagtaaaaacccaagttatccctccacttcctgaggatagatttctctgtagcttcagtcacatctttgccggtaacaaccctcttaaccctgagagactatacatcgttggtgcgttttgatctgaccattcacctactaacttgttcatgaatttccagggggatatgcagctggatattacagttacaaggtaaatttgaaaatctctttatactataaccgactctgtaaattctcactcaaatatctaaaaaaactggatgtgaaaaacttgcagtgggcagaagttttgtctgctgatgcattttcagcatttgaagacgctggactagacgacatcaaggtatcagtatatcctaaaacatctgttatagacacaaatagttgagatacaaagattacgaaattttttgttgcaaacaggctgttaaagaaacaggacagagattcagaaacaccatacttgcacttggaggagggaaagcgcctcttaaggtattactaactactactatattgtgttttcatacaatagtttcaata

SEQ ID NO: 5001 - DNA, 1636 bp, Arabidopsis thaliana landsberg
cccctatttggtcactccaactttgatgttcctgatggaggtttacttacattcctttcaggacctttttctaccttcggttgtgtctcttgctgttccactagccctcatgtctttgaccaggttaagttcttcttgcatcctcaaacgaaaaaggagactatgtttggcttcaactgtctcgtaaatgtttgcaatgtatatgctaattgatgtaagttttttttctttctcagtgaggtaaatggaaaggaacaggatcctaaagatgtattggcttctgaaaagatggctccaagagggaagctagtttttggagttggccttggagcattggtttttgttccagtctttaaagctctaactggattgcctccttacatgggtatcttgttgggtcttggagttctttggatcttgacagatgccattcattacggtgaatcagaaagacaaaagctcaaagtacctcaagccttatctcgaatagacacacaaggtgctctgtttttcctcgggattcttttatccgtaagcaggtattaaatcaactgttcatctccaaactccttatgttccattactcttaagaattcacaatcttttctgatgttgttttccttttttccagccttgaggcagctgggatactccgggagattgcaaactaccttgatgccaatatacccaacgttgagctcattgcaagtgctatcggtgttgtatcagcaatcatagacaatgttccactggttgcagcgactatggggatgtatgatctcacatcgttccctcaagattctgaattttggcaactcattgcattctgtgccggcactggtggttcgatgcttgtcattggttctgctgctggtgtagccttcatggggatggagaaagtcgatttcttttggtatttccgaaaggtaagatacattcttccggcttgtctaacgatcaacaacacaacattgcattaaccagactgaaactcaatactcttgtggctctgcgcaagaaactcagtttttttttttttttctccatgcaggttagtggttttgcttttgctggctatgctgctggtatcgcagcttatctggccgttcataatcttcatttcgagatcccaacaactgtggctcagatcccatttctcactggttcataagctccatcaatctctgtatttcttctctctgagaaaacaagaaaaaatccctggctggctgcaacaataacacatcacttcgtcgacatgccgctttggaaaaaatcaactatgtaatttgtttcatgtacactcgattgtatcattagtacagaataaatcatcatttaagattatatcgatctctgaattttttcttatgtgcatccatgtaaagtattaacctatagtttgaggaaaacaaactcttcaatggcaggaatgtctccgattttcttcaaagtttctttgcttggttgctcatctactccaattgccatcacagcttgcttgcctggagcaattcgaccaacgctcatgaagctcacgttgacgttttcatctactaagatgctagcaactttaccgatcatcccatgctgatctacttgcctgcacagaatcacacctccttttaaactcaca

SEQ ID NO: 5002 - DNA, 1828 bp, Arabidopsis thaliana landsberg
gtccccgataaaccacagtaagatgtagatttttaacatccgccggaagaggcagacattgacatctctctcttgaaaaatcaaaacttagtaagaaacgacgactcgtcagatgaccaccagtctttactaagagcaaaccagtaagtagttcccttgacattcatgccataactctcattcgtttgtatgtggaagtcggtagtcacaccaacacttctccacgaatgagaagcaaagtcatagacttcggactcaatgtgaaatgggttaccaacgggatgcatcctcaagattttgtaggaggaggatctgttatcgtaacctagggcatataagtctgattccttgtaggaatttctgggttggatccacttggtttcccctgaacatggattccaaacaaccaatctcctgtctttggtacagcatagcaataagccgtcgcagtgaaaggcgttacgtatatcaacttcttctgaagaattagaaagagggtcttttaggctgaattgacctgttagcttcgcagatggggcaccgttgttattgttaattccatggagatctatactcactaaataaaccctaaactcgatcaacataataactataggatactgccttggagcggacgcatagtgcttcttagcaaagcttccatcgacgaccagagcgttccatcttctgcaagtcgatcgagatcgtgccagagatacagccggaaccttagagagtatctccaggaccaaatcctccggaagatgcattgtgcttgaagccttgaaagcgaatgtcacttgggaattgagggtagggttaagttagaatacttagaaattagggttaagttagatatatgcttcttctatgggcttcgtcttagattcaactaaatttgggcttttggtggcaataaggcgagagagattagtggaactaacataagagccaacgatgtttatgaaatatacaatttagtattcccattgacaatcaaaaatctaataatctcaatcgcaatttaaaaaagatgaacaaacgcgtttttttctttctctcgaccccctggtcaaatataacttcgtcacaccaccagatcacacttggccgttcactctaccacattactcgacctcctggtcgagtatcatcactcaacaccaacaccatcactcgaccaagcactcgatcacatcttcagagtactcaaatccgcactcaacaagacaagctgagcacaaggaagagaagaggagaagaagaagtgtttggtagcggtccggagcttcatctgatcacgaagcccatcttggcccattatcactctgtggaaagtcgattaggtttctggcccatctactatcattttatttcgttttgtataaatatgtgttttagggttttgtcctgggccatctagtggacattgattttttacttcagttttattttctgttttactctggctgcgccgcttttgcttctgcaacctgtaattcgagttttttccaagttatcaagatcccgcattagatttcatcagtcatctagtttctaaactctttatctcttgacttatgcaatattatcatttacctgcgtgtatgtctttgagcaagttgtatgagtagtgaccaagcattcctaaggatggtactctcccccacctagaggggagtggtaacttccaataaagataatctagatttaaaagttctgaacttagagaaaaattatctgataccattggtttttcgtataattcccaaattttcaaagaaagtgggcattcaaatagaacatgatttattgtttcctctgccat

SEQ ID NO: 5003 - DNA, 2561 bp, Arabidopsis thaliana landsberg
ctattttatctgacactcctccatatatgatgttctctcggattgtcccagcaaacaatgttggctcttggctaaccaaagctatgtgtcgacgaagtgatctcagatgatacgaccttatatcgcgaccatcgattttcactataccctttaacgggtcgtagaaccgctctatcaagccaactatagtggatttacctgacccgcttggaccaacaatggctgtggacttcccctcttcgatcttgatggagaagttcttgaatataatcacatccggtctagtcgggtacgagaaatctacgtcaagaaattcaacctgacccgttattctttctgtttcatatccatctggatcctccggatcaatcgacgtgtaccgatccaacacagcgaaaactgaccctaccgcatccgaacctttagctagatccgtggtcatgcttccagcatcggcaatgactcgaccagtactaactaagatcataaacgtctcgaacaaagctttagccgtgatgtacccatcttgtatcagtctaccaccgtaccagaaatctaaagcccacgtacacgacgtgaggctctgcgacatagcaagcccgaagcctgcaaaccacgactggcgaatgctttctctccgcggactttcttgggccttttcgagcattttcatgatacgttcttgtgatgaaaatgcagtgatggttcggacgttggaaactgcctctgccgctagtttgctactttcatcttgagccttgattgcttttttcgacatgctcttgagtagaacccgacgagtgtagaagcaaacaataatcaccggttgcaccgcaatcatcacaagtgctaacctccaagcgatgaccaagcccatcgtgaaagctatggtaacagccgatacggtttgcaccactaatgccattcgatcacccactaacgatctcaccttatcattcaaaaaaaaaaacataagcaaaatcaagaaacactataacattgttcgttaaaaagatttttatgtagacttaccacattagcatcttttgcgagtctagagcaaatggcgccgcttgagttctcatctctatcgaaccaaccgacctcaaacgttaacaccttagaaagcatccgttctcggatacgtttagtcaaatactcacccatgtatgcaaaattgtagtgttgactgatgttgatcaagaaagaaagaacggctaggccaacaaaagataatgcatagatccttgttttctccttgatctcgtcgtggctcgttagaaaataaaccgagaccatcgaccctaaagaatatgcgtaagctggctgtatggctccaaataaagttgcgcttatgcaaccatacgatgcttgtttccattccggtaaattcattgccaatagtctcttaaacgacggtaattgcggcttgttgtcttcggaaagattctttatagtgcttggacctgtaaccgagttagcagagcttgaacggctaagagtcgacactctagaactatttcttatatctttgctcggatccgagattggacctattttcacactaacgttgatgtcttgtttttcaatctgttgtaagtgaacaagtgtagagtattgaccgtctatgttttccattagctcatcgtgtgatccagtttccacaatgtgaccgttcttaaccacggagataacatcagcattacgaatggtagagagacggtgagcgataaggatagttgtacgaccaatcgatgcattttctaaggcctcttggactactctttccgactccgagtccaatgcgcttgttgcctcgtctagaagaagaatagttggtgatttgattattgcacgcgcgattgcgatcctttgcttttgtcctcctgacatttgcactcctctctctccaacctatttttttcaaaacaaaatctaaatcaaacctctaataaaagattatgtaatagatatatatgtgtttcgaaactgaaatgtaacctgagtttcgtagccattaggtaactgagaaatgaaattatgagcattagaggctttggcagcttccacaacatcatccatggatgcatcttctttaccaaacaatatattttcttttatcgttgtggcgaaaagggcaggttcttggctaactagacccatttgtgatctcaaccacttcacttgtaacttatcaatggatacaccatcaatgagaatctctcctgcaagcgggtcataaaacctttgcaaaagagatataacggtcgattttcctgacccgcttcctccaaccaaagctacagttttcccagaaggaactctcagacaaaagtcatcaaagatcgatgtttcaagccttgatggatacacaaactttacgttcttgaactctacttctcctctaattttctccaacttgtggccatctggattgtctgaatcaatcttgggaactctgtttatcacttccatgattcgctccccaactgaagccgcctcaaagaagtacttgagattagacaaaccaccaccaagtgatctgaagcaataacaaagat

SEQ ID NO: 5004 - DNA, 5342 bp, Arabidopsis thaliana landsberg
tctaagatcttcgtccaggttgcaaattgcaacagaatgttaaaaatgtaatgttttatttttgggttagttataggttacacctcaattttggaaactaattaaagagaaacaattgtttctattcacaaaaactttttgtaaccattacgcattacataattttaatcatattgttattaacttaatggctctatttgaccaaaaacaaaaacttagaggttatttgacaaacagattacttaaagagggaccgaaaaataaaaacacaaaagaactgagtgaatcaactaaagggtaattccggtatttcaggaaagttttaaggacgacccctactaaaggataaagtagaaaccctagtttgaattttcacggccgacctctctctctcatctactaagctctcctccgagtattgttggcttcagaccaaatcttctccggcgctgtagcgtttcccccggtacggattcattcacctctctctctctatcgctctccctcgctctatctctatctatctgttgttttctctgaatttggtttccgtgttcttatgaattcgatggtttggtgtttcaatttcgttaatttcactgataattgttggtcttttggttctcttgaggtgaatatacttcgctatggtcgtgggggtagtttccttgacttcaattagcttttttatgtcgaatgttcttgagttgtttaaggtgatttttgattaaattcagaaggtcttatgtttgttagaatctgtattttattcattgtccttactgaggaaatttttttacttgcattgaaaagaaacataatttaccaagaggttctatgtaacgatgatttgtgggtcgatctgtattttaaatagtcgttaaaagtagaatttttgttgtatgtttgaaaggaataatggtttgagtaaggaagaagaacaaggtagatgcatgagtctatgttacatgatgtcatgacacatgctttctttatgatagatggcaagagcttggaacatgagcattgcaatggttcatagggatatagagagggattggggagatcaatgtggatattgtttttattattaatggagattcatggaaacgatctggagaaatatatatatttcaatattttaaatagcttttggagcatattggagcaaataagcatttggagcttgtggagcactgctctgacccaggattgctctcacttggtttgcttcatatatattttggtcttaccatgttttctttttcttttcttatcatcgtctcattttgatgctggggctatgtcgaaagctgtttgagtggaggttctttgtctatagcagtaaattttgatcctttatttatttcgtttcctttttattctcatgtgcagtttcccctttttaacctttgcaaacaatgagtgggcgattttctcggtcaatctatgttggtaacttgcccggtgacattagggaacatgagattgaagatatcttttacaaggtcagtttttggttatttgtttgattcagttacgggtcctctcttgaatcgttatccctataagacagtgaagattcttgagcatcttttgtattcatatttaatgctcttgtttgcagtatggccgcattgtcgatattgaattgaaggttccacctcggcctccatgttattgctttgttgaggtaagtgtattcgcttacattacatgttcctaaccaactttaaatttcgctgaaccaagctctgttgaatgtttgtagtttgagcattctcgggatgctgaagatgccatcaagggccgtgatggctataatttggatggctgtcgcttgagggtaatcagttacttccttgctattttttcagcagacaatatgggcttatgcttcacatatccttacagcagagtctaaacttttctggctgttttacattaccttgtgatgtttctttttatttttcaatagtttctaatcattatgaatgcaggttgagcttgcacatggtggtcgaggacagtcttcaagtgatcgtcgtggtggctacggtggtggtggcagcggctatggtggtggaggtggtggtggtggatcagctcggtttggcgtctcacgacactctgaattccgaggtttgtgtttcttgctagaagttggtattattaaaatttggtttcacttcacttcttctgattcttggatggctattttgcagttattgtacgtgggctcccatcatctgcttcatggcaagatttgaaggtctgatgacacttaatgttttgctgcaacattttggtttctactccctagtcttgtttttcatataaaatccatttttttcaggatcatatgcggaaagctggtgatgtgtgctttgctgaggtgactcgagacagtgatggtacgttaatttacagtttctgatgcatacttacttagcaatatatttactttttcagctttgagcagagttttgtttgggatattatacttacgtttttctcccacaacatgactatttataataatatgatcaggaacttatggtgttgtcgactacaccaattatgatgacatgaagtatgcagtaagtgaactctgtgcgtctctcttactgtattgcatgctatggtttgtataattactgatgttcaatagttgtgatttcagataaggaaacttgatgacacagagttcagaaacccctgggctagaggttttatccgggtaccatttctctatgcagtctcttcttttttccctctttgaccataattaacagatattagttatctctcaagtctttcaacattttacttcgtttgatgcttcattctctcccttcccattcgtaaaacatctatgacttttgtagtctcaattggttaggctaatttaaaatcatgatctcacaagtttgtattcatcttatgtctgtgttttctgctcatatgcaggttaagaaatatgaaagctcccgatcaagaagcagaagcccaagcagaagcagaagcagaagtcgaagtcgtagccgaggccgtggtcgcagccatagccgcagtcgcagccttagcaggagcaagagcccaaggaaggatctgaggtactacgtttgttatcactgaacctttgtatatctcccattttcaatacctaaaaatggagttgtgtgtttacgaatctttattgcagtaaatcaccaaggcgatccctttccagatcgatttcaaaatctagatcgccatcgcccgacaagaagaagagtccccccaggcaagtcttctgcccttcttttgtgttctttctctcaaccatcatgatacttttattcgttcttttatttctcctgtgattattgtgacatgttgctttttaccaattcagggcaatgtcgagatcaaagtccaggtccaggtccagatcgaggtctccgtccaaatctcctcccaaggtatagaactaagctgcctgcgttttagcatcattttaccaagttataggcaaaacaccaaacagaccaatctaaaaaaatctttttctcaggttcgcgaaggcagtgtgtgattttgttaggcggtgaaaatggccaaaagaaagagtgcgaaaattctcaagtcaagatccattctctgtgtgtgtttttttgctgttttcggataattgacattttctgctgttctctgcttctttactcacaaatgatcatctttatactattatgacctgttatgttatggatgtttccgtgaccatcacaatacctctgagttttgtattgttagtcctgttcttgtttaaaccctatgaagtcttagcgaacctggatctctcatctaaattatcaaatatttaactgatttgtataaaatgggcataatattaaagaaatcaaattaaagttaagatatttgacatggtttatagacggtcaaatgagttgtttactcaacaaggttcttccacaaagtcgacaaaatttatatatttgacatgatctgtttgtcggcatcttttagtattccatcacaaacaaaagttgagaattaggatgaagtgcgcatttccttgcataagtagggatacaacttcaacatcttaggtataatgttaaaacatttttgtacaaacttttagctaatatgtatctttacaagaaatatcagaagagaaaatatatctatcttaatacgtatttttggataaatagtggccatatatataaggtccccaacttagaaacgaaacaagatgttataaattcttatgtagcccggaccggctaagagaaaagtgggatcatgtacccatttaaaaaaaaagtttatctcttatactatatgtatagatttgggccttttgtataatttttgaaaaatagggctataattgcttaaagaaatctgactaaaaaataggaccctattcaaaagcaccctttgcacaccctctcagccggccttggtagccataatcgcttccataagcctcacatcttctatatggtcagtaaatgtaaaaatattccgacccttaaaagcttccatcccttggattttgattcttgtaatagtcttcctcttcatattgtaacaaaaagtgtagaaaggatcatataactcgagtgaggtcaacacaatctcaccgttacgagtcatcctgacaatcactaaccagtaattttcaactaaactctcccacaaaggcggtatgtaatgtctccaccatttatgttcctcaacatcatctaaaacccaaaactcaatgcatgtagtcgctctagaaaacataccatctaaatcggtgataagcgcacctaattttaccttgtaatctatcagagtccgaagcaagaactggatctggacagcttcataattattaatagtagtaaacttgaacttctcagacctaatgtcaaagcgaactatcatcaactgatattcattttccatagctttataatacaaatgcccgttgatgcatatcccaacacatttaggagtatgaggaatggaacaatcaacaaattctccataataatttcctccattttctaacgtcaaaacttgatgctttcgagcttgacttgacacacacaacaccttgtattgtctttcgatcggatcatacacaaaatagggtttctttattttagtgctttcatttaacgtgttggataagtcataaggttatgtactctacagtgctagggttatatatcgtgatcagattcctatctttattacatagctatccccatcttggaggacaaaccttcaataatctgtgaggaacctggcacccacatgtggcgttcggcagctgaaac

SEQ ID NO: 5005 - DNA, 5706 bp, Arabidopsis thaliana landsberg
gaaacaaagatcgagttgattaataattatacagttatggcagattttaaaactaaccccacaatctattaaaacttgagagtgttccttggaatgaattcaacatgtgtattacaacacaatcaagaaattaattcggtaggaaaccatgattttgatgagacaataaacgattggatccgatcaatttccccataaatttttgcaataataaaatatgtcaaggtcaggttccataactaaaggaaaacaatatctgcatttctttatcgtgtttctccatcttgcatgaataagaagaattgttaaaaagtgaatgcataccttgttgatctaataactaaaaaaaaaaacatgagaaggatcaactgatttacaccaaagacatcttaatttgattggatctagccagtagccacctctcataaaagtttaaaagactttctaaccaatagatgttgttttttgttttggttttaatgttaaatccaatagattttgttcttctcttgaattgtgtgatgtttcaacaagtctggcaaatacacagtggttcgtataattggacgatgtctaccctagtttgggctcatttggtttcttgttgaaatccagttttgggaactaaaaatcattataaaattttaacaacaaaattttcatatctagaaactaaataaacacacatgagaagtaagatttcaaaaatatctgtaattgagttagaatcaaaacaaactttacaagatcatgtgaaaaaaatatacatatattatttttatataagtatatcggacacagttgtaaaatttgagagaaattatttatgaaaaatcaattcaaaataatatatataaaaaacaaatagttttttcccccataaaatatcacgattgtatacaaatttgttgggcaaaaacaatactatgaaaattttcataattagataatttatttatgcaagtttttttttgttattgacttttttatttatttagaagaatatatccttatgaaaatcataacaaagaaagagagtttagttttgcctaaattaggatcaaataaaaaaacaaaattcctgacccataccactctacgacctccctcaaaaaaaaaacaaataagaaaaaaaaacaataaaaaaatcgacttaaaagcatctgcttgagcgcgagaggttcatgattccaggaatctcgtgcccaattatatagctttccatttctgtggctttgtaatctgatcggaaatcgaaaacaaacaattttattttcttaaaaaaacaagatcgtggaggagagatggatgatcggcacgaaggagaccatcatgatatagaggttgaaggaggagctttacatggtttcgagaggaagatatctgggattctagacgatggatctgtcggatttcgacagcctcttctcgctaggaatcgaaagaacacaacttctcagatcgctattgtcggagctaatacttgtcccatcgaaagccttgattacgagtctgtcctttttctccctcttctcttttcttctgcacataacttgatgtttcattcttttttctggataaagtttttaactttggcaattagactttaatatgcttaaatgttttcgattagtttttaaacttcatctcaaatttgattatgagtctatgaagttttggattatgtaacattttgggtcccatcccatgtataatttttaaatcataatgttttcatttttaatacttttgggtaaaaattgaagcttttagcttttgagagacatcatagccacttcacctagcaataggtatgctatacaatctattagattgagaaaagtgcaaatctttttggggtctttatgatgatgcaatcatagtttcagactgaatttgactttttgtctttgtgtgtgtctcctactggtgtcttgcctaatttggtgtgaatgattatagcttatgtaaacatatcaggatcttgacttgggatttttatttggcaggatcttcgagaatgattttttcaagcaagactggaggtctaggaagaagattgagatacttcagtatacgtttctcaaatgggcgcttgcttttcttattggtttagctactggacttgttggctttttgaataaccttggtgttgagaatatagctggatttaaactcttgctcatcggtaatctcatgctcaaggaaaagtaagtctagcttttgttgtttatctctgcttctacgccattttttagcactttctatcctgtttcagttactgtttattcactgattatatctaaatttcttaatggttaatactgttatgagaattaaggctcacagggatatatgtgtggatcagaatgataaatgacatcggatgtttctcaaatactgcagatatttccaggcattttttgcatttgctggttgtaacttaattttggcaactgctgctgcttcactctgtgcttttattgctcctgcggcggcaggatctggcatacctgaggttaaagcatatctcaatggtatagatgcttattcaatattagctccaagcaccctctttgttaaggtaagatccccaaacaactttccaagcagtctttgttcatcctgaatttagcattgatgtctttgttcatctctgtggccttttctgatacgaaatatttcgtattggtagatctttggctctatatttggagttgctgccggatttgtagttggaaaagaagggcctatggttcatactggtgcttgcattgctaatttacttggacaaggtggttccaaaaagtaccggttgacttggaagtggctcagattcttcaaaaacgatagagacagaagagacctgatcacttgcggggctgctgctggtgtagcagctgccttccgtgctccagttggaggagtgcttttcgcccttgaagaagctgcttcatggtattttctgtttctctctaactccttataactaatccaaggagtgataccttatgcaagtctagtcattgtagtagacagactctgaaaggggaagcttctccccagctagaagtcttaatgcaaaagtgcaagaaggtcaccatgtttgtctagttgaaaacataatgtatccaacatgacttctttatgcaaatggaagttagtgagcgaggaaatctaagtgatacatagtgtagagtttagacggtttgcgtatattgctatatccatttggaaaagattatgtctcacttttttaatatcgttaggtggaggaatgcccttctctggaggacgttcttcactaccgcagttgtagcagtggtcttacgaagtttgattgagttctgtcgctctgggagatgtggactgtttgggaaaggaggtctcatcatgtttgatgtaaactcgggaccagtgctatatagcactccagatttgctagcaatagtattccttggagttattggtggtgtgcttggaagcctttacaactaccttgtggacaaagtcctccgcacatatagcattataaacgagtacgtcatttcacaacaagttaactctttcataaagtcattttccaacgagttactctttcataatatcatttctttgcctcttttcgattttcttaatttgttctttccataacttgcaggaaaggtccgagatttaaaattatgcttgtaatggcagtttccattttgagctcgtgttgcgcatttggtctcccatggctttcacagtgtactccatgtcctattggcatagaggagggaaagtgcccaagtgtaggtcgatccagcatctataagagtttccagtgtcctccaaaccattacaatgacctttcctccctacttctcaacaccaatgatgatgcaatccgtaatcttttcacatccagatctgaaaatgaattccatatctctacccttgccatcttctttgtcgcagtgtactgccttggcatcataacatacggcatagccataccctctgggcttttcattcctgtcattcttgctggagcctcttatggacgactagtgggtagactgctgggtccagtatctcagcttgatgtaggtctgttttctctgctcggagctgcttccttccttggaggcacaatgagaatgacggtctctctatgtgttatactgctcgaacttacaaataatctcctaatgctgccactggtgatgcttgtactccttatatcaaaaacggttgcagattgtttcaacaggggggtctatgaccagattgtaacaatgaaaggactgccttacatggaagaccatgcagagccgtacatgcgcaatttggttgcaaaggacgtagtttctggagctttgatatccttttcgagagttgaaaaggttggggtaatatggcaggctttaaaaatgacaagacataatggtttccctgtaattgatgagccacctttcacagaagcttctgagctatgtgggattgccttgagatctcatctccttgtgcttctccaagggaagagattctcgaagcagagaacaacttttggttcacaaattctgagaagttgcaaagcccgtgactttggtaaagcagggttaggtaaggggctcaagattgaagatttggatctaagtgaggaggagatggagatgtatgttgatctccatcccatcactaacacatctccttacactgtgcttgagactctgtctctagctaaggcggctattcttttccggcaacttggtcttcgccacttgtgtgtggtgcctaaaacaccaggggtcagtctctttctcgctctctcttcctctcgctagacttgtttatgtttctaacgcgtatgttttcgtattgcagagaccgcctattgttggaatactgacaaggcatgatttcatgccggaacatgtcctgggactctaccctcacattgatcccctcaagtgaataaggttagccgtttagtcttcgttgttgcctgcatttggttgctctaattgttttctaaatccaattggcacttgttcttgcaggtaataaagaatggagaaacaagtacgtgagagttctctaaagatctacaatgtaataatatgtgaatatcaaaaaattaaaagcccagatgaccaatgtcacttaggcatttatttcaattattcgttgagattgattatggaaaagcaggggaaggatgattgtgtaatgaggtgatacaagtttttttttttttgggttttggttttcacaacatttattcaaaacaataaataaaaactaaacatgtaattatattataagtcgatatcaattttgctctaatcttctttacatgtaggtagtctgtgtattatttgtgttttaaattcatggttatataaaaatctgtttgcttgatattcaagtgttactgtttttggtgactataaagtaataaacgcataatcagagaatgacattagatattctttctgagtaaatcgaaactagtttctttcataccaaaatagagttactgacaccacaattatagcagacataacgaaccagaggtagatatagataaggccagtgttttaagctgcggctttcgagtttcagtttctattcagcaggctttagaaatatacaaaacacagagttgcaaatccggacgcagtgctctcaatatagcgtcaaacggatgaatgattccat

SEQ ID NO: 5006 - DNA, 1534 bp, Arabidopsis thaliana landsberg
gtattatgtataaaatgattaaaattatactataaaacagaaaataatttaactttaaataaatatcaaaatttaatttttaattttagtattatttattaaataacatgacacgccttccaaaagatccactgcccctctactttatctgtaacaaaatattactatcctttcatctaacggttaaataggaaatgcaccgtagtcattgatacagctgattattcccaagctcgaaacgagaaaagactagagcgcgcaaattttgaatatatttatttattgtctttactttccatcaaattttgaagaacgaaagaacactgttggctaagaggaaaaccctaggaaccatcaaccgagaagaacgaagaagattcgaaagatggaagggacattggagcgacactattctgcttcaattcggtcaattttcgaagctttcttttgagaatcgtccatcgtcgaatgttgcttcatcggagtttcagggtcttctcgattcggactcgtcggagctccggaatcagttgggctccgctgattcaggtgccaattgcggagataaggactttattcttagccaagacttcttctggtaaatcttcggcatttcctgtaacacaattctggtaaatcttcggcatcaaatcagtacttgtaagtatctgtaacacaattctggtttagttattctgatatcttccgtagctaaaaaggaaatttctctcatcaccatttgattccaatattcctcagaacaagaagctgcgcaaaagaatttgaaaacgaaaaagactcacagttgcttccaccgttacatcaccgggatccctagcataatttagcgcaccacaacctgaaaacaacacataagctccttatgaaaacactttccttaatcagttaatctatgaactgcaagaaggtacgggaaacctgactgaagttaagatagtcatagaaaaggcttgatcgcaaaatatatacctatgagtttttcgagctttgtttgaagtattaatcctccctacaatattcaagccaactatggtcaaaccacaatcaaattcaccctatagctcctcaaaactagtcaagccaacaacaatcaggaattgggcaaaatcaaaagttcccatgttctttctcaaagacaaattctcaggagttcccagagagctttatgcaagctcagttgagattaaacatgacctcttcttcctttgcattctcgcttggccacatatcattttctcccaaactaacattgatgatctcttcctcctcctctaaaagaccaaacaacagcttgcgaatcacttgttagacaatgaacgacctaaacactaagatctaaaatcgaaatttcagatgataaaagcaatcatcagttctcaccagagatgctctgatcggaatctggattccctgaaaatccaacatgaacaaaagcaaaactcataatcaaattaatccaacaataaaagaactcgcaaaagcgaacaattctcagagatgtagaacagtcacc

SEQ ID NO: 5007 - DNA, 1404 bp, Arabidopsis thaliana landsberg
cagaagctctttgtgaaacttgactgaagttaaatagtcgtagaaaaggcttgaccgcaaaatggatatattatatgtacctatgagtttttcgagctttgtttgaagtagtaatcctctctacaatattgaagccaactatggtcaaaccacaatcaaattccctatagctcctcaaaaaaaactactcaagccaacaacaatcaattcggcaaatcagaagttgccaagttctttctcaaagacaacttctcaggagttcacagagagctttatgcaagcttaacgaatcgaaagttgagattaaacattacctcttgttccttcgcattctccttcggcgaaatatcattttcttcttcttcctctaaaagaccaaacaacagcttgagaatcactcgatagacaatgaaacacaaagatctaaaatcgaaatttcagatgaagaaaaagaagcaatcatcagtcctcaccagatatgctctgatcggaatctggattcccctgatgataatccaacaagaaaaaagcaaaacagaaaatcaaatcaatgtcctggaaagagaaaaaagcaaacaattctcagcgatgcataacagtcaccggtaagttacttcgccgccacattcgccgtcaccgttcaaatcgatcttgccggtgttcgcctttgtaccgtcgtttgcccgttagtatgcttggatatgggcccttgtctgagatattcacttcttcttttttgtataactaattgggctttaacaggcccaattcaataaaactcttccatgttttataatttggtttttatatcccacattttagaattaatctacatatagaattttgggccaaaataaatactatttagtttttatttcctacaatatctatttttaaaaaatattgttctaggtctttttaacgctattaatttcattcgttatatagaaccaatgtaatcagagtgaacatccctattgttctagatttatattctgaactaaatattatcatcattaaattacatttaattaattgctaattttttaattaattaagtttttatagcataaaaatattaaaaaaatacaaaatcgtcttggaagtatatcatacaaatatttttgataaaaatataggtctatggtatatctcttaatatgctatttatatatattatattaattaaaataaaaatctctaatcttttttcgaaaatattaaaccgaaatataccgcggatcaatctctagttaatagttataattagcaaattccttaatttcacatttttgtacacatactgttcttcaataatataaggagagttattttataattttttgaccaataaaaagaaaacttgttaaattaatcacaataaacactaattctaactcgtaa

SEQ ID NO: 5008 - DNA, 3341 bp, Arabidopsis thaliana landsberg
  unsure (1)..(3341): unsure at all n locations
aaagttaagttaagattcttttgcaatattaatggggatgaggtgagtgaaaatgctcatattgcgcggtggatcaacgatgttgttaagcgaaaagttcacaatctcgatcttacgtggggtgcagtagagatacctccaatcctatacttgtgtaacagtttggtgtctttaaagctttgtggcgtaaccttgccaaatcttgagcttacgtctttaccgtgtgtcaaagttatcgttctagaatgggttaagtttgcaaatgatttggctttggaaatgcttatctcaggctgcctagttctcgaaagcttaactttatgcagacgtcccaatgacaatgtaaaagttttacgtgtgagttctcagtctctattgagactcaactataacggctccagttacaagggtcttcatgatgatctagtacttgaaattaatgctcctaagcttaagatcctcaagctgctctctcatcaattaactacaagtctcataagccatacttcgagttccattgtagaaacagataacaatattggtttgggaaagaaatttgatcccaaggatctgccaaagagaaatatgatttgcaattttcttgccgggatctccagtgtcaaaaatctgttcattgctccatgtactcttgaggtaacatattttttcttctaagaatgttaatattccattaaaaatgaaaaagttaggaattacaagaatgtaaaacctatagtttggtctcatggcaaaaacgaataaaaaacatgaaagcaaatatcaatcagtcaactggtccactattttagtatttaagtttatcctgatactttaattttcttgtatttatttttcttgtaggtcatttatgattactcaagatgtgaaccactgcccttattctgtaacctatcttacttgagcgttgacttctacaacaacagctgggaaatattgccaatctttcttgagagctgcccgaatctaaaatcccttgtcgtggttagaatcgttcacataaaacttgtgtactttctttggtataaatgcaaatggggaaagtacattatgactcaaacatggatgtattttcagggatctataacatctccaaagaggagaactagtgttttatctggacctaggcgtctcctatcatctcttgagtatgttgaaatagaatcgccattgacaggggaggtctttgagatgaaacttgtgagttacttacttgagaactcaccaatcctcaagaaactcactataaatttggatgattcttctagaaagaaagcagaatgtgaactacttaccattccaagacgatctacctcatgccaagttgtcgtcctctgatcctcgttgacataaaaaaggttgtctttctgtacttttattaatgtgaactctgtgttttccttcttcactgtggtgactgttgtgttgtagaccgtaagaagatcatatatatgtttggcctaaatgattcagttgaaccaaaaatataataaggttcttgaaatacctaaggattaaagtttcccgaaacccgttattaatgtgaactatatgttttttttcttcattgtggtgagatatatatcctgtagctgttgatcgtgtaagatcatcagcttattatgctacagatacatgtatatgttattggtacataccatttcggcatttcctccaactgtaaaataagcaaagataagtgacacatgtttacactttacataatcctcaccacagccatcatctaactctctttgcttccaccaccacctctgcttctccctctgaacgtcggttgcgagttgcgaccacctcaggcccggctctcacccatggatccgcgtgtatatgctcgaggtcaacgatatattacgcatcaaatgggatggtgtgatagttgctggagttggagataaactacagactagcccagtcagtatgtatatctacatggatgttaagataaaaggcccgaaatcatcagtgacttaacactatgggcccatacgaatcgtatgcctttttcgcatttgatctcttagttcttttgaactgttttcaggatcaaactcgcttcctttttataataactcacaagaatcaagcaaatggtgaagcaagaaaatgtatattggatgaacaataaaaagtgtgtaactgtttctgtaaataactctttgttttggaccataatagatattaaaatctcttgtaaattacctcaaagcaatttcaaaggtatccaaaatacttttcaatttatgcaattgaaccaaaacaaattcttccacgtgaactgaaacganaatcggttttgatttctcatttaaactgaataaacgaatttttttttaattcattagtctaaaatttaatttcttttatctaaacataattgaaccggagggtggtaagagaattgaatccaatacactaaaacaaaataaaactagaaatttatgtaattgaaccacgttggagtcaaattaaaaccaaatcagaattctattgcaattgaaccaaactaatttcaccaactcgaaccgaaaccaaaactcgattttttcattcataattctactcaaattctttatctaaaccgaattgaaccgaaagttttgaagcaaagtttgaaccgattcgatggtcgaattccggttatttccggtttgaggataagctttatcattctctgagagtctctctctctgtgagtggcgagcattggtttctggaaaatgaacacaaaaaaatatctgaaaatttcgatctaaaaagcataaacgaatccaaatttcaagaggagaagacaaatcttcaagtccacgacgaaacttttcatcgatcttcaaattccagaaaaaactcgatgaatcttcaagctgtttcttgtagcttcggattcctttcgagtccacttggtgtcactcccagaacttcgtttcgtcgcttcgtaatccgagcgaaaagtaaacaatttgaatccctagatctttgtttaaagtgattgtgatttcggttttggattcatcttgaatcttcttcttgtttttgcagcggaaccgtcggagaaatcagtagagattatgaggaaattctccgagcaatatgctcgtcgctctgggacttacttctgtgttgataaaggagttacttcagtcgttattaaggtactcttgatttcaatcggagcttattgaaatttcagatgaacttgtgttgatatgaagattgtgatcaactgcttaactattgaagtggcttgtgtctttctacttgtagattatgagttagtgaatgtaaacatcttgaggtttaatgct

SEQ ID NO: 5009 - DNA, 2948 bp, Arabidopsis thaliana landsberg
  unsure (1)..(2948): unsure at all n locations
ttctgcacatgttcagcctattactcgcactgttctgaatgtggagcttacagttacacctgatttcctgtgggacgagaaaattcataaatatgttgagccgttttggataattgtggaagacaatgatggtgaaaagatccttcatcacgagtattttcttttgaagaagcagtatattgatgaggatcacactttgcacttcactgtgccaatttttgaaccgttgccacctcagtattttgttcgagtggtttcagacaagtggcttggctcggagactgtgttgcctgtatctttcaggcatcttattcttccagagaagtatccacctccaacagagttactggacttgcagcctctcccagtgacggcgctaaggaatccgaattatgagatactctatcaggatttcaagcatttcaatccagtgcagactcaggtctttactgttttgtataacactaacgacaatgtgttggttgctgctccaacgggaagtgggaaaactatttgtgcggagttcgctattttgaggaatcatcatgaaggacctgatgctacaatgcgtgttgtttatattgcaccacttgaggctattgccaaggagcagtttcgtatctgggaggggaagtttgggaagggtcttggtttacgggttgttgagctaactggggagacagcattggatcttaagctgcttgagaaaggccagataatcataagtactcctgagaaatgggatgctctttcccgcaggtggaaacagagaaaatatgttcaacaagttagtcttttcatcgtcgacgaactccatctaattggaggtcaacatggtccagtgttggaggtaatcgtttccagaatgagatatatttcaagtcaagtcaataataagatcaggattgttgcgctatccacttcgcttgcaaatgcaaaagatcttggggagtggattggggccagttcccacggccttttcaacttccctcccggagtccgtcctgttccactggagatccacattcagggagtggatatatccagttttgaagccaggatgcaggcgatgaccaaaccaacctacaccgccatagttcagcacgccaagaacaagaagccggctattgttttcgtcccaacccgtaaacatgtccgcttgactgctgtggatctgatggcttattctcacatggataacccgcagagtcctgatttcttgttagggaagctggaagaactggacccttttgttgaacaaatccgcgaggaaacactgaaggagacactgtgtcatggtattggatacttgcatgagggtttaagcagtctggatcaggagattgtgacacagctctttgaagctggacggattcaggtttgtgtgatgagcagttcattgtgttggggcactccattaactgcgcatttggtggtcgtaatgggaacgcagtattacgatgggagggaaaattcacattctgattatccagtccctgatctgcttcagatgatggggcgtgctagccgaccacttcttgacaatgccgggaagtgtgtgatcttttgtcatgcaccgcggaaggagtattacaagaagtttttgtacgaatcctttcctgtggaaagtcagctccagcatttcttgcatgataatttcaacgcagaagtggttgctggggttatagagaacaagcaagatgccgtggattatcttacatggactttcatgtacaggaggcttccccagaaccctaactactacaatctccaaggtgttagccacaggcatttgtctgatcacctatcagagctggttgagaacaccttgtctgatcttgaagccagtaaatgcattgaggtagaggatgagatggaactctctcctctcaaccttggtatgattgcatcctattattacatcagttataccaccattgagcgcttcagttcactgttgtcttctaaaaccaagatgaagggacttcttgaaatcnnnnnnnnnnnnnnnnnnnnnnncatgattcctatacggcctggcgaagaggacaccgttcgaagattaatcaatcaccagaggttctcttttgaaaacccaaaatgcacagaccctcatgtgaaggcaaacgcgcttcttcaggcgcatttctcaaggcaaaacattggcgggaacttggcaatggatcagcgtgatgtccttctatctgcaaccagacttcttcaagcgatggtcgatgtgatatcaagcaatggctggctgaatcttgctctgctagctatggaagtaagccagatggtgactcaaggcatgtgggagcgggactccatgcttctgcagctccctcacttcacaaaagacttggccaagaggtgccaggagaatccggggaaaaacattgaaaccgtattcgatcttgtggagatggaggatgaagaacgccaagagcttctcaagatgtcagacactcagcttctagacattgccagattctgcaaccgcttcccaaacatcgaccttacttacgagattgtgggcagtgaagaggtgaacccagggaaagaggttacattgcaagtgatgctcgagagagacatggaggggaggacagaagtgggacctgtggattcactgaggtatcccaagaccaaagaagaaggatggtggctggtcgagggcgacaccaagacaaaccagttgatgactatcaagcgggtctcattacactggaaagtgaaggtcaagttggatttcacagcgtcgagtatccatcaagtagtcattcactgtacacatcatgtgtgtctctcactttgggtgtgaccgagagtagtggttctttgttgatgtcaaagtatccggcgctggagatcccatggccgaatgatttgttattcaggttagtaaaaagaaatctggtgatagttttcggatttacattctgcacatg

SEQ ID NO: 5010 - DNA, 564 bp, Arabidopsis thaliana landsberg
accatgatatagttgtccagggagacttaactccactttgggatgttgacctcggtggtaaggtcaatggggcagtagagacttgcaggggtgaagatgaatgggtgatgtcaaagcgtttaaggaactacttcaatttctctcacccgctcatcgcaaagcatttagatcctgaagaatgtgcttgggcatatggtatgaatatcttcgatctacaagcttggaggaaaacaaatatcagagaaacgtatcactcttggcttagagaggtaactctatcgaataagcttacacttttttgtttttctttagcagaatctaaagttacctctctaatctactctgtttacttttgctttggaacagaatctaaagtcaaatctgacaatgtggaaacttggaaccttgcctcctgctcttatcgcgttcaagggtcacgtacacataatagactcgtcatggcatatgctaggattaggctaccagagcaagaccaacatagaaaatgtgaagaaagcagcagctcatccactacattgggcagtcaaagccatggctggagat

SEQ ID NO: 5011 - DNA, 3620 bp, Arabidopsis thaliana landsberg
cttgcaacgggcaacaaggccaattctcgttttcggaaatcaaacccaactacactcattgtcaggctgtgttattcaataatactgaggcctcccaagtatttgatagcaaccttgtcagatcaataaaagcaaaaacaataagtatcagatgaacaaggatggaatatcaatgaaagcagactaggagaagacgaattggtgttaatacagctcagataactagtcttattactgaacctaaatcaaatcacagtttagattacaatcaccattacgggggaacacgcgagccattcatacaaatagatcaaacctaaaaaatcaaatctacgaaaaaagaagaggagcttcagatctggaagatctgagaataaagattgggaaacatacctggatcgcgagaggggtttaaagttatggaagcttgaacccaaatctgggttttatcgtcgtagagagaaaacgaagagcaggagaggttgtcgtaaggaagagacaagagagcgagaggggtttattaagaagcccccagggttgcgttcctctctacttttccttttttcttttcctttttttttttaattactacttttatgtccttttcttctaatactatatcttatgatatttatttttgcctctctttcataatttacgtaaacaaatcgagtctacaaataaatattatcaaaaccaaattaatacatttgcgtaaagctcttccgtccaaaaccaaattatttataagttgaaagattatacaactaactttgtatgcgttaatgataaacaaaaataataattctaaactagttgaaaaatattatcagctaataaatgatttctgagttagattttttcgagataatgtcactgtttactgccatttcaatcctactgttgcagaccttattttgtgaaatattcttagtgtggacaaaaatcttgggtcgtaatcatctagtactttctaatcgtcaattgattgaagaactatattaaatgtttacatatatttttggtatcacttgcttttttatttgcaggtttcctacctgatcttaagtttactcggtttaaaactactgtacatagtaaacttgcgatgacatgcaatatactgtcattattggctttcgttacactagataaaaagtaaccatgctcttaaaaatttgatcggattagataatctatgattaaatcgataataacaatgaagattgatgtattgcgagtagaacaattaatttctgatcaaaatataaatagttacaataaaacagttttcttaaaaccattaaaattttgttttgtttaaatttctgttttgttgtaactatttacaatctcgggatcacattaaatctctagagcatataatccctctttgatccatatccttttctctttttcctttataatttataaaaaatgtgatttttttttgggaaattcgttttcgttcaccataaaaactttgctattaataattactctaatttaatggaaaataaataactcgtaaaaatgtaaagagagaaatgaattgcgaattattttaattgagaaggtaaagaaaagtgaataagcaggtaaagaagaaagaactcaccaatcagattttagaagagaagagatgctaaaagaaaaaaaaactgcaacgccgtttgttgccgatctgcagcagcgcgatctctctgattatagagagctatcatcctaggtgagcttcttcttcgatttggtcttgtacaatatcctttcaagttcgatttcatcttctttcaccaattattggttttgcttccttcccgtagtttcgtttgttttctaaggttttgtgtcgatctcaaagtgagtccagggattcatatacctttagactagattagccgagatctattagtgttgatctccgtcatgtagaatccctaattaatttcagtggcctcagatccagctttcattttattgataattttgtatccttgaagctttttggatgttgtgagattataacagagcttttcctttcagcagaatagaatctctcagctaaaaggctccaaagatggcggcgtcagaagagaatagcgcattgtttcccatttttatcttgacgattatggcaattcctttggtgccttacaccatggtcaagttaagcggtgctctctccaagaaacaaaggaccattcattgtcagtgtctcgagtgtgaccgttctggaaaatataagagatccttgtttaaaaaggttactttccactcaatctcctgctctgtaatagattattgcatgttcctaacctcttcttcacttatctatctgcagatctctaacttctctacgtggagcaacttgacacttgtgctactctgggtcgtgatgattttcttgatttattacactaagaacatgagccgtgaggtaatcccattgcttgctgttgaacttgaatgcaccgctgacttatatcaactaattctacttgcttatttaccttcttttgttttacaggctcaagtttttgacccattcagtatacttggactggaacctggagttacagattcagaaataaagaaagcatatagaaggctgtcgattcaataccatcctgataaaaatccagatccaggtcaagtttttccccttgttatttttttttcccttttgatcattacggaattttggttgcagcttttgatcctgatagttttttcttctctgcgcatattgttgatctctacagaagccaataaatattttgtggagttcatatctaaagcataccaggctttgactgattcagtatcccgtgaaaactttgagaagtatggtcatccagatggcagacaggtaaagaatacatctcctttcccttcgcatgtgctcccgtcttattgacaagcctattgagactaaaatattgtaatgtgatcgcagggatttcaaatgggcattgctcttcctcaatttcttctagacattgatggagcatctggtggcatattattgctttggatagttggtgtctgtattctcttgccccttgtgattgctgttatatatctctcgaggtcatcaaagtataccgggaactacgttatgcatcaaacactctccgcatattattatctaatgaaaccctctctggccccaaggtatattcactcatacccatatacattcaagtgatgctattggtgcatgacaaatgggctgtgttttcgtttgtttgtatgacatgttttaaaaattttattgtccagcaaagttatggaagttttcaccaaggcagctgagtacatggagattccagttcgtagaactgatgatgaacctctgcagaagctctttatgtctgttaggagtgaactaaatttggacctgaagaacatgaagcaagagcaagctaagttttggaaacagcatcctgccatagtgaaggtgaattttaaaattatgcaactgtaatgctaaatattggataaactgaaatactcacttcctcaatttctgtacagaccgagctgttgatacaggcccagttaactcgtgaatcatgagtcctgtctccagcccttcagggtgatttcaagcgtgtgct

SEQ ID NO: 5012 - DNA, 874 bp, Arabidopsis thaliana landsberg
gattcgaatgacggtagaggtgagcagcacaaacgagaggaagtaccccaattttagcggatcaatgcattccatgccacgagggaatgattgcaaactggtaagaaccactttcttgtcagctccagatacctttctatcaaggttctgagtcacggatggtgctgttctcgactcccgcatatcacgaaccttgcgtgcaagctgccaaatgtcattagcatttcagtaaaaatgttcatatttccaactaaatttttcgtcatgccatgattctaaaataactaatggccttgagctgaggtcttctacacctcaattccatgaacagataattaaaggccatacaactaatatcacatatacgaattgattcaatttcaaatcttcaaatcgatcaaagaagcaaagattacttaagactacttcaaatcaaaacaatgcaattgaaattcgtaggtcgaaattgcacacataatctctccaaaatcaatttaaagccagataaatccaaacatgatagaaaccgtacctcagcttcattaacccgtttccagcaatctggctccactccatcccaagctctatcatcttccttccgcgctcgtcctctctccttaccacttccacctcttcctctacctccgccaccgtcaccaccaccacctcttccccgatcagttccctcatcttcatccccgctcgaaatgctaagcaattccacctccgattcatcatcctcatccatcgatggcttccttgacgccttcgcacctcccttagacggaggagctgacggcctggttagactacgtggctgctgcactaaattggtgactggcttacgggaattagcggaaggaggcttccgata

SEQ ID NO: 5013 - DNA, 1558 bp, Arabidopsis thaliana landsberg
tttacccagtatcattcgtagcagtattagcaagggtgaatatgatttggctgttcgagaatacaagaaggcgaaatctattgctctaccttctcatgtatgcctgaattttcaatcacactctcttgagacagatcctatccacattcctataagcactgagccttctttttattacgatttaatttaattacataacaaggctcttgacaatatagaaaaacaagctgctttcaggttaatatactcaagcgtgtactcgaggaggttgagaaagttatgctggaatttaaaggcacactatacaagtctatggaagatccgaaaatagactttacaagtgtatgtcagttataattcattttattttaaactagtaattaaactgaacaatccttcattcaaatattcaccaaatgcattaaccatactactgatatcatgtcaatattgcagccatcatgaatgttaacttttatttaggatatcccgttttacattttcccagttgttgtacctactaaataaaatgactaaacttttttccagtctatttttttgtcttgatatctgaggtctgttcttattttagctggaaaacactgtgaggcttttgctggagctggaacccgaatctgatcctgtgtggcattatctaaatgttcaggtcggtatattcgaagatgtcactcttttactacttcttactatgttctgtgtggaatctggattcctaatagatttgctttgagtatcagagtgacttttagcttataaaatctttcatttgtttcaacttagcacatttatatgtctcctacactttttgttgcaatcctcgtgtattttcataattggctctttaattacagaatcatagaatccacggcttgcttgagaaatgtacatatgatcatgaagcaagggtggaaattttgcgtaacgacactcatgagaaagccatctcagatgcaaagtggcaacaaattcaacaaaatggcgtttcatatgtgagtctagcattgagaatgatatatcattaaaagactattcaatattcagttctttagatgataacgtgccttgttttttcatcctctagtcagataccgcctcttctaatgaaaataatgcagttcaagttgacctacaatcagtggaattccccagcgaagagattgatattttgaagggaagatacatcaaaagattgactgctgtgcttgtgcatcatatccctgtgttttggaaaacagctatatctattttcagtggaaaatttgccaaggtatccgctattctttctgcttagatccctatactgacccaagagtagattaattctgtagttattatttctttcttgaattggaaatagttcttcatttgatttgaatttaactttgatttgcttagtcctcccaagttactgatacttcagccaataaagctgaggagaaggtcacagaggcaagatattcaactcattctttggaagaagttgctgggatgatacgcaagactatttctgtctatgaagcacaggtgatatctttgt

SEQ ID NO: 5014 - DNA, 576 bp, Arabidopsis thaliana landsberg
  unsure (1)..(576): unsure at all n locations
aaaacggattcgagataggaactaccaaaaagctgctatacctttactgatttttctgaagatggtgccttttctcctgcgtcactgtcgctctgtgaatctgtttgttttgtcttctttgcagaggcaggtttctccttttcacgtttccgctttccggttccctctgactttgataattttctttcctccgccatcttcttttttacagctacttccttgtccttctcctcgtcttcaccatctgaatcaaacatttcttcactgtctgagnttttagctggtgtgctcttgaccttcttagatactggtttcctctgagccttagttgaagattgtgtagcttcatgagcttgtagtatctaattagccaagaaaagttataagaagactgtgccttacagttataacttataagatacatagtcaattataattactcacttcatctagttctccattaatgaatttcttgtaggggtcaagagaatacttctctaatttaagatcttgctccaaaagtcgacgaagtaaacccattgtaattttcctgaaacagaacaagcgattttaaac

SEQ ID NO: 5015 - DNA, 810 bp, Arabidopsis thaliana landsberg
atagagtaccactttggttgcagggtaaatttactcaagcgcgtactttaggaggtttagaaagtgatgcaggagtttaaaggggccctttaggggtctatggaagatccgaaaatagattttacgagtgtaagttcactattaccacttctattctaatgtggattactaatggaatgaatgaacattccatcattgtaatatgtttgggatcctgtttcttttgttataatatcatcatcagttcccaagtgtagaatgattgaagttttcatgcttcccttttgtaagactatgagtcacaagttaatgtttataataaacattcatgtatcttgtctccccattcttttcctctgcttaatgctatttgtttttgcttaatttagctggaaaacactgtgaggcttttgctggaactggagcctgaatcggatcctgtttggcattacttaaatgttcaggtcagtgtattatatgtttttcttttcactacggttttccattgtttagtgctgagtagtgtttggattcctgatacttttgattttaatatccgaaggtttctctcttagcctctgctattatgcatctctttctttcatgattgtggtcttacatgacacctcttcaaaaatacacattatatatggtttcctagactatgtatataaatttttctggcttggttctttcttttatcagaatcataggatccatgggatgcttgaaaagtgtacatttgatcatgaagcaaggatggaaattttgcgcaaccaggtgcatgagagagctctctctgacgcgaag

SEQ ID NO: 5016 - DNA, 501 bp, Arabidopsis thaliana landsberg
tttaacataatcaacctccaaatttcaacctcttgtctttaattttgtttaaagagggtttttgaaatcttgaaacccttatttagaaataaatttcgtgttcttgtttttctctgatatcataatctgttttttttttctcacttgttccttgagctttaagaaagacaactataggacttagggtttctgttttgtggaagtttcacactgttttcgacaagaaatttttaaatcaagatcaagaatacgactgagtaaatcatttgaagaaattatagataaagaaaatggtaggatcatttttaccacctggtttcagattttatccaacagatgaagaacttgtaggttattacctgcacagaagaaacgaagggcttgagatcgagctcgaaataatcccattaatggacttatacaagtttgatccttgggaacttccaggtatgttgcttcttgtaaaaaataatcagtttttactatctatattataacata

SEQ ID NO: 5017 - DNA, 529 bp, Arabidopsis thaliana landsberg
caccttcgctaatactactacgaattatactgggtaaattgaagagtgtacggaatctctgaagcattccttgtacagacctgatcttctcagcttgggcctatgaataatggtgaaaacagtctaagcagatagcaagaggctaggaaaacaccaaaaaaacaatagtacgtgaccatacaaacctgtctctcaaaaagtggctcaaaagcacgattagcccgtgatgtcacactcttcatacaattaaacaaatgagtagttcccgatccgtctgggtcgtcttcaatccgtttcagttttgattcaatatctgtaaagaaaggcagtaatgttcacatcaacaagagagaagagtaaagttcaaaatagataattgagtgtaataatgcataccatcaattgttgttttacacgagacaaagcagtcataattatctttcaccaattgtttcctttgtagattacggccctttaagtctcttgtcaaaaaaaaggccccagattctaagtctgctgcacatgtctc

SEQ ID NO: 5018 - DNA, 8015 bp, Arabidopsis thaliana landsberg
tcaaagtcttgcagcaaaagtatccttctcaacagcttcggcttggcatctttcttagacaacaagtatctcaaagtggcatggtcggtgtgaacaatgactttagacctacccaaataggatctaaacttctcaaaagcaaacacaatagcaagaagttccttctctgttgttgcataattcacttgtgctccatcaagagtgcgactagcatagtaaattgcatgcaactttttatctttcctttgtctcaaaacagcacccacagcatagtcactagcatcgcacatcacctcaaaaggcagttcccaatctggtggttgcacaatgggagcactcaccagagattccttgattatattgaatgcctgtaaacagctgtcatcaaactcaaacttctgttccttgcacagcaactgagtgagtggtctagcgatcttggaaaaatctttaatgaacctcttgtagaaacccgcgtgtcccaagaagctcctgattcctttcactgaatttggcgactgcatactcatcatcacatcaatcttagcactgtcaacctcaatacccttttctgaaatcttgtacccgagcacaataccatccctcaccatgaaatgacatttctcccagttcaagaccaagtgtttgtcctcgcagcgccgaagtaccctggacaagttagacaaacaagtagcgaaagacgagccatgcacagaaaaatcaaccataaaatccttaatcatgtcactaaagatagacattctggagaatagcgctacattcatgactgatcaacacagctccttcttcaagggtccttttgttagtcaaaatgttcttcaaatgttttcggtaaatagaaacatgctcaactaactcaaagaaaaggaagcataacctggagctgcctcataatctcatcaaacaaagcatactccttttctctctgaattttcctctgacggccgggaaatggcagctttggcacataaggtggtggtacaacggtctcatcctgctccttctcagggacttttttctcaacttcaactttctcaactaatggttcatcatccatcttcttctcaacatcatcctttcccgagtcatcagaaatggccttaaccttttccttcttcaggattgggttgagctctttgccacttctcagtgagatagcattaacataatccttaccattgttgtagtctttcgggttcgtgataggctttccaggaagaactcccattggtcttgtagaagtaaaagctgtctaagctacttgatgttcaagtgtcttaacatgttaagctagtgactcgaatttcccatgaagatcactgtacatgttatcaaccttgacattaatatctgcagcattctttttctgtccctcaagaatttgctgcatcatgagcttcatctcattgtctcctgaagaagatgcagaattagcacctggaggtgccttgtaacttccctggaagttgttaaactgaggtttttgctgaaaacctccctgattatacccattgccctgtgtctgtggcttaggcacgaatgacttattgctgaaatttccatgtccgggtacaaaaggcttgaactgaaactgctgaccttgtgatcctgtttgcgctgggtacacctgatcctgtagattctctacattagtactcctgtaggaaagattatgatggttcatgtagttcggattgaatcccctattctggtagttgccctgaccgttgatgtagttcaattcagcctgattatctttccgaccattgccactaaactcctggtacacctgagcttccccagtgtcatcacagaaattaacaaccctctgatctctcctgagtagttgctcaaccttagctgacaatttagcaagctgttttgattctcctcctccacctctattggacctgtcatagtcaacattgtggttgctgttgctagctgcaaggttctcaattagctatgtagcctcaatctcagtcttggtcatgaagtccccattgctagcagtgtctaatgccatcttgtaggccttgtcaactccccgatagaaagtgttgatcaatgtagcccgtggaaaaccatgatgaggacactccctgtagtagtccttaaacctctcccaagcttcatggaatgattctgtgcttccttgttggaagctactgatcttattcctcagtagagctgtcctggactgcatgaaatactgccccaaaaacgcagctttgtagtcttctcaacttctcagatttgcagaatccatcgatttaaaccagcggtgggcttcgtctgccaaagagaatataaacaatctgcatttgataagatcatctggcactccattcattctcgttgtcccgcaaatatcttcaaaactatccagatgataaataggattctcggagggaagaccgaaaaactgatgtctgtttcacaagagctaacaacccggtcttgatctcaaaatcattcttgttgatagggagctgttggttcctgtctctgaaaaattcaatattaggagcatcatgatctctcagagtttgtcgagcaggcgcaggcctagcattcaacaaagctgcaagagcagcattagcagcagctgcacgggcagcgttggcagcagcagcattagcagcatttccaccatcaggaggtggtagatcctgaaacacaccatgatgttctccttcaaattggagtccatcatcatcaacaacattagccatctcagcttctctctgaacagctaactgcttccttttcttgttctctttttcaaaccttccgatatcctcgtggtagtttactagatgtgatgagcctttgctacgggtcatacacctgaaaacaccagagaaaatacgaaaataaatatcagtaacagtaaattaaaaaatgctttagactagaaactaatcctaaatccttacgtaacgcaattggtccccggcaacgccgccaacttgattgctcgagtaattacccgaaatatttaaccgaagtagaatattcgaggtcgatccacaaagaccaaagatactctaaagatttccgagactcgttcttagctaaagcggaaagatggtttttgtttgagttatcagattgtaaaataaaaatgcaaataaattaaacgatttaacttccaagatttaaagacattgggcaatatggtatttcagagaacaatgattaatagaaataataaacaaggaattcagcataaagaaccgttctcgaacatgaacacaagtttagactaattctctctcaagacattaatcactaaatttgactactcgattactaaactttcgcatgtaatttcctagtcaagttcgcattacaattaggttcattaggttcacaatgcattctagcatcaactctcgttggctagaaatacattgctcaaatcacattggttcgggcattctatcgaacacttttgatgcatagaaaaatctagaatctaaaacatggtgatcaatcctattctagcattaagaacatgtgaattaaagaacttaaagattaagaactccaaacaacaatcaaaccatcaattcattgaatcccctacttagaaccctaacacccaattaagagactactcactcatagcaaaatgaacaacacaaaagaaaacataattccaattaaataaatgagataaggttcagaaatcttctccaaagtgtcaaagtggatgaatctctaatccaaatgtgcttaaaaaatggttcttagaaatgttgcagaaaaagaagcgtaaaagaaaaagtagaaataaaattaggtctctcgggtttttatacccaattacagaaaaaggcagataattccggttaaggaaaaccggtctggtcgtcgagagggttggatcgattgattcccccttggggtcgatcgatcccgagctggcgggtctaaatctccatttgttctcgacttggatcgatcgttctggccttgggatcgatcgatcccatcctggcgggtttgaaccttcatctggcagacgacctggatcgatcggtctcctcctgggatcgatcgatcccgagctggcgggtctgaacattcatttctattgttgtttctggtccaaatgagcctgacaagtctcgaaagcatatgtgtcccgcttaaacacctaaaacctgcaaatgactcaagacacaaccgaaaatacacaaaagacggactatgacatggcaaacgactcaaaactaagggacttaagacaccaaaaacacaacatatcaactcccccgacttagatctttgcttttcctcaaggaaaacaaaaatctttactaggagatgaggtttgaaaacacgggaactcacattttctttaggatcatgctcttgtcaattgcctgcaaaccaccatcacaaaactcatcaacccgtagacaccgacgcagttggcactgtcacctcgggaatagcttccatgtcttgaatcgcgtctgggggagcccgcggtgagatcactcccgcctcggcgagacgcttctcctctgccaaacgcctctccttatcttctttctttttcgcggaaacctcccttagagtaactttggttgactacatctcgacgaagggagaaaatcgatgatccgaagtctacgaactagaagtgcaagatacaccgcagcttaactttagggctcgttcgactctaaccctggaaaagtgatccagccaattgcactgccaagtagatagctctccgtgaatagaaacgatgtcgtcgtgacacggctcgagaaatcgaatggaacgagctgcaaaaagaaacacttaaacaagttagacgccaatgtctaactaccaagaatgccccatctcgtcaaaatcttcccgactagatcttaaggaacgctgacatcgtcgagagccacaaagaagaatagggctcgtccttgctaggaaactcctagatgattttctgatccttcgccggggaaatgtagtatctatccaccaccgacttgggaactcggcaaatctccaaatagtttctcaagtgtgtgagcgtgatctcattccacgtctcgtagtttcgcactataatcctgacgagataccttagtgaacgagtagtgatctgggaaagcgcgatctggtaggaagtcacgtattccaaaatcaaccttgggattgggaaccagaggaaacaatggtagaaaaacctctcgttgagggcgaagaaaccctccggagggttatcgactcttttgctcggggtcggaagacgcaggataacatcttcgccgaagtgaaaccgagaagccagatcccgaagcgactgctcggtgcaaagagttgaaccaggcgggtcgggcataacctgtttctttttctttttctttttctttttctttttccctttgtcagctttgcacatcgcaatccgctcggccacctgaaagatgccctcagcctcgttcggcctgaagaaaagatcatcctcgaccttcacctgagggaagaaaggttcgggcacatcccatcaattggacgttccagactcgtcagcaattggaacacgaagccttcgaacaagagatggctcgtgatcctctagatgatcgagttcccgagctatatcagcagcagtgtcttcccgggccatgaaagggctcggctcttcaggcgcattagacgacgaagccgcatcaccctggtgacttgaactcggctcggcatcttcagaagagctccaaaccattctccttttatggatcgaagggaggtcatctcggtgcatggagtcagtagaatcagagagactcatgatcggcgcaggagttttgacgagacgaaagccgaaaacataaatttctaaccgggaaaatcaaaacaaacctaagagacgacggagcttcgccggaaaaaaaaaatataaaggaaatgaagatcagaggagagaaagcaaacctcgaattttttccttcggaacttcaaatgaaattcttaagagatgataatgaagaatcttggaggatatcatcaaatccggaagttttcttgaagcccacgaagaataaggaaaatctccatttagcaaagatcctccgttgccgacttacagataaatgaaaatcttccgagaatatcgcgagggcggtctatcaaaatcttatataaagcgcctcaagaaacccagagaaggacacacacaaaaacgctctcaacttcaggctatcaatacgctctaactttgaaggcaaaacacttattttctatttctcaaaacacttgtacgatcatatcatcatcttttcaacaataatatctagaacaccgtccgcggtaatcaaataattctgttgttctttgagagtcttgcaaagatctgttctttgaagaaactctaaatacaatttcgattgtgcaagtttggactctcacagaccccagctcgaatgtccataacttccctgcccgaaactcatcttgttgttgttggcatcagattttaagctctgactagctgacattgttttgttcccgatggagaagaagaataagatgcaaatcgagttctggggtgaatcgccggcaagaacccttggttaccattttcgagtttataactgagtaataagtagctaccatttgtgacagtttaagtgtgtacggcggaattaatagatgcggcgacagaatttttgtagcagtagcaacataataatgtagtaatagtgatggaatgaagatccaaccaggaatgagattatccggccagggtgggcctcatcattggtttatgttttaagctcaaattaaatagtgcatctaagttatggagtcatgttttacactaagtgttgacgaatgagaaaaacaggaaagactctacttgtaggagaggcttctatctgattaattaattataattgcaatgtcattttaatctttaggttgtgtatttaaactctcatcattatggtttttatcttatgaaagatcaattaatgaaacatttctaaatcatttgtaagactataaatgttttaataaaaatgatttgcgggtcggtcctcggactatataaatgtaatatataaatggttaataaaataaataaataatttgcaaacataaatatttttcattaattatgaaattataatatttaaaatatgtaaaaatgtgaaaacattcaattttaaaattttaatatttacaaaactatttataaaatattttaaattagtatgtaaaatgtatttatagttttattttaaatataaaactagtccacgggtcagtccgcaaactcgtcggacttaccgggacatgcttggacatagtttctttgctcgcggtcctagcggaccggcctgtcttggtccatcaaaactaatgtccattgctggccggcccgtgttagaaacttctacttacgtttacccatatttggatacaaaatattgtagcaaagttttaaaaatttaaaataatctcgaatgcctcattaatattattcgtctcgaggaagcggaaacgattcaacccgtttctttgtaaaccctaactagattttactctcttctcacttctctctaacggcgatcttgcatgtgtctcgatctctcgatatctctctccccacaccggcgatttactcgcttctctctcaaatctactactttctagcttcatcaaagtctttgtgtcctcgatcatattctctccatctccgacgctcgattgctctctctcgaacagactcgtaacctcttgatccagtattaacgatctgtctctctcgtcatcaatccatcttcgacgttttctcagccttctacttcttcaatttcaaggtaacccgtggttttcatctttatgattttaaagttcgatcttctttattaaatcctgataaatcttgtgtgtggtttcattttaagctgcataattattgaacctcagatttttaatatcgactttttacagagtctgtg

SEQ ID NO: 5019 - DNA, 715 bp, Arabidopsis thaliana landsberg
  unsure (1)..(715): unsure at all n locations
aatccagagtactttatcttactaagatttgtgatttccgctttggtaactctagttgaagtctcaggcgtctccatgtttctacgttaagttacgtcgaaagcctcagggagcgacaattttaaagtagagattgatcttatacagttataccaaaagttaacctttttctcttaccaatcgttcatcatcatttattataaaacaagcaagcaaaagatttctaaatgatgtctgagattatcaccagcacggtagaaagcatacatgaagcagctcaaacatctctaaaaaccctgagaaacgcaactatctaatcttgtgatatactcgcttctgcttgactctgatttcattcactcggcagaattctcgtgcaacagtacgtactctcggctgcaaccaaaagaacaaaacatgtcaagaacagaagaaagtagatgttaactgcgcaagcaagcaaagattaatcacagagaataggcacggggtatgattcataatgggaaaccagaactagaatgtgtcttcattagaatacctgctgttgccaaactttatggtgtctttctcaaaaagctcataatatctttgtggctcaatgggactttcctgaaaaagtaaaagaagtactaatcacaaacgtttgaattanccatgataaagaaaaaaataagaaggaatgtaattgagcacttacattgatataagtttt

SEQ ID NO: 5020 - DNA, 5978 bp, Arabidopsis thaliana landsberg
tcatgccaccaaaagcccacgcgatgccaaggattccgacgccgccgcagtcaactccaccggcttttgtgtcggactgaatcttgtaaccaatgacagttaaaacggtgacgtacaagaagaggagagtggctacgaactcggcgatgactgctctgtataaagaccacttggtaagctcctctgcgtcgaaaaacggtgttggcggaggatcttcgtaatctcttgtctgaaatccatcagatccttccacgtctttagccatatgtgttaatggatgtttctggactttctaagtaagtgttttgctttgtggttgttgtagggcttgtggttgtgagatgaagaataaaggttctttatatagagtgagctcttggtttgtgctactgttgattttgacacttttgatttaatgtcacaacttacaacattgatgttttgttttatggtattttttttgtaacgaatgcataagttggtttagtggtaattttttttttttgctaaagaagttggtcagtggtaactaaaggaaatctaaaacaagtattaattttttttttatctcagtaacttgataatctaaatcagtgagaaccaatacaaaaaatctcctaaagatataatttaacatttcctgaaaagtttatacaaatagtataaatctcatactgtaattcatttccaaataactagattgttaaatgctactgatagatcaccgtcccaagagtcacgtcattaaattttgttaggcatcacccaaaaaatttgaccgttgacaaaaaaccaaaaaccgataaaacgtgagcaattatataagtgaacatatttgacaatgatgatcatatatacttgtgtgttaacatacataccttatcttttagctgtatccacattgcatatactgtaggtgctttttaagtttttgataaataatgattttatatgattagtaaagtatttgtctcgatcgtgtcacacgattcttttgtttttctgccgtttcaagcacattctggatcattcgtgcatctttttcatgatagttggtaaacatatagtatatatagtaagcgaatatttgtataggaaaatgaaatggtattttaggtcattttgtataataagttaaataacgcataaatacgtaatttatttgagacttaactttttcggtgtaagctgagtgttaaatctgtcataggacactacaatcaaattataactctatatatactccatcgactatatattgactcaacatatcatgatagaattacatatgagtcagatgtaattttatgatctgttattgtggattcattgttagcaagcatatatatacgtgtgttcagaagactaaaaaatttactatgaaatgaaagaacatttatttgtttggaacaaaaaatgtttatcataacaaattaacccatttttccacagagaacaataccattcgtaaccaatatcgagtagacaattctttaacaaaacagaaagcgacaaagatgaaagaaaacataaataaaaccaggggagagaccgagagagagagagcacctttctgacgtggaaatataatccaataagagcagagaaatggcgctacaacgataaggatattgtgacgtggcaaaacattggccatgaacaccacattacaccacattccttttgtctatgtacactttttatttttccaatttatttttgtagacagactagtgattagtgaatactgaataatatacgtaagaaaattgcaattggaaatttggaattgaggagtgagagcaaatgattgttgaatatggggagtaaacaacgtggcataagaggagtggttgggacggctgaactggagttggacttaatctgtatggacggtgccgatgcaattgacggagctaatcaattctatatggggcggtttctccggtccagtggacccaactttcatcatattttctactttagtggaaacataacccgtgaagcgacgccgtttcttttatcatgtccatgtgataaattatgtttttgttatatggtagggttagctgagagctatcaaaagactcttttttatccacctaatagatttgatttgtaacgttaagagcataggaagtcaatttaatcgttactaattacatgcataagaactagtataactatataaggagctccttctagaaattaaatgaaggatgatagaatctagataatcagaaattttactattgatcaatctagctatctcgtagttcaaaaagctttatcgttaacaagtaacaactttcaagtattgcccaaatagataaggttcataacttcatattttttatttattttatgtgtaaaagagtgacagtctatattattctagggggaggacaaggctcatgacataggacaagagaaagaaaaatatagaagcatatagtatattagggtcggtccaaatgaaaacaacgtttaggtatggggcggcgaggctaagttaaattaaccacaaaactccattatcaaccataattttagaattaaaaggtctctgttcctattgatagctccacaatcattcttttaaataatcagaatctcatataagttcatctttagttacagatttgtatcaatagttgaagttgaaaccaaaataataataatttagttatagttaattttgtcaacaaaacaataccttaactatcatattatgacaaacactaattgagatgaaaaactcttagcagtagctaattcttgctatcatcagttaattatactaatgtatatggaaattctgcttaaacaaaaaaaaaacagtggaacatgaatatattaagcaaaatcagtttctattgattatgtagcaatgattagattggtttagattatatatcatcaagacagctagctaggtaattaattagtgaaagaaagtttccacaaaaataatcataatcgtcatacacacaattctatattcatttcattgaaacgaataataaaaacaaccataagcctaccaaaaggaaaacattatcgtaatataatcaatcaataacacgtatacaattattaacgtatattgacaagcaaaattaatgagagcactcactatagctatagtctctctatataaacaactttcattcgtctcttcagtcttcacaaacacaacatatccacaatacaaaacacaactttcatatataacaaaaaaagttatagaaatggccaaagacgtggaaggacctgagggatttcagacaagagactacgaagatccgccaccaactccgtttttcgatgcggacgagcttaccaagtggtctttatacagagccgtcattgccgagttcgtagccactctcctcttcttgtacatcaccgttttgactgttatcggttacaagattcagtccgacacaaaagttggtggagttgactgtggcggtgtcggaatccttggcatcgcgtgggcttttggtggcatgatcttcattcttgtctactgcaccgccggtatctcaggtacaatatatcgaaccggtccggtttaaacctggtttcagaatttttaaaaattgttgactttcaaatttgtccttcgtttttcttgcttatttgaaattgactccgaaacttatgtaggtggtcacataaacccggcggtgacatttggtttgttcttagcccggaagtgtcgctgattagggcggtgctttacatggtggctcagtgtttgggtgctatttgtggagttggtttcgtcaaagcctttcaaagctcttactatgatcgttacggtggaggagccaactctctagcagacggctacaacacaggcaccggactagccgcagagatcattggaacattcgttctcgtctacacagtcttctccgctactgatcccaaacgtaacgctagagactcccacgttccggttagtatttatttctatcagttataagatcgttctggtaacatacgataacattaattaatacttagtgttatgaattatgaaacgaaaggttttggcgccacttccgattgggtttgcggtgtttatggtacatttggccactattccgatcaccggaaccggcatcaacccggctaggagtttcggagctgccgtaatctataacaagagcaagccatgggatgaccacgtacgtttctatttcttaattatttaaaattaatcaaattatggactattgtttgatgggaaaataatgaactgtttttttggtctatctaaatacagtggatattctgggtgggaccattcattggagctgcgatagctgcattttatcaccaatttgtcctaagggcttcaggttccaagtcacttggatccttcagaagtgcagccaacgtttgagtttttgccacacaaaaaaaaacctatcataataacaacaattacaaaatggttgtgttattatgtatgtacaaaaattggcaactttgcttgtaaaactatgcactatatttcttcttgtttttctgttttcattgtggtgtaatactttgatatgtgccaatgccaatgtttgtgtactcgggaaaacaattaatgaaaaccaaattgttttgccttctcctccctctttttattttatacagatgatattaccagctaaaagcatatctacatagactacattaatagttataatttataagttcatgtgatttaaattatcctccactgaagaggattaagacagaacaaaaacttatgtgtttggcacttttttgtcagcttgtcgccatcacctaattaaacaacaactaaagcacaagtcaattggtaagatcgtctcaaattcaattaatctacaccaaaaacgaattttgttgaacacttagttttgagttgacattccactcactagtttaagctcatagaatttgtaatgagagcttacgcaggaaagctgttggttcaacaactaatttgcgtcactttacttaaagtatacaaacgtcattttcagaaataacaatatcaagaagagcgtgaacaaaatattaaaaacctatagatggtcatacagacaaaaacttcgaaatttctttaatccaatgtagattatccaaaaaatgtgcctcaagaccaaaatcagggttttacataaatcgaaacaataataggaaaactttaaaaatttcgtaacagttttgcaactgcaagaaaatacacttttgcgtcttcttccgaagcaccaatcttgaattattagtttttggttagcttttgttggatataaaccctaaaatccaaaagatctgttttctcttaattacatctgaaaactctctttatctcctttcatctccatcaatccccagaaatgtctcagcctctctcccacacatcgatagagtcagattcagtaccgaggagagatattcacagggtttcctttcgaaaccacgacctgaaacaatatgatttaaatggtgactgaattaactggaaccaccaaccttgctggtcagcgagggtttgcttgtggttggatttgttgcttctgagctgctgctgggctgggtgtcaggtcgtgtccagatctttaaatggccttctctgcaagctgttatcaatgattcttgggtgaagatcaagcccgagagggctcggtgtgaacacggtgagccactactggtgagagctttgggacatcgcgcatgcacggcgctggctgaagagtgcccattggaacaatgttgtcccagtgagcggactgactccctgtgctgtaagtgggtgatcctcctggaggtcgccgtaggggaacaacaatctcatccatttctaggtcccatagcagtaactgtgtgtcctgttcggcacaagaaaagggaataaagacatggaatgcaagccaaaaggcccaaaaccccaaagatgatcatagtataagttatcaaacaat

SEQ ID NO: 5021 - DNA, 2374 bp, Arabidopsis thaliana landsberg
  unsure (1)..(2374): unsure at all n locations
ttgatgaccagattgttgaaccggaatctacatgtacgacgaaaaagtagtaaccggtagaggaatcatcgccgccgggactgaataatccgtctttgaagatgcagttacgagacaagaggaaagctcctttggagctatcgacgaatgtgaggttagaagctgtgaaattagggtaaacagtctctatggaagaagcacatgaaacaaagacaaagagaagattgagactaagtaacaccaacatcaacagaaacgttgatttcatagagaaaccactctgtttgtttttgttattattacaagaagtggatcatcagagaagaatctgaatgagttcttgtttttttttgtgttgtgttgttaagtttgaccagaaacgtattattggtgtggtggtgaccattatcatcaccttataattgtttattttaggaaggcaacgtttgaatgctttgaaaattacacaagggaagatttagtaataaattgcggcgagcatttatgaagtaggccagttttctttcttacgatgactattaggttttatttattgctcaccgaaacttatacgagtttgatgttgcactaataatttatttttttagttttttaattaattttttttgcaagaaaaaacaaattattcattttttcttcacattaaatttcgtttcagaacttaaatttggttacataataattggtttatattttaaatgtagatttcaactctgttcgattcacaataaatattattttaacgttttttacacgaatttaaaaataaaaacacaaattcaaatttaaattatattccttaaaatcatgatgacttttagtttttttttttatagagatgaggttatattgaaaatataaaacgatattatttttaaacaatttatttgtataaattgtactctttctacttcaaaaaattttatttataagttttttgcatatatattaagagatcatttatttattcttgtatatagataaaaaacatcatttattatttacctaacacaattcaaccaataaactccaaaatataaatagtcaaaaaaacatataaaatctaatgaactttgtatagaaaactgaaaacatcatttaatctgaaacaaaataattatccgaaaacatcacatattattattataaactgaaacagaagaaacaataaaatttccatttttatctcactattaaagtgagaacattatgtagactttgccactagaccatgaacctttctagtgttcatttcttctaccttatctgttttacttccttaagaagttttcgattttaccttcagaaaatcaaaatggtaaaaaaaggatatgggttttctctctcaaatttttcagagaaagaaaactgaagactcttatggtcgtccgaaattctttctggctttgtctctcgatagggattatcatctggcaactaccagctctttccggtgttggccagctcttgtccggcattattcggctttcatatcgataatggtcggctttgccgtcagcgctcctttgcttcttttcatttttcttataaattagttttttttaatagaagttgcggttaaacctcatcggatctgtgtattagtggtggcgtttgtggcgattctccactcaaaagggtctacatatcctttaggtttacggtttatggaaaataattaggcaatttgcaatttagttgaagatccaaagcaatttcctcaacttattactactgcttttagctatttctttttattaaagctttgattggtttagttaacagaagtagattagtttgagatcttatctcatttccgttgctttgcgatgaatctcaaaaaaaaaaaatattgatgattaaagcaaatgattgagattaattgttccatattagatctttacttctgttttgcagttatcggtgaattacagaagaatctatactcgattcattcgatgttagtttcaatttccggtagaatcgatggcttcaacggcgaaagacgatgactgaaatcttttgtctcctnnnnnnnnnnnnnnnnnnnnnnnnnnnnnnnnncttgagatcttttagttcgatccaatcttcttcttaagcgatgcaaatggttgggctcgtgttgggccttatatgttttccagtttcagttttgcagtcatgggttgtgatattaataaaactaaacctttgtggaaaaaaaaatcaaaatggtatatactcttataaatccgtatagattctgtggtatacaagggtttagtatttcttctttttttttttggttaactacaagggtntagtgttagcacactgntaaaacccatattacatataaacagatttaaac

SEQ ID NO: 5022 - DNA, 705 bp, Arabidopsis thaliana landsberg
ggtcttccgttctgtgatggctgtctcttttccagcatcagcctggcttttgtagcggcggtggctggcttctctccagcatcgttggcttccatagcaatgatggttggctcaatttccggcgtgttcgtcaatttctccgacgtactcggctggctctgttatacggctatctgttgccgtttcctttctgttgaataaaagttgtgcttgaaactcatcggacctatgtagtagtagtggcgtttgtgttttccactcaaaagactctctttctggcatatcctttgggtttgcagtttttggaaaacaattaaacactttgtgtttccagttgaagattcaaagctcttccttcagtttattactattgccttttagctgtttttttatgtttaagctttgattgggttagttaacaaaggtggattaatcggagttcataattttcattttgttttgctttggatctaaatttgatttgagcaagcaattgagagtaatggatctgtgttagttttcactcctgttttgcagatgtcggagtattacaaaagaactgattttcgatgttgatcgttgttagtttcagtcttcggcgaaatcgttaagctttacggccaaggatgatgacgggaaacttttctttttcctgatgtttacacgagtccatgttgttgacacgtgtcgtgagatatttgactt

SEQ ID NO: 5023 - DNA, 3856 bp, Arabidopsis thaliana landsberg
ctgtggctcgtaagatcgaaatgaaagtagcttaaaaacacattttgcattacctgttgattatcaacctatgctgtcaagtcaacaaatgcacttgccttaaagattagcacttgctactgcactcaaaattggaacatgtgcgcatacaacccgaacatatataggtagtgagtggtcatgataagttagtattgtttccatctctgttatgcaaactttctgtccaatcaagatttagctttactactttggtgccttacgcagatagtttcgacagcttctttttgacaaagcatccacttaaatgattgtagaatggaaatttgcttttctattactctgaagttataaccaagctatagccgtctcactacctatagtacctgagcaatggatcctcttaacccaaaacagcctttagattacacttaagagtcccttatctgactagaaatctctttgatgtagaggaaagagctaagtctatggcgtaagagagtttagtctatgtgtatcaccaaatctgcctaactatttattagctgattagctagagtcgacgattaaagtaagtaggtgattcaacagacttgttgaacatggggaattatgttctgatgtaaaaagctggtattcaaaagttggggagattctctcttttaattccttggtaaatggatgctgttgcagtaatataggagggttatatcagaaagctggttaaaacccatgtgattatggctgtatgcctgtataacccatgcttagtggttttcaaagagatggagaaatgatgaagaaacaatgtatttatgtatgtgtaaaagatatcattggattggatcataccacaaaactctttttggaagcacatggaggtgggataactgatcccaatgattgaaattttcttttatacatgagagaagagcactaaaagaagcagtacatgaatagacaatcgctttcacaacaggtgattcactgttcatctgaccttagtacatgaaaaaacagcttcttgtaggactcttttttttttttttttatctctctttttgtcaaaatttgtagactctttagtcgtcagagataacttacattgatatatatacttgtgacttgattgatctgatatgaagtgcaccattcccttacatttttggtttctctcccaaaattgaacttgttttacaattgccattgttcaccaaacaagaaaagtgaaactatcaatagaggctagtaaaaaagtgaaaacatgaatatagtaaactccacaataataaacatcatttggttggcccacttttgtttctataattatctcaacaatttccaatttcatctttttcacccaaaaaaaaaatcatcatttgacaggtacaactatacatcatgcatgtatgtgaatacatcatcatcatcatcatatgaattggagaagaaaacctatctttttttagttatgtatgattaaaacaaatttgctcttcgtctctgactttggaagtaataggaaaagactatttccctcaaattcagcgattttttttttcttttccaaattagttacatacagtacggaagctaatgagatattattaaaaatagcatacaattttccagaaaattggcctatgtggctacaaagtctggtcccataaagctttaagtcaattccgaaaatgttgtcacttctttggatctctcatcctcgtcttatctctctgctccttcatcgttctcccgtgaaagctatattctgttttttttttcatttcaaaatataaacacataatattaagaatctctctgtattgtaacatactaacatccataattataccaaatctgaagtatcaaacatcaaatttgtacacatttccttattcatgctaatagtcattttcttctctgaatcattgtacattgcggcgccagtaaaaaaaaaaaaagcaacagtgattactgaggccaacatatatactttaactaaacaatgtagtaatactaaaataaatgaaagtgggctcagacaaaaaacaaatcaaagtcactaacaaagtggccatgtgcgactgctcaaaagtctagtgtctcttaacagattcctgattccttcctctatagtcttcattatatcatttaactatttgctcctaatcaatctcgtttatttaattataatttcaactgtctcgtctcgagaaacagcgtcatccatctgtttttaaatcatgtatctataaataatattatatgatggatgatgtaatgtacctctacctaaactgaatcagatatctttataaaagagttaaaattaccatgttatgaggatgagagtaataatagtacatgttttggccgtagtaaccgtcgggagattcaacggtggtggcaactgcaacagaatcatctccgtcgttttcatccatttgacactccagattcacaccgaaaagcctcaccgtccttgagctcccgacgacggaagacgacggtgtgctgtgagtctcagccgctgttgctacggcggctcctgtaatcaccgacacgtgcgtgtcattaattaattgaaagaaaccaaaacaaaaacataatagtacacaagtgaacaaaaagcacgtttgtcccaggggattggacggtcttcttcacgcgctctttaatgcgcgtgtatagctactctattaagtatgttaactacaactgggagtattaagcaatcgaggttagagaaaagcaaacattaattaatagctgtataatacaatgttacttatctcaggttgttaatacgcaagcataaatcttgtagagaaataattatagtacactattagctaaaggatatctatatttgggtgtaatgttttaatcctcccgacaacattagatagtcgatatacactctaggacacgaacaattcattcgtaggaaaaaataaaaatgtctacccaaaaaaaagataaaagctatttgatgtaaaaaaagaaaagagacgaataatttggttaaaaagagaaatatataccatagtgggaatactctgagtgagagggaggattagagtaattactagtggcgtggatttgatgataagaaagagctcccatagaactcgtattcacggcggagttagtggccgcgacggaggatgaggagccttgtccacgtctgcgccagccaatgaagagtctcctagaatcagaacggtgtcgttggaagaaaacaacgtcgcctggatcgagctgtttgtctttgacaaatctgctccatcctttagtcaagacatagctttgactgctgttccagtaagagtatctgaacctccatgacttgcctgactcgtcttcaaagcttagaagcatccctttctccgaagatgacgtgtcagcagcagcagaggagactaggacggcattgagagggaagtatttctctgcgtgttgttttggtatgacgaggcggttgagtttcccgacgtcgcttggtgtgagagacttctcgaagagtgactcttttaggtcgtcgtggagccatgtggcggtggtggttgtctccgatgtgtcggtggtgtggcggtgttgctgttgctgccacaagagagtgtggtggtggtctgtggagtaatggttgactgacattttttctaggagatagaaagcgaaagagagagagcgaatggagagtatagggagagagggttaggtgaaagagagaggtgggtactcgtagtactaatatagtatgatacgaaggagagagagagagatgaaaaaattggggtttttgagggttaaaaaatttgacgtgaaaactttggcaaactatttaggagagagc

SEQ ID NO: 5024 - DNA, 616 bp, Arabidopsis thaliana landsberg
  unsure (1)..(616): unsure at all n locations
gttattaacgcggcattcacgaccgacccgaacagtcctctggctaatctatgatctagattcttatccggtatgggtttagtgctaaggtccggcaattttaaaaccattaaatctcataaaaactattaactcgcaatctagtgaaacagttgaactgaccgggtatttattaaaaacaaattctattttggaataaaatatacatgatttcagtcttgtagtgtatttactaatcaatttcagttattttaaaaacttttttcagttcttcgtattcactttcctacaatcttagtatttttacggctttagttgaatttaattttatcttctcggtacagattttggaaggttcatcggttgaaattatttttctttctgaatatcgtttaggaatagaagcaattaactgagggaggaaagtcgttaaatgagaatgaggtagttgacattattgcaacaaaaaaatgtaagaaaaggctaaagaagatttctacactaaagggaatgcgatatcagaagtgcaagacattatatacatgatcttacatgctctaatacttttaaagaaagagaagattttcactacgaagcanaacatagatcattatga

SEQ ID NO: 5025 - DNA, 1152 bp, Arabidopsis thaliana landsberg
atggccctgatgaagaaaaaaagtctctttcacttgctggagaggtgccttagaatctcaattgtatgttgagtataactttctgctgtgtccttattgctgtttccctcactttactgcagcttgcctggacttgttataacttttaccaatcgacaccaacgaaacttgctggagagaactatttcttcactgcagggcaggttggtaaatacttcttgcgcatctgtttgtatgttagttggttggttatgtcgtatccataagcacatgattgtttcaggacatgagtgttggcacatcttggaacattttaagaccagaaaccgttgaatcactgttttacctctggcgattaactgggaacaagacatatcaagagtggggatggaatatatttcaagcatttgagaagaactctcgcgtagaatctggatatgtaggcttgaaggatgtaagtttcgagccgggctgaccttaaccaatcagataccctcctcgagtgggcctttccatctttcggaaacacgttgttaacgtttgcttcttcattttcaggtcaatacaggtgctaaagacaacaagatgcaaagcttcttcttagctgagactcttaagtatctatatcttctcttttcgccttcatctgttatttcattagacgagtgggttttcaacacagaagcccatccgcttaagattgtggcacggaatgatccgcgtaagccaactatagcactacgccagaggaagtttggtcatcagattaacgtttagtagacagtttctgctcaaatggaatttgatattattatatattaccacaaagtttgaggcacattgttgtatcagtttaaagaacagatggacaacgtttttgccacagcaatttgtagaggtactttactgtttcctatgatttttggatttgtagaagagcttttttttactatcatgttaaaattgtacacactttgaaaagagagcaatcaagattgaccacagagaataaaagcatgaagaaggctttgagcaaagtgagcttgatccgatgtgcctgagacaaccaccagtccttctgtagtccctgcctttggaacatagaacagccacattcgctcctgatacctagttgattaggtgactggcggt

SEQ ID NO: 5026 - DNA, 5258 bp, Arabidopsis thaliana landsberg
aaagtcccagaggatttaaatgctgaagccgtaaaataaattctcgagaacgatactgcataaaataaatcgatccctttatgaattaaacaatcaggacgattgtggtataatcgtcttagtgagtacttgataaaagaaggctataaaaatgaccctgttagtccatgcatctttataaaaagatttgagaaaggatttgttataattgcagtttatgttcatgatttaaatattatgggaactcctgaagagatttccttcacagcagaatatttaaagaaagaattcgagatgaaagatcttggaaaaacaaaattttgtttgggactacaaatcgaacacctaaagaatggaattctggtgcatcaaaagacatatacagaaaatgttctcaaaagattatatatggatggagcacaccccttgagtagcccgatggttgtaagatcacttgatgtggataaagatccattccgccctcgggaaagcaatgaagaagttcttagtcttgaagtaccatacttaagtgcagtaggagcactgatgtatcttgctagtcatacaagacctgatatatcatttgcggtgaatttattagcaaggtttagctcatgcccaactcgaaggcattggaatgaattaaacgtatacttcgttaccttcaaggtacaaaagacatgggtctgttttttcctaaccaatccaaggaagatttaattggttttgtagatgcaggaaacttatctgatctccataatggtagatcgcaaacagaatatgtcttcacatgcagggatactgctatttcttggcgctctatgaagcaaactattgcagtcacatcttccaatcatggagagattttaacaattcatgaagctagccgcgagtgtgtatggctaagatccatagttcaccatatacaagaagactgtggtatgtatgcggagaaaaagactccaacaattatgtacgaagacaatgcaacatgcatcgcataactcaaagacggatacatcaaaggcgatagaacaaagcacatcctaccaaaatgcttcttcacacacgatctacaaaagagcggcgatgtacgagttctacagatccgttcgaatgataacctgactgacttattcaccaaggcgctacctactactactttcaagaagttagtctatcgtttcggattacaccgtctcaaagatctcgacgaatatactcataagggggagtaattgtgtgttgcactctttttcccttaaccatggtttttcatggtaaggtttttaatgaggcaacatttcaaatactttacgagttatggtactataatggtcatcaagggggagtgttatgaataatagatggatgcccattataaggcccatcatttagatcttctagatctttctagaatagaatattctagaattatcttgtagatgctttgtgaaaccctaaccttgtactcctatataaaggacctctcattcaatggaataatacacacaaatcttcctcttcttcttcttcttttctaacacgttatcagcacgagctgcctaagctaatagatactaaaaaattttctgataaaaaaaaaaaccatgatggcttgaatccgattcatacattaatcggttgatgatggcttgagtttcttctttattatttctatgccgccgcgtgcttcgtcaataatttaatacacccatacgtttaccgttcaaatcagtttttgataaatcgtatattatttattattattttcatcacgtcctgattttgataaattgtacaccacatgtttaatcgttatatatcatggtcgtcgtctcgtttattttgttgttatgataagtaaatatttttcatttttattaaatatgctatcttaaagaaaagtcaaacatgaatatacggttcatttcatttgccatcacatgtctaatattatatgaaaattaatttaataatctgatcaagttacacgatcgatgatgacttatgctcatttgataaatttattgcttcattttttttatattattttattgactggtttagttggtacaattgtttgatttagtttgataaattgaaatcacaatctgttatttattgataatataaatatgacatcgttattcatttatttttatatacaattattgtaaagaaatatatatatatatattaattgtatcatttatgaaatttaattaaatttcttaatatttcagtgaatcatgtcaaaactcatgagccttgaatttggagctcttgatatcacgggagataactacttggcatgggcactagatgctgaaattcatctagattcaaagaatctccttgatactattaaagatggtaatcaaactccaagcagagaaaaatcaaaagctatgatttttctgcgacaccatctccatgaggatctcaagaatgagtacctcagtgtgaaagatccacagatcctttggaacgatctaaaggataggtatgatcatcaaaagacagtgatcttacctaaggcccgatatgattggactcatctgagactccaggactataagtctgtaagtgagtacaactcagccttgttcaaaataacatccaaattggagttatgtggagagaaaatcacggatgcagataagttggagaaaacattctctacttttcatgctaataacattgtcctgcagacacagtaccgtgaaaagggattcgtgaagtattcccaacttatttcttgtctccttgtagctgagaaaaacaatgagttgcttttgaaaaatcatggactacgcccatcaggttctgctccattccctgaagcgaatgtgacatcctatggtcaagaaagtggttacaaccgtggccgtggccgtggtcatggtcgtggtcgcggtcgtggtcgtggacgtggatacactggaggacgaggcagtggagttcattttaaaaactcaaactctcacaaggagtgggaaaacaaagatggtaacaaacaagtgaaaacaccatatgcgaatatctgttaccgttgtggagcgaaagatcactggtctcgtacgtgccgtacaccaaagcaccttgttgagctctatcaacaatcagtcaaaggcaaggggaaggatgttgaaacaaatttggtgtatgaagacggagttgatgattttgactttgatgatttcactcacttggacattgacgattttcttcctgaagaagagacaaagtgatcaaactacaactatttgaagaactatgttttatttctttatttatttcttttgctttcagttatttgatttttatttatttggctttcagttattttattttacgaattattattaaagttgatttattttaattattggattcattatcttatttatgatattaatttattttattttatttatttgaagaaacaatgaatggtggtgatatttgcttggcagacagtgcaactagtcatactattttaaaaaataagagatatttctcttttttgacaatgaaagaagcaagtgtaactaccgtaacaggtaatgcaaagataattaaaggctctggaagagcgaatatatcaatgcctatgggaacacaattagaaattgtggatgctttatactctcctaaatctcaaagaaacttattaagttttaaagacatccgcagaaatggatatcatattgagactatgagcgaaggtagtatcaaataccttcaaatcagaagtaatatccaaggctctaaaaatattctggaaaaactacctgcttttgccactggtttatattatactacaattaatacaattgaagtaaatggtatagtaaaccagaagtccacaaaaaacattaaactttggcatgaccggttaggccatcccggtacaataatgatgcgaaagataatcactaattcatgtggacattcattaaagaactagcagattcgtcctaatgatttctcatgtgttgcttgttcacaaggcaagttgatgatacggccttcaccagctaagataaatttcgaatcaatcaattttctggaacgaatacaaggagatatttgtgggccgattcacccatcatgtagaacctttagatactttatggttttaattgactcatctagtagatggtcgcatgtaaccttgttatcaactcgaaacctggcgtttgcaagattgcttgctcagttgattagattacgagcacattttccagattttcctttacagaaaattcgtcttgataatgctggtgaattcacatctcaagcttttaatgactattgtatgtctattgggataagtgttgaacatcctgtagcacatgttcacacacaaaatggtttagtagaatcactaatcaagcgtcttcaattgattgctagaccattactaatgaaatcaaaactcccaatatcagcttggggacatgctatattacatgcagcaggattagttcgcatcaggccaacaagtaatcataagttctctccatctcaactggttctcggtcatgaaccaaatatttcccatctcaaagtttttggatgtgctgtatatgttccaattgctccaccacaacgatctaagatgggacctcaaagaaggttgggagtatatgttggttatgatttcccatcaataattaagtatctcgagccatccacatggaatttattcataagctcgattcgcagactgtcattgtaatgagtctgtttttccaacattagagggatatattagcagtaaggaaaagatatactttggaatgaattatcaatgtcttatcttgatcctcggactaaagagtgtgtattagaagtccaaaagttaattcatttacagagcttagcaaatcagttgccacatgcattcactgacccaaaaagtgtgatcaaatcacatataccggctgcaaatgctccaataagaataaatatcgcagaaggacaaaatcaaactgcaaatgagtctaaggcacgtttaaagcgtggtagacctattggttccaaagataaaaatcctcgaaaaagaaaaggggcagaaattggcatatataaaacagaggaaataattacaaatgaagaatctccaaaagagaccttagacatgacacagaaagaaattcaggtacctgacaatgaagagatctcaattagttatgtctggattaaaatggaaccgaaagcaaatcgacgtctatgatattttttgcatg

SEQ ID NO: 5027 - DNA, 2215 bp, Arabidopsis thaliana landsberg
  unsure (1)..(2215): unsure at all n locations
aaacataaaaagcgatcaatcatgttttttcttttcctttttctgtaagggtctagatataacgcaagagcatatagaagaaacaccatatatagcaaggcaacacatctacacatttgttatgaaacattatctttatagaaactttgttttgtagataaccaaacgatattcacttctattggaaaagatgttcggcttacaagggaatnnnnnnnnnnnnnnnnnnnnnnnnnnnnnnnnnnnnnnntgtcttcagtcataagaggtgggtcctgtcatagctcatgatatctgagattgttcacgataagatatgaaacagccaaggacaagtcgatactaacctgggtaaatggggcatggagttgctgacgtgacttcaggagcatcatcgtccccactggtccagctgaacctctcctgatggcatctgttgggctttggttcacagaatttgtgcgttcagttttccgctcaaatctgagttgcttagatgtatcttctgcaattgagctgtatgcaaggaaaaggaatttaaacacccttagtcaagatttcctctctatcaagatttaacattcaatcaagagctctcacttgctaagttcacctgtcacgtttcctccgcagttcttcttccgaggatgtatttcttctcttgtcgaccttgtggtgttcctgagaatttattcaaagaaatgtttcatgccaacaacacaggcgcatcaggaatttatatttaagtatttacatggctttttttaatttaatgaaacacatactgccagcacataacaactaatgtacgatatacaaaaaacttagccaattacctccatagaaacagaagcgtctgaactgtcatcacttcctatacagtctaggaactcttcattcatttcacgttttttttcgatgcaaattgcaagctgatcacaaagaagaaattgttagtatctacaagtaatttgaaatttccgattaaggatatatagaggattaccaagtgtaacttttggttgatcaaacaactggacaaatcaatagaaccgtcaattggcattttcggcaacggctgtgtctcttcccaacaccatcgaacttcatggacaaactctatccagagaaaggcaatggctagagatgggatgcagaaaacaaaggaaaaatacaacacaagatattaatcagataattcctttcattccgtagctggcagtttaattcattttccctataatgatgtatggctggccaatgtggcatggtctactggcacataccacggatattgcaattgccaaaccacagtgagtgcaaacagaattgtgtaaaaagagattcaagcggtgcagccttaagagctcgagaaagcctgtgttcgccttttgtaaaatctgggagtttagaccctgaaagagattggaaaaaggtgaaacaataccacatagctggattctaacaaatggttctagctgcaaatgcaaaattcatgcatcaaattttagatggtttcaaagtgaataatactacatggtaactcgaattcttgaaccagcaatgataatcaatattcaatgttgtgaaacagaacacaagtttatacatgcatctatgttcacacataatatagtcgaagtataccctcacgaaagagatctttaatcacccgatcaagaactgacggaggagggatgaccactgaggtctttaaattttcggagcttggattttccactgtgagagattaaaagaaaaaaaaaacattagacagtggatatgtcaggaaaatctaatgctgtaagataatctaagaacataagggaaattatcatatgctataactcattctttgatagtggaagtttctacatgtgtttgatgtatgaggaaaaaaataaaagcacacaaatttgcggcagacctgacacaaaatcctccataaactgagctgagaaagacgaatccaatgcttcaaccaagcaaagtagttgggaagcaaaatcaattcttttgccatgtgaaggatcacccctggtaaagctatatttgttataaaactggaagggaaaaataatataccacaagacatgcaaactactattttgtccaagaatgagaaactatgagaagcatttcttacagatatggcgagaggattgggtgtaaaatccacttctcagcatcatggggtgaggcattttcagttcag

SEQ ID NO: 5028 - DNA, 2036 bp, Arabidopsis thaliana landsberg
ctccgattcaagatcttcgagccgattcttctcctcggaaagcaccgtttcgcaggtgtgaacatgaggatccgtgtcacgggtggtggtcacacatcacaggtttacgccatccgtcagagtatcgcgaaggctcttgttgcgtactaccagaagtatgtggatgagcagtcgaagaaggagattaaagatatcttggtgaggtatgataggactctgcttgtggcggatccgaggaggtgtgagccgaagaagtttggtggtcgtggtgctcgttctcgttaccagaagagttaccgttaaacaaagctgggttttttttttttttcaatttcgattcatctcaaggtttttggagtttttgattatggacttgtgagactcttagaatttctgttttatgatttattggataactgtgattctccaagaacttatgtcttatatgattttgtcttcatttcgttgcttcttatttcttgcctgtgatgtattgcatctgcatagttggattgaaagttaggttcttgggtttataagaaggctgtgacttgatgttacttagccatagctgatcaaatatcgtctaacaaagtggtctggtactctgttatattggttcgcctaaattttggttacagtttgtttccgagttggtatctcgtaagtcgtaacgtttgtgtacttattcactggaagcaagttgtattgttgttagtcttttgttacctctcctggtacgattttttttgtgtgtgaacaagatcagaaactgggactgtgaatttgaccgataatcaaagaaccaaataacttttgatccaaaaatcgagtaattaataaccgaaaagatctttctactaagttttttcctacttcgacgtgatttttgacttgttgcaaaatgttatgctctttgtgcgttccaccacttccgtagtgaaagctcttgtatccgtaaaagcaaaaagtcaacccttttgagtttttgtcatggcaatttctgcacatttttcattgcagccttgccatggagacaccatgtgttcccaagcttcagcgggcaagacgtccgtagaacctttctcagtcaccttctgaaggaattccggaacaagggaatacgcacgttcatggataatgatatcgagagaggccaaatgatcagtcccgagctcatacaagcaatccgagaatctaggtttgcggttgtagtgttgtcgaagacatatgcatcttcaaagtagtgtttggatgagttggtatattctttatacccagtatcatgattcatataggtaaagaaacagagttacacataaatgcgtatacacaaagatatggtgtttgtgctgattttgctctttacttgttgttttcaaacttatgaaaagagatatatcacagagtggctgaagcatgaacgtacatgtcccaaaaccaaacaagtcctttctcaccgtctttggataccaaaccatttgatcagtgacttgattacgcaatggtgccttgttaacaaatatgatcatcaaaaaccatctgatgaattagtcactgagctgttcactagtgacatagaagcattgctacagcgggtttcctcttcctcctctgttgcagatcagatagaagctgcaaaagagctgcgtcaccagaccaagaaatttcctaatgttcgggtcttctttgtcgctggaatccatgattctatcacccgtttgctcagtccgctctctactttggacgaggcagtagactctagtctcgagcttcaagagaatattgtcacagctttgttcaacctctcgattcttgagagtaataaaacagtgattgctgaaaactgtctagtgatccctctgcttacaaagtctttgaagcaggggacagatgagacacgaagaaacgctgctgcgactttatcatcactttcagccattgattctaacaagatcattattgggaactcgaaaaaggtaaaggctttgattgatcttatcgaagagggtgatttgttagccgccaaagaagcc

SEQ ID NO: 5029 - DNA, 3680 bp, Arabidopsis thaliana landsberg
ctccaccaacatcaagcttgggtcaccaccaaaggaatattatgttcaagttgttacatgttagtgatatactttgggttaattgggcacggtgtcccaagtgtcctgtgaaaactgatctcggtgtatgcttctttataacccgtgtttatcgaatgttaagaagttacattttggaatcttagatgtatgtttggttgctgtgtagataccgttatcattatatgacaataaagcttcttcgacgtcgaagaatgttggctgtgaagatgatttctgttcgttcattatgcaatcggagacttgcggtgcaaagaagccatgtagttatcatgtagtgtatggagatggaagtacaagtgatggagattttataaaggataacattactttagaacaagtgactggaaatcttcgaaccgcgccacttgcgcaggaagttgtattcgggtaagtatagcggtacacttttgatgcttctttaacttagtgaatgctgcttcatcataaggattcctctgtgagacagatgtggaaaaaatcaatcagggcagcttggacaaaccgactcagcggttgacggtattatgggcttcggacaatcaaatacctcgatcttttcgcaactagctgccggggggagtacaaagagaatattttcacattgcttggataatatgaatggaggtgggatttttgctgttggtgaagtggaatcaccagtagtgaaaacaactcctatagttcctaatcagtaagtgagaccatctctagtcattcaaatattttatatattgtttcttgtaataactttatccaatgttttttagggtacattacaatgtcattttaaagggaatggatgtggatggtgaccctattgaccttccaccaagtctagctagtactaacggtgatggaggaacgataatcgatagtggtacaactttagcatacttaccacagaatttgtataactcactaatcgaaaaggtgaaactctttttcattacttggctttcttgtttattctcaaaaccctgacatggtaatttttctgtatatagattactgctaaacaacaggtgaaactacacatggtacaggaaacttttgcctgtttcagtttcacttcaaagtaagatgacttgcttccttttcctagcctctatatctcaatcattcttcgtttctcgataccaagggtcgctatatattacttcatcgcggatgacgcaaatcgcgcaaaagtctgacatactagtgcaaagaagcttgagtacatggatctggatcattacatgttgtgagtttttttgttgtactatgtgcgatgctaaactatctttcttgtacttgcagcacagataaagcgtttcccgtggtcaatcttcatttcgaagactcactgaaactgagtgtgtatccgcatgactatcttttctcacttcgtgtaagtcagtcgcttcctactttgatgtgtttagttcaacagaatattcctactttaactgagttttgatcaatagagttttaacaacatagttatagatggtgttattgtcaaccttcatgaattgtctcatgcacaatgtaatgattttcttaaacaggaagacatgtattgctttggttggcaatctggtggaatgacgactcaggacggagctgatgtaatccttttgggaggtaaaattcatatcatactactaaaccatgtattacacttcatgtgtctgacttgagatttggtttcttcatctatagatttggtgctttcaaacaagttagtagtatacgatttggagaatgaggtcattggatgggctgaccacaactgtaagtctctaaaactcaagaactagttaaatgacgatggatgatcaaagaagaagtcaaacacaccaaaaatgttttgtttcgttaggttcgtcaagcatcaaagtcaaagatggatcaggagcggcttaccaactcggagcagaaaatctcatatcggcggcttcttcggttatgaacggaacacttgtaacgttattgtccatactaatttgggttttccattcttttacttcatagttttgctaacaaggagatggtttgggttttgattcatttgatcctttgtgggtgtggtttggctttttgggtcatgtaactttacatagacaacttactcattctttgttgtatactcccaaagatatatatatgtactcttttggtcttaactcttaagtctttgtaatttacgtaaggactaaaaacatctacgtaactattttgtgatgttatgtttggcaaccagaaaagaagtactaactagttttgcaatgttattgtaatgtaactgaaatttgacaaaagtaaagtaaaatgccaaaaatgacaaactgttatgtccatactcagtgtactaacactaacattgccatataatgtaacactaactacaaatactaatgagtgtttactcaaaccataatggcgttactcaaaaggcttgatgtgttctttttccaacaaacaaaatttgctcaaacaagtgctacgaaaaactcaattggagcatcagaaatttattaacaaagtaaagagagtctgtagcaaaagtattacaatgatttgaaaaagaagatatatacaatgagtcacacacgagcacgggcgtgtaacagtaattttacccgaggtaaatgaccaaaacagtaactgttgatagaaacatagagcataggagacattgagctcctggctctgttctatcttcctactctttggttgggacatatactgggagattcacaagtgtatcgattctgttgactccattgagctcaggcgatccggttcctgagtctggagttgatgatgatgctgtgtctggttcaggttcagtaacgccattgttgatgtgtttttcttttgagaaagaagcagttgacaatctgtttggttcggagtcaaggaataggcaaactacggcacagtcatcgacttttgaagtcgggaacttccatctccagttacgcactgcagcctccaccaatgctcgacctgctgaggaacgcgttggagctttcgctactatctttacaacctcttcattcgtcaatgcatcccaaatctagcaaatttttaagagagaaaaatgtacttaacagctagaagagtataggttgctacgtccataacacatatatccaaagttcttaagagaatgagctcactagtccagacttattctgacattgagcttggatgtttcttaccccatcagttgccaagacaacaaattcatccttctcagtgaggcgtcggtaggagacgtcaggtacagaaattagaccgaagtctttgaggcaaaaatctccaaaagcacgtgccatggctagaccaggtgagttgtggttaggaagccacagacgggcaactcccggttcatctcgaagagcaaatatacgtcctctgcatctctttatcctttctgcttcagctggaaacaacaaaactcaatctttaattgataaatcagatggtataaccaaaaaaggcttgtagaggccaagtagattacctggaacatctggtttgagatcttcagttaattgaaaaggaacaagtttattgtctttgttcctcacacccaatactgctcttgaatccccgataatcccgat

SEQ ID NO: 5030 - DNA, 1911 bp, Arabidopsis thaliana landsberg
  unsure (1)..(1911): unsure at all n locations
atgcatattataaccagctgaatggtttctttgttactatgctaaggaagtaaaagccattacgatcaatggtgacaaaattgtaagaagctttgtgatcatcaacaaacgaggagccgatgagagattgtctgcgccgaccgagtaaacacctcctgatccgtcttttattttgatgcttgatgaaccttaaaacatgaaaagcatttgtttgtatgagaaagaaaggatgcagagtttgctacttttttgggttctagagatacttacagttatgatctgcccatccgatcacctcgttatccagatcgtatactactaacttgttcgagagcaccaaatctacaaaaagataagcgaaatgactatcttctagagtgagtgatatggaaagaaatattttattagaattttgaactttacctcctaagagaatgacttctgatctttcatcagttgtcagtccaccagcttgccaaccaaagcagtacaactcttcctgttagcaaaaataaagagacaatttccatcatcgaaactcgaaacatctcgaaacgttttgttgaaatctcgcaagcaaagtttctgttctattgacttacctcaagtgtgaaaagataatcatgcggataaacggttagtttgacagagtcctcaaactcaaaacttactggtgggaacgcctcatccacgctgcgagtttaaggaggaagagcttagcatatataggtaatgaatgatgcataatacttaagaaaggcttgctttataggtatctaaaagaagaatggtttggaaataaacacggtagggaaagtcttactttgtactaaagctaaaacattggaaggtctcctctactatgtgaagttttacaggttgacgagcaagaatctacacaagaaaatctcatgtcaggattgtgatattcacacaaactagaaataaacatgcactaatatgaatatgagcagagaaagttaccgtttctattaaggagtcataaagaacctttggaaagtaagccaaagttgtaccactatcaacaatggttcctccgttcctcacaatacttcgtggaaggtcaagagaagttccatccacatccattcccatcaacattacattgtaatgcatcctaaaattgttgagcaacacatgttagcggtcatacaacagaaactactcctactctaacttcttgatgtaaagaataaatgacttgagaagacatatcacttactgattaggtaccataggagtcgttttaacttttggagaatccactacaccaacagcaaaaatcccacctcctttaacattatccaagcaatgcgaaaaaactcttttcgcatcgcccgtggcagctagttgtgaaaggacagaggtatttgattgtccaaatcccataacaccatcaactgctgactcaccattcccaagttgtccagattgatcacttccacacctttctcaaagaaaagcccttatgagaaaaaataaatcacaaaccacaaacaaaagataaggaagatattaaagctcacccgaatacaacttcttgaccaagtggtccagttttaagatctccagtaacttgttcaagtgttaacatgtcccttataaactttccatcacttgtgnnnnnnnnnnnnnnnnnnnnnnnnnnnnnnnnnnnnnnnnnnnnttgacagctatccgattgcgaaatgaaagagcaaaaatcatcatcacaaccaaccttcttcgaagtcgaagaagcattcatgtcgaacaacgataaacggaactgcattggtgtaaacaaaaaaacaaagatgatccatctgtgtcactaccagatagtaagtaaataagaagaagaaagcaaaacattcaaattagttttcgtgggacattttggacacggct

SEQ ID NO: 5031 - DNA, 841 bp, Arabidopsis thaliana landsberg
ggacttggactacccattgggagagccccagcgatgaacgggactgaattggtgtaaacaaaaaaacaaagatgatccatctgtgttactactagatagtaagttattaagaagaaggaagcattacattcaaattagttttcgtgggacattttggacacggcttgcaattgatccaaagtatatcacttcctgtatcaacttgtacatgatattcctttggtggcgaccctagcttgattttagtgaagtataaactataacaaaataaaaaaaatgtaacttcattagtacctaaacttaggtatttgtcccaaatgttacataaattatgtcggtactaaatgatcgctgcataatcattttcgcttattgccaattggttttgagtcggaagctacatttatcatacgttaaattattaaaaagagagggaaaaagaacaaaacccgacagagtctacgcggctgtctccgccaagagggagatcaatggaagcgagcatccgagagtggcggcgcgtgtcatgagacttgaaatgctcgagcttcttccttttccctgcgaacttgtgttgtaccttaaacacgaaattggctgatgcaaattcgatcacaattacgaaaactgcaaccacaatgcacaattttctcctcagttccatcgcctataatatgttagatatctccggaggagaaaaatttgagattttgtttgaattaatgtattgaattctggtgatttctttgtttcataatcagacaaagaaacggcaaaagaaaaacacagaacgcgttttcaaagacggatttagaaaagtgccaaatgcgatgtttgaatt

SEQ ID NO: 5032 - DNA, 2204 bp, Arabidopsis thaliana landsberg
  unsure (1)..(2204): unsure at all n locations
aaaatattgacctatataatctgaataaaatgaacacagctcacgaaacatgtgatttgttccctgaatcttaagccttttcatatggctaataaattagtttattaagacacaaattaattaaataacttaaatttttgagaaagattctaagttagggcagtaattaaagatgggttttttgtaaaaacaaactccagatccctaagccttctgtcttaagaagcttagttattacactcaatgacattacgttttcttacttaatttttcaacaaacattatagtataagcttaattagtttttaagaattcacacggaatattagtactataagcttaattatatattagtaaactcagtgattgcaagaattaaaaaaacaatatgctcactataatgtagatgcagctaatggactcatgattgcagtttaattactagaaatgtcaaatcaaatagtatataatttcaagtataatgttgaataccaaactcgatttttttctacatatcttaagctagttcaacatctttagaaagacatttttatatagttcgtctactttgaaagatcactccaaaagtaatgatagaaaatggatgattatattgataatgcacattattataagaaactttctatttaaagcaaagctttaagatgaatacttgcagcaaagctaaccgcttctttccatttttcggtttctagatgatttgctaatttcccatcttttcttctcttttttcattatactattactatgtatgtagtagacctacacccacaaaaaatacattttaaatgcctaaattgtgcatgaaataaatggacggtctcactcaccattcaccaaccaataatttgcctcgatcatattaattattcctcggtaacgaaaatgtcaaccggatccagcaacctcgttatcggtggcagaaatttctttgcgttaattggttttcagtttttcgaatcaagctgccgacaatagaaaataagcccatgggcttttatgagcccatataaaatgactttcccatgtattttaaaatagtatataattgaaattttgagggtaagatcacaattaataaaagtttcattagtgttgttgattaaaataaataaatgattaaaattattgattcgtatctttcatgtcaaatctttaaagattaaaaatatgattagcttgattaaaagaagaaaatattaacgaagtaaaacaaaattattgattcgtctctcagataatatttaaaaatgtcggaaacttttaaataatgcgataaaaaaaaacaattgtctaaatcaataaaacccaacaaaaaataaattctaaactgttgacaaaaattaactttctcagaaatccaaaattgatccctcaaaaacatgaaacttcaaaattgaccacgtatcaaaacaagaatattctactccacgttcaaaatcttgacaacagaggagccatcgatcttgtgcaacgccacaatcgagtctcctgccttacatattcccttcttcttcgcgaattcaatggcgaattgaatcgtctcctccgtcgagtccttgttcgaagacctagcggatgctcccgtcgccatcacaggaacaattccacggtagatcaaaccacgtcttgccacatgagccgcagattcagagcacgaccactcgaaatcatccgtacgagtaatctccggcacaattacggacagaatcggaacactaggcctgtacttggccacaagctccaccgtgtaacctcccttggttagaacgacaatcgcagccgcacaaagactcctcgccgnnnnnnnnnnnnnnnnnnccaagctctcaataggagataaaggcaacgaaacgatatcttgaatcttcttgtgcattgtgtcgtaatcgatgaaatcctctgcttccttacagattcttgacattgttagcacggcggtttcagggtgagctccggcggcggtttctccactgagcatgacgcaatcagtgccgtcaaggacagcgttagctacatcggtggcttctgctctagttggacgaggagatttggtcattgactcaagcatctgtgtggctgtgacgattggcttcccaagagcattagccttctgaatcatcatcttctgagcaagaaacatcttttcaatcggaatctccattcctaaatcacctctagcc

SEQ ID NO: 5033 - DNA, 882 bp, Arabidopsis thaliana landsberg
cttcgtttaaagtttttttacaatggagaagttacttgctggacaaacaaacaatggatccctcaagtcaaagacgaagatcgtctgtactctcggaccggcttcgagatcggttgagatggttgagaagcttctcaaagccggtatgaacgtagcccggttcaacttctcccatggttctcactcataccatcaagaaactcttgacaatctcagaaccgccatggagaacacttgtattccctgtgccgtcatgctcgacaccaaggtaacctaattttgaaccgtcttttcaacttctccttatgttgttttaagattctattagggtctagggacataatctaactcggtttaatcttttctggtttatagggtcctgagatccgaaccgggtttctcaaagaaggcaaaccggttgagctaattcaaggtcaagagattacaatctcaactgattacaccatggaaggagattcaaacacaatctcaatgagttacaagaaacttgctgaagatctcaagtccggtgacgtgattctctgttccgacggtacaatctctcttaccgtcttgtcttgtgacaagaatctcggtcttgttcgtgcccgttgcgagaactctgcagttcttggagaaagaaagaacgtgaacctccctggaatcgtagttgatcttccaacactcacagagaaggatcaagaggatattctccaatggggagttccgaataagatcgatatcatcgctctttcctttgttcgtaaaggatctgatctggtcgaggtcaggaagttgcttggagagaacgcaaagagtatcatgctcatgtcaaaggtaagagttaaaaaacagaacacattttttttttttaagtgaaat

SEQ ID NO: 5034 - DNA, 3390 bp, Arabidopsis thaliana landsberg
tcattgagaacacttctaatggcggtttggtcagtaagagacactcaacaacgaaagtcaacgactttgtgatagagacagacatttaattactcttcccacttttgttgcttgtcttcttccaccttctcatcaccgtgtggctttcattttcagtcatattaacactattttcaataataaaccaaaactttcataaatatccattaccgctaacgtaattgccaaaatggagtcaaagttaacatctttgttaatcgttatcttgaaatggaaatgttattcttttgattatcaatgtgtgaattaaccgaactcaatccctaagagttgaaactcttgagactcatctgagttgtggaaacgttcttcctctgtttctatatagagattcgatgtatcgacaataaccttacacgaaattggatgcttatcaccaactataagcgagcatgctttgtaaactccattccctggtggtaaatttagtagcgaagatgtctgaagcgagatcctccctcttttgctcgttatatcttgtgttcttgtccgagagatgaccctgtgtggtctgccgaggagctctgttacatacctcacatctcctgcagctagagcatgacggactcgtgtggatgagacttgacctctttctttcgactttgagtcctcctcctctgtgtttacagagacttggttcttatccatcacggagttaatgatgtaagcgctgataccaaagtctttgcataacctcacaagttcagaggcgtcaccagaagcccggtatccaaacctgtaattttcgcctaaaggaaaagaactaggaatgagaattttcggagaaagaagggaacctttgagatgttcttttggaattcacctgccacaactccgcagactctaagctctcttgacaacttctcgacaaactgttgtgggttaaggtgtcgaacgctggcaaattcaatctcaaactctaccggtgctatgctaccacaatacgatgcccaagaggaaagcactcgttttctgtcgcatttggctactatcggtgctctgttcaatagaagtgagaagcacatacagattaaaaaaaaaaaactttatcagtagagtcatgatctaatgattataagtaacttagatcaaggggatgttaagttaattgggaaggtagacggagaaattacctaggcttccaaccaagtacttcagccaatccaacaaacgacagtagatatggagtaccaattcttgcagcttgaattgcaagctctcgatgaccgatatgcagggcatcaaacttccctagagcaacaatgcctcctgcaaattcaaaacaaattcataatccagaaaggtcatataaaggttggccactgatggaaggcagttgaaacttgaatgacaaacagatacctgcaactggggaaagcccttcagctgaaagctcaggatgatcatctccctggctttgaaagaagaattacagccaaatattttagtaaagactccaattttgaaaatttgagtagaacatagtgaagaacatctaacagaaatctctatcttaaagctcatcaggaaatttcacataaaacaatcagattcggatacaaaaacaatcaaaacaacagcgagattcaaaaacctgaaacaatcgagaggagctgggatttttcttggagttttacagtgagacctaaacgacgactttatccgctgctgcgatatagccgaacaaggtctgagcatgaacgaagatttccgcaaaaccttagcaccgagcctaggaggatgacgatggtcccacaaatgcacggaggcgcgagagcctccgcataacatggttaccgactccactgctcaaacccctaaaaagaccaaacttgttctccgaaactcttcgccggagctatgcatcaccggtgacaggtgtcacataaacaattaacgctgtggtaaatttcatatccacgtcaagaccttctctttcagccagagggtcttgtatgtttttgtgactttaagacctcaagtcaagtacatcaaactcatatgttcaaaaataattcaagtgtcagttcacaaatggaacaccagaggcaacactctctgcatactctagatactgtaccccaaaaaactgattcagaaaatactcctcgtacggtattctctgagcaaaaaacgccacacgacaaccgcgaacgcaactgctgaaacggggttacagagcataacttgtgtcccgaccgaccagatgagaaaaccgcagtaacttggatgcctcattagtctatacacaccatgagtcacaagcccgtgatgctcttcgtagttgatctttatgaggtgagtgaacgatcttcccgctgttattatcgctgccttcctgatgatttccccaacgatgatcattatgagtccaaagttgctgacccaccagtgttgtttcagccccgggaagaggataatctccgttaggtattcgagaagcgacagaagcattgctaaagcgtaatgcttggtgattaaaagcgaactaagagttacgtttgatgctccgtgaatggtgatggctagaatgtattcggatatgtggaagaagattagtgatagtagcatttgagataactgtctgatgctggtgtcactgaagatctctgtcatttttatcaatcaagaaagattataagaggttttctctcctgtttgatcaaagcttatgataatttgtttcaagaactacaacagacctgagaatgagacggaggcatagtgtatcagtaatggaagctggtttttgacaacaaatctcaggggatccaagaactgcataacctcctacaaaggataaagaacgaggaaattcaagtaaacgttaactcgctatatactcgattttatgaatcttaacaatgaattagtttggcatcaaggaaacatatgatcttgatccaaataaatcttgtaatctctgagttatactagtatcagtttgaccatttagcaaccatacaaatgtaatatgaggactaacactacagtctttatggcactgaatctgccaaaacccaggtcctacatgaacattgagattttacagaaaacccaccaccaacacaacaatcgcattgcaagtttcatacaaggataaatttcacgaacacaaagcttgaaattgcttatctttaagaaaattttccctttttactcacgcagttatgggcacgaatcctaatcaattgtagaaaattcatagacgaggaaatgaacagaacctcaagagcccaatcgaaatcgagagtttccgcgagagcgagttgggaaaatcagggaattacccgatgctgagggagttccacagagacgatcgcggtaaac

SEQ ID NO: 5035 - DNA, 2220 bp, Arabidopsis thaliana landsberg
agtcccaatgtcattcagagagagtcatgaccaactttaccttgcagtaaacgcatttcttcaggtatgcgccttcactttttccttcttccattatgtataaattaaacctaatgcctgtgtggctctgctttaggtacatacaaatatatctcaagaagaaaaaggatcaatctgcagttacctaaactgccaaaagctatcacaagaagcgtccctcgaactcgttaaaaacgagaaaatgccattacgtttggttgtccaagctctctttatccaacagctgaacacacaccaagcttttaaagactgttcggactcattcagattcacaaactctgcagacttctctggtagtgttgtcccaagctcaagacccttaacttcccaacaaagcccttgcactgatgatgaaacggggccaagaaacagaccgttatgcttcttgatgcagaaagatgcaacattggatgagtttgagtcaacgagcttcagaatccataacctcgaagagcaactagtttctttaaagaagagccttcactcccacgacaacctaaagaagccaaattgccttggaaaaagatcagcgagtagaaacaaaaacacctttggccaagtcacaacggcttgtattggctctgtaagctttacttcacagagaaaatatgcaaataggctactccagattctacgtagagttaacttgtttggaagtagaaaaactaatagatcgaaagcaggtgagagtgaaagatgaacatttatcaaatgtaagtataaatttacaataataatcgctgaatacaaaatttatcaaaaatttacttaaaaatagagttttgattgggtatggattaaaaaacatcgaccaggatttgtaatatgtagttgtgtttttttttttttaataaccatgtagcggtcgaatagcctactcaccaggtttctaatataatggacctaaaggatgccaccatttcgccaatgatttcgttacaaatatctttgttcaactatattgaatgcagtttggaattagtcacaagttattaaattagttagatgttttttttttttcaagaatggttcatttcttacaatataccaaaagctcaaaaaaataggtcatttcacaaacatatcaattgaagcatacagcatacactaagggtgtacatttagattgtgtattgagtttataatatatacacattctactttggtggctttgtcaccgggctgctacacgcttttggaatctgagttcccacaagctttggtgatacgttagagcattggaaagtcgctggaccatctgctccggtatactggatgttcacgtcaccaacctcaacgttctgacatggatatcccttgctacacaaaagcttcactgcgtctttgtttcctgatgttcctctgatcttcttgaagctaatattggccaacttgatcgttgatggtttctacgaaaaaaaaaaaaaaacagaacatcaaacttcttggaatcataaccaattgtagtgctcatgcactttccatatatatactacaagaaaacatgcaaatttatcacaaagaaaaatgatgaccactataatgcatgttttgtacgtacctgcttgttgcattggttccatgggcagtactcttggtcgatgaggatggggttgctgacgttcttgaggaggatgttctcgaaatggatatcggaggcggttgtggtacaagcagcagaaggccatgtcttgatccttagaccattgtcagtctcttggagagtgcagttgatgatcttgatgccactaacgttttcctcgtggctgtaccttccaagacttccaatactgattccatgtcccggaccgcatgtaactctttcgacaagaaggttcttcatcccatctccaacagagacacagtcatctcctgtggagataaatgaattgatgatcttgattccgtcacttcttccaacgtggataccatcggtgttgggactctctgcaggggcaatgatcttgacgtcttcgaatgtcatgttctttgctccaatgacgttaatgtggaagtgctttgcatctaaggaggtaatgcctcttattttcgcgtcggtgacgaaatcaaacctaatgctctgttcaagaatgccaccaaaacatcaacaaaaacagttaatcgcggagttatcttataaactatgagagggtttcttac

SEQ ID NO: 5036 - DNA, 1345 bp, Arabidopsis thaliana landsberg
  unsure (1)..(1345): unsure at all n locations
cccaaagatctctgatgttcaagttttatgtatgtgaacccaaaagataaactcatgagcaacctatttgtttttgaaatttttttcactcttatttcaatcatagttgattattgcggatttgccaaacatacatgtttcacggttcccaatattagtttgagttttggtccgtatcttccggttacaaaaagaaannnnnnnnnnnnnnnnnngccaagccaccactacggaatgtttcacttgcacaatttaagaaatcaaaaagtgactttcttttttttgtttcgggttctaacgtcaatctcgacaacaatgatccgatcgacttgtcattttgccggaactaaagaaaattaacgggactttatttactgatcaaattactatgaaccgagcaaatgaaatagagatttgtcaccaagaaataatggatgatgcattcattgttgaattaaatgagagcatacatcgtatatagttactgtgtagaagaaattcatatataaaattgaattgaatgagtgtttgattaattaattgttttagagcttctacatttaggctgctggagcgctgcatgctttaaggctctgagatcccaagattttgggactgacgtttgagcaatggaaagtggctggaccatctgctccattgtacttgatatcaatgtctccaatctccacgttctggcacggataccccttgctgcaaaggagcttcaccgcgtccttgttccctgatgttcctctgatgttcttgaagctaatgttcaccaacttaattgttgatgctttctgcaaatcacaaatcaattaacaattggaaaatcaaaatcaagcgttgagtaagatctgttgaagttggataggaaatacatacttgcttgttgcactggttccaagggcagtactcttggtcgatgaggattgggttgctaacgtccttgaggataatatcctcgaaatgaatatcggatgcggtggtggagcaagctgcagagggccatgtcttgatcctcaacccgttgtcagtctcttgaagagtgcagttgatgaccttaatgccgctgacatcttgctcgtgtccgtaccttccaagactcccgacactgattccgtgtcccggaccgcatgtgaccttctccacgtgaaggttcttcatcccatctccgacggagatacaatcgtctccggtggagatgaaagagttaaggatcttgacttcgtcacttcttcccaaatggattccatcagtgttgggactgtcttctggggcgacgatcttgatgttattcatggtcatgttcttggctcccaacacgttgatgtggaagtcttgg

SEQ ID NO: 5037 - DNA, 5226 bp, Arabidopsis thaliana landsberg
  unsure (1)..(5226): unsure at all n locations
aaaaatctatgaacttttcctcccaatgtgtggatagacccccaagtcaaaatctacttaatagtaacacaaacgtgattaatgttcaaaatggctgtatgcttgaatgaaaatttgtattgggtttgatttcgtaaaaagaatgatcccttgtgctaccacattcataaattcggtttctcgaacagcatatgggtgagattttgtaacctaccttttgggagaaaccatgatggggatgctcttgtccttggtgtctttagaggagatcggttttcgttgctaaagcaatgcatggtgacaaagaagattgaggtttttgtgaccgagaacaagattaaccatgagaatggtgatgacgtggtttggaagaatttcatgactttttcaagtcctaacttgcctgatttagtagagacggtaaaattctctaatccaagttacttcatcgaaggtaaaaggcttgtggtgtgctctcgtgacaacactggtcacgcttggatctatatactgggggatagtaagttgatcagtaaaactcgtatagagtgtgtggttgatccttggcctttgcactgtacctttgttcccagtttggtaccggttcctgcttcatgccgaagagaagaacaagcagaattacaagtttagttttattacatttttgcttcttgtttggtatgttatagagaaagctgaactcgatttgaattttggtgtttctattcactaccattttctttgcttaaactagagattttactatttttcccttacaataaattcttacagatttttttttattttaatcaaactagattgaatcttaactttgactctcggttccttaactttaatctgcaagtaatactcatttgaagaatttggttaagaaatctctatttgatctgcaagtaatacgaaactaagcaactttaaaatctctatttgcatccccaccgtttgttaactgagttacaaagatactgtgccattggaccaacaacaaaggaaaagagttacaaaacatgtgtattaccttatcgactattattttttaataattttgactatcatgaaacatctaagcaaaactatgcggaacctaaatgtgtgtttgaggtttaacccaactccagggtttgataaatacaaatatcgatctgatgttgtcttaatttaccataaatcttaagacattatgtgtaaactacaaagagagagtcgtctaacttgtccaagactaaaagatttaactttaacactttgatgttttgattctattgactagcttgtccagttctccgtagctacatcgaagtttccctattacagaagtcacatggacacaattgacaagaacataggatacactgtttggtacaaagagttacagagatacagatgcgaaaaagaacaccggcatcaagggccacatcaattaaaagaacgcttcgcattgattcctttccgggggaataaatagatggaccatttcgttctcttaggcacgttcatcattcgtgtggttcgggacctcgggttggctgtccagtggcatgtactgtgccattatggctctgatctctgagtccatgtattgctgtaaatccatgaacatagcaagttcataacaattttcccaagtaatcgatacaattccaagacgatatcgggttacataaaacaatgttttaagagacatctcaggcaaccaaaacataaaacattaatcttttgcttctaacagaaatagcagaaggatgaataaaaagcttaccctcaatctatatttgtaaacgaggtatgcaccagcagctgcaagtcccaatgataacattataagccaaacggctgcccacgctgatttcacttgtgaacccnnnnnnnnnnnnnnnnnnnnnnnnnnaccaatttcagttgataaagagagagaacttttctaattcagaggctatttgtatgcgcgagtactcttttcgtgtgtgacatactcgtacatgcatatttatagaaatctagaaatcttaagatgatgaaaactcactgatgcaagtgtcatggtctctcatgtagagaaggtccccgctacaagagcactcatagcttccccaggtgttcttacagctacattccgggcactgacatgctttcttctctttgcactcattgatgtctagtgaaggaagtatgaaaaatccttaagaagatgtttatgaagtaagacaaaaaaaatagggtaaccaaagttttgacagaggtctaaccttcacatttcttaacaccgtctcctttaaatcctggaggacactcgcatttcacactgtccttgtcctgaaggcattacaagttcagacagaagtatcttactaaactgtgagattatacgcttaaaagtgaagcaaggcgcaggagaaaccactaaccacacaagcagagaacgcatgtccatctctctcttcatgccaacaacctccattgttgattgtacatctccctggcccgcttgctgcaatgcaaccaccatatacgtatgaaaatgtgaacgagcgaagcacaacaacaacaacaacggcaaagaacacagttncgaagtcatctaagagtatattttgctatgaaagttcttgtgatcagcacgaagatcgtattttgaatttcaccagagacatgtgaaacaaaacatccgtttacgattcactgacaataaattatattgtatcttgccatactgtaagaccacaacatattactttgtaagaaacttgactaatattttgccattcttaattgctactgtataacataagtcgacataatcataaaaattattcaaaagatgacccgagcacttacgctcacagtggctgtaaccatctcctttgaatcgcacaccatcaactataggacacacgcatacttttccacgaaacgtatcctgcaaattaatcagattaatagataatagatataatagaaattcttcccaggaatatcaaaagtaccttgcaagcagttatgttggctgatttatcttgccaacaaccgccattgttatctaagcactcgtttgtctccatatctgtcaaatgcaagagaaacttgcaaattcaaaactttcacaataattgttttaagtgtaatactagtgtatagtctacagtccagccattaatttgatgaccgaccactgggtctgggtaagggtatgtaaaacatacctgtgctgaggcatatagctggttcagttgactcctcaaaaccagagcatagagccttgagtactgcactcttctccaacttgcctgcaatggaacgattataaaataagctaaactacatatattgaagtcttaagttgaacactgcggaacaaacctcggtactgtctgttgttgacaactaaggtaggcaatatggtaacatcaccccttgaacccttgccaacctacataatataatatgtcaatcacaaacgaacggattattcaaagattataactatgaaacgccggaggaaaatacagatgaaaatgactaatatttacttgagcatcttgttcttccttaagaactggattgtccaagtcagcatcagggtctcccatacacttgtcaagttttttactatcaattcctgtaaagacatagtaactatgcatcattctccccaaaattgcctttctttaatttgcatataacagacacactcaccaagagatttgattacagactcagcacaatctttgttgtattttttctccttcattggacatctgatctggaaatcagtaacataatcccaccagacccaaggtttgccggtttcattcgccaccttgtaaacacaaagctgtctcaaattttccacaaccacgtcttttccatcgtatcccgagctaaagtcctgctctggatcaggagcacagtaccttcctttattgatacactgagacttacactgtcgactcaacgtgaaagcatgaggacaataccaagtaatataatgaggcctaaactgcgtaaaaccgcctttctcaagaatctgccttcacagtgttatagcctaaacatagcaaaatgtaacaatagaaaatattattaactttggaaacaaaataatttccatttgcaattccgataagatttgagtaggatatttaatatacaaaatatcgtaatcaaactaaccttattctcattagtacaattacagaatatgcttctataaaagcctaatatgtttgattgtaaaatatttgcaggcatctgtttgaccgcttgggttttctgatgaggtcattctcgatgtttcgaacagaacgcttgcatatctttcattctctacaacttatataaggattgtgtctaagagaatcggttttaggaattcaagtaaagattctgtactagaattagtttctatctattgctaattagctatcatcactaatattaattttgttgcaggttctcaaaaaatgtttcaacacattccacgcacagatacatcagcgtgtcccattggagtcaataaatgctctttcaacaaacaatgaagaacttggtagaggatcctctctgagttatttgtatttggaaggtaaagtgtttttaattaattttgctttttgtgattacacccatatgagtttcattgctaaatttgttctcattggtaacgattttgtacttgaatgagaacacatatgaaatggcgttcaagtatgattggatttgtccccagattaaatccttattattaaccttttgtcgttaaatatgtgattatgttgttattatttcagatattgctcaataaaataataaatgtataagcttcgagaaaaggacgaataatctgatctttatgatctttggtttttgttttggtgtgagtagaagaacaatcaaatcttaactctcgatgtgagtataaagtagtctattttggattctctcctttgtgggtagagagatgtactaacgtcaagattactagttcggtggtttatcttccacaaagatacatcatcattgaactcgaaaatatggagaaggttgagaatgttttagaagctttttacagtagaagaaaagctgatgtttgtttaatactcaaatgtttttatgaaaaatgtttatttagattcaaatctaatcttttgtatcattttatatanaaaaacaaatgctataggatcatatttgtagtaaagaaatggt

SEQ ID NO: 5038 - DNA, 142 bp, Arabidopsis thaliana landsberg
aacataaaagagaatcaccgaaagcatgaaaaaacgtacacagacaacacacatgctatcaatttctttgagaacccaaaacctatcgaggcagacaaggtatcagagacaacaacaacagaaactctaagacatgtgggag

SEQ ID NO: 5039 - DNA, 1993 bp, Arabidopsis thaliana landsberg
gtctatgtgttggcttggtttgcttacatgtcccacctacatgttactctctctatatcacttttttattggttaccaatatttcttgagagctgtacggaattaaaatctctagtcttggtgatgatttacttaaccaatgaatttctttttcgtctttagtgtttttatcttatattgccattcaactctctttattttttttccttaggtattgttgcatagtgataacataaatcaactaagtttttcatctgttcctaagtgtctactatcatcgctccagtttgttgaactcaatgcccaaatcttgagatttgatggcgaaatactgaatctggcgaaatacttcttagagaattcatctatcctccaaaaactcactctacatccgaacaagtatggttcaacttatgcgaatatgctacacaaattccgaagacgctctagaacttgccaattcatcctaactgatttggaatagcttagagagagcatgtgaaattcttgagacacaagtaatgacaggtttcagaatctgtgttgtttatgtaatgaagttttgtcccttaatgcttatctattacgaatttgaatgctccaccatcactcaatgcatgttttattgctacacttgcgtattttgttttctttagtatattgattaacttatgtgttttgtatattaagttctatattactaagaaaaacagccttttacactccgtttttgtttgttaagcatttcacactcttcgtcaattaattactaagcgctctataaaaattaattggaattctgaaagtagttcatctataggttaggtctttggagtactgtggaagtagatgtttttgagtttcttctttaccctaggtatgagattagaaggttgagggtttgggatgtcaagtgatcgctctcttctgggagttagtcgcgaggatcatgtttgtcctcggtagcaacttgaactgttggaaccggttacttttggccaaagggctcattgtcaaaaacttgcctcaaagtggcttctattgtaaccaccagagtttgcatatgagtgacccgtggtttcactaccgactagacacatatatttgattccagttaaagcttcgccgggcggagcagcttcgttgtttctgttttttgtaacccatggatatgttagggccataactcaagactatttgagttgaattaacatattctaaattttatatgtaaaaaataaaatagacatgtatatttgcataatgatatgcaataagtgaatgttgaacagttcataaatgtataagttggataaatggaatttattttcttaaaactactatcaaactgacccttaatcagctagcacaaattcaattttcttaaaaagttacgtagtttggttaccatttctcctaatattaaaaatccgaaaactgttaactcaaatcaaaactaggaggggatgtgaatctcacaagaactggatatgaaatttagatggacgtttaggaagatcaagaaggtgattgatgactctcagtttcttgttatcatcatgagcatcaatttccactttcatcacttgaagacactgcatttcccgcaacaagcacttcacttgtctcacttctctaccacatccactaaacccatatatctccaacaccttcacttcatttcgatcaacgcaaactccgtgatcacttgcacaatgcaaaccctaaagcaagcatcacaaataaagcaccatatatacaaagttaggattgtataacgcacaagtgaattaattatctctttataaagttcagattgcgacaccttgaggaccaacgtttctagctttggagatttgttaagcagacgcggaagcacttcccaaccttctttctcattactttcaaaataaagcttaacaaggtttgaaaagacatgtaattccacacatcttgaatacatcatctgaaacgcaagaccaaaaatatatac

SEQ ID NO: 5040 - DNA, 2042 bp, Arabidopsis thaliana landsberg
aagcacggcaaagaccaattacagatagagagaccacagtcattttatcttaagggagaatctgcttagaactgaaactaaccttacaaaaacataaaatctggtaacgtaagcgagacgtagaatacaagcataaaatgccttttgtctcactttgttccagagtagatagataccgcaaaatcaaaagagttcaaaacttaaaaagcaccataacgcaaacccatctcattcctcatcatcctcactgtctttgttcttcttcttcttatccttctttttctttttcttctcactcttctctgctgctgattcatcttctgcgtcaacagcagcttcggtgtctttgctcttctttttcttcttcttctcagactttggtgaagctacctcttctataacctcctccttcttatctttcttcttcttcttttccttcttctcagacccggcttcctcttctttctcctcttccttatccttcttcttcttcttcttagaagacttcaccttctcttcagcctcttctccttcaacttctttggttttagatttcttggttgttacaggagcagggctatcactgctatcatcatgcttacgcttacgcgcttcccctgcttctccattctcagcgtcagcctttatctcctcaggagcagcagcagcaccagcaattatagcatctccaccggtaggcaaaaccacattcctgctccactcaaccggagtcttctcattaggcttcccatgcttatccaatttcccatcagcaataagcttcttcttcatagaagcccttggtcccaatccccacttcctcgggtaggtatctctatccatcaccacacgcttgatcttagctaccacaccatgatcacaagtagccatcacagatgttgtcatctcagcaatcccaacggcaatcgcctcacccttggtagtcataagaacgacttcagtaccaacatcaatgtcattctcgaatctcaacaacccaggaatcatcaacttagcaccataacagatagcattcacagcagaatccttgacaacaagtctcttgtaactcgtcaatatcatctcaagaggcataatcaccctcctaagataagactcatctctggagttgtcatacacaaattgggcatccatcacatcatgcatagtaaccatgttattattctcacccaaaatcccagacctaaccctcctaagctcctgcatatgcccaccaaccccaagaagtaaacccaagtgaacacacatagtcctaatgtaagtacccgcctcacaagaaacccagaaaacaaccaaatgcctatcagcatcatactcaagcagcttgctttcatagattgtcctaatcctaagctgtcttttaacagcagagatcaaaggaggcctctgaaacacagctccagtgagcgattcaagagctctagctactttagcaacatcagggacagctgagtgaagtcgagcaacacaaacgtactctttacccgcaccttgctgcgatttcacaagccgtgtggctcggtcaatacagacaatgaggtttccagtgacttttgggtcaagagtaccactgtgaccggttttctcaacacggaggatacgcttaatccaagcaacgacctcgtgagaagaagggttcgcgggtttatcgagattgatgacaccgtacctgatatactcttgaagaggacgtttcagaggagagtgaccggcgctgattggagtgtagtgaccggtacggacgttgaggcggtcgtagttcttgaggaggatgggccactgagaagtgtcgatggctggagtgaaactctgtggcttgatcatgtagtctccggtgtcggcggcatcgttctccgttttgtcttgcttcttcttcttcgagtgtgagatgtcgacctccgccatggctacggtcggattagggttttgaaaaatggaggaggaggcgttaaaagttgtagcggaaaaagaggagacgactgattggtaatttataaaggactagggttttttagggtttt

SEQ ID NO: 5041 - DNA, 1435 bp, Arabidopsis thaliana landsberg
tagtgtattatctcttgaaatcagattcaagatgttcaaaaaaactcccacaaaaaaatatatttaaaactatctcgaaaactaaaactaaatccattcttagaccattcaaccaatccccaaagctctcctaaaccgcgtctctcaactgaaatttctgcacaccaaatctccgttttacatttcttagtcgagtggctacgacctcgagggcgaaacaccaccatcgacttccaccaaatggccactcttctccctccgccggagtttcccacataagtaaaattttgattgtgagacagttgttcaagtcccctaaccacacgccaaacatcttccttcagttcacgccacactagatctctatacgtttcacttagacccaacagcaagttctctaactctacaaagcaagtgttcattttcgtgccattcgttgtataacgtttcccgcccattaccaagccacctgaaaccacacagttttgaatggtgagatttactgtcgtgggcaataatggctcccaagtttgggtatttggatcataaacctctccacaatcttttttgatattcctgggcttgtagcctccaataacatagatcttcttgtcaactatatttacaactgcagaaacacgaggtaaacgcatgtcgtggagtctacgccattgatgagatcgactatcgaaaacaaatactctcttgctacttgttccgcaaacgaagcctccgactatgtaaatatctgaaccatttgcaacaactgttgaggatttgggatattgatgacgatgccaagggatggatttcaatttctgtttggctatcggggaaagtgtgaaccagcgaggattatagttggtgttcttgttgaggtttaagcagacacaaaggtgattctcggtttccccaatgaaggaacgtgtggcctcgagctcaggcgaagcgatgagtgatcggaaacccttggagacgagtgatagagttggataatggaatctcgagatacgagccaaacaattgaaagcgatatacatcgtctggtaaagaaagaaacgtcgtcggaggagactttgatgatttcttcctcttttgcgtcgtcattatttcctgatttgggaggttttcgaattagggttttataccttcaaactaatttacgaagaaaacctagaattaatagacttgttgttttaatgcatttttattagttactgactatcgatggtgaattataaacttcaagaaaataattaatttagatttatccaaaacaataaataaatttttacaatcagtttttgatatctgtgacaaaatatatagtaaatataaaatctctattagaaaatcattaaaaataaaataaaataaaagaaaactttaaatcctctcagtctatcaatgatcctaaaaatccttggacatatca

SEQ ID NO: 5042 - DNA, 1813 bp, Arabidopsis thaliana landsberg
tcaccacttgtgcaacatctctttatcactctcaactgtttgactatttattgctacagaagcccatttcttcattaactacacccattgactttctcgttcgtagccattattttaacaacgaaatgatgcctattgttaaggtcacccgtacgttagttgtcacgtatgcgttggaagcggcgtctctgagtggactgtttacttgcatatttaggatttcacaatttggagcttctttgaaagaagattaataagaaaaagtaagtaagaagttgacttcaccttttaccaaaaaaaagtaagaagttgagttcactggaatcttagttaaatgaaatcggaggaaaacaaaaatgaagggagtagcggagtataatcaatccccttcaagaggatctaacgttcactgtttgtttgtatgttaaatgggaaaaaattggagatgggttaaaaggtgtgtgtatgtggtcattggtcagagagctgccatcattgctcgtcttgtggcctcctgcttcatctctgctgctttcccgctccccctgaagtacatgtacacttgctgttcccacacacacacacaacaacaacaacaacttgttaaccacttcttcctttttaacttatctacatgaataaatgattcagcaaaggagggaacctgaataacccagatgctgacgagtgactccagacagaagaacccaaacccaatgaagtaaaatatctgccaccacctcaccaaaagttagccttactcaaagtccacaactgtttaagttattcgctacctaagctttcaacttaccccgaccaagatattcccactcaatacgtcgatcgccggcaatattcctctgcataacacaacaacatatgatgattccacctctttccttttgtgtgatttagaaagtagaaactaatttgttacttacgtcagcgattttcccttgaagataattggaggagccaccgccgcaaacacacaaaacgctatgtgaaactgcaatcatattttaagcttttactcacttccaccttttgatgtgtcaaagccattaaaaaaagttcactaaaccaaatggaaaactcaccagatacgtgaagaaaaaccacccaaacttcagagcactatcagtcctgcacacaaccaaatcaacccacatctcattgaaagtttcgactcttaattacgatgctatctggaatactctttttgttttccctctaaataaaggaacacaccacgcagtagcagataagatattttaaaggaaaagatcttaagtggcatgaatacctcatggcacgataaagagggcgataccacataacatacgctccaggaacccccgatatgaaatagataatagctagaaaccatattgtcggacctacacccaaagtcaataagtcagcagattagcatcaatacaggttcagtctacttggtaacttttgactgttccaagactaaccttctcccttaatccacgcggtagtaactgcgacaatgttccataacaggcacaccacaagacctaccaaacagagattaagatcgtttactaataattcaagaaatccacctctgttgcaactgcagatccgttgatcatttgaagagaaaacacatacccagcattgatgtgaaagcaacatattggattctctgcagatggatgggtatctcatttgaaatgtcatgatggatgagaggaaaaaacggtggccagtttttctcttctatcacaattccggcttccaaataaatatgacagcatgagcatttcacatggaacgaaat

SEQ ID NO: 5043 - DNA, 498 bp, Arabidopsis thaliana landsberg
  unsure (1)..(498): unsure at all n locations
aaccgccccgatcatggcttctttcccgcctttggaaattaattgggttttccaaccatttattctagagggtgaacgggggctaacaaaggaaaaaacttttgtcttatatccgcctaaactttctggccatgcaagatacgatcccataccaccaagggtatgaatgcccaaaattaatttaatatctgccttgatggaatcttctaccttatgaccaaactgaatcgaaaattttgaaaaattaatttgttggcccgataccgattcatattgcttcagagtctgcaatattattccacactgtgctttattagctttgcaaaaaaataaactatcatgcgcaaaccgaagatgagaaactgtnnnnnnnnnnnnnnnnnnnnntatacccgctattagagtctgacgttccgctttccgaatattcgcaattagtgcctgcgtacagagaatgaattcatagggtgagagcaggtcaccctgtcttaaacccct

SEQ ID NO: 5044 - DNA, 456 bp, Arabidopsis thaliana landsberg
aaaaaatttacaacaacggcaagcaaagattttttttaatttatagcagacaatagacgaggctttatcccgggataactccttcgccttctgcgctgctgaagagacaagctcaaatggaagaggagccaactatgaccagtgctcttgcctggatggagctatatccgcacaaatgcctacagaagcacaccataggaaaagcaaatatctgtaaattcgattgatcactaccacaagtatatgccatgttgaccgaagatacaaagaatattatgataatattcactctggttcagaatataaactttttgtcttaagaatggatgaatgacctaccatgttgcacagccaagccccaataccgtgcgcgccagcatttcttcagaactactaattcctagataatacaatcattcataaagtcaaaacctcacaaccttatgaattattgga

SEQ ID NO: 5045 - DNA, 1185 bp, Arabidopsis thaliana landsberg
caggtatatctggaatatctgatcactgcctttaatatcaggttatctatggttatctggcgatcaaaccggccaggccgtaataaagctttatcaagaatatctggcctgttagtcccagcaaggacgacaactccagcggtagtaccaaatccatccatttcaactagcagttgattaagtgtgctttcacgctcatcatttccaccagagaaacctccacgtcccctcgcacggccaatcgcatcgatctcatcaataaatattatgctaggtgcacactgtctagcctcttgaaacaagtttctcactctggaaggtccaacaccaacaaacatctccatgaaatctgaaccagatattgagagaaacggtacagctgattctcctgcagtagcttttgctagaagggtctttccagtcccgggtgggccaactaaaagcgcaccttttgggattttagctcccaaatcttcatatttctttgggttctgaaggaaatgcacaaattccataatttcttgtttagcctcctcgcatcccgcaacatctttaaaatatatctggcaaaaaacaaaatagatcagtagtaaatctcaatagcatcatgaattggaaatgaagatggtaattcaacttctccaccctgattgaaatgctgaccttattcttggagtttttatctgctctcgttatttgagctttccctatattgaaaattccacggccagccttcccaccaggtccgcctaaacctcccagtccaccttgcatccgtcttgccccaaaaattagcgtagccaagagaagtaaagtcggtgcaaatctcaatagttcctggtaccagatagtttcactgacgtaggtgacaggaacaaagtcatgagaattaacgcctatagcttcttgggcctcttctagtttctcctcaaatgattcaacactaccaatattaaagtagtacttatactgaccaccacgtcctttagcaggaactccattaccaggaccttgaacaacttcttccgttgtttggctttttggtgaactcctcacatagacttttgcgacttctttattggaaacatctatgtgatccactaaaccagcctcgaggagcttgtttttgaactcctggaaactaatctgaaccaacaaatataacacggataatttagttgacat

SEQ ID NO: 5046 - DNA, 1644 bp, Arabidopsis thaliana landsberg
tgatcttcttcaagtaaatcttgaaaatctgatcacgccctttgatatcaggtttatcaatagttatctggcgatcaaaacgtccaggccttaacaaagctttatccaaaatatccggtctgttggttccagcaagaaccacaacaccagcggttgtaccaaaaccatccatttcaactagcaactgattcagagtgctttcacgctcatcatttccgcctaaacctccacgacctcttgcccgaccaatagcatcaatctcatcgataaatataatgctcggtgcagcttgtctcgcctcttggaacaaatgtctcaccctcgaaggcccaacaccaacaaacatctccatgaaatctgagccagaaatagacagaaatggcacaccagattctcctgctgtggcttttgctaaaagggtctttccggttccaggcggaccgactaaaagtgcacctttcggaattttagcacccaaatcttcatacttctttgggttcttaaggaaatgtacaaactccataatttcttgtttagcctcgtcacatccagcaacatccttgaaataaatctggcgaagaaaacaacaaaagtaagtttataaattccaaacggatcattaaaaacaaaggcaaaactctaagtctctaaccttattcttggaatgtttatcagctctcgttattgtagctttgcctatattgaaaattccacgaccattcttaccgccagttcctcctacacccaatccaccttgcatccgtctcgcaccatagatcagagtacccaagagcaacaaagtcggtgcaaacctcatgaactcttgataccagaccatttcagagacgtatgtgacaggaacatattcatgacgatcaacacctaacgcttcttgagcttcttcgagtttctcctcaaaagaatcaacactaccgatattgaagtagtacttatactgaccaccagttcttttagcaggaataccgttaccattaccatggacaacgtcagttgtttgttggtctttcggtgtgctcctcacgtagacttttgctactgatttgtttgaaacatctatgtggtcaactaaaccaggctcgagtagcttgtttttgaactcctggaaacttatctgaaacaataaaaggtagcataggatattagtggaaactatacgagcagaaccacatctgcagttccatatccaagaatatcacaaagcttagtttaaatatgcttgcctgttgttgttccccagagccaaacgagaaagtagaaaagaatacagcaagagctagtagaggaattagcaaattttggaatcggttcatgaacatatctcccacattctcattttcattcttttctgaaccctctgtattgcaacaataacatatacaattattataatccttcagtagcaccaacaggtctcataataagaaaagtatcttcaaaatctatgttgttcacctttatgctctgatttctgatcactcttgggttcttgcttatctttaggaaaatagttctcataatctacacaaagacaacaacaagaacactaatttataaccaactctcaacactcattaaaaatggattaacattaatgcaaacatactcttcttcttaggagcttca

SEQ ID NO: 5047 - DNA, 2716 bp, Arabidopsis thaliana landsberg
gaaaccattcattaataaaatcaacagaggcaaattttggcaatcgaatgagacaaaagacgaagtatatttaagaaaagaggtctcagtgtgtccggagatatactatagtgaggtcggtaagttgtatacactttttgttcttacatttacagagagaatcagagtaacaagagaacctgtttttaactgttgtattcaagattctctacaacactcgatgaagacatcggagacgatgtttccaccctcgttagaacttcaggcactcctgcggtatctcttacaatctacataacaacaaccaaaagactcgttttataattttctgtaagctccaacttgtatcatcataacatttcaggaacttacaagaatctcgtcgtctagataagatatcatgaagaatctttggtaagttccacctgaaagtcaataacaacaacactacttggttacaatgttacatgtgaggagtggaaaatgttaaaatgatggttatggctttaccaagggggattcttagaccattggctagagtatctttgataggttcaggaagctgttgcaacgtggtagtagcttgacccaataaacctcttagttggtcaggtactgcttcttcaataaccgttggcgactcgagcaatccctctaaatactcttctttcatccttaaaggcccttctattgtcaatttcgatgacagggtgattttgttttctatctgcatcattttcaacagaaacaacaaagaaactctaatttgagtctgcttataaatccataattctcatccttggaaaaagtaaatttaccgagtttaggagtttgatgtttgctgttgcctttgtgttattatctttaatgaatatttccatattggatagactcaccaatgtcgaagggaacctcctgccacaataccaaacagatgtaggaatgcttaaaaactctctagatataaaacgaatgtttatttgattatcgatgagcaagaacactgactcgaacataacccgaacagcaagagaaccaggagtgttgactccaaaccactcaaaactccatctaccttcaagataaggagacctgacaaagctagctattaggaagcatcaaataacaccttaaagcttaaaactttgaagctcaaaatcgagcaacatacgtggttggtctaggagttggattaagccgctcaagattcgttatcctttcattgacatcaatcttttgcatatcagtgatcttccctgtaactagagcctcaaatcctccagcatcattgaactgtaatctcaaatggtttcagaactccaacagagagcaatcaaattattcactaagcaatctaatgatgatttccaaaaccagatactaaattcaacctaatttctaaccaatcacagttgaaagtttcaatttttaagaatttttcgaagacttacggcgagaataagcgattccttagcagagagacgctccatttctctggcgtaaactgaaggaatcccttgaaccgagtcttgaaccatagctctgcatatcattctccggtaacaactcttcttctccgactgaaaattgagagaaacccttgacagtggaggagaagacgacggtggtgatacagaggatgagaagctcaatcgaaccgcagaggtcccagaaaccgaaccatgttggatcaatgccattgaataagggggaaaaggtcaaagattggctttttattagtctgaggaatgagtaggtagaagaagacgagagcagcagcagcagaagaacccaactaaatttatcagttttaatttaaattctgaatttgcataaataaagataataatatctgaaaaaaaaatcttgtaacaaaataatattagaacatacaataaaggtctaataaaatttttgggaaatggttttaaatgtaaaatgcaacaaaatattaattttttactagaatactaaaagaacattcatgatataaaacaggcaaacaactatacgaaatttacctccacaatatgattttgtgcatttatttccctatgacactcaaaagatattagatccaatagaaaacaataaatatgaatgatgaacatttagatttcacataaagaaagtctaaactctaaactatgaagaaggagaagtagagaaaaggaaaaaataatgttggcattattagtggttaaacataatcgtaattaatgatactccgcgtgcttcatatcgaattaatagaggttttaacatatatttatttccattagctcgttttcttggtccaaaaaaggaaagactcgagcttattaaaggactttagacattgcagtgaatcttctttttccttgtctcatcacttggaatccgagtatattaggtgagacttgtttatgtgaaaccctaattaagttaatattttcttcaagttttctcggtatatatagagattaaactcaagatcggtttcctgtttttgtaggttattatatattttctctgaagaatatgatgaagtcttgttcctcaccgaagatgatgatgatgaaatccgtgaccgcttgtctaattttaacacttttgatcatgtccgtcgccgcaaaaggcggtggtggtggcggtcatggtggtggaggtcacggtcgtggtggtcacggtcgtggcggtggtggtatttttttctttggcggtggctctcatcatc

SEQ ID NO: 5048 - DNA, 1786 bp, Arabidopsis thaliana landsberg
  unsure (1)..(1786): unsure at all n locations
agctaaattcattcttttttcaaaccatttaggaattaatctataatatgaaattgggaccaaaatgtccaaaaatactttcggctaaaaagaccaacatgactctctttttatgtaggtcaaaatagtattaatagtctcgaatctatctttttttcttcgtcaaaacttgcaatatgctggtttgttgaatatatagatggtgatagaacaacgaaaataatagcaatcactagcctacatgttcagatccgatgtgtaaatatgtaattataatattgaattaggtggataaaattaaattacctctttgctgtaaggtttatnnnnnnnnnnnnnnnnnnnnnnnnnnnnnnnnnnngtgggatcggcgctaccaccaattgcatacattatccatttatcgtatctattgtttgccacatgagcgtagcctcgtcttaccctgcagccaccacacgtttttacatcattacatgtctttttggtaggctcatcattacatttctaattctgctctaaaaattcttaatagttattctaatatttttgggcaaataattttagttttttagatgaaaaaagaaaggaaaattaaatagtaattaccttggcattctctccacaagtcctggtccaaaatgattgaatgccacggtcactttcatgttcacatctttcacaaaattatcgttgtgtccgagcaacatcacctatacatatataacaaccaatatcaaaatgtgatattaacttcccaagacattaaatagctatgttaatgattttgaaaaactgaaactgactttgtcatgctgagtgaagtagttgttggaaatagtgattgccgtggaagcatggattacatcgatgagtccgtccgtacaactcgctaggtaacaatgatcgatccaaacattcgacgaaccaaaaatagtgatggcatcaccgtccgatcccttacggtgaccgacatgcgtcgggctgctcctcaccataccgtacttccccggtttgcagtcgtggatgctgatcccgtgcacaatgacgttcgtcacgtcttgtatcgtgatgcatggtccgtatgcgatttctacttttgcccctctcccatcaatggttttatagctattgaccatgagctcattttctagggttatgaccatatccttagcgaaagtgatccacaatggtttggcttggatcacgccgtaccgcaaagaacctggttgaggattctgtgcattgtcgtaagggtttgtgacaacgtataaattacctttctttccgcccaaggtagatgaaccgaatccaaccacgcaatccgctaggtctttacgattggcagcccagtcagacttgagccgccaacaggagtccaccggattcatgatgttctgcggtttctcggggaggtagttggcaaccgtgggggtatacccgtaataaccattattttcggcatggaccaaggaatgacataagaatagtaccacgaggaggcacgaaacggtgaaaagagtcatggttgggtgggtttatggtttgagtagggatcgatactaagaaaagagaaaagatgggcaagtacttaaggaagtgtttagatgagagattgtgtcggaaagattagaaggtgttgtaaacacgatcttttcctaatattggcctaaagatcaaagttgtattggtgagactttcgcgttcccgcacaagatcacatgttcgtgcttaaaaacgaacatttctcaagccaacttgttggatggaaaattccaaaggcttt

SEQ ID NO: 5049 - DNA, 547 bp, Arabidopsis thaliana landsberg
caaattaagatcatcttcataaatcttctcttatctcttcctattttctagagaaaacatgtcttgctgtggtggaagctgtggttgtggatctgcctgcaagtgcggcaatggttgcggagggtacgcgtttctcgatctctcataattctgattcttctggtgtttcttgtgattttctgaatcaaaaaccctaatttctcgatgagattataatacaattttaatcaaatctttctggttttaattattcatcatttttaacccatgatctttattttttttggggctttgtacagttgcaaaaggtactctgacttggagaacaccgccactgagactcttgtcctcggtgttgctccggcgatgaactctcagtacgaggcttccggcgagactttcgttgccgagaatgatgcctgcaaatgcggatctgactgcaagtgcaacccttgtaccttgcaatgaagaactttataaaccctaaatctgtaataaccctaatgttatgttagggttgcttatatgtaataattggctgattttt

SEQ ID NO: 5050 - DNA, 2768 bp, Arabidopsis thaliana landsberg
gtgttcttttggtatgctataaggtttgatacgaggccttgataattgcaggtccctgtagattttgtttttgatcactctgttcaggtggatgtggcgagatcagagaacgcggtgcaggcaaacatggagcttgagttccagcgtaacaaggaaagatttgcttttcttaagtggggatccaacgcctttcacaacatgcttgtcgtacctcctggatctggaatagttcatcaagtaagtagaggattcagggacaacggtattgcttggaaacttaaagtatttttatgctaaattctataattttgcaattgacaggtcaacctagaataccttgccagagttgttttcaacacaaatggacttctttacccagacagtgttgttggcacagactctcacaccactatgattgatggactgggtgttgctggatggggagttggcggtatagaagcggaagctaccatgcttggtcaggtaaatcagatgctctttcggtcgagaactcatagctaactgtctaacctctttctgaaactttggttctaaactacatcctttcaataattctaatagactttccatctctttatatgcagccaatgagcatggtcctacccggtgttgtgggtttcaagctaacgggaaagttaagagatggaatgacagctactgatttggtcttaacagtgactcagatgttgaggaaacatggagtagttggaaagtttgttgaattccacggtacgttgataaaagatttgatatcatatttcatatatgtctcttatttacttacatagtaccttaccgagttaggctagctcacatatgcatcgactgctttttcatacacaggggaagggatgagagaattgtctttagctgaccgtgctacaattgccaatatgtctcctgagtacggtgcgaccatgggattcttcccagtcgatcatgtcactttgcagtatctaaggttgacaggcaggagcgatgacactgtaagaaaatgcacaaaatgtcacatttgggaaaatcttcattatttagtgtgttaaagactttcataatggtattgatttgtgaattggattgcaggtctccatgatagaggcgtatttacgagcaaacaagatgtttgtggattacagtgaggtaaaccttgggcatccttaatacttcatttcttatgcctattgtcatatatcatatttgcataacatatgcttcacttggaacttgttgcacatctcagccggagagtaagacagtttattcctcatgtctggaattgaatctcgaggatgtggaaccttgtgtttctggtcccaagaggtactattagtgaatgattcgacagaaaattatctaggatccattctacttacaatgtctattctctgtgcacaatacaggcctcatgatcgtgttcctttgaaggaaatgaaagcggactggcattcttgcttggacaatagagtaggattcaaggttagtactctcctttctgttgagaagatgtgaatgcttgcagtcccgagagcttaatttgtaggaaattatgacacctctagctattgttactgtaattttgaaagaatggtacgtattcgagtctttaagcgggtccaataaactaacttgtacgttctgcaacacttctgaatttataacctacttccattttttcaaaaatagtggttagtgatactacttatccatgattttccagggtttcgctgtacctaaagaagcacagagtaaggctgtagagttcaattttaacgggaccacagcacagcttagacatggagatgttgttatagcagcaatcaccagttgcacaaatacttcaaaccctagtgtaatgcttggcgctgccttagttgcaaaaaaggcctgcgacctaggactggaggtttgactacttgtgtgatagtgatttaatatctttatgtgcaatggaaataatagaagtgcttgaaatttctcaattattaggttaagccatggatcaaaactagtcttgctccaggctctggagttgtaacaaagtacttggcaaagaggtactgcagatacaccgttgaatgttttgttatttatttccttatcctttgtattgtgtggtcctgagttttcaagtcttgcagtggcttgcagaagtacttgaatcagctcggcttcagtatcgttggttatgggtgcaccacatgcattggaaactcgggggatatccatgaagctgtggcttcagcaatagttgataatggtaattccttaagtagttaatgaagtaatgcttattcacttgaattttcgaaggtcaaactaaaagatttctcatatatgtacaagacttggtggcatccgctgtgttgtctgggaacagaaattttgagggacgtgttcacccgttaacaagagctaactatctagcttccccaccgcttgttgtagcctatgctctggctggaactgtatgttaatgctaactctaaagccatttcacaacattcaagcattcttgttatatgaagcacagaatcattcacatgaatattcttgtaggttgacattgattttgagacacagcccattggaactgggaaagatggaaaacagatatttttcagggacatttggccctctaacaaagaagttgctgaggtaaatatatatgggctacttgtgtaatacgtaaacaatgagatattataagtggaggggatgccaaattctctgtttcgatttttcaggtt

SEQ ID NO: 5051 - DNA, 492 bp, Arabidopsis thaliana landsberg
cggttgaaccagacactcccaccttaactcttttttcctgaggtttggttctcaaagcaaacaaattctcaatctttcgtttttcaccttcttcttcttcttcttcttcaatggcgttgatacatggttcggttcctggtacgtctgcggttcgattggttttttcaacctcagcgtcaccgtcgagattttgtctcaatgttccggtggtgaagcagggttggaagaattcgtgccggagaagggttttaagagcaatggtgcaggaaacagttcaaggatctcctttggtttacgccagagaaatggagcgcctttctgctaaggaatcgctacttctcgctgtataacttctctcacttttataaactctttgaattacttggttgttatgtgaatatatgatttgtttaaaacttcaattttactctgattttgaaaattggggtctcttttactattctctgtcgtaaagctgaggaattaatggga

SEQ ID NO: 5052 - DNA, 572 bp, Arabidopsis thaliana landsberg
tgctataactaatgactgatttcataattttaggggctaaacatgggcccgccgttgagtatatatatgatcttgtgcaacaacaccaaagtctcacgtctcaccaatacaagtttaccacaccttctaatctgtccgacacaatatctcatctaacactcccttaagtatacttgccgatcttttctcttttcttagtatccctactcaaaccttaaacccatcggaccatgactcatttcaccgtttcgtgcctcctcgtggcactattcttatgtcagtccttggtccatgccgcatataacggttattacgggtatagccccgcggctgcaccctaccccgccgaagaacctcagaacatcatgaatccggtggactcctgttggcggctcaagtctgactgggatgtcaatcgtgaagacctagcagattgcgcggttgggtttggttcatctaccttgggtggcaagaaaggtaatatatatgttgtcacaaacccttacgacaatgcacaaaacctccaccaggttctttgcggtcggcgtgatccagccaagcattgtggatac

SEQ ID NO: 5053 - DNA, 2384 bp, Arabidopsis thaliana landsberg
cttcttagtgggtaagaagtagaaacctggggggtgagttggaattcaccttggttccattttccgctccttacatagcgatcgcactcacacagccgtcgaaggagagccaggataagcccgatggcgagatctgcgacgtcttcggtgagaacgtcgggggtgttggtgacgcggatccctttttctttgcatttccccaaatcgatcttgtcgagcccgacgctgaagctggatacaatctcaaggttgggcagatcgctgatgagctgagcatcggcgccggcagaagcattcccaacgacggcgcggatggagttccgatgagtttctatgaggacggatttctccggagaagtccagaagcgaagaaggttgaagcgcttctcaagctcgttctcgaggtaagaggacatggggcacatcataaggactccgattgattccatatctccttttctctgtttttttttttttatttttcttctgcaaatgattgagtcagtgagaggtctgtgtataatttatcggaggttgacgataaagatgggcctatttttgggcccataattgatattatccgctttttatgggccactaaatgacccttttcaagttttcctcttggttccgaaatcatgacttatgtttaaagacaacattgcacgtttgatgatattcatgcaaattgttgtaggattcatgaacatgatacaaacacaagaagacatacactgtatgtgtatggaaacgtagcagattccccgttgacattgcatgtttagggaatccagtgacaagggtgtaatcacattttagtatgttactatatgataacattttataatttaaacggctctctatctctaattatcaatgttcaaaatcctaaataatgattagttaaaattaagaggtgtggtctgaaacatgcgccccacgtcccatcttccaaaaaaaggaagcaaaagaagaaagctccacaattttctcaaagccaaaatcactgtaacaattaccctttattgttttgcggctcgattagcttctccttcccttttgattctccccatctcaagagaggcccatttgatcctctctctttctctctctctcctctctaattctctattgccatcaagagaccaggaatggttcgtgcttcggaacaagaacaggaaacctataggagcaggctcttcaatttcaaatggaggaacaacgacaacaatagtgctacgagacacaacaagagtctcagcgtcgagaccggtttagatgaggctgccaccggatcccatgacgctgaaccattgaccattattcatcctagtcagggtccaccactttcaagatcggctgcggatgaagcagtcctcgccgccctcgccgcctcacaggctagagaaaggcagcttttggcagacatggagcagatgaaagagcgcttctccaagctgttgctgggagaggacaattccggtggaggcaaaggagtatcctctgctctcgccctttcaaacgcaatcacaaaccttgcaggttgctttaggaccctcttttgttattacacttagtttatattaaccagcaaccaatatctcatgtttatcttgttggtatagcttccgtgttcggagagcaacggcgcttggagccaatgcctgcagaaagaagagcaagatggagaaaagagattgattggcttctctccgtgaccgattacgtggttgagtttgctccatctcagcagaaaaataaagatgggaccaatatggaggttgtctatctgctgctgctgctgcattatatttcatttggtaacatacaatgattcccttattctgttggtattgatttaacagataatgaccacacgccaacgtactgacctccacatgaatatccccgcattgaagaaactggacgccatgctcatcgtaagacctctctctctctctctctcgttgaccaaatatcaaccctactttaataatttcatttaggatattcaaaagcatcctcttatcccccttttctacctaggattgtctagaaaatttcaaggaccaaagcgagttcagctatatctcaaaagactcccctgacttagacggtaagagaaacgacgaaaaatggtggattccgaccgtcaaagttccaccagatggtctatcagaagcttcaagaaggtttttgcagtaccagaaagattgtgtaaaccaggttctaaaggcagccatggccataaacgcacaggttttgttcgagatggagatacctgagagctacatcgactctctcccaaaggtaaaaaaaaaaaaagacaccaacaatttgatggtattgattaagaagaagttgatgaaaaaataatacctcac

SEQ ID NO: 5054 - DNA, 2456 bp, Arabidopsis thaliana landsberg
  unsure (1)..(2456): unsure at all n locations
cctatagttagacacataagtgacatatgaaccccatataatatacaccaaagtacggttagtaagtgttgttaatcttatttaaaatttactaacaaatgttatatcaaaattctatatatgattcatgaccaccaatattttcagaatctttcctagatgatgatttgtccgatcatatcggaataacaaaataaagcaataacatgtgagcattaccttgttatactgaattttggaaatgtcaagggaagattggggaagaccagggaacttttgtttaagcaagaccaagatcgtctcggctctctcttcgaacaactctcgtttctccaagctcacagctgatccccaagaagatttgttgtcttttagatgaagttttcttttccatataacgattgaggcctcaatcctattcttcacatccaacactttgtgctctgtagataagtcaagtgttgacaagaactgctctggatcaaaccactcttctgttatgctcttgtataacgaatccccaaggcttactcttccattctgaaaataatccaagtcttcttaataaccattattgatttgcttaaaatagtatatgatattttcaagtaaatgcaagtaaatcatccaaactatataccgattttaagacaaaaaaggaagatcacctttggaagagactcgatatagctatcagggatagccatttctgacagaacttgcgcgttaatagccatggcggctttttggacttgtgagactgaatctttctgaaaatgaagcattcttcgggctgattcggacaagccattaggagggactttaaccggaggaagccaccacttgtcctttgtcctttcattccgtgcttgtttcccttcttctgaatctctcgatacataccaaaactcattgtgtcctctaaaattgtccaatgtatcctaacatgtttcaatatccttcaatcaaaattattgcataacatacatgtatataaatatgggttataaatatacaaggacacacttacaatgagcatggcgtcgagtttgcgaagggcagggatgttcatgaggagatcacctctttgtcttgtcaccataatctagacatagtcattgaatcagaatattatctctgatgttgatgaatatgaaattgatagttaattataagtttcaagaaatggaacctcggtgcagactccttccttactaatctgttgagatggaacaaactcgacgatgtgatcagtcacggacaacaaccaatcgatctctttcttccacctcgctcgtctatccggtgccatcggctgcaactttgtctgttccccgaatattgacgctacacataaaaattaaacaaaaccatagattgattttatgtaacttgtggaggaagataactaaaaaaaactatagagctaattttttaccggctagatttgtgatggcatttgatagtgccaaagcagaagatacacctttaccaccgccagacatatcttctccaagaagtaatttcgtgaatctatctttcatcatctccgtctctacaatatgtaaacccgcaaaattgtaagctttttgatatatatctctagcgttcttagttcttaaacgaacagaaataatgaaactttttctttaatcaccggattgttgcttgtcctgtctacgagaaatcagacgagaagtcatcgggcggctagtctccacgggacttccaccgaggctgtcttgagtttgactctccggcatggttgtttcgcgagatgaggttgttgttgttcttttcccggtgaggaatcaaacattctatcaagattgaatgaactcgtgatgcttattcctcgttccaacgatggaaccatggtaccaaaacctttctattgttttcttgtctacaaatacaaaatttttacttttaatattcccaagaacgagagagaatttagctgtacggagaatcaatgtaaattgttcgacagattattatagtatgcaactacaaaaaaattctaaatctgtggaagccttaattatgacaaatcaaggaaacgtgggatgcacgaaaatgatgaagaatcaagaaagtgtcacagatttaaggatttgaaatttgttctataccaaaatagtaaatcaatagataggcagaaaccttatttaagtttttttttttctctttggtgttcaaaggtaaatcagtggtttgtgcttactataaaattccgtaaagcccgggagagacgataaacttggcaactattttaacaataaacaaagactaggccattcataaaacaaaactatcataggttcttatagttatccaccaacaaaatttttgcaaaaataacttttaaagaaaatattattgccaatgtatttctaattttcttcaaatttgtctgaatgagtgaaatgaatttggatgcttntaattacatg

SEQ ID NO: 5055 - DNA, 952 bp, Arabidopsis thaliana landsberg
caggtcgactctagaggatccccgagctttttcggcgtaaggtttggagatttagtaggtttatcgcctcctttggaactattatcgttccaacccataaaatccaacaaggtcttggagtgtgggtcaagcttctcggcttcttctcccgagttagaagatcccgctgactcggaatccgtctctgttgttctcccaccatctgatgtttcttcagccaataaagtttgctttagtgccaatgtatctgtgtaaagaacatcttctattcttgacatcactgtgtaagccaagctctcaagtatcctagagtaactttccaacaccgcttgcccaacgtcctgtatccattgataaaagatcagttttcttataaccaaaacaaaaatgagttgtttcttgccattcaaggcatctacaatatatgagagcttatcattatgattgatttaccttgttaaactgaatcttggagatgtcaagggaagattgaggaagaccgggaaatttttgtttgagcaagaccaagattgtttctgctctctcttcgaacaattctctcttctccaagctaactgctgagccccacgaagatttggtgtcctttgtgtgaagcttcctcttccaaatcacaacagatgcctcaattctgttcttcaaatccaacactttgtgctctgtcgacatgtccaacatcgctaagaactgctcaggatcaaaccattcctctgttatgctcttgtatatcgaatccccgaggctggctcttccgttctgtcaataaaaatcaaatcttaagagccaaacatagaataacaaaagatacaaattgaataaaaacgtgacattgatttacctttgggagagagtcgatgtagctctcaggtatttccatttctgagaggacttgagcattgatggccattgcagctttttgaacttgtgtgactga

SEQ ID NO: 5056 - DNA, 544 bp, Arabidopsis thaliana landsberg
  unsure (1)..(544): unsure at all n locations
ctccaggaggaactttaaccggtggtagccaccacttgtcgtttgtccgatcattccttgcttgctgcccttcttctgaatctcttgagacataccaaaactcgttgtgtcctctgaaattgtccaatgtatcctgaacatgttatcattaccattaatccaccaaacgctagatataagccggattcaatacagattgaatggagagacttacgatgagcatggcgtcaagttttcgaagagctggaatgttcataagaagatcacctctttgtcttgtcaccataatctacaaaaaaaaaaaaaaaaaaaccattgtaacttattctaaagaggtcgcaaaaatgatattttcttttctttgggaaactcaaacctcagtgcaaactccttctttgcttgtttgttgagaaggaacaaactcgacaatgtgatcggtcacagataataaccaatcgatctctttcttccatctcgctagtctatcttgcggcatcggttgtagctttgtttgttctccgaatatagacgctgcanatcatca

SEQ ID NO: 5057 - DNA, 2878 bp, Arabidopsis thaliana landsberg
gaaatctatgtgaagaataaaatttttgtcgtgatttttaacacctaagcatatctcttgcacagaacgacaaattagtaaacaattgaaatcttgatctagtaaacaaattaataacttgttaactttcttaatatatcgccgattgatagaatgtatttgaaggtgattaattaaaacgtttttaccaaacagttcttcatttttataggggatgaacttcacctgtaacttttcttcagaggtaattacgtatttatgcacacaatgtaaaaatagtgagtaagtcctatgatctaaagagttttcgcaaaccaccaaaagagaaaacgtttaacccaacccaagtgacataataatatgatgttttggtaaacaaaaaaaaaatggttgatcatccattaatgacaaagctgtagcacgaatttgtatagtttatcagttgcaaaactaggtacacttaaatttcatttaatggataaataattcatgcttgagagcctattattattagagtagtaattacgcatgcttcctaaaaaaaaaaaccacccttaaatacattccacattcaccaatattaagatcttcaaacatacacaaacacaatagaataatctcgtatcaattctctcctaaatagttcatttacacgcaccatacatcaatggattccaaactaatccgtttcgctgttgtgattatgctcctgtccatccaaatcttttgcacagctggtaagaactgatttattgatttattttgttttcatcacaattaacctcacaacaaaaactcaactttatttaatcaatctatgtttaaattaataaaaagcattatctcatggtttgattttctttggatgtaatctggttcagtctaactccgttttttggaaacgattaaatattttaaaccaaacaataaccgagtacggtttgattactatattttgtgtccttctaggtgttgcaggggacatcaccggagtttgttacggccggaacggcaacaatcttccaacgccggcagatacagttgctctatacaaaagcaacaacatcgacgcaatccgtatgtacgagcccttcgcagacatgctcgaagcgcttcgtggctcaggtctcttagtcgcgtttggtccacgaaacgaagatatccaatccctagctcacgatccagccgccgcaacaaatttcgtctccacctggattacaccttaccaaaacaacgtcgcaattaaatggatcacaattggtaacgaagtcttccccggagaaatcgctcaatttgttgccgccgcgataaaaaacgtcaacgtcgcgctaacgaattccggcgtcacaggaatctctgtcacgacggttttagctatgaccgcgttgaccaatacatatccaccttccgctgcaacattcctcccagatctaaccgagatcatgacggagattacatcgatactctcagagacgaattcgcctctcatgacgaatatctacccgtacttcgcatacgcgtcagatccatatcacatctcactcgattacgctagtttcaaatccaatacaccggtagtgatagacggtgatttgtattacaacaatatgtttgaggcgatggttgacggattcaatgcggcgttggagaagatcaacgccgcaaacgtggtggtgatggtggcggagacgggatggccgacggagggaaatccaccgcacacgagtgttgataacgcgaaggcctataatatggggattcgaacatgtgggagatctgcagaacggaagcggacgccccgccggcaaaacacgccggttgacgtgtttctattcgcaatgttcaaagaaaatcagaaggatggtccggtggaacagagtttcggaatctttgcacctgatatgactccagtctacgatcttttttgtaaatggcgttaattaattttcccgcttaaatttttaaaaatacgtttgtccattttacttatttttttttaggtctgagcatgcaataattaaatttatttattatttactttctgtaagtaaaactaaagtgaaaataattaaagttaatcaattgagcgcatagcaagagagaaacagaggatcgaatcgtctaattcaaagcacaaagttcaacttaaaacctaattcaaagcataaagttcaacgtggggttaactgtcagtagctctggacaaagatactaaaagtaccagtaatggtggtctctcttatgaaagtccgtaaaaaccaaaataataataatattttaatgttgttattatattttagttttttaatagagtttgattattaaaagaattacacgtgtatatttggggttgagattgtcccttaaataagggtttttagagttcctctctcctctgtccctttctttttaattatttttttttatttttattataagagactcataagagagatcaccattgctgctgctctaatgtctgtataacatgacgtggggttaaaagttttaacttaacagcaaagcatgacaataattgcatatcatggattcgatttttttgaaggatctagtttgagtgtatgacgtgtgtttgagtctccctaatgtatatttcaaaaagaaaaaatattcagagataatcttaacattgtgcagattttcaagatattttaaaaataattattttttatcttttagaacaaacaaaaaaaaaaagaaaagtatgaaaattaaaacaaacttttgcaagatttcatcagggtattgcaactaagcttcttactgatgataacatttcaaaatttgttcatataagagaaaatgtgctaaagattttccaaagtattaacaggtttagacacatcacacaagcatt

SEQ ID NO: 5058 - DNA, 1047 bp, Arabidopsis thaliana landsberg
gctactggcagatctgagatctttttgaactgacacgtgtaatggtgggtaaggaaaacgtcaagtggtaatattgggcttaccatatgggccattaaaaagattttatagatgtagttaatattgggcttaccatatgggccattaaaaagattttaacccaataaaaaatattcaaaaagcaatcgtcgacagcagggttcgaacctgcgcgggcgaagcccaatagatttcaagtctatctccttaaccactcggacatatcgacatctcgttaatatctcaaataattaaccaaataaatccgttcctaagtctaccccttagtataccctagaaatgacattcacgagatacgttgacctaaaggagtaaaattttcccgccattgttagtaccagaactctctgggccgccgcgtctccgtcgtcgtcgctatctacagatggcggataagaagaagcgaaagcgatcaaaagatgacgaggctgaggaacttcctttcaaaagcattctggaatcagacgacgttatcacggagcttctcaaatcgtatatttcctcttctatcaaagccgccgcgggagccgggggtgcctcctcctcttcatcgaaaccactaaccctagctgacctctctctctcatcttcctgccgtgaagtcgcagatctctcactctcctccgtgcagacagagatagagacagtcatcgtccagatcgcccgttctattctcgccggtgatggcttctccttcagtgttccttcacgcgccgcctcgaatcagctgtatgtccctgagctcgaccgtatagtgctaaaagacaaatctaccctccgtccatttgcctccgtttcttctgtcaggaaaaccaccatcaccactagtatcctcgcccttatccaccagctctgcctcaggaacattcacgttaccaagcgtgatctcttctacaccgacgttaagcttttcacaagtaggtctttacagcctcccatttttcataagatcagaagttgttttcgtgtcattataatttagacttg

SEQ ID NO: 5059 - DNA, 635 bp, Arabidopsis thaliana landsberg
cgttatccaactccgattgttgagtatacttcagcgagttgttccgtctccgccacctcctgtgctccgttattaggatttgtgagatcttcttgattgagtttatacttcagcgagattgtttatctctaagctccaggagacgctaatttgaattgcttctgggtttttagtacgtagctctctataagatatataacaaatggttcgctccaaggctcctgcaaagaagcagcaaaagaaaggaattgatttcaaggtgcgttcctctcttcgagcttccatgaatcttcttcttcacgtgtttgatatattggtctaaggatttttgttttgtttggcagaaaattaagagaaagctcgggagaaaattaccaccaccaaagaatgcaaccaacactgagattaaatccaaaggtatctgctttcttctgctattcaaacttcttctctcctctctgcttatggttggaatttacttttgtttatgttgcagcaattatacttcctgagcaaagtgtggctgctgaaaagagtggcttagctacaagtaagaaaggcttgactttgaaggaacttctgccacagacttctcatcacaatgccaaagttcgcaaaggtacttctttttcttg

SEQ ID NO: 5060 - DNA, 591 bp, Arabidopsis thaliana landsberg
  unsure (1)..(591): unsure at all n locations
ataagtagttccctaagtttctgaatgatagcatatttatgtgactgctgctctgctggatggctcttcaaaaggtctttgagaccatggaatgcatctacacagaccaaaatctaaaattgatcaacatagcaaagcaaaccattatattttcctcaaccaagtacctttgcgaagtttggcattgcaatgtgaagtttgtggcagaagatccttcaaggtcaagcctttcttacttgtagctaagccactcttttcagctgccacattttgctcagcaagtatcattgctgcagcagtttcaactttcaaccataagcagagagagctaggcttaataaaggatgcaaaaacactgatcatctattatccaaagagatccattttcaaagaagttntgcaagaatctaaattaaaaacaccaaaacctttttattatagaagatacaccaatcggaaaccgggtttgaggaaaattatatggaacaaattgtcggtttgctactggggaactgattacttgggattggtaaagagtgaaaaagtgaaaaaccaggtgtcgaaattgagatcgtacaagctaaacaatac

SEQ ID NO: 5061 - DNA, 1055 bp, Arabidopsis thaliana landsberg
aatcatccaaattccgacaagataagagacttccaaactctaaaatttgagtatgtctaagatacaaaacagagtatcaaaacagagtatgtgcagcttacattgggtgaagaccttcgatgacaagaatcttaggaggctgaataagctccggagggtcaagaagtccagtcacatggttataaatcggtttctcaacggctataccattcttaagagctttgacttgctcatacatgagatcaaagtcattggcgcgtgggtccaaagcggtgactttctgctctttcctaccgtacctatccaaagaatggtaatcatcaagacagatcacagtggtcgtgtcgctgatgagtgtgttggaatcagggttcccgccttttggtggcttagcagcgccaccaaagacgctggtgagcctccgcataaaggtacttttgccgcagccagagtcagcagctagtccgatcacgatggtttcttgtgcgcaagtgatgagtgtgttgaatctacggttggtttgtggttgacgacggtagaggaagacttgtttggaggaggaagaagaggttaagaaatgagttgaattgagagcttgtgttgagtagatagttgagacagccattgttgtttgtttggtgttttggtgtttggttcctcttcttctccgcctaagctctttttttttgtttggttttgtgagctcaagttgagtgatgaggatttaggatagaatgaaagaaatgtgggtaacgatctttaattttatggttttatgtgtggtgatatagagatgtgatttccttttttttctttgaaaataagattaaatggggaaatagagaaatgagaggagtacaatgggtctataggaaaagcagatggcaatttgcagagaagcaaaggagttttattttggtttaatgtggttgtgtgatgattggctcatgttttggtttcttgaagtaatattgttcctaatgcccattagtctctatgttaagatgaaattgataagataagaggataaggaaacatttatagccattaaagac

SEQ ID NO: 5062 - DNA, 3824 bp, Arabidopsis thaliana landsberg
  unsure (1)..(3824): unsure at all n locations
tactggtttctctaattaactgtagatcgatcgaacttttatagattcgggattgtttctcccaatatttctgtagaaattactacaaaaaaaattagattttcagctactctgagtctaccttgaatcgtttgaaatcgaaaaccctttcctttaatttcaaagagtcgcttaattagggtttaggatagatggagaagaagaaggtgacgattccacaagtgtgccatggccattcaagacctgttgttgatttgttctacagtccaattactcctgacggtttcttcctcatcagcgctagcaaaggtgataatacttttggtttcttacaaaagtttggatttttttggtcaatttagttactagaactgtgcaaaaattcatgttgatcgaattgagaacttacaaaagtctttgagttttctctgagtaatacttatttcgtagttcatagagttttgagaatactcatgtcttgatggtttagattcgcatccaatgttgagaaatggggaaactggagactggattggtacatttgaagggcataaaggtgcagtttggagttcttgtctggataacaatgcattacgtgctgcatctgcttctgccgatttttcagcgtatgtgtttaattttttttggttcattaagtcattatttgcgtatgttttatgttcttagatacagcacatttatccaattttttgttatcttgttttgttcagcaaactttgggatgcgttaacaggggatgtgctgcattcttttgagcacaagcatattgtccgagcatgcgccttctcagaggttcgttcaacctatttactctctccatatagattctcgatttggtcaactggggttttgtaagatggtaggctaaaagaattggaattatctactgaaatactttaatcctnnnnnnnnnnnnnnnnnnnaagcttttgtatctctgtgttttggattatcggctgtgggcaggttgttatgtaatagctcttattcaggcaactgcacggaatttaagtaaaaagctttgaggatttgtttaattaggtgatagtgaaattgttcttcagattggactattcttaaacatttgttgttgtggatggtgtcgatccgcttttatgcatcgtcactaattgaatgacatttttctttcactaggatacaaaatcgttgctcacaggagggtttgagaaaattcttcgtgtttttgacatgaatcggttggatgcacctcctacagaagttgataaatctcctggttctatcagaaccctcacatggcttcacagtgatcaaacaatattaagttcatgtactgatattggcggtgtaaggtatgaactaaacaagacacagactaaatacacattgtcgcacataaaaaggcatagtttgatagacgttttgtttgcttttccgtctcctctactgctatcttatacaggttatgggatgtgaggagtgggaaaattgtgcaaacgttagaaactaagtctcctgtcaccagtgctgaagtgagccaagatggacggtatataacaactgctgatgggtcaactgttaaattctgggacgctaaccagtaagttctcattctaggaagagaatcaaatattttctaattaccttttgtatcttgctcaaaccccatctttgccccttgctttttcttccaagttttggactagtgaagagttacgacatgccctgcaatattgaatctgcatcgtaggagccaaagtctggtgaaaaatttgttgctggtggagaggatatgtgggtccgagtgtttgatttctacactggcgaagagattggtaagtgactttcaaaacatctatgctatcatattccaaatcagactgtgtcatattacctttttgtcgtccaagttaaattccagatagcttcaagcttaattggagtttctgactctgttataaactccatgagtgaagagcttaatagatctttgaagcatggttctttaagctcctgcgaggttttggttttctgattgtttcatttgtgtctgaaacttaggatgcaacaagggacatcacggtccagtacactgcgttaggtttactcccactggtttatcctatgcctcgggatctgaagacgggaccatcagaatctggcaaacaacaccagcaaatcccgaagagaacgaaactagctcgaggagagtgaagcatagcgtggatgaagtttcaaagaagattgaaggctttcacatcaacaaagaaggaaaaaccgcagagaaaccatctgatacttaagctaaactgagcgtacaaaaagcctctatatgtcttagttcatgatttgctatgttttgtttccagactgaatgattatacagagaaaacaaacaaagatctgcttgttttattttgaatcaaaacatgggtgttaaaatttaatagttttctttcaagtgtctttttcaatattgaactaaatttagggacgaatttgtgatttatgattatttgactttagattgggcttgggcttttttcgcaggttggggtataagggtaaagtcgtcatttgacagaccgacttgtctctctctatctggggaaaacgtctatcgggagactcctcttcgagctcatcttcttctctctctttttatctttggttgtgcgatctcctttctctttcaatctccaaggattttactgtgagatatttggcgggaaaatgtcggggaaaggtgctaaaggtttgattatggggaaacccagcggtagcgacaaggataaggacaagaagaagcctatcactcgttcttctcgagctggtctccaggtagattataatctccctcacactctaagtcttccgtgtctgtttctttgggaatcgaaatggtcttatacacctgaacgattagtagatcgcgtttaagtggtagatcgatgagattctgagctagatttggtaatttcagctgagaattagagacattgggatgcgagatttggttttctattgtgttatctgctggagaattgtttcattaagcttttatggttgatattgaacccgatctttgatttcacggagtcttgttgttacagctaccttgtgaattgaattcggagttttttttgtagagatttattgtcatatatgaaatgtttctgggagcaattgagatttgagtattcatttaggttccattgttgtggctaattgaatttacattgtgtgcagttcccagttggtagggtgcatcgtctgttaaagacaaggtccactgctcatggaagggttggagcaactgcagctgtttacacagcagcaatattggagtatctgactgcagaagttttggagttggctggtaacgccagcaaggacttgaaggtgaaacgtatctcgccgaggcatttgcagcttgcgattcgtggagatgaggagctcgatactctcatcaaaggaactatagctggtggtggagtcatccctcatatccacaagagtctcatcaacaaatccgccaaggaataggacttttttagttacccgctttgttctgtgttgcttttctgttttctaaatgtttttaagagttgttgtttgataagatgctagagaagctctttttaggatcgtttgctattgttcgttcgatcagcgtactttgtgttagagacgccagtcgatttatctatctttaaaaatgtattcgaatgattatccaaaaaccatttctgactacctaccttgctggtttgttcgctggagaagcttgaaagcaaattcattgggaaagatttgtattatct

SEQ ID NO: 5063 - DNA, 1210 bp, Arabidopsis thaliana landsberg
ccagtcaaagcatcccaaagcttcctaaaaagattataaatgtagcaggacatcaatcaaaccgattcgagcataaaccagaaccaaaatcaacaagaacagatgctttcattcctatttctcaatcacttacgctgaaaaatcagcagatgcagaagctgcacgtaaagcattgttatcaagacaagaactccacacagcacctttatgaccttcaaatgtaccaatccaatctccagtttccccatttctcaacattggttgagaatctaatcatcaagaagccatgaaataatatgaagagagtttgcagcaaaacatgtttcatagtatacaaagccaatcaacaacaatagtgaacagaacagattccccaaatttggatcttacaataacaaatctagaagatcatatttttacctttacttgcgctgatgaggaagaaaccatcaggagtgattggactgtagaacaaatccacaacaggtctcgaatggccatggcacactagcggagtcgcgactttcttcttctccatctctctttactaattttaacaaaacacacacttaagaagaagaaccctacttagatcgatcgtaagaccaaatcttagcttctaatcaaacgattcagtggttaaattggcgctaaaattcacagctgattcaatacgatccgacaaaacaaaaattgctgtctattttcgattccttttgatatataaatctaatttggagaaaataattctcgaatctaaaacttggatcgatctataattttgataggaagattttgcagctccagtggaaatgctgcttcccgaaaattcaaaagaaaaaaaaaagaaaggaaaattacaaaagaaaaaaaagtggctaatcgaagaagaaagtaactgtaagaagaagaaggaagctattgttatatgtctgagagatttctatttcgggaagctatttctttgtcttcttcaattttgattactatatgtttccttttttacaaattcgcctcgttactttactaattacatctctgtccaaaaattcaaataatttatatttgcctcaagagaagtgttacatgacacattgatgcataacagatttttttacatagaaatagaaatgtaaccatgattaagtcataccagctagaattattgtaacaatacacacttcatcaatttcagaaaaggtttttaatc

SEQ ID NO: 5064 - DNA, 1039 bp, Arabidopsis thaliana landsberg
  unsure (1)..(1039): unsure at all n locations
tgttaggaaaaaaaaaaaaaactttcaatatttcaaattaaactgcatttatctagacaggcggggctcttgtgatttttggaaccacaaaggcagctgattctgctatgtcgcggttaaatgaagattgtctgatgttatctggccagaggttacttactactcttttatattctacttctcacgtatatgttaacttcatcaaatccttctttcttttactatctaatatgatgatccatttgcagagctctaacgggtagcaaaaatgtcccagtcgaaattggaagatgtagaagctttactggccattttaacatggtggatagatctctgatgacggctcagaaggtaagttgttgcattactctgcgcttattttcagttgtcatttcacttgtcatggtcacacatcgaaagcccaacagcccatgccaaattactgaatattacaaattgaccccactatttagtcttataatcgtaaacagaccccataaattcgtaaattttcagccacatccataaacttgactcgaatgaagattgacaacgactgtttttcaaacacttgttttgaatttccgtatattcagtctggaagtaaaaacacagtaagaagacaaagagaagcagccatttttcttggttcttttcttggtttaagcatcagatggtttctctgcggtttttccttccttgttaatgtgaaagccttcaatcttacgagcaacctcatccacactctgcttcggctttgactcgctgatctcttcaggattcaccggtccagtttgccaaattctgattgtaccatcttcagaccctgaagcataagactcacctgttggtgcaaatctcacacagtgaaccggaccatgatgtcccttgttgcatcctaaagttcagacaaaaagaaacccatcaaaaccaaaggctttatgtgacttaactagaacagcttagttaatctgcttgtagttnttagtcactcaccaatctcctttccggtgtggaaatcaaagagtcgaacccacat

SEQ ID NO: 5065 - DNA, 459 bp, Arabidopsis thaliana landsberg
tgctatatgtatcccttcatggtgcatgtgtgattgctcaagtcaatgtattatgtaagaatctagcatgtgtctaacatggttctttttgatcaggatacgaaatatctaatcacaggaggatttgagaaaattcttcgtgttttcgacttgaatcgcttggatgcacctcctacagaaattgataaatctcctggttctatcagaacactaacatggcttcacggtgatcaaacaatattaagttcttgcactgatattggtggtgtgaggtatgaagtaaatatctcataaaaaaaaaactgtctgtgaattttagacagatggagaaactcaagtgttgtttcttgtctcatcttctcgaacaggttatgggatgtgaggagtggcaaaatagtgcaaactctagaaaccaagtctcctgtcaccagtgctgaagtgagtcaagatggacggtat

SEQ ID NO: 5066 - DNA, 2899 bp, Arabidopsis thaliana landsberg
cgaatctgtacataacaagttcaagtcctcaaagtgcatacaaggtttacttgaatcaattccaaaaagacttcatgaggtgtctaaggttacgttctgaagaaattgtctctaatggacgtatggttctcaccttcatcggaagaaacactcttaacgatccattgtatagagattgttgtcacttttggacattgctatcaaactctctccgtgacctagtctttgaggtatatcaaatcaacttattcatttcttttgtaaaactttttaaatatgggacattcatggtcttcgacatagattaacatttttatatattttactcaaaatataagaccaaacatatatattattgtggaacatggtactcattgctatcttcatataaacagggtcttgtgagtgagtcaaagctggacgcattcaacatgccgttttatgatccgaacgtacaagaactcaaagaagtgatacaaaaagagggctcttttgaaatcaatgaattggagtcacatggatttgatcttggtcactactacgaagaagatgactttgaagcaggacgcaatgaagctaatggcataagagctgttagtgaaccaatgctcattgctcattttggagaagaaattatcgataccttgttcgataagtatgcataccatgtgactcaacatgccaactgcaggaacaaaacgactgtcagtcttgtcgtttccttgactaagaagtaatcaacttctgtcatgttgctctatttgtatttatttactactgttattttgtttccttgaataaatttcaacacctgccactcaatgtgatgatgtggagctagtattggaaaaaagtgtgactgtaatatattatggtaaatttggtaaatgatttatttcctgcaaaagttgcagatactgctttcaagtataaagataaatccttgtgaagagaaagagaaactgagaaacttatcattgacattatatgcagaaacgtagcatttcttgatacacaagcaaccatcatcaaaattcaaaagcatccatccatcccacaaaacccaaattaagaaatccaaaagctggatcaaaaacatcaacagtaaccttttttcatcgccaagcttcgaatagctcaactctgtaattcacacgtcccacaatactactcgctttcgacatggttctctgctcctcccaaccaatgtgtttctgtccaaaacctccactgctgttattaaccagagaagactttcttatgtcaacaagttctacagattcggcacattcttcttcttcttcatctgcagactcttctttgtctttcatctccgcctcaaagttgtctaaagtttcctccttgttagctttcatgagatgtaacaactgtctactgctgctctgatcaccattatggtcccgaggacttggatttgaggctggaaccaacttatctctagattcttttcggtctttaagcgtcttcacaataagtgttttcagaaagttcataacttgcacagcatacattagagccgtcaatggatccaacatctgcaatttgactgatgtcatttaccaaaatacgaacacatcaaacaatctttagagattcattcaaaaaacttacctgagtcatgttaggtgcaaaaaccattgcaatgtttcgagcattcatcttgttaagttgttccatctcaacaacatcagccattagattgatagcccaatctaacaaagaagcttctgttgaaggaagaagccttacaagctccacacactcatcttcactctcagactccattacttgctctggtgaaagtgaatccaaaacgccactaggaagttccctaaaccaagcctagaggataaaccaagaaaaaatccacaaattcaaaaagggtgaaagaagggaaaggaaacaataagatccttgtggagtttatgggtttttaccttaatgagacttgctaagcagtggacatcaatgttatcaggtataatacctttattcaactcttctcttatgtactcttcttgaccattctcaccattaatcctgaaaattccctctacctatataaggcaacaaacaaagcaaatgaaaactttattcacccattgtcattaaaccagatggaaattgttttaaacatgcagattaacacgtacccgcaatccgcctctactgtacaagtgactctgcatcatcaaaagtatcgtaggcacgatgttccctctagtatcataagatagctgcattgattcagtagagactccaaacacggttgcactgcatttacagaaaaagactaatcagcttctgatttacacaaaagagttaaactatctaatctgatcagtcaagagtcgttgactagctattcacttaataattacacccaaattcatagagaattcacaaaagaagtcctcaatctatatacctcactcaagatccttaacaactcacagaaaacaaagggatttgaatcaagaacatcaaaaagtatggatcattgatgtcaggggacacactaattgcaagtaaaagacagaatagattctattaacagaaggggatttcaattacggcaactactggaaatagaagaaaccaaaaccacacccaaaattgatttttaacacatagcttcaacaacaacattattcccaagaatttgttaactaaaacaagaactaaaagaatcctaatcaccaaacattaccagaaacatctatcatcgttacaagtaaacgaaccttgcactaggagctcgtctagggacttcaggttcaaactcaacaggcaagccaagaaagccatggaaacgatcaaaggtaacatgagcgacatgtctaacatctgtaggaacaccaatctccattgaacaaag
